(19) United States
(12) Patent Application Publication
(10) Pub. No.: US 2009/0199308 A1
(43) Pub. Date: Aug. 6, 2009

(54) Transgenic plants with enhanced agronomic traits

(76) Inventors: Kimberly Zobrist Duff, St. Louis, MO (US); Rajam Chitra, Singapore (SG)

Correspondence Address: MONSANTO COMPANY, 800 N. LINDBERGH BLVD., ATTENTION: GAIL P. WUELLNER, IP PARALEGAL, (E1NA), ST. LOUIS, MO, 63167, US

(21) Appl. No.: 12/074,197

(22) Filed: Feb. 29, 2008

(30) Foreign Application Priority Data
Aug. 30, 2005 (US) PCT/US2006/033989

(51) Int. Cl. A01H 5/00; A01H 1/02; C12N 5/10; A01H 1/00; G01N 33/53

(52) U.S. Cl. 800/260; 800/298; 800/320.1; 800/312; 800/314; 800/320; 800/306; 800/320.2; 800/320.3; 435/419; 800/278; 435/7.1

(57) ABSTRACT

This invention provides recombinant DNA for expression of proteins that are useful for imparting enhanced agronomic trait(s) to transgenic crop plants. Also provided by this invention is transgenic seed for growing a transgenic plant having recombinant DNA in its genome and exhibiting an enhance agronomic trait, i.e. enhanced nitrogen use efficiency, increased yield, enhanced water use efficiency, enhanced tolerance to cold stress and/or improved seed compositions. Also disclosed are methods for identifying such transgenic plants by screening for nitrogen use efficiency, yield, water use efficiency, growth under cold stress, and seed composition changes. This invention also discloses a method of identifying the target genes of a transcription factor.

### CROSS REFERENCE TO RELATED APPLICATIONS

[0001] This application claims benefit under 35 U.S.C. 119(e) of U.S. provisional application Ser. No. 60/713,150, filed Aug. 30, 2005, and International application PCT/US2006/033989, both incorporated herein by reference.

### INCORPORATION OF SEQUENCE LISTING

[0002] Two copies of the sequence listing (Copy 1 and Copy 2) and a computer readable form (CRF) of the sequence listing, all on CD-Rs, each containing the text file named “38-21(53948)A_seqListing_amended_{—}02182008.txt”, which is 31.6 MB (measured in MS-WINDOWS) and was created on Feb. 28, 2008 are incorporated herein by reference.

### FIELD OF THE INVENTION

[0003] Disclosed herein are inventions in the field of plant genetics and developmental biology. More specifically, the present inventions provide transgenic seeds for crops, wherein the genome of said seed comprises recombinant DNA, the expression of which results in the production of transgenic plants with enhanced agronomic traits.

### SUMMARY OF THE INVENTION

[0004] This invention employs recombinant DNA for expression of proteins that are useful for imparting enhanced agronomic traits to the transgenic plants. Recombinant DNA in this invention is provided in a construct comprising a promoter that is functional in plant cells and that is operably linked to DNA that encodes a protein having at least one amino acid domain in a sequence that exceeds the Pfam gathering cutoff for amino acid sequence alignment with a protein domain family identified by a Pfam name in the group of Pfam domain names as identified in Table 11. In more specific embodiments of the invention the protein expressed in plant cells has an amino acid sequence with at least 90% identity to a consensus amino acid sequence in the group of consensus amino acid sequences consisting of the consensus amino acid sequence constructed for SEQ ID NO: 194 and homologs thereof listed in Table 7 through the consensus amino acid sequence constructed for SEQ ID NO: 386 and homologs thereof listed in Table 7. In even more specific embodiments of the invention the protein expressed in plant cells is a protein selected from the group of proteins identified in Table 1.

[0005] Other aspects of the invention are specifically directed to transgenic plant cells comprising the recombinant DNA of the invention, transgenic plants comprising a plurality of such plant cells, progeny transgenic seed, embryo and transgenic pollen from such plants. Such plant cells are selected from a population of transgenic plants regenerated from plant cells transformed with recombinant DNA and that express the protein by screening transgenic plants in the population for an enhanced trait as compared to control plants that do not have said recombinant DNA, where the enhanced trait is selected from group of enhanced traits consisting of enhanced water use efficiency, enhanced cold tolerance, increased yield, enhanced nitrogen use efficiency, enhanced seed protein and enhanced seed oil.

[0006] In yet another aspect of the invention the plant cells, plants, seeds, embryo and pollen further comprise DNA expressing a protein that provides tolerance from exposure to an herbicide applied at levels that are lethal to a wild type of said plant cell. Such tolerance is especially useful not only as an advantageous trait in such plants but is also useful in a selection step in the methods of the invention. In aspects of the invention the agent of such herbicide is a glyphosate, dicamba, or glufosinate compound.

[0007] Yet other aspects of the invention provide transgenic plants which are homozygous for the recombinant DNA and transgenic seed of the invention from corn, soybean, cotton, canola, alfalfa, wheat or rice plants.

[0008] In other important embodiments for practice of various aspects of the invention, the plants of this invention can be further enhanced with stacked traits, e.g., a crop having an enhanced agronomic trait resulting from expression of DNA disclosed herein, in combination with herbicide, disease, and/or pest resistance traits.

[0009] This invention also provides methods for manufacturing non-natural, transgenic seed that can be used to produce a crop of transgenic plants with an enhanced trait resulting from expression of stably-integrated, recombinant DNA for expressing a protein having at least one domain of amino acids in a sequence that exceeds the Pfam gathering cutoff for amino acid sequence alignment with a protein domain family identified by a Pfam name in the group of Pfam names identified in Table 11. More specifically the method comprises (a) screening a population of plants for an enhanced trait and a recombinant DNA, where individual plants in the population can exhibit the trait at a level less than, essentially the same as or greater than the level that the trait is exhibited in control plants which do not express the recombinant DNA, (b) selecting from the population one or more plants that exhibit the trait at a level greater than the level that said trait is exhibited in control plants, (c) verifying that the recombinant DNA is stably integrated in said selected plants, (d) analyzing tissue of a selected plant to determine the production of a protein having the function of a protein encoded by nucleotides in a sequence of one of SEQ ID NO:1-193; and (e) collecting seed from a selected plant. In one aspect of the invention the plants in the population further comprise DNA expressing a protein that provides tolerance to exposure to an herbicide applied at levels that are lethal to wild type plant cells and the selecting is effected by treating the population with the herbicide, e.g. a glyphosate, dicamba, or glufosinate compound. In another aspect of the invention the plants are selected by identifying plants with the enhanced trait. The methods are especially useful for manufacturing corn, soybean, cotton, alfalfa, wheat or rice seed.

[0010] Another aspect of the invention provides a method of producing hybrid corn seed comprising acquiring hybrid corn seed from a herbicide tolerant corn plant which also has stably-integrated, recombinant DNA comprising a promoter that is (a) functional in plant cells and (b) is operably linked to DNA that encodes a protein having at least one domain of amino acids in a sequence that exceeds the Pfam gathering cutoff for amino acid sequence alignment with a protein domain family identified by a Pfam name in the group of Pfam names identified in Table 11. The methods further comprise producing corn plants from said hybrid corn seed, wherein a fraction of the plants produced from said hybrid corn seed is homozygous for said recombinant DNA, a fraction of the plants produced from said hybrid corn seed is hemizygous for said recombinant DNA, and a fraction of the plants produced from said hybrid corn seed has none of said recombinant DNA; selecting corn plants which are homozygous and hemizygous for said recombinant DNA by treating with an herbicide; collecting seed from herbicide-treated-surviving corn plants and planting said seed to produce further progeny corn plants; repeating the selecting and collecting steps at least once to produce an inbred corn line; and crossing the inbred corn line with a second corn line to produce hybrid seed.

[0011] Another aspect of the invention provides a method of selecting a plant comprising plant cells of the invention by using an immunoreactive antibody to detect the presence of protein expressed by recombinant DNA in seed or plant tissue. Yet another aspect of the invention provides anti-counterfeit milled seed having, as an indication of origin, a plant cell of this invention.

[0012] Still other aspects of this invention relate to transgenic plants with enhanced water use efficiency or enhanced nitrogen use efficiency. For instance, this invention provides methods of growing a corn, cotton or soybean crop without irrigation water comprising planting seed having plant cells of the invention which are selected for enhanced water use efficiency. Alternatively methods comprise applying reduced irrigation water, e.g. providing up to 300 millimeters of ground water during the production of a corn crop. This invention also provides methods of growing a corn, cotton or soybean crop without added nitrogen fertilizer comprising planting seed having plant cells of the invention which are selected for enhanced nitrogen use efficiency.

### BRIEF DESCRIPTION OF FIGURES

[0013] FIG. 1-4 illustrate plasmid maps.

### DETAILED DESCRIPTION OF THE INVENTION

[0014] In the attached sequence listing:

[0015] SEQ ID NO:1-193 are nucleotide sequences of the coding strand of DNA for “genes” used in the recombinant DNA imparting an enhanced trait in plant cells, i.e. each represents a coding sequence for a protein;

[0016] SEQ ID NO:194-386 are amino acid sequences of the cognate protein of the “genes” with nucleotide coding sequence 1-193;

[0017] SEQ ID NO: 387-12580 are amino acid sequences of homologous proteins;

[0018] SEQ ID NO: 12581-12601 are nucleotide sequences of the elements in base plasmid vectors

[0019] SEQ ID NO: 12602 is a consensus amino acid sequence.

[0020] SEQ ID NO: 12603 is a nucleotide sequence of a base plasmid vector useful for corn transformation; and

[0021] SEQ ID NO: 12604 is a nucleotide sequence of a base plasmid vector useful for soybean transformation.

[0022] SEQ ID NO: 12605 is a nucleotide sequence of a base plasmid vector useful for cotton transformation.

[0023] SEQ ID NO: 12606 is the nucleotide sequence of plasmid PMON17730.

[0024] SEQ ID NO: 12607 is the nucleotide sequence of PHE0010424_PMON17730.

[0025] SEQ ID NO: 12608 is the consensus sequence of SEQ ID NO: 371 and 11 homologs

[0026] As used herein, a “transgenic plant” means a plant whose genome has been altered by the incorporation of exogenous DNA, e.g., by transformation as described herein. The term “transgenic plant” is used to refer to the plant produced from an original transformation event, or progeny from later generations or crosses of a plant so transformed, so long as the progeny contains the exogenous genetic material in its genome. “Exogenous DNA” means DNA, e.g., recombinant DNA, originating from or constructed outside of the plant including natural or artificial DNA derived from the host “transformed” organism of a different organism.

[0027] As used herein, “recombinant DNA” means DNA which has been a genetically engineered or constructed outside of a cell, including DNA containing naturally occurring DNA or cDNA, or synthetic DNA.

[0028] As used herein, a “functional portion” of DNA is that part which comprises an encoding region for a protein segment that is sufficient to provide the desired enhanced agronomic trait in plants transformed with the DNA activity. Where expression of protein is desired, a functional portion will generally comprise the entire coding region for the protein, although certain deletions, truncations, rearrangements and the like of the protein may also maintain, or in some cases improve, the desired activity. One skilled in the art is aware of methods to screen for such desired modifications and such functional portion of the protein is considered within the scope of the present invention.

[0029] As used herein, “consensus sequence” means an artificial, amino acid sequence of conserved parts of the proteins encoded by homologous genes, e.g., as determined by a CLUSTALW alignment of amino acid sequence of homolog proteins.

[0030] As used herein, “homolog” means a protein in a group of proteins that perform the same biological function, e.g., provide an enhanced agronomic trait in transgenic plants of this invention. Homologs are expressed by homologous genes which are genes that encode proteins with the same or similar biological function. Homologous genes may be generated by the event of speciation (see ortholog) or by the event of genetic duplication (see paralog). Orthologs refer to a set of homologous genes in different species that evolved from a common ancestral gene by specification. Normally, orthologs retain the same function in the course of evolution; and paralogs refer to a set of homologous genes in the same species that have diverged from each other as a consequence of genetic duplication. Thus, homologous genes can be from the same or a different organism. Homologous DNA includes naturally occurring and synthetic variants. For instance, degeneracy of the genetic code provides the possibility to substitute at least one base of the protein encoding sequence of a gene with a different base without causing the amino acid sequence of the polypeptide produced from the gene to be changed. Hence, a polynucleotide useful in the present invention may have any base sequence that has been changed from SEQ ID NO:1 through SEQ ID NO: 193 by substitution in accordance with degeneracy of the genetic code. Homologs are proteins which, when optimally aligned, has at least 60% identity (say at least 70% or 80% or 90% identity) over the full length of a protein identified herein, or a higher percent identity especially over a shorter functional part of the protein, e.g., 70% to 80 or 90% amino acid identity over a window of comparison comprising a functional part of the protein imparting the enhanced agronomic trait. Homologs include proteins with an amino acid sequence that has at least 90% identity to a consensus amino acid sequence of proteins and homologs disclosed herein.

[0031] Homologs can be identified by comparison of amino acid sequence, e.g., manually or by using known homology-based search algorithms such as those commonly known and referred to as BLAST, FASTA, and Smith-Waterman. A local sequence alignment program, e.g., BLAST, can be used to search a database of sequences to find similar sequences, and the summary Expectation value (E-value) used to measure the sequence base similarity. As a protein hit with the best E-value for a particular organism may not necessarily be an ortholog or the only ortholog, a reciprocal query is used in the present invention to filter hit sequences with significant E-values for ortholog identification. The reciprocal query entails search of the significant hits against a database of amino acid sequences from the base organism that are similar to the sequence of the query protein. A hit is a likely ortholog, when the reciprocal query's best hit is the query protein itself or a protein encoded by a duplicated gene after speciation. A further aspect of the invention comprises functional homolog proteins which differ in one or more amino acids from those of disclosed protein as the result of conservative amino acid substitutions, e.g., substitutions are among: acidic (negatively charged) amino acids such as aspartic acid and glutamic acid; basic (positively charged) amino acids such as arginine, histidine, and lysine; neutral polar amino acids such as glycine, serine, threonine, cysteine, tyrosine, asparagine, and glutamine; neutral nonpolar (hydrophobic) amino acids such as alanine, leucine, isoleucine, valine, proline, phenylalanine, tryptophan, and methionine; amino acids having aliphatic side chains such as glycine, alanine, valine, leucine, and isoleucine; amino acids having aliphatic-hydroxyl side chains such as serine and threonine; amino acids having amide-containing side chains such as asparagine and glutamine; amino acids having aromatic side chains such as phenylalanine, tyrosine, and tryptophan; amino acids having basic side chains such as lysine, arginine, and histidine; amino acids having sulfur-containing side chains such as cysteine and methionine; naturally conservative amino acids such as valine-leucine, valine-isoleucine, phenylalanine-tyrosine, lysine-arginine, alanine-valine, aspartic acid-glutamic acid, and asparagine-glutamine. A further aspect of the homologs encoded by DNA useful in the transgenic plants of the invention are those proteins which differ from a disclosed protein as the result of deletion or insertion of one or more amino acids in a native sequence.

[0032] As used herein, “transcription factor gene” refers to a gene that encodes a protein that binds to regulatory regions and is involved in control gene expression. Therefore, as used herein, a target gene refers to a gene whose expression is controlled by a transcription factor gene.

[0033] As used herein, “percent identity” means the extent to which two optimally aligned DNA or protein segments are invariant throughout a window of alignment of components, e.g., nucleotide sequence or amino acid sequence. An “identity fraction” for aligned segments of a test sequence and a reference sequence is the number of identical components which are shared by sequences of the two aligned segments divided by the total number of sequence components in the reference segment over a window of alignment which is the smaller of the full test sequence or the full reference sequence. “Percent identity” (“% identity”) is the identity fraction times 100.

[0034] As used herein “Pfam” refers to a large collection of multiple sequence alignments and hidden Markov models covering many common protein families, e.g. Pfam version 19.0 (December 2005) contains alignments and models for 8183 protein families and is based on the Swissprot 47.0 and SP-TrEMBL 30.0 protein sequence databases. See S. R. Eddy, “Profile Hidden Markov Models”, Bioinformatics 14:755-763, 1998. Pfam is currently maintained and updated by a Pfam Consortium. The alignments represent some evolutionary conserved structure that has implications for the protein's function. Profile hidden Markov models (profile HMMs) built from the Pfam alignments are useful for automatically recognizing that a new protein belongs to an existing protein family even if the homology by alignment appears to be low. Once one DNA is identified as encoding a protein which imparts an enhanced trait when expressed in transgenic plants, other DNA encoding proteins in the same protein family are identified by querying the amino acid sequence of protein encoded by candidate DNA against the Hidden Markov Model which characterizes the Pfam domain using HMMER software, a current version of which is provided in the appended computer listing. Candidate proteins meeting the gathering cutoff for the alignment of a particular Pfam are in the protein family and have cognate DNA that is useful in constructing recombinant DNA for the use in the plant cells of this invention. Hidden Markov Model databases for use with HMMER software in identifying DNA expressing protein in a common Pfam for recombinant DNA in the plant cells of this invention are also included in the appended computer listing. The HMMER software and Pfam databases are version 19.0 and were used to identify known domains in the proteins corresponding to amino acid sequence of SEQ ID NO: 194 through SEQ ID NO: 386. All DNA encoding proteins that have scores higher than the gathering cutoff disclosed in Table 11 by Pfam analysis disclosed herein can be used in recombinant DNA of the plant cells of this invention, e.g. for selecting transgenic plants having enhanced agronomic traits. The relevant Pfams for use in this invention, as more specifically disclosed below, are FAD_binding_{—}4, MtN3_slv, Homeobox, FAD_binding_{—}6, RWP-RK, PMEI, FAD_binding_{—}7, RRM_{—}1, Transaldolase, RNA_pol_L, WD40, U-box, Cyclin_N, Skp1, Redoxin, DZC, PBP, TPP_enzyme_M, CBFD_NFYB_HMF, TPP_enzyme_N, PFK, Caleosin, Iso_dh, Ribosomal_L18p, Metallophos, zf-A20, Ras, BBE, NAF, PLDc, DUF1242, Pkinase, C2, p450, Pyridoxal_deC, FBD, UPF0005, HEAT_PBS, GST_N, PEP-utilizers, Alpha-amylase, Amino_oxidase, SRF-TF, Phi_{—}1, Malic_M, Tryp_alpha_amyl, GSHPx, Miro, HSF_DNA-bind, DNA_photolyase, Sina, CTP_transf 2, Abhydrolase_{—}3, Chal_sti_synt_C, ACP_syn_III_C, ADH_zinc_N, CSD, Globin, GATase_{—}2, Amidohydro_{—}1, HLH, HALZ, Amidohydro_{—}3, Lactamase_B, HSP20, DAO, DUF296, AT_hook, AWPM-19, Dimerisation, Suc_Fer-like, Methyltransf_{—}2, Aminotran_{—}3, PHD, MMR_HSR1, Aldo_ket_red, zf-AN1, malic, Fasciclin, UPF0057, DUF221, Pkinase_Tyr, DnaJ, Cofilin_ADF, Orn_Arg_deC_N, Skp1_POZ, Asn_synthase, K-box, LRR_{—}2, Ribosomal_L12, Ammonium_transp, Ribosomal_L14, KOW, DUF1336, DS, Aa_trans, CcmH, peroxidase, eIF-5a, Aldedh, PEP-utilizers_C, ADH_N, UIM, NAD_binding_{—}1, zf-C3HC4, Spermine_synth, AUX_IAA, LIM, Anti-silence, X8, Citrate_synt, 14-3-3, RMMBL, efhand, NPH3, CAF1, ICL, FAE1_CUT1_RppA, Orn_DAP_Arg_deC, PPDK_N, Myb_DNA-binding, AP2, F-box, and APS_kinase

[0035] As used herein, “promoter” means regulatory DNA for initializing transcription. A “plant promoter” is a promoter capable of initiating transcription in plant cells whether or not its origin is a plant cell, e.g., is it well known that viral promoters are functional in plants. Thus, plant promoters include promoter DNA obtained from plants, plant viruses, and bacteria such as Agrobacterium and Rhizobium bacteria. Examples of promoters under developmental control include promoters that preferentially initiate transcription in certain tissues, such as leaves, roots, or seeds. Such promoters are referred to as “tissue preferred”. Promoters which initiate transcription only in certain tissues are referred to as “tissue specific”. A “cell type” specific promoter primarily drives expression in certain cell types in one or more organs, for example, vascular cells in roots or leaves. An “inducible” or “repressible” promoter is a promoter which is under environmental control. Examples of environmental conditions that may effect transcription by inducible promoters include anaerobic conditions, or certain chemicals, or the presence of light. Tissue specific, tissue preferred, cell type specific, and inducible promoters constitute the class of “non-constitutive” promoters. A “constitutive” promoter is a promoter which is active under most conditions.

[0036] As used herein, “operably linked” means the association of two or more DNA fragments in a DNA construct so that the function of one, e.g., protein-encoding DNA, is affected by the other, e.g., a promoter.

[0037] As used herein, “expression” means the process that includes transcription of DNA to produce RNA and translation of the cognate protein encoded by the DNA and RNA.

[0038] As used herein, a “control plant” means a plant that does not contain the recombinant DNA that confers an enhanced agronomic trait. A control plant is used to compare against a transgenic plant, to identify an enhanced agronomic trait in the transgenic plant. A suitable control plant may be a non-transgenic plant of the parental line used to generate a transgenic plant. A control plant may in some cases be a transgenic plant line that comprises an empty vector or marker gene, but does not contain the recombinant DNA.

[0039] As used herein, an “agronomic trait” means a characteristic of a plant, which includes, but are not limited to, plant morphology, physiology, growth and development, yield, nutritional enhancement, disease or pest resistance, or environmental or chemical tolerance. In the plants of this invention the expression of identified recombinant DNA confers an agronomically important trait, e.g., increased yield. An “enhanced agronomic trait” refers to a measurable improvement in an agronomic trait including, but not limited to, yield increase, including increased yield under non-stress conditions and increased yield under environmental stress conditions. Stress conditions may include, for example, drought, shade, fungal disease, viral disease, bacterial disease, insect infestation, nematode infestation, cold temperature exposure, heat exposure, osmotic stress, reduced nitrogen nutrient availability, reduced phosphorus nutrient availability and high plant density. “Yield” can be affected by many properties including without limitation, plant height, pod number, pod position on the plant, number of internodes, incidence of pod shatter, grain size, efficiency of nodulation and nitrogen fixation, efficiency of nutrient assimilation, resistance to biotic and abiotic stress, carbon assimilation, plant architecture, resistance to lodging, percent seed germination, seedling vigor, and juvenile traits. Yield can also affected by efficiency of germination (including germination in stressed conditions), growth rate (including growth rate in stressed conditions), ear number, seed number per ear, seed size, composition of seed (starch, oil, protein) and characteristics of seed fill.

[0040] Increased yield of a transgenic plant of the present invention can be measured in a number of ways, including test weight, seed number per plant, seed weight, seed number per unit area (i.e. seeds, or weight of seeds, per acre), bushels per acre, tones per acre, tons per acre, kilo per hectare. For example, maize yield may be measured as production of shelled corn kernels per unit of production area, e.g., in bushels per acre or metric tons per hectare, often reported on a moisture adjusted basis, e.g., at 15.5% moisture. Increased yield may result from enhanced utilization of key biochemical compounds, such as nitrogen, phosphorous and carbohydrate, or from improved responses to environmental stresses, such as cold, heat, drought, salt, and attack by pests or pathogens. Recombinant DNA used in this invention can also be used to provide plants having enhanced growth and development, and ultimately increased yield, as the result of modified expression of plant growth regulators or modification of cell cycle or photosynthesis pathways.

[0041] Also of interest is the generation of transgenic plants that demonstrate enhanced yield with respect to a seed component that may or may not correspond to an increase in overall plant yield. Such properties include enhancements in seed oil, seed molecules such as tocopherol, protein and starch, or oil particular oil components as may be manifest by an alteration in the ratios of seed components.

[0042] A subset of the nucleic molecules of this invention includes fragments of the disclosed recombinant DNA consisting of oligonucleotides of at least 15, preferably at least 16 or 17, more preferably at least 18 or 19, and even more preferably at least 20 or more, consecutive nucleotides. Such oligonucleotides are fragments of the larger molecules having a sequence selected from the group consisting of SEQ ID NO:1 through SEQ ID NO:193, and find use, for example as probes and primers for detection of the polynucleotides of the present invention.

[0043] In some embodiments of the invention a constitutively active mutant is constructed to achieve the desired effect. SEQ ID NO: 3-6 encodes only the kinase domain of a calcium dependent protein kinase (CDPK). CDPK1 has a domain structure similar to other calcium-dependant protein kinase in which the protein kinase domain is separated from four efhand domains by 42 amino acid “spacer” region. Calcium-dependent protein kinases are thought to be activated by a calcium-induced conformational change that results in movement of an autoinhibitory domain away form the protein kinase active site (Yokokura et al., 1995). Thus, consitutively active proteins can be made by over expressing the protein kinase domain alone.

[0044] In other embodiments of the invention a chimeric gene is constructed between homologous genes from different species to obtain a protein with certain characteristics superior to either native protein, e.g., enhanced stability and favorable enzymatic kinetics. Exemplary chimeric DNA molecules provided by the present invention are set forth as SEQ ID NO: land 2 that encode a Arabidopsis-Corn chimeric pyruvate orthophosphate dikinase (PPDK).

[0045] In yet other embodiments of the invention, a codon optimized gene is synthesized to achieve a desirable expression level. Synthetic DNA molecules can be designed by a variety of methods, such as, methods known in the art that are based upon substituting the codon(s) of a first polynucleotide to create an equivalent, or even an improved, second-generation artificial polynucleotide, where this new artificial polynucleotide is useful for enhanced expression in transgenic plants. The design aspect often employs a codon usage table. The table is produced by compiling the frequency of occurrence of codons in a collection of coding sequences isolated from a plant, plant type, family or genus. Other design aspects include reducing the occurrence of polyadenylation signals, intron splice sites, or long AT or GC stretches of sequence (U.S. Pat. No. 5,500,365). Full length coding sequences or fragments thereof can be made of artificial DNA using methods known to those skilled in the art. Such exemplary synthetic DNA molecules provided by the present invention are set forth as SEQ ID NO: 38.

[0046] DNA constructs are assembled using methods well known to persons of ordinary skill in the art and typically comprise a promoter operably linked to DNA, the expression of which provides the enhanced agronomic trait. Other construct components may include additional regulatory elements, such as 5′ introns for enhancing transcription, 3′ untranslated regions (such as polyadenylation signals and sites), DNA for transit or signal peptides.

[0047] In accordance with the current invention, constitutive promoters are active under most environmental conditions and states of development or cell differentiation. These promoters are likely to provide expression of the polynucleotide sequence at many stages of plant development and in a majority of tissues. A variety of constitutive promoters are known in the art. Examples of constitutive promoters that are active in plant cells include but are not limited to the nopaline synthase (NOS) promoters; the cauliflower mosaic virus (CaMV) 19S and 35S promoters (U.S. Pat. No. 5,858,642); the figwort mosaic virus promoter (P-FMV, U.S. Pat. No. 6,051,753); actin promoters, such as the rice actin promoter (P-Os.Actl, U.S. Pat. No. 5,641,876).

[0048] Furthermore, the promoters may be altered to contain one or more “enhancer sequences” to assist in elevating gene expression. Such enhancers are known in the art. By including an enhancer sequence with such constructs, the expression of the selected protein may be enhanced. These enhancers often are found 5′ to the start of transcription in a promoter that functions in eukaryotic cells, but can often be inserted in the forward or reverse orientation 5′ or 3′ to the coding sequence. In some instances, these 5′ enhancing elements are introns. Deemed to be particularly useful as enhancers are the 5′ introns of the rice actin 1 (see U.S. Pat. No. 5,641,876), rice actin 2 genes and the maize heat shock protein 70 gene intron (U.S. Pat. No. 5,593,874). Examples of other enhancers that can be used in accordance with the invention include elements from the CaMV 35S promoter, octopine synthase genes, the maize alcohol dehydrogenase gene, the maize shrunken 1 gene and promoters from non-plant eukaryotes.

[0049] Tissue-specific promoters cause transcription or enhanced transcription of a polynucleotide sequence in specific cells or tissues at specific times during plant development, such as in vegetative or reproductive tissues. Examples of tissue-specific promoters under developmental control include promoters that initiate transcription primarily in certain tissues, such as vegetative tissues, e.g., roots, leaves or stems, or reproductive tissues, such as fruit, ovules, seeds, pollen, pistils, flowers, or any embryonic tissue, or any combination thereof. Reproductive tissue specific promoters may be, e.g., ovule-specific, embryo-specific, endosperm-specific, integument-specific, pollen-specific, petal-specific, sepal-specific, or some combination thereof. Tissue specific promoter(s) will also include promoters that can cause transcription, or enhanced transcription in a desired plant tissue at a desired plant developmental stage. An example of such a promoter includes, but is not limited to, a seedling or an early seedling specific promoter. One skilled in the art will recognize that a tissue-specific promoter may drive expression of operably linked polynucleotide molecules in tissues other than the target tissue. Thus, as used herein, a tissue-specific promoter is one that drives expression preferentially not only in the target tissue, but may also lead to some expression in other tissues as well.

[0050] In one embodiment of this invention, preferential expression in plant green tissues is desired. Promoters of interest for such uses include those from genes such as maize aldolase gene FDA (U.S. patent application publication No. 20040216189), aldolase and pyruvate orthophosphate dikinase (PPDK) (Taniguchi et al. (2000) Plant Cell Physiol. 41(1):42-48).

[0051] In another embodiment of this invention, preferential expression in plant root tissue is desired. An exemplary promoter of interest for such uses is derived from Corn Nicotianamine Synthase gene (U.S. patent application publication No. 20030131377).

[0052] In yet another embodiment of this invention, preferential expression in plant phloem tissue is desired. An exemplary promoter of interest for such use is the rice tungro bacilliform virus (RTBV) promoter (U.S. Pat. No. 5,824,857).

[0053] In practicing this invention, an inducible promoter may also be used to ectopically express the structural gene in the recombinant DNA construct. The inducible promoter may cause conditional expression of a polynucleotide sequence under the influence of changing environmental conditions or developmental conditions. For example, such promoters may cause expression of the polynucleotide sequence at certain temperatures or temperature ranges, or in specific stage(s) of plant development such as in early germination or late maturation stage(s) of a plant. Examples of inducible promoters include, but are not limited to, the light-inducible promoter from the small subunit of ribulose-1,5-bis-phosphate carboxylase (ssRUBISCO) (Fischhoff et al. (1992) Plant Mol. Biol. 20:81-93); the drought-inducible promoter of maize (Busk et al., Plant J. 11:1285-1295, 1997), the cold, drought, and high salt inducible promoter from potato (Kirch, Plant Mol. Biol. 33:897-909, 1997), and many cold inducible promoters known in the art; for example rd29a and cor15a promoters from Arabidopsis (Genbank ID: D13044 and U01377), blt101 and blt4.8 from barley (Genbank ID: AJ310994 and U63993), wcs120 from wheat (Genbank ID:AF031235), mlip15 from corn (Genbank ID: D26563) and bn115 from Brassica (Genbank ID: U01377).

[0054] In some aspects of the invention, sufficient expression in plant seed tissues is desired to effect improvements in seed composition. Exemplary promoters for use for seed composition modification include promoters from seed genes such as napin (U.S. Pat. No. 5,420,034), maize L3 oleosin (U.S. Pat. No. 6,433,252), zein Z27 (Russell et al. (1997) Transgenic Res. 6(2):157-166), glutelin1 (Russell (1997) supra), peroxiredoxin antioxidant (Per1) (Stacy et al. (1996) Plant Mol. Biol. 31(6): 1205-1216), and globulin 1 (Belanger et al (1991) Genetics 129:863-872).

[0055] Recombinant DNA constructs prepared in accordance with the invention will also generally include a 3′ element that typically contains a polyadenylation signal and site. Well-known 3′ elements include those from Agrobacterium tumefaciens genes such as nos 3′, tml 3, tinr 3, tms 3′, ocs 3′, tr7 3′, e.g., disclosed in U.S. Pat. No. 6,090,627, incorporated herein by reference; 3′ elements from plant genes such as wheat (Triticum aesevitum) heat shock protein 17 (Hsp17 3′), a wheat ubiquitin gene, a wheat fructose-1,6-biphosphatase gene, a rice glutelin gene a rice lactate dehydrogenase gene and a rice beta-tubulin gene, all of which are disclosed in U.S. published patent application 2002/0192813 A1, incorporated herein by reference; and the pea (Pisum sativum) ribulose biphosphate carboxylase gene (rbs 3), and 3′ elements from the genes within the host plant.

[0056] Constructs and vectors may also include a transit peptide for targeting of a gene target to a plant organelle, particularly to a chloroplast, leucoplast or other plastid organelle. For descriptions of the use of chloroplast transit peptides see U.S. Pat. No. 5,188,642 and U.S. Pat. No. 5,728,925, incorporated herein by reference. For description of the transit peptide region of an Arabidopsis EPSPS gene useful in the present invention, see Klee, H. J. et al., (MGG (1987) 210:437-442).

[0057] The recombinant DNA construct may include other elements. For example, the construct may contain DNA segments that provide replication function and antibiotic selection in bacterial cells. For example, the construct may contain an E. coli origin of replication such as ori322 or a broad host range origin of replication such as oriV, oriRi or oriColE.

[0058] The construct may also comprise a selectable marker such as an Ec-ntpll-Tn5 that encodes a neomycin phosphotransferase II gene obtained from Tn5 conferring resistance to a neomycin and kanamysin, Spc/Str that encodes for Tn7 aminoglycoside adenyltransferase (aadA) conferring resistance to spectinomycin or streptomycin, or a gentamicin (Gm, Gent) or one of many known selectable marker gene.

[0059] The vector or construct may also include a screenable marker and other elements as appropriate for selection of plant or bacterial cells having DNA constructs of the invention. DNA constructs are designed with suitable selectable markers that can confer antibiotic or herbicide tolerance to the cell. The antibiotic tolerance polynucleotide sequences include, but are not limited to, polynucleotide sequences encoding for proteins involved in tolerance to kanamycin, neomycin, hygromycin, and other antibiotics known in the art. An antibiotic tolerance gene in such a vector may be replaced by herbicide tolerance gene encoding for 5-enolpyruvylshikimate-3-phosphate synthase (EPSPS, described in U.S. Pat. Nos. 5,627,061, and 5,633,435; Padgette et al., Herbicide Resistant Crops, Lewis Publishers, 53-85, 1996; and in Penaloza-Vazquez, et al., Plant Cell Reports 14:482-487, 1995) and aroA (U.S. Pat. No. 5,094,945) for glyphosate tolerance, bromoxynil nitrilase (Bxn) for Bromoxynil tolerance (U.S. Pat. No. 4,810,648), phytoene desaturase (crtI (Misawa et al., Plant J. 4:833-840, 1993; and Misawa et al., Plant J. 6:481-489, 1994) for tolerance to norflurazon, acetohydroxyacid synthase (AHAS, Sathasiivan et al., Nucl. Acids Res. 18:2188-2193, 1990). Herbicides for which transgenic plant tolerance has been demonstrated and for which the method of the present invention can be applied include, but are not limited to: glyphosate, sulfonylureas, imidazolinones, bromoxynil, delapon, cyclohezanedione, protoporphyrionogen oxidase inhibitors, and isoxaslutole herbicides.

[0060] Other examples of selectable markers, screenable markers and other elements are well known in the art and may be readily used in the present invention. Those skilled in the art should refer to the following for details (for selectable markers, see Potrykus et al., Mol. Gen. Genet. 199:183-188, 1985; Hinchee et al., Bio. Techno. 6:915-922, 1988; Stalker et al., J. Biol. Chem. 263:6310-6314, 1988; European Patent Application 154,204; Thillet et al., J. Biol. Chem. 263:12500-12508, 1988; for screenable markers see, Jefferson, Plant Mol. Biol, Rep. 5: 387-405, 1987; Jefferson et al., EMBO J. 6: 3901-3907, 1987; Sutcliffe et al., Proc. Natl. Acad. Sci. U.S.A. 75: 3737-3741, 1978; Ow et al., Science 234: 856-859, 1986; Ikatu et al., Bio. Technol. 8: 241-242, 1990; and for other elements see, European Patent Application Publication Number 0218571; Koziel et al., Plant Mol. Biol. 32: 393-405; 1996).

[0061] The plants of this invention can be further enhanced with stacked traits, e.g., a crop having an enhanced agronomic trait resulting from expression of DNA disclosed herein, in combination with herbicide, disease, and/or pest resistance traits. The recombinant DNA is provided in plant cells derived from corn lines that maintain resistance to a virus such as the Mal de Rio Cuarto virus or a fungus such as the Puccina sorghi fungus or both, which are common plant diseases in Argentina. For example, genes of the current invention can be stacked with other traits of agronomic interest, such as a trait providing herbicide resistance, or insect resistance, such as using a gene from Bacillus thuringiensis to provide resistance against lepidopteran, coliopteran, homopteran, hemiopteran, and other insects. Herbicides for which transgenic plant tolerance has been demonstrated and the method of the present invention can be applied include, but are not limited to, glyphosate, dicamba, glufosinate, sulfonylurea, bromoxynil and norflurazon herbicides. Polynucleotide molecules encoding proteins involved in herbicide tolerance are well-known in the art and include, but are not limited to, a polynucleotide molecule encoding 5-enolpyruvylshikimate-3-phosphate synthase (EPSPS) disclosed in U.S. Pat. Nos. 5,094,945; 5,627,061; 5,633,435 and 6,040,497 for imparting glyphosate tolerance; polynucleotide molecules encoding a glyphosate oxidoreductase (GOX) disclosed in U.S. Pat. No. 5,463,175 and a glyphosate-N-acetyl transferase (GAT) disclosed in U.S. Patent Application publication 2003/0083480 A1 also for imparting glyphosate tolerance; dicamba monooxygenase disclosed in U.S. Patent Application publication 2003/0135879 A1 for imparting dicamba tolerance; a polynucleotide molecule encoding bromoxynil nitrilase (Bxn) disclosed in U.S. Pat. No. 4,810,648 for imparting bromoxynil tolerance; a polynucleotide molecule encoding phytoene desaturase (crtI) described in Misawa et al, (1993) Plant J. 4:833-840 and Misawa et al, (1994) Plant J 6:481-489 for norflurazon tolerance; a polynucleotide molecule encoding acetohydroxyacid synthase (AHAS, aka ALS) described in Sathasiivan et al. (1990) Nucl. Acids Res. 18:2188-2193 for imparting tolerance to sulfonylurea herbicides; polynucleotide molecules known as bar genes disclosed in DeBlock, et al. (1987) EMBO J. 6:2513-2519 for imparting glufosinate and bialaphos tolerance; polynucleotide molecules disclosed in U.S. Patent Application Publication 2003/010609 A1 for imparting N-amino methyl phosphonic acid tolerance; polynucleotide molecules disclosed in U.S. Pat. No. 6,107,549 for imparting pyridine herbicide resistance; molecules and methods for imparting tolerance to multiple herbicides such as glyphosate, atrazine, ALS inhibitors, isoxoflutole and glufosinate herbicides are disclosed in U.S. Pat. No. 6,376,754 and U.S. Patent Application Publication 2002/0112260, all of said U.S. patents and patent application Publications are incorporated herein by reference. Molecules and methods for imparting insect/nematode/virus resistance is disclosed in U.S. Pat. Nos. 5,250,515; 5,880,275; 6,506,599; 5,986,175 and U.S. Patent Application Publication 2003/0150017 A1, all of which are incorporated herein by reference.

[0062] In particular embodiments, the inventors contemplate the use of antibodies, either monoclonal or polyclonal which bind to the proteins disclosed herein. Means for preparing and characterizing antibodies are well known in the art (See, e.g., Antibodies: A Laboratory Manual, Cold Spring Harbor Laboratory, 1988; incorporated herein by reference). The methods for generating monoclonal antibodies (mAbs) generally begin along the same lines as those for preparing polyclonal antibodies. Briefly, a polyclonal antibody is prepared by immunizing an animal with an immunogenic composition in accordance with the present invention and collecting antisera from that immunized animal. A wide range of animal species can be used for the production of antisera. Typically the animal used for production of anti-antisera is a rabbit, a mouse, a rat, a hamster, a guinea pig or a goat. Because of the relatively large blood volume of rabbits, a rabbit is a preferred choice for production of polyclonal antibodies.

[0063] As is well known in the art, a given composition may vary in its immunogenicity. It is often necessary therefore to boost the host immune system, as may be achieved by coupling a peptide or polypeptide immunogen to a carrier. Exemplary and preferred carriers are keyhole limpet hemocyanin (KLH) and bovine serum albumin (BSA). Other albumins such as ovalbumin, mouse serum albumin or rabbit serum albumin can also be used as carriers. Means for conjugating a polypeptide to a carrier protein are well known in the art and include using glutaraldehyde, m-maleimidobencoyl-N-hydroxysuccinimide ester, carbodiimide and bis-biazotized benzidine.

[0064] As is also well known in the art, the immunogenicity of a particular immunogen composition can be enhanced by the use of non-specific stimulators of the immune response, known as adjuvants. Exemplary and preferred adjuvants include complete Freund's adjuvant (a non-specific stimulator of the immune response containing killed Mycobacterium tuberculosis), incomplete Freund's adjuvants and aluminum hydroxide adjuvant.

[0065] The amount of immunogen composition used in the production of polyclonal antibodies varies upon the nature of the immunogen as well as the animal used for immunization. A variety of routes can be used to administer the immunogen (subcutaneous, intramuscular, intradermal, intravenous and intraperitoneal). The production of polyclonal antibodies may be monitored by sampling blood of the immunized animal at various points following immunization. A second, booster, injection may also be given. The process of boosting and titering is repeated until a suitable titer is achieved. When a desired level of immunogenicity is obtained, the immunized animal can be bled and the serum isolated and stored, and/or the animal can be used to generate mAbs.

[0066] mAbs may be readily prepared through use of well-known techniques, such as those exemplified in U.S. Pat. No. 4,196,265, incorporated herein by reference. Typically, this technique involves immunizing a suitable animal with a selected immunogen composition, e.g., a purified or partially purified antifungal protein, polypeptide or peptide. The immunizing composition is administered in a manner effective to stimulate antibody producing cells. Rodents such as mice and rats are preferred animals, however, the use of rabbit, sheep, or frog cells is also possible. The use of rats may provide certain advantages (Goding, 1986, pp. 60-61), but mice are preferred, with the BALB/c mouse being most preferred as this is most routinely used and generally gives a higher percentage of stable fusions.

[0067] Following immunization, somatic cells with the potential for producing antibodies, specifically B lymphocytes (B cells), are selected for use in the mAb generating protocol. These cells may be obtained from biopsied spleens, tonsils or lymph nodes, or from a peripheral blood sample. Spleen cells and peripheral blood cells are preferred, the former because they are a rich source of antibody-producing cells that are in the dividing plasmablast stage, and the latter because peripheral blood is easily accessible. Often, a panel of animals will have been immunized and the spleen of animal with the highest antibody titer will be removed and the spleen lymphocytes obtained by homogenizing the spleen with a syringe. Typically, a spleen from an immunized mouse contains approximately 5×10⁷ to 2×10⁸ lymphocytes.

[0068] The antibody-producing B lymphocytes from the immunized animal are then fused with cells of an immortal myeloma cell, generally one of the same species as the animal that was immunized. Myeloma cell lines suited for use in hybridoma-producing fusion procedures preferably are non-antibody-producing, have high fusion efficiency, and enzyme deficiencies that render them incapable of growing in certain selective media which support the growth of only the desired fused cells (hybridomas).

[0069] Any one of a number of myeloma cells may be used, as are known to those of skill in the art (Goding, 1986, pp. 65-66; Campbell, 1984, pp. 75-83). For example, where the immunized animal is a mouse, one may use P3-X63/Ag8, X63-Ag8.653, NS1/1.Ag 41, Sp210-Ag14, FO, NSO/U, MPC-11, MPC11-X45-GTG 1.7 and S194/5XXO Bul; for rats, one may use R210.RCY3, Y3-Ag 1.2.3, IR983F and 4B210; and U-266, GM1500-GRG2, LICR-LON-HMy2 and UC729-6 are all useful in connection with human cell fusions.

[0070] One preferred murine myeloma cell is the NS-1 myeloma cell line (also termed P3-NS-1-Ag-4-1), which is readily available from the NIGMS Human Genetic Mutant Cell Repository by requesting cell line repository number GM3573. Another mouse myeloma cell line that may be used is the 8-azaguanine-resistant mouse murine myeloma SP2/0 non-producer cell line.

[0071] Methods for generating hybrids of antibody-producing spleen or lymph node cells and myeloma cells usually comprise mixing somatic cells with myeloma cells in a 2:1 ratio, though the ratio may vary from about 20:1 to about 1:1, respectively, in the presence of an agent or agents (chemical or electrical) that promote the fusion of cell membranes. Fusion methods using Spend virus have been described (Kohler and Milstein, 1975; 1976), and those using polyethylene glycol (PEG), such as 37% (v/v) PEG, (Gefter et al., 1977). The use of electrically induced fusion methods is also appropriate (Goding, 1986, pp. 71-74).

[0072] Fusion procedures usually produce viable hybrids at low frequencies, about 1×10⁻⁶ to 1×10⁻⁸. However, this does not pose a problem, as the viable, fused hybrids are differentiated from the parental, unfused cells (particularly the unfused myeloma cells that would normally continue to divide indefinitely) by culturing in a selective medium. The selective medium is generally one that contains an agent that blocks the de novo synthesis of nucleotides in the tissue culture media. Exemplary and preferred agents are aminopterin, methotrexate, and azaserine. Aminopterin and methotrexate block de novo synthesis of both purines and pyrimidines, whereas azasenne blocks only purine synthesis. Where aminopterin or methotrexate is used, the media is supplemented with hypoxanthine and thymidine as a source of nucleotides (HAT medium). Where azaserine is used, the media is supplemented with hypoxanthine.

[0073] The preferred selection medium is HAT. Only cells capable of operating nucleotide salvage pathways are able to survive in HAT medium. The myeloma cells are defective in key enzymes of the salvage pathway, e.g., hypoxanthine phosphoribosyl transferase (HPRT), and they cannot survive. The B-cells can operate this pathway, but they have a limited life span in culture and generally die within about two weeks. Therefore, the only cells that can survive in the selective media are those hybrids formed from myeloma and B-cells.

[0074] This culturing provides a population of hybridomas from which specific hybridomas are selected. Typically, selection of hybridomas is performed by culturing the cells by single-clone dilution in microtiter plates, followed by testing the individual clonal supernatants (after about two to three weeks) for the desired reactivity. The assay should be sensitive, simple and rapid, such as radioimmunoassays, enzyme immunoassays, cytotoxicity assays, plaque assays, dot immunobinding assays, and the like.

[0075] The selected hybridomas would then be serially diluted and cloned into individual antibody-producing cell lines, which clones can then be propagated indefinitely to provide mAbs. The cell lines may be exploited for mAb production in two basic ways. A sample of the hybridoma can be injected (often into the peritoneal cavity) into a histocompatible animal of the type that was used to provide the somatic and myeloma cells for the original fusion. The injected animal develops tumors secreting the specific monoclonal antibody produced by the fused cell hybrid. The body fluids of the animal, such as serum or ascites fluid, can then be tapped to provide mAbs in high concentration. The individual cell lines could also be cultured in vitro, where the mAbs are naturally secreted into the culture medium from which they can be readily obtained in high concentrations. mAbs produced by either means may be further purified, if desired, using filtration, centrifugation and various chromatographic methods such as HPLC or affinity chromatography.

[0076] Numerous methods for transforming plant cells with recombinant DNA are known in the art and may be used in the present invention. Two commonly used methods for plant transformation are Agrobacterium-mediated transformation and microprojectile bombardment. Microprojectile bombardment methods are illustrated in U.S. Pat. Nos. 5,015,580 (soybean); 5,550,318 (corn); 5,538,880 (corn); 5,914,451 (soybean); 6,160,208 (corn); 6,399,861 (corn) and 6,153,812 (wheat) and Agrobacterium-mediated transformation is described in U.S. Pat. Nos. 5,159,135 (cotton); 5,824,877 (soybean); 5,591,616 (corn); and 6,384,301 (soybean), and in US Patent Application Publication 2004/0244075, all of which are incorporated herein by reference. For Agrobacterium tumefaciens based plant transformation system, additional elements present on transformation constructs will include T-DNA left and right border sequences to facilitate incorporation of the recombinant polynucleotide into the plant genome.

[0077] In general it is useful to introduce recombinant DNA randomly, i.e. at a non-specific location, in the genome of a target plant line. In special cases it may be useful to target recombinant DNA insertion in order to achieve site-specific integration, e.g., to replace an existing gene in the genome, to use an existing promoter in the plant genome, or to insert a recombinant polynucleotide at a predetermined site known to be active for gene expression. Several site specific recombination systems exist which are known to function implants include cre-lox as disclosed in U.S. Pat. No. 4,959,317 and FLP-FRT as disclosed in U.S. Pat. No. 5,527,695, both incorporated herein by reference.

[0078] Transformation methods of this invention are preferably practiced in tissue culture on media and in a controlled environment. “Media” refers to the numerous nutrient mixtures that are used to grow cells in vitro, that is, outside of the intact living organism. Recipient cell targets include, but are not limited to, meristem cells, callus, immature embryos and gametic cells such as microspores, pollen, sperm and egg cells. It is contemplated that any cell from which a fertile plant may be regenerated is useful as a recipient cell. Callus may be initiated from tissue sources including, but not limited to, immature embryos, seedling apical meristems, microspores and the like. Cells capable of proliferating as callus are also recipient cells for genetic transformation. Practical transformation methods and materials for making transgenic plants of this invention, e.g., various media and recipient target cells, transformation of immature embryos and subsequent regeneration of fertile transgenic plants are disclosed in U.S. Pat. Nos. 6,194,636 and 6,232,526, which are incorporated herein by reference.

[0079] The seeds of transgenic plants can be harvested from fertile transgenic plants and be used to grow progeny generations of transformed plants of this invention including hybrid plants line for screening of plants having an enhanced agronomic trait. In addition to direct transformation of a plant with a recombinant DNA, transgenic plants can be prepared by crossing a first plant having a recombinant DNA with a second plant lacking the DNA. For example, recombinant DNA can be introduced into first plant line that is amenable to transformation to produce a transgenic plant which can be crossed with a second plant line to introgress the recombinant DNA into the second plant line. A transgenic plant with recombinant DNA providing an enhanced agronomic trait, e.g., enhanced yield, can be crossed with transgenic plant line having other recombinant DNA that confers another trait, e.g., herbicide resistance or pest resistance, to produce progeny plants having recombinant DNA that confers both traits. Typically, in such breeding for combining traits the transgenic plant donating the additional trait is a male line and the transgenic plant carrying the base traits is the female line. The progeny of this cross will segregate such that some of the plants will carry the DNA for both parental traits and some will carry DNA for one parental trait; such plants can be identified by markers associated with parental recombinant DNA Progeny plants carrying DNA for both parental traits can be crossed back into the female parent line multiple times, e.g., usually 6 to 8 generations, to produce a progeny plant with substantially the same genotype as one original transgenic parental line but for the recombinant DNA of the other transgenic parental line.

[0080] In the practice of transformation DNA is typically introduced into only a small percentage of target cells in any one transformation experiment. Marker genes are used to provide an efficient system for identification of those cells that are stably transformed by receiving and integrating a transgenic DNA construct into their genomes. Preferred marker genes provide selective markers which confer resistance to a selective agent, such as an antibiotic or herbicide. Any of the herbicides to which plants of this invention may be resistant are useful agents for selective markers. Potentially transformed cells are exposed to the selective agent. In the population of surviving cells will be those cells where, generally, the resistance-conferring gene is integrated and expressed at sufficient levels to permit cell survival. Cells may be tested further to confirm stable integration of the exogenous DNA. Commonly used selective marker genes include those conferring resistance to antibiotics such as kanamycin and paromomycin (nptII), hygromycin B (aph IV) and gentamycin (aac3 and aacC4) or resistance to herbicides such as glufosinate (bar or pat) and glyphosate (aroA or EPSPS). Examples of such selectable are illustrated in U.S. Pat. Nos. 5,550,318; 5,633,435; 5,780,708 and 6,118,047, all of which are incorporated herein by reference. Screenable markers which provide an ability to visually identify transformants can also be employed, e.g., a gene expressing a colored or fluorescent protein such as a luciferase or green fluorescent protein (GFP) or a gene expressing a beta-glucuronidase or uidA gene (GUS) for which various chromogenic substrates are known.

[0081] Cells that survive exposure to the selective agent, or cells that have been scored positive in a screening assay, may be cultured in regeneration media and allowed to mature into plants. Developing plantlets can be transferred to plant growth mix, and hardened off, e.g., in an environmentally controlled chamber at about 85% relative humidity, 600 ppm CO₂, and 25-250 microeinsteins m⁻² s⁻¹ of light, prior to transfer to a greenhouse or growth chamber for maturation. Plants are regenerated from about 6 weeks to 10 months after a transformant is identified, depending on the initial tissue. Plants may be pollinated using conventional plant breeding methods known to those of skill in the art and seed produced, e.g., self-pollination is commonly used with transgenic corn. The regenerated transformed plant or its progeny seed or plants can be tested for expression of the recombinant DNA and screened for the presence of enhanced agronomic trait.

[0082] Transgenic plant seed provided by this invention are grown to generate transgenic plants having an enhanced trait as compared to a control plant. Such seed for plants with enhanced agronomic trait is identified by screening transformed plants or progeny seed for enhanced trait. For efficiency a screening program is designed to evaluate multiple transgenic plants (events) comprising the recombinant DNA, e.g., multiple plants from 2 to 20 or more transgenic events.

[0083] Transgenic plants grown from transgenic seed provided herein demonstrate enhanced agronomic traits that contribute to increased yield or other trait that provides increased plant value, including, for example, enhanced seed quality. Of particular interest are plants having enhanced yield resulting from enhanced plant growth and development, stress tolerance, enhanced seed development, higher light response, enhanced flower development, or enhanced carbon and/or nitrogen metabolism.

[0084] Table 1 provides a list of protein encoding DNA (“genes”) that are useful as recombinant DNA for production of transgenic plants with enhanced agronomic trait, the elements of Table 1 are described by reference to:

“NUC SEQ ID NO” which is a SEQ ID NO for a DNA sequence in the Sequence Listing.
“PEP SEQ ID NO” which is a SEQ ID NO for an amino acid sequence in the Sequence Listing.
GENE ID” which is an arbitrary name for the recombinant DNA.
“Base Vector” which is a reference to the identifying number in Table 5 of base vectors used for transformation of the recombinant DNA. Construction of plant transformation constructs is illustrated in Example 1.
“annotation” refers to a description of the top hit protein obtained from an amino acid sequence query of each PEP SEQ ID NO to GenBank database of the National Center for Biotechnology Information (NCBI). Identifier is the GenBank ID number for the informative BLAST hit with —F T.

TABLE 1

| NUC | PEP | | | annotation | | | |
|---|---|---|---|---|---|---|---|
| SEQ | SEQ | Base | | e- | % | | |
| ID NO | ID NO | vector | GENE ID | value | identity | identifier | description |
| 1 | 194 | 1 | PHE0003351_PMON81242 | 0 | 98 | 168586 | gb\|AAA33498.1\|pyruvate, orthophosphate |
| | | | | | | | dikinase |
| 2 | 195 | 7 | PHE0003351_PMON83625 | 0 | 98 | 168586 | gb\|AAA33498.1\|pyruvate, orthophosphate |
| | | | | | | | dikinase |
| 3 | 196 | 1 | PHE0000207_PMON77878 | 1.00E−144 | 96 | 34907990 | ref\|NP_915342.1\|putative |
| | | | | | | | calcium-dependent protein |
| | | | | | | | kinase [Oryza sativa |
| | | | | | | | (japonica cultivar-group)] |
| 4 | 197 | 1 | PHE0000208_PMON77879 | 1.00E−143 | 94 | 50919297 | ref\|XP_470045.1\|putative |
| | | | | | | | calmodulin-domain protein |
| | | | | | | | kinase [Oryza sativa |
| | | | | | | | (japonica cultivar-group)] |
| 5 | 198 | 1 | PHE0000209_PMON77891 | 1.00E−135 | 89 | 53850561 | gb\|AAU95457.1\|At5g12180 |
| | | | | | | | [Arabidopsis thaliana] |
| | | | | | | | dbj\|BAB10036.1\|calcium- |
| | | | | | | | dependent protein kinase |
| 6 | 199 | 1 | PHE0000210_PMON77880 | 1.00E−137 | 89 | 26452430 | dbj\|BAC43300.1\|putative |
| | | | | | | | calcium-dependent protein |
| | | | | | | | kinase [Arabidopsis |
| | | | | | | | thaliana] |
| 7 | 200 | 8 | PHE0001329_PMON92878 | 0 | 100 | 34903780 | dbj\|BAB92151.1\|putative |
| | | | | | | | CBL-interacting protein |
| | | | | | | | kinase 2 [Oryza sativa |
| | | | | | | | (japonica |
| 8 | 201 | 1 | PHE0001425_PMON79162 | 1.00E−154 | 100 | 51979679 | ref\|XP_507586.1\|PREDICTED |
| | | | | | | | P0524F03.33 gene |
| | | | | | | | product [Oryza sativa |
| | | | | | | | (japonica cultivar-group)] |
| | | | | | | | ref\|XP_482612.1\|putative |
| | | | | | | | CCR4-NOT transcription |
| | | | | | | | complex, subunit 7 |
| 9 | 202 | 8 | PHE0001573_PMON92870 | 0 | 78 | 984262 | emb\|CAA58052.1\|asparragine |
| | | | | | | | synthetase [Zea mays] |
| 10 | 203 | 12 | PHE0001664_PMON99280 | 0 | 100 | 34906358 | sp\|Q9LDE6\|CKX1_ORYSA |
| | | | | | | | Probable cytokinin |
| | | | | | | | dehydrogenase precursor |
| | | | | | | | (Cytokinin oxidase) (CKO) |
| 11 | 204 | 1 | PHE0001674_PMON79194 | 5.00E−12 | 50 | 15223390 | ref\|NP_171645.1\|myb |
| | | | | | | | family transcription factor |
| | | | | | | | [Arabidopsis thaliana] |
| 12 | 205 | 10 | PHE0002026_PMON96489 | 0 | 87 | 32488298 | emb\|CAE03364.1\|OSJNBb0065L13.7 |
| | | | | | | | [Oryza sativa |
| | | | | | | | (japonica cultivar-group)] |
| 13 | 206 | 8 | PHE0002108_PMON92821 | 2.00E−31 | 100 | 10176234 | dbj\|BAB07329.1\|cold-shock |
| | | | | | | | protein [Bacillus halodurans |
| | | | | | | | C-125] |
| 14 | 207 | 8 | PHE0002109_PMON93856 | 6.00E−33 | 100 | 41324401 | emb\|CAF18741.1\|COLD- |
| | | | | | | | SHOCK PROTEIN CSPA |
| | | | | | | | [Corynebacterium |
| | | | | | | | glutamicum ATCC 13032] |
| 15 | 208 | 8 | PHE0002508_PMON92607 | 2.00E−79 | 72 | 50509850 | dbj\|BAD32022.1\|putative |
| | | | | | | | transcription factor [Oryza |
| | | | | | | | sativa |
| 16 | 209 | 1 | PHE0002650_PMON81832 | 1.00E−132 | 100 | 9964296 | gb\|AAG09919.1\|MADS |
| | | | | | | | box protein 2 [Zea mays] |
| 17 | 210 | 2 | PHE0002989_PMON95630 | 1.00E−117 | 100 | 7271044 | emb\|CAB80652.1\|small |
| | | | | | | | GTP-binding protein-like |
| | | | | | | | [Arabidopsis thaliana] |
| 18 | 211 | 6 | PHE0003290_PMON95107 | 4.00E−29 | 34 | 7269078 | emb\|CAB79187.1\|hypothetical |
| | | | | | | | protein [Arabidopsis |
| | | | | | | | thaliana] |
| 19 | 212 | 6 | PHE0003300_PMON95106 | 7.00E−81 | 54 | 50908933 | ref\|XP_465955.1\|putative |
| | | | | | | | nodulin 3 [Oryza sativa |
| | | | | | | | (japonica cultivar-group)] |
| 20 | 213 | 6 | PHE0003303_PMON95080 | 2.00E−96 | 69 | 38347194 | emb\|CAD37109.2\|OSJNBa0024J22.22 |
| | | | | | | | [Oryza sativa |
| | | | | | | | (japonica cultivar-group)] |
| 21 | 214 | 8 | PHE0003389_PMON94682 | 0 | 65 | 52076827 | dbj\|BAD45770.1\|putative |
| | | | | | | | Cyt-P450 monooxygenase |
| | | | | | | | [Oryza sativa (japonica |
| | | | | | | | cultivar-group)] |
| 22 | 215 | 8 | PHE0003614_PMON95111 | 0 | 94 | 32309578 | gb\|AAP79441.1\|glutamate |
| | | | | | | | decarboxylase [Oryza sativa |
| | | | | | | | (japonica cultivar-group)] |
| 23 | 216 | 8 | PHE0003684_PMON92807 | 1.00E−72 | 68 | 34906004 | dbj\|BAB63676.1\|induced |
| | | | | | | | protein MgI1 [Oryza sativa |
| | | | | | | | (japonica cultivar-group)] |
| 24 | 217 | 9 | PHE0003684_PMON93378 | 1.00E−72 | 68 | 34906004 | dbj\|BAB63676.1\|induced |
| | | | | | | | protein MgI1 [Oryza sativa |
| | | | | | | | (japonica cultivar-group)] |
| 25 | 218 | 8 | PHE0003853_PMON92602 | 1.00E−179 | 98 | 62320210 | ref\|NP_195478.2\|cyclin |
| | | | | | | | family protein [Arabidopsis |
| | | | | | | | thaliana] gb\|AAS49095.1\| |
| | | | | | | | At4g37630 [Arabidopsis |
| | | | | | | | thaliana] |
| 26 | 219 | 11 | PHE0003903_PMON98271 | 0 | 99 | 19851522 | gb\|AAL99744.1\|pyruvate |
| | | | | | | | decarboxylase [Zea mays] |
| 27 | 220 | 11 | PHE0003905_PMON99283 | 0 | 92 | 11995457 | gb\|AAG43027.1\|aldehyde |
| | | | | | | | dehydrogenase [Oryza |
| | | | | | | | sativa] |
| 28 | 221 | 11 | PHE0003907_PMON98066 | 5.00E−87 | 86 | 50906015 | ref\|XP_464496.1\|ribosomal |
| | | | | | | | protein L12-like protein |
| | | | | | | | [Oryza sativa (japonica |
| | | | | | | | cultivar-group)] |
| 29 | 222 | 11 | PHE0003908_PMON98064 | 0 | 84 | 51535811 | dbj\|BAD37896.1\|ARG1- |
| | | | | | | | like protein [Oryza sativa |
| | | | | | | | (japonica cultivar-group)] |
| 30 | 223 | 6 | PHE0003960_PMON95079 | 1.00E−156 | 87 | 50905641 | ref\|XP_464309.1\|putative |
| | | | | | | | choline-phosphate |
| | | | | | | | cytidylyltransferase [Oryza |
| | | | | | | | sativa (japonica cultivar- |
| | | | | | | | group)] |
| 31 | 224 | 5 | PHE0003967_PMON95088 | 1.00E−102 | 83 | 55168334 | gb\|AAV44199.1\|dehydroascorbate |
| | | | | | | | reductase [Oryza |
| | | | | | | | sativa (japonica cultivar- |
| | | | | | | | group)] |
| 32 | 225 | 10 | PHE0003985_PMON96457 | 1.00E−30 | 58 | 55770043 | ref\|XP_550011.1\|hypothetical |
| | | | | | | | protein [Oryza sativa |
| | | | | | | | (japonica cultivar-group)] |
| 33 | 226 | 10 | PHE0003987_PMON96134 | 5.00E−41 | 74 | 50919885 | ref\|XP_470303.1\|hypothetical |
| | | | | | | | protein [Oryza sativa |
| | | | | | | | (japonica cultivar-group)] |
| 34 | 227 | 10 | PHE0004001_PMON96453 | 4.00E−22 | 66 | 51978970 | ref\|XP_507362.1\|PREDICTED |
| | | | | | | | OSJNBa0077F02.127 |
| | | | | | | | gene product [Oryza sativa |
| | | | | | | | (japonica cultivar-group)] |
| 35 | 228 | 8 | PHE0004023_PMON92446 | 1.00E−132 | 88 | 12651665 | gb\|AAA20093.2\|Alfin-1 |
| | | | | | | | [Medicago sativa] |
| | | | | | | | pir\|\|T09646 probable zinc |
| | | | | | | | finger protein - alfalfa |
| | | | | | | | (fragment) |
| 36 | 229 | 4 | PHE0004026_PMON93885 | 0 | 100 | 21592703 | gb\|AAM64652.1\|LAX1/ |
| | | | | | | | AUX1-like permease |
| | | | | | | | [Arabidopsis thaliana] |
| 37 | 230 | 4 | PHE0004027_PMON93860 | 0 | 100 | 7269873 | emb\|CAB79732.1\|cytokinin |
| | | | | | | | oxidase-like protein |
| | | | | | | | [Arabidopsis thaliana] |
| 38 | 231 | 15 | PHE0004028_PMON94697 | 0 | 100 | 216765 | dbj\|BAA14344.1\|sucrose |
| | | | | | | | phosphorylase |
| | | | | | | | [Leuconostoc |
| | | | | | | | mesenteroides] |
| 12607 | 231 | n/a | PHE0010424_PMON17730 | 0 | 100 | 216765 | dbj\|BAA14344.1\|sucrose |
| | | | | | | | phosphorylase |
| | | | | | | | [Leuconostoc |
| | | | | | | | mesenteroides] |
| 39 | 232 | 8 | PHE0004034_PMON92631 | 0 | 100 | 6520233 | dbj\|BAA87958.1\|CW14 |
| | | | | | | | [Arabidopsis thaliana] |
| 40 | 233 | 8 | PHE0004039_PMON92634 | 1.00E−178 | 65 | 26452061 | ref\|NP_191207.2\|myosin |
| | | | | | | | heavy chain-related |
| | | | | | | | [Arabidopsis thaliana] |
| 41 | 234 | 8 | PHE0004047_PMON92619 | 4.00E−79 | 74 | 62087121 | dbj\|BAD91881.1\|transcription |
| | | | | | | | factor lim1 [Eucalyptus |
| | | | | | | | camaldulensis] |
| 42 | 235 | 14 | PHE0004047_PMON93388 | 4.00E−79 | 74 | 62087121 | dbj\|BAD91881.1\|transcription |
| | | | | | | | factor lim1 [Eucalyptus |
| | | | | | | | camaldulensis] |
| 43 | 236 | 8 | PHE0004068_PMON93663 | 3.00E−94 | 100 | 15293293 | ref\|NP_563710.1\|AWPM- |
| | | | | | | | 19-like membrane family |
| | | | | | | | protein [Arabidopsis |
| | | | | | | | thaliana] |
| 44 | 237 | 8 | PHE0004071_PMON93311 | 1.00E−130 | 100 | 21358850 | ref\|NP_568751.1\| |
| | | | | | | | polyadenylate-binding |
| | | | | | | | protein, putative/PABP, |
| | | | | | | | putative [Arabidopsis |
| | | | | | | | thaliana] |
| 45 | 238 | 8 | PHE0004072_PMON93654 | 0 | 100 | 23297397 | ref\|NP_192188.2\|GTP- |
| | | | | | | | binding family protein |
| | | | | | | | [Arabidopsis thaliana] |
| 46 | 239 | 14 | PHE0004072_PMON93669 | 0 | 100 | 23297397 | ref\|NP_192188.2\|GTP- |
| | | | | | | | binding family protein |
| | | | | | | | [Arabidopsis thaliana] |
| 47 | 240 | 8 | PHE0004074_PMON94164 | 0 | 100 | 9759255 | ref\|NP_196133.3\| |
| | | | | | | | transcription elongation |
| | | | | | | | factor-related [Arabidopsis |
| | | | | | | | thaliana] |
| 48 | 241 | 8 | PHE0004075_PMON92851 | 1.00E−132 | 100 | 11994587 | ref\|NP_566493.1\|nodulin |
| | | | | | | | MtN3 family protein |
| | | | | | | | [Arabidopsis thaliana] |
| 49 | 242 | 8 | PHE0004080_PMON93321 | 1.00E−143 | 99 | 16173 | emb\|CAA42168.1\|L- |
| | | | | | | | ascorbate peroxidase |
| | | | | | | | [Arabidopsis thaliana] |
| 50 | 243 | 14 | PHE0004084_PMON95141 | 0 | 100 | 7267537 | emb\|CAB78019.1\|putative |
| | | | | | | | phi-1-like phosphate- |
| | | | | | | | induced protein |
| | | | | | | | [Arabidopsis thaliana] |
| | | | | | | | gb\|AAM18526.1\|cell cycle- |
| | | | | | | | related protein [Arabidopsis |
| | | | | | | | thaliana] |
| 51 | 244 | 8 | PHE0004093_PMON93332 | 0 | 100 | 12744973 | gb\|AAK06866.1\|putative |
| | | | | | | | ATPase [Arabidopsis |
| | | | | | | | thaliana] ref\|NP_173536.1\| |
| | | | | | | | O-methyltransferase, |
| | | | | | | | putative [Arabidopsis |
| | | | | | | | thaliana] |
| 52 | 245 | 14 | PHE0004093_PMON94155 | 0 | 100 | 12744973 | gb\|AAK06866.1\|putative |
| | | | | | | | ATPase [Arabidopsis |
| | | | | | | | thaliana] ref\|NP_173536.1\| |
| | | | | | | | O-methyltransferase, |
| | | | | | | | putative [Arabidopsis |
| | | | | | | | thaliana] |
| 53 | 246 | 8 | PHE0004139_PMON92898 | 2.00E−88 | 100 | 21554099 | ref\|NP_568761.1\|expressed |
| | | | | | | | protein [Arabidopsis |
| | | | | | | | thaliana] |
| 54 | 247 | 8 | PHE0004144_PMON93842 | 1.00E−78 | 100 | 21555039 | ref\|NP_565390.1\|actin- |
| | | | | | | | depolymerizing factor 5 |
| | | | | | | | (ADF5) [Arabidopsis |
| | | | | | | | thaliana] |
| 55 | 248 | 8 | PHE0004148_PMON92574 | 0 | 100 | 48768596 | ref\|ZP_00272945.1\|COG0538: |
| | | | | | | | Isocitrate |
| | | | | | | | dehydrogenases [Ralstonia |
| | | | | | | | metallidurans CH34] |
| 56 | 249 | 8 | PHE0004149_PMON92471 | 1.00E−148 | 99 | 31096331 | ref\|NP_441003.1\| |
| | | | | | | | phycocyanin alpha |
| | | | | | | | phycocyanobilin lyase; |
| | | | | | | | CpcE [Synechocystis sp. |
| | | | | | | | PCC 6803] |
| 57 | 250 | 14 | PHE0004149_PMON93899 | 1.00E−148 | 99 | 31096331 | ref\|NP_441003.1\| |
| | | | | | | | phycocyanin alpha |
| | | | | | | | phycocyanobilin lyase; |
| | | | | | | | CpcE [Synechocystis sp. |
| | | | | | | | PCC 6803] |
| 58 | 251 | 15 | PHE0004152_PMON93672 | 3.00E−85 | 60 | 8978267 | ref\|NP_199781.1\|DNA- |
| | | | | | | | binding protein-related |
| | | | | | | | [Arabidopsis thaliana] |
| 59 | 252 | 8 | PHE0004155_PMON92626 | 0 | 100 | 22136876 | ref\|NP_200010.1\|sorbitol |
| | | | | | | | dehydrogenase, putative/ |
| | | | | | | | L-iditol 2-dehydrogenase, |
| | | | | | | | putative [Arabidopsis |
| | | | | | | | thaliana] |
| 60 | 253 | 8 | PHE0004156_PMON92623 | 0 | 98 | 12322729 | ref\|NP_187478.1\| |
| | | | | | | | phototropic-responsive |
| | | | | | | | protein, putative |
| | | | | | | | [Arabidopsis thaliana] |
| 61 | 254 | 8 | PHE0004162_PMON92481 | 3.00E−77 | 57 | 7269806 | emb\|CAB79666.1\|phytochrome- |
| | | | | | | | associated protein |
| | | | | | | | PAP2 [Arabidopsis |
| | | | | | | | thaliana] |
| 62 | 255 | 8 | PHE0004164_PMON92465 | 4.00E−67 | 100 | 21537028 | ref\|NP_198423.1\|glycosyl |
| | | | | | | | hydrolase family protein 17 |
| | | | | | | | [Arabidopsis thaliana] |
| 63 | 256 | 8 | PHE0004166_PMON93801 | 6.00E−09 | 100 | 13374861 | emb\|CAC34495.1\|putative |
| | | | | | | | strictosidine synthase-like |
| | | | | | | | [Arabidopsis thaliana] |
| 64 | 257 | 8 | PHE0004167_PMON93333 | 1.00E−176 | 100 | 28827764 | ref\|NP_569050.1\| |
| | | | | | | | adenylylsulfate kinase, |
| | | | | | | | putative [Arabidopsis |
| | | | | | | | thaliana] |
| 65 | 258 | 8 | PHE0004168_PMON93855 | 0 | 100 | 18176302 | ref\|NP_199253.1\|FAD- |
| | | | | | | | binding domain-containing |
| | | | | | | | protein [Arabidopsis |
| | | | | | | | thaliana] |
| 66 | 259 | 8 | PHE0004169_PMON92568 | 0 | 100 | 5080826 | gb\|AAD39335.1\|Putative |
| | | | | | | | Aldo/keto reductase |
| | | | | | | | [Arabidopsis thaliana] |
| 67 | 260 | 8 | PHE0004184_PMON92565 | 0 | 100 | 7270846 | emb\|CAB80527.1\|multiubiquitin |
| | | | | | | | chain binding protein |
| | | | | | | | (MBP1) [Arabidopsis |
| | | | | | | | thaliana] |
| 68 | 261 | 8 | PHE0004185_PMON92802 | 0 | 100 | 28460683 | ref\|NP_182075.1\| |
| | | | | | | | cytochrome P450, putative |
| | | | | | | | [Arabidopsis thaliana] |
| 69 | 262 | 8 | PHE0004188_PMON92803 | 0 | 100 | 20465485 | ref\|NP_200218.1\|heat |
| | | | | | | | shock transcription factor |
| | | | | | | | family protein [Arabidopsis |
| | | | | | | | thaliana] |
| 70 | 263 | 8 | PHE0004190_PMON92801 | 1.00E−167 | 98 | 7267277 | ref\|NP_192426.1\|basic |
| | | | | | | | helix-loop-helix (bHLH) |
| | | | | | | | family protein [Arabidopsis |
| | | | | | | | thaliana] |
| 71 | 264 | 8 | PHE0004208_PMON92834 | 1.00E−83 | 55 | 21555865 | gb\|AAS09998.1\|MYB |
| | | | | | | | transcription factor |
| | | | | | | | [Arabidopsis thaliana] |
| 72 | 265 | 8 | PHE0004215_PMON92827 | 2.00E−55 | 65 | 7320708 | ref\|NP_195750.1\| |
| | | | | | | | phosphatidylethanolamine- |
| | | | | | | | binding family protein |
| | | | | | | | [Arabidopsis thaliana] |
| 73 | 266 | 8 | PHE0004223_PMON92840 | 0 | 100 | 6523058 | ref\|NP_190239.1\|fasciclin- |
| | | | | | | | like arabinogalactan family |
| | | | | | | | protein [Arabidopsis |
| | | | | | | | thaliana] |
| 74 | 267 | 8 | PHE0004225_PMON94167 | 0 | 99 | 1421730 | gb\|AAC49371.1\|RF2 |
| | | | | | | | gb\|AAG43988.1\|T |
| | | | | | | | cytoplasm male sterility |
| | | | | | | | restorer factor 2 [Zea mays] |
| 75 | 268 | 10 | PHE0004226_PMON95114 | 0 | 100 | 53793208 | dbj\|BAD54414.1\|aldehyde |
| | | | | | | | dehydrogenase ALDH2b |
| | | | | | | | [Oryza sativa (japonica |
| | | | | | | | cultivar-group)] |
| 76 | 269 | 8 | PHE0004227_PMON92605 | 5.00E−26 | 100 | 21314334 | gb\|AAM46894.1\|early |
| | | | | | | | drought induced protein |
| | | | | | | | [Oryza sativa (indica |
| | | | | | | | cultivar-group)] |
| 77 | 270 | 8 | PHE0004229_PMON92867 | 1.00E−24 | 100 | 6320482 | ref\|NP_010562.1\|Small |
| | | | | | | | plasma membrane protein |
| | | | | | | | related to a family of plant |
| | | | | | | | polypeptides that are |
| | | | | | | | overexpressed under high |
| | | | | | | | salt concentration or low |
| | | | | | | | temperature, not essential |
| | | | | | | | for viability, deletion causes |
| | | | | | | | hyperpolarization of the |
| | | | | | | | plasma membrane potential; |
| | | | | | | | Pmp3p [Saccharomyces |
| | | | | | | | cerevisiae] |
| 78 | 271 | 8 | PHE0004233_PMON92843 | 0 | 100 | 19310749 | ref\|NP_188922.1\|heat |
| | | | | | | | shock transcription factor |
| | | | | | | | family protein [Arabidopsis |
| | | | | | | | thaliana] |
| 79 | 272 | 13 | PHE0004237_PMON93673 | 9.00E−85 | 100 | 16338 | emb\|CAA45039.1\|heat |
| | | | | | | | shock protein 17.6-II |
| | | | | | | | [Arabidopsis thaliana] |
| 80 | 273 | 8 | PHE0004243_PMON92621 | 3.00E−72 | 82 | 30409461 | dbj\|BAC76332.1\|HAP3 |
| | | | | | | | [Oryza sativa (japonica |
| | | | | | | | cultivar-group)] |
| 81 | 274 | 8 | PHE0004244_PMON92858 | 1.00E−159 | 96 | 15321716 | gb\|AAK95562.1\|leafy |
| | | | | | | | cotyledon1 [Zea mays] |
| 82 | 275 | 8 | PHE0004245_PMON93813 | 1.00E−131 | 100 | 50509850 | dbj\|BAD32022.1\|putative |
| | | | | | | | transcription factor [Oryza |
| | | | | | | | sativa (japonica cultivar- |
| | | | | | | | group)] |
| 83 | 276 | 8 | PHE0004248_PMON94672 | 1.00E−98 | 100 | 34907184 | ref\|NP_914939.1\|putative |
| | | | | | | | CCAAT-binding |
| | | | | | | | transcription factor subunit |
| | | | | | | | A(CBF-A) [Oryza sativa |
| 84 | 277 | 8 | PHE0004249_PMON95137 | 1.00E−48 | 100 | 12642910 | ref\|NP_850005.1\|expressed |
| | | | | | | | protein [Arabidopsis |
| | | | | | | | thaliana] |
| 85 | 278 | 8 | PHE0004250_PMON92881 | 5.00E−78 | 100 | 30409463 | dbj\|BAC76333.1\|HAP3 |
| | | | | | | | [Oryza sativa (japonica |
| | | | | | | | cultivar-group)] |
| 86 | 279 | 8 | PHE0004252_PMON92606 | 1.00E−173 | 100 | 18481620 | gb\|AAL73485.1\|repressor |
| | | | | | | | protein [Oryza sativa] |
| 87 | 280 | 8 | PHE0004253_PMON92874 | 1.00E−143 | 100 | 18481626 | gb\|AAL73488.1\|repressor |
| | | | | | | | protein [Zea mays] |
| 88 | 281 | 14 | PHE0004258_PMON93385 | 0 | 100 | 1871189 | gb\|AAB63549.1\|putative |
| | | | | | | | protein kinase [Arabidopsis |
| | | | | | | | thaliana] |
| 89 | 282 | 8 | PHE0004258_PMON93806 | 0 | 100 | 1871189 | gb\|AAB63549.1\|putative |
| | | | | | | | protein kinase [Arabidopsis |
| | | | | | | | thaliana] |
| 90 | 283 | 14 | PHE0004259_PMON93384 | 0 | 100 | 9755654 | ref\|NP_197112.1\|expressed |
| | | | | | | | protein [Arabidopsis |
| | | | | | | | thaliana] |
| 91 | 284 | 8 | PHE0004260_PMON92854 | 1.00E−48 | 100 | 12642910 | ref\|NP_850005.1\|expressed |
| | | | | | | | protein [Arabidopsis |
| | | | | | | | thaliana] |
| 92 | 285 | 14 | PHE0004261_PMON93389 | 1.00E−170 | 100 | 7270230 | ref\|NP_195009.1\|protein |
| | | | | | | | kinase, putative |
| | | | | | | | [Arabidopsis thaliana] |
| 93 | 286 | 8 | PHE0004261_PMON93655 | 1.00E−170 | 100 | 7270230 | ref\|NP_195009.1\|protein |
| | | | | | | | kinase, putative |
| | | | | | | | [Arabidopsis thaliana] |
| 94 | 287 | 8 | PHE0004262_PMON92862 | 0 | 100 | 42570809 | ref\|NP_973478.1\|protein |
| | | | | | | | kinase, putative |
| | | | | | | | [Arabidopsis thaliana] |
| 95 | 288 | 14 | PHE0004262_PMON93360 | 0 | 100 | 42570809 | ref\|NP_973478.1\|protein |
| | | | | | | | kinase, putative |
| | | | | | | | [Arabidopsis thaliana] |
| 96 | 289 | 8 | PHE0004264_PMON92845 | 3.00E−95 | 100 | 21554624 | ref\|NP_201267.1\| |
| | | | | | | | invertase/pectin |
| | | | | | | | methylesterase inhibitor |
| | | | | | | | family protein [Arabidopsis |
| | | | | | | | thaliana] |
| 97 | 290 | 14 | PHE0004264_PMON93354 | 3.00E−95 | 100 | 21554624 | ref\|NP_201267.1\| |
| | | | | | | | invertase/pectin |
| | | | | | | | methylesterase inhibitor |
| | | | | | | | family protein [Arabidopsis |
| | | | | | | | thaliana] |
| 98 | 291 | 8 | PHE0004265_PMON92873 | 0 | 100 | 642305 | ref\|NP_013662.1\| |
| | | | | | | | Hypothetical ORF; |
| | | | | | | | Yml050wp [Saccharomyces |
| | | | | | | | cerevisiae] |
| 99 | 292 | 14 | PHE0004265_PMON93807 | 0 | 100 | 642305 | ref\|NP_013662.1\| |
| | | | | | | | Hypothetical ORF; |
| | | | | | | | Yml050wp [Saccharomyces |
| | | | | | | | cerevisiae] |
| 100 | 293 | 8 | PHE0004266_PMON92877 | 0 | 99 | 23506085 | ref\|NP_567548.1\|pseudo- |
| | | | | | | | response regulator 2 |
| | | | | | | | (APRR2) (TOC2) |
| | | | | | | | [Arabidopsis thaliana] |
| 101 | 294 | 8 | PHE0004284_PMON93857 | 0 | 99 | 18399375 | ref\|NP_566402.1\|U-box |
| | | | | | | | domain-containing protein |
| | | | | | | | [Arabidopsis thaliana] |
| 102 | 295 | 10 | PHE0004285_PMON95136 | 1.00E−161 | 96 | 37542675 | gb\|AAL47207.1\|HAP3-like |
| | | | | | | | transcriptional-activator |
| | | | | | | | [Oryza sativa (indica |
| | | | | | | | cultivar-group)] |
| 103 | 296 | 8 | PHE0004286_PMON93666 | 0 | 99 | 255220 | gb\|AAB23208.1\|isocitrate |
| | | | | | | | lyase, threo-D S-isocitrate |
| | | | | | | | glyoxylate-lyase, IL {EC |
| | | | | | | | 4.1.3.1} [Brassica napus, |
| | | | | | | | seedlings, Peptide, 576 aa] |
| 104 | 297 | 8 | PHE0004287_PMON93344 | 0 | 88 | 50937953 | ref\|XP_478504.1\|putative |
| | | | | | | | isocitrate lyase [Oryza |
| | | | | | | | sativa (japonica cultivar- |
| | | | | | | | group)] |
| 105 | 298 | 2 | PHE0004307_PMON94102 | 1.00E−105 | 62 | 38345397 | emb\|CAE03088.2\|OSJNBa0017B10.3 |
| | | | | | | | [Oryza sativa |
| | | | | | | | (japonica cultivar-group)] |
| 106 | 299 | 14 | PHE0004314_PMON93397 | 9.00E−52 | 54 | 55740645 | gb\|AAV63915.1\|hypothetical |
| | | | | | | | protein At4g03965 |
| | | | | | | | [Arabidopsis thaliana] |
| 107 | 300 | 8 | PHE0004321_PMON93811 | 1.00E−128 | 100 | 18655355 | sp\|O48646\|GPX4_ARATH |
| | | | | | | | Probable phospholipid |
| | | | | | | | hydroperoxide glutathione |
| | | | | | | | peroxidase, mitochondrial |
| | | | | | | | precursor (PHGPx) |
| | | | | | | | (AtGPX1) |
| 108 | 301 | 14 | PHE0004321_PMON93834 | 1.00E−128 | 100 | 18655355 | ref\|NP_192897.2\| |
| | | | | | | | glutathione peroxidase, |
| | | | | | | | putative [Arabidopsis |
| | | | | | | | thaliana] |
| 109 | 302 | 8 | PHE0004325_PMON93818 | 5.00E−78 | 89 | 50906887 | ref\|XP_464932.1\|cytochrome |
| | | | | | | | c biogenesis protein-like |
| | | | | | | | [Oryza sativa (japonica |
| | | | | | | | cultivar-group)] |
| 110 | 303 | 8 | PHE0004335_PMON93850 | 0 | 100 | 28393953 | gb\|AAO42384.1\|putative |
| | | | | | | | major intrinsic protein |
| | | | | | | | [Arabidopsis thaliana] |
| 111 | 304 | 8 | PHE0004336_PMON93858 | 1.00E−146 | 69 | 51964952 | ref\|XP_482812.1\|major |
| | | | | | | | intrinsic protein-like [Oryza |
| | | | | | | | sativa (japonica cultivar- |
| | | | | | | | group)] |
| 112 | 305 | 4 | PHE0004337_PMON93886 | 0 | 62 | 50943587 | ref\|XP_481321.1\|unknown |
| | | | | | | | protein [Oryza sativa |
| | | | | | | | (japonica cultivar-group)] |
| 113 | 306 | 8 | PHE0004348_PMON93810 | 1.00E−32 | 100 | 15644431 | ref\|NP_229483.1\|cold shock |
| | | | | | | | protein [Thermotoga |
| | | | | | | | maritima MSB8] |
| 114 | 307 | 8 | PHE0004349_PMON93812 | 8.00E−33 | 100 | 15644617 | ref\|NP_229670.1\|cold shock |
| | | | | | | | protein [Thermotoga |
| | | | | | | | maritima MSB8] |
| 115 | 308 | 8 | PHE0004350_PMON93826 | 3.00E−31 | 100 | 20808157 | ref\|NP_623328.1\|Cold |
| | | | | | | | shock proteins |
| | | | | | | | [Thermoanaerobacter |
| | | | | | | | tengcongensis MB4] |
| 116 | 309 | 8 | PHE0004351_PMON93821 | 7.00E−32 | 100 | 56419891 | ref\|YP_147209.1\|cold shock |
| | | | | | | | protein [Geobacillus |
| | | | | | | | kaustophilus HTA426] |
| 117 | 310 | 8 | PHE0004352_PMON93824 | 1.00E−27 | 88 | 49611845 | ref\|YP_050486.1\|cold |
| | | | | | | | shock protein [Erwinia |
| | | | | | | | carotovora subsp. |
| | | | | | | | atroseptica SCRI1043] |
| 118 | 311 | 8 | PHE0004383_PMON93816 | 1.00E−34 | 98 | 50899510 | ref\|XP_450543.1\|unknown |
| | | | | | | | protein [Oryza sativa |
| | | | | | | | (japonica cultivar-group)] |
| 119 | 312 | 8 | PHE0004393_PMON94192 | 8.00E−95 | 100 | 42572939 | ref\|NP_974566.1\|calcineurin |
| | | | | | | | B-like protein 1 (CBL1) |
| | | | | | | | [Arabidopsis thaliana] |
| 120 | 313 | 8 | PHE0004395_PMON94145 | 0 | 100 | 30690488 | ref\|NP_849501.1\|phospholipase |
| | | | | | | | D delta/PLD delta |
| | | | | | | | (PLDDELTA) [Arabidopsis |
| | | | | | | | thaliana] |
| 121 | 314 | 8 | PHE0004396_PMON94137 | 0 | 100 | 7270422 | emb\|CAB80188.1\|arginine |
| | | | | | | | decarboxylase SPE2 |
| | | | | | | | [Arabidopsis thaliana] |
| 122 | 315 | 8 | PHE0004417_PMON94190 | 1.00E−170 | 100 | 1230677 | gb\|AAC17191.1\| |
| | | | | | | | spermidine synthase |
| | | | | | | | [Saccharomyces cerevisiae] |
| 123 | 316 | 8 | PHE0004418_PMON94368 | 0 | 100 | 798930 | sp\|P50264\|FMS1_YEAST |
| | | | | | | | Polyamine oxidase FMS1 |
| | | | | | | | (Fenpropimorph resistance |
| | | | | | | | multicopy suppressor 1) |
| 124 | 317 | 8 | PHE0004419_PMON95100 | 0 | 66 | 21281139 | ref\|NP_567276.1\| |
| | | | | | | | amidohydrolase family |
| | | | | | | | protein [Arabidopsis |
| | | | | | | | thaliana] |
| 125 | 318 | 10 | PHE0004421_PMON95120 | 2.00E−53 | 78 | 33321848 | gb\|AAQ06658.1\|apetala2 |
| | | | | | | | domain-containing CBF1- |
| | | | | | | | like protein [Oryza sativa] |
| 126 | 319 | 10 | PHE0004422_PMON95123 | 3.00E−51 | 80 | 25991254 | gb\|AAN76804.1\|DREB-like |
| | | | | | | | protein [Zea mays] |
| 127 | 320 | 8 | PHE0004425_PMON94428 | 7.00E−37 | 98 | 11762134 | gb\|AAG40345.1\|AT5g17460 |
| | | | | | | | [Arabidopsis thaliana] |
| 128 | 321 | 8 | PHE0004431_PMON94398 | 1.00E−159 | 99 | 557818 | ref\|NP_012214.1\|Pho85p |
| | | | | | | | cyclin of the Pho80p |
| | | | | | | | subfamily, forms a |
| | | | | | | | functional kinase complex |
| | | | | | | | with Pho85p which |
| | | | | | | | phosphorylates Mmr1p and |
| | | | | | | | is regulated by Pho81p; |
| | | | | | | | involved in glycogen |
| | | | | | | | metabolism, expression is |
| | | | | | | | cell-cycle regulated; Pcl7p |
| | | | | | | | [Saccharomyces cerevisiae] |
| 129 | 322 | 8 | PHE0004432_PMON94112 | 0 | 100 | 15156338 | ref\|NP_354295.1\| |
| | | | | | | | hypothetical protein |
| | | | | | | | AGR_C_2368 |
| | | | | | | | [Agrobacterium |
| | | | | | | | tumefaciens str. C58] |
| 130 | 323 | 8 | PHE0004472_PMON94115 | 1.00E−128 | 100 | 16323494 | ref\|NP_187978.1\|seven in |
| | | | | | | | absentia (SINA) family |
| | | | | | | | protein [Arabidopsis |
| | | | | | | | thaliana] |
| 131 | 324 | 14 | PHE0004472_PMON94126 | 1.00E−128 | 100 | 16323494 | ref\|NP_187978.1\|seven in |
| | | | | | | | absentia (SINA) family |
| | | | | | | | protein [Arabidopsis |
| | | | | | | | thaliana] |
| 132 | 325 | 14 | PHE0004488_PMON95609 | 1.00E−123 | 100 | 21554344 | ref\|NP_198627.1\|ASF1- |
| | | | | | | | like anti-silencing family |
| | | | | | | | protein [Arabidopsis |
| | | | | | | | thaliana] |
| 133 | 326 | 14 | PHE0004491_PMON95628 | 3.00E−12 | 45 | 14916641 | dbj\|BAB19648.1\| |
| | | | | | | | preprophytosulfokine |
| | | | | | | | [Oryza sativa] |
| 134 | 327 | 14 | PHE0004492_PMON95614 | 0 | 100 | 22331730 | ref\|NP_190653.2\|phototropic- |
| | | | | | | | responsive NPH3 family |
| | | | | | | | protein [Arabidopsis |
| | | | | | | | thaliana] |
| 135 | 328 | 10 | PHE0004545_PMON95117 | 1.00E−106 | 100 | 28973235 | ref\|NP_173200.1\| |
| | | | | | | | ribosomal protein L14 |
| | | | | | | | family protein [Arabidopsis |
| | | | | | | | thaliana] |
| 136 | 329 | 8 | PHE0004574_PMON94433 | 0 | 100 | 16329404 | ref\|NP_440132.1\|transaldolase |
| | | | | | | | [Synechocystis sp. PCC |
| | | | | | | | 6803] |
| 137 | 330 | 14 | PHE0004606_PMON95627 | 0 | 100 | 130709 | pir\|\|S29317 phosphoprotein |
| | | | | | | | phosphatase (EC 3.1.3.16) 1 - |
| | | | | | | | maize gb\|AAA33545.1\| |
| | | | | | | | protein phosphatase-1 |
| 138 | 331 | 8 | PHE0004620_PMON94189 | 1.00E−101 | 57 | 56421275 | ref\|YP_148593.1\|6- |
| | | | | | | | phosphofructokinase |
| | | | | | | | (phosphofructokinase) |
| | | | | | | | (phosphohexokinase) |
| | | | | | | | [Geobacillus kaustophilus |
| | | | | | | | HTA426] |
| 139 | 332 | 14 | PHE0004620_PMON94442 | 1.00E−101 | 57 | 56421275 | ref\|YP_148593.1\|6- |
| | | | | | | | phosphofructokinase |
| | | | | | | | (phosphofructokinase) |
| | | | | | | | (phosphohexokinase) |
| | | | | | | | [Geobacillus kaustophilus |
| | | | | | | | HTA426] |
| 140 | 333 | 14 | PHE0004622_PMON95621 | 0 | 100 | 10177836 | ref\|NP_974942.1\|F-box |
| | | | | | | | family protein [Arabidopsis |
| | | | | | | | thaliana] |
| 141 | 334 | 8 | PHE0004626_PMON95101 | 0 | 88 | 50942161 | ref\|XP_480608.1\|putative |
| | | | | | | | gamma-aminobutyrate |
| | | | | | | | transaminase subunit |
| | | | | | | | precursor isozyme 3 [Oryza |
| | | | | | | | sativa (japonica cultivar- |
| | | | | | | | group)] |
| 142 | 335 | 8 | PHE0004630_PMON94367 | 0 | 100 | 7270516 | emb\|CAB80281.1\|NAD+ |
| | | | | | | | dependent isocitrate |
| | | | | | | | dehydrogenase-like protein |
| | | | | | | | [Arabidopsis thaliana] |
| 143 | 336 | 3 | PHE0004634_PMON94385 | 1.00E−102 | 100 | 61656127 | ref\|NP_176491.1\|AP2 |
| | | | | | | | domain-containing |
| | | | | | | | transcription factor, putative |
| | | | | | | | [Arabidopsis thaliana] |
| 144 | 337 | 2 | PHE0004640_PMON95066 | 0 | 73 | 34913436 | ref\|NP_918065.1\|putative |
| | | | | | | | fatty acid condensing |
| | | | | | | | enzyme CUT1 [Oryza |
| | | | | | | | sativa (japonica cultivar- |
| | | | | | | | group)] |
| 145 | 338 | 8 | PHE0004645_PMON94655 | 1.00E−136 | 100 | 18411867 | ref\|NP_565174.1\|14-3-3 |
| | | | | | | | protein GF14 pi (GRF13) |
| | | | | | | | [Arabidopsis thaliana] |
| 146 | 339 | 14 | PHE0004645_PMON94685 | 1.00E−136 | 100 | 18411867 | ref\|NP_565174.1\|14-3-3 |
| | | | | | | | protein GF14 pi (GRF13) |
| | | | | | | | [Arabidopsis thaliana] |
| 147 | 340 | 8 | PHE0004647_PMON94651 | 1.00E−117 | 100 | 21554066 | pir\|\|T02447 hypothetical |
| | | | | | | | protein At2g46000 |
| | | | | | | | Arabidopsis thaliana |
| 148 | 341 | 14 | PHE0004647_PMON94688 | 1.00E−117 | 100 | 21554066 | gb\|AAM63147.1\|unknown |
| | | | | | | | [Arabidopsis thaliana] |
| 149 | 342 | 14 | PHE0004650_PMON94686 | 1.00E−112 | 100 | 67633514 | gb\|AAY78681.1\|putative E3 |
| | | | | | | | ubiquitin ligase SCF |
| | | | | | | | complex subunit |
| | | | | | | | SKP1/ASK1 [Arabidopsis |
| | | | | | | | thaliana] |
| 150 | 343 | 8 | PHE0004652_PMON94657 | 1.00E−138 | 100 | 38603872 | dbj\|BAD43212.1\|putative |
| | | | | | | | glutamate/aspartate-binding |
| | | | | | | | peptide [Arabidopsis |
| | | | | | | | thaliana] |
| 151 | 344 | 14 | PHE0004652_PMON94687 | 1.00E−138 | 100 | 38603872 | dbj\|BAD43212.1\|putative |
| | | | | | | | glutamate/aspartate-binding |
| | | | | | | | peptide [Arabidopsis |
| | | | | | | | thaliana] |
| 152 | 345 | 8 | PHE0004687_PMON94669 | 7.00E−61 | 91 | 21592528 | ref\|NP_568396.1\|ring-box |
| | | | | | | | protein-related [Arabidopsis |
| | | | | | | | thaliana] |
| 153 | 346 | 10 | PHE0004689_PMON95131 | 0 | 100 | 7268004 | emb\|CAB78344.1\|serine/threonine- |
| | | | | | | | specific protein |
| | | | | | | | kinase MHK [Arabidopsis |
| | | | | | | | thaliana] |
| 154 | 347 | 10 | PHE0004691_PMON95129 | 0 | 100 | 51978966 | emb\|CAB61629.1\| |
| | | | | | | | spermidine synthase 1 |
| | | | | | | | [Oryza sativa] |
| 155 | 348 | 14 | PHE0004719_PMON94698 | 1.00E−147 | 100 | 28416631 | ref\|NP_564556.1\|zinc |
| | | | | | | | finger (C3HC4-type RING |
| | | | | | | | finger) family protein |
| | | | | | | | [Arabidopsis thaliana] |
| 156 | 349 | 8 | PHE0004719_PMON95089 | 1.00E−147 | 100 | 28416631 | ref\|NP_564556.1\|zinc |
| | | | | | | | finger (C3HC4-type RING |
| | | | | | | | finger) family protein |
| | | | | | | | [Arabidopsis thaliana] |
| 157 | 350 | 8 | PHE0004734_PMON94667 | 1.00E−87 | 100 | 5080771 | ref\|NP_172848.1\| |
| | | | | | | | eukaryotic translation |
| | | | | | | | initiation factor 5A-1/eIF- |
| | | | | | | | 5A 1 [Arabidopsis thaliana] |
| 158 | 351 | 10 | PHE0004735_PMON95116 | 9.00E−88 | 100 | 21592652 | ref\|NP_177100.1\| |
| | | | | | | | eukaryotic translation |
| | | | | | | | initiation factor 5A, putative/ |
| | | | | | | | eIF-5A, putative |
| | | | | | | | [Arabidopsis thaliana] |
| 159 | 352 | 8 | PHE0004739_PMON95110 | 1.00E−109 | 100 | 6562282 | emb\|CAB62652.1\|rac-like |
| | | | | | | | GTP binding protein |
| | | | | | | | Arac11 [Arabidopsis |
| | | | | | | | thaliana] |
| 160 | 353 | 8 | PHE0004753_PMON95105 | 0 | 100 | 6684442 | ref\|NP_178062.1\| |
| | | | | | | | succinate-semialdehyde |
| | | | | | | | dehydrogenase (SSADH1) |
| | | | | | | | [Arabidopsis thaliana] |
| 161 | 354 | 8 | PHE0004759_PMON95109 | 0 | 100 | 29824301 | ref\|NP_849582.1\|expressed |
| | | | | | | | protein [Arabidopsis |
| | | | | | | | thaliana] |
| 162 | 355 | 10 | PHE0004770_PMON95122 | 1.00E−32 | 92 | 51038072 | gb\|AAT93875.1\|unknown |
| | | | | | | | protein [Oryza sativa |
| | | | | | | | (japonica cultivar-group)] |
| 163 | 356 | 10 | PHE0004772_PMON95132 | 6.00E−36 | 33 | 9758946 | ref\|NP_200265.1\| |
| | | | | | | | expressed protein |
| | | | | | | | [Arabidopsis thaliana] |
| 164 | 357 | 10 | PHE0004774_PMON95147 | 6.00E−52 | 66 | 50909195 | ref\|XP_466086.1\|putative |
| | | | | | | | multiple stress-responsive |
| | | | | | | | zinc-finger protein [Oryza |
| | | | | | | | sativa (japonica cultivar- |
| | | | | | | | group)] |
| 165 | 358 | 10 | PHE0004777_PMON95118 | 2.00E−64 | 100 | 26452894 | ref\|NP_180514.1\|DNA- |
| | | | | | | | directed RNA polymerase |
| | | | | | | | I(A) and III(C) 14 kDa |
| | | | | | | | subunit (RPAC14) |
| | | | | | | | [Arabidopsis thaliana] |
| 166 | 359 | 14 | PHE0004785_PMON95057 | 1.00E−145 | 84 | 34484312 | sp\|Q6UNT2\|RL5_CUCSA |
| | | | | | | | 60S ribosomal protein L5 |
| 167 | 360 | 10 | PHE0004786_PMON95604 | 0 | 100 | 7267537 | ref\|NP_192634.1\| |
| | | | | | | | phosphate-responsive |
| | | | | | | | protein, putative (EXO) |
| | | | | | | | [Arabidopsis thaliana] |
| 168 | 361 | 8 | PHE0004788_PMON95092 | 0 | 84 | 31126776 | ref\|XP_506910.1\| |
| | | | | | | | PREDICTED |
| | | | | | | | OSJNBa0057G07.4 gene |
| | | | | | | | product [Oryza sativa |
| | | | | | | | (japonica cultivar-group)] |
| 169 | 362 | 10 | PHE0004799_PMON95602 | 0 | 99 | 9843858 | emb\|CAC03739.1\|flavin |
| | | | | | | | containing polyamine |
| | | | | | | | oxidase [Zea mays] |
| 170 | 363 | 10 | PHE0004841_PMON95636 | 0 | 100 | 50909767 | ref\|XP_466372.1\|cryptochrome |
| | | | | | | | 1a [Oryza sativa |
| | | | | | | | (japonica cultivar-group)] |
| 171 | 364 | 10 | PHE0004844_PMON95637 | 3.00E−53 | 100 | 62734659 | gb\|AAX96768.1\|expressed |
| | | | | | | | protein [Oryza sativa |
| | | | | | | | (japonica cultivar-group)] |
| 172 | 365 | 14 | PHE0004854_PMON95611 | 1.00E−163 | 100 | 21592743 | ref\|NP_199265.1\|ribose 5- |
| | | | | | | | phosphate isomerase-related |
| | | | | | | | [Arabidopsis thaliana] |
| 173 | 366 | 10 | PHE0004862_PMON95601 | 5.00E−56 | 100 | 34902924 | dbj\|BAB07982.1\|FPF1 |
| | | | | | | | protein-like [Oryza sativa |
| | | | | | | | (japonica cultivar-group)] |
| 174 | 367 | 10 | PHE0004888_PMON95603 | 0 | 100 | 32405610 | ref\|XP_323418.1\|hypothetical |
| | | | | | | | protein [Neurospora |
| | | | | | | | crassa] |
| 175 | 368 | n/a | At1g21790.1 | 1.00E−168 | 100 | 21593249 | ref\|NP_564152.1\|expressed |
| | | | | | | | protein [Arabidopsis |
| | | | | | | | thaliana] |
| 176 | 369 | n/a | ERD4 | 0 | 100 | 17104683 | ref\|NP_564354.1\|early- |
| | | | | | | | responsive to dehydration |
| | | | | | | | stress protein (ERD4) |
| | | | | | | | [Arabidopsis thaliana] |
| 177 | 370 | n/a | At1g78070.2 | 0 | 100 | 42572153 | ref\|NP_974167.1\|WD-40 |
| | | | | | | | repeat family protein |
| | | | | | | | [Arabidopsis thaliana] |
| 178 | 371 | n/a | At1g78070.1 | 1.00E−128 | 100 | 18411805 | ref\|NP_565168.1\|WD-40 |
| | | | | | | | repeat family protein |
| | | | | | | | [Arabidopsis thaliana] |
| 179 | 372 | n/a | At3g47340.1 | 0 | 100 | 5541701 | ref\|NP_190318.1\| |
| | | | | | | | asparagine synthetase 1 |
| | | | | | | | [glutamine-hydrolyzing]/ |
| | | | | | | | glutamine-dependent |
| | | | | | | | asparagine synthetase 1 |
| | | | | | | | (ASN1) [Arabidopsis |
| | | | | | | | thaliana] |
| 180 | 373 | n/a | At3g47340.3 | 0 | 100 | 30692853 | ref\|NP_850664.1\|asparagine |
| | | | | | | | synthetase 1 [glutamine- |
| | | | | | | | hydrolyzing]/glutamine- |
| | | | | | | | dependent asparagine |
| | | | | | | | synthetase 1 (ASN1) |
| | | | | | | | [Arabidopsis thaliana] |
| 181 | 374 | n/a | At3g47340.2 | 0 | 100 | 30692849 | ref\|NP_850663.1\|asparagine |
| | | | | | | | synthetase 1 [glutamine- |
| | | | | | | | hydrolyzing]/glutamine- |
| | | | | | | | dependent asparagine |
| | | | | | | | synthetase 1 (ASN1) |
| | | | | | | | [Arabidopsis thaliana] |
| 182 | 375 | n/a | At5g13170.1 | 1.00E−163 | 100 | 9955561 | ref\|NP_196821.1\|nodulin |
| | | | | | | | MtN3 family protein |
| | | | | | | | [Arabidopsis thaliana] |
| 183 | 376 | n/a | At2g19900.1 | 0 | 100 | 28059162 | ref\|NP_179580.1\|malate |
| | | | | | | | oxidoreductase, putative |
| | | | | | | | [Arabidopsis thaliana] |
| 184 | 377 | n/a | At5g09480.1 | 8.00E−80 | 100 | 9955535 | ref\|NP_196510.1\| |
| | | | | | | | hydroxyproline-rich |
| | | | | | | | glycoprotein family protein |
| | | | | | | | [Arabidopsis thaliana] |
| 185 | 378 | n/a | At5g09530.1 | 0 | 100 | 7671436 | ref\|NP_196515.1\| |
| | | | | | | | hydroxyproline-rich |
| | | | | | | | glycoprotein family protein |
| | | | | | | | [Arabidopsis thaliana] |
| 186 | 379 | n/a | At2g42790.1 | 0 | 100 | 21700853 | ref\|NP_181807.1\|citrate |
| | | | | | | | synthase, glyoxysomal, |
| | | | | | | | putative [Arabidopsis |
| | | | | | | | thaliana] |
| 187 | 380 | n/a | At3g56200.1 | 0 | 100 | 7572918 | ref\|NP_191179.1\|amino |
| | | | | | | | acid transporter family |
| | | | | | | | protein [Arabidopsis |
| | | | | | | | thaliana] |
| 188 | 381 | n/a | At5g01520.1 | 1.00E−141 | 100 | 7327811 | ref\|NP_195772.1\|zinc |
| | | | | | | | finger (C3HC4-type RING |
| | | | | | | | finger) family protein |
| | | | | | | | [Arabidopsis thaliana] |
| 189 | 382 | n/a | At5g01520.2 | 2.00E−97 | 100 | 7327811 | ref\|NP_195772.1\|zinc |
| | | | | | | | finger (C3HC4-type RING |
| | | | | | | | finger) family protein |
| | | | | | | | [Arabidopsis thaliana] |
| 190 | 383 | n/a | At5g66780.1 | 2.00E−66 | 100 | 9758128 | d ref\|NP_201479.1\| |
| | | | | | | | expressed protein |
| | | | | | | | [Arabidopsis thaliana] |
| 191 | 384 | n/a | At5g59320.1 | 1.00E−61 | 100 | 24417292 | ref\|NP_568905.1\|lipid |
| | | | | | | | transfer protein 3 (LTP3) |
| | | | | | | | [Arabidopsis thaliana] |
| 192 | 385 | n/a | AtHB7 | 1.00E−151 | 100 | 20259175 | gb\|AAM14303.1\|putative |
| | | | | | | | homeodomain transcription |
| | | | | | | | factor protein ATHB-7 |
| | | | | | | | [Arabidopsis thaliana] |
| 193 | 386 | n/a | RD20 | 1.00E−136 | 100 | 20465881 | ref\|NP_180896.1\|calcium- |
| | | | | | | | binding RD20 protein |
| | | | | | | | (RD20) [Arabidopsis |
| | | | | | | | thaliana] |

[0085] Screening Methods for Transgenic Plants with Enhanced Agronomic Trait

[0086] Many transgenic events which survive to fertile transgenic plants that produce seeds and progeny plants will not exhibit an enhanced agronomic trait. Screening is necessary to identify the transgenic plant of this invention. Transgenic plants having enhanced agronomic traits are identified from populations of plants transformed as described herein by evaluating the trait in a variety of assays to detect an enhanced agronomic trait. These assays also may take many forms, including but not limited to, analyses to detect changes in the chemical composition, biomass, physiological properties, morphology of the plant. Changes in chemical compositions such as nutritional composition of grain can be detected by analysis of the seed composition and content of protein, free amino acids, oil, free fatty acids, starch or tocopherols. Changes in biomass characteristics can be made on greenhouse or field grown plants and can include plant height, stem diameter, root and shoot dry weights; and, for corn plants, ear length and diameter. Changes in physiological properties can be identified by evaluating responses to stress conditions, e.g., assays using imposed stress conditions such as water deficit, nitrogen deficiency, cold growing conditions, pathogen or insect attack or light deficiency, or increased plant density. Changes in morphology can be measured by visual observation of tendency of a transformed plant with an enhanced agronomic trait to also appear to be a normal plant as compared to changes toward bushy, taller, thicker, narrower leaves, striped leaves, knotted trait, chlorosis, albino, anthocyanin production, or altered tassels, ears or roots. Other screening properties include days to pollen shed, days to silking, leaf extension rate, chlorophyll content, leaf temperature, stand, seedling vigor, internode length, plant height, leaf number, leaf area, tillering, brace roots, stay green, stalk lodging, root lodging, plant health, barreness/prolificacy, green snap, and pest resistance. In addition, phenotypic characteristics of harvested grain may be evaluated, including number of kernels per row on the ear, number of rows of kernels on the ear, kernel abortion, kernel weight, kernel size, kernel density and physical grain quality.

[0087] Although preferred seeds for transgenic plants with enhanced agronomic traits of this invention are corn and soybean plants, other seeds are for cotton, canola, wheat, sunflower, sorghum, alfalfa, barley, millet, rice, tobacco, fruit and vegetable crops, and turfgrass

### Example 1

### Plant Expression Constructs

[0088] This example illustrates the construction of plasmids for transferring recombinant DNA into plant cells which can be regenerated into transgenic plants of this invention.

[0089] Primers for PCR amplification of protein coding nucleotides of recombinant DNA are designed at or near the start and stop codons of the coding sequence, in order to eliminate most of the 5′ and 3′ untranslated regions. Each recombinant DNA coding for a protein identified in Table 1 is amplified by PCR prior to insertion into the insertion site of one of the base vectors as referenced in Table 5.

[0090] A. Corn Transformation Constructs

[0091] With reference to Table 2 and FIG. 1, pMON82060 illustrates the elements of base vector 1 for corn transformation. Other base vectors for corn transformation were also constructed by replacing the gene of interest plant expression cassette elements of base vector 1, i.e. the promoter, leader, intron and terminator elements, with the elements listed in Table 5 to provide base vectors 2-12 for corn transformation. Each of the protein encoding DNA as identified in Table 1 is placed in the gene of interest plant expression cassette before the termination sequence in each of the base vector 1-12.

TABLE 2
pMON82060

| | | | Coordinates |
|---|---|---|---|
| | | | of SEQ ID |
| function | name | annotation | NO: 12603 |
| Agro | B-AGRtu.right border | Agro right border sequence, essential for | 5235-5591 |
| transformation | | transfer of T-DNA. | |
| Gene of | P-Os.Act1 | Promoter from the rice actin gene act1. | 5609-7009 |
| interest plant | L-Os.Act1 | Leader (first exon) from the rice actin 1 | |
| expression | | gene. | |
| cassette | I-Os.Act1 | First intron and flanking UTR exon | |
| | | sequences from the rice actin 1 gene | |
| | T-St.Pis4 | The 3′ non-translated region of the | 7084-8026 |
| | | potato proteinase inhibitor II gene which | |
| | | functions to direct polyadenylation of the | |
| | | mRNA | |
| Plant | P-CaMV.35S | CaMV 35S promoter | 8075-8398 |
| selectable | L-CaMV.35S | 5′ UTR from the 35S RNA of CaMV | |
| marker | CR-Ec.nptII-Tn5 | nptII selectable marker that confers | 8432-9226 |
| expression | | resistance to neomycin and kanamycin | |
| cassette | T-AGRtu.nos | A 3′ non-translated region of the | 9255-9507 |
| | | nopaline synthase gene of | |
| | | Agrobacterium tumefaciens Ti plasmid | |
| | | which functions to direct | |
| | | polyadenylation of the mRNA.. | |
| Agro | B-AGRtu.left border | Agro left border sequence, essential for | 39-480 |
| transformation | | transfer of T-DNA. | |
| Maintenance | OR-Ec.oriV-RK2 | The vegetative origin of replication from | 567-963 |
| in E. coli | | plasmid RK2. | |
| | CR-Ec.rop | Coding region for repressor of primer | 2472-2663 |
| | | from the ColE1 plasmid. Expression of | |
| | | this gene product interferes with primer | |
| | | binding at the origin of replication, | |
| | | keeping plasmid copy number low. | |
| | OR-Ec.ori-ColE1 | The minimal origin of replication from | 3091-3679 |
| | | the E. coli plasmid ColE1. | |
| | P-Ec.aadA-SPC/STR | promoter for Tn7 adenylyltransferase | 4210-4251 |
| | | (AAD(3″)) | |
| | CR-Ec.aadA- | Coding region for Tn7 | 4252-5040 |
| | SPC/STR | adenylyltransferase (AAD(3″)) | |
| | | conferring spectinomycin and | |
| | | streptomycin resistance. | |
| | T-Ec.aadA-SPC/STR | 3′ UTR from the Tn7 adenylyltransferase | 5041-5098 |
| | | (AAD(3″)) gene of E. coli. | |

[0092] Elements of a corn transformation plasmid, pMON17730, for expressing a Leuconostoc mesenteroides sucrose phosphorylase are illustrated in Table 3. This construct was assembled using the technology known in the art.

TABLE 3
pMON17730

| | | | Coordinates of |
|---|---|---|---|
| function | name | annotation | SEQ ID NO: 12606 |
| Agro | B-AGRtu.right | Agro right border sequence, essential | 4862-5218 |
| transformation | border | for transfer of T-DNA. | |
| Gene of | P-Zm.Brittle2 | Promoter from thecorn brittle 2 gene | |
| interest plant | L-Zm.Brittle2 | 5′ untranslated region from the corn | |
| expression | | brittel 2 gene. | |
| cassette | L-Ta.Lhcb1 | wheat CAB leader | |
| | I-Os.Act1 | First intron and flanking UTR exon | 5276-6375 |
| | | sequences from the rice actin 1 gene | |
| | CR-Lm.spl1 | PHE0004028_PMON17730 SPL | 6385-7857 |
| | | coding region | |
| | T-Ta.Hsp17 | The 3′ non-translated region of the | 7870-8079 |
| | | wheat low molecular weight heat | |
| | | shock protein gene | |
| Plant | P-CaMV.35S | CaMV 35S promoter | 8226-8518 |
| selectable | CR-Ec.nptII- | nptII selectable marker that confers | 8583-9377 |
| marker | Tn5 | resistance to neomycin and | |
| expression | | kanamycin | |
| cassette | T-AGRtu.nos | A 3′ non-translated region of the | 9409-9661 |
| | | nopaline synthase gene of | |
| | | Agrobacterium tumefaciens Ti | |
| | | plasmid which functions to direct | |
| | | polyadenylation of the mRNA.. | |
| Agro | B-AGRtu.left | Agro left border sequence, essential | 10003-10026 |
| transformation | border | for transfer of T-DNA. | |
| Maintenance | OR-Ec.oriV- | The vegetative origin of replication | 194-590 |
| in E. coli | RK2 | from plasmid RK2. | |
| | CR-Ec.rop | Coding region for repressor of | 2099-2290 |
| | | primer from the ColE1 plasmid. | |
| | | Expression of this gene product | |
| | | interferes with primer binding at the | |
| | | origin of replication, keeping | |
| | | plasmid copy number low. | |
| | OR-Ec.ori- | The minimal origin of replication | 2718-3306 |
| | ColE1 | from the E. coli plasmid ColE1. | |
| | P-Ec.aadA- | promoter for Tn7 | 3837-3878 |
| | SPC/STR | adenylyltransferase (AAD(3″)) | |
| | CR-Ec.aadA- | Coding region for Tn7 | 3879-4667 |
| | SPC/STR | adenylyltransferase (AAD(3″)) | |
| | | conferring spectinomycin and | |
| | | streptomycin resistance. | |
| | T-Ec.aadA- | 3′ UTR from the Tn7 | 4668-4725 |
| | SPC/STR | adenylyltransferase (AAD(3″)) gene | |
| | | of E. coli. | |

[0093] B. Soybean Transformation Constructs

[0094] Plasmids for use in transformation of soybean are also prepared. Elements of an exemplary common expression vector plasmid pMON82053 are shown in Table 4 and FIG. 2. Other base vectors for soybean transformation were also constructed by replacing the gene of interest plant expression cassette elements of base vector 13, i.e. the promoter, leader, intron and terminator elements, with the elements listed in Table 5 to provide base vectors 13-15 for soybean transformation. Each of the protein encoding DNA as identified in Table 1 is placed in the gene of interest plant expression cassette before the termination sequence in each of the base vector 13-15.

TABLE 4
pMON82053

| | | | Coordinates of SEQ ID |
|---|---|---|---|
| function | name | annotation | NO: 12604 |
| Agro | B-AGRtu.left border | Agro left border | 6144-6585 |
| transforamtion | | sequence, essential for | |
| | | transfer of T-DNA. | |
| Plant | P-At.Act7 | Promoter from the | 6624-7861 |
| selectable | | arabidopsis actin 7 gene | |
| marker | L-At.Act7 | 5′UTR of Arabidopsis | |
| expression | | Act7 gene | |
| cassette | I-At.Act7 | Intron from the | |
| | | Arabidopsis actin7 gene | |
| | TS-At.ShkG-CTP2 | Transit peptide region of | 7864-8091 |
| | | Arabidopsis EPSPS | |
| | CR-AGRtu.aroA- | Synthetic CP4 coding | 8092-9459 |
| | CP4.nno_At | region with dicot | |
| | | preferred codon usage. | |
| | T-AGRtu.nos | A 3′ non-translated region | 9466-9718 |
| | | of the nopaline synthase | |
| | | gene of Agrobacterium | |
| | | tumefaciens Ti plasmid | |
| | | which functions to direct | |
| | | polyadenylation of the | |
| | | mRNA. | |
| Gene of | P-CaMV.35S-enh | Promoter for 35S RNA | 1-613 |
| interest | | from CaMV containing a | |
| expression | | duplication of the −90 to −350 | |
| cassette | | region. | |
| | T-Gb.E6-3b | 3′ untranslated region | 688-1002 |
| | | from the fiber protein E6 | |
| | | gene of sea-island cotton; | |
| Agro | B-AGRtu.right border | Agro right border | 1033-1389 |
| transformation | | sequence, essential for | |
| | | transfer of T-DNA. | |
| Maintenance | OR-Ec.oriV-RK2 | The vegetative origin of | 5661-6057 |
| in E. coli | | replication from plasmid | |
| | | RK2. | |
| | CR-Ec.rop | Coding region for | 3961-4152 |
| | | repressor of primer from | |
| | | the ColE1 plasmid. | |
| | | Expression of this gene | |
| | | product interferes with | |
| | | primer binding at the | |
| | | origin of replication, | |
| | | keeping plasmid copy | |
| | | number low. | |
| | OR-Ec.ori-ColE1 | The minimal origin of | 2945-3533 |
| | | replication from the E. coli | |
| | | plasmid ColE1. | |
| | P-Ec.aadA-SPC/STR | romoter for Tn7 | 2373-2414 |
| | | adenylyltransferase | |
| | | (AAD(3″)) | |
| | CR-Ec.aadA- | Coding region for Tn7 | 1584-2372 |
| | SPC/STR | adenylyltransferase | |
| | | (AAD(3″)) conferring | |
| | | spectinomycin and | |
| | | streptomycin resistance. | |
| | T-Ec.aadA-SPC/STR | 3′ UTR from the Tn7 | 1526-1583 |
| | | adenylyltransferase | |
| | | (AAD(3″)) gene of E. coli. | |

TABLE 5
Compositions of expression cassettes for gene of interest in plant
transformation base vectors

| | | SEQ | | SEQ | | SEQ | | SEQ |
|---|---|---|---|---|---|---|---|---|
| | | ID | | ID | | ID | | ID |
| | promoter | NO | leader | NO | intron | NO | terminator | NO |
| Base | | | | | | | | |
| vector | | | | | | | | |
| for corn | | | | | | | | |
| 1 | P-Os.Act1 | 12581 | L-Os.Act1 | 12592 | I-Os.Act1 | 12596 | T-St.Pis4 | 12598 |
| 2 | P-Hv.Per1 | 12582 | L-Hv.Per1 | 12593 | I-Zm.DnaK | 12597 | T-St.Pis4 | 12598 |
| 3 | P-Zm.RAB17 | 12591 | NONE | / | I-Zm.DnaK | 12597 | T-St.Pis4 | 12598 |
| 4 | P-Zm.NAS2 | 12584 | L-Zm.NAS2 | 12595 | I-Zm.DnaK | 12597 | T-St.Pis4 | 12598 |
| 5 | P-Zm.PPDK | 12585 | L-Zm.PPDK | 12588 | I-Zm.DnaK | 12597 | T-St.Pis4 | 12598 |
| 6 | P-Os.GT1 | 12586 | NONE | / | I-Zm.DnaK | 12597 | T-St.Pis4 | 12598 |
| 7 | P-Zm.PPDK | 12587 | L-Zm.PPDK | 12588 | I-Zm.DnaK | 12597 | T-St.Pis4 | 12600 |
| 8 | P-Os.Act1 | 12581 | L-Os.Act1 | 12592 | I-Os.Act1 | 12597 | T-St.Pis4 | 12598 |
| 9 | P-Zm.PPDK | 12587 | L-Zm.PPDK | 12588 | I-Zm.DnaK | 12597 | T-St.Pis4 | 12600 |
| 10 | P-Os.Act1 | 12581 | L-Os.Act1 | 12592 | I-Os.Act1 | 12596 | T-St.Pis4 | 12598 |
| 11 | P-Zm.SzeinC1 | 12589 | L- | 12601 | I-Zm.DnaK | 12597 | T-St.Pis4 | 12598 |
| | | | Zm.SzeinC1 | | | | | |
| 12 | P-Zm.NAS2 | 12584 | L-Zm.NAS2 | 12595 | I-Zm.DnaK | 12597 | T-St.Pis4 | 12598 |
| Base | | | | | | | | |
| vector | | | | | | | | |
| for | | | | | | | | |
| Soybean | | | | | | | | |
| 13 | P-CaMV.35S- | 12590 | NONE | / | NONE | / | T-Gb.E6 | 12599 |
| | enh | | | | | | | |
| 14 | P-CaMV.35S- | 12590 | NONE | / | NONE | / | T-Gb.E6 | 12599 |
| | enh | | | | | | | |
| 15 | P-Gm.Sphas 1 | 12583 | L- | 12594 | NONE | / | T-Gb.E6 | 12599 |
| | | | Gm.Sphas1 | | | | | |

DNA constructs with some recombinant DNA of interest, e.g., SEQ ID NO: 72, also contain a chloroplast transit peptide adjacent to the recombinant DNA.

[0095] C. Cotton Transformation Vector

[0096] Plasmids for use in transformation of cotton are also prepared. Elements of an exemplary common expression vector plasmid pMON99053 are shown in Table 6 below and FIG. 3. Primers for PCR amplification of protein coding nucleotides of recombinant DNA are designed at or near the start and stop codons of the coding sequence, in order to eliminate most of the 5′ and 3′ untranslated regions. Each recombinant DNA coding for a protein identified in Table 1 is amplified by PCR prior to insertion into the insertion site within the gene of interest expression cassette of

TABLE 6

| | | | Coordinates of |
|---|---|---|---|
| | | | SEQ ID NO: |
| function | name | annotation | 12606 |
| Agro | B-AGRtu.right border | Agro right border sequence, | 11364-11720 |
| transforamtion | | essential for transfer of T-DNA. | |
| Gene of interest | Exp-CaMV.35S- | Enhanced version of the 35S RNA | 7794-8497 |
| expression | enh + ph.DnaK | promoter from CaMV plus the | |
| cassette | | petunia hsp70 5′ untranslated | |
| | | region | |
| | T-Ps.RbcS2-E9 | The 3′ non-translated region of the | 67-699 |
| | | pea RbcS2 gene which functions | |
| | | to direct polyadenylation of the | |
| | | mRNA. | |
| Plant selectable | Exp-CaMV.35S | Promoter from the rice actin 1 | 730-1053 |
| marker | | gene | |
| expression | CR-Ec.nptII-Tn5 | first exon of the rice actin 1 gene | 1087-1881 |
| cassette | T-AGRtu.nos | A 3′ non-translated region of the | 1913-2165 |
| | | nopaline synthase gene of | |
| | | Agrobacterium tumefaciens Ti | |
| | | plasmid which functions to direct | |
| | | polyadenylation of the mRNA. | |
| Agro | B-AGRtu.left border | Agro left border sequence, | 2211-2652 |
| transformation | | essential for transfer of T-DNA. | |
| Maintenance in | OR-Ec.oriV-RK2 | The vegetative origin of | 2739-3135 |
| E. coli | | replication from plasmid RK2. | |
| | CR-Ec.rop | Coding region for repressor of | 4644-4835 |
| | | primer from the ColE1 plasmid. | |
| | | Expression of this gene product | |
| | | interferes with primer binding at | |
| | | the origin of replication, keeping | |
| | | plasmid copy number low. | |
| | OR-Ec.ori-ColE1 | The minimal origin of replication | 5263-5851 |
| | | from the E. coli plasmid ColE1. | |
| | P-Ec.aadA-SPC/STR | romoter for Tn7 | 6382-6423 |
| | | adenylyltransferase (AAD(3″)) | |
| | CR-Ec.aadA-SPC/STR | Coding region for Tn7 | 6424-7212 |
| | | adenylyltransferase (AAD(3″)) | |
| | | conferring spectinomycin and | |
| | | streptomycin resistance. | |
| | T-Ec.aadA-SPC/STR | 3′ UTR from the Tn7 | 7213-7270 |
| | | adenylyltransferase (AAD(3″)) | |
| | | gene of E. coli. | |

### Example 2

### Corn Plant Transformation

[0097] This example illustrates the production and identification of transgenic corn cells in seed of transgenic corn plants having an enhanced agronomic trait, i.e. enhanced nitrogen use efficiency, increased yield, enhanced water use efficiency, enhanced tolerance to cold and/or improved seed compositions as compared to control plants. Transgenic corn cells are prepared with recombinant DNA expressing each of the protein encoding DNAs listed in Table 1 by Agrobacterium-mediated transformation using the corn transformation vectors 1-12 prepared as disclosed in Example 1. Corn transformation is effected using methods disclosed in U.S. Patent Application Publication 2004/0344075 A1 where corn embryos are inoculated and co-cultured with the Agrobacterium tumefaciens strain ABI and the corn transformation vector. To regenerate transgenic corn plants the transgenic callus resulting from transformation is placed on media to initiate shoot development in plantlets which are transferred to potting soil for initial growth in a growth chamber followed by a mist bench before transplanting to pots where plants are grown to maturity. The plants are self fertilized and seed is harvested for screening as seed, seedlings or progeny R2 plants or hybrids, e.g., for yield trials in the screens indicated above.

[0098] Many transgenic events which survive to fertile transgenic plants that produce seeds and progeny plants do not exhibit an enhanced agronomic trait. The transgenic plants and seeds having the transgenic cells of this invention which have recombinant DNA imparting the enhanced agronomic traits are identified by screening for nitrogen use efficiency, yield, water use efficiency, cold tolerance and improved seed composition.

### Example 3

### Soybean Plant Transformation

[0099] This example illustrates the production and identification of transgenic soybean cells in seed of transgenic soybean plants having an enhanced agronomic trait, i.e. enhanced nitrogen use efficiency, increased yield, enhanced water use efficiency, enhanced tolerance to cold and/or improved seed compositions as compared to control plants. Transgenic soybean cells are prepared with recombinant DNA expressing each of the protein encoding DNAs listed in Table 1 by Agrobacterium-mediated transformation using the soybean transformation vectors 13-15 prepared as disclosed in Example 1. Soybean transformation is effected using methods disclosed in U.S. Pat. No. 6,384,301 where soybean meristem explants are wounded then inoculated and co-cultured with the soybean transformation vector, then transferred to selection media for 6-8 weeks to allow selection and growth of transgenic shoots.

[0100] The transformation is repeated for each of the protein encoding DNAs identified in Table 1 in one of the base vectors 13-15.

[0101] Transgenic shoots producing roots are transferred to the greenhouse and potted in soil. Many transgenic events which survive to fertile transgenic plants that produce seeds and progeny plants do not exhibit an enhanced agronomic trait. The transgenic plants and seeds having the transgenic cells of this invention which have recombinant DNA imparting the enhanced agronomic traits are identified by screening for nitrogen use efficiency, yield, water use efficiency, cold tolerance and improved seed composition.

### Example 4

### Cotton Transgenic Plants with Enhanced Agronomic Traits

[0102] Cotton transformation is performed as generally described in WO0036911 and in U.S. Pat. No. 5,846,797. Transgenic cotton plants containing the recombinant DNA having a sequence of SEQ ID NO: 1 through SEQ ID NO: 193 are obtained by transforming with the cotton transformation vector identified in Example 1.

[0103] Progeny transgenic plants are selected from a population of transgenic cotton events under specified growing conditions and are compared with control cotton plants. Control cotton plants are substantially the same cotton genotype but without the recombinant DNA, for example, either a parental cotton plant of the same genotype that was not transformed with the identical recombinant DNA or a negative isoline of the transformed plant. Additionally, a commercial cotton cultivar adapted to the geographical region and cultivation conditions, i.e. cotton variety ST474, cotton variety FM 958, and cotton variety Siokra L-23, are used to compare the relative performance of the transgenic cotton plants containing the recombinant DNA. The specified culture conditions are growing a first set of transgenic and control plants under “wet” conditions, i.e. irrigated in the range of 85 to 100 percent of evapotranspiration to provide leaf water potential of −14 to −18 bars, and growing a second set of transgenic and control plants under “dry” conditions, i.e. irrigated in the range of 40 to 60 percent of evapotranspiration to provide a leaf water potential of −21 to −25 bars. Pest control, such as weed and insect control is applied equally to both wet and dry treatments as needed. Data gathered during the trial includes weather records throughout the growing season including detailed records of rainfall; soil characterization information; any herbicide or insecticide applications; any gross agronomic differences observed such as leaf morphology, branching habit, leaf color, time to flowering, and fruiting pattern; plant height at various points during the trial; stand density; node and fruit number including node above white flower and node above crack boll measurements; and visual wilt scoring. Cotton boll samples are taken and analyzed for lint fraction and fiber quality. The cotton is harvested at the normal harvest timeframe for the trial area. Enhanced water use efficiency is indicated by increased yield, improved relative water content, enhanced leaf water potential, increased biomass, enhanced leaf extension rates, and improved fiber parameters.

[0104] Cotton plants with the transgenic cells by this invention are identified from among the transgenic cotton plants by agronomic trait screening as having increased yield and enhanced water use efficiency.

### Example 5

### Homolog Identification

[0105] This example illustrates the identification of homologs of proteins encoded by the DNA identified in Table 1 which is used to provide transgenic seed and plants having enhanced agronomic traits. From the sequence of the homologs, homologous DNA sequence can be identified for preparing additional transgenic seeds and plants of this invention with enhanced agronomic traits.

[0106] An “All Protein Database” was constructed of known protein sequences using a proprietary sequence database and the National Center for Biotechnology Information (NCBI) non-redundant amino acid database (nr.aa). For each organism from which a polynucleotide sequence provided herein was obtained, an “Organism Protein Database” was constructed of known protein sequences of the organism; it is a subset of the All Protein Database based on the NCBI taxonomy ID for the organism.

[0107] The All Protein Database was queried using amino acid sequences provided herein as SEQ ID NO: 194 through SEQ ID NO: 386 using NCBI “blastp” program with E-value cutoff of 1e-8. Up to 1000 top hits were kept, and separated by organism names. For each organism other than that of the query sequence, a list was kept for hits from the query organism itself with a more significant E-value than the best hit of the organism. The list contains likely duplicated genes of the polynucleotides provided herein, and is referred to as the Core List. Another list was kept for all the hits from each organism, sorted by E-value, and referred to as the Hit List.

[0108] The Organism Protein Database was queried using polypeptide sequences provided herein as SEQ ID NO: 194 through SEQ ID NO: 386 using NCBI “blastp” program with E-value cutoff of 1e-4. Up to 1000 top hits were kept. A BLAST searchable database was constructed based on these hits, and is referred to as “SubDB”. SubDB was queried with each sequence in the Hit List using NCBI “blastp” program with E-value cutoff of 1e-8. The hit with the best E-value was compared with the Core List from the corresponding organism. The hit is deemed a likely ortholog if it belongs to the Core List, otherwise it is deemed not a likely ortholog and there is no further search of sequences in the Hit List for the same organism. Homologs from a large number of distinct organisms were identified and are reported by amino acid sequences of SEQ ID NO: 387 through SEQ ID NO: 12580. These relationships of proteins of SEQ ID NO: 194 through 386 and homologs of SEQ ID NO: 387 through 12580 is identified in Table 7. The source organism for each homolog is found in the Sequence Listing.

TABLE 7

| SEQ ID NO: | homolog SEQ ID NOs | | | | | | | | | | | |
|---|---|---|---|---|---|---|---|---|---|---|---|---|
| 196: | 3549 | 1976 | 8970 | 12287 | 11799 | 758 | 6083 | 9821 | 8256 | 7610 | 7869 | 4091 |
| | 1111 | 1113 | 8630 | 7054 | 10917 | 3094 | 6712 | 9080 | 2702 | 2718 | 1130 | 1131 |
| | 5382 | 6582 | 559 | 2169 | 1134 | 1132 | 1139 | 2295 | 11615 | 8090 | 2133 | 5063 |
| | 5000 | 10336 | 12279 | 3828 | 7214 | 1485 | 2156 | 2232 | 2229 | 2242 | 2209 | 2203 |
| | 2177 | 2207 | 2160 | 2151 | 11166 | 3220 | | | | | | |
| 197: | 3549 | 1976 | 4850 | 8970 | 12287 | 11799 | 758 | 6083 | 9821 | 4946 | 11935 | 8256 |
| | 7610 | 7869 | 1841 | 9456 | 4091 | 1113 | 1111 | 8630 | 7054 | 7880 | 6876 | 6237 |
| | 6712 | 9080 | 2702 | 2718 | 1130 | 1131 | 5382 | 6582 | 559 | 2169 | 1134 | 1132 |
| | 1139 | 2295 | 11615 | 8090 | 5063 | 5000 | 10336 | 12279 | 3828 | 7214 | 1485 | 2156 |
| | 2232 | 2229 | 2242 | 2209 | 2203 | 2207 | 2177 | 2160 | 2151 | 7622 | 1377 | 6970 |
| | 6143 | | | | | | | | | | | |
| 198: | 3549 | 1976 | 2210 | 6154 | 1028 | 1769 | 758 | 12325 | 9821 | 2973 | 4946 | 11935 |
| | 8256 | 7610 | 5387 | 5384 | 5361 | 10434 | 8983 | 5051 | 4091 | 2766 | 6248 | 1113 |
| | 1111 | 8630 | 9080 | 2702 | 2718 | 1131 | 1130 | 5382 | 7052 | 6582 | 1134 | 1132 |
| | 1139 | 11615 | 2295 | 8090 | 6572 | 4803 | 1970 | 8113 | 3883 | 9565 | 1707 | 517 |
| | 12372 | 11514 | 5441 | 5421 | 3828 | 7214 | 1485 | 1097 | | | | |
| 199: | 3549 | 4850 | 2210 | 8970 | 12287 | 2360 | 11500 | 11799 | 6912 | 1028 | 6154 | 758 |
| | 5783 | 6083 | 9552 | 12325 | 9821 | 2973 | 4946 | 8256 | 7610 | 5387 | 5361 | 5384 |
| | 5300 | 10434 | 8983 | 5051 | 1111 | 1113 | 8630 | 9080 | 2702 | 2718 | 1130 | 1131 |
| | 5382 | 7052 | 6582 | 559 | 2169 | 1134 | 1132 | 1139 | 8090 | 6572 | 11350 | 7138 |
| | 1730 | 10762 | 11345 | 527 | 8679 | 5063 | 5000 | 2879 | 517 | 7986 | 12372 | 11514 |
| | 10336 | 6955 | 12279 | 5441 | 5421 | 3828 | 7214 | 1485 | 2229 | 2207 | 2242 | 2232 |
| | 2209 | 2203 | 2156 | 2160 | 2151 | 5328 | 8248 | | | | | |
| 200: | 11500 | 5617 | 8150 | 3321 | 2181 | 4364 | 1769 | 1028 | 5122 | 11328 | 6042 | 2711 |
| | 1760 | 4874 | 4098 | 1914 | 11853 | 7334 | 6504 | 10624 | 2638 | 11705 | 7913 | 12171 |
| | 12198 | 10430 | 12189 | 12219 | 10404 | 10432 | 10408 | 6957 | 8282 | 6184 | 11935 | 580 |
| | 10470 | 1940 | 11039 | 8629 | 1096 | 742 | 12505 | 5801 | 11671 | 4006 | 12473 | 6778 |
| | 2607 | 10849 | 6279 | 7500 | 2657 | 5584 | 8059 | 2622 | 2043 | 3269 | 10363 | 6186 |
| | 9631 | 9243 | 11098 | 1168 | 6690 | 8584 | 10577 | 687 | 2977 | 9804 | 9337 | 6306 |
| | 9118 | 4356 | 10225 | 9740 | 6652 | 5251 | 12514 | 7463 | 706 | 3048 | 3780 | 1925 |
| | 11765 | 9803 | 10824 | 3004 | 5275 | 8642 | 1664 | 12173 | 4049 | 2031 | 11681 | 8980 |
| | 2339 | 9172 | 11955 | 10576 | 9333 | 10482 | 813 | 5656 | 4628 | 10843 | 2352 | 5484 |
| | 2856 | 4313 | 2877 | 1633 | 11143 | 6066 | 7722 | 7746 | 10941 | 11741 | 2941 | 2745 |
| | 11364 | 7638 | 7884 | 1328 | 5606 | 6580 | 11262 | 7483 | 8156 | 412 | 453 | 7288 |
| | 6842 | 1286 | 7896 | 9734 | 6570 | 10595 | 8863 | 1246 | 7112 | 12464 | 1373 | 3779 |
| | 2705 | 5044 | 4017 | 5712 | 4619 | 3539 | 1029 | 1610 | 5976 | 4964 | 11724 | 9037 |
| | 8989 | 1126 | 4073 | 395 | 10344 | 5428 | 4845 | 1611 | 10484 | 4496 | 3517 | 3418 |
| | 10294 | 2427 | 3442 | 9747 | 5534 | 9571 | 1125 | 9720 | 9319 | 12346 | 3417 | 1588 |
| | 2779 | 4611 | 5312 | 10179 | 6867 | 3049 | 3051 | 9900 | 1265 | 9463 | 4576 | 764 |
| | 6024 | 432 | 8921 | 11379 | 2141 | 1755 | 9498 | 7395 | 8179 | 7462 | 7279 | 8729 |
| | 9676 | 11351 | 1758 | 10907 | 4995 | 1205 | 608 | 12100 | 8331 | 8341 | 10326 | 6852 |
| | 11947 | 6597 | 2475 | 6407 | 8077 | 10788 | 11815 | 5269 | 489 | 9317 | 5574 | 11240 |
| | 11821 | 11485 | 2868 | 9753 | 676 | 11223 | 1924 | 8045 | 1689 | 12035 | 11980 | 5906 |
| | 7805 | 6728 | 5177 | 1711 | 1715 | 5050 | 1601 | 11242 | 1010 | 11286 | 7814 | 7152 |
| | 3730 | 5888 | 615 | 11078 | 9681 | 2883 | 8522 | 8210 | 4450 | 11632 | 7573 | 6031 |
| | 2713 | 3861 | 9480 | 5307 | 7874 | 2048 | 5136 | 8625 | 2168 | 4580 | 10634 | 5772 |
| | 5082 | 8731 | 2678 | 9311 | 10561 | 7803 | 4408 | 6227 | 12026 | 11234 | 7247 | 5578 |
| | 9683 | 3999 | 2953 | 2193 | 3370 | 11542 | 10711 | 6403 | 4207 | 11251 | 8447 | 6805 |
| | 727 | 951 | 737 | 9090 | 1828 | 1928 | 2277 | 986 | 739 | 7044 | 10025 | 7409 |
| | 9449 | 944 | 8427 | 10911 | 3965 | 1299 | 5294 | 6332 | 5145 | 9418 | 6150 | 9008 |
| | 1004 | 3831 | 5157 | 6968 | 11922 | 7392 | 9855 | 5061 | 5448 | 6857 | 2354 | 2879 |
| | 620 | 7986 | 10208 | 4520 | 9003 | 8015 | 525 | 8013 | 11884 | 10726 | 12493 | 9260 |
| | 8508 | 5693 | 1450 | 4258 | | | | | | | | |
| 201: | 7470 | 10842 | 5790 | 6772 | 1530 | 9966 | 9973 | 10368 | 655 | 4677 | 4157 | 1015 |
| | 9967 | 9732 | 1621 | 1702 | 2553 | 11599 | 9342 | 3724 | 6613 | 4462 | 2681 | 4577 |
| | 3827 | 8039 | 2557 | 8538 | 9605 | 12321 | 3228 | 2139 | 9255 | 11428 | 3022 | 5404 |
| | 9564 | 12166 | 8047 | 11255 | 11888 | 1492 | 5870 | 4250 | 554 | 12481 | 8585 | 5674 |
| | 2062 | 2021 | 6718 | 2810 | 4015 | 12306 | 8941 | 3135 | 7850 | 7009 | 4247 | 5760 |
| | 643 | 2512 | 2422 | 8709 | 5661 | 2437 | 11487 | 8706 | 3703 | 6811 | 5006 | 6000 |
| | 2290 | 11973 | 8426 | 2912 | 6498 | 10642 | 8257 | 5362 | 1189 | 996 | 1740 | 10904 |
| | 5778 | 4372 | 12095 | 1616 | 9708 | 1598 | 4525 | 7513 | 1934 | 10939 | 9044 | 7273 |
| | 6105 | 6950 | 12122 | 5936 | 2802 | 3711 | 8640 | 6644 | 9842 | 6994 | 2587 | 7510 |
| | 8609 | 1877 | 5408 | 8009 | 9943 | 8475 | 4333 | 8476 | 2651 | 5379 | 11144 | |
| 202: | 7477 | 1676 | 4448 | 2400 | 6045 | 6940 | 8526 | 9923 | 11995 | 8913 | 10513 | 634 |
| | 7969 | 11746 | 6446 | 4371 | 1018 | 4026 | 10874 | 11604 | 5505 | 9219 | 4140 | 11205 |
| | 12025 | 3605 | 1669 | 1987 | 2822 | 2279 | 10124 | 11930 | 4546 | 3504 | 1950 | 7696 |
| | 1604 | 4492 | 710 | 11737 | 3171 | 8574 | 11646 | 9030 | 765 | | | |
| 203: | 9581 | 1789 | 9205 | 10127 | 507 | 7859 | 5085 | 10794 | 2201 | 5072 | 1384 | 7541 |
| | 12225 | 5253 | 4000 | 8561 | 1469 | 3834 | 12504 | 9837 | 7137 | 4670 | 9143 | 1972 |
| | 230 | 11807 | 7457 | 3867 | 12503 | 9644 | 10286 | 686 | 3416 | 8708 | 913 | 9391 |
| | 9343 | 1949 | 971 | 11938 | 12315 | 7511 | 9076 | 8346 | 3455 | 1790 | 6685 | 11054 |
| | 10989 | 4775 | 9544 | 2197 | 3225 | 1198 | 7996 | 9715 | 6751 | 11217 | 3189 | 10361 |
| | 3589 | 2768 | 4753 | 393 | 7426 | 9423 | 2744 | 1339 | 10139 | 2332 | 8771 | 3079 |
| | 4312 | 7098 | 11256 | 1681 | 642 | 411 | 5179 | 11964 | 5793 | 8376 | 2386 | 9500 |
| | 2401 | 5669 | 10501 | 1939 | 11311 | 4977 | 7401 | 8266 | 12472 | 480 | 10947 | 12116 |
| | 539 | 7591 | 1020 | 1493 | 9017 | 2513 | 3100 | 4405 | 5679 | 3373 | 3795 | 10805 |
| | 11445 | 10653 | 5898 | 5556 | 12139 | 12448 | 8448 | 5245 | 12533 | 10039 | 1324 | 2498 |
| | 9955 | 6104 | 5516 | | | | | | | | | |
| 204: | 3474 | 7088 | 4085 | 10331 | 6972 | 7065 | 2023 | 10909 | 5915 | 5913 | 6491 | 5970 |
| | 6936 | 5920 | 5919 | 5966 | 5944 | 5738 | 5968 | 6663 | 1233 | 5947 | 2258 | 10694 |
| | 9592 | 4692 | 12344 | 11227 | 6753 | 8618 | | | | | | |
| 205: | 9144 | 6127 | 6445 | 4401 | 3645 | 9756 | 5274 | 8302 | 1548 | 9875 | 9979 | 1922 |
| | 1941 | 9100 | 7274 | 12121 | 11051 | 11528 | 9523 | 7830 | 3543 | 6760 | 1979 | 3997 |
| | 9779 | 9635 | 4955 | 1818 | 946 | 5201 | 12580 | 8270 | 10531 | 415 | 4910 | 1802 |
| | 2256 | 2979 | 7899 | 3139 | 3777 | 10332 | 10536 | 4842 | 8280 | 9000 | 1327 | 10950 |
| | 8576 | 513 | 4263 | 6884 | 8684 | 3877 | 7243 | 7262 | 6420 | 1424 | 2680 | 10546 |
| | 9965 | 11711 | 6656 | 1164 | 1160 | 5248 | 4812 | 11605 | 3598 | 8386 | 12446 | 3922 |
| | 10305 | 467 | 5963 | 948 | 11998 | 4655 | 4064 | 446 | 6112 | 6111 | 4689 | 3743 |
| | 449 | 1123 | 11231 | 11434 | 2456 | 471 | 11629 | 6249 | 2152 | 2171 | 6494 | 8636 |
| | 11953 | 5487 | 7844 | 6164 | 11566 | 1495 | 4623 | 6920 | 3447 | 3181 | 3153 | 1081 |
| | 11890 | 3476 | 1127 | 1195 | 1192 | 12349 | 3600 | 11090 | 5377 | 8022 | 7160 | 11091 |
| | 10643 | 7586 | 12247 | 6202 | 6217 | 4617 | 2237 | 2380 | 6219 | 1756 | 7456 | 925 |
| | 3237 | | | | | | | | | | | |
| 206: | 5804 | 12016 | 10678 | 10712 | 10735 | 7448 | 9024 | 10738 | 10708 | 12014 | 10638 | 7423 |
| | 7421 | 7417 | 309 | 10586 | 10603 | 10589 | 10584 | 7444 | 10644 | 7446 | 5047 | 10645 |
| | 10646 | 12280 | 207 | 9710 | 2096 | 11839 | 9709 | 1612 | 8993 | 10037 | 6780 | 11613 |
| | 9034 | 306 | 307 | 2004 | 11103 | 8166 | 6931 | 7311 | 6922 | 8933 | 10494 | 3783 |
| | 308 | 11857 | 12034 | 3781 | 916 | 6666 | 9745 | 9140 | 6285 | 12449 | 10356 | 9452 |
| | 4275 | 12246 | 9728 | 9405 | 2987 | 7223 | 2067 | 3934 | 8138 | 11430 | 9052 | 12318 |
| | 6252 | 410 | 2407 | 6792 | 3564 | 2073 | 4786 | 11326 | 9877 | 3397 | 310 | 11058 |
| | 9105 | 8474 | 12047 | 6860 | 7715 | 860 | 8446 | 4050 | 6973 | 6725 | 9408 | 4088 |
| | 3842 | 1902 | 4332 | 2342 | 1701 | 10402 | 11870 | 4672 | 3986 | 10725 | 12181 | 1973 |
| | 3950 | 9992 | 4578 | 10224 | 862 | 7045 | 11785 | 4789 | 5465 | 8088 | 3553 | 10189 |
| | 9964 | 2793 | 6677 | 10001 | 3375 | 4200 | 10391 | 1361 | 1234 | 10741 | 10641 | 10683 |
| | 11712 | 10743 | 10575 | 10581 | 4747 | | | | | | | |
| 207: | 12016 | 7448 | 12014 | 7423 | 309 | 5047 | 9710 | 2096 | 11839 | 1612 | 8993 | 10037 |
| | 6780 | 9034 | 307 | 306 | 2004 | 6931 | 6922 | 8933 | 10494 | 308 | 11857 | 3781 |
| | 916 | 9745 | 6666 | 9140 | 6285 | 12449 | 9452 | 8035 | 10356 | 11492 | 12021 | 4443 |
| | 10064 | 8344 | 2067 | 3934 | 4275 | 8138 | 12246 | 9405 | 2987 | 9728 | 11430 | 9052 |
| | 12318 | 6252 | 7223 | 410 | 6792 | 3564 | 2073 | 4786 | 9877 | 3397 | 310 | 11058 |
| | 8474 | 9105 | 11870 | 12047 | 4672 | 3986 | 6860 | 7715 | 860 | 2342 | 8446 | 1701 |
| | 4050 | 10402 | 6973 | 9408 | 4088 | 3842 | 4332 | 6725 | 1902 | 10725 | 12181 | 6779 |
| | 1973 | 2823 | 9849 | 10154 | 862 | 7045 | 11785 | 4789 | 5465 | 10224 | 8088 | 4578 |
| | 10189 | 3553 | 2793 | 6677 | 10001 | 3375 | 4200 | 10391 | 3950 | 9992 | 1361 | 1468 |
| | 9964 | 7410 | 2176 | 10741 | 11712 | 10743 | 10575 | 10581 | 206 | | | |
| 208: | 8564 | 10720 | 7580 | 12251 | 9922 | 5975 | 8617 | 4257 | 645 | 3210 | 4615 | 8228 |
| | 747 | 1408 | 10412 | 3357 | 4397 | 7547 | 10137 | 3018 | 7289 | 11413 | 1687 | 2058 |
| | 4738 | 1274 | 12252 | 8769 | 6626 | 4708 | 275 | 11442 | 2843 | 10230 | 6198 | 10814 |
| | 2304 | 9207 | | | | | | | | | | |
| 209: | 9386 | 8213 | 8184 | 6094 | 8240 | 8242 | 8209 | 8211 | 5327 | 9254 | 10652 | 9428 |
| | 11965 | 11812 | 11814 | 9275 | 9274 | 6208 | 8173 | 7971 | 9276 | 9278 | 9280 | 9297 |
| | 9253 | 8100 | 9330 | 9303 | 9305 | 4986 | 4730 | 10770 | 11755 | 3994 | 5070 | 7569 |
| | 5734 | 3989 | 3985 | 9531 | 9214 | 9429 | 9365 | 11108 | 6372 | 5373 | 2117 | 3351 |
| | 12521 | 4075 | 1896 | 3535 | 10982 | 4340 | 2371 | 858 | 3813 | 10602 | 5493 | 5548 |
| | 10627 | 5552 | 2460 | 4278 | 1787 | 3297 | 2964 | 2965 | 2962 | 3630 | 9434 | 3625 |
| | 4592 | 10087 | 8272 | 3870 | 4415 | 8484 | 5940 | 10629 | 10623 | 10636 | 10174 | 10667 |
| | 5553 | 10670 | 10671 | 2562 | 2568 | 8456 | 5226 | 5200 | 11493 | 7169 | 9374 | 7962 |
| | 11722 | 5462 | 2866 | 10150 | 10170 | 10153 | 4425 | 1856 | 4727 | 9772 | 6514 | 2550 |
| | 9367 | 4482 | 9458 | 9455 | 2869 | 2162 | 9300 | 9302 | 10632 | 3616 | | |
| 210: | 2857 | 3612 | 6601 | 1183 | 1181 | 1182 | 6604 | 1159 | 10118 | 10806 | 11819 | 11745 |
| | 6639 | 11715 | 7049 | 10888 | 10024 | 7122 | 8076 | 8876 | 8903 | 1266 | 10535 | 624 |
| | 7532 | 4011 | 5266 | 6168 | 6326 | 11178 | 2641 | 2461 | 6646 | 8758 | 7990 | 9318 |
| | 8505 | 7393 | 2727 | 6008 | 3940 | 9115 | 5137 | 9096 | 1148 | 1363 | 10193 | 9377 |
| | 9250 | 5445 | 11200 | 11273 | 11276 | | | | | | | |
| 211: | 11176 | 8570 | 11245 | 10274 | 6081 | 7181 | 6450 | 4624 | 9320 | 6129 | 984 | 7196 |
| | 7388 | 2804 | 542 | 11805 | | | | | | | | |
| 212: | 2393 | 3407 | 11789 | 8124 | 2340 | 3714 | 1395 | 1433 | 12303 | 375 | 2814 | 6364 |
| | 9438 | 3292 | 12390 | 2984 | 6746 | 9695 | 675 | 2101 | 3618 | 12081 | 6128 | 1892 |
| | 3448 | 9864 | 6152 | 2844 | 7381 | 4291 | 4973 | 5447 | 10140 | 11877 | 8566 | 7624 |
| | 6472 | 10665 | 2089 | 9925 | 938 | 8536 | 6156 | 10608 | 11433 | 5967 | 1511 | 11974 |
| | 12573 | 4734 | 11501 | 5076 | 12428 | 8275 | 2769 | 4402 | 11854 | | | |
| 213: | 4784 | 5997 | 2399 | 6338 | 3933 | 4092 | 10151 | 2740 | 10610 | | | |
| 214: | 10855 | 2954 | 6766 | 2958 | 8910 | 12101 | 6783 | 3620 | 7658 | 7785 | 3180 | 9266 |
| | 9246 | 9247 | 1792 | 8649 | 5777 | 10173 | 10178 | 3461 | 9046 | 5810 | 5806 | 1226 |
| | 3287 | 12557 | 8375 | 12235 | 8403 | 8384 | 7414 | 5429 | 4396 | 6501 | 8433 | 7094 |
| | 8413 | 7920 | 5588 | 9853 | 6890 | 6483 | 9273 | 9841 | 683 | 9313 | 6871 | 6899 |
| | 6877 | 2491 | 4890 | 9129 | 5744 | 9572 | 11085 | 12037 | 11048 | 12113 | 613 | 9424 |
| | 6574 | 12066 | 7504 | 5863 | 8409 | 4273 | 10572 | 5923 | 1895 | 1893 | 9040 | 3665 |
| | 5481 | 7755 | 8408 | 924 | 1454 | 12140 | 8378 | 5510 | 5509 | 5513 | 3124 | 3103 |
| | 11911 | 4141 | 2082 | 2247 | 4630 | 8299 | 6667 | 702 | 8975 | 6801 | 745 | 741 |
| | 779 | 770 | 772 | 744 | 771 | 11549 | 719 | 7117 | 5565 | 11875 | | |
| 215: | 11919 | 9154 | 5594 | 10308 | 2827 | 2830 | 3408 | 3403 | 2471 | 5367 | 1120 | 5371 |
| | 5081 | 4880 | 10931 | 7367 | 6883 | 11808 | 6136 | 2549 | 11638 | 6868 | 8315 | 3118 |
| | 10508 | 10877 | 650 | 5616 | 4115 | 3026 | 3028 | 9516 | 785 | 9083 | 7596 | 8108 |
| | 4176 | 6525 | 5765 | 3802 | 1806 | 8081 | 7208 | 8893 | 12007 | 8654 | 9048 | 9072 |
| | 8575 | 8423 | 6300 | 6409 | 4165 | 6095 | 9477 | 2485 | 10112 | 5117 | 2278 | 2281 |
| | 2264 | 2284 | 6055 | 2348 | 4251 | 8187 | 10826 | 9660 | 9216 | 2777 | 4403 | 7239 |
| | 2643 | 782 | 2262 | 8111 | 1799 | 781 | 2696 | 8265 | 821 | 6575 | 9029 | 6259 |
| | 5907 | 2153 | 9132 | 1008 | 9697 | 11658 | 5996 | 6135 | 3512 | | | |
| 216: | 1063 | 9995 | 9748 | 8083 | 4921 | 10081 | 2976 | 7153 | 8380 | 1072 | 2845 | 2124 |
| | 5604 | 2742 | | | | | | | | | | |
| 217: | 1063 | 9995 | 9748 | 8083 | 4921 | 10081 | 2976 | 7153 | 8380 | 1072 | 2845 | 2124 |
| | 5604 | 2742 | | | | | | | | | | |
| 218: | 10265 | 3604 | 11692 | 2087 | 2100 | 2084 | 4972 | 8627 | 4940 | 10555 | 4941 | 652 |
| | 1430 | 11778 | 7581 | 915 | 1478 | 8934 | 1244 | 9538 | 6106 | 9540 | 6923 | 5854 |
| | 6892 | 9462 | 3486 | 10996 | 12018 | 9346 | 3284 | 6742 | 8247 | | | |
| 219: | 5171 | 3451 | 10952 | 6452 | 5333 | 11383 | 12420 | 9816 | 9099 | 11249 | 528 | 11871 |
| | 11060 | 8935 | 3521 | 3063 | 10253 | 9510 | 10954 | 6303 | 6941 | 523 | 904 | 5364 |
| | 4534 | 1993 | 9623 | 3245 | 12506 | 8843 | 10612 | 7200 | 2319 | 7201 | 1746 | 9164 |
| | 1043 | | | | | | | | | | | |
| 220: | 6376 | 1316 | 5391 | 12526 | 7194 | 2996 | 3154 | 10569 | 11756 | 11824 | 3924 | 9004 |
| | 5150 | 5993 | 10023 | 5309 | 10233 | 5582 | 9183 | 5649 | 2780 | 11917 | 6719 | 11145 |
| | 10056 | 2516 | 1372 | 5622 | 7269 | 2665 | 1402 | 5885 | 7636 | 6193 | 3223 | 2719 |
| | 6657 | 1867 | 7660 | 12334 | 9360 | 5492 | 2710 | 2076 | 8465 | 7571 | 11887 | 2033 |
| | 8847 | 3260 | 10323 | 11018 | 7553 | 6905 | 5747 | 10773 | 5018 | 9023 | 9420 | 9484 |
| | 9512 | 8291 | 2650 | 4553 | 2233 | 4983 | 7834 | 11916 | 8565 | 4123 | 1090 | 3981 |
| | 610 | 2885 | 5427 | 3349 | 649 | 9974 | 10523 | 10337 | 5840 | 8815 | 6996 | 11041 |
| | 1321 | 11532 | 11331 | 9757 | 6755 | 2327 | 2730 | 5199 | 5280 | 11943 | 3656 | 6297 |
| | 4570 | 2983 | 6557 | 12145 | 2376 | 7618 | 6924 | 9049 | 10975 | 8678 | 12452 | 7263 |
| | 2204 | 3741 | 7210 | 7502 | 4325 | 11408 | 1350 | 6089 | 2892 | 8054 | 8643 | 2501 |
| | 1647 | 11693 | 6378 | 1729 | 6966 | 8734 | 9027 | 8827 | 5647 | 9075 | 7286 | 659 |
| | 4113 | 6496 | 4454 | 11650 | 4378 | 2224 | 2687 | 1763 | 830 | 3255 | 5001 | 3830 |
| | 6495 | 3121 | 1757 | 7740 | 8530 | 2770 | 1866 | 459 | 2049 | 4814 | 12517 | 2408 |
| | 8583 | 6850 | 7550 | 5545 | 2042 | 3709 | 5474 | 11062 | 4761 | 10345 | 7778 | 1449 |
| | 1562 | 8901 | 4943 | 10916 | 11403 | 6820 | 3167 | 1997 | 7484 | 9833 | 12022 | 8573 |
| | 5100 | 5639 | 7158 | 8791 | 9723 | 4484 | 10282 | 1334 | 11312 | 11317 | 4294 | 9400 |
| | 4982 | 7125 | 2655 | 10854 | 9131 | 992 | 5153 | 2528 | 12519 | 12187 | 6818 | 799 |
| | 861 | 11120 | 11361 | 6634 | 12230 | 10852 | 8817 | 3105 | 9513 | 8235 | | |
| 221: | 6205 | 11358 | 3072 | 2888 | 2907 | 6203 | 2800 | 7221 | 4750 | 3627 | 12485 | 2816 |
| | 10896 | 4463 | 3774 | 8273 | 5002 | 4122 | 8581 | 8364 | 3273 | 6044 | 6503 | 6451 |
| | 6887 | 4226 | 5120 | 9987 | 679 | 12019 | 1695 | 939 | 9726 | 8964 | 2326 | 6178 |
| | 6080 | 8551 | 12220 | 926 | 10271 | 3458 | 983 | 6773 | 5354 | 551 | 12326 | 1673 |
| | 10474 | 7111 | 503 | 3261 | 7427 | 7498 | 5710 | 9522 | 12089 | 8842 | 8147 | 8799 |
| | 9369 | 2355 | 6063 | 3582 | 3537 | 3557 | 1618 | 2519 | 10121 | 9781 | 10031 | 1438 |
| | 4529 | 11657 | 7069 | 3979 | 1260 | 8752 | 9515 | 1762 | 10093 | 875 | 12460 | 12052 |
| | 9166 | 7493 | 12523 | 10742 | 10451 | 8622 | 8931 | 10210 | 7668 | 3177 | 3657 | 6276 |
| | 625 | 6423 | | | | | | | | | | |
| 222: | 9766 | 2574 | 8653 | 12518 | 6881 | 10011 | 1281 | 4435 | 3555 | 696 | 5489 | 10478 |
| | 6961 | 6001 | 1591 | 1453 | 10635 | 2267 | 6727 | 12366 | 4551 | 1889 | 1367 | 1388 |
| | 9264 | 8099 | 5016 | 1033 | 4094 | 12546 | 7145 | 6511 | 1331 | 1524 | 3894 | 1943 |
| | 8569 | 11313 | 5235 | | | | | | | | | |
| 223: | 12210 | 2632 | 5689 | 5995 | 9108 | 6848 | 3162 | 5357 | 9825 | 6099 | 9769 | 11406 |
| | 12011 | 4089 | 11037 | 2154 | 7634 | 2930 | 6937 | | | | | |
| 224: | 11851 | 9599 | 392 | 3514 | 5363 | 9918 | 7949 | 12550 | 981 | 8255 | 3499 | 2997 |
| | 9043 | 6076 | 2056 | 2922 | 11064 | 11131 | 9209 | 5316 | 10222 | 11118 | 1947 | 4743 |
| 225: | 12336 | 2351 | 3767 | 1826 | | | | | | | | |
| 226: | 9174 | 12242 | 516 | 9436 | 5692 | 6101 | 8462 | 9960 | 3910 | | | |
| 227: | 882 | 7014 | 8781 | 8246 | 10705 | 2703 | 8520 | 6497 | 7900 | 6599 | 3575 | 3216 |
| 228: | 2359 | 5356 | 6318 | 6123 | 588 | 7908 | 6312 | 4748 | 9929 | 6824 | 6509 | |
| 229: | 9744 | 8168 | 1420 | 6853 | 7687 | 2503 | 7653 | 5252 | 787 | 6057 | 2759 | 8114 |
| | 9054 | 8122 | 8127 | 4410 | 5238 | 4675 | 7892 | 11484 | 12365 | 11744 | 3437 | 6705 |
| | 3241 | 11187 | | | | | | | | | | |
| 230: | 9581 | 9205 | 10794 | 5085 | 2201 | 1384 | 4000 | 8605 | 4670 | 1972 | 10286 | 11576 |
| | 686 | 913 | 2768 | 203 | 393 | 4753 | 1339 | 2332 | 8771 | 9423 | 7426 | 2744 |
| | 3079 | 10139 | 4312 | 11256 | 7098 | 642 | 1681 | 411 | 11964 | 5179 | 1324 | 9955 |
| | 6104 | 5516 | 9644 | 11807 | 7457 | | | | | | | |
| 231: | 12356 | 4958 | 6943 | 8532 | 8516 | 9081 | 4754 | 8450 | 8451 | 10677 | 4939 | 12575 |
| | 11787 | 7205 | 4213 | 972 | 3291 | 9604 | 11517 | 7192 | 10860 | 5598 | 12538 | 4035 |
| | 11116 | 695 | 7007 | 479 | 4154 | 10733 | | | | | | |
| 232: | 641 | 10835 | 7416 | 7705 | 8597 | 5506 | 5365 | 2998 | 4911 | 1710 | 4507 | 7519 |
| | 1965 | | | | | | | | | | | |
| 233: | 7211 | 12486 | 7508 | 11321 | 5086 | 11818 | 8707 | 9321 | 1682 | 4612 | 3885 | 10374 |
| | 3698 | 2956 | 2709 | 2789 | 9060 | 3654 | 4690 | 9089 | 7726 | 3369 | 8385 | 2927 |
| | 2192 | 5052 | 11202 | 11758 | 10190 | 5874 | 8038 | 8631 | 537 | 10655 | 4768 | 2120 |
| | 3687 | 4281 | 11320 | 6521 | 4769 | 7545 | 7786 | 7407 | 12108 | 9206 | 12454 | 2147 |
| | 7282 | 12432 | 3610 | 8128 | 5956 | 3069 | | | | | | |
| 234: | 9373 | 9421 | 11561 | 11557 | 12294 | 10301 | 9284 | 6616 | 1308 | 6809 | 3915 | 11093 |
| | 3919 | 11088 | 11597 | 11298 | 11592 | 6281 | 3917 | 11137 | 1726 | 11130 | 1230 | 3689 |
| | 4740 | 3725 | 11047 | 2975 | 6172 | 1216 | 3544 | 4142 | 7375 | 746 | 11962 | 6474 |
| | 12427 | | | | | | | | | | | |
| 235: | 9373 | 9421 | 11561 | 11557 | 12294 | 10301 | 9284 | 6616 | 1308 | 6809 | 3915 | 11093 |
| | 3919 | 11088 | 11597 | 11298 | 11592 | 6281 | 3917 | 11137 | 1726 | 11130 | 1230 | 3689 |
| | 4740 | 3725 | 11047 | 2975 | 6172 | 1216 | 3544 | 4142 | 7375 | 746 | 11962 | 6474 |
| | 12427 | | | | | | | | | | | |
| 236: | 444 | 10758 | 1559 | 12502 | 889 | 9874 | 9788 | 7310 | 12020 | 6831 | 7980 | 10109 |
| | 5949 | 6731 | 11689 | 7825 | 3697 | 1264 | 4393 | 548 | 2268 | 1773 | 3208 | 1147 |
| | 4029 | 9056 | 1141 | 7469 | 5188 | 10443 | 7314 | 1452 | 1744 | 5383 | | |
| 237: | 5650 | 5881 | 10697 | 3343 | 2506 | 6706 | 9195 | 3119 | 609 | 11113 | 12263 | 12264 |
| | 9501 | 8410 | 8925 | 3221 | 7983 | 7956 | 933 | 2361 | 8269 | 9921 | 6336 | 10563 |
| | 632 | 12541 | 10155 | 10751 | 9511 | 7976 | 6351 | 5482 | 10797 | 4571 | 1776 | 12112 |
| | 7190 | 1900 | 9324 | 6339 | 7001 | 2317 | 9820 | 7015 | 6384 | 4917 | 11822 | 4227 |
| | 11377 | 6229 | 10949 | 11498 | 1448 | 8172 | 10908 | 7776 | 6183 | | | |
| 238: | 3651 | 11823 | 2950 | 1915 | 5176 | 4381 | 8742 | 6316 | 9780 | 3427 | 8319 | 899 |
| | 4829 | 11372 | 12232 | 6415 | 3788 | 1658 | 9838 | 11020 | 8918 | 7485 | 10102 | 8428 |
| | 1054 | 2552 | 11363 | 12489 | 9487 | 10566 | 9535 | 11344 | 4210 | 1739 | 5067 | 8368 |
| | 9789 | 7897 | 2937 | 10388 | 8859 | 10675 | 3146 | 1783 | 2989 | 3471 | 4847 | 919 |
| | 918 | 5832 | 1172 | 2121 | 5023 | 806 | 11459 | 12478 | 12285 | 11359 | 2683 | 11412 |
| | 12180 | 11214 | 5716 | 7022 | 8289 | 6594 | 7858 | 11270 | 1848 | 12273 | 9776 | 6464 |
| | 1578 | 4239 | 7235 | 5329 | 9074 | 3608 | 6048 | 1812 | 3310 | 7872 | 5540 | 8662 |
| | 4796 | 790 | 2336 | 6532 | 8866 | 6741 | 7383 | 5683 | 4201 | 1638 | 1583 | 6819 |
| | 11937 | 2788 | 11593 | 12298 | 6125 | 6977 | 1956 | 8141 | 7002 | 1569 | 11618 | 3937 |
| | 5648 | 10925 | 10480 | 9137 | 6221 | 2366 | 6277 | 10503 | 5161 | 12302 | 5628 | 4791 |
| 239: | 3651 | 11823 | 2950 | 1915 | 5176 | 4381 | 8742 | 6316 | 9780 | 3427 | 8319 | 899 |
| | 4829 | 11372 | 12232 | 6415 | 3788 | 1658 | 9838 | 11020 | 8918 | 7485 | 10102 | 8428 |
| | 1054 | 2552 | 11363 | 12489 | 9487 | 10566 | 9535 | 11344 | 4210 | 1739 | 5067 | 8368 |
| | 9789 | 7897 | 2937 | 10388 | 8859 | 10675 | 3146 | 1783 | 2989 | 3471 | 4847 | 919 |
| | 918 | 5832 | 1172 | 2121 | 5023 | 806 | 11459 | 12478 | 12285 | 11359 | 2683 | 11412 |
| | 12180 | 11214 | 5716 | 7022 | 8289 | 6594 | 7858 | 11270 | 1848 | 12273 | 9776 | 6464 |
| | 1578 | 4239 | 7235 | 5329 | 9074 | 3608 | 6048 | 1812 | 3310 | 7872 | 5540 | 8662 |
| | 4796 | 790 | 2336 | 6532 | 8866 | 6741 | 7383 | 5683 | 4201 | 1638 | 1583 | 6819 |
| | 11937 | 2788 | 11593 | 12298 | 6125 | 6977 | 1956 | 8141 | 7002 | 1569 | 11618 | 3937 |
| | 5648 | 10925 | 10480 | 9137 | 6221 | 2366 | 6277 | 10503 | 5161 | 12302 | 5628 | 4791 |
| 240: | 5298 | 3673 | 6171 | 5229 | 8230 | 6271 | 9427 | 1356 | 10882 | 11852 | 10687 | 6088 |
| | 10076 | 9830 | 10597 | 6373 | 3987 | 10322 | | | | | | |
| 241: | 2393 | 3407 | 11789 | 11391 | 11346 | 5568 | 689 | 9121 | 3768 | 6558 | 5447 | 1870 |
| | 7849 | 2504 | 8733 | 10066 | 994 | 11743 | 980 | 4909 | 7933 | 8486 | 8369 | 5152 |
| | 1705 | 6156 | 10608 | | | | | | | | | |
| 242: | 3431 | 5395 | 4346 | 8330 | 8327 | 8702 | 7787 | 5265 | 8943 | 12561 | 4536 | 11625 |
| | 4411 | 1035 | 11796 | 6078 | 2720 | 4449 | 10010 | 3057 | 9876 | 3536 | 5603 | 11727 |
| | 5025 | 698 | 9899 | 6457 | 10804 | 3454 | 2741 | 11343 | 11668 | 12537 | 9198 | 9194 |
| | 6906 | 11749 | 2886 | 4118 | 11050 | 3125 | 3104 | 8238 | 7647 | 11157 | 11552 | 5735 |
| | 3190 | 1224 | 2010 | 10669 | 3186 | 12278 | 10534 | 9546 | 10088 | 3888 | 1521 | 10626 |
| | 10413 | 11620 | 12324 | 1406 | 12498 | 3067 | 7386 | 6359 | 10120 | 6004 | 2803 | 9290 |
| | 11141 | 854 | 2391 | 6032 | 10433 | 12371 | 11636 | 11795 | 6713 | 8567 | 10754 | 717 |
| | 2465 | 9545 | 9886 | 6990 | 4012 | 8324 | 3742 | 1053 | 8586 | 8683 | 10073 | 12149 |
| | 7481 | 2755 | 2646 | 6082 | 8956 | 4440 | 4579 | 4447 | 6886 | 4268 | 561 | 11512 |
| | 3439 | 1568 | 8328 | 1091 | 7948 | 5861 | 726 | 582 | 11893 | 2118 | 12271 | 6845 |
| | 6843 | 6847 | 2068 | 9119 | 2022 | 8587 | 12175 | 8754 | 6777 | 497 | 9325 | 6872 |
| | 7531 | 11335 | 2928 | 9885 | 5358 | 1963 | 6109 | 7533 | 11337 | 11444 | 9889 | 6179 |
| | 1632 | 6874 | 3342 | 12072 | 12199 | 11476 | 9892 | 6224 | 6254 | 5355 | 11338 | 7625 |
| | 10426 | 10428 | 11395 | 1315 | 11066 | 11063 | 11076 | 5351 | 1440 | 11336 | 11316 | 3538 |
| | 8749 | 9778 | 5154 | 9356 | 835 | 831 | 2589 | 8503 | 10727 | 2891 | 8958 | 11046 |
| | 6790 | 9818 | 9094 | 9828 | 5374 | 8610 | 7368 | | | | | |
| 244: | 9283 | 4282 | 1754 | 571 | 9388 | 10252 | 4060 | 4063 | 10254 | 9392 | 10256 | 10251 |
| | 8049 | 10250 | 10237 | 10240 | 8942 | 10188 | 9163 | 9457 | 9412 | 4148 | 2795 | 2440 |
| | 10370 | 3577 | 434 | 12383 | 7841 | 4935 | 4928 | 4931 | 4933 | 4908 | 701 | 7640 |
| | 2602 | 8966 | 4824 | 5455 | 4822 | 4823 | 5454 | 9020 | 8692 | 9551 | 6293 | 8301 |
| | 3456 | 1197 | 12421 | 3247 | 6475 | 7319 | 9389 | 569 | 6169 | 1497 | 1499 | 9460 |
| | 2309 | 600 | 2172 | 2178 | 6997 | 2668 | 8309 | 2821 | 4458 | 2940 | 9832 | 5380 |
| | 6918 | 732 | 9375 | 9376 | 9294 | 2109 | 12129 | 8117 | 12379 | 4965 | 10550 | 7218 |
| | 12182 | 11653 | 9067 | 4197 | 9956 | 4905 | 3379 | 8543 | 5663 | 10834 | 8946 | 3814 |
| | 4643 | 1788 | 6732 | 9857 | 4189 | 10740 | 6347 | 1240 | 5417 | 6399 | 1781 | 1782 |
| | 3068 | 3398 | 10951 | 3402 | 4557 | 3406 | 1307 | 4161 | 11960 | 8337 | 8307 | 7812 |
| | 2486 | 2510 | 1431 | 6430 | 894 | 5282 | 12422 | 6029 | 10938 | 10935 | 10936 | 2671 |
| | 4260 | 10891 | 7914 | 5646 | 9237 | 11207 | 11111 | 4869 | 10685 | 6067 | 4596 | 12455 |
| | 4572 | 7777 | 2072 | 1364 | 3840 | 4879 | 1193 | 7010 | 1667 | 2748 | 4809 | 1850 |
| | 8067 | 8922 | 9994 | 5724 | 12160 | 6849 | 3432 | 11503 | 11999 | 2619 | 11453 | 5074 |
| | 12050 | 3193 | 3298 | 5344 | 3303 | 3301 | 3300 | 3362 | 3283 | 3251 | 3211 | 9607 |
| | 3277 | 4512 | 10924 | 8703 | 8838 | 4726 | 6467 | 2527 | 962 | 5203 | 4589 | 9809 |
| | 9806 | 9805 | 9812 | 12423 | 12314 | 3674 | 3728 | 3676 | 4145 | 7690 | 4132 | 3000 |
| | 3002 | 2009 | 2415 | 3348 | 2543 | 1825 | 3368 | 1753 | 11838 | 6270 | 11163 | 4736 |
| | 11353 | 3911 | 10235 | 10232 | 9385 | 10283 | 10275 | 10280 | 10279 | 1285 | 1293 | 1279 |
| | 1312 | 1291 | 1089 | 2708 | 1407 | 10065 | 9873 | 12041 | 9138 | 11097 | 4104 | 405 |
| | 10732 | 3843 | 10734 | 9232 | 1527 | 5586 | 4841 | | | | | |
| 245: | 9283 | 4282 | 1754 | 571 | 9388 | 10252 | 4060 | 4063 | 10254 | 9392 | 10256 | 10251 |
| | 8049 | 10250 | 10237 | 10240 | 8942 | 10188 | 9163 | 9457 | 9412 | 4148 | 2795 | 2440 |
| | 10370 | 3577 | 434 | 12383 | 7841 | 4935 | 4928 | 4931 | 4933 | 4908 | 701 | 7640 |
| | 2602 | 8966 | 4824 | 5455 | 4822 | 4823 | 5454 | 9020 | 8692 | 9551 | 6293 | 8301 |
| | 3456 | 1197 | 12421 | 3247 | 6475 | 7319 | 9389 | 569 | 6169 | 1497 | 1499 | 9460 |
| | 2309 | 600 | 2172 | 2178 | 6997 | 2668 | 8309 | 2821 | 4458 | 2940 | 9832 | 5380 |
| | 6918 | 732 | 9375 | 9376 | 9294 | 2109 | 12129 | 8117 | 12379 | 4965 | 10550 | 7218 |
| | 12182 | 11653 | 9067 | 4197 | 9956 | 4905 | 3379 | 8543 | 5663 | 10834 | 8946 | 3814 |
| | 4643 | 1788 | 6732 | 9857 | 4189 | 10740 | 6347 | 1240 | 5417 | 6399 | 1781 | 1782 |
| | 3068 | 3398 | 10951 | 3402 | 4557 | 3406 | 1307 | 4161 | 11960 | 8337 | 8307 | 7812 |
| | 2486 | 2510 | 1431 | 6430 | 894 | 5282 | 12422 | 6029 | 10938 | 10935 | 10936 | 2671 |
| | 4260 | 10891 | 7914 | 5646 | 9237 | 11207 | 11111 | 4869 | 10685 | 6067 | 4596 | 12455 |
| | 4572 | 7777 | 2072 | 1364 | 3840 | 4879 | 1193 | 7010 | 1667 | 2748 | 4809 | 1850 |
| | 8067 | 8922 | 9994 | 5724 | 12160 | 6849 | 3432 | 11503 | 11999 | 2619 | 11453 | 5074 |
| | 12050 | 3193 | 3298 | 5344 | 3303 | 3301 | 3300 | 3362 | 3283 | 3251 | 3211 | 9607 |
| | 3277 | 4512 | 10924 | 8703 | 8838 | 4726 | 6467 | 2527 | 962 | 5203 | 4589 | 9809 |
| | 9806 | 9805 | 9812 | 12423 | 12314 | 3674 | 3728 | 3676 | 4145 | 7690 | 4132 | 3000 |
| | 3002 | 2009 | 2415 | 3348 | 2543 | 1825 | 3368 | 1753 | 11838 | 6270 | 11163 | 4736 |
| | 11353 | 3911 | 10235 | 10232 | 9385 | 10283 | 10275 | 10280 | 10279 | 1285 | 1293 | 1279 |
| | 1312 | 1291 | 1089 | 2708 | 1407 | 10065 | 9873 | 12041 | 9138 | 11097 | 4104 | 405 |
| | 10732 | 3843 | 10734 | 9232 | 1527 | 5586 | 4841 | | | | | |
| 246: | 6942 | 11388 | 3778 | 2672 | 12375 | 7074 | 1179 | 12458 | 1855 | 12015 | 9980 | 10716 |
| | 10918 | 11770 | 10255 | 581 | 10006 | 4467 | 10169 | 7675 | 1250 | 5319 | 9827 | 496 |
| | 1732 | 8778 | | | | | | | | | | |
| 247: | 9530 | 12217 | 826 | 5267 | 2006 | 547 | 7365 | 1816 | 10509 | 6784 | 2509 | 7339 |
| | 3841 | 5471 | 11850 | 11519 | 2806 | 7443 | 8018 | 11751 | 1529 | 4077 | 12088 | 6149 |
| | 1489 | 868 | 7473 | 2466 | 614 | 1176 | 6038 | 2195 | 1557 | 8182 | 3984 | |
| 248: | 2809 | 1347 | 5519 | 6353 | 8932 | 7422 | 7557 | 4683 | 11147 | 10637 | 9404 | 11768 |
| | 910 | 8870 | 6324 | 5045 | 4945 | 9453 | 7164 | 4152 | 3322 | 10499 | 7328 | 8994 |
| | 11460 | 9634 | 9064 | 9047 | 10906 | 11904 | 749 | 5014 | 9906 | 9939 | 9963 | 2364 |
| | 6617 | 1635 | 4234 | 3462 | 12043 | 10075 | 3459 | 10489 | 8606 | 1999 | 4508 | 10028 |
| | 5341 | 6180 | 9971 | 7215 | 3422 | 5091 | 9652 | 10601 | 8028 | 11427 | 6678 | 4365 |
| | 7082 | 1022 | 3209 | 4357 | 9159 | 7321 | 12077 | 11967 | 680 | 7943 | 661 | 11246 |
| | 10622 | 7676 | 818 | 3364 | 9160 | 6187 | 8531 | 4604 | 6381 | 4859 | 2298 | 10753 |
| | 12368 | 9200 | 5155 | 2175 | 8058 | 11106 | 1639 | 5299 | 1905 | 10681 | 10937 | 1738 |
| | 3580 | 7344 | 8320 | 8466 | 5687 | 5293 | 8844 | 5030 | 1572 | 1735 | 543 | 1105 |
| | 562 | 3483 | 9147 | 12109 | 11282 | 7291 | 10666 | 11009 | 2523 | 12408 | 12128 | 12406 |
| | 2535 | 10560 | 12212 | 10101 | 11610 | 5148 | 8687 | 5945 | 11651 | 12286 | 5942 | 12291 |
| | 11624 | 11675 | 12078 | 4588 | 1480 | 1513 | 4665 | 759 | 5868 | 705 | 4662 | 1458 |
| | 4585 | 4555 | 5193 | 754 | 756 | 5855 | 4641 | 4563 | 1455 | 761 | 5867 | 5859 |
| | 5756 | 1520 | 4608 | 1437 | 5787 | 1459 | 671 | 1515 | 5784 | 5824 | 5864 | 5902 |
| | 5791 | 678 | 5169 | 5797 | 5166 | 807 | 808 | 5897 | 5173 | 793 | 5839 | 5899 |
| | 5761 | 700 | 5752 | 5748 | 848 | 845 | 792 | 786 | 815 | 673 | 853 | 1429 |
| | 812 | 850 | 849 | 817 | 1432 | 5172 | 5009 | 5062 | 5040 | 4868 | 5060 | 5066 |
| | 5032 | 5034 | 5008 | 5092 | 9098 | 5069 | 5717 | 7327 | 3898 | 5904 | 8185 | 10968 |
| | 12327 | 12382 | 12376 | 12380 | 12358 | 12355 | 4920 | 5826 | 4918 | 9879 | 6009 | 6638 |
| | 4899 | 6614 | 6005 | 9882 | 9880 | 9915 | 6609 | 6007 | 9959 | 4923 | 9936 | 9912 |
| | 5794 | 9935 | 9908 | 6637 | 9941 | 9962 | 9957 | 9970 | 6610 | 9996 | 9993 | 9991 |
| | 9998 | 4974 | 5857 | 5931 | 5830 | 5865 | 5007 | 5903 | 5852 | 5833 | 5862 | 5202 |
| | 5093 | 4978 | 5098 | 5096 | 4892 | 6002 | 5934 | 5788 | 5751 | 5785 | 5981 | 5985 |
| | 5822 | 5958 | 5227 | 6671 | 6643 | 6645 | 6640 | 1393 | 12542 | 1691 | 10538 | 9575 |
| | 2875 | 1909 | 6944 | 2273 | 7752 | 7749 | 7747 | 7774 | 7150 | 7754 | 7753 | 7720 |
| | 7717 | 7154 | 7723 | 6454 | 9178 | 1910 | 9184 | 12431 | 11386 | 11005 | 3701 | 2612 |
| | 991 | 4598 | 6761 | 458 | 1261 | 11303 | 11387 | 5560 | | | | |
| 249: | 11466 | 10817 | 8971 | 4262 | 10839 | 329 | 8600 | 5335 | 896 | 791 | 1352 | 7322 |
| | 10270 | 7741 | 9035 | 6714 | 10000 | 8201 | 3746 | 5174 | 4398 | 7207 | 587 | 4853 |
| | 4851 | 2261 | 11405 | 10793 | 3440 | 3463 | 7505 | 1693 | 2532 | 2862 | 2859 | 5792 |
| | 2825 | 11560 | 7637 | 7633 | 7614 | 2464 | 11222 | 1778 | 11268 | 11462 | 2158 | 10647 |
| | 1146 | 7316 | 6100 | 12545 | 1698 | 4358 | 879 | 1727 | 12205 | 7170 | 6117 | 10722 |
| | 12516 | 7294 | 12005 | 11165 | 1857 | 12042 | 6879 | 3473 | 4353 | 2798 | 10096 | 2424 |
| | 7595 | 9288 | 3396 | 4644 | 7051 | 6749 | 4932 | 1417 | 11847 | 8676 | 2675 | 3149 |
| | 4493 | 8041 | 2231 | 10890 | 2301 | 3232 | 3614 | 9139 | 3530 | 7139 | 7836 | 3718 |
| | 12250 | 881 | 2373 | 4126 | 9707 | 5779 | 9630 | 2905 | 11956 | 10260 | 8176 | 8370 |
| | 1834 | 1301 | 5330 | 2572 | 10162 | 3878 | 8872 | 7166 | 12030 | 9648 | 2689 | 10149 |
| | 10973 | 9109 | 4471 | 11920 | 685 | 6584 | 10680 | 5472 | 5665 | 3253 | 2889 | 12470 |
| | 8726 | 6034 | 6623 | 4199 | 4362 | 12405 | 6411 | 10429 | 12497 | 9570 | 1214 | 1030 |
| | 617 | 829 | 10859 | 11229 | 1603 | 3932 | 5522 | 1255 | 12084 | 10987 | 900 | 11188 |
| | 2018 | 616 | 10866 | 6138 | 1003 | 7084 | 10459 | 1656 | 9217 | 4190 | 10206 | 4395 |
| | 2310 | 3027 | 3199 | 8196 | 12409 | 1333 | 1930 | 7140 | 8939 | 3081 | 5939 | 1360 |
| | 6958 | 10063 | 5908 | 2324 | 5587 | 735 | 10365 | 8940 | 1173 | 7035 | 8162 | 10945 |
| | 7665 | 8546 | 4249 | 8439 | 4095 | 10156 | 10177 | 10176 | 931 | 2377 | 8634 | 420 |
| | 2894 | 3098 | 4069 | 5285 | 1311 | 9272 | 6242 | 7611 | 3944 | 3947 | 5722 | 5719 |
| | 5695 | 5720 | 5753 | 5727 | 5731 | 12515 | 9999 | 6710 | 9394 | 9395 | 4022 | 4024 |
| | 10165 | 3990 | 10801 | 3995 | 10163 | 1553 | 3993 | 11441 | 10846 | 11136 | 7843 | 10491 |
| | 4725 | 11489 | 4723 | 10823 | 10498 | 10615 | 626 | 11339 | 10409 | 11480 | 1805 | 7639 |
| | 10281 | 10034 | 8405 | 11038 | 3492 | 8645 | 5037 | 12001 | 5800 | 7175 | 4668 | 9467 |
| | 3156 | 11075 | 2995 | 9347 | 7905 | 1423 | 7870 | 7748 | 2283 | 9865 | 11865 | 5561 |
| | 8231 | 8097 | 6110 | 8686 | 7829 | 8871 | 5715 | 1804 | 5644 | 4423 | 2259 | 11914 |
| | 11250 | 8485 | 9933 | 716 | 6323 | 6799 | 3509 | 12565 | 7764 | 5263 | 9011 | 6246 |
| | 4504 | 2358 | 8877 | 2182 | 11148 | 10158 | 5262 | 5258 | 4660 | 3899 | 6021 | 10821 |
| | 10978 | 1801 | 8831 | 1936 | 6826 | 9977 | 3546 | 5982 | 3472 | 8460 | 3460 | 12528 |
| | 5242 | 8527 | 8657 | 8552 | 7744 | 6286 | 2066 | 9201 | 506 | 6016 | 5456 | 399 |
| | 481 | 11107 | 9066 | 4390 | 6748 | 11573 | 5819 | 5182 | 9176 | 11244 | 8029 | 3399 |
| | 7013 | 10161 | 10468 | 11469 | 5983 | 9301 | 5544 | 7268 | 5412 | 8121 | 3720 | 9353 |
| | 2299 | 6358 | 3224 | 11486 | 2423 | 1330 | 12174 | 3550 | 4953 | 2783 | 11429 | 8828 |
| | 8602 | 1300 | 9104 | 7287 | 8658 | 1986 | 5677 | 8336 | 12262 | 3449 | 4980 | 9514 |
| | 7606 | 2388 | 11771 | 10820 | 1780 | 11551 | 2392 | 10995 | 9489 | 2737 | 8454 | 10493 |
| | 975 | 1824 | 7713 | 12036 | 7172 | 8395 | 6062 | 4409 | 8222 | 5608 | 5031 | 12363 |
| | 11455 | 2661 | 2189 | 5632 | 6561 | 3215 | 11858 | 2652 | 9866 | 8620 | 11816 | 2701 |
| | 10674 | 568 | 11663 | 11649 | 9706 | 12317 | 12525 | 2916 | 8590 | 7129 | 9310 | 11073 |
| | 7694 | 1472 | 5767 | 7178 | 8963 | 4159 | 3109 | 8186 | 2200 | 5114 | 9659 | 6461 |
| | 8688 | 6519 | 5873 | 668 | 11777 | 10392 | 4625 | 10853 | 6210 | 3001 | 4310 | 1966 |
| | 1885 | 7538 | 5702 | 8513 | 9937 | 10901 | 11642 | 2005 | 4671 | 9435 | 3667 | 4480 |
| | 5740 | 6785 | 4971 | 10956 | 5657 | 2890 | 7670 | 8813 | 6102 | 8483 | 8452 | 11464 |
| | 10848 | 11438 | 10851 | 10769 | 10766 | 10764 | 10763 | 6869 | 8373 | 1564 | 5524 | 10079 |
| | 11491 | 11440 | 10713 | 7635 | 7631 | 5372 | 5348 | 9233 | 9231 | 9221 | 9240 | 9235 |
| | 9220 | 3029 | 10761 | 9983 | 814 | 7040 | 12560 | 7016 | 8158 | 8759 | 8762 | 8163 |
| | 7037 | 7822 | 8767 | 7066 | 7061 | 10679 | 11467 | | | | | |
| 250: | 11466 | 10817 | 8971 | 4262 | 10839 | 329 | 8600 | 5335 | 896 | 791 | 1352 | 7322 |
| | 10270 | 7741 | 9035 | 6714 | 10000 | 8201 | 3746 | 5174 | 4398 | 7207 | 587 | 4853 |
| | 4851 | 2261 | 11405 | 10793 | 3440 | 3463 | 7505 | 1693 | 2532 | 2862 | 2859 | 5792 |
| | 2825 | 11560 | 7637 | 7633 | 7614 | 2464 | 11222 | 1778 | 11268 | 11462 | 2158 | 10647 |
| | 1146 | 7316 | 6100 | 12545 | 1698 | 4358 | 879 | 1727 | 12205 | 7170 | 6117 | 10722 |
| | 12516 | 7294 | 12005 | 11165 | 1857 | 12042 | 6879 | 3473 | 4353 | 2798 | 10096 | 2424 |
| | 7595 | 9288 | 3396 | 4644 | 7051 | 6749 | 4932 | 1417 | 11847 | 8676 | 2675 | 3149 |
| | 4493 | 8041 | 2231 | 10890 | 2301 | 3232 | 3614 | 9139 | 3530 | 7139 | 7836 | 3718 |
| | 12250 | 881 | 2373 | 4126 | 9707 | 5779 | 9630 | 2905 | 11956 | 10260 | 8176 | 8370 |
| | 1834 | 1301 | 5330 | 2572 | 10162 | 3878 | 8872 | 7166 | 12030 | 9648 | 2689 | 10149 |
| | 10973 | 9109 | 4471 | 11920 | 685 | 6584 | 10680 | 5472 | 5665 | 3253 | 2889 | 12470 |
| | 8726 | 6034 | 6623 | 4199 | 4362 | 12405 | 6411 | 10429 | 12497 | 9570 | 1214 | 1030 |
| | 617 | 829 | 10859 | 11229 | 1603 | 3932 | 5522 | 1255 | 12084 | 10987 | 900 | 11188 |
| | 2018 | 616 | 10866 | 6138 | 1003 | 7084 | 10459 | 1656 | 9217 | 4190 | 10206 | 4395 |
| | 2310 | 3027 | 3199 | 8196 | 12409 | 1333 | 1930 | 7140 | 8939 | 3081 | 5939 | 1360 |
| | 6958 | 10063 | 5908 | 2324 | 5587 | 735 | 10365 | 8940 | 1173 | 7035 | 8162 | 10945 |
| | 7665 | 8546 | 4249 | 8439 | 4095 | 10156 | 10177 | 10176 | 931 | 2377 | 8634 | 420 |
| | 2894 | 3098 | 4069 | 5285 | 1311 | 9272 | 6242 | 7611 | 3944 | 3947 | 5722 | 5719 |
| | 5695 | 5720 | 5753 | 5727 | 5731 | 12515 | 9999 | 6710 | 9394 | 9395 | 4022 | 4024 |
| | 10165 | 3990 | 10801 | 3995 | 10163 | 1553 | 3993 | 11441 | 10846 | 11136 | 7843 | 10491 |
| | 4725 | 11489 | 4723 | 10823 | 10498 | 10615 | 626 | 11339 | 10409 | 11480 | 1805 | 7639 |
| | 10281 | 10034 | 8405 | 11038 | 3492 | 8645 | 5037 | 12001 | 5800 | 7175 | 4668 | 9467 |
| | 3156 | 11075 | 2995 | 9347 | 7905 | 1423 | 7870 | 7748 | 2283 | 9865 | 11865 | 5561 |
| | 8231 | 8097 | 6110 | 8686 | 7829 | 8871 | 5715 | 1804 | 5644 | 4423 | 2259 | 11914 |
| | 11250 | 8485 | 9933 | 716 | 6323 | 6799 | 3509 | 12565 | 7764 | 5263 | 9011 | 6246 |
| | 4504 | 2358 | 8877 | 2182 | 11148 | 10158 | 5262 | 5258 | 4660 | 3899 | 6021 | 10821 |
| | 10978 | 1801 | 8831 | 1936 | 6826 | 9977 | 3546 | 5982 | 3472 | 8460 | 3460 | 12528 |
| | 5242 | 8527 | 8657 | 8552 | 7744 | 6286 | 2066 | 9201 | 506 | 6016 | 5456 | 399 |
| | 481 | 11107 | 9066 | 4390 | 6748 | 11573 | 5819 | 5182 | 9176 | 11244 | 8029 | 3399 |
| | 7013 | 10161 | 10468 | 11469 | 5983 | 9301 | 5544 | 7268 | 5412 | 8121 | 3720 | 9353 |
| | 2299 | 6358 | 3224 | 11486 | 2423 | 1330 | 12174 | 3550 | 4953 | 2783 | 11429 | 8828 |
| | 8602 | 1300 | 9104 | 7287 | 8658 | 1986 | 5677 | 8336 | 12262 | 3449 | 4980 | 9514 |
| | 7606 | 2388 | 11771 | 10820 | 1780 | 11551 | 2392 | 10995 | 9489 | 2737 | 8454 | 10493 |
| | 975 | 1824 | 7713 | 12036 | 7172 | 8395 | 6062 | 4409 | 8222 | 5608 | 5031 | 12363 |
| | 11455 | 2661 | 2189 | 5632 | 6561 | 3215 | 11858 | 2652 | 9866 | 8620 | 11816 | 2701 |
| | 10674 | 568 | 11663 | 11649 | 9706 | 12317 | 12525 | 2916 | 8590 | 7129 | 9310 | 11073 |
| | 7694 | 1472 | 5767 | 7178 | 8963 | 4159 | 3109 | 8186 | 2200 | 5114 | 9659 | 6461 |
| | 8688 | 6519 | 5873 | 668 | 11777 | 10392 | 4625 | 10853 | 6210 | 3001 | 4310 | 1966 |
| | 1885 | 7538 | 5702 | 8513 | 9937 | 10901 | 11642 | 2005 | 4671 | 9435 | 3667 | 4480 |
| | 5740 | 6785 | 4971 | 10956 | 5657 | 2890 | 7670 | 8813 | 6102 | 8483 | 8452 | 11464 |
| | 10848 | 11438 | 10851 | 10769 | 10766 | 10764 | 10763 | 6869 | 8373 | 1564 | 5524 | 10079 |
| | 11491 | 11440 | 10713 | 7635 | 7631 | 5372 | 5348 | 9233 | 9231 | 9221 | 9240 | 9235 |
| | 9220 | 3029 | 10761 | 9983 | 814 | 7040 | 12560 | 7016 | 8158 | 8759 | 8762 | 8163 |
| | 7037 | 7822 | 8767 | 7066 | 7061 | 10679 | 11467 | | | | | |
| 251: | 7566 | 9095 | 9909 | 985 | 3712 | 4673 | 10400 | 6894 | 5106 | 4420 | 10664 | |
| 252: | 1273 | 6354 | 10628 | 10067 | 5950 | 6721 | 684 | 10319 | 709 | 8095 | 11478 | 8177 |
| | 9858 | 2059 | 488 | 468 | 466 | 443 | 6770 | 8271 | 8157 | 9002 | 4162 | 7370 |
| | 1098 | 10796 | 8991 | 10090 | 3419 | 1137 | 3784 | 4900 | 1074 | 6158 | 9679 | 1086 |
| | 7420 | 7419 | 11662 | 4061 | 7548 | 11926 | 460 | 10362 | 8812 | 6107 | 10946 | 6408 |
| | 8006 | 2847 | 1989 | 3661 | 2787 | 1619 | 1169 | 7204 | 7238 | 10070 | 8193 | 12501 |
| | 5485 | 1845 | 2794 | 7224 | 9406 | 3749 | 12378 | 7011 | 3438 | 11084 | 5896 | 11474 |
| | 11425 | 546 | 7789 | 4010 | 6448 | 7795 | 7357 | 11260 | 11210 | 8046 | 7430 | 5071 |
| | 10524 | 9742 | 3252 | 9006 | 10057 | 646 | 7991 | 5217 | 3450 | 5973 | 6730 | 3980 |
| | 4722 | 10407 | 12354 | 911 | 10043 | 9379 | 9461 | 9509 | 6855 | 11475 | 4699 | 4707 |
| | 3903 | 7938 | 9028 | 10396 | 7951 | 1494 | 6633 | 5811 | 1535 | 1538 | 1708 | 5130 |
| | 11886 | 5347 | 10359 | 6327 | 7431 | 11504 | 7564 | 4929 | 6272 | 10295 | 1505 | 3845 |
| | 4840 | 5433 | 8232 | 12488 | 4783 | 9665 | 667 | 1675 | 7251 | 12058 | 1860 | 10394 |
| | 8850 | 8383 | 714 | 6900 | 2682 | 4992 | 12142 | 10423 | 878 | 6382 | 4981 | 6573 |
| | 9261 | 426 | 2584 | 2775 | 2459 | 8550 | 6512 | 3410 | 10959 | 3484 | 8923 | 9711 |
| | 619 | 9357 | 3314 | 7516 | 5046 | 10986 | 11915 | 4893 | 6348 | 6418 | 3650 | 5909 |
| | 6647 | 12436 | 7700 | 1565 | 10495 | 10526 | 10511 | 10870 | 9093 | 4720 | 2493 | 9031 |
| | 11617 | 9494 | 11310 | 11940 | 4618 | 11774 | 692 | 1411 | 9722 | 4468 | 12568 | 11407 |
| | 7852 | 5755 | 8339 | 8261 | 1024 | 8260 | 11252 | 8668 | 12554 | 11172 | 2126 | 3350 |
| | 8274 | 2633 | 2347 | 867 | 9039 | 11029 | 518 | 11209 | 8727 | 10724 | 3847 | 2316 |
| | 1653 | 909 | 1651 | 2630 | 6035 | 567 | 11952 | 6533 | 2167 | 6980 | 2903 | 5645 |
| | 2985 | 1419 | 2272 | 8096 | 2028 | 6291 | 11208 | 11025 | 11024 | 5181 | 7856 | 8183 |
| | 7234 | 7750 | 3519 | 10320 | 10862 | 1964 | 3457 | 3453 | 5882 | 5849 | 8580 | 4942 |
| | 3849 | 5260 | 6222 | 9848 | 5523 | 8905 | 11374 | 436 | 465 | 464 | 1140 | 11443 |
| | 10042 | 3806 | 9553 | 10185 | 7826 | 10304 | 8012 | 5024 | 2583 | 2439 | 8659 | 11296 |
| | 4457 | 3826 | 3825 | 2123 | 6153 | 2580 | 3823 | 11235 | 5180 | 1488 | 1490 | 5211 |
| | 2474 | 1881 | 12311 | 1354 | 9614 | 7907 | 6374 | 3347 | 10926 | 1920 | 6334 | 5431 |
| | 8595 | 7641 | 5799 | 11247 | 7348 | 12051 | 5914 | 3330 | 8845 | 6621 | 4241 | 11797 |
| | 2199 | 12467 | 478 | 1427 | 11654 | 1136 | 8093 | 577 | 6132 | 2150 | 5407 | 11992 |
| | 8519 | 5378 | 6745 | 2449 | 11259 | 1376 | 10055 | 7661 | 4076 | 8854 | 8603 | 10662 |
| | 6195 | 12075 | 11323 | 11304 | 7916 | 8839 | 1138 | 7326 | 8295 | 12332 | 9482 | 11477 |
| | 484 | 7028 | 7408 | 7379 | 5325 | 4461 | 9084 | 5254 | 12236 | 5518 | 9609 | 442 |
| | 8120 | 4033 | 10357 | 514 | 6417 | 3763 | 2952 | 10085 | 1346 | 11907 | 10086 | 11849 |
| | 11941 | 2826 | 10100 | 5164 | 4319 | 7506 | 2567 | 5959 | 2764 | 12070 | 2700 | 7978 |
| | 3044 | 3064 | 1422 | 715 | 3359 | 9532 | 441 | 440 | 1862 | 740 | 718 | 8115 |
| | 3061 | 534 | 3160 | 10696 | 10298 | | | | | | | |
| 253: | 5927 | 3822 | 5709 | 5332 | 11543 | 10238 | 4587 | 4298 | | | | |
| 254: | 3005 | 4566 | 3638 | 3636 | 4949 | 5593 | 4950 | 4952 | 6386 | 6624 | 4307 | 3140 |
| | 6319 | 7213 | 7928 | 8481 | 10333 | 12107 | 5205 | 4749 | 1984 | 5730 | 3405 | 11861 |
| | 3819 | 11697 | 3214 | 6534 | 9110 | 11404 | 7447 | 7451 | 2747 | | | |
| 255: | 6851 | 10963 | 4533 | 8701 | 12352 | 4018 | | | | | | |
| 256: | 1398 | | | | | | | | | | | |
| 257: | 4311 | 9437 | 6301 | 9698 | 8305 | 4430 | 1916 | 3966 | 2446 | 8223 | 12071 | 7173 |
| | 11279 | 2994 | 12463 | 6181 | 12347 | 6140 | 9285 | 6201 | 11237 | 4813 | 11876 | 1006 |
| | 7131 | 9122 | 9924 | 9082 | 6064 | 8234 | 4545 | 11494 | 6466 | 1475 | 6806 | 9092 |
| | 6515 | 10540 | 856 | 2077 | 6207 | 8044 | 6949 | 8542 | 10988 | 7589 | 12288 | 4280 |
| | 9331 | 1713 | 1349 | 9061 | 4855 | 4694 | 10186 | 10818 | 12322 | 777 | 803 | 4460 |
| | 8010 | 8775 | 12388 | 6586 | 9554 | 5768 | 4599 | 10157 | 570 | 5597 | 4451 | 607 |
| | 1039 | 7554 | 2538 | 11891 | 3123 | 5515 | 536 | 4495 | 5739 | 3594 | 9870 | 4947 |
| | 9673 | 4798 | 1280 | 4136 | 2322 | 11007 | 6288 | 4646 | 6933 | 1844 | | |
| 258: | 9859 | 12104 | 8809 | 8807 | 6357 | 6356 | 1789 | 10837 | 2642 | 3264 | 9441 | 8984 |
| | 8089 | 4196 | 9932 | 3047 | 6863 | 7859 | 9791 | 10592 | 12563 | 993 | 9958 | 7654 |
| | 4937 | 4540 | 8667 | 1650 | 1296 | 7541 | 6815 | 1649 | 1469 | 8561 | 3834 | 11908 |
| | 12504 | 8493 | 9837 | 7137 | 7837 | 9143 | 3913 | 8926 | 669 | 602 | 397 | 11747 |
| | 10928 | 3857 | 2947 | 3905 | 7688 | 6370 | 7161 | 1745 | 7945 | 2746 | 10541 | 4925 |
| | 5430 | 5845 | 1383 | 1484 | 11461 | 7123 | 11294 | 2690 | 9638 | 7340 | 1898 | 10844 |
| | 4970 | 7629 | 12350 | 6619 | 7029 | 654 | 4815 | 12384 | 9127 | 11340 | 2498 | 1184 |
| | 3150 | 11558 | 12295 | | | | | | | | | |
| 259: | 8388 | 3722 | 7698 | 3015 | 10098 | 10548 | 508 | 4289 | 7734 | 7728 | 8287 | 7796 |
| | 7582 | 8616 | 10704 | 7030 | 4169 | 7702 | 7706 | 7760 | 5133 | 7788 | 7765 | 7767 |
| | 9315 | 6998 | 6984 | 7008 | 7005 | 7058 | 7114 | 7092 | 7063 | 7091 | 7096 | 7067 |
| | 7000 | 7012 | 10040 | 1961 | 1397 | 9439 | 8663 | 4664 | 8071 | 7086 | 6419 | 7987 |
| | 12490 | 1679 | 1657 | 4331 | 1983 | 6707 | 3391 | 7497 | 7380 | 7845 | 7666 | 9658 |
| | 7955 | 1477 | 11341 | 8188 | 12012 | 775 | 12065 | 8672 | 1245 | 4446 | 3055 | 11555 |
| | 8112 | 886 | 8711 | 8285 | 8283 | 7104 | 1258 | 3726 | 5057 | 9344 | 1937 | 12566 |
| | 8716 | 11643 | 5989 | 6696 | 2375 | 2637 | 11384 | 8563 | 3794 | 3791 | 3013 | 2235 |
| | 893 | 12177 | 1467 | 895 | 8779 | 4771 | 6545 | 757 | 2136 | 2135 | 2138 | 10125 |
| | 10542 | 4351 | 10760 | 8345 | 6952 | 3663 | 2436 | 10787 | 2205 | 4770 | 5789 | 1191 |
| | 7588 | 4737 | 1645 | 3194 | 1643 | 5301 | 9568 | 4597 | 606 | 8738 | 8740 | 688 |
| | 1447 | 11990 | 725 | 11030 | 7724 | 11012 | 7085 | 1201 | 4153 | 2707 | 1236 | 10243 |
| | 3571 | 4602 | 2754 | 10867 | 4661 | 5479 | 11835 | 7842 | 6726 | 2808 | 5829 | 8796 |
| | 4175 | 4871 | 6440 | 8878 | 2385 | 11553 | 3306 | 4444 | 1014 | 7794 | 8496 | 6687 |
| | 4238 | 425 | 8393 | 5926 | 6037 | 11564 | 937 | 6397 | 11272 | 11274 | 6981 | 597 |
| | 4128 | 8492 | 4235 | 4252 | 3066 | 1793 | 10958 | 11713 | 9976 | 10957 | 4236 | 8721 |
| | 5036 | 6827 | 1967 | 3424 | 2431 | 10983 | 9952 | 5142 | 2900 | 8262 | 12459 | 2776 |
| | 2253 | 12260 | 3016 | 5741 | 11451 | 1820 | 2515 | 3609 | 11133 | 2251 | 7893 | 12254 |
| | 5141 | 12377 | 5004 | 12351 | 5115 | 1696 | 5979 | 3793 | 3263 | 11081 | 6921 | 2030 |
| | 11957 | 4960 | 10571 | 7486 | 5011 | 8357 | 6335 | 10863 | 7264 | 10012 | 2344 | 7350 |
| | 5370 | 1724 | 5528 | 8203 | 2297 | 10903 | 8202 | 6704 | 3288 | 3690 | 8804 | 5418 |
| | 2130 | 1392 | 522 | 9793 | 1466 | 7038 | 12237 | 4120 | 8407 | 12161 | 3787 | 8131 |
| | 6605 | 5883 | 1830 | 8928 | 10864 | 6480 | 7542 | 11726 | 3185 | 6635 | 3525 | 5209 |
| | 5234 | 2592 | 5776 | 10562 | 11330 | 9613 | 11397 | 8358 | 9161 | 3218 | 9729 | 6444 |
| | 7598 | 7957 | 4667 | 4732 | 3764 | 11232 | 7992 | 7758 | 7742 | 7792 | 8316 | 8321 |
| | 8313 | 8318 | 8898 | 8314 | 8896 | 7036 | 7708 | 2838 | 2837 | 9204 | 9196 | 9165 |
| | 9169 | 9167 | 3629 | 7679 | 12494 | 7034 | 7730 | 7736 | 7901 | 2749 | 5013 | 9348 |
| | 10267 | 9407 | 4173 | 7059 | 7060 | 8764 | 5946 | 3386 | 3233 | 4464 | 7886 | 9574 |
| | 5105 | 5163 | 3187 | 3949 | 10398 | 3963 | 6241 | 6243 | 5232 | 5231 | 723 | 4071 |
| | 9692 | 10318 | 1592 | 1640 | 1593 | 6043 | 6028 | 2626 | 6027 | 8571 | 6486 | 6490 |
| | 8490 | 9869 | 6434 | 3326 | 7917 | 4490 | 10856 | 2497 | 8664 | 3138 | 6108 | 12215 |
| | 12152 | 5483 | 1775 | 5517 | 2378 | 8613 | 4639 | 6675 | 9175 | 3415 | 4345 | 7783 |
| | 4417 | 11725 | 2331 | 636 | 5449 | 2434 | 6189 | 4360 | 4452 | 3601 | 1706 | 2313 |
| | 5292 | 3390 | 5676 | 5698 | 6810 | 1021 | 1242 | 844 | 4121 | 6897 | 9485 | 11171 |
| | 5444 | 6735 | 1209 | 10132 | 10389 | 3113 | 10103 | 11622 | 11619 | 5681 | 5315 | 8607 |
| | 1700 | 11450 | 1379 | 6862 | 6993 | 9444 | 4352 | 6954 | 9727 | 10997 | 9454 | 9474 |
| | 9450 | 9445 | 2470 | 8722 | 7620 | 12274 | 9335 | 7283 | 920 | 6069 | 9134 | 7032 |
| | 8458 | 8960 | 7699 | 7097 | 4729 | 2280 | 4472 | 6660 | | | | |
| 260: | 4214 | 10052 | 2812 | 5162 | 6750 | 9903 | 2712 | 3501 | 7527 | 5168 | 5346 | 10564 |
| | 1609 | 10272 | 4848 | 8554 | 7685 | 7584 | 7875 | 4883 | 12569 | 2098 | 9005 | 8016 |
| | 1217 | 4832 | 4511 | 10354 | 4039 | 4267 | 11757 | 666 | 4526 | 4827 | 12579 | 2173 |
| | 8776 | 3900 | 2116 | 6377 | 3983 | 9759 | 955 | 5583 | 4721 | 3576 | 1498 | 8723 |
| | 6768 | 8718 | 3644 | 2075 | 5987 | 7882 | 5225 | 3196 | 7716 | 495 | 6935 | 9761 |
| | 3085 | 5953 | 9503 | 8755 | 5029 | 10373 | 10700 | 9192 | 7081 | 3865 | 7894 | |
| 261: | 485 | 7151 | 1320 | 1290 | 451 | 4232 | 7155 | 450 | 2079 | 447 | 12101 | 9224 |
| | 6447 | 8360 | 4519 | 6844 | 8050 | 1655 | 8361 | 5543 | 2398 | 10378 | 6673 | 9961 |
| | 998 | 3436 | 9533 | 8649 | 10960 | 11580 | 9946 | 3430 | 6890 | 6483 | 7347 | 3268 |
| | 5572 | 3753 | 7695 | 5744 | 8043 | 8832 | 7891 | 6441 | 3622 | 9579 | 3776 | 3752 |
| | 3773 | 6487 | 10375 | 8408 | 7209 | 1630 | 9190 | 3033 | 7177 | 1534 | 5860 | 2083 |
| | 8378 | 2654 | 5222 | 6744 | 2982 | 505 | 690 | 7195 | 6667 | 702 | 4348 | 5933 |
| | 4349 | 12102 | 12119 | 10347 | 8591 | 12096 | 4828 | 10352 | 10351 | 6392 | 771 | 770 |
| | 744 | 772 | 779 | 741 | 745 | 6274 | 719 | 4243 | 7117 | 5591 | 12243 | |
| 262: | 8290 | 9642 | 1843 | 11732 | 12475 | 1766 | 8069 | 520 | 6505 | 2170 | 9021 | 10836 |
| | 7854 | 11836 | 4028 | 3732 | | | | | | | | |
| 263: | 11809 | 8254 | 6051 | 11522 | 760 | 6489 | 10701 | | | | | |
| 264: | 8907 | 8133 | 10594 | 3921 | 5803 | 9945 | 10922 | 7645 | | | | |
| 265: | 4066 | 1661 | 3518 | 11779 | 11827 | 2479 | 11987 | 1102 | 9997 | 4456 | 4994 | 1897 |
| | 6649 | 6269 | 2684 | 3489 | 6608 | 10414 | 7293 | 502 | 967 | 6655 | 9887 | 2074 |
| | 4887 | 2305 | 7607 | 1852 | 1582 | 11458 | 4253 | 11609 | 11608 | 7459 | 6103 | 1624 |
| | 1305 | 10639 | 10069 | 4293 | 10871 | 3496 | 10261 | 7784 | 10568 | 6526 | 10840 | 3542 |
| | 7396 | 12120 | 5547 | 7108 | 1586 | 6694 | 4687 | 8748 | 2430 | 2105 | 541 | 1325 |
| | 2500 | 4205 | 9610 | 10752 | 2166 | 6371 | 10316 | 10321 | 4329 | 12333 | 5381 | 2921 |
| | 811 | 12135 | 10383 | 1428 | 3930 | 10207 | 6670 | | | | | |
| 266: | 2090 | 9566 | 9464 | 2088 | 2091 | 2106 | 10582 | 5288 | 7559 | 7950 | 2246 | 2729 |
| | 2621 | 12256 | 11470 | 6622 | 780 | 7206 | 11763 | 3939 | 2108 | 9703 | 9655 | 9674 |
| | 3145 | 9678 | | | | | | | | | | |
| 267: | 2306 | 2969 | 1292 | 5197 | 12526 | 12222 | 2996 | 3154 | 11518 | 9179 | 3130 | 11756 |
| | 11824 | 3924 | 9004 | 5150 | 1597 | 4858 | 5733 | 8995 | 10095 | 6969 | 5582 | 2383 |
| | 9888 | 6686 | 5932 | 3811 | 12143 | 5699 | 9088 | 9087 | 8207 | 1596 | 9901 | 6137 |
| | 1254 | 2780 | 4194 | 9091 | 8401 | 9488 | 1969 | 658 | 11948 | 4979 | 8425 | 9465 |
| | 789 | 7551 | 7265 | 10056 | 2516 | 11201 | 5622 | 7269 | 10981 | 10587 | 2719 | 6657 |
| | 10054 | 9953 | 8025 | 2252 | 4474 | 5694 | 9696 | 10809 | 10346 | 3591 | 12540 | 2472 |
| | 8500 | 7526 | 6542 | 8794 | 6428 | 3260 | 3853 | 834 | 11437 | 7553 | 2104 | 1174 |
| | 4070 | 10284 | 11846 | 6905 | 3318 | 3112 | 7937 | 11417 | 1512 | 7587 | 8381 | 8471 |
| | 6595 | 1879 | 5084 | 3895 | 4878 | 7737 | 7879 | 4626 | 4820 | 3745 | 8954 | 4765 |
| | 734 | 7376 | 2762 | 4983 | 4164 | 11186 | 7226 | 9505 | 6206 | 2370 | 7873 | 7227 |
| | 1335 | 2656 | 12316 | 9150 | 10736 | 5160 | 12224 | 3384 | 4212 | 1038 | 1090 | 7813 |
| | 2000 | 11019 | 8633 | 9202 | 12547 | 610 | 1151 | 477 | 11842 | 4459 | 10523 | 846 |
| | 6976 | 6177 | 3478 | 7601 | 7819 | 12396 | 3429 | 9472 | 1952 | 9073 | 6996 | 9361 |
| | 9298 | 8548 | 3686 | 3959 | 8332 | 8435 | 11759 | 6603 | 3632 | 9256 | 7646 | 4433 |
| | 10471 | 8992 | 2187 | 1321 | 8167 | 1369 | 12178 | 6756 | 431 | 11621 | 3129 | 9398 |
| | 7887 | 6330 | 1777 | 4570 | 7576 | 5170 | 3648 | 2127 | 1482 | 4993 | 4083 | 1890 |
| | 9636 | 10445 | 10415 | 2376 | 3523 | 6676 | 8678 | 6924 | 7263 | 9813 | 1641 | 8070 |
| | 4031 | 1716 | 9502 | 8473 | 3741 | 4330 | 11966 | 7877 | 10022 | 12534 | 9351 | 5643 |
| | 9443 | 9022 | 4325 | 11408 | 1742 | 9580 | 2032 | 2312 | 12130 | 6053 | 12465 | 5399 |
| | 9807 | 2943 | 5566 | 5880 | 4392 | 1847 | 2346 | 4013 | 4682 | 6974 | 5503 | 1470 |
| | 2501 | 1647 | 5895 | 11762 | 11022 | 7003 | 3169 | 11760 | 7954 | 3040 | 4710 | 3312 |
| | 3856 | 11269 | 10512 | 8997 | 10381 | 1594 | 11874 | 3858 | 5763 | 2945 | 2389 | 1287 |
| | 3666 | 12296 | 11449 | 6966 | 8724 | 3091 | 1104 | 1526 | 4106 | 2426 | 7312 | 5089 |
| | 4558 | 1362 | 784 | 7286 | 6804 | 2692 | 9155 | 638 | 4087 | 7165 | 4778 | 6496 |
| | 6596 | 11650 | 4378 | 2529 | 10338 | 3020 | 2704 | 2613 | 10136 | 2968 | 1289 | 2913 |
| | 12208 | 12213 | 2687 | 1763 | 1605 | 3255 | 5001 | 10446 | 3830 | 622 | 4919 | 7514 |
| | 6495 | 8862 | 3508 | 1757 | 6913 | 2770 | 456 | 682 | 12248 | 6264 | 10756 | 7128 |
| | 2597 | 11198 | 8880 | 1229 | 11102 | 2417 | 665 | 9103 | 6909 | 2972 | 4374 | 8782 |
| | 12517 | 10310 | 9656 | 8637 | 959 | 10314 | 2408 | 8583 | 12484 | 5284 | 8004 | 7865 |
| | 11095 | 5879 | 10104 | 8003 | 8292 | 6166 | 5477 | 12443 | 8881 | 7245 | 6369 | 4831 |
| | 5113 | 2644 | 1519 | 7906 | 7797 | 6820 | 3167 | 8998 | 1997 | 268 | 10780 | 11194 |
| | 2311 | 6443 | 12293 | 9910 | 9913 | 11253 | 2438 | 3383 | 11083 | 1199 | 5020 | 8646 |
| | 5389 | 5140 | 825 | 4294 | 9400 | 9402 | 9536 | 4982 | 4149 | 8342 | 524 | 10019 |
| | 6757 | 1894 | 7267 | 7062 | 6209 | 2655 | 10289 | 6225 | 423 | 6999 | 2829 | 4645 |
| | 408 | 9131 | 10854 | 7186 | 9600 | 3389 | 3166 | 4041 | 9764 | 8477 | 11226 | 2528 |
| | 12519 | 987 | 1542 | 11389 | 1514 | 6818 | 6026 | 4183 | 3426 | 9065 | 8073 | 7662 |
| | 521 | 1525 | 6163 | 8690 | 2566 | 11120 | 6634 | 12230 | 3498 | 10852 | 11230 | 8317 |
| | 9286 | 4782 | 2861 | 5592 | | | | | | | | |
| 268: | 2306 | 2969 | 631 | 4857 | 1313 | 7109 | 1316 | 1358 | 6436 | 6376 | 1292 | 5197 |
| | 12526 | 12222 | 2996 | 3154 | 7194 | 11518 | 9179 | 4127 | 11305 | 10569 | 10567 | 3130 |
| | 11756 | 11824 | 3924 | 9004 | 5636 | 5150 | 1597 | 4858 | 3748 | 898 | 7330 | 7336 |
| | 5733 | 1840 | 8995 | 10095 | 6969 | 10023 | 5215 | 5309 | 5582 | 10233 | 2383 | 9888 |
| | 6686 | 5932 | 9183 | 3811 | 12143 | 5699 | 9088 | 9087 | 8207 | 1596 | 6137 | 9901 |
| | 2799 | 8411 | 9354 | 6560 | 3176 | 10832 | 2488 | 9926 | 11193 | 11195 | 5123 | 1254 |
| | 2780 | 4194 | 12044 | 1537 | 4188 | 9091 | 1969 | 8401 | 9488 | 658 | 11948 | 4979 |
| | 8425 | 9465 | 4172 | 1215 | 5187 | 11001 | 6054 | 396 | 6093 | 5210 | 11954 | 789 |
| | 7551 | 7265 | 10056 | 2516 | 11201 | 1372 | 5622 | 7269 | 10981 | 1402 | 10587 | 10020 |
| | 6657 | 11034 | 11032 | 10054 | 9953 | 8025 | 2252 | 4474 | 5694 | 9696 | 5691 | 10809 |
| | 8977 | 10346 | 3591 | 9180 | 7391 | 7394 | 5492 | 12540 | 2472 | 2710 | 2686 | 2076 |
| | 2660 | 8500 | 8465 | 7571 | 11887 | 416 | 7526 | 6542 | 8794 | 8847 | 6428 | 3260 |
| | 3853 | 11018 | 10379 | 10323 | 834 | 11437 | 7553 | 4070 | 2104 | 1174 | 10284 | 11846 |
| | 388 | 1135 | 9188 | 4081 | 504 | 11872 | 1116 | 6905 | 3318 | 3112 | 11306 | 7937 |
| | 11417 | 7202 | 929 | 9811 | 7587 | 1512 | 8381 | 8471 | 6595 | 1879 | 5084 | 8348 |
| | 9653 | 4878 | 3895 | 7737 | 7879 | 4820 | 4626 | 3745 | 8954 | 4765 | 5018 | 734 |
| | 9023 | 11647 | 10134 | 7376 | 2762 | 4553 | 4983 | 4164 | 2233 | 11186 | 7226 | 9505 |
| | 1463 | 8789 | 7834 | 2370 | 6206 | 4286 | 11883 | 2350 | 1779 | 7873 | 7227 | 1335 |
| | 8565 | 2293 | 12316 | 2656 | 10736 | 9150 | 5160 | 4096 | 1749 | 1878 | 1023 | 10744 |
| | 12224 | 3384 | 4212 | 4181 | 1038 | 968 | 5850 | 4844 | 1090 | 7813 | 2000 | 11019 |
| | 8633 | 1077 | 11086 | 5295 | 3092 | 9202 | 12547 | 5178 | 1585 | 5771 | 2349 | 2911 |
| | 610 | 1151 | 477 | 2885 | 651 | 9730 | 4897 | 9257 | 1434 | 10783 | 3065 | 3735 |
| | 8911 | 3349 | 847 | 4678 | 4283 | 11842 | 2667 | 11788 | 10003 | 7487 | 5930 | 5684 |
| | 11740 | 7691 | 6817 | 5962 | 1052 | 10745 | 439 | 4459 | 10523 | 846 | 6976 | 6177 |
| | 3478 | 7601 | 7819 | 1952 | 12396 | 3429 | 9472 | 4315 | 10929 | 10731 | 1117 | 7823 |
| | 12261 | 8415 | 9073 | 6996 | 9361 | 8548 | 9298 | 3686 | 10143 | 8957 | 3959 | 8332 |
| | 8435 | 10657 | 2315 | 11759 | 6603 | 3632 | 9256 | 7646 | 4433 | 1683 | 10471 | 8992 |
| | 2187 | 1321 | 8167 | 9757 | 1369 | 12178 | 6756 | 431 | 6755 | 7219 | 11621 | 3129 |
| | 2327 | 9398 | 7887 | 6330 | 2730 | 1777 | 4570 | 11848 | 7576 | 5170 | 3715 | 5103 |
| | 5411 | 11655 | 2924 | 10812 | 3648 | 2127 | 1482 | 4922 | 8103 | 12323 | 9555 | 9526 |
| | 12027 | 4993 | 4083 | 1890 | 3046 | 4303 | 9846 | 12410 | 1069 | 9636 | 10445 | 10415 |
| | 2376 | 3523 | 7618 | 6676 | 11793 | 8678 | 6924 | 9049 | 10975 | 7263 | 9813 | 1641 |
| | 8070 | 4031 | 1716 | 3030 | 6543 | 10257 | 12281 | 9502 | 8473 | 5890 | 6492 | 3741 |
| | 4330 | 11966 | 7877 | 10022 | 12534 | 5643 | 9351 | 6220 | 9022 | 9443 | 8593 | 9086 |
| | 8252 | 3053 | 637 | 11399 | 3927 | 3956 | 6740 | 12074 | 3207 | 6653 | 4325 | 11408 |
| | 1742 | 2842 | 4629 | 8906 | 5476 | 6247 | 2037 | 7968 | 12118 | 9580 | 2032 | 12130 |
| | 2312 | 6053 | 12465 | 5399 | 9807 | 3325 | 9881 | 11280 | 8190 | 3467 | 8160 | 8985 |
| | 6516 | 7967 | 3272 | 2943 | 5566 | 1284 | 389 | 5614 | 9307 | 5191 | 10111 | 6835 |
| | 3477 | 1982 | 5273 | 12440 | 2901 | 5880 | 1847 | 4392 | 2346 | 4013 | 11723 | 1891 |
| | 4191 | 7522 | 4412 | 9130 | 4218 | 4682 | 5503 | 6974 | 1470 | 4766 | 8026 | 1555 |
| | 3869 | 2323 | 8023 | 630 | 7300 | 3951 | 8763 | 8948 | 2501 | 1647 | 5895 | 11762 |
| | 5216 | 7003 | 11022 | 3169 | 11760 | 7954 | 3040 | 10199 | 4710 | 11126 | 10147 | 8857 |
| | 5621 | 5668 | 11780 | 11939 | 5425 | 3312 | 3856 | 11269 | 8997 | 10512 | 1594 | 11874 |
| | 10381 | 3858 | 5763 | 2945 | 2389 | 1287 | 3666 | 11449 | 12296 | 2318 | 10463 | 1558 |
| | 448 | 3760 | 11055 | 1343 | 7993 | 2443 | 10324 | 3916 | 5526 | 9528 | 10453 | 2276 |
| | 7298 | 12136 | 11969 | 2482 | 6966 | 8724 | 3091 | 8734 | 8951 | 1104 | 1526 | 2426 |
| | 4106 | 5647 | 2321 | 7312 | 5089 | 1362 | 4558 | 784 | 10556 | 7286 | 2692 | 6804 |
| | 9155 | 10921 | 10659 | 638 | 659 | 4087 | 7165 | 4778 | 7233 | 6020 | 7284 | 10698 |
| | 6496 | 6596 | 11650 | 4378 | 2529 | 10338 | 3020 | 2704 | 2613 | 10136 | 1375 | 1948 |
| | 1712 | 2968 | 1289 | 2913 | 2224 | 11190 | 3021 | 12208 | 12213 | 2687 | 12495 | 1763 |
| | 1605 | 3255 | 830 | 8955 | 5001 | 10446 | 3830 | 622 | 4919 | 6716 | 9314 | 7514 |
| | 6495 | 8862 | 3508 | 8463 | 1757 | 6913 | 2770 | 456 | 459 | 4180 | 682 | 6264 |
| | 10756 | 12248 | 2597 | 11198 | 7128 | 8880 | 1229 | 11102 | 2417 | 665 | 3855 | 10502 |
| | 9103 | 6909 | 2972 | 4374 | 8782 | 12517 | 6215 | 10310 | 9656 | 8637 | 959 | 10314 |
| | 6073 | 550 | 6945 | 9390 | 11644 | 3958 | 9252 | 2408 | 8583 | 12484 | 5284 | 9146 |
| | 353 | 4888 | 8004 | 7865 | 6919 | 3790 | 3191 | 5474 | 11095 | 5879 | 8003 | 10104 |
| | 9560 | 7254 | 3313 | 6166 | 8292 | 5477 | 12443 | 8881 | 7245 | 4818 | 6523 | 601 |
| | 7467 | 5655 | 7904 | 2616 | 7385 | 11356 | 10441 | 4896 | 10757 | 5707 | 2099 | 10943 |
| | 3339 | 10559 | 10300 | 6401 | 2699 | 12163 | 6765 | 7800 | 6015 | 796 | 9475 | 5508 |
| | 1048 | 6449 | 4831 | 6369 | 5113 | 2644 | 1519 | 1551 | 1516 | 7906 | 3948 | 3970 |
| | 1241 | 8048 | 7797 | 6820 | 3167 | 8998 | 1997 | 10780 | 11194 | 2311 | 6443 | 7250 |
| | 5239 | 4290 | 8558 | 2604 | 1457 | 9596 | 9792 | 7405 | 4277 | 12381 | 5426 | 10573 |
| | 11978 | 7424 | 2328 | 2813 | 8478 | 10887 | 10427 | 2478 | 267 | 4782 | 8317 | 9286 |
| | 2861 | 5592 | 4717 | 1627 | 11355 | 4384 | 1626 | 12203 | 1628 | 1634 | 3012 | 5310 |
| | 10932 | 1938 | 1631 | 9170 | 11150 | 9904 | 12196 | 5943 | 7142 | 474 | 9062 | 10827 |
| | 2811 | 11127 | 11368 | 5339 | 9304 | 6956 | 10334 | 4001 | 6413 | 5342 | 7798 | 3896 |
| | 11894 | 7780 | 6114 | 3142 | 5535 | 11149 | 6833 | 3647 | 4112 | 12293 | 9910 | 9913 |
| | 11253 | 11312 | 2438 | 3383 | 11537 | 12138 | 2772 | 11083 | 1199 | 5020 | 10690 | 8646 |
| | 5389 | 5140 | 825 | 8086 | 4294 | 9402 | 9400 | 9536 | 4982 | 4149 | 8342 | 524 |
| | 10019 | 6757 | 1894 | 7267 | 7062 | 6209 | 2655 | 10289 | 6225 | 423 | 6999 | 2829 |
| | 4645 | 408 | 6995 | 8495 | 12394 | 9131 | 10854 | 7186 | 9600 | 3389 | 3166 | 5667 |
| | 7275 | 4542 | 6618 | 519 | 12086 | 1366 | 4041 | 9764 | 8477 | 7372 | 1002 | 9763 |
| | 11446 | 11226 | 2528 | 12519 | 987 | 1542 | 11389 | 1514 | 6818 | 6026 | 4183 | 9065 |
| | 3426 | 8073 | 7662 | 521 | 1525 | 6163 | 8690 | 2566 | 11120 | 6634 | 11361 | 9685 |
| | 12230 | 3498 | 10852 | 11230 | 8817 | 11471 | 3901 | | | | | |
| 269: | 10246 | 7020 | 10686 | 1680 | 2796 | 1248 | 4594 | 2505 | 2649 | 8814 | 4168 | 8374 |
| | 6389 | 751 | 11074 | 5159 | 11572 | 9199 | 8170 | 11830 | 3320 | 1694 | 6988 | 4377 |
| | 1158 | 2140 | 6808 | 1540 | 816 | 2611 | 2241 | 4706 | 12106 | 2495 | 7793 | 6342 |
| | 12477 | 3412 | 7006 | 12049 | 10544 | 4477 | 12125 | 7475 | 4354 | 2846 | 7156 | 6363 |
| | 2055 | 7558 | 5296 | 12398 | 1019 | 2781 | 7458 | 6926 | 7121 | 11829 | 3754 | 9602 |
| | 3038 | 2174 | 11439 | 11516 | 8441 | 3201 | 538 | 4055 | 8783 | 11982 | 11239 | 4860 |
| | 6050 | 7851 | 6664 | 4339 | 8596 | 1835 | 4062 | 8288 | 1678 | 5580 | 3810 | 8594 |
| | 7041 | 6577 | 1960 | | | | | | | | | |
| 270: | 4062 | 1835 | 12226 | | | | | | | | | |
| 271: | 8290 | 9642 | 1843 | 11732 | 12475 | 1766 | 8069 | 520 | 1037 | 6505 | 5910 | 11968 |
| | 2170 | 9735 | 9733 | 3296 | 9919 | 9736 | 6388 | 4211 | 10836 | 7854 | 6903 | 4895 |
| | 4891 | 2824 | 11297 | 6396 | 5660 | 3159 | 4028 | 3732 | | | | |
| 272: | 8063 | 5732 | 3188 | 12369 | 8106 | 5080 | 8559 | 5286 | 9212 | 6803 | 750 | 4584 |
| | 1070 | 6395 | 12048 | 6368 | 4780 | 6720 | 3285 | 7270 | 5175 | 10059 | 3031 | 9890 |
| | 4441 | 8785 | 8432 | 7543 | 8947 | 2382 | 9338 | 9916 | 2726 | 5706 | 4904 | 1112 |
| | 8534 | 12046 | 5615 | 4488 | 804 | 3480 | 1954 | 12218 | 6267 | 11927 | 6258 | 8125 |
| | 8126 | 5527 | 6214 | 11902 | 1822 | 1837 | 6240 | 7878 | 12091 | 8556 | 9969 | 9381 |
| | 11837 | 7476 | 8665 | 452 | 3702 | 12328 | 10209 | 2368 | 7672 | 6087 | 4676 | 4229 |
| | 7434 | 3076 | 10466 | 6404 | 841 | 4861 | 4575 | 2872 | 9917 | 8967 | 9749 | 12115 |
| | 10692 | 5473 | 7256 | 1873 | 2198 | 1336 | 3931 | 5798 | 5808 | 8673 | 3377 | 510 |
| | 3158 | 3925 | 8389 | 12141 | 9014 | 11932 | 3569 | 10651 | 2208 | 8990 | 3345 | 906 |
| | 12209 | 1050 | 7346 | 9893 | 1587 | 3161 | 10825 | 3649 | 1918 | 6767 | 501 | 4795 |
| | 10221 | 5149 | 6439 | 2784 | 10214 | 1584 | 3120 | 12202 | 5678 | 428 | 10578 | 7612 |
| | 4274 | 6191 | 4074 | 6190 | 7590 | 10144 | 3043 | 5323 | 3640 | 5250 | 1128 | 8414 |
| | 9490 | 9112 | 9758 | | | | | | | | | |
| 273: | 8564 | 10720 | 7580 | 12251 | 9922 | 5975 | 9534 | 9393 | 11158 | 3613 | 2357 | 8444 |
| | 2119 | 7602 | 3108 | 2579 | 8365 | 9547 | 11895 | 2245 | 12158 | 11802 | 1274 | 6626 |
| | 8769 | 278 | 2843 | 10230 | 6198 | 10814 | 2304 | 9207 | 9542 | 6236 | 10051 | 10027 |
| 274: | 8564 | 10720 | 7580 | 12251 | 9922 | 9576 | 4259 | 7808 | 6453 | 6362 | 10533 | 12131 |
| | 4838 | 10436 | 9019 | 7182 | 4738 | 7025 | 1326 | 7147 | 8769 | 6626 | 4708 | 11348 |
| | 8116 | 2843 | 10230 | 6198 | 10814 | 2304 | 9207 | 9975 | | | | |
| 275: | 8564 | 10720 | 7580 | 12251 | 9922 | 5975 | 8617 | 4257 | 645 | 295 | 9393 | 9534 |
| | 11158 | 3613 | 6982 | 2357 | 9576 | 4259 | 7808 | 8296 | 3210 | 4615 | 747 | 8228 |
| | 8444 | 6520 | 1408 | 1212 | 2119 | 12131 | 4397 | 10412 | 3357 | 10137 | 7547 | 3018 |
| | 7602 | 1687 | 7289 | 2579 | 11413 | 4889 | 3108 | 2245 | 2058 | 1274 | 1304 | 1326 |
| | 12252 | 9409 | 6626 | 8769 | 4708 | 11442 | 5397 | 12002 | 8139 | 5642 | 11431 | 8792 |
| | 387 | 7509 | 208 | 2269 | 11533 | 6769 | 2676 | 1510 | 921 | 3668 | 8728 | 2843 |
| | 10230 | 6198 | 10814 | 2304 | 9207 | | | | | | | |
| 276: | 8564 | 10720 | 7580 | 12251 | 9922 | 5975 | 6953 | 3210 | 8228 | 4615 | 1408 | 747 |
| | 8444 | 2119 | 6520 | 12131 | 1212 | 8085 | 4738 | 11349 | 8769 | 6626 | 4708 | 2149 |
| | 6060 | 1642 | 2843 | 10230 | 6198 | 10814 | 2304 | 9207 | | | | |
| 278: | 8564 | 10720 | 7580 | 12251 | 9922 | 5975 | 8365 | 9547 | 11895 | 12158 | 4163 | 4240 |
| | 4160 | 5925 | 3184 | 8350 | 7490 | 11199 | 6290 | 9672 | 12433 | 3775 | 6965 | 6236 |
| | 2843 | 10230 | 6198 | 10814 | 2304 | 9207 | | | | | | |
| 279: | 11873 | 12447 | 2706 | 9271 | 8545 | 8588 | 8589 | 1577 | 1575 | 1576 | 1556 | 1574 |
| | 1554 | 12551 | 2725 | 3886 | 4500 | 6611 | 2287 | 8846 | 8469 | 10838 | 672 | 10223 |
| | 7975 | 8434 | 3868 | 4882 | 10126 | 11563 | 3642 | 9352 | 11652 | 8174 | 11905 | 9191 |
| | 8406 | 4808 | 4695 | 731 | 743 | 11308 | 557 | 8768 | 8766 | 7331 | 8826 | 8798 |
| | 8805 | 8823 | 8802 | 8770 | 8810 | 7337 | 10227 | 12576 | 6424 | 8751 | 2625 | 2329 |
| | 11117 | 5782 | 5613 | 12126 | 3234 | 11981 | 7912 | 4328 | 8756 | 10460 | 11394 | 11912 |
| | 11140 | 11794 | 5736 | 7997 | 8001 | 8833 | 8858 | 8229 | 11559 | 4865 | 2620 | 4139 |
| | 10306 | 12509 | 7191 | 6463 | 3414 | 7888 | 9622 | 2636 | 10442 | 1509 | 8263 | 5935 |
| | 4620 | 8920 | 7281 | 978 | 12244 | 8303 | 4679 | 10588 | 12456 | 8675 | 1462 | 10865 |
| | 2027 | 9686 | 1337 | 7315 | 2477 | 4322 | 2786 | 12487 | 3434 | 8685 | 1110 | 10015 |
| | 12292 | 1614 | 10953 | 5654 | 1401 | 5132 | 4731 | 4059 | 10385 | 8101 | 1092 | 2544 |
| | 3727 | 8068 | 9657 | 11690 | 9843 | 902 | 11114 | 11508 | 9248 | 5844 | 4093 | 4193 |
| | 7973 | 7272 | 9752 | 3395 | 7480 | 12062 | 7735 | 7260 | 5272 | 5194 | 2631 | 1302 |
| | 11584 | 6056 | 11710 | 6971 | 11324 | 10325 | 2534 | 3684 | 9590 | 5816 | 1644 | 7616 |
| | 5600 | 5596 | 8889 | 8884 | 7853 | 7024 | 1648 | 8367 | 5246 | 4913 | 12176 | 704 |
| | 10123 | 9378 | 1836 | 11691 | 1654 | 9950 | 2628 | 11218 | 5390 | 4684 | 8860 | 5562 |
| | 4654 | 5424 | 4056 | 4054 | 4649 | 5575 | 5573 | 4685 | 4681 | 794 | 1741 | 10798 |
| | 10795 | 10815 | 3025 | | | | | | | | | |
| 280: | 8944 | 10309 | 11523 | 5409 | 9218 | 5496 | 3060 | 12127 | 10717 | 1563 | 11079 | 5075 |
| | 5446 | 7162 | 6394 | 475 | 2895 | 11855 | | | | | | |
| 281: | 8713 | 1390 | 12290 | 11594 | 6366 | 5219 | 9822 | 472 | 990 | 1864 | 5322 | 3734 |
| | 5671 | 8402 | 1798 | 5624 | 8175 | 8143 | 2112 | 2007 | 9228 | 8075 | 8074 | 9689 |
| | 1977 | 6691 | 4246 | 11342 | 9339 | 12570 | 3946 | 1709 | 3643 | 7404 | 4008 | 822 |
| | 2906 | 9396 | 6308 | 7762 | 8245 | 5247 | 8501 | 5398 | 9724 | 10792 | 9537 | 8154 |
| | 1704 | 3799 | 12444 | 7567 | 4631 | 10236 | 4053 | 10234 | 12524 | 11204 | 12520 | |
| 282: | 8713 | 1390 | 12290 | 11594 | 6366 | 5219 | 9822 | 472 | 990 | 1864 | 5322 | 3734 |
| | 5671 | 8402 | 1798 | 5624 | 8175 | 8143 | 2112 | 2007 | 9228 | 8075 | 8074 | 9689 |
| | 1977 | 6691 | 4246 | 11342 | 9339 | 12570 | 3946 | 1709 | 3643 | 7404 | 4008 | 822 |
| | 2906 | 9396 | 6308 | 7762 | 8245 | 5247 | 8501 | 5398 | 9724 | 10792 | 9537 | 8154 |
| | 1704 | 3799 | 12444 | 7567 | 4631 | 10236 | 4053 | 10234 | 12524 | 11204 | 12520 | |
| 283: | 5129 | 579 | 7910 | 6041 | 4924 | 9938 | 8648 | 1959 | 5116 | 11840 | 10410 | 6723 |
| | 2627 | 2374 | 8349 | 5198 | 4261 | 7308 | 12451 | 4744 | 8824 | 5423 | 9208 | 7703 |
| | 8379 | 7382 | 4873 | 7258 | 887 | 12265 | 9643 | 1685 | 7499 | 8488 | 3329 | 7902 |
| | 9795 | 3563 | 11706 | 486 | 9611 | 5352 | 8424 | 2190 | 6175 | 6882 | 6684 | 10772 |
| | 7323 | 5838 | 5796 | 12157 | 5042 | 12530 | 8929 | 2774 | 7524 | 3019 | 6134 | 9705 |
| | 11596 | 12028 | 5028 | 8919 | 6435 | 10672 | 5108 | 3737 | 6630 | 1204 | 10355 | 3914 |
| | 934 | 8102 | 11080 | 3227 | 5595 | 4999 | 11933 | 10068 | 493 | 10775 | 6715 | 4025 |
| | 748 | 3338 | 2537 | 4002 | 9897 | 12249 | 4601 | 2307 | 2406 | 12399 | 3839 | 11641 |
| | 7811 | 855 | 11881 | 4418 | 874 | 11400 | 3526 | 2517 | 5240 | 7534 | 9327 | 9479 |
| | 6916 | 4651 | 2448 | 4764 | 7115 | 7359 | 4745 | 2218 | 2445 | 5550 | 11288 | 4565 |
| | 10376 | 10600 | 10339 | 6052 | 5107 | 10317 | 2243 | 9128 | 4595 | 3864 | 2303 | 9770 |
| | 9539 | 9743 | 11803 | 7677 | 11096 | 8297 | 1154 | 3485 | 10991 | 876 | 4100 | 7296 |
| | 4016 | 2065 | 7236 | 12548 | 10273 | 12097 | 2595 | 7217 | 1666 | 8670 | 10349 | 1774 |
| | 2476 | 7363 | 4741 | 6796 | 6565 | 11292 | 1849 | 4373 | 3435 | 7230 | 3341 | 2541 |
| | 1821 | 8498 | 5396 | 3198 | 11538 | 3685 | 8651 | 10348 | 7686 | 3494 | 2601 | 3152 |
| | 2923 | 7678 | 10044 | 12272 | 8979 | 8978 | 9671 | 457 | 3653 | 1629 | 4117 | 4614 |
| 284: | 6668 | 3235 | 3818 | 3280 | 4758 | 4297 | 9603 | 12233 | 6255 | 277 | 11983 | 5049 |
| | 1677 | 10510 | 5376 | 4876 | 7709 | 2606 | 7855 | 5817 | 5502 | 2752 | 8873 | 7831 |
| | 12155 | 4505 | 3421 | 8647 | 2936 | 8837 | 1861 | 10226 | 3621 | | | |
| 285: | 1976 | 5617 | 4364 | 10244 | 11750 | 7026 | 10598 | 10444 | 12198 | 6957 | 11935 | 1931 |
| | 721 | 957 | 10530 | 5964 | 3926 | 2863 | 5386 | 3808 | 8614 | 2702 | 6345 | 10476 |
| | 5312 | 4110 | 6414 | 9914 | 11598 | 7824 | 5318 | 417 | 12305 | 7779 | 5448 | 12493 |
| | 4038 | | | | | | | | | | | |
| 286: | 1976 | 5617 | 4364 | 10244 | 11750 | 7026 | 10598 | 10444 | 12198 | 6957 | 11935 | 1931 |
| | 721 | 957 | 10530 | 5964 | 3926 | 2863 | 5386 | 3808 | 8614 | 2702 | 6345 | 10476 |
| | 5312 | 4110 | 6414 | 9914 | 11598 | 7824 | 5318 | 417 | 12305 | 7779 | 5448 | 12493 |
| | 4038 | | | | | | | | | | | |
| 287: | 4532 | 4537 | 4535 | 4321 | 5690 | 3863 | 4040 | 5167 | 9368 | 6992 | 1071 | 1871 |
| | 3307 | 1504 | 9777 | 11731 | 3677 | 930 | 7604 | 4057 | 11684 | 4610 | 4616 | 4007 |
| | 2093 | 1382 | 8118 | 1103 | 4486 | 5467 | 5393 | 4515 | 4521 | 4523 | 4494 | 4498 |
| | 4491 | 4501 | 4517 | 2428 | 10002 | 7721 | | | | | | |
| 288: | 4532 | 4537 | 4535 | 4321 | 5690 | 3863 | 4040 | 5167 | 9368 | 6992 | 1071 | 1871 |
| | 3307 | 1504 | 9777 | 11731 | 3677 | 930 | 7604 | 4057 | 11684 | 4610 | 4616 | 4007 |
| | 2093 | 1382 | 8118 | 1103 | 4486 | 5467 | 5393 | 4515 | 4521 | 4523 | 4494 | 4498 |
| | 4491 | 4501 | 4517 | 2428 | 10002 | 7721 | | | | | | |
| 289: | 5602 | 4469 | 5419 | 5432 | 4637 | 10619 | 12255 | 11347 | 1232 | 1294 | 10091 | 12571 |
| | 3340 | 7341 | 10614 | 3641 | 10384 | 2591 | 10195 | 6615 | 3382 | | | |
| 290: | 5602 | 4469 | 5419 | 5432 | 4637 | 10619 | 12255 | 11347 | 1232 | 1294 | 10091 | 12571 |
| | 3340 | 7341 | 10614 | 3641 | 10384 | 2591 | 10195 | 6615 | 3382 | | | |
| 291: | 956 | 4465 | 4807 | 7960 | 12053 | | | | | | | |
| 292: | 956 | 4465 | 4807 | 7960 | 12053 | | | | | | | |
| 293: | 9995 | 10229 | 5629 | 4497 | 5478 | 1295 | 6535 | 7277 | 5314 | 5311 | 2845 | 2893 |
| | 1590 | 3892 | 5403 | 9930 | 12093 | | | | | | | |
| 294: | 5961 | 4836 | 7630 | 4296 | 5666 | 7068 | 3635 | 8611 | 3090 | 1533 | 3559 | 10613 |
| | 6581 | 2421 | 6383 | 11801 | | | | | | | | |
| 295: | 8564 | 10036 | 10720 | 7580 | 12251 | 9922 | 5975 | 3210 | 4615 | 747 | 8228 | 10137 |
| | 4889 | 11413 | 1687 | 7547 | 3357 | 10412 | 4397 | 4738 | 1304 | 8769 | 6626 | 4708 |
| | 921 | 2843 | 10230 | 6198 | 10814 | 2304 | 9207 | | | | | |
| 296: | 10164 | 12268 | 7193 | 12156 | 12154 | 9486 | 8455 | 12552 | 5871 | 11173 | 2548 | 2542 |
| | 5633 | 3141 | 3766 | 590 | 1082 | 3992 | 8267 | 6299 | 778 | 2533 | 1059 | 4146 |
| | 7163 | 5256 | 11156 | 11648 | 11529 | 5921 | 8825 | 6682 | 6157 | 8241 | 1259 | 10579 |
| | 11293 | 3172 | 3890 | 3244 | 1660 | 5461 | 9077 | 10417 | 11782 | 9241 | 4647 | 6085 |
| | 5533 | 10786 | 11283 | 8864 | 7613 | 10145 | 3023 | 2254 | 11899 | 9693 | 4998 | 2249 |
| | 6410 | 5641 | 7093 | 4052 | 4549 | 1355 | 3042 | 7495 | 9483 | 1005 | 6235 | 11042 |
| | 9349 | 7772 | 11454 | 7077 | 2216 | 6433 | 7119 | 629 | 6578 | 12361 | 12367 | 12339 |
| | 12304 | 1095 | 5688 | 9382 | 10369 | 3991 | 7244 | 3978 | 8632 | 6688 | 297 | 4237 |
| | 8212 | 10490 | 8019 | 10723 | 6507 | 7628 | 10789 | 3579 | 7364 | 8000 | 1445 | 663 |
| | 12144 | 9990 | 11984 | 1945 | 8030 | 3293 | 8031 | 2228 | 3137 | 5015 | 11472 | |
| 297: | 10164 | 12268 | 7193 | 9486 | 8455 | 12552 | 5871 | 11173 | 2548 | 2542 | 5633 | 3141 |
| | 3766 | 590 | 1082 | 3992 | 8267 | 6299 | 778 | 2533 | 1059 | 4146 | 7163 | 5256 |
| | 11156 | 11648 | 11529 | 5921 | 8825 | 6157 | 8241 | 1259 | 10579 | 11293 | 3172 | 3890 |
| | 3244 | 1660 | 5461 | 9077 | 10417 | 11782 | 9241 | 4647 | 6085 | 5533 | 10786 | 11283 |
| | 8864 | 7613 | 10145 | 3023 | 2254 | 11899 | 9693 | 4998 | 2249 | 6410 | 296 | 5015 |
| | 11472 | 9171 | 5641 | 7093 | 4052 | 1355 | 4549 | 3042 | 7495 | 9483 | 6433 | 7119 |
| | 6578 | 12361 | 12367 | 12339 | 12304 | 1095 | 5688 | 9382 | 10369 | 3991 | 7244 | 3978 |
| | 8632 | 6688 | 8000 | 663 | 12144 | 9990 | 11984 | 1945 | 8030 | 8031 | 3293 | 2228 |
| | 3137 | | | | | | | | | | | |
| 298: | 6538 | 1032 | 1988 | 11733 | 10816 | 4334 | 10053 | 7132 | 8765 | | | |
| 299: | 9629 | 10933 | 11170 | 4429 | 11119 | 10276 | 2041 | 7360 | 11044 | 10557 | | |
| 300: | 8084 | 5326 | 12114 | 2801 | 859 | 5498 | 5501 | 5500 | 4097 | 2853 | 11026 | 1093 |
| | 6864 | 7572 | 1322 | 1998 | 9312 | 3195 | 3212 | 9141 | 6500 | 7593 | 2695 | 5994 |
| | 11381 | 2046 | 12450 | 1175 | 11496 | 10580 | 3308 | 10507 | 1359 | 766 | 482 | 7144 |
| | 3680 | 12207 | 5610 | 4785 | 5099 | 837 | 3691 | 11589 | 4538 | 9550 | 8239 | 10350 |
| | 4306 | 6253 | 8310 | 6929 | 7570 | 10029 | 6839 | 11665 | 12183 | 8699 | 10366 | 1752 |
| | 4109 | 9684 | 10416 | 12239 | 2071 | 10593 | 11167 | 4792 | 8276 | 4032 | 1858 | 10979 |
| | 11380 | 1446 | 7503 | 10114 | 1439 | 8461 | 3367 | 8284 | 8579 | 10447 | 5422 | 6013 |
| | 11212 | 11985 | 10505 | 10684 | 1958 | 5243 | 5224 | 3420 | 5244 | 2666 | 3503 | 10830 |
| | 7361 | 11291 | 3084 | 4658 | 1222 | 7043 | 833 | 2929 | 9358 | 7216 | 3236 | 4806 |
| | 1737 | 1662 | 2206 | 10693 | 4204 | 2008 | 12168 | 9731 | 3859 | 8398 | 6959 | 5618 |
| | 6121 | 10749 | 3974 | 1725 | 3083 | 9145 | 10401 | 3583 | 3584 | 3534 | 5237 | 11267 |
| | 5317 | 1076 | 5918 | 5308 | 8214 | 7478 | 11067 | 7070 | 703 | 1013 | 6708 | 857 |
| | 3213 | 6390 | 10358 | 1129 | 3328 | 11224 | 1067 | 2452 | 12064 | 7929 | 2677 | 12496 |
| | 2669 | 11302 | 5579 | 9844 | 11950 | 6986 | 5851 | 9106 | 12319 | 3231 | 10187 | 11369 |
| | 3962 | 2664 | 708 | 10537 | 8869 | 11611 | 10873 | 7664 | 9942 | 2756 | 11666 | 605 |
| | 2372 | 2185 | 4657 | 12151 | 917 | 8091 | 1353 | 2942 | 12000 | 401 | 10695 | 9397 |
| | 3623 | 4907 | 4103 | 2739 | 3833 | 8806 | 9107 | 5443 | 3374 | 578 | 2520 | 6380 |
| | 9491 | 10688 | 783 | 3548 | 403 | 5055 | 8515 | 11236 | 7936 | 2002 | 8293 | 5277 |
| | 1426 | 11734 | 9896 | 12360 | 3552 | 11263 | 4613 | 2881 | 873 | 969 | 7729 | 11390 |
| | 10130 | | | | | | | | | | | |
| 301: | 8084 | 5326 | 12114 | 2801 | 859 | 5498 | 5501 | 5500 | 4097 | 2853 | 11026 | 1093 |
| | 6864 | 7572 | 1322 | 1998 | 9312 | 3195 | 3212 | 9141 | 6500 | 7593 | 2695 | 5994 |
| | 11381 | 2046 | 12450 | 1175 | 11496 | 10580 | 3308 | 10507 | 1359 | 766 | 482 | 7144 |
| | 3680 | 12207 | 5610 | 4785 | 5099 | 837 | 3691 | 11589 | 4538 | 9550 | 8239 | 10350 |
| | 4306 | 6253 | 8310 | 6929 | 7570 | 10029 | 6839 | 11665 | 12183 | 8699 | 10366 | 1752 |
| | 4109 | 9684 | 10416 | 12239 | 2071 | 10593 | 11167 | 4792 | 8276 | 4032 | 1858 | 10979 |
| | 11380 | 1446 | 7503 | 10114 | 1439 | 8461 | 3367 | 8284 | 8579 | 10447 | 5422 | 6013 |
| | 11212 | 11985 | 10505 | 10684 | 1958 | 5243 | 5224 | 3420 | 5244 | 2666 | 3503 | 10830 |
| | 7361 | 11291 | 3084 | 4658 | 1222 | 7043 | 833 | 2929 | 9358 | 7216 | 3236 | 4806 |
| | 1737 | 1662 | 2206 | 10693 | 4204 | 2008 | 12168 | 9731 | 3859 | 8398 | 6959 | 5618 |
| | 6121 | 10749 | 3974 | 1725 | 3083 | 9145 | 10401 | 3583 | 3584 | 3534 | 5237 | 11267 |
| | 5317 | 1076 | 5918 | 5308 | 8214 | 7478 | 11067 | 7070 | 703 | 1013 | 6708 | 857 |
| | 3213 | 6390 | 10358 | 1129 | 3328 | 11224 | 1067 | 2452 | 12064 | 7929 | 2677 | 12496 |
| | 2669 | 11302 | 5579 | 9844 | 11950 | 6986 | 5851 | 9106 | 12319 | 3231 | 10187 | 11369 |
| | 3962 | 2664 | 708 | 10537 | 8869 | 11611 | 10873 | 7664 | 9942 | 2756 | 11666 | 605 |
| | 2372 | 2185 | 4657 | 12151 | 917 | 8091 | 1353 | 2942 | 12000 | 401 | 10695 | 9397 |
| | 3623 | 4907 | 4103 | 2739 | 3833 | 8806 | 9107 | 5443 | 3374 | 578 | 2520 | 6380 |
| | 9491 | 10688 | 783 | 3548 | 403 | 5055 | 8515 | 11236 | 7936 | 2002 | 8293 | 5277 |
| | 1426 | 11734 | 9896 | 12360 | 3552 | 11263 | 4613 | 2881 | 873 | 969 | 7729 | 11390 |
| | 10130 | | | | | | | | | | | |
| 302: | 7930 | 8544 | 10850 | 11315 | 1622 | 713 | 7552 | 12402 | 12054 | 2832 | 1378 | 7648 |
| | 5146 | 2634 | 9070 | 7958 | 4361 | 8568 | 5530 | 3222 | 7766 | 9447 | 7141 | 3358 |
| | 2648 | 3815 | 12564 | 7471 | 949 | 6651 | 11701 | 3772 | 8852 | 4184 | 7621 | 7652 |
| | 9840 | 9038 | | | | | | | | | | |
| 303: | 1087 | 3127 | 12531 | 11944 | 8119 | 5400 | 10714 | 2653 | 9713 | 6738 | 7171 | 7017 |
| | 3271 | 304 | 3126 | 11365 | 6566 | 6841 | 4270 | 4954 | 5831 | 3493 | 3736 | |
| 304: | 9927 | 8180 | 9829 | 3960 | 3127 | 2849 | 1133 | 11944 | 7171 | 4954 | 3126 | |
| 305: | 4622 | 10899 | 8164 | 3782 | 5729 | 798 | | | | | | |
| 306: | 5804 | 12016 | 7448 | 10738 | 10708 | 12014 | 10638 | 7423 | 7421 | 7417 | 309 | 10586 |
| | 7444 | 7446 | 5047 | 10645 | 10646 | 12280 | 207 | 2096 | 11839 | 7072 | 9709 | 1612 |
| | 8993 | 10037 | 6780 | 11613 | 9034 | 2004 | 8166 | 6931 | 7311 | 6922 | 8933 | 10494 |
| | 3783 | 308 | 12034 | 3781 | 9745 | 916 | 6666 | 9140 | 6285 | 9452 | 8035 | 12449 |
| | 10356 | 10064 | 4275 | 2067 | 3934 | 11430 | 12246 | 9405 | 2987 | 9052 | 12318 | 6252 |
| | 11326 | 8138 | 3397 | 9877 | 310 | 11058 | 8474 | 9105 | 11870 | 12047 | 3986 | 6725 |
| | 1902 | 4332 | 4672 | 9408 | 4088 | 3842 | 2342 | 1701 | 10402 | 12181 | 8446 | 4050 |
| | 6973 | 6860 | 7715 | 860 | 10725 | 4578 | 862 | 7045 | 11785 | 4789 | 5465 | 10224 |
| | 8088 | 10189 | 3553 | 9992 | 9964 | 3950 | 2793 | 6677 | 10001 | 3375 | 4200 | 10391 |
| | 10676 | 11712 | 10682 | 4747 | 206 | 307 | | | | | | |
| 307: | 12016 | 7448 | 9024 | 10738 | 10708 | 12014 | 7423 | 7421 | 7417 | 309 | 10586 | 7444 |
| | 7446 | 5047 | 10646 | 12280 | 207 | 2096 | 11839 | 9709 | 1612 | 8993 | 9034 | 2004 |
| | 8166 | 6931 | 7311 | 6922 | 3783 | 308 | 12034 | 3781 | 916 | 9745 | 9140 | 6285 |
| | 12449 | 9452 | 8035 | 10356 | 4443 | 10064 | 8138 | 2067 | 3934 | 4275 | 11430 | 9052 |
| | 12318 | 6252 | 12246 | 9405 | 2987 | 9728 | 11326 | 3397 | 9877 | 8474 | 310 | 11058 |
| | 9105 | 6860 | 7715 | 860 | 2342 | 1701 | 10402 | 8446 | 4050 | 6973 | 3986 | 11870 |
| | 12047 | 4332 | 6725 | 1902 | 9408 | 4088 | 3842 | 4672 | 10725 | 12181 | 1973 | 10224 |
| | 3950 | 4578 | 862 | 7045 | 11785 | 4789 | 5465 | 8088 | 9992 | 3553 | 10189 | 9964 |
| | 2793 | 6677 | 10001 | 3375 | 4200 | 10391 | 4747 | 206 | 306 | | | |
| 308: | 5804 | 12016 | 10678 | 10712 | 10735 | 7448 | 10738 | 10708 | 12014 | 10638 | 7423 | 7421 |
| | 7417 | 309 | 10586 | 10589 | 10603 | 10584 | 7444 | 10644 | 7446 | 5047 | 10645 | 10646 |
| | 12280 | 207 | 9710 | 2096 | 11839 | 9709 | 1612 | 8993 | 10037 | 8354 | 6780 | 11613 |
| | 9034 | 306 | 307 | 2004 | 11103 | 8166 | 6931 | 7311 | 6922 | 8933 | 3783 | 11857 |
| | 12034 | 3781 | 6666 | 9745 | 12449 | 10356 | 4275 | 12246 | 9405 | 2987 | 2067 | 3934 |
| | 8138 | 11430 | 9052 | 12318 | 6252 | 7223 | 9728 | 410 | 6792 | 9877 | 3397 | 310 |
| | 11058 | 9105 | 8474 | 8446 | 4050 | 6973 | 6860 | 7715 | 860 | 4332 | 6725 | 1902 |
| | 2342 | 1701 | 10402 | 12181 | 9408 | 4088 | 3842 | 10725 | 11870 | 12047 | 3986 | 4672 |
| | 6779 | 3950 | 862 | 7045 | 11785 | 4789 | 5465 | 10224 | 8088 | 3553 | 9992 | 10189 |
| | 9964 | 4578 | 2793 | 6677 | 10001 | 3375 | 4200 | 10391 | 11712 | 4747 | 206 | |
| 309: | 5804 | 12016 | 10678 | 10712 | 10735 | 7448 | 10738 | 10708 | 12014 | 10638 | 7423 | 7421 |
| | 7417 | 10586 | 10603 | 10589 | 10584 | 7444 | 10644 | 7446 | 5047 | 10645 | 10646 | 12280 |
| | 207 | 9710 | 2096 | 11839 | 1612 | 8993 | 10037 | 6780 | 11613 | 9034 | 306 | 307 |
| | 2004 | 8166 | 6931 | 7311 | 6922 | 8933 | 10494 | 3783 | 308 | 12034 | 3781 | 9745 |
| | 12449 | 10356 | 4275 | 2067 | 3934 | 9728 | 12246 | 9405 | 2987 | 8138 | 3564 | 2073 |
| | 4786 | 9877 | 310 | 11058 | 8474 | 9105 | 6779 | 9408 | 4088 | 3842 | 4672 | 6725 |
| | 1902 | 6860 | 7715 | 860 | 2342 | 8446 | 1701 | 4050 | 10402 | 6973 | 4332 | 11870 |
| | 12047 | 3986 | 10725 | 10224 | 862 | 7045 | 11785 | 4789 | 5465 | 8088 | 3553 | 10189 |
| | 9992 | 3950 | 4578 | 1468 | 10676 | 11712 | 10682 | 4747 | 206 | | | |
| 310: | 5804 | 2397 | 12016 | 7448 | 10738 | 10708 | 12014 | 10638 | 7423 | 7421 | 7417 | 309 |
| | 7444 | 7446 | 10645 | 12280 | 207 | 9710 | 3151 | 3170 | 2096 | 11839 | 9709 | 1612 |
| | 8993 | 10037 | 8354 | 6780 | 8499 | 11613 | 1088 | 9034 | 306 | 307 | 2004 | 8166 |
| | 888 | 7311 | 3783 | 308 | 12034 | 7362 | 6666 | 8344 | 7302 | 1234 | 10676 | 10741 |
| | 10660 | 10641 | 10683 | 11712 | 10743 | 10575 | 10581 | 10682 | 4747 | 206 | 8474 | 9105 |
| 311: | 10915 | 10878 | 1068 | 12529 | 8032 | 413 | 5270 | 2499 | 8936 | 5781 | 4938 | 5276 |
| | 1252 | 892 | 4567 | | | | | | | | | |
| 312: | 8987 | 9785 | 7079 | 7212 | 7143 | 1975 | 6697 | 2771 | 8204 | 12195 | 8537 | 585 |
| | 2367 | 8528 | 2778 | 10971 | 5848 | 3923 | 2481 | 10194 | 10765 | 6901 | | |
| 313: | 9794 | 11709 | 6934 | 6911 | 3465 | 11447 | 8784 | 2016 | 8641 | 5611 | 8517 | 8671 |
| | 3003 | 7544 | 6479 | 6231 | 563 | 8829 | 10089 | 2790 | 628 | 627 | 9649 | 1297 |
| | 11694 | 5577 | 8598 | 9675 | 10148 | 4363 | 3836 | 4733 | 1188 | 3242 | 5221 | 11035 |
| | 2914 | 8480 | 11016 | 4957 | 7466 | 6072 | 7775 | 10813 | 3443 | 7004 | 1031 | 12329 |
| | 2384 | 8400 | 3441 | 6113 | 1400 | 10790 | 3796 | 7441 | 1736 | 6771 | 5928 | 2870 |
| | 5451 | 8104 | 10128 | 10965 | 2791 | 9293 | 11843 | 11570 | 8042 | 1481 | 6529 | 11667 |
| | 866 | 7292 | 6602 | | | | | | | | | |
| 314: | 12162 | 11631 | 3039 | 3335 | 1817 | 6144 | 11507 | 11509 | 10668 | 9931 | 7389 | 11289 |
| | 3607 | 1332 | 7818 | 7488 | 11660 | 11565 | 11685 | 11567 | 11688 | 10617 | 5147 | 2492 |
| | 1968 | 10962 | 3770 | 7759 | 8253 | 7833 | 2978 | 10138 | 9767 | 3688 | 11601 | 11695 |
| | 4434 | 10033 | 407 | 4317 | 10372 | 540 | 8736 | 5135 | 6797 | 470 | 12257 | 7890 |
| | 2547 | 9902 | 8793 | 1833 | 11410 | 5625 | 3866 | 10200 | 2909 | 10621 | 5905 | 11153 |
| | 769 | 6607 | 7608 | 11014 | 10403 | 1714 | 1985 | 8277 | 11535 | 11659 | 11637 | 12345 |
| | 12301 | 11505 | 11530 | 11656 | 11525 | 11606 | 12307 | 11634 | 12340 | | | |
| 315: | 712 | 11134 | 11581 | 8135 | 891 | 5866 | 7918 | 1721 | 10277 | 4963 | 7671 | 9567 |
| | 512 | 10630 | 6458 | 3683 | 4951 | 8419 | 4724 | 5955 | 3114 | 1441 | 4439 | 8965 |
| | 11628 | 9774 | 5184 | 10737 | 9308 | 6612 | 10159 | 5721 | 6759 | 12507 | 2586 | 7299 |
| | 10335 | 9387 | 5504 | 6758 | 9577 | 5043 | 9868 | 6733 | 9951 | 5843 | 11373 | 4090 |
| | 3481 | 2186 | 10450 | 10709 | 11672 | 6568 | 11882 | 5745 | 9469 | 9268 | 11804 | 10475 |
| | 11196 | 6964 | 2129 | 10514 | 7931 | 8436 | 1370 | 7659 | 6865 | 1238 | 3006 | 635 |
| | 7240 | 5350 | 6661 | 12111 | 9988 | 1853 | 1109 | 2594 | 12193 | 12188 | 1329 | 10264 |
| | 11716 | 4872 | 347 | 4739 | 7259 | 3909 | 3596 | 6541 | 2688 | 2146 | 5708 | 10807 |
| | 10781 | 10784 | 10777 | 9045 | 8986 | 8786 | 9839 | 11901 | 1929 | 1933 | 1935 | 10650 |
| | 10654 | 7773 | 7801 | 7804 | 1143 | 2054 | 6917 | 1476 | 10477 | 4712 | 1561 | 10094 |
| | 1078 | 1684 | 10485 | 2080 | 10545 | 2225 | 11028 | 8886 | 9355 | 2815 | 2957 | 3147 |
| | 7080 | 5087 | 2577 | 11228 | 10228 | 4716 | 4719 | 8219 | 1623 | 5563 | 11698 | 4688 |
| | 6802 | 7656 | 7655 | 11357 | 11544 | 11574 | 12191 | 9823 | 707 | 4304 | 11582 | 11993 |
| | 11988 | 11991 | 12562 | 11182 | 11164 | 11162 | 10876 | 11184 | 2858 | 1541 | 9124 | 7770 |
| | 11817 | 2155 | 12468 | 8830 | 10980 | 5410 | 8443 | 6061 | 2736 | 11463 | 8780 | 9125 |
| | 11997 | 935 | 8250 | 9251 | 4203 | 9291 | 6598 | 4948 | 6065 | 2047 | 10171 | 7719 |
| | 6540 | 3804 | 2670 | 3982 | 11540 | 11059 | 3392 | 10297 | 6763 | 9898 | 2286 | 6482 |
| | 1045 | 7087 | 8619 | 7714 | 3117 | 7324 | 7301 | 7454 | 9151 | 10810 | 2165 | 1994 |
| | 11179 | 11370 | 8371 | 7116 | 7222 | 9215 | | | | | | |
| 316: | 10181 | 5990 | 406 | 6910 | 5922 | 9771 | 8885 | 1859 | 574 | 2867 | 532 | 1868 |
| | 6925 | 10421 | 3134 | 12068 | 5705 | 2337 | 12241 | 9985 | 3554 | 11752 | 5564 | 2432 |
| | 2463 | 1750 | 7099 | 9628 | 6813 | 6873 | 1600 | 1443 | 7309 | 12216 | 6438 | 10892 |
| 317: | 2001 | 9411 | 1075 | 7903 | 8973 | 6228 | 11216 | 3706 | 9101 | 10886 | 2855 | 12572 |
| | 10961 | 7464 | 2904 | 10516 | 4510 | 8333 | 8057 | 11958 | 4305 | 6046 | 1672 | 5230 |
| | 11536 | 3762 | 2038 | 11435 | 2899 | 6559 | 5359 | 494 | 6709 | 9645 | 9316 | 8626 |
| | 4344 | 943 | 5569 | 2274 | 12370 | 3372 | 2986 | 9817 | 2723 | 8355 | 5821 | 6502 |
| | 9481 | 6030 | 1829 | 7862 | 8577 | 2818 | 10521 | 2507 | 1904 | 11531 | 2831 | 9309 |
| | 8347 | 3705 | 6837 | 1942 | 529 | 3692 | 884 | 6075 | 11053 | 5261 | 1823 | 5521 |
| | 5620 | 9741 | 5458 | 4209 | 10496 | 3133 | 10883 | 10748 | 11524 | 8416 | 6456 | 9739 |
| | 10729 | 3716 | 1869 | 3943 | 10259 | 989 | 1566 | 9414 | 5570 | 3969 | 2061 | 12023 |
| | 4834 | 7329 | 1599 | 12133 | 1298 | 997 | 3452 | 3409 | 7876 | 500 | 6317 | 10340 |
| | 9615 | 5619 | 2025 | 11396 | 5304 | 1410 | 5125 | 11354 | 7934 | 11109 | 10205 | 11465 |
| | 10315 | 7718 | 3708 | 12353 | 7369 | 4198 | 11754 | 9213 | 720 | 2565 | 4404 | 8816 |
| | 2763 | 9750 | 3487 | 2107 | 2416 | 5876 | 1811 | 10553 | 2898 | 1699 | 11813 | 9078 |
| | 839 | 6693 | 3694 | 2275 | 8945 | 6825 | 429 | 10377 | 3278 | 10269 | 9851 | 4308 |
| | 3366 | 5469 | 4158 | 11942 | 10539 | 11281 | 4989 | 10437 | 11448 | 11023 | 4266 | 1399 |
| | 5475 | 1474 | 3089 | 8937 | 752 | 8129 | 9624 | 603 | 6938 | 4302 | 6071 | 5887 |
| | 8953 | 9754 | 11068 | 6539 | 11602 | 11856 | 11773 | | | | | |
| 318: | 1808 | 1810 | 1809 | 1815 | 8197 | 7925 | 3733 | 9562 | 9559 | 8735 | 9493 | 11825 |
| | 7039 | 2571 | 4406 | 1717 | 4426 | 11479 | 5470 | 5490 | 5468 | 12179 | 12073 | 9263 |
| | 1882 | 6962 | 8737 | 5554 | 454 | 6331 | 9197 | 7474 | | | | |
| 319: | 1608 | 435 | 1810 | 1809 | 1808 | 8197 | 9562 | 9559 | 8735 | 9493 | 4045 | 7039 |
| | 2571 | 4406 | 1717 | 4426 | 11479 | 5470 | 5490 | 5468 | 6962 | 8737 | 5554 | 10895 |
| | 10799 | 10893 | 10845 | 10872 | 10869 | 10868 | 1277 | 1036 | 7857 | | | |
| 320: | 11284 | 3835 | 1257 | 7050 | 4894 | 995 | 10631 | 1387 | 3315 | 5206 | 2848 | 2458 |
| | 5893 | | | | | | | | | | | |
| 321: | 1992 | 7276 | 11661 | 3904 | 3713 | 8363 | 12462 | 7790 | 8181 | 11322 | 1115 | 2876 |
| | 4777 | 11426 | 5331 | 3812 | 11811 | 10448 | 730 | 1688 | 10292 | 8788 | 10266 | 7189 |
| | 7105 | 5338 | 7555 | 6641 | 12172 | 10702 | 3961 | 2554 | 10739 | 3771 | 10525 | 11295 |
| | 10175 | 3346 | 9422 | 3617 | 1340 | 3652 | 8834 | 1785 | 10107 | 6885 | 9797 | 2092 |
| | 7460 | 8036 | 1518 | 4343 | 9541 | 10966 | 8739 | 7343 | 7970 | 1357 | 7692 | |
| 322: | 7998 | 11945 | 3324 | 2518 | 2605 | 12395 | 12415 | 6120 | 4228 | 1728 | 6481 | 9287 |
| | 8237 | 7203 | 4544 | 11071 | 6485 | 7597 | 3710 | 4975 | 7397 | 5640 | 5151 | 10017 |
| | 11392 | 8033 | 6793 | 5938 | 12275 | 2260 | 11004 | 9055 | 4389 | 391 | 2053 | 9786 |
| | 5557 | 7782 | 1275 | | | | | | | | | |
| 323: | 2163 | 12492 | 12513 | 2433 | 12362 | 5815 | 6948 | 1690 | 4436 | 11925 | 10565 | 3671 |
| | 12009 | 5590 | 2338 | | | | | | | | | |
| 324: | 2163 | 12492 | 12513 | 2433 | 12362 | 5815 | 6948 | 1690 | 4436 | 11925 | 10565 | 3671 |
| | 12009 | 5590 | 2338 | | | | | | | | | |
| 325: | 5223 | 7733 | 3595 | 6743 | 8171 | 1884 | 4936 | 7342 | 5441 | 1333 | 4021 | 10203 |
| | 1099 | 788 | 10465 | 1185 | 6579 | 12206 | 11278 | 12277 | 7727 | 3862 | 11362 | 6398 |
| | 11319 | 5259 | 1270 | 11110 | 3045 | 511 | 3792 | 5551 | | | | |
| 326: | 4483 | 7102 | 12574 | 11511 | 5281 | | | | | | | |
| 327: | 5332 | 5927 | 4548 | 5709 | 11543 | 8482 | 3822 | 5041 | 9863 | 838 | 4020 | 11868 |
| | 5102 | 9911 | 4642 | 10599 | 1012 | 6488 | 4691 | 9525 | 1062 | 7489 | 6816 | 2714 |
| | 8445 | | | | | | | | | | | |
| 328: | 11721 | 5605 | 2086 | 4366 | 1269 | 3758 | 7461 | 3682 | 4125 | 10030 | 11534 | 7537 |
| | 8615 | 11301 | 4300 | 9716 | 7707 | 7358 | 12567 | 10049 | 7574 | 2467 | 8459 | 7101 |
| | 2732 | 4569 | 7261 | 7972 | 12098 | 982 | 5952 | 3290 | 953 | 12385 | 11696 | 9296 |
| | 5713 | 11495 | 9981 | 6322 | 6795 | 8719 | 8387 | 6978 | 9584 | 7285 | 810 | 8024 |
| | 596 | 10008 | 7197 | 4265 | 3603 | 4391 | 9425 | 12253 | 390 | 9350 | 6547 | 3679 |
| | 7413 | 11860 | 8874 | 476 | 4966 | 11483 | 10611 | 5073 | 8720 | 6724 | 8818 | 4326 |
| | 8743 | | | | | | | | | | | |
| 329: | 2805 | 11466 | 10817 | 12063 | 4835 | 12061 | 4262 | 10839 | 12227 | 4562 | 4636 | 4607 |
| | 4586 | 4609 | 3893 | 791 | 12164 | 1352 | 7322 | 5134 | 2955 | 2878 | 5825 | 10270 |
| | 10747 | 6822 | 6782 | 10822 | 7599 | 8525 | 8453 | 2918 | 1122 | 11630 | 4524 | 9768 |
| | 6459 | 5336 | 11488 | 10000 | 1807 | 9627 | 2250 | 5726 | 2230 | 3561 | 10425 | 1547 |
| | 3423 | 6893 | 7821 | 7482 | 4962 | 1100 | 1663 | 10881 | 6320 | 8875 | 1487 | 3299 |
| | 6493 | 7820 | 973 | 4224 | 6789 | 7146 | 11806 | 10590 | 8431 | 11300 | 1913 | 9775 |
| | 7743 | 2113 | 3428 | 5019 | 11401 | 5529 | 1903 | 7592 | 3655 | 8165 | 11845 | 5638 |
| | 6858 | 11376 | 7403 | 824 | 7304 | 8472 | 3295 | 8136 | 7078 | 2556 | 2691 | 4804 |
| | 4179 | 11583 | 11575 | 9102 | 11213 | 3074 | 11867 | 3761 | 9059 | 4156 | 6311 | 10457 |
| | 12201 | 3400 | 662 | 7056 | 8999 | 9787 | 1318 | 7425 | 1235 | 9162 | 462 | 11826 |
| | 2887 | 1846 | 8604 | 871 | 9612 | 9641 | 8005 | 6947 | 8418 | 6650 | 8835 | 2217 |
| | 1607 | 587 | 4853 | 4851 | 2261 | 11405 | 5131 | 3440 | 3463 | 8753 | 7505 | 1693 |
| | 2532 | 7018 | 7816 | 2862 | 2859 | 5792 | 2825 | 11560 | 2464 | 7947 | 11222 | 8549 |
| | 250 | 249 | 1118 | 1532 | 12578 | 6821 | 1665 | 5514 | 5491 | 5464 | 5495 | 5457 |
| | 5437 | 5435 | 4797 | 3327 | 2871 | 1883 | 1886 | 8888 | 3837 | 11290 | 3378 | 9236 |
| | 3257 | 8982 | 7124 | 9026 | 11772 | 12359 | 12060 | 9068 | 9120 | 5737 | 9856 | 6932 |
| | 5948 | 7673 | 4368 | 9281 | 2134 | 3824 | 10371 | 2540 | 4223 | 2694 | 10633 | 2639 |
| | 11261 | 9978 | 5068 | 7848 | 774 | 7835 | 5894 | 6079 | 11670 | 8244 | 10750 | 10141 |
| | 2381 | 9058 | 6257 | 6588 | 3394 | 6012 | 1778 | 11268 | 11462 | 8660 | 2158 | 12387 |
| | 10746 | 9187 | 4432 | 7406 | 10647 | 1146 | 7316 | 6100 | 1698 | 4358 | 879 | 1727 |
| | 12205 | 7170 | 12545 | 6117 | 10722 | 12516 | 7294 | 12005 | 11165 | 1857 | 12042 | 6879 |
| | 3473 | 4353 | 2798 | 10096 | 2424 | 7595 | 9288 | 3396 | 4644 | 7051 | 6749 | 4932 |
| | 1417 | 11847 | 8676 | 2675 | 3149 | 4493 | 8041 | 2231 | 10890 | 2301 | 3232 | 9139 |
| | 3530 | 7139 | 7836 | 3718 | 12250 | 881 | 2373 | 3614 | 4126 | 9707 | 5779 | 9630 |
| | 2905 | 11956 | 10260 | 8176 | 8370 | 1834 | 1301 | 5330 | 2572 | 10162 | 3878 | 8872 |
| | 7166 | 12030 | 9648 | 2689 | 10149 | 10973 | 9109 | 4471 | 11920 | 685 | 6584 | 2239 |
| | 10680 | 5472 | 5665 | 3253 | 2889 | 12470 | 8726 | 4199 | 6034 | 6623 | 4362 | 12405 |
| | 6411 | 10429 | 12497 | 9570 | 1214 | 1030 | 617 | 829 | 10859 | 11229 | 1603 | 3932 |
| | 1255 | 12084 | 10987 | 900 | 11188 | 2018 | 616 | 10866 | 6138 | 5522 | 1003 | 7084 |
| | 10459 | 1656 | 9217 | 4190 | 10206 | 4395 | 11017 | 2310 | 3027 | 3199 | 8196 | 12409 |
| | 1333 | 1930 | 7140 | 8939 | 3081 | 5939 | 1360 | 6958 | 10063 | 5908 | 2324 | 5587 |
| | 735 | 1173 | 7035 | 8162 | 10945 | 7665 | 8546 | 4249 | 8439 | 4095 | 10156 | 10177 |
| | 10176 | 931 | 2302 | 2377 | 8634 | 420 | 11000 | 2894 | 3098 | 4069 | 5285 | 1311 |
| | 9272 | 6242 | 7611 | 3944 | 3947 | 5722 | 5719 | 5695 | 5720 | 5753 | 5727 | 5731 |
| | 12515 | 9999 | 6710 | 9394 | 9395 | 4022 | 4024 | 10165 | 3990 | 10801 | 3995 | 10163 |
| | 1553 | 3993 | 11441 | 10846 | 11136 | 7843 | 10491 | 4725 | 11489 | 4723 | 10823 | 5021 |
| | 10914 | 3017 | 7338 | 10498 | 7898 | 10615 | 3506 | 626 | 4799 | 10409 | 11339 | 1805 |
| | 7639 | 10281 | 10034 | 8405 | 11038 | 3492 | 8645 | 12001 | 5800 | 7175 | 4668 | 11480 |
| | 9467 | 3156 | 11075 | 2995 | 7905 | 1423 | 5037 | 7870 | 7748 | 2283 | 9865 | 11865 |
| | 5561 | 8231 | 8097 | 6110 | 8686 | 7829 | 8871 | 5715 | 1804 | 5644 | 4423 | 2259 |
| | 11914 | 11250 | 8485 | 9933 | 716 | 6323 | 6799 | 3509 | 12565 | 7764 | 5263 | 9011 |
| | 6246 | 4504 | 2358 | 8877 | 2182 | 11148 | 10158 | 5262 | 5258 | 4660 | 3899 | 6021 |
| | 10821 | 10978 | 1801 | 8831 | 1936 | 6826 | 9977 | 3546 | 5982 | 3472 | 8460 | 3460 |
| | 12528 | 5242 | 9347 | 8527 | 8657 | 8552 | 7744 | 6286 | 2066 | 9201 | 506 | 6016 |
| | 5456 | 399 | 481 | 11107 | 9066 | 4390 | 6748 | 11573 | 5819 | 5182 | 9176 | 11244 |
| | 8029 | 3399 | 7013 | 10161 | 10468 | 11469 | 5983 | 9301 | 5544 | 7268 | 5412 | 8121 |
| | 3720 | 9353 | 2299 | 6358 | 3224 | 11486 | 2423 | 1330 | 12174 | 3550 | 4953 | 2783 |
| | 11429 | 8828 | 8602 | 1300 | 9104 | 7287 | 8658 | 1986 | 5677 | 8336 | 12262 | 3449 |
| | 4980 | 9514 | 7606 | 2388 | 11771 | 10820 | 1780 | 11551 | 2392 | 10995 | 9489 | 2737 |
| | 8454 | 10493 | 975 | 1824 | 7713 | 12036 | 7172 | 8395 | 6062 | 4409 | 8222 | 5608 |
| | 5031 | 12363 | 11455 | 2661 | 2189 | 5632 | 6561 | 3215 | 11858 | 2652 | 9866 | 8620 |
| | 11816 | 2701 | 10674 | 568 | 11663 | 11649 | 9706 | 12317 | 12525 | 2916 | 8590 | 7129 |
| | 9310 | 11073 | 7694 | 1472 | 5767 | 7178 | 8963 | 4159 | 3109 | 8186 | 2200 | 8688 |
| | 5114 | 9659 | 6461 | 6519 | 5873 | 668 | 11777 | 10392 | 4625 | 10853 | 6210 | 3001 |
| | 4310 | 1966 | 1885 | 7538 | 5702 | 8513 | 9937 | 10901 | 11642 | 2005 | 4671 | 9435 |
| | 3667 | 4480 | 5740 | 6785 | 4971 | 10956 | 8452 | 11464 | 10848 | 11438 | 10851 | 10769 |
| | 10766 | 10764 | 10763 | 3757 | 4574 | 11739 | 6869 | 8373 | 8666 | 10481 | 9606 | 12245 |
| | 3756 | 3197 | 10861 | 6465 | 3593 | 6775 | 5984 | 599 | 7355 | 6537 | 7494 | 10728 |
| | 12397 | 9341 | 2226 | 6185 | 10343 | 1288 | 4414 | 6983 | 8412 | 11161 | 11579 | 7999 |
| | 8479 | 4489 | 1371 | 4138 | 5186 | 5969 | 6473 | 8915 | 8236 | 2240 | 2531 | 11898 |
| | 4870 | 5512 | 1564 | 12165 | 5524 | 8233 | 5143 | 5631 | 5607 | 4034 | 2935 | 2934 |
| | 12500 | 5110 | 8078 | 5324 | 762 | 823 | 10079 | 11491 | 8938 | 11159 | 11132 | 6131 |
| | 11124 | 11129 | 11122 | 11440 | 6280 | 2750 | 8169 | 7635 | 7631 | 5372 | 5348 | 9233 |
| | 9231 | 9221 | 9240 | 9235 | 9220 | 2122 | 3029 | 7040 | 12560 | 7016 | 8158 | 8759 |
| | 8762 | 8163 | 7037 | 7822 | 8767 | 7066 | 7061 | 11467 | 942 | 6314 | 7384 | |
| 330: | 12032 | 12416 | 9702 | 8311 | 9871 | 9085 | 3041 | 8757 | 2659 | 10930 | 4428 | 11833 |
| | 11792 | 681 | 10543 | 7911 | 9410 | 8467 | 8008 | 9867 | 1772 | 8996 | 7033 | 11906 |
| | 10828 | 7889 | 12234 | 1084 | 3276 | 8149 | 11266 | 8572 | 1344 | 7106 | 7107 | 4195 |
| | 4547 | 11422 | 9561 | 4650 | 4648 | 2144 | 2142 | 2148 | 4680 | 4656 | 4653 | 633 |
| | 5402 | 409 | 6305 | 10014 | 6859 | 12364 | 7575 | 5289 | 3907 | 7452 | 3669 | 11548 |
| | 2333 | 4742 | 6830 | 2981 | | | | | | | | |
| 331: | 10160 | 10640 | 8343 | 4802 | 1528 | 8856 | 515 | 677 | 952 | 7450 | 6251 | 4755 |
| | 8449 | 10473 | 7390 | 6576 | 11718 | 2615 | 7103 | 10211 | 10977 | 4800 | 4314 | 7867 |
| | 9639 | 7932 | 11248 | 3355 | 7617 | 2525 | 10518 | 5743 | 1589 | 8208 | 9668 | 5774 |
| | 5974 | 5814 | 2961 | 9399 | 11092 | 5321 | 5264 | 1080 | 6145 | 7689 | 3942 | 7442 |
| | 2483 | 11748 | 12331 | 12214 | 5980 | 5480 | 7320 | 5440 | 10776 | 4781 | 9666 | 3971 |
| | 7979 | 3468 | 8146 | 4220 | 4413 | 3920 | 5416 | 8390 | 1957 | 5313 | 2735 | 11318 |
| | 4437 | 9259 | 8429 | 11015 | 7585 | 7435 | 4475 | 12123 | 4830 | 7053 | 7352 | 3938 |
| | 7110 | 6593 | 10656 | 966 | 3928 | 10099 | 12555 | 8109 | 11578 | 870 | 5664 | 6989 |
| | 1416 | 12103 | 11181 | 5195 | 3488 | 8294 | 9944 | 970 | 7199 | 2188 | 8851 | 11185 |
| | 6333 | 10583 | 8715 | 828 | 11105 | 2300 | 1272 | 4605 | 6204 | 7241 | 4961 | 932 |
| | 1479 | 3941 | 6155 | 6654 | 2411 | 10311 | 3132 | 10779 | 6695 | 9113 | 4382 | 4370 |
| | 3238 | 9765 | 5394 | 7378 | 8693 | 4023 | 3953 | 8976 | 2263 | 7064 | 10047 | 461 |
| | 9468 | 1101 | 4079 | 4728 | 5158 | 8968 | 12479 | 5828 | 4916 | 9417 | 3032 | 2685 |
| | 9018 | 10135 | 7048 | 897 | 10841 | 6006 | 3968 | 7120 | 6124 | 3102 | 7921 | 2064 |
| | 9239 | 11783 | 2698 | 7415 | 5823 | 5635 | 11864 | 4640 | 593 | 4046 | 5343 | 6406 |
| | 2792 | 8092 | 11513 | 1919 | 11764 | 10026 | 8691 | 2679 | 7600 | 10399 | 2289 | 5567 |
| | 9801 | 2125 | 6284 | 9433 | 2993 | 427 | 11366 | 3581 | 3097 | 4014 | 12532 | 10913 |
| | 8020 | 4751 | 4316 | 6734 | 1442 | 674 | 6025 | 5541 | 2179 | 7168 | 12170 | 805 |
| | 3080 | 12469 | 11468 | 11287 | 5842 | 3282 | 9440 | 4309 | 12511 | 12508 | 2063 | 10517 |
| | 6891 | 9594 | 11087 | 4606 | 8366 | 12400 | 7712 | 4288 | 6764 | | | |
| 332: | 10160 | 10640 | 8343 | 4802 | 1528 | 8856 | 515 | 677 | 952 | 7450 | 6251 | 4755 |
| | 8449 | 10473 | 7390 | 6576 | 11718 | 2615 | 7103 | 10211 | 10977 | 4800 | 4314 | 7867 |
| | 9639 | 7932 | 11248 | 3355 | 7617 | 2525 | 10518 | 5743 | 1589 | 8208 | 9668 | 5774 |
| | 5974 | 5814 | 2961 | 9399 | 11092 | 5321 | 5264 | 1080 | 6145 | 7689 | 3942 | 7442 |
| | 2483 | 11748 | 12331 | 12214 | 5980 | 5480 | 7320 | 5440 | 10776 | 4781 | 9666 | 3971 |
| | 7979 | 3468 | 8146 | 4220 | 4413 | 3920 | 5416 | 8390 | 1957 | 5313 | 2735 | 11318 |
| | 4437 | 9259 | 8429 | 11015 | 7585 | 7435 | 4475 | 12123 | 4830 | 7053 | 7352 | 3938 |
| | 7110 | 6593 | 10656 | 966 | 3928 | 10099 | 12555 | 8109 | 11578 | 870 | 5664 | 6989 |
| | 1416 | 12103 | 11181 | 5195 | 3488 | 8294 | 9944 | 970 | 7199 | 2188 | 8851 | 11185 |
| | 6333 | 10583 | 8715 | 828 | 11105 | 2300 | 1272 | 4605 | 6204 | 7241 | 4961 | 932 |
| | 1479 | 3941 | 6155 | 6654 | 2411 | 10311 | 3132 | 10779 | 6695 | 9113 | 4382 | 4370 |
| | 3238 | 9765 | 5394 | 7378 | 8693 | 4023 | 3953 | 8976 | 2263 | 7064 | 10047 | 461 |
| | 9468 | 1101 | 4079 | 4728 | 5158 | 8968 | 12479 | 5828 | 4916 | 9417 | 3032 | 2685 |
| | 9018 | 10135 | 7048 | 897 | 10841 | 6006 | 3968 | 7120 | 6124 | 3102 | 7921 | 2064 |
| | 9239 | 11783 | 2698 | 7415 | 5823 | 5635 | 11864 | 4640 | 593 | 4046 | 5343 | 6406 |
| | 2792 | 8092 | 11513 | 1919 | 11764 | 10026 | 8691 | 2679 | 7600 | 10399 | 2289 | 5567 |
| | 9801 | 2125 | 6284 | 9433 | 2993 | 427 | 11366 | 3581 | 3097 | 4014 | 12532 | 10913 |
| | 8020 | 4751 | 4316 | 6734 | 1442 | 674 | 6025 | 5541 | 2179 | 7168 | 12170 | 805 |
| | 3080 | 12469 | 11468 | 11287 | 5842 | 3282 | 9440 | 4309 | 12511 | 12508 | 2063 | 10517 |
| | 6891 | 9594 | 11087 | 4606 | 8366 | 12400 | 7712 | 4288 | 6764 | | | |
| 333: | 1001 | 4906 | 8800 | 3344 | 2015 | 2020 | 4318 | 7710 | 10721 | 2563 | 3717 | 1228 |
| | 4603 | 9718 | 1317 | 2819 | 8797 | 6896 | 9688 | 6275 | 6022 | 6023 | 6010 | 1908 |
| | 12491 | 3275 | 4299 | 8601 | 4383 | 7942 | 5268 | 10515 | 3747 | 558 | 7924 | 8917 |
| | 7861 | 7946 | 3744 | 1396 | 12348 | 7923 | 10606 | 2285 | 5758 | 7667 | 5463 | 5546 |
| | 7922 | 5549 | 12374 | 2282 | 4005 | 11378 | 11112 | 7984 | 8811 | 12299 | 4713 | 3333 |
| | 5889 | 7864 | 7940 | 1761 | 11398 | 3821 | 2238 | 4004 | 12159 | 9680 | 8705 | 9007 |
| | 3972 | 10492 | 1765 | 8840 | 7860 | 1405 | 6159 | 11243 | 3817 | 1502 | 4711 | 9800 |
| | 3945 | 8082 | 664 | 4003 | 6437 | 7684 | 4102 | 3973 | | | | |
| 334: | 1523 | 2933 | 4956 | 6234 | 6928 | 5998 | 10172 | 7536 | 3631 | 3520 | 11142 | 5900 |
| | 1996 | 8969 | 9226 | 7768 | 10920 | 10831 | 3174 | 10390 | 6829 | 6832 | 8422 | 3388 |
| | 1617 | 5714 | 4375 | 10999 | 8464 | 2255 | 5214 | 4427 | 1955 | 4279 | 11633 | 594 |
| | 3168 | 10884 | 6049 | 6631 | 6194 | 6223 | 5917 | 1368 | 1418 | 1351 | 5670 | 5697 |
| | 1491 | 7354 | 7180 | 7371 | 6553 | 6011 | 928 | 10117 | 12297 | 3664 | 5929 | 4043 |
| | 10992 | 1144 | 3217 | 7021 | 5189 | 4788 | 7603 | 5872 | 1107 | 10072 | 6527 | 5109 |
| | 4881 | 9852 | 4108 | 7739 | 6628 | 8123 | 1613 | 4323 | 7377 | 1697 | 9620 | 11880 |
| | 7781 | 3078 | 12259 | 3551 | 12426 | 10058 | 8744 | 1061 | 5971 | 584 | 4219 | 12527 |
| | 954 | 11627 | 2114 | 1581 | 4135 | 3267 | 8356 | 9499 | 5531 | 7817 | 653 | 5065 |
| | 6344 | 8377 | 12512 | 10041 | 10082 | 9401 | 6854 | 3502 | 5742 | 5954 | 4072 | 6097 |
| | 3479 | 7398 | 11510 | 2184 | 11738 | 9872 | 6915 | 6429 | 1743 | 9416 | 9586 | 5241 |
| | 9345 | 2234 | 6173 | 3646 | 4997 | 10420 | 10452 | 10367 | 5827 | 8145 | 11490 | 8669 |
| | 4217 | 10730 | 2926 | 9796 | 6632 | 5532 | 4988 | 10910 | 8890 | 9229 | 10771 | 12439 |
| | 6960 | 5406 | 1309 | 7523 | 7626 | 4222 | 6737 | 8760 | 1394 | 2420 | 1149 | 7297 |
| | 8017 | 7952 | 5653 | 1150 | 738 | 4811 | 6665 | 8704 | 6846 | 5297 | 11123 | 11135 |
| | 11027 | 11963 | 4709 | 11761 | 3739 | 2835 | 10287 | 6587 | 9001 | 1595 | 1283 | 9529 |
| | 8087 | 10291 | 8801 | 8105 | 7255 | 2212 | 8972 | 5764 | 10625 | 3266 | 1263 | 4582 |
| | 1874 | 10424 | 10061 | 6256 | 2767 | 6798 | 11099 | 7366 | 6400 | 2490 | 890 | 1425 |
| | 9601 | 2202 | 4027 | 2609 | 8582 | 2990 | 3014 | 11219 | 545 | 1065 | 2693 | 3848 |
| | 11452 | 768 | 7539 | 6889 | 5039 | 3505 | 11776 | 4037 | 10554 | 2960 | 5723 | 8927 |
| | 2765 | 6091 | 11885 | 2884 | 8635 | 1971 | 800 | 7345 | 6787 | 9790 | 8855 | 2143 |
| | 10288 | 4846 | 12471 | 3707 | 4833 | 11065 | 8698 | 10819 | 2897 | 1946 | 1486 | 3365 |
| | 4763 | 2908 | 8774 | 3723 | 9111 | 8259 | 8421 | 8420 | 1073 | 1243 | 1671 | 2441 |
| | 5303 | 941 | 11089 | 1314 | 10431 | 4320 | 598 | 6379 | 7019 | 10113 | 10060 | 4886 |
| | 8623 | 840 | 8916 | 8438 | | | | | | | | |
| 335: | 2809 | 1347 | 3070 | 5519 | 6353 | 4683 | 10278 | 7995 | 11147 | 4915 | 4817 | 7113 |
| | 11420 | 1517 | 6416 | 864 | 2738 | 9453 | 8524 | 6360 | 1213 | 5208 | 9694 | 8994 |
| | 10342 | 4151 | 9222 | 923 | 12313 | 3570 | 12419 | 12544 | 5536 | 8592 | 12258 | 1951 |
| | 2817 | 1282 | 3183 | 945 | 10906 | 11904 | 5014 | 9906 | 9939 | 9963 | 1814 | 12017 |
| | 11152 | 11151 | 10075 | 10440 | 8950 | 4508 | 1999 | 4019 | 10028 | 5341 | 5555 | 6544 |
| | 4470 | 5111 | 2582 | 5095 | 8529 | 9270 | 10532 | 2603 | 6266 | 5183 | 10616 | 12434 |
| | 8392 | 9934 | 8028 | 11427 | 6678 | 10220 | 9984 | 10875 | 11154 | 2840 | 1899 | 1022 |
| | 10969 | 3615 | 6536 | 4357 | 11961 | 3073 | 9159 | 4192 | 8746 | 6211 | 7321 | 6531 |
| | 7520 | 7943 | 11246 | 661 | 8912 | 7676 | 3024 | 8161 | 6508 | 3996 | 5054 | 10071 |
| | 12039 | 2298 | 9149 | 9126 | 9123 | 9751 | 9200 | 7546 | 2175 | 9419 | 9670 | 3977 |
| | 8562 | 7711 | 4388 | 11106 | 10681 | 1738 | 3580 | 7344 | 5299 | 8466 | 1572 | 1735 |
| | 543 | 562 | 9152 | 9147 | 2211 | 2353 | 11077 | 8007 | 12109 | 11282 | 8761 | 1917 |
| | 10666 | 2558 | 2560 | 9258 | 6729 | 10691 | 10570 | 8130 | 10658 | 11009 | 1060 | 2523 |
| | 12128 | 11669 | 1851 | 3077 | 10021 | 8747 | 3062 | 7751 | 8521 | 8185 | 10968 | 7149 |
| | 4920 | 5826 | 9879 | 6009 | 4918 | 6638 | 6614 | 4899 | 6609 | 9959 | 9996 | 6005 |
| | 9882 | 6007 | 9936 | 9970 | 9880 | 9915 | 9993 | 4923 | 5794 | 9941 | 6610 | 9912 |
| | 9935 | 9962 | 9991 | 6637 | 9908 | 9957 | 9998 | 4974 | 5931 | 5857 | 5830 | 5852 |
| | 5865 | 5903 | 5833 | 5862 | 5007 | 11889 | 5093 | 5096 | 5098 | 4978 | 4892 | 6002 |
| | 5934 | 5788 | 5751 | 5785 | 5958 | 5985 | 5981 | 5822 | 6640 | 6671 | 6643 | 6645 |
| | 5227 | 12542 | 2875 | 1909 | 2273 | 10016 | 12407 | 9117 | 9178 | 9210 | 9182 | 9211 |
| | 1910 | 9186 | 9184 | 9148 | 12431 | 8650 | 2612 | 6985 | 991 | 8849 | 3562 | 3545 |
| | 10129 | 11329 | 3522 | 3568 | 3590 | 422 | 3516 | 8470 | 3541 | 3587 | 3515 | 3566 |
| | 1261 | 11303 | 11387 | | | | | | | | | |
| 336: | 1608 | 435 | 1809 | 1808 | 1819 | 1810 | 1815 | 9824 | 7252 | 398 | 2455 | 9562 |
| | 9559 | 9493 | 5003 | 10119 | 12283 | 9948 | 9836 | 733 | 7039 | 4426 | 11479 | 5470 |
| | 5490 | 5468 | 8773 | 3533 | 7619 | 7474 | 9197 | 6331 | 8737 | 6962 | 6914 | 5554 |
| | 10872 | 10869 | 10868 | 10799 | 10895 | 10845 | 10893 | 3095 | 11702 | 12076 | | |
| 337: | 6292 | 6296 | 2925 | 9234 | 4245 | 4030 | 8504 | 3729 | 1278 | 1276 | 2356 | 11921 |
| | 6564 | 9267 | 7681 | 6571 | 6315 | 4473 | 7249 | 6569 | 1545 | 1549 | 8359 | 8695 |
| | 6567 | 8697 | 1550 | 6294 | 5078 | 11515 | 1009 | 9626 | 6313 | 8442 | | |
| 338: | 9269 | 4225 | 5257 | 2039 | 4327 | 4244 | 3256 | 9569 | 11115 | 2874 | 10078 | 11414 |
| | 2797 | 1571 | 3740 | 5525 | 4757 | 2614 | 4167 | 2496 | 7866 | 1249 | 5672 | 2395 |
| | 4801 | 11979 | 7313 | 3495 | 4528 | 7535 | 5017 | 5728 | 2539 | 3381 | 9306 | 1978 |
| | 4272 | 8853 | 5847 | 7159 | 9691 | 3906 | 6563 | 1506 | | | | |
| 339: | 9269 | 4225 | 5257 | 2039 | 4327 | 4244 | 3256 | 9569 | 11115 | 2874 | 10078 | 11414 |
| | 2797 | 1571 | 3740 | 5525 | 4757 | 2614 | 4167 | 2496 | 7866 | 1249 | 5672 | 2395 |
| | 4801 | 11979 | 7313 | 3495 | 4528 | 7535 | 5017 | 5728 | 2539 | 3381 | 9306 | 1978 |
| | 4272 | 8853 | 5847 | 7159 | 9691 | 3906 | 6563 | 1506 | | | | |
| 340: | 9784 | 5190 | 4849 | 6165 | 8502 | 4479 | 10406 | 10268 | 5977 | | | |
| 341: | 9784 | 5190 | 4849 | 6165 | 8502 | 4479 | 10406 | 10268 | 5977 | | | |
| 342: | 647 | 2051 | 8014 | 3393 | 10620 | 7556 | 1770 | 6506 | 9947 | 5875 | 5960 | 5682 |
| | 2115 | 7965 | 1026 | 4342 | 9448 | 12338 | 2530 | 2052 | 2057 | 9802 | 4635 | 6263 |
| | 6250 | 6265 | 648 | 7349 | 7090 | 4593 | 1421 | 11800 | 7799 | 10710 | 6823 | 12510 |
| | 6930 | 3206 | 10032 | | | | | | | | | |
| 343: | 6115 | 8689 | 3274 | 2618 | 8107 | 4944 | 6200 | 8541 | 802 | 2608 | 8397 | 6422 |
| | 7563 | 3305 | 10923 | 2865 | 2164 | 4187 | 4295 | 4903 | 10152 | 6888 | 2980 | 11640 |
| | 4652 | 592 | 4424 | 7353 | 9920 | 9891 | 11011 | 11040 | 1231 | 8681 | 10778 | 1227 |
| | 8900 | 4843 | 9156 | 2011 | 1415 | 8510 | 869 | 3034 | 3801 | 11645 | 10469 | 10547 |
| | 455 | 693 | 2502 | 3309 | 12029 | 12320 | 1471 | 7941 | 1465 | 11436 | 4387 | 1876 |
| | 7757 | 4591 | 2992 | 12535 | 5012 | 1066 | 5511 | 7220 | 6287 | 9982 | 639 | 5884 |
| 344: | 6115 | 8689 | 3274 | 2618 | 8107 | 4944 | 6200 | 8541 | 802 | 2608 | 8397 | 6422 |
| | 7563 | 3305 | 10923 | 2865 | 2164 | 4187 | 4295 | 4903 | 10152 | 6888 | 2980 | 11640 |
| | 4652 | 592 | 4424 | 7353 | 9920 | 9891 | 11011 | 11040 | 1231 | 8681 | 10778 | 1227 |
| | 8900 | 4843 | 9156 | 2011 | 1415 | 8510 | 869 | 3034 | 3801 | 11645 | 10469 | 10547 |
| | 455 | 693 | 2502 | 3309 | 12029 | 12320 | 1471 | 7941 | 1465 | 11436 | 4387 | 1876 |
| | 7757 | 4591 | 2992 | 12535 | 5012 | 1066 | 5511 | 7220 | 6287 | 9982 | 639 | 5884 |
| 345: | 6421 | 3565 | 10219 | 3371 | 7840 | 1723 | 6161 | 8243 | 1865 | 1827 | 11869 | 623 |
| | 11423 | | | | | | | | | | | |
| 346: | 4514 | 1219 | 10858 | 6672 | 3259 | 7266 | 4215 | 8062 | 4171 | 9227 | 9633 | 8002 |
| | 12033 | 8080 | 11367 | 8440 | 6700 | 1911 | 6590 | 9230 | 12194 | 6068 | 7562 | 11521 |
| | 11587 | 4044 | 9133 | 6736 | 1178 | 4773 | 9782 | 5388 | 3122 | 8821 | 6226 | 3789 |
| | 3527 | 8952 | 6047 | 7411 | 5290 | 6426 | 6216 | 10419 | 4816 | 7615 | 2761 | 9079 |
| | 11600 | 4502 | 9850 | 8065 | 6902 | 1436 | 5686 | 10898 | 8152 | 8155 | 4230 | 5104 |
| | 1659 | 7568 | 8560 | 5585 | 5128 | 6679 | 9332 | 9329 | 2095 | 6346 | 6659 | 5701 |
| | 4884 | 9654 | 8034 | 10115 | 8557 | 9587 | 3182 | 7231 | 9717 | 11375 | 6070 | 2404 |
| | 1767 | 7075 | 7455 | 2457 | 5255 | 7959 | 6350 | 5750 | 1414 | 903 | 2341 | 7578 |
| | 10703 | 927 | 2248 | 12132 | 863 | 9883 | 618 | 3678 | 12480 | 8396 | 7847 | 9558 |
| | 11682 | 2469 | 7373 | 10386 | | | | | | | | |
| 347: | 712 | 11134 | 11581 | 8135 | 891 | 5866 | 7918 | 1721 | 10277 | 4963 | 7671 | 9567 |
| | 512 | 10630 | 6458 | 3683 | 8419 | 4724 | 5955 | 3114 | 1441 | 4439 | 11628 | 5184 |
| | 10737 | 9308 | 6612 | 10159 | 5721 | 6759 | 12507 | 7299 | 10335 | 5504 | 6758 | 9577 |
| | 5043 | 4852 | 9868 | 1887 | 6733 | 9951 | 5843 | 11373 | 4090 | 3481 | 10450 | 10709 |
| | 11672 | 6568 | 11882 | 3797 | 5745 | 9469 | 9268 | 11804 | 10475 | 11196 | 6964 | 2129 |
| | 10514 | 1370 | 7659 | 6865 | 3006 | 7240 | 6661 | 9988 | 1853 | 1109 | 2594 | 12193 |
| | 12188 | 1329 | 10264 | 9045 | 8986 | 1929 | 1933 | 1935 | 10650 | 10654 | 7773 | 7801 |
| | 7804 | 10477 | 8219 | 11698 | 7655 | 11574 | 11544 | 11582 | 12562 | 11164 | 10876 | 11182 |
| | 11162 | 11184 | 2858 | 7770 | 11817 | 2155 | 8830 | 5410 | 2736 | 6061 | 6540 | 2047 |
| | 6065 | 10171 | 3804 | 3392 | 10297 | 3117 | 315 | 8052 | 9815 | 7301 | 7324 | 7454 |
| | 9151 | 2165 | 1994 | 11179 | 11370 | 7116 | 7222 | 9215 | | | | |
| 348: | 2559 | 10307 | 12499 | 8094 | 9328 | 612 | 11307 | 6139 | 3619 | 3556 | 2873 | 5711 |
| | 1391 | 1177 | 10048 | 10133 | | | | | | | | |
| 349: | 2559 | 10307 | 12499 | 8094 | 9328 | 612 | 11307 | 6139 | 3619 | 3556 | 2873 | 5711 |
| | 1391 | 1177 | 10048 | 10133 | | | | | | | | |
| 350: | 6170 | 10387 | 820 | 4182 | 9177 | 11720 | 535 | 1444 | 1262 | 10488 | 10083 | 6092 |
| | 11526 | 11371 | 6812 | 8205 | 9677 | 11325 | 10718 | 2183 | 531 | 3846 | 7492 | 6927 |
| | 3466 | 4554 | 2717 | 6059 | 7927 | 9446 | 9471 | 9470 | 9476 | 9478 | 9497 | 9473 |
| | 4854 | 7761 | 2526 | 10504 | 7846 | 1389 | 4350 | 1888 | 4581 | 4583 | 4560 | 4564 |
| | 1751 | 8487 | 8489 | 11499 | 9701 | 5856 | 8745 | 2880 | 1803 | 1156 | 3107 | 8710 |
| | 3704 | 3010 | 2932 | 6861 | 2743 | 4442 | 4774 | 3639 | 1620 | | | |
| 351: | 6170 | 10387 | 820 | 4182 | 9177 | 11720 | 535 | 1444 | 1262 | 10488 | 10083 | 6092 |
| | 11526 | 11371 | 6812 | 8205 | 9677 | 11325 | 10718 | 2183 | 531 | 3846 | 7492 | 6927 |
| | 3466 | 4554 | 2717 | 7927 | 9446 | 9471 | 9470 | 9476 | 9497 | 9478 | 9473 | 4854 |
| | 7761 | 2526 | 7846 | 10504 | 1389 | 4350 | 1888 | 4560 | 4583 | 4581 | 4564 | 1751 |
| | 8489 | 8491 | 8487 | 11499 | 9701 | 5497 | 1579 | 5856 | 8745 | 6856 | 6470 | 11959 |
| | 10131 | 827 | 11101 | 1374 | 5291 | 940 | 6870 | 10411 | 4058 | 11708 | 1247 | 2414 |
| | 4133 | 2045 | 6039 | 6478 | 9442 | 3602 | 2111 | 438 | 1381 | 10648 | 6711 | 3008 |
| | 11169 | 8555 | 7810 | 1872 | 10183 | 6946 | 2555 | 12266 | 6834 | 5375 | 7465 | 11021 |
| | 2915 | 644 | 9326 | 3230 | 9185 | 11781 | 6084 | 7725 | 8511 | 12308 | 7518 | 6096 |
| | 8053 | 10529 | 4914 | 11994 | 2145 | 11924 | 1386 | 1880 | 7453 | 1927 | 8819 | 1341 |
| | 2473 | 11742 | 8710 | 3107 | 3704 | 10948 | 9928 | 3010 | 2932 | 6861 | 2743 | 4442 |
| | 4774 | 3639 | 3165 | | | | | | | | | |
| 352: | 2857 | 10800 | 6701 | 7881 | 9041 | 3658 | 3547 | 9249 | 12438 | 6098 | 7560 | 8334 |
| | 2860 | 10885 | 3337 | 6907 | 11049 | 8959 | 5754 | 5088 | 12031 | 10458 | 6468 | 3887 |
| | 3163 | 9860 | 9548 | 487 | 8326 | 1271 | 5539 | 9371 | 9340 | 11769 | 1153 | 11238 |
| | 11180 | 10497 | 10116 | 1083 | 7915 | 11006 | 5436 | 5438 | 5434 | 1342 | 3075 | 9664 |
| | 9905 | 8539 | 2635 | 2390 | 1771 | 7095 | 11918 | 3829 | 6122 | 9096 | 11562 | 7609 |
| | 773 | 12429 | 11502 | 1670 | 1652 | 9013 | 9009 | 9012 | 5992 | 1460 | 3254 | 5360 |
| | 3832 | 8714 | 4271 | 11931 | 11928 | 10964 | 8362 | 12312 | 7680 | 8286 | 9295 | 4400 |
| | 11687 | 9265 | 8142 | 8140 | | | | | | | | |
| 353: | 1313 | 5197 | 12526 | 7194 | 4127 | 10569 | 10567 | 3130 | 11756 | 3924 | 11824 | 5150 |
| | 1597 | 7330 | 7336 | 5733 | 1840 | 8995 | 10023 | 5309 | 9183 | 3811 | 2799 | 3176 |
| | 1007 | 2780 | 10768 | 11917 | 12044 | 4188 | 1537 | 9091 | 4172 | 1215 | 11954 | 5210 |
| | 11001 | 6054 | 396 | 6093 | 789 | 7265 | 10056 | 5622 | 7269 | 2665 | 1409 | 1402 |
| | 5885 | 10020 | 10587 | 2719 | 6657 | 10054 | 6174 | 9953 | 8025 | 2252 | 4474 | 1348 |
| | 5691 | 2034 | 9180 | 3591 | 10519 | 5492 | 4422 | 2710 | 2076 | 8465 | 12482 | 7571 |
| | 11887 | 6428 | 3260 | 11018 | 10323 | 834 | 11437 | 5486 | 604 | 7553 | 388 | 11872 |
| | 9188 | 4081 | 6905 | 11306 | 7202 | 8348 | 5018 | 9023 | 9484 | 9512 | 4553 | 11385 |
| | 2233 | 1463 | 8789 | 7834 | 11916 | 4286 | 2350 | 11883 | 8565 | 1749 | 1023 | 10744 |
| | 4181 | 6476 | 5850 | 1090 | 11086 | 5178 | 2911 | 2349 | 5771 | 610 | 2885 | 5427 |
| | 3735 | 3349 | 649 | 847 | 11740 | 439 | 4459 | 10523 | 846 | 4315 | 7823 | 8415 |
| | 6975 | 9073 | 10143 | 8957 | 2315 | 2292 | 6603 | 1321 | 8167 | 11331 | 9757 | 6755 |
| | 2327 | 2730 | 11943 | 11848 | 5411 | 5103 | 10812 | 8103 | 4922 | 9555 | 12323 | 9526 |
| | 3046 | 4303 | 9846 | 9636 | 10415 | 2376 | 7618 | 9049 | 11863 | 12452 | 9813 | 8070 |
| | 10257 | 3030 | 4031 | 4065 | 1716 | 12281 | 6543 | 5890 | 6492 | 3741 | 8608 | 6220 |
| | 3053 | 9086 | 637 | 6653 | 8593 | 11408 | 12357 | 6247 | 4629 | 2842 | 5476 | 10303 |
| | 2032 | 8190 | 1284 | 12440 | 9307 | 3477 | 2901 | 4407 | 5191 | 10111 | 4218 | 4412 |
| | 11723 | 7627 | 1891 | 7522 | 2323 | 8023 | 4766 | 8763 | 3951 | 8643 | 2501 | 5759 |
| | 1647 | 1794 | 11762 | 5216 | 5233 | 8857 | 11939 | 11126 | 5668 | 5621 | 11780 | 2443 |
| | 5526 | 448 | 7298 | 6966 | 8734 | 1104 | 5647 | 2321 | 12229 | 10556 | 1362 | 7312 |
| | 5089 | 4558 | 784 | 7286 | 2999 | 10921 | 10659 | 6804 | 659 | 6020 | 7233 | 6496 |
| | 4454 | 10299 | 11650 | 6596 | 4378 | 2529 | 10338 | 1375 | 573 | 2224 | 12213 | 1763 |
| | 1605 | 830 | 5001 | 10446 | 3830 | 4701 | 776 | 9314 | 6716 | 7514 | 3121 | 8862 |
| | 3508 | 8463 | 1757 | 6913 | 8530 | 5097 | 7740 | 2770 | 459 | 4180 | 2049 | 3855 |
| | 9103 | 6909 | 2972 | 4374 | 2939 | 12517 | 6215 | 6073 | 6945 | 11644 | 2408 | 8583 |
| | 12484 | 6919 | 5474 | 3709 | 3313 | 12163 | 3116 | 9475 | 8417 | 10673 | 6369 | 4831 |
| | 1516 | 1241 | 7797 | 6820 | 8998 | 1997 | 1768 | 2328 | 7424 | 11978 | 8750 | 7780 |
| | 11894 | 3142 | 12577 | 12293 | 11312 | 2772 | 11537 | 10690 | 1718 | 8646 | 8086 | 4294 |
| | 9402 | 9400 | 4982 | 4149 | 8342 | 12024 | 2655 | 10289 | 6995 | 8495 | 7186 | 9136 |
| | 9600 | 4718 | 3389 | 4542 | 519 | 4041 | 992 | 7372 | 1002 | 11226 | 2528 | 12519 |
| | 1542 | 11389 | 1514 | 6818 | 3426 | 4183 | 9065 | 7662 | 8073 | 521 | 1525 | 6163 |
| | 861 | 8690 | 2566 | 11361 | 9685 | 12230 | 8817 | 4888 | | | | |
| 354: | 5626 | 2966 | 4663 | 4805 | 5637 | 8787 | 12445 | 11680 | | | | |
| 355: | 9746 | 2454 | 2820 | 6126 | 9527 | 11327 | 4206 | 1124 | | | | |
| 356: | 3803 | 2159 | 11265 | 10262 | 1208 | 2265 | 6548 | 4559 | 9949 | 8892 | 1253 | 5869 |
| | 6212 | 6017 | 11175 | 3155 | 5749 | 2919 | 12006 | 2161 | 7594 | 10558 | 12270 | |
| 357: | 11897 | 12310 | 11976 | 5165 | 7935 | 565 | 11277 | 908 | 12483 | 7089 | 11639 | |
| 358: | 7374 | 4134 | 5499 | 4481 | 11052 | 4793 | 5466 | 6747 | 3954 | 6213 | 640 | 4867 |
| | 12055 | 11571 | 3592 | 1079 | 5345 | 10097 | 11174 | 7895 | | | | |
| 359: | 10455 | 9279 | 2524 | 4394 | 10985 | 4178 | 3240 | 6391 | 10552 | 3567 | 2029 | 1042 |
| | 1797 | 11402 | 7449 | 8268 | 2462 | 865 | 5988 | 3908 | 1404 | 11416 | 5916 | 7278 |
| | 7325 | 12549 | 7885 | 7883 | 6455 | 11569 | 6302 | 12413 | 9181 | 1962 | 2013 | 3143 |
| | 8399 | 10462 | 7807 | 7806 | 3136 | 3131 | 11003 | 1251 | 7387 | 2412 | 10649 | 10077 |
| | 4839 | 7683 | 6752 | 8353 | 3902 | 11971 | 9700 | 7909 | 1974 | 1145 | 11946 | 8178 |
| | 8457 | | | | | | | | | | | |
| 360: | 243 | 8836 | 3558 | 6739 | 5558 | 11923 | 11784 | 11730 | 10397 | 3528 | 7134 | 8772 |
| | 7228 | 2453 | 8340 | 7839 | 1256 | 10038 | 12184 | | | | | |
| 361: | 10213 | 10215 | 12148 | 10197 | 1692 | 10198 | 10202 | 12341 | 3385 | 2836 | 6484 | 11717 |
| | 10618 | 3411 | 10927 | 6460 | 1921 | 10241 | 1907 | 12389 | 7827 | 9025 | 5807 | 6681 |
| | 12391 | 12411 | 6550 | 974 | 5415 | 9578 | 5213 | 4987 | 4080 | 12522 | 2369 | 12124 |
| | 4767 | 6352 | 7944 | 10217 | 10216 | 3413 | 9071 | 3511 | 11013 | 10218 | 7981 | 8298 |
| | 9862 | 2132 | 530 | 3844 | 6662 | 6625 | 4550 | 6341 | 1722 | 7027 | 9323 | 5094 |
| | 3611 | 2266 | 4530 | 7763 | 7290 | 11753 | 2081 | 4242 | 11360 | 1239 | 2673 | 4531 |
| | 8677 | 4930 | 2570 | 7994 | 6309 | 4476 | 9282 | 6794 | 3851 | 3634 | 3637 | 10242 |
| | 10245 | | | | | | | | | | | |
| 362: | 922 | 10181 | 10184 | 6562 | 3258 | 6528 | 6629 | 1180 | 9451 | 406 | 6910 | 5922 |
| | 8885 | 9557 | 3599 | 7579 | 7047 | 2882 | 10405 | 3975 | 532 | 1868 | 2867 | 574 |
| | 1859 | 6925 | 6880 | 950 | 10421 | 6722 | 1464 | 1500 | 5038 | 12068 | 3134 | 12241 |
| | 9985 | 5705 | 3554 | 11752 | 2337 | 1748 | 4287 | 7838 | 8011 | 5651 | 5941 | 9051 |
| | 5564 | 4621 | 7863 | 2536 | 5059 | 5773 | 5837 | 12335 | 6680 | 7099 | 7118 | 10998 |
| | 2432 | 2463 | 1750 | 9628 | 6813 | 3628 | 9033 | 5836 | 10449 | 5420 | 5207 | 3387 |
| | 7412 | 3524 | 394 | 11949 | 8547 | 4036 | 6873 | 1600 | 1443 | 5349 | 4233 | 9783 |
| | 7318 | 2864 | 11057 | 1323 | 3052 | 10007 | 2599 | 6329 | 9359 | 7436 | 7657 | 11879 |
| | 1025 | 12197 | 9682 | 10707 | 9968 | 4445 | 801 | 8656 | 6142 | 2948 | 7184 | 4255 |
| | 10302 | 10364 | 12386 | 7309 | 12216 | 6438 | 2050 | 3050 | 2920 | 5965 | 11072 | 9831 |
| | 3854 | 5662 | 12003 | 3011 | 2728 | 9738 | 1017 | 8134 | 526 | | | |
| 363: | 6176 | 8639 | 1152 | 1522 | 8352 | 6375 | 10201 | 5139 | 8072 | 2308 | 4150 | 3445 |
| | 7428 | 2024 | 4633 | 4866 | 2581 | 12337 | 12476 | 10035 | 8153 | 11036 | 3036 | 7174 |
| | 5414 | 3759 | 9595 | 1795 | 7561 | 5236 | 11547 | 1813 | 1163 | 4779 | 3695 | 4760 |
| | 6556 | 8661 | 11299 | 11986 | 8914 | 10050 | 11070 | 4068 | 809 | 4568 | 3229 | 10263 |
| | 4659 | 10993 | 8382 | 1047 | 2931 | 9895 | 4478 | 1570 | 7237 | 4269 | 3838 | 1016 |
| | 4137 | 11183 | 12276 | 11482 | 9854 | 11264 | 3433 | 7046 | 8216 | 3513 | 9383 | 8148 |
| | 1602 | 6058 | 2215 | 1842 | 5999 | 10212 | 8258 | 6591 | 4686 | 9520 | 8497 | 6648 |
| | 3088 | 6786 | 5986 | 4715 | 7335 | 6510 | 1839 | 5658 | 2103 | 11352 | 7577 | 4634 |
| | 7828 | 9426 | 11791 | 11970 | 560 | 12269 | 10454 | 3529 | 7253 | 5891 | 880 | 4009 |
| | 2760 | 7540 | 9015 | 8638 | 3356 | 5775 | 10574 | 1338 | 12117 | 3249 | 7644 | 9762 |
| | 3751 | 7042 | 3672 | 4202 | 5589 | 6019 | 9835 | 7229 | 7693 | 3086 | 10296 | 9608 |
| | 11707 | 2588 | 6425 | 9954 | 7071 | 10204 | 7525 | 6469 | 3192 | 5805 | 6230 | 4385 |
| | 2180 | 6991 | 11841 | 9662 | 5353 | 2773 | 10791 | 3059 | 6304 | 7745 | 5886 | 6518 |
| | 1536 | 1863 | 1385 | 5022 | 6003 | 8904 | 7257 | 9755 | 11607 | 11221 | 6807 | 4696 |
| | 8329 | 9798 | 1221 | | | | | | | | | |
| 364: | 4714 | 6552 | 6036 | 9637 | 11177 | 7157 | 2425 | 8841 | 4455 | 8468 | 3444 | 8404 |
| | 3936 | 763 | 10942 | 1668 | 885 | 1786 | 10802 | 7271 | 8055 | 4969 | 11623 | 3054 |
| | 11828 | 2575 | 5685 | 5924 | 5460 | 4819 | 9989 | 11834 | 10380 | 5520 | 9589 | 3334 |
| | 4912 | 9894 | 7974 | 8700 | 12342 | | | | | | | |
| 365: | 4543 | 9647 | 3507 | 1211 | 3246 | 10549 | 2019 | 2094 | 4177 | 4338 | 9238 | 5770 |
| | 4772 | 6343 | 4048 | 12231 | 10905 | 12008 | 4926 | 12442 | 2270 | 5780 | 11506 | 7565 |
| | 1094 | 12147 | 1451 | 473 | 3294 | 11314 | 9173 | 2035 | 2593 | 12094 | 5494 | 5488 |
| | 3087 | 2026 | 8206 | 9878 | 4705 | 10472 | 4746 | 6642 | 5937 | 8790 | 11896 | 2244 |
| | 5026 | 5835 | 7953 | 11936 | 10110 | 7133 | 3785 | | | | | |
| 366: | 10341 | 5696 | 6298 | 2325 | 2938 | 8027 | 1580 | 7429 | 589 | 12057 | 10353 | 3976 |
| | 3860 | 1646 | 9225 | 842 | 5818 | 4573 | 1901 | 8803 | | | | |
| 367: | 4208 | 3058 | 2394 | 8507 | 2917 | 6904 | 1345 | 10919 | 4336 | 1202 | 7187 | 1114 |
| | 3353 | 3660 | 2387 | 8437 | 9496 | 9413 | 11082 | 8079 | 12040 | 2841 | 4934 | 12221 |
| | 8040 | 4875 | 7674 | 11844 | 10774 | 6033 | 11664 | 5283 | 5192 | 1085 | 3967 | 2564 |
| | 3007 | 11334 | 11393 | 9940 | 872 | 2508 | 12169 | 3721 | 6130 | 1306 | 5401 | 10879 |
| | 883 | 9814 | 5802 | 10180 | 6895 | 7491 | 3952 | 4386 | 8159 | 1106 | 5271 | 6278 |
| | 4124 | 11612 | 6546 | 556 | 9556 | 5366 | 11798 | 6295 | 10902 | 3531 | 3572 | 3574 |
| | 7418 | 3765 | 2343 | 7356 | 6349 | 9808 | 3624 | 9583 | 6431 | 3128 | 8098 | 3871 |
| | 2494 | 1319 | 2271 | 4787 | 1838 | 1456 | 5064 | 6878 | 9972 | 8908 | 6774 | 3809 |
| | 8730 | 11094 | 670 | 1496 | 5212 | 3588 | 9459 | 8518 | 6963 | 10018 | 7791 | 8264 |
| | 2418 | 6442 | 11211 | 1636 | 6014 | 5278 | 4155 | 11100 | 10528 | 11481 | 10313 | 7126 |
| | 8887 | 2600 | 11160 | 3425 | 5846 | 4898 | 4527 | 6393 | 12267 | 1747 | 10239 | 10330 |
| | 3670 | 10329 | 10327 | 11203 | 10715 | 8883 | 10249 | 1046 | 11155 | 5228 | 2070 | 2128 |
| | 7076 | 6412 | 6875 | 5853 | 8795 | 564 | 9262 | 2640 | 5083 | 1875 | 6898 | 6951 |
| | 12373 | 7127 | | | | | | | | | | |
| 368: | 6754 | 10585 | 6689 | 9826 | 964 | 4693 | 8822 | 6462 | 691 | 2410 | 9712 | 9884 |
| | 3219 | 7232 | 12539 | 1991 | 11008 | 9322 | 8725 | | | | | |
| 369: | 1461 | 7305 | 10596 | 7966 | 8323 | 9036 | 4856 | 433 | 2663 | 8335 | 8509 | 11775 |
| | 10231 | 5820 | 8056 | 12556 | 5630 | 11866 | 9292 | 2220 | 509 | 12153 | 7303 | 12393 |
| | 7926 | | | | | | | | | | | |
| 370: | 1200 | 12300 | 576 | 5306 | 8372 | 2320 | 7732 | 6788 | 3633 | 10013 | 657 | 1403 |
| | 10074 | 7663 | 6585 | 8051 | 2569 | 2722 | 8325 | 1121 | 11616 | 4248 | 6146 | 4276 |
| | 2647 | 5766 | 9625 | 10767 | 6273 | 4186 | 6188 | 3988 | 4877 | 3998 | 8151 | 6018 |
| | 2040 | 595 | | | | | | | | | | |
| 371: | 1200 | 12300 | 6283 | 5306 | 1573 | 8372 | 9432 | 1142 | 533 | 2320 | 7732 | 370 |
| | 1267 | 595 | 3852 | | | | | | | | | |
| 372: | 7477 | 1676 | 4448 | 2400 | 6045 | 6940 | 9923 | 11995 | 8913 | 10513 | 634 | 7969 |
| | 11746 | 6446 | 4371 | 1018 | 4026 | 10874 | 11604 | 5505 | 9219 | 4140 | 6427 | 12025 |
| | 1669 | 3605 | 5027 | 10847 | 11128 | 1483 | 9362 | 2044 | 12343 | 3560 | 430 | 11220 |
| | 12146 | 10479 | 7769 | 4704 | 5385 | 12424 | 3286 | 1435 | 12461 | 10990 | 7985 | 5652 |
| | 6086 | 12067 | 2785 | 6367 | 3470 | 2598 | 10591 | 4756 | 2959 | 10900 | 11878 | 12536 |
| | 5795 | 12559 | 5450 | 8391 | 10046 | 7073 | 3157 | 2834 | 8144 | 2236 | 2782 | 1926 |
| | 9617 | 1987 | 2822 | 2279 | 2196 | 10312 | 5369 | 10124 | 11903 | 12289 | 4170 | 12092 |
| | 8540 | 2362 | 12010 | 5204 | 9431 | 6620 | 3500 | 9585 | 7989 | 1508 | 4885 | 877 |
| | 6119 | 3807 | 2585 | 12330 | 4380 | 3820 | 5302 | 3056 | 6337 | 2060 | 3096 | 202 |
| | 4492 | 1604 | 11737 | 710 | 8574 | 11646 | 3171 | 9030 | 765 | 5680 | 10955 | 6592 |
| | 2624 | 9114 | 5576 | 5196 | 5912 | 1980 | 11275 | 1119 | 3929 | 9810 | 12099 | 11930 |
| | 4546 | 3504 | 1950 | 7696 | 374 | 1703 | | | | | | |
| 373: | 7477 | 1676 | 4448 | 2400 | 6045 | 6940 | 9923 | 8913 | 10513 | 634 | 11746 | 6446 |
| | 4371 | 1018 | 4026 | 11604 | 5505 | 9219 | 4140 | 6427 | 12025 | 3605 | 11128 | 9362 |
| | 1483 | 5027 | 10847 | 2044 | 12343 | 3560 | 430 | 11220 | 12146 | 12424 | 3286 | 12461 |
| | 10479 | 10990 | 5652 | 5385 | 6086 | 4704 | 7769 | 7985 | 2785 | 6367 | 10591 | 10900 |
| | 11878 | 12536 | 12559 | 12067 | 10046 | 3157 | 5450 | 8144 | 9617 | 1987 | 2822 | 10312 |
| | 2196 | 5369 | 10124 | 11903 | 12289 | 2362 | 12010 | 6620 | 5204 | 7989 | 4885 | 877 |
| | 4170 | 2585 | 8540 | 4380 | 12092 | 3820 | 1508 | 3056 | 6337 | 5302 | 3096 | 2060 |
| | 202 | 4492 | 1604 | 11737 | 710 | 8574 | 11646 | 3171 | 9030 | 765 | 5680 | 2624 |
| | 9114 | 6592 | 10955 | 5196 | 5912 | 1980 | 11275 | 9810 | 12099 | 4821 | 10994 | 8060 |
| | 1531 | 6262 | 4632 | 1058 | 2716 | 7317 | 4825 | 3731 | 5786 | 414 | 5576 | 1000 |
| | 9714 | 1854 | 2489 | 4638 | 4485 | 11930 | 3504 | 1950 | 7696 | 374 | 372 | 1703 |
| 374: | 7477 | 1676 | 4448 | 2400 | 6045 | 6940 | 9923 | 11995 | 8913 | 10513 | 634 | 7969 |
| | 11746 | 6446 | 4371 | 1018 | 4026 | 10874 | 11604 | 5505 | 9219 | 4140 | 6427 | 12025 |
| | 3605 | 1669 | 10847 | 5027 | 11128 | 9362 | 1483 | 2044 | 12343 | 3560 | 430 | 11220 |
| | 12146 | 10479 | 4704 | 7769 | 5385 | 12424 | 3286 | 12461 | 10990 | 7985 | 5652 | 6086 |
| | 1435 | 12067 | 2785 | 6367 | 3470 | 10591 | 2959 | 10900 | 2598 | 11878 | 12536 | 12559 |
| | 5450 | 10046 | 7073 | 3157 | 2834 | 5795 | 8144 | 9617 | 10146 | 1987 | 2822 | 2279 |
| | 2196 | 10312 | 5369 | 10124 | 11903 | 12289 | 4170 | 2362 | 12010 | 5204 | 6620 | 12092 |
| | 8540 | 9585 | 9431 | 3500 | 7989 | 1508 | 4885 | 877 | 2585 | 4380 | 3820 | 3056 |
| | 6337 | 5302 | 2060 | 3096 | 202 | 4492 | 1604 | 11737 | 710 | 8574 | 11646 | 3171 |
| | 9030 | 765 | 5680 | 6592 | 10955 | 2624 | 9114 | 5196 | 5912 | 1980 | 11275 | 5576 |
| | 9810 | 12099 | 11930 | 4546 | 3504 | 1950 | 7696 | 372 | | | | |
| 375: | 2393 | 3407 | 11789 | 2984 | 10140 | 7809 | 9834 | 6717 | 6156 | 10608 | 6364 | |
| 376: | 6589 | 11497 | 6836 | 11332 | 11382 | 5877 | 2213 | 2951 | 8215 | 1064 | 1057 | 8227 |
| | 8249 | 10551 | 3319 | 8195 | 8218 | 8221 | 9142 | 9661 | 8198 | 6116 | 10889 | 10520 |
| | 7399 | 3659 | 1734 | 5077 | 3510 | 5010 | 8351 | 9403 | 9244 | 483 | 4466 | 12167 |
| | 7031 | 4216 | 6477 | 4107 | 12150 | 6828 | 5305 | 12404 | 1567 | 7248 | 11614 | 7445 |
| | 3482 | 5079 | 2734 | 11033 | 3311 | 7402 | 4221 | 2223 | 1040 | 9289 | 2902 | 4438 |
| | 4600 | 4324 | 9168 | 2576 | 10382 | 7057 | 4976 | 1719 | 10894 | 10483 | 3361 | 9016 |
| | 5634 | 7496 | 1784 | 9760 | 12134 | 7188 | 8533 | 10833 | 1303 | 9336 | 4810 | 10290 |
| | 3800 | 11192 | 6040 | 852 | 586 | 9907 | 11699 | 8192 | 7242 | 2963 | 10418 | 12069 |
| | 9588 | 10604 | 2330 | 9242 | 6800 | 10782 | 7530 | 6261 | 8220 | 8962 | 7198 | 7306 |
| | 7697 | 2102 | 2085 | 9372 | 5757 | 3700 | 11432 | 3755 | 11635 | 3376 | 11831 | 9573 |
| | 10934 | 12553 | 9010 | 12441 | 2757 | 3093 | 11913 | 9725 | 3144 | 5892 | 10167 | 7130 |
| | 5337 | 3872 | 1625 | 4143 | 7507 | 3179 | 7982 | 2590 | 1203 | 1932 | 1225 | 6260 |
| | 1044 | 9032 | 498 | 499 | 9053 | 7023 | 8322 | 4927 | 3331 | 10393 | 8132 | 11728 |
| | 8655 | 7771 | 988 | 8909 | 1791 | 5413 | 2157 | 10976 | 1365 | 2511 | 3200 | 7167 |
| | 9986 | 11603 | 1041 | 6238 | 10166 | 11045 | 9704 | 9621 | 7669 | 2014 | 3281 | 11206 |
| | 2697 | 4067 | 5118 | 12401 | 5368 | 12284 | 9430 | 7136 | 12412 | 6387 | 9543 | 2522 |
| | 572 | 5119 | 1606 | 8394 | 10248 | 11146 | 10285 | 11719 | 6776 | 11309 | 11139 | 10439 |
| | 9245 | 11197 | 11729 | 2036 | 4759 | 9773 | 6077 | 5571 | 11810 | 10084 | 10857 | 8191 |
| | 9597 | 8037 | 3279 | 8225 | 797 | 976 | 977 | 979 | 999 | 5185 | 4166 | 9598 |
| | 4901 | 7135 | 2944 | 10328 | 8189 | 6781 | | | | | | |
| 377: | 10527 | 6513 | 5978 | 2596 | 1034 | 5101 | 1637 | 6141 | 6160 | 5334 | 12110 | |
| 378: | 11873 | 5442 | 7939 | 7815 | 10258 | 11591 | 11595 | 4116 | 4129 | 9663 | 4114 | 11588 |
| | 11586 | 11585 | 9690 | 11556 | 4111 | 11550 | 9687 | 4264 | 11554 | 5405 | 4130 | 3884 |
| | 9667 | 3491 | 11545 | 3879 | 11546 | 3875 | 9646 | 3873 | 4105 | 3881 | 4101 | 4086 |
| | 4084 | 3850 | 4082 | 4078 | 8588 | 8545 | 8589 | 9271 | 8300 | 5033 | 5035 | 5058 |
| | 1832 | 5005 | 9380 | 5056 | 2097 | 1720 | 7704 | 10811 | 2733 | 5138 | 3490 | 8251 |
| | 3805 | 2314 | 3573 | 5858 | 2753 | 2629 | 7295 | 557 | 3786 | 8599 | 9153 | 2012 |
| | 5249 | 12190 | 6141 | 5334 | 6162 | 7529 | 1731 | 10108 | 463 | 12105 | 5048 | 660 |
| | 7731 | 10191 | 9632 | 11189 | 6866 | 10706 | 4292 | 7977 | 437 | 10106 | 5124 | 1552 |
| | 2131 | 7651 | 11225 | 8644 | 1923 | 3585 | 6432 | 3532 | | | | |
| 379: | 8061 | 8064 | 7961 | 7964 | 404 | 3270 | 11215 | 3265 | 10192 | 11241 | 2078 | 11168 |
| | 7871 | 12087 | 4499 | 1544 | 1412 | 6268 | 8820 | 11677 | 914 | 5507 | 4996 | 4991 |
| | 4416 | 4419 | 1981 | 4347 | 3401 | 10092 | 11767 | 11031 | 12403 | 9799 | 8861 | 3101 |
| | 12558 | 10974 | 1155 | 1157 | 1162 | 1171 | 1167 | 10984 | 5609 | 5612 | 5156 | 5809 |
| | 5813 | 2069 | 10182 | 4042 | 3226 | 7512 | 6791 | 5053 | 6674 | 11820 | 11674 | 10970 |
| | 9466 | 11069 | 10506 | 2468 | 2442 | 2444 | 2291 | 2435 | 2288 | 2294 | 2296 | 1196 |
| | 12392 | 12414 | 12417 | 12418 | 12430 | 12435 | 12437 | 12453 | 8217 | 3323 | 4516 | 10500 |
| | 12038 | 2221 | 5834 | 3035 | 7400 | 2413 | 1207 | 2833 | 2850 | 4552 | 4556 | 3578 |
| | 5581 | 555 | 7183 | 552 | 7176 | 553 | 7179 | 549 | 7185 | 4518 | 4522 | 4539 |
| | 4541 | 3889 | 12474 | 5841 | 9042 | 5812 | 8199 | 8200 | 8494 | 469 | 4590 | 6355 |
| | 711 | 9845 | 9847 | 4984 | 7919 | 7432 | 7433 | 4285 | 11121 | 4503 | 7100 | 5439 |
| | 2561 | 5559 | 1944 | 1237 | 10062 | 2402 | 4735 | 6583 | 3891 | 5718 | 5725 | 5746 |
| | 9737 | 2946 | 2949 | 7280 | 5538 | 2658 | 2674 | 9057 | 8712 | 9135 | 5144 | 6967 |
| | 11626 | 10759 | 9277 | 11254 | 11258 | 10005 | 400 | 1615 | 4506 | 2137 | 6636 | 12186 |
| | 843 | 8021 | 3464 | 4335 | 12045 | 3009 | 6698 | 7468 | 1733 | 3239 | 4185 | 12228 |
| | 1011 | 4131 | 5279 | 11790 | 5453 | 5452 | 9366 | 10461 | 6840 | 5340 | 4790 | 9069 |
| | 4421 | 767 | 6182 | 2807 | 11421 | 6683 | 6090 | 4254 | 11473 | 4256 | 7225 | 11457 |
| | 6361 | 5623 | 1560 | 2751 | 6147 | 6148 | 6151 | 11409 | 11411 | 11415 | 9097 | 1310 |
| | 3111 | 4301 | 9508 | 7650 | 1796 | 11061 | 11104 | 11934 | 6530 | 9063 | 10105 | 4959 |
| | 7479 | 8137 | 11271 | 4864 | 11951 | 8624 | 8110 | 5704 | 4119 | 6365 | 9492 | 7963 |
| | 10912 | 2447 | 3204 | 3317 | 2521 | 2451 | 2450 | 2546 | 2514 | 3202 | 2487 | 2365 |
| | 3205 | 2363 | 3148 | 2396 | 3354 | 2480 | 4047 | 3352 | 3203 | 3175 | 3243 | 2484 |
| | 3262 | 3173 | 2419 | 2335 | 3380 | 3316 | 4051 | 3164 | 9189 | 11975 | 11977 | 12013 |
| | 7351 | 6499 | 6517 | 11125 | 10880 | 9640 | 9651 | 5762 | 5769 | 11996 | 11736 | 6987 |
| | 8226 | 3336 | 8224 | 1210 | 722 | 7083 | 11418 | 5972 | 9384 | 11424 | 6600 | 7623 |
| | 7528 | 10940 | 10803 | 8430 | 3662 | 3099 | 4359 | 5542 | 1686 | 11972 | 8902 | 2017 |
| | 2110 | 6669 | 6692 | 11541 | 4284 | 1473 | 4147 | 8879 | 8882 | 4376 | 8535 | 9364 |
| | 10522 | 7701 | 8652 | 11989 | 10456 | 4561 | 12185 | 1501 | 3769 | 9669 | 5220 | 5218 |
| | 9616 | 2405 | 12056 | 491 | 492 | 8338 | 819 | 2222 | 6325 | 1906 | 9158 | 6199 |
| | 421 | 5392 | 2403 | 3750 | 694 | 697 | 699 | 724 | 728 | 6340 | 3693 | 3696 |
| | 3955 | 7148 | 1166 | 2645 | 2409 | 8777 | 4990 | 8278 | 8279 | 8281 | 8304 | 8306 |
| | 8308 | 8312 | 947 | 4453 | 1206 | 10609 | 10755 | 11735 | 11539 | 11786 | 1546 | 10196 |
| | 7632 | 3082 | 3037 | 3110 | 3106 | 6524 | 3289 | 12083 | 12085 | 12082 | 490 | 6197 |
| | 12080 | 12079 | 2219 | 8066 | 6405 | 8894 | 7333 | 6385 | 10897 | 8930 | 1223 | 3912 |
| | 11910 | 1912 | 8891 | 3475 | 4698 | 2662 | 901 | 1194 | 1503 | 1507 | 8696 | 9203 |
| | 6471 | 566 | 6133 | 3248 | 11892 | 5459 | 3302 | 8553 | 4703 | 8621 | 851 | 4337 |
| | 4341 | 3675 | 2970 | 5601 | 10607 | 9524 | 12425 | 7307 | 9223 | 3918 | 736 | 729 |
| | 961 | 10464 | 6196 | 1543 | 2758 | 2971 | 5700 | 12211 | 2578 | 10438 | 3880 | 1539 |
| | 8865 | 8981 | 3738 | 12457 | 445 | 3540 | 11456 | 5703 | 4762 | 8680 | 2839 | 583 |
| | 4627 | 8732 | 5599 | 2623 | 6321 | 5659 | 10004 | 10168 | 8741 | 6218 | 2194 | 2214 |
| | 6554 | 6244 | 6555 | 2191 | 7472 | 8949 | 2896 | 6699 | 6703 | 3469 | 4902 | 9719 |
| | 1995 | 5537 | 3957 | 3964 | 11679 | 3719 | 424 | 8848 | 3586 | 11832 | 7055 | 10785 |
| | 9507 | 7643 | 10467 | 7642 | 10395 | 8808 | 9495 | 8628 | 9050 | 12192 | 9591 | 3681 |
| | 7246 | 11257 | 10605 | 9721 | 2379 | 1187 | 1674 | 10009 | 1108 | 6522 | 3363 | 3360 |
| | 1049 | 1051 | 1056 | 7756 | 7738 | 8897 | 2974 | 8924 | 2988 | 7438 | 832 | 4666 |
| | 11859 | 4702 | 2991 | 4355 | 8867 | 4968 | 8868 | 3897 | 8895 | 2967 | 4669 | 4697 |
| | 4674 | 4700 | 9415 | 6838 | 6549 | 2617 | 621 | 1831 | 10829 | 10808 | 4794 | 6627 |
| | 4776 | 7605 | 8694 | 12200 | 11056 | 11002 | 7868 | 3699 | 2610 | 419 | 418 | 10435 |
| | 936 | 2345 | 6762 | 12543 | 9549 | 10661 | 10689 | 10699 | 10719 | 1190 | 1165 | 1161 |
| | 1170 | 11929 | 11419 | 7988 | 3798 | 1218 | 1220 | 2721 | 1800 | 6167 | 1268 | 3178 |
| 380: | 7583 | 12223 | 3882 | 6192 | 10967 | 5287 | 11700 | 9299 | 12204 | 3071 | 9116 | 6233 |
| | 3626 | 6939 | 5957 | 2854 | 2852 | 10080 | 6245 | 9582 | 11285 | 9334 | 2429 | |
| 381: | 611 | 12004 | 6814 | 5320 | 1380 | 5991 | 7802 | 5112 | 6551 | 402 | 7832 | 382 |
| | 11138 | | | | | | | | | | | |
| 382: | 611 | 12004 | 5991 | 6551 | 7832 | | | | | | | |
| 383: | 4837 | 10247 | 4513 | 8974 | 9193 | 3250 | 11577 | 10663 | 2910 | 9363 | 1186 | |
| 384: | 11191 | 6118 | 591 | 9506 | 9370 | 8717 | 1055 | 9504 | 10360 | 6606 | 575 | 5878 |
| | 5911 | 3404 | 1764 | 7501 | 4369 | 4367 | 12240 | 12238 | 2227 | 7439 | 2003 | 7437 |
| | 7440 | 7521 | 11862 | 2334 | 12466 | 12137 | 5673 | 11590 | 12090 | 11766 | 7515 | 5121 |
| | 3935 | 6239 | 6232 | 836 | 6307 | 6289 | 6328 | 6310 | 9157 | 8674 | 2257 | 2828 |
| | 2851 | 6282 | 1990 | 10944 | 5126 | 5127 | 905 | 3876 | 907 | 8578 | 912 | 8514 |
| | 8899 | 12309 | 12059 | 10972 | 11683 | 4862 | 4099 | 11900 | 9518 | 9521 | 4985 | 9517 |
| | 6702 | 960 | 9819 | 958 | 965 | 963 | 2731 | 11043 | 10487 | 10486 | 11010 | 7682 |
| | 1759 | 9618 | 9619 | 5901 | 10142 | 7649 | 753 | 755 | 4752 | 6402 | 11686 | 1413 |
| | 656 | 5951 | 9563 | 795 | 8523 | 4826 | 11233 | 3115 | | | | |
| 385: | 12282 | 3816 | 6979 | 4487 | 8194 | 4174 | 1027 | 3606 | 9593 | 8612 | 10293 | 4967 |
| | 3304 | 6074 | 6908 | 8506 | 6658 | 7332 | 8682 | 9519 | 4399 | 4231 | 3446 | 3597 |
| | 11520 | 11676 | 11673 | 11704 | 11678 | 11714 | 11703 | 5090 | 10122 | 4379 | | |
| 386: | 3874 | 2573 | 7549 | 7517 | 9650 | 3332 | 1953 | 4431 | 11909 | 3497 | 10045 | 2551 |
| | 2545 | 9861 | 8988 | 4509 | 11527 | 10422 | 4863 | 8961 | 11568 | 5627 | 2724 | 9699 |
| | 5675 | 8512 | 2715 | 4144 | | | | | | | | |

### Example 6

[0109] This example illustrates the preparation and identification by screening of transgenic seeds and plants having enhanced agronomic traits using DNA encoding homologs identified in Example 7. Transgenic corn, soybean or cotton seed and plants with recombinant DNA encoding each of the homologs identified in Example 5 are prepared by transformation. The transgenic seed, plantlets and progeny plants are screened for nitrogen use efficiency, yield, water use efficiency, growth under cold stress and seed composition change. Transgenic plants and seed having at least one enhanced agronomic trait of this invention are identified.

### Example 7

[0110] This example illustrates the identification of consensus amino acid sequence for the proteins and homologs encoded by DNA that is used to prepare the transgenic seed and plants of this invention having enhanced agronomic traits.

[0111] ClustalW program was selected for multiple sequence alignments of the amino acid sequence of SEQ ID NO: 371 and 11 homologs. Three major factors affecting the sequence alignments dramatically are (1) protein weight matrices; (2) gap open penalty; (3) gap extension penalty. Protein weight matrices available for ClustalW program include Blosum, Pam and Gonnet series. Those parameters with gap open penalty and gap extension penalty were extensively tested. On the basis of the test results, Blosum weight matrix, gap open penalty of 10 and gap extension penalty of 1 were chosen for multiple sequence alignment. Attached are the sequences of SEQ ID NO: 371, its homologs and the consensus sequence, SEQ ID NO: 12608 at the end. The symbols for consensus sequence are (1) uppercase letters for 100% identity in all positions of multiple sequence alignment output; (2) lowercase letters for >=70% identity; symbol; (3) “X” indicated <70% identity; (4) dashes “-” meaning that gaps were in >=70% sequences.

SEQ ID NO:

| | |
|---|---|
| 371 | MDIFDNSDLEYLVDEFH--ADFDDDEPFGEVDVTSESDSDFMDSDFDFELSESKTNNETS |
| 12300 | MDIFDNSDLEYLVDDFHGFSDSEDDEPFGEFDHKSEADSDFEDDLDPTQESD------TS |
| 6283 | MEHFNNDDLEYVVDEYYDVPDFAVEDTS---SDIVPELTSDVDSDFEDEFPTSNAKTDTT |
| 1573 | MEHFNNDDLEYVVDEYYDVPDFAVEDTS---SDIVPELTSDVDSDFEDEFPTSNAKTDTT |
| 8372 | MEHFNNDDLEYVVDEYYDVPDFAVEDTS---SDIVPELTSDVDSDFEDEFPTSNAKTDTT |
| 5306 | MEHFNNDDLEYVVDEYYDVPDFAVEDTS---SDIVPELTSDVDSDFEDEFPTSNAKTDTT |
| 9432 | ------------------------------------------------------------ |
| 533 | ------------------------------------------------------------ |
| 2320 | ------------------------------------------------------------ |
| 1142 | -------------------------------------------------MTISNTSSTSK |
| 1200 | ------------------------------------------------------------ |
| 7732 | -----------------MAHDLHDDLEFVSGDDDDYYLEFDHDPGHGFHTSAATSASQTL |
| 12608 | xxxxxxxxxxxxxxxxxxxxxxxxxxxx---xxxxxxxxxxxxxxxxxxxxxxxxxxxxx |

ALEARNGKDIQGIPWESLNYTRDRYRENRLLHYKNFESLFRSREELDKECLQVEKGKNFY
ALEARNGKDIQGIPWERLNYSRDQYRYKRLQQYKNFEILFRSRQDLDKECLQVEKGKHFY
ASEARNGKDIQGIPWERLNYSRDKYRETRLKQYKNYQNFSRSRHDLRKECLEVQKGETFY
ASEARNGKDIQGIPWERLNYSRDKYRETRLKQYKNYQNFSRSRHDLRKECLEVQKGETFY
ASEARNGKDIQGIPWERLNYSRDKYRETRLKQYKNYQNFSRSRHDLRKECLEVQKGETFY
ASEARNGKDIQGIPWERLNYSRDKYRETRLKQYKNYQNFSRSRHDLRKECLEVQKGETFY
-----------GIPWERLNYSRDKYRETRLKQYKNYQNFSRSRHDLRKECFEVQKGETFY
-----------GIPWERLNYSRDKYRETRLKQYKNYQNFSLSPHHLHKECFQVQKGQTFY
-----------GIPWERLNYSRDKYRETRLKQYKNYQNFSRSPHHLRKECFQVQKGQTFY
TIFRRNGKDIQGIPWERLNYSRDKYRETRLKQYKNYQNFSLSPHHLHKECFQVQKGQTFY
------------IPWERLQITRKDYRKARLEQYKNYENFPQSGELMDKLCKQVESSSKYY
IGALYFRTSRWTIPWERLNYSRNQYREMRLRQYKNYENLTMPRDGLEKECKQVERKDTFY
xxxxxxxxxxxgIPWErLnysRdxYRexRLxqYKNyxnfxxsxxxlxKeCxxVxkgxtfY
DFQFNTRLVKSTIAHFQLR----------------NLVWATSKHDVYFMNNYSLMHWSSL
DFQFNTRLVKSTIAHFQLR----------------NLLWATTKHDVYFMKNYSLMHWSSL
DFFFNTRLVKSTIVHFQLR----------------NLLWATSKHDVYFMQNYSVMHWSAL
DFFFNTRLVKSTIVHFQLLRQVXVSSLAGPNIMLRNLLWATSKHDVYFMQNYSVMHWSAL
DFFFNTRLVRXTLAGPNIMLR--------------NLLWATSKHDVYFMQNYSVMHWSAL
DFFFNTRLVKSTIVHFQLRPN----------IMLRNLLWATSKHDVYFMQNYSVMHWSAL
DFFFNTRLVKSTIVHFQLR----------------NLLWATSKHDVYFMQNYSVMHWSAL
DFFFNTRLVKSTIVHFQLRN----------------LLWATSKHDVYLMQNYSVMHWSAL
DFFFNTRLVKSTIVEFQLQLGRTX-------IMLRNLLWATSKHDVYLMQNYSVMHWSAL
DFFFNTRLVKSTIVHFQLLXRWNMSSLAGPYIMLRNLLWATSKHDVYLMQDYSVMHWSAL
EFQYNTRIVKPSILHFQLR----------------NLLWATSKHDVYFMSNSTVGNWSSL
DFHLNTRLVKSTIVHFQLR----------------NLLWATSKHDVYLMQNYSVMHWSSL
dFxfNTRlVkstixhfqlxxx----------xxxxnLlWATsKHDVYxMqnysvmHWSxL
LQRGKEVLNVAKPIVPSMKQHGSLSQSVSRVQISTMAVKDDLKLREGSKESLSVRKSTNL
LQRSKEVLNVAKPIVPTMKQPGLLSQSISRVQISTMAVKDDLIVAGGFQGELICKRINEP
LRRGKEVLNVAKPIIPTLKRPGFLAQPVSRVQISTMTVKENLMVAGGFQGELICKNLKHP
LRRGKEVLNVAKPIIPTLKRPGFLAQPVSRVQISTMTVKENLMVAGGX-SRVSLYNLKHP
LRRGKEVLNVAKPIIPTLKRPGFLAQPVSRVQISTMTVKENLMVAGGFQGELICKNLKHP
LRRGKEVLNVAKPIIPTLKRPGFLAQPVSRVQISTMTVKENLMVAGGFQGELICKNLKHP
LRRGKEVLNVAKPIIPTLKRPGFLAQPVSRVQISTMTVKENLMVAGGFQGELICKNLKHP
LQRSKEVLNVAKPIIPTLTHPGFLAQPVSRVQISTMTVKENLMVAGGFQGELICKNLKQP
LRRGKEVLNVAKPIIPTLKRPGFLAQPVSRVQISTMTVKENLMVAGGFQGELICKNLKHP
LQRSKEVLNVAKPIIPTLTHPGFLAQPVSRVQISTMTVKENLMVAGGPQGELICKVGLII
SHKMTDVLDFSGHVAPAKKHPGCALEGFTGVQVSTLAVNEGLLVAGGFQGELVCKSLGER
LQRGKEVLNVAGQLAPSQNVR--GAMPLSRVQISTMAVKGNLMVAGGFQGELICKYVDKP
lxrxkeVLnvakpixPtxkxpgxlaqpvsrVQiSTmxVkenLmvagGfqgelickxxxxp
RLLSALN-----------------------------------------------------
GVAFCTVLHRFX-NDITNSVDIYNAPSGSLRVITANNDCTVRVLDAXNFAFLNSFTL---
GVLFCGKITTDDNAITHAV-DVYSNPAGSLRVITANNDFQGRVFD---------------
GVLFCGKITTDDNAITNAV-DVYSNPAGSLRVITANNDFQVRVFDAENFASLGWFKYDWS
GVLFCGKITTDDNAITNAV-DVYSNPAGSLRVITANNDFQVRVFDAENFASLGCFKYDWS
GVLFCGKITTDDNAITNAV-DVYSNPAGSLRVITANNDFQVRVFDAENFASLGCFKYDWS
GVLFCGKITTDDNAITNAV-DVYRNPAGSEGNPA--------------------------
GVLFCGKITTDGNAITNAVXDVYRNPAGSLRVITAXNDSQASGFDAENFAS---------
GVLFCGKITTDDNAITNAV-DVYSNPAGSLRVITANNDFQVRVFDAENFASLGCFKYDWS
ISYFHSI-----------------------------------------------------
DVKFCTRTTLSDNAITNAM-DIHRSTSGSLRITVSNNDSGVREFDMERFQLLNHFRFNWP
GVAFCTNLTGNNNSITNAV-DIYQAPNGGTRITTANNDCVVRTFDTERFSLISEFAFPWS
gvxfcxxxtxxxnxitxax-dxyxxpxgsxrxxxxxndxxxxxxdxxxxxxxxxxxxxxx
------------------------------------------------------------
------------------------------------------------------------
------------------------------------------------------------
VNNTSVSPDG--------------------------------------------------
VNNTSVSPDGKLLAVLGDSTECLIADANTGKITGSLKGHLDYSFSSAWHPDGQILATGNQ
VNNTSVSPDGKLLAVLGDSTECLIADANTGKITGSLKGHLDYSFSSAWHPDGQILATGNQ
------------------------------------------------------------
------------------------------------------------------------
VNNTSVSPDGKLLAVLGDSTECLIADANTGKITGSLKGHLDYSFSSAWHPDGQILATGNQ
------------------------------------------------------------
VNHTSVSPDKKLLAVVGDDRDALLVDSRNGKVTSTLVGHLDYSFASAWHLDGVTFATGNQ
VNNTSVSPDGKLLAVLGDSSDCLIADSQSGKEMARLKGHLDYSFSSAWHPDGRVVATGNQ
xxxxxxxxxxxxxxxxxxxxxxxxxxxxxxxxxxxxxxxxxxxxxxxxxxxxxxxxxxxx
------------------------------------------------------------
------------------------------------------------------------
------------------------------------------------------------
------------------------------------------------------------
DKTCRLWDIRNLSQSMAVLKGRMGAIRALRFTSDGRFLAMAEPADFVHIFDSHSGYEQGQ
DKTCRLWDIRNLSQSMAVLKGRMGAIRALRFTSDGRFLAMAEPADFVHIFDSHSGYEQGQ
------------------------------------------------------------
------------------------------------------------------------
DKTCRLWDIRNLSQSMAVLKGRMGAIRALRFTSDGRFLAMAEPADFVHIFDSHSGYEQGQ
------------------------------------------------------------
DKTCRVWDIRNPSTSLAVLRGNIGAIRCIRYSSDGRFLLFSEPADFVHVYSTAECYRKRQ
DRTCRVWDVRNMSRSVAVLEGRIGAVRGLRYSPDGRFLAASEPADFVHVYDAAAGYADAQ
xxxxxxxxxxxxxxxxxxxxxxxxxxxxxxxxxxxxxxxxxxxxxxxxxxxxxxxxxxxx
------------------------------------------------------*
------------------------------------------------------*
------------------------------------------------------*
------------------------------------------------------*
EIDLFGEIAGISFSPDTEALFVGIADRTYGSLLEFNRKRHYNYLDSF-------*
EIDLFGEIAGISFSPDTEALFVGIADRTYGSLLEFNRKRHYNYLDSF-------*
------------------------------------------------------*
------------------------------------------------------*
EIDLFGEIAGISFSPDTEALFVGIADRTYGSLLEFNRKRHYNYLDSF-------*
------------------------------------------------------*
EIDFFGEISGISLSPDD------ESLFVGVCDRVYASLLNYRLVHANGYLDSYM*
EIDLFGEIAGVAFSPAGNNGGGGEALFVSIADRTYGSLLEFHRRRRHGYLDCYV*
xxxxxxxxxxxxxxxxxxxxxxxxxxxxxxxxxxxxxxxxxxxxxxx-------*

[0112] The consensus amino acid sequence can be used to identify DNA corresponding to the full scope of this invention that is useful in providing transgenic plants, e.g., corn, soybean and cotton plants with transgenic cells expressing protein encoding DNA that impart an enhanced agronomic traits. For example, enhanced nitrogen use efficiency, enhanced yield, enhanced water use efficiency, enhanced growth under cold stress and/or improved seed compositions are imparted by the expression in the plants of DNA encoding a protein with amino acid sequence identical to the consensus amino acid sequence.

### Example 8

### Identification of Target Genes of Transcription Factors ABF3 and CBF3 Chemical Kinetics Models to Identify Regulator-Target Relationships

[0113] It has been shown both in mRNA blotting and microarray experiments that activation of regulators under stress conditions usually occurs earlier than that of its targets (Haake, 2002, Seki, 2002a). In eukaryotic cells, the effect of a regulator is usually achieved in multiple steps, including transcription of the regulator genes, transportation of the regulator mRNA(s) out of the nucleus, translation of the transcript(s), transportation of the regulator protein back to the nucleus, and the binding of the regulator protein to the promoter regions of its target genes to achieve transcriptional regulation. Noticeable timing difference exists among changes in concentrations of the regulator mRNA, the regulator protein, and the mRNAs of its targets. A chemical kinetics model naturally fits this context by taking into account of the time lags among these events.

[0114] Because the active level of the regulator protein is not measured directly in microarray experiments, the regulator protein concentration is treated as a hidden variable in our model to serve as the link between the measurable mRNA concentrations of a regulator and its target(s). More specifically, the regulator protein concentration can be modeled by the following chemical kinetic equation without considering post-translational regulation:

$$\frac{d {R}_{p}}{d t} = {K}_{tran} {R}_{m} - {K}_{p} {R}_{p} \qquad equation ( 1 )$$

where Rₚ is the regulator protein concentration; Rₘ is the regulator mRNA concentration; Kₜᵣₐₙ is the apparent rate of mRNA translation, and Kₚ is the turnover rate of the regulator protein. Accordingly, the time course of the target mRNA concentration can be modeled with the following equation

$$\frac{d {T}_{m}}{d t} = {B}_{t} + f ( {R}_{p} ) - {K}_{t} {T}_{m} \qquad equatio n ( 2 )$$

where Tₘ is the concentration of the target mRNA; Bᵢ is the basal transcription rate of the target gene; and Kₜ is the turnover rate of the target mRNA; f(Rₚ) measures the regulated transcription rate, which is different for activators and repressors. For activators, it has the following Taylor first order approximation when Rₚ is small (Chen et al., 1999).

$${f ( {R}_{p} ) = f ( {R}_{p} = 0 ) + \frac{d ( f ( {R}_{p} )}{d {R}_{p}} \vert}_{{R}_{p} = 0} {R}_{p} \qquad equation ( 3 )$$

f(Rₚ=0) is equal to zero, assuming target gene transcription should not be activated when there is no regulator protein.

$${\frac{d ( f ( {R}_{p} )}{d {R}_{p}} \vert}_{{R}_{p} = 0}$$

is the activation rate of regulator protein on the target gene. If it is replaced by parameter K_{act} for simplicity, f(Rₚ) takes the following form:

f(Rₚ)=K_{act}Rₚ equation (4)

[0115] The basal level target transcription rate should satisfy the following condition:

Bₜ+f(R_{pbasal})−KₜT_{mbasal}=0 equation (5)

[0116] Where R_{pbasal} and T_{mbasal} are the basal concentrations of the regulator protein and target mRNA, respectively.

[0117] Usually, what is reported in transcription profiling experiment is not the absolute concentration of mRNA, but rather a fold change compared to basal transcription level of that gene. Thus, we define relative changes of Rₘ and Tₘ as Rₘ′ and Tₘ′

Rₘ′=Rₘ/R_{mbasal}−1 equation (6)

Tₘ′=Tₘ/T_{mbasal}−1 equation (7)

Combining equation (1), (2), (4), (5), (6) and (7), and considering the fact that KₜᵣₐₙR_{mbasel}−KₚR_{pbaseal}=0 leads to the following second order ordinary differential equation:

$$\frac{{d}^{2} ( {T}_{m}^{′} )}{d {t}^{2}} + ( {K}_{t} + {K}_{p} ) \frac{d ( {T}_{m}^{′} )}{d t} + {K}_{t} {K}_{p} {T}_{m}^{′} = γ {R}_{m}^{′} \qquad equation ( 8 )$$

### Where γ=K_{act}KₜᵣₐₙR_{mbasal}/T_{mbasal}

[0118] Given all the model parameters, the relationship between the relative mRNA levels of regulator and its target, Rₘ′ and Tₘ′, is defined by Equation (8). In other words, for the target gene of a regulator, its relative mRNA level Tₘ′ has to satisfy equation (8), given the model parameters and the relative regulator mRNA level Rₘ′. It is interesting to note that the regulator protein concentration, a key variable in the original model equations, is not involved explicitly in the final equation relating the relative mRNA levels of regulator and target. To predict the target of a specific regulator, we can solve equation (8) to obtain the theoretical target behavior curve, and then find the genes with mRNA levels similar to the theoretical curve, which will be identified as the potential targets of that regulator.

[0119] In the case of transcript expression profiling experiments under stress conditions, the initial conditions should be the following:

$$\begin{matrix}{T}_{m}^{′} {\vert}_{t = 0} = 0 & equation ( 9 ) \\ {\frac{d ( {T}_{m}^{′} )}{d t} \vert}_{t = 0} = 0 & equation ( 10 )\end{matrix}$$

[0120] Because the target gene mRNA and the regulator protein should be at their basal levels at the onset of stress condition (t=0). It is apparent from equations (2) and (5) that initial condition (10) should be true.

[0121] To approximate Rₘ, a stepwise linear model can be fit as follows:

Rₘ′ₜ(t)=αᵢ+βᵢt tᵢ≦t≦tᵢ₊₁ i=0, . . . , n−1 equation (11)

Where tᵢ is i^{th} time point; and αᵢ and βᵢ are the parameters of stepwise linear function in each time interval, which are determined by the measured regulator mRNA levels at the two adjacent time points. Equation (8) has analytic solution:

Tmᵢ(t)′=Aᵢe^{-Kit}+Bᵢe^{-Kpt}+Cᵢ+Dᵢt tᵢ≦t≦tᵢ₊₁. i=0, . . . , n−1 equation (12)

Where Dᵢ=βᵢγᵢKₚKₜ and Cᵢ=[αᵢγ−(Kₚ+Kₜ)Dᵢ]/KₚKₜ
The contiguous restrictions on Tₘ′ are stated in the following equations:

$$\begin{matrix}{Tm}_{i}^{′} ( t ) = {Tm}_{i + t}^{′} ( t ) , \\ when t = ti i = 1 , … , n - 1. & equation ( 13 ) \\ \frac{d ( {Tm}_{i}^{′} ( t ) )}{d t} = \frac{d ( {Tm}_{i + t}^{′} ( t ) )}{d t} , \\ when t = ti i = 1 , … , n - 1. & equation ( 14 )\end{matrix}$$

After substituting equation (12) into equations (9), (10), (13) and (14), Aᵢ and Bᵢ can be obtained by solving sets of linear algebra equations, and are functions of αᵢ, βᵢ, γ, Kₜ and Kₚ.

[0122] Learning model parameters. For each regulator and target pair, there are three parameters involved in equation (8), the target mRNA turnover rate Kₜ, the active regulator turnover rate Kₚ, and γ, which is equal to K_{act}KₜᵣₐₙR_{mbasal}/T_{mbasel}. K_{act} represents the strength of regulator protein effect on the target gene; Kₜᵣₐₙ is the translation rate of regulator mRNA. They lump together with the ratio of basal mRNA concentrations of regulator and target to form parameter γ, which determines the magnitude of the relative target mRNA level but not its shape. It is the parameters Kₜ and Kₚ that determine the shape of the relative target mRNA level, such as how fast the target gene responds to the regulator.

[0123] For gene expression experiments under stress conditions in plants, the kinetics model can be trained with known regulator-target pair reported in the literature (e.g., CBF and RD17 in Arabidopsis under cold stress) with a non-linear regression model. When the normalized expression profile of a target gene with its maximal response is considered, there is no need to keep γ as a free model parameter (γ1=nγ2 leads to Tₘ₁′=nTₘ₂′ when other parameters are kept the same in equations (8), (9) and (10)). Therefore, only two parameters Kₜ and Kₚ are estimated from the non-linear regression model, and are used to predict other regulators and their targets in plant stress response. The theoretical target mRNA expression profiles are calculated for all the genes annotated as transcription factors, and Pearson correlation coefficient is computed for each theoretical target profile and each observed expression profile in each stress condition. When high correlation in one or several stress conditions is found, the transcription factor could be one of the putative regulators of the corresponding gene.

[0124] Target gene prediction using promoter motif analysis. As an additional line of evidence for regulator-target pair prediction, we used promoter motif analysis to correlate regulators and their potential targets. Differentially expressed genes under stress conditions measured in microarray experiments can be partitioned into certain number of clusters based on the similarity in their expression profiles. All known promoter motifs within 1500 base-pairs distance to the starting codon were extracted from AGRIS database (Davuluri, 2003) for each gene. The frequency of each promoter motif in each cluster is computed, and Fisher's Exact Test is conducted to test the over-representation of certain promoter motifs. Enriched promoter motifs for a given cluster are selected as putative regulator motifs when statistical significance meets certain cutoff value (e.g., p-value 0.05). When a transcription factor (or a family of transcription factors) is known to bind to the putative regulator motif, the transcription factor(s) should be the putative regulators of target genes with the regulator motif in that cluster.

[0125] Combining evidences from kinetics models and promoter analysis. Kinetics models and promoter analysis independently predict putative regulator-target pairs, we attempted to combine their results to enhance our ability to detect true regulator-target pairs. In our kinetics models, for each target gene only the transcription factors with a Pearson correlation coefficient higher than certain cutoff in at least one stress condition are considered as its potential regulators. It is possible that the same regulator regulates its target genes in different stress conditions. Therefore, it is reasonable to give a higher ranking for a regulator if its theoretical target profiles are correlated to those of certain gene in multiple conditions. Based on these ideas, a ranking score for each possible regulator-target pair is derived as follows:

$$score ( {r}_{i} , {t}_{j } ) = {\prod }_{k} {R}_{k} ( {r}_{i} , {t}_{j} ) / N \qquad equation ( 15 )$$

Where Rₖ(rᵢ,tⱼ) is the rank of Pearson correlation coefficient of the theoretical target profile of transcription factor rᵢ to that of gene tⱼ in stress condition k; N is the total number of transcription factors on DNA chip.

[0126] The rank of the scores for putative transcription factors should represent the likelihood of them being the true regulator for a specific gene. Similarly, the rank of p-value of motif enrichment is the indicator of the likelihood of a transcription factor(s) being the true regulator for a specific target. Lastly, we combine both rankings from kinetics model prediction and promoter analysis by defining a score for a given regulator-target pair as following:

$$L ( {r}_{i} , {t}_{j} ) = {\prod }_{m} {rank}_{m} ( {r}_{i} , {t}_{j} ) / N \\ m = 1 , 2 \qquad equation ( 17 )$$

[0127] Where L(rᵢ,tⱼ) can be viewed as the strength of transcription factor rᵢ to be the regulator of gene tⱼ; rank₁(rᵢ,tⱼ) and rank₂(rᵢ,tⱼ) are the rank of score(rᵢ,tⱼ) from kinetics model prediction, and the rank of p-value of regulator rᵢ binding motifs enrichment for the cluster with gene tⱼ, respectively.

[0128] This method was applied to an Arabidopsis gene expression dataset measuring responses to various stress conditions (Seki et al., 2002a; Seki, et al., 2002b). In this experiment, wild-type Arabidopsis plants were subject to stress treatments for various periods (1, 2, 5, 10 and 24 hours), and extracted mRNA samples were hybridized to a cDNA microarray with ˜7000 full-length cDNAs. 493 genes were chosen for the analysis, as each of these genes was differentially regulated in at least one of the stress conditions. Table 8 shows the evidence of the predicted target genes of CBF3 in terms of evidence strength, whether evidence from kinetics model or enriched promoter analysis exists for each predicted target.

TABLE 8

| | | Evidence | Kinetics | Promoter |
|---|---|---|---|---|
| SEQ ID NO | Target | strength (10⁻⁵) | model | Analysis |
| / | At1g01470 | 2.13333 | yes | yes |
| / | AtGolS3 | 2.13333 | yes | yes |
| / | RD17 | 2.13333 | yes | yes |
| / | ERD10 | 2.13333 | yes | yes |
| 175 | At1g21790 | 2.13333 | yes | yes |
| / | ERD7 | 2.13333 | yes | yes |
| / | cor15A | 2.13333 | yes | yes |
| / | FL3-5A3 | 4.26667 | yes | yes |
| / | kin2 | 4.26667 | yes | yes |
| / | cor15B | 6.4 | yes | yes |
| 176 | ERD4 | 26.66667 | yes | no |
| / | RD29A | 26.66667 | yes | no |
| / | At1g16850 | 53.33333 | yes | no |
| 177 and 178 | At1g78070 | 800 | no | yes |
| / | kin1 | 800 | no | yes |

Table 9 shows the evidence of the predicted target genes of ABF3 in terms of the evidence strength, whether evidence from kinetics model or enriched promoter analysis exists for each predicted target.

TABLE 9

| | | Evidence | Kinetics | Promoter |
|---|---|---|---|---|
| SEQ ID NO | Target | strength (10⁻⁵) | model | Analysis |
| 179, 180 and 181 | At3g47340 | 1.26222 | yes | yes |
| 182 | At5g13170 | 1.26222 | yes | yes |
| 183 | At2g19900 | 1.26222 | yes | yes |
| 184 and 185 | At5g09530 | 2.52444 | yes | yes |
| 186 | At2g42790 | 2.52444 | yes | yes |
| 187 | At3g56200 | 2.52444 | yes | yes |
| 188 and 189 | At5g01520 | 2.52444 | yes | yes |
| 190 | At5g66780 | 3.78667 | yes | yes |
| 191 | At5g59320 | 3.78667 | yes | yes |
| 192 | AtHB7 | 5.04889 | yes | yes |
| / | RD29B | 7.57333 | yes | yes |
| 193 | RD20 | 7.57333 | yes | yes |

[0129] It has been shown that ABF3 and CBF3 confer stress tolerance to transgenic plants. Thus, the target genes of ABF3 and CBF3, identified by this invention, including SEQ ID NO: 368 through SEQ ID NO: 386, and their homologs, are particularly useful for producing transgenic plant cells in crop plants with enhanced stress tolerance.

### Example 9

### Identification of Amino Acid Domain by Pfam Analysis

[0130] The amino acid sequence of the expressed proteins that were shown to be associated with an enhanced trait were analyzed for Pfam protein family against the current Pfam collection of multiple sequence alignments and hidden Markov models using the HMMER software in the appended computer listing. The Pfam protein families for the proteins of SEQ ID NO: 194 through 386 are shown in Table 10. The Hidden Markov model databases for the identified patent families are also in the appended computer listing allowing identification of other homologous proteins and their cognate encoding DNA to enable the full breadth of the invention for a person of ordinary skill in the art. Certain proteins are identified by a single Pfam domain and others by multiple Pfam domains. For instance, the protein with amino acids of SEQ ID NO: 194 is characterized by three Pfam domains, i.e. PPDK_N, PEP-utilizer and PEP-utilizer_C.

TABLE 10

| PEP SEQ | | Pfam domain | | | | |
|---|---|---|---|---|---|---|
| ID NO | GENE ID | name | begin | stop | score | E-value |
| 194 | PHE0003351_PMON81242.pep | PPDK_N | 99 | 464 | 710.9 | 7.90E−211 |
| 194 | PHE0003351_PMON81242.pep | PEP-utilizers | 500 | 601 | 182.3 | 1.10E−51 |
| 194 | PHE0003351_PMON81242.pep | PEP-utilizers_C | 613 | 969 | 723.9 | 1.00E−214 |
| 195 | PHE0003351_PMON83625.pep | PPDK_N | 99 | 464 | 710.9 | 7.90E−211 |
| 195 | PHE0003351_PMON83625.pep | PEP-utilizers | 500 | 601 | 182.3 | 1.10E−51 |
| 195 | PHE0003351_PMON83625.pep | PEP-utilizers_C | 613 | 969 | 723.9 | 1.00E−214 |
| 196 | PHE0000207_PMON77878.pep | Pkinase | 1 | 259 | 343.1 | 4.40E−100 |
| 197 | PHE0000208_PMON77879.pep | Pkinase | 1 | 259 | 353.4 | 3.30E−103 |
| 198 | PHE0000209_PMON77891.pep | Pkinase | 1 | 259 | 354.9 | 1.20E−103 |
| 199 | PHE0000210_PMON77880.pep | Pkinase | 1 | 259 | 359.4 | 5.40E−105 |
| 200 | PHE0001329_PMON92878.pep | Pkinase | 12 | 266 | 354.3 | 1.80E−103 |
| 200 | PHE0001329_PMON92878.pep | NAF | 311 | 371 | 123.6 | 5.10E−34 |
| 201 | PHE0001425_PMON79162.pep | CAF1 | 19 | 252 | 368.1 | 1.30E−107 |
| 202 | PHE0001573_PMON92870.pep | GATase_2 | 2 | 162 | 55.5 | 3.10E−15 |
| 202 | PHE0001573_PMON92870.pep | Asn_synthase | 210 | 451 | 329.6 | 5.00E−96 |
| 203 | PHE0001664_PMON99280.pep | FAD_binding_4 | 69 | 213 | 83.4 | 6.30E−22 |
| 204 | PHE0001674_PMON79194.pep | Myb_DNA-binding | 25 | 70 | 36.3 | 9.90E−08 |
| 205 | PHE0002026_PMON96489.pep | Ammonium_transp | 36 | 459 | 628.5 | 5.10E−186 |
| 206 | PHE0002108_PMON92821.pep | CSD | 1 | 65 | 155.1 | 1.60E−43 |
| 207 | PHE0002109_PMON93856.pep | CSD | 1 | 67 | 144.8 | 2.10E−40 |
| 208 | PHE0002508_PMON92607.pep | CBFD_NFYB_HMF | 24 | 89 | 130.9 | 3.20E−36 |
| 209 | PHE0002650_PMON81832.pep | SRF-TF | 9 | 59 | 106.9 | 5.50E−29 |
| 209 | PHE0002650_PMON81832.pep | K-box | 73 | 172 | 118.4 | 1.90E−32 |
| 210 | PHE0002989_PMON95630.pep | Miro | 10 | 126 | 74.3 | 3.40E−19 |
| 210 | PHE0002989_PMON95630.pep | Ras | 11 | 173 | 288.8 | 9.30E−84 |
| 212 | PHE0003300_PMON95106.pep | MtN3_slv | 12 | 99 | 131.1 | 2.80E−36 |
| 212 | PHE0003300_PMON95106.pep | MtN3_slv | 133 | 219 | 134.9 | 2.00E−37 |
| 214 | PHE0003389_PMON94682.pep | p450 | 48 | 527 | 286.5 | 4.60E−83 |
| 215 | PHE0003614_PMON95111.pep | Pyridoxal_deC | 33 | 381 | 531.8 | 6.80E−157 |
| 216 | PHE0003684_PMON92807.pep | Myb_DNA-binding | 118 | 168 | 47.9 | 3.00E−11 |
| 217 | PHE0003684_PMON93378.pep | Myb_DNA-binding | 118 | 168 | 47.9 | 3.00E−11 |
| 218 | PHE0003853_PMON92602.pep | Cyclin_N | 46 | 171 | 72.6 | 1.10E−18 |
| 219 | PHE0003903_PMON98271.pep | TPP_enzyme_N | 44 | 220 | 302.9 | 5.50E−88 |
| 219 | PHE0003903_PMON98271.pep | TPP_enzyme_M | 241 | 390 | 157.3 | 3.70E−44 |
| 220 | PHE0003905_PMON99283.pep | Aldedh | 30 | 492 | 514.4 | 1.10E−151 |
| 221 | PHE0003907_PMON98066.pep | Ribosomal_L12 | 124 | 191 | 62.6 | 1.20E−15 |
| 222 | PHE0003908_PMON98064.pep | DnaJ | 31 | 93 | 128.9 | 1.30E−35 |
| 223 | PHE0003960_PMON95079.pep | CTP_transf_2 | 56 | 186 | 142.9 | 7.70E−40 |
| 224 | PHE0003967_PMON95088.pep | GST_N | 11 | 84 | 43.3 | 7.40E−10 |
| 228 | PHE0004023_PMON92446.pep | PHD | 198 | 248 | 54.9 | 2.40E−13 |
| 229 | PHE0004026_PMON93885.pep | Aa_trans | 44 | 438 | 409.4 | 4.80E−120 |
| 230 | PHE0004027_PMON93860.pep | FAD_binding_4 | 64 | 218 | 83.9 | 4.60E−22 |
| 231 | PHE0004028_PMON94697.pep | Alpha-amylase | 10 | 426 | −62.1 | 4.30E−06 |
| 232 | PHE0004034_PMON92631.pep | DUF1336 | 236 | 478 | 491.8 | 7.30E−145 |
| 234 | PHE0004047_PMON92619.pep | LIM | 11 | 68 | 53.4 | 7.00E−13 |
| 234 | PHE0004047_PMON92619.pep | LIM | 110 | 167 | 63.9 | 4.70E−16 |
| 235 | PHE0004047_PMON93388.pep | LIM | 11 | 68 | 53.4 | 7.00E−13 |
| 235 | PHE0004047_PMON93388.pep | LIM | 110 | 167 | 63.9 | 4.70E−16 |
| 236 | PHE0004068_PMON93663.pep | AWPM-19 | 1 | 125 | 287.6 | 2.20E−83 |
| 237 | PHE0004071_PMON93311.pep | RRM_1 | 105 | 174 | 77.3 | 4.40E−20 |
| 238 | PHE0004072_PMON93654.pep | MMR_HSR1 | 214 | 324 | 65.7 | 1.40E−16 |
| 239 | PHE0004072_PMON93669.pep | MMR_HSR1 | 214 | 324 | 65.7 | 1.40E−16 |
| 241 | PHE0004075_PMON92851.pep | MtN3_slv | 15 | 104 | 75.5 | 1.50E−19 |
| 241 | PHE0004075_PMON92851.pep | MtN3_slv | 137 | 223 | 97.2 | 4.50E−26 |
| 242 | PHE0004080_PMON93321.pep | peroxidase | 19 | 227 | 241 | 2.40E−69 |
| 243 | PHE0004084_PMON95141.pep | Phi_1 | 35 | 314 | 691.3 | 6.40E−205 |
| 244 | PHE0004093_PMON93332.pep | Dimerisation | 40 | 100 | 105.7 | 1.20E−28 |
| 244 | PHE0004093_PMON93332.pep | Methyltransf_2 | 104 | 350 | 317.5 | 2.20E−92 |
| 245 | PHE0004093_PMON94155.pep | Dimerisation | 40 | 100 | 105.7 | 1.20E−28 |
| 245 | PHE0004093_PMON94155.pep | Methyltransf_2 | 104 | 350 | 317.5 | 2.20E−92 |
| 247 | PHE0004144_PMON93842.pep | Cofilin_ADF | 16 | 143 | 152.4 | 1.10E−42 |
| 248 | PHE0004148_PMON92574.pep | Iso_dh | 28 | 412 | 521.5 | 8.40E−154 |
| 249 | PHE0004149_PMON92471.pep | HEAT_PBS | 115 | 143 | 23.8 | 0.00057 |
| 249 | PHE0004149_PMON92471.pep | HEAT_PBS | 155 | 181 | 37.8 | 3.50E−08 |
| 249 | PHE0004149_PMON92471.pep | HEAT_PBS | 186 | 212 | 22.4 | 0.0015 |
| 249 | PHE0004149_PMON92471.pep | HEAT_PBS | 260 | 287 | 16.8 | 0.074 |
| 250 | PHE0004149_PMON93899.pep | HEAT_PBS | 115 | 143 | 23.8 | 0.00057 |
| 250 | PHE0004149_PMON93899.pep | HEAT_PBS | 155 | 181 | 37.8 | 3.50E−08 |
| 250 | PHE0004149_PMON93899.pep | HEAT_PBS | 186 | 212 | 22.4 | 0.0015 |
| 250 | PHE0004149_PMON93899.pep | HEAT_PBS | 260 | 287 | 16.8 | 0.074 |
| 251 | PHE0004152_PMON93672.pep | AT_hook | 69 | 81 | 7.4 | 1.1 |
| 251 | PHE0004152_PMON93672.pep | DUF296 | 96 | 217 | 175.1 | 1.60E−49 |
| 252 | PHE0004155_PMON92626.pep | ADH_N | 41 | 152 | 176.1 | 8.20E−50 |
| 252 | PHE0004155_PMON92626.pep | ADH_zinc_N | 181 | 324 | 127.8 | 2.70E−35 |
| 253 | PHE0004156_PMON92623.pep | NPH3 | 135 | 364 | 219.3 | 7.80E−63 |
| 254 | PHE0004162_PMON92481.pep | AUX_IAA | 22 | 279 | 395.9 | 5.30E−116 |
| 255 | PHE0004164_PMON92465.pep | X8 | 29 | 115 | 168.4 | 1.70E−47 |
| 257 | PHE0004167_PMON93333.pep | APS_kinase | 108 | 264 | 363.4 | 3.20E−106 |
| 258 | PHE0004168_PMON93855.pep | FAD_binding_4 | 84 | 225 | 93 | 8.10E−25 |
| 258 | PHE0004168_PMON93855.pep | BBE | 476 | 534 | 120.1 | 5.70E−33 |
| 259 | PHE0004169_PMON92568.pep | Aldo_ket_red | 14 | 298 | 389.4 | 4.80E−114 |
| 260 | PHE0004184_PMON92565.pep | UIM | 214 | 231 | 14.4 | 0.29 |
| 260 | PHE0004184_PMON92565.pep | UIM | 298 | 315 | 24 | 0.00049 |
| 261 | PHE0004185_PMON92802.pep | p450 | 39 | 504 | 157.8 | 2.70E−44 |
| 262 | PHE0004188_PMON92803.pep | HSF_DNA-bind | 70 | 233 | 177.8 | 2.50E−50 |
| 263 | PHE0004190_PMON92801.pep | HLH | 175 | 213 | 9.2 | 0.014 |
| 264 | PHE0004208_PMON92834.pep | Myb_DNA-binding | 5 | 56 | 39.1 | 1.30E−08 |
| 264 | PHE0004208_PMON92834.pep | Myb_DNA-binding | 134 | 181 | 44.6 | 3.10E−10 |
| 265 | PHE0004215_PMON92827.pep | PBP | 14 | 170 | 30 | 1.50E−07 |
| 266 | PHE0004223_PMON92840.pep | Fasciclin | 40 | 179 | 11.7 | 0.00032 |
| 266 | PHE0004223_PMON92840.pep | Fasciclin | 217 | 353 | 104.9 | 2.20E−28 |
| 267 | PHE0004225_PMON94167.pep | Aldedh | 77 | 539 | 880.7 | 6.30E−262 |
| 268 | PHE0004226_PMON95114.pep | Aldedh | 77 | 539 | 873 | 1.30E−259 |
| 269 | PHE0004227_PMON92605.pep | UPF0057 | 5 | 55 | 76.3 | 8.50E−20 |
| 270 | PHE0004229_PMON92867.pep | UPF0057 | 4 | 54 | 96.4 | 8.00E−26 |
| 271 | PHE0004233_PMON92843.pep | HSF_NMA-bind | 60 | 236 | 255.5 | 1.00E−73 |
| 272 | PHE0004237_PMON93673.pep | HSP20 | 48 | 153 | 184.3 | 2.80E−52 |
| 273 | PHE0004243_PMON92621.pep | CBFD_NFYB_HMF | 22 | 87 | 122.5 | 1.10E−33 |
| 274 | PHE0004244_PMON92858.pep | CBFD_NFYB_HMF | 39 | 104 | 121 | 3.00E−33 |
| 275 | PHE0004245_PMON93813.pep | CBFD_NFYB_HMF | 25 | 90 | 129.2 | 1.00E−35 |
| 276 | PHE0004248_PMON94672.pep | CBFD_NFYB_HMF | 37 | 102 | 125.3 | 1.60E−34 |
| 278 | PHE0004250_PMON92881.pep | CBFD_NFYB_HMF | 25 | 90 | 119.7 | 7.80E−33 |
| 279 | PHE0004252_PMON92606.pep | CBFD_NFYB_HMF | 14 | 79 | 94.1 | 3.80E−25 |
| 280 | PHE0004253_PMON92874.pep | CBFD_NFYB_HMF | 7 | 71 | 83.8 | 5.00E−22 |
| 281 | PHE0004258_PMON93385.pep | Pkinase | 5 | 276 | 144.7 | 2.30E−40 |
| 282 | PHE0004258_PMON93806.pep | Pkinase | 5 | 276 | 144.7 | 2.30E−40 |
| 283 | PHE0004259_PMON93384.pep | Abhydrolase_3 | 95 | 319 | 302.4 | 7.70E−88 |
| 285 | PHE0004261_PMON93389.pep | Pkinase | 31 | 282 | 289.6 | 5.30E−84 |
| 285 | PHE0004261_PMON93389.pep | Pkinase_Tyr | 31 | 280 | 69.3 | 6.10E−20 |
| 286 | PHE0004261_PMON93655.pep | Pkinase | 31 | 282 | 289.6 | 5.30E−84 |
| 286 | PHE0004261_PMON93655.pep | Pkinase_Tyr | 31 | 280 | 69.3 | 6.10E−20 |
| 287 | PHE0004262_PMON92862.pep | Pkinase | 86 | 366 | 153.9 | 3.70E−43 |
| 287 | PHE0004262_PMON92862.pep | Pkinase_Tyr | 86 | 366 | 132.2 | 1.30E−36 |
| 288 | PHE0004262_PMON93360.pep | Pkinase | 86 | 366 | 153.9 | 3.70E−43 |
| 288 | PHE0004262_PMON93360.pep | Pkinase_Tyr | 86 | 366 | 132.2 | 1.30E−36 |
| 289 | PHE0004264_PMON92845.pep | PMEI | 25 | 174 | 138.8 | 1.40E−38 |
| 290 | PHE0004264_PMON93354.pep | PMEI | 25 | 174 | 138.8 | 1.40E−38 |
| 291 | PHE0004265_PMON92873.pep | Suc_Fer-like | 59 | 308 | 60.7 | 4.30E−15 |
| 292 | PHE0004265_PMON93807.pep | Suc_Fer-like | 59 | 308 | 60.7 | 4.30E−15 |
| 293 | PHE0004266_PMON92877.pep | Myb_DNA-binding | 298 | 348 | 46.6 | 7.80E−11 |
| 294 | PHE0004284_PMON93857.pep | U-box | 23 | 97 | 98.2 | 2.30E−26 |
| 295 | PHE0004285_PMON95136.pep | CBFD_NFYB_HMF | 61 | 126 | 123 | 7.70E−34 |
| 296 | PHE0004286_PMON93666.pep | ICL | 21 | 551 | 1239.3 | 0 |
| 297 | PHE0004287_PMON93344.pep | ICL | 21 | 552 | 1169.2 | 0 |
| 298 | PHE0004307_PMON94102.pep | RWP-RK | 196 | 247 | 90.7 | 4.00E−24 |
| 299 | PHE0004314_PMON93397.pep | zf-C3HC4 | 148 | 185 | 34.1 | 4.50E−07 |
| 300 | PHE0004321_PMON93811.pep | Redoxin | 64 | 228 | 4.9 | 0.0016 |
| 300 | PHE0004321_PMON93811.pep | GSHPx | 73 | 181 | 246.5 | 5.10E−71 |
| 301 | PHE0004321_PMON93834.pep | Redoxin | 64 | 228 | 4.9 | 0.0016 |
| 301 | PHE0004321_PMON93834.pep | GSHPx | 73 | 181 | 246.5 | 5.10E−71 |
| 302 | PHE0004325_PMON93818.pep | CcmH | 1 | 139 | 16.6 | 6.50E−09 |
| 303 | PHE0004335_PMON93850.pep | DZC | 158 | 193 | 81.9 | 1.80E−21 |
| 303 | PHE0004335_PMON93850.pep | DZC | 308 | 343 | 80.9 | 3.70E−21 |
| 304 | PHE0004336_PMON93858.pep | DZC | 179 | 214 | 78.3 | 2.20E−20 |
| 304 | PHE0004336_PMON93858.pep | DZC | 369 | 404 | 71.4 | 2.60E−18 |
| 306 | PHE0004348_PMON93810.pep | CSD | 1 | 65 | 136.8 | 5.50E−38 |
| 307 | PHE0004349_PMON93812.pep | CSD | 1 | 65 | 141.9 | 1.50E−39 |
| 308 | PHE0004350_PMON93826.pep | CSD | 1 | 66 | 148.4 | 1.70E−41 |
| 309 | PHE0004351_PMON93821.pep | CSD | 1 | 66 | 149.5 | 8.10E−42 |
| 310 | PHE0004352_PMON93824.pep | CSD | 2 | 68 | 151.2 | 2.50E−42 |
| 312 | PHE0004393_PMON94192.pep | efhand | 29 | 57 | 18 | 0.031 |
| 312 | PHE0004393_PMON94192.pep | efhand | 66 | 94 | 25.3 | 0.0002 |
| 312 | PHE0004393_PMON94192.pep | efhand | 110 | 138 | 24.2 | 0.00042 |
| 313 | PHE0004395_PMON94145.pep | C2 | 16 | 138 | 72.1 | 1.60E−18 |
| 313 | PHE0004395_PMON94145.pep | PLDc | 357 | 392 | 30.1 | 7.20E−06 |
| 313 | PHE0004395_PMON94145.pep | PLDc | 702 | 729 | 37.1 | 5.70E−08 |
| 314 | PHE0004396_PMON94137.pep | Orn_Arg_deC_N | 118 | 393 | 282.3 | 8.80E−82 |
| 314 | PHE0004396_PMON94137.pep | Orn_DAP_Arg_deC | 396 | 596 | 161.7 | 1.70E−45 |
| 315 | PHE0004417_PMON94190.pep | Spermine_synth | 13 | 256 | 516.1 | 3.40E−152 |
| 316 | PHE0004418_PMON94368.pep | Amino_oxidase | 18 | 504 | 275.8 | 7.90E−80 |
| 317 | PHE0004419_PMON95100.pep | Amidohydro_1 | 95 | 446 | 56.2 | 1.00E−13 |
| 317 | PHE0004419_PMON95100.pep | Amidohydro_3 | 95 | 444 | −49.9 | 0.00024 |
| 318 | PHE0004421_PMON95120.pep | AP2 | 52 | 118 | 92.2 | 1.40E−24 |
| 319 | PHE0004422_PMON95123.pep | AP2 | 58 | 123 | 78.5 | 1.90E−20 |
| 322 | PHE0004432_PMON94112.pep | Lactamase_B | 63 | 262 | 81.6 | 2.20E−21 |
| 322 | PHE0004432_PMON94112.pep | RMMBL | 400 | 440 | 33.6 | 6.10E−07 |
| 323 | PHE0004472_PMON94115.pep | Sina | 5 | 205 | 188 | 2.00E−53 |
| 324 | PHE0004472_PMON94126.pep | Sina | 5 | 205 | 188 | 2.00E−53 |
| 325 | PHE0004488_PMON95609.pep | Anti-silence | 1 | 155 | 392.9 | 4.40E−115 |
| 327 | PHE0004492_PMON95614.pep | NPH3 | 193 | 435 | 469.9 | 2.90E−138 |
| 328 | PHE0004545_PMON95117.pep | Ribosomal_L14 | 49 | 196 | 105.5 | 1.50E−28 |
| 329 | PHE0004574_PMON94433.pep | Transaldolase | 102 | 405 | 620.7 | 1.20E−183 |
| 329 | PHE0004574_PMON94433.pep | efhand | 444 | 472 | 21.3 | 0.0031 |
| 330 | PHE0004606_PMON95627.pep | Metallophos | 54 | 249 | 154 | 3.60E−43 |
| 331 | PHE0004620_PMON94189.pep | PFK | 6 | 281 | 515.1 | 7.30E−152 |
| 332 | PHE0004620_PMON94442.pep | PFK | 6 | 281 | 515.1 | 7.30E−152 |
| 333 | PHE0004622_PMON95621.pep | F-box | 2 | 49 | 43.2 | 8.10E−10 |
| 333 | PHE0004622_PMON95621.pep | LRR_2 | 150 | 175 | 41.5 | 2.60E−09 |
| 333 | PHE0004622_PMON95621.pep | FBD | 332 | 382 | 74.8 | 2.50E−19 |
| 334 | PHE0004626_PMON95101.pep | Aminotran_3 | 79 | 434 | 323.4 | 3.50E−94 |
| 335 | PHE0004630_PMON94367.pep | Iso_dh | 40 | 363 | 326.9 | 3.20E−95 |
| 336 | PHE0004634_PMON94385.pep | AP2 | 28 | 91 | 114.2 | 3.40E−31 |
| 337 | PHE0004640_PMON95066.pep | FAE1_CUT1_RppA | 75 | 365 | 539.9 | 2.40E−159 |
| 337 | PHE0004640_PMON95066.pep | Chal_sti_synt_C | 322 | 466 | 8.7 | 0.0003 |
| 337 | PHE0004640_PMON95066.pep | ACP_syn_III_C | 382 | 464 | 26.7 | 2.30E−08 |
| 338 | PHE0004645_PMON94655.pep | 14-3-3 | 5 | 241 | 304.8 | 1.50E−88 |
| 339 | PHE0004645_PMON94685.pep | 14-3-3 | 5 | 241 | 304.8 | 1.50E−88 |
| 342 | PHE0004650_PMON94686.pep | Skp1_POZ | 4 | 64 | 105.3 | 1.70E−28 |
| 342 | PHE0004650_PMON94686.pep | Skp1 | 112 | 190 | 173 | 6.90E−49 |
| 343 | PHE0004652_PMON94657.pep | UPF0005 | 31 | 247 | 55.1 | 2.20E−13 |
| 344 | PHE0004652_PMON94687.pep | UPF0005 | 31 | 247 | 55.1 | 2.20E−13 |
| 346 | PHE0004689_PMON95131.pep | Pkinase | 12 | 291 | 357 | 2.70E−104 |
| 347 | PHE0004691_PMON95129.pep | Spermine_synth | 33 | 278 | 501.4 | 9.60E−148 |
| 348 | PHE0004719_PMON94698.pep | zf-C3HC4 | 203 | 243 | 26.6 | 8.00E−05 |
| 349 | PHE0004719_PMON95089.pep | zf-C3HC4 | 203 | 243 | 26.6 | 8.00E−05 |
| 350 | PHE0004734_PMON94667.pep | KOW | 26 | 62 | 30.7 | 4.80E−06 |
| 350 | PHE0004734_PMON94667.pep | elF-5a | 84 | 153 | 125.8 | 1.10E−34 |
| 351 | PHE0004735_PMON95116.pep | KOW | 26 | 62 | 32.2 | 1.70E−06 |
| 351 | PHE0004735_PMON95116.pep | elF-5a | 84 | 153 | 120.3 | 5.10E−33 |
| 352 | PHE0004739_PMON95110.pep | Miro | 7 | 121 | 68.7 | 1.70E−17 |
| 352 | PHE0004739_PMON95110.pep | Ras | 8 | 179 | 270.9 | 2.30E−78 |
| 353 | PHE0004753_PMON95105.pep | Aldedh | 61 | 520 | 791.8 | 3.50E−235 |
| 355 | PHE0004770_PMON95122.pep | DUF1242 | 2 | 70 | 118.4 | 1.80E−32 |
| 357 | PHE0004774_PMON95147.pep | zf-A20 | 14 | 38 | 33.1 | 9.10E−07 |
| 357 | PHE0004774_PMON95147.pep | zf-AN1 | 92 | 132 | 68.2 | 2.50E−17 |
| 358 | PHE0004777_PMON95118.pep | RNA_pol_L | 6 | 83 | 75.9 | 1.20E−19 |
| 359 | PHE0004785_PMON95057.pep | Ribosomal_L18p | 26 | 172 | 251.4 | 1.70E−72 |
| 360 | PHE0004786_PMON95604.pep | Phi_1 | 35 | 314 | 691.3 | 6.40E−205 |
| 361 | PHE0004788_PMON95092.pep | DS | 53 | 369 | 587.4 | 1.30E−173 |
| 362 | PHE0004799_PMON95602.pep | DAO | 34 | 481 | −14.1 | 7.30E−05 |
| 362 | PHE0004799_PMON95602.pep | Amino_oxidase | 42 | 483 | 342.7 | 5.60E−100 |
| 363 | PHE0004841_PMON95636.pep | DNA_photolyase | 18 | 190 | 254.3 | 2.30E−73 |
| 363 | PHE0004841_PMON95636.pep | FAD_binding_7 | 223 | 501 | 503 | 3.20E−148 |
| 367 | PHE0004888_PMON95603.pep | Globin | 7 | 134 | 73 | 8.40E−19 |
| 367 | PHE0004888_PMON95603.pep | FAD_binding_6 | 156 | 263 | 29 | 4.80E−07 |
| 367 | PHE0004888_PMON95603.pep | NAD_binding_1 | 276 | 393 | 13.4 | 9.80E−05 |
| 369 | ERD4.pep | DUF221 | 295 | 710 | 245.3 | 1.20E−70 |
| 370 | At1g78070.2.pep | WD40 | 310 | 347 | 34.1 | 4.40E−07 |
| 372 | At3g47340.1.pep | GATase_2 | 2 | 161 | 99.6 | 8.60E−27 |
| 372 | At3g47340.1.pep | Asn_synthase | 209 | 450 | 344.3 | 1.80E−100 |
| 373 | At3g47340.3.pep | GATase_2 | 2 | 161 | 99.6 | 8.60E−27 |
| 373 | At3g47340.3.pep | Asn_synthase | 209 | 430 | 286.1 | 6.20E−83 |
| 374 | At3g47340.2.pep | GATase_2 | 2 | 161 | 99.6 | 8.60E−27 |
| 374 | At3g47340.2.pep | Asn_synthase | 209 | 450 | 344.3 | 1.80E−100 |
| 375 | At5g13170.1.pep | MtN3_slv | 12 | 99 | 135.1 | 1.80E−37 |
| 375 | At5g13170.1.pep | MtN3_slv | 134 | 220 | 135.4 | 1.40E−37 |
| 376 | At2g19900.1.pep | malic | 107 | 295 | 407.1 | 2.20E−119 |
| 376 | At2g19900.1.pep | Malic_M | 297 | 550 | 466.9 | 2.30E−137 |
| 379 | At2g42790.1.pep | Citrate_synt | 93 | 461 | 506.2 | 3.40E−149 |
| 380 | At3g56200.1.pep | Aa_trans | 21 | 426 | 106.3 | 8.10E−29 |
| 381 | At5g01520.1.pep | zf-C3HC4 | 146 | 183 | 26.1 | 0.00011 |
| 384 | At5g59320.1.pep | Tryp_alpha_amyl | 27 | 111 | 114.7 | 2.30E−31 |
| 385 | AtHB7.pep | Homeobox | 30 | 86 | 66.6 | 7.10E−17 |
| 385 | AtHB7.pep | HALZ | 87 | 131 | 39.2 | 1.30E−08 |
| 386 | RD20.pep | Caleosin | 54 | 227 | 469 | 5.30E−138 |

TABLE 11

| Pfam domain | accession | gathering | |
|---|---|---|---|
| name | number | cutoff | domain description |
| 14-3-3 | PF00244.9 | 25 | 14-3-3 protein |
| ACP_syn_III_C | PF08541.1 | −24.4 | 3-Oxoacyl-[acyl-carrier-protein (ACP)] synthase III C |
| | | | terminal |
| ADH_N | PF08240.2 | −14.5 | Alcohol dehydrogenase GroES-like domain |
| ADH_zinc_N | PF00107.16 | 23.8 | Zinc-binding dehydrogenase |
| AP2 | PF00847.9 | 0 | AP2 domain |
| APS_kinase | PF01583.9 | 25 | Adenylylsulphate kinase |
| AT_hook | PF02178.8 | 3.6 | AT hook motif |
| AUX_IAA | PF02309.6 | −83 | AUX/IAA family |
| AWPM-19 | PF05512.1 | 25 | AWPM-19-like family |
| Aa_trans | PF01490.7 | −128.4 | Transmembrane amino acid transporter protein |
| Abhydrolase_3 | PF07859.2 | 25.8 | alpha/beta hydrolase fold |
| Aldedh | PF00171.11 | −209.3 | Aldehyde dehydrogenase family |
| Aldo_ket_red | PF00248.10 | −97 | Aldo/keto reductase family |
| Alpha-amylase | PF00128.12 | −93 | Alpha amylase, catalytic domain |
| Amidohydro_1 | PF01979.8 | −37.4 | Amidohydrolase family |
| Amidohydro_3 | PF07969.1 | −65.5 | Amidohydrolase family |
| Amino_oxidase | PF01593.12 | −11.4 | Flavin containing amine oxidoreductase |
| Aminotran_3 | PF00202.10 | −207.6 | Aminotransferase class-III |
| Ammonium_transp | PF00909.10 | −144 | Ammonium Transporter Family |
| Anti-silence | PF04729.4 | 25 | Anti-silencing protein, ASF1-like |
| Asn_synthase | PF00733.10 | −52.8 | Asparagine synthase |
| BBE | PF08031.1 | 25 | Berberine and berberine like |
| C2 | PF00168.18 | 3.7 | C2 domain |
| CAF1 | PF04857.8 | −100.5 | CAF1 family ribonuclease |
| CBFD_NFYB_HMF | PF00808.12 | 18.4 | Histone-like transcription factor (CBF/NF-Y) and |
| | | | archaeal histone |
| CSD | PF00313.12 | −0.3 | ‘Cold-shock’ DNA-binding domain |
| CTP_transf_2 | PF01467.16 | −11.8 | Cytidylyltransferase |
| Caleosin | PF05042.3 | 25 | Caleosin related protein |
| CcmH | PF03918.4 | −30.8 | Cytochrome C biogenesis protein |
| Chal_sti_synt_C | PF02797.5 | −6.1 | Chalcone and stilbene synthases, C-terminal |
| | | | domain |
| Citrate_synt | PF00285.10 | −101.5 | Citrate synthase |
| Cofilin_ADF | PF00241.10 | −4.7 | Cofilin/tropomyosin-type actin-binding protein |
| Cyclin_N | PF00134.13 | −14.7 | Cyclin, N-terminal domain |
| DAO | PF01266.12 | −35.9 | FAD dependent oxidoreductase |
| DNA_photolyase | PF00875.8 | 26.1 | DNA photolyase |
| DS | PF01916.7 | −95.2 | Deoxyhypusine synthase |
| DUF1242 | PF06842.1 | 25 | Protein of unknown function (DUF1242) |
| DUF1336 | PF07059.2 | −78.2 | Protein of unknown function (DUF1336) |
| DUF221 | PF02714.5 | 25 | Domain of unknown function DUF221 |
| DUF296 | PF03479.4 | −11 | Domain of unknown function (DUF296) |
| DZC | PF08381.1 | 15.3 | Disease resistance/zinc finger/chromosome |
| | | | condensation-like region |
| Dimerisation | PF08100.1 | 18.1 | Dimerisation domain |
| DnaJ | PF00226.19 | −8 | DnaJ domain |
| F-box | PF00646.21 | 13.6 | F-box domain |
| FAD_binding_4 | PF01565.12 | −8.1 | FAD binding domain |
| FAD_binding_6 | PF00970.13 | −11.4 | Oxidoreductase FAD-binding domain |
| FAD_binding_7 | PF03441.4 | 25 | FAD binding domain of DNA photolyase |
| FAE1_CUT1_RppA | PF08392.1 | −192.7 | FAE1/Type III polyketide synthase-like protein |
| FBD | PF08387.1 | 25 | FBD |
| Fasciclin | PF02469.10 | 4 | Fasciclin domain |
| GATase_2 | PF00310.10 | −106.2 | Glutamine amidotransferases class-II |
| GSHPx | PF00255.10 | −16 | Glutathione peroxidase |
| GST_N | PF02798.9 | 14.6 | Glutathione S-transferase, N-terminal domain |
| Globin | PF00042.11 | −8.8 | Globin |
| HALZ | PF02183.7 | 17 | Homeobox associated leucine zipper |
| HEAT_PBS | PF03130.5 | 15 | PBS lyase HEAT-like repeat |
| HLH | PF00010.15 | 8.2 | Helix-loop-helix DNA-binding domain |
| HSF_DNA-bind | PF00447.7 | −70 | HSF-type DNA-binding |
| HSP20 | PF00011.10 | 13 | Hsp20/alpha crystallin family |
| Homeobox | PF00046.18 | −4.1 | Homeobox domain |
| ICL | PF00463.10 | −234 | Isocitrate lyase family |
| Iso_dh | PF00180.10 | −97 | Isocitrate/isopropylmalate dehydrogenase |
| K-box | PF01486.7 | 0 | K-box region |
| KOW | PF00467.18 | 29.1 | KOW motif |
| LIM | PF00412.11 | 0 | LIM domain |
| LRR_2 | PF07723.2 | 6 | Leucine Rich Repeat |
| Lactamase_B | PF00753.16 | 24.6 | Metallo-beta-lactamase superfamily |
| MMR_HSR1 | PF01926.11 | 31.2 | GTPase of unknown function |
| Malic_M | PF03949.4 | −143.9 | Malic enzyme, NAD binding domain |
| Metallophos | PF00149.17 | 22 | Calcineurin-like phosphoesterase |
| Methyltransf_2 | PF00891.7 | −103.8 | O-methyltransferase |
| Miro | PF08477.1 | 28 | Miro-like protein |
| MtN3_slv | PF03083.5 | −0.8 | MtN3/saliva family |
| Myb_DNA-binding | PF00249.19 | 2.8 | Myb-like DNA-binding domain |
| NAD_binding_1 | PF00175.10 | −3.9 | Oxidoreductase NAD-binding domain |
| NAF | PF03822.4 | 4.5 | NAF domain |
| NPH3 | PF03000.4 | 25 | NPH3 family |
| Orn_Arg_deC_N | PF02784.7 | −76 | Pyridoxal-dependent decarboxylase, pyridoxal |
| | | | binding domain |
| Orn_DAP_Arg_deC | PF00278.12 | 6.7 | Pyridoxal-dependent decarboxylase, C-terminal |
| | | | sheet domain |
| PBP | PF01161.9 | −20.6 | Phosphatidylethanolamine-binding protein |
| PEP-utilizers | PF00391.12 | 10 | PEP-utilising enzyme, mobile domain |
| PEP-utilizers_C | PF02896.7 | −173 | PEP-utilising enzyme, TIM barrel domain |
| PFK | PF00365.10 | −132 | Phosphofructokinase |
| PHD | PF00628.17 | 25.9 | PHD-finger |
| PLDc | PF00614.11 | 0 | Phospholipase D Active site motif |
| PMEI | PF04043.5 | 25 | Plant invertase/pectin methylesterase inhibitor |
| PPDK_N | PF01326.8 | −87 | Pyruvate phosphate dikinase, PEP/pyruvate binding |
| | | | domain |
| Phi_1 | PF04674.2 | 25 | Phosphate-induced protein 1 conserved region |
| Pkinase | PF00069.14 | −70.8 | Protein kinase domain |
| Pkinase_Tyr | PF07714.5 | 65 | Protein tyrosine kinase |
| Pyridoxal_deC | PF00282.9 | −158.6 | Pyridoxal-dependent decarboxylase conserved |
| | | | domain |
| RMMBL | PF07521.1 | 18.5 | RNA-metabolising metallo-beta-lactamase |
| RNA_pol_L | PF01193.12 | 16.9 | RNA polymerase Rpb3/Rpb11 dimerisation domain |
| RRM_1 | PF00076.11 | 20.7 | RNA recognition motif. (a.k.a. RRM, RBD, or RNP |
| | | | domain) |
| RWP-RK | PF02042.5 | 25 | RWP-RK domain |
| Ras | PF00071.11 | −69.9 | Ras family |
| Redoxin | PF08534.1 | −1 | Redoxin |
| Ribosomal_L12 | PF00542.8 | 25 | Ribosomal protein L7/L12 C-terminal domain |
| Ribosomal_L14 | PF00238.9 | −8 | Ribosomal protein L14p/L23e |
| Ribosomal_L18p | PF00861.12 | 25 | Ribosomal L18p/L5e family |
| SRF-TF | PF00319.8 | 11 | SRF-type transcription factor (DNA-binding and |
| | | | dimerisation domain) |
| Sina | PF03145.6 | −48.4 | Seven in absentia protein family |
| Skp1 | PF01466.8 | −2 | Skp1 family, dimerisation domain |
| Skp1_POZ | PF03931.5 | 14.9 | Skp1 family, tetramerisation domain |
| Spermine_synth | PF01564.6 | −93.8 | Spermine/spermidine synthase |
| Suc_Fer-like | PF06999.2 | −42.4 | Sucrase/ferredoxin-like |
| TPP_enzyme_M | PF00205.11 | −23.9 | Thiamine pyrophosphate enzyme, central domain |
| TPP_enzyme_N | PF02776.7 | −70 | Thiamine pyrophosphate enzyme, N-terminal TPP |
| | | | binding domain |
| Transaldolase | PF00923.9 | −49 | Transaldolase |
| Tryp_alpha_amyl | PF00234.10 | −4 | Protease inhibitor/seed storage/LTP family |
| U-box | PF04564.5 | 10.5 | U-box domain |
| UIM | PF02809.10 | 4.1 | Ubiquitin interaction motif |
| UPF0005 | PF01027.11 | −6.7 | Uncharacterised protein family UPF0005 |
| UPF0057 | PF01679.7 | 25 | Uncharacterized protein family UPF0057 |
| WD40 | PF00400.20 | 21.5 | WD domain, G-beta repeat |
| X8 | PF07983.3 | −28.8 | X8 domain |
| eIF-5a | PF01287.9 | 9.6 | Eukaryotic initiation factor 5A hypusine, DNA- |
| | | | binding OB fold |
| efhand | PF00036.20 | 17.5 | EF hand |
| malic | PF00390.8 | 25 | Malic enzyme, N-terminal domain |
| p450 | PF00067.11 | −105 | Cytochrome P450 |
| peroxidase | PF00141.12 | −10 | Peroxidase |
| zf-A20 | PF01754.6 | 25 | A20-like zinc finger |
| zf-AN1 | PF01428.6 | 0 | AN1-like Zinc finger |
| zf-C3HC4 | PF00097.13 | 16.9 | Zinc finger, C3HC4 type (RING finger) |

### Example 10

### Selection of Transgenic Plants with Enhanced Agronomic Traits

[0131] This example illustrates identification of plant cells of the invention by screening transgenic plants and seeds for an enhanced trait. Transgenic seed and plants, e.g., with transgenic corn cells in the plants prepared in Example 2, transgenic soybean cells in the plants prepared in Example 3, transgenic cotton cells in the plants prepared in Example 4, and transgenic cells in the plants prepared in Example 6, are screened for enhanced water use efficiency, enhanced cold tolerance, increased yield, enhanced nitrogen use efficiency, enhanced seed protein and enhanced seed oil as compared to control plants.

A. Selection for enhanced Nitrogen Use Efficiency

[0132] The physiological efficacy of transgenic corn plants (tested as hybrids) can be tested for nitrogen use efficiency (NUE) traits in a high-throughput nitrogen (N) selection method. The collected data are compared to the measurements from wildtype controls using a statistical model to determine if the changes are due to the transgene. Raw data were analyzed by SAS software. Results shown herein are the comparison of transgenic plants relative to the wildtype controls.

### (1) Media Preparation for Planting a NUE Protocol

[0133] Planting materials used: Metro Mix 200 (vendor: Hummert) Cat. #10-0325, Scotts Micro Max Nutrients (vendor: Hummert) Cat. #07-6330, OS 4⅓″×3⅞″ pots (vendor: Hummert) Cat. #16-1415, OS trays (vendor: Hummert) Cat. #16-1515, Hoagland's macronutrients solution, Plastic 5″ stakes (vendor: Hummert) yellow Cat. #49-1569, white Cat. #49-1505, Labels with numbers indicating material contained in pots. Fill 500 pots to rim with Metro Mix 200 to a weight of ˜140 g/pot. Pots are filled uniformly by using a balancer. Add 0.4 g of Micro Max nutrients to each pot. Stir ingredients with spatula to a depth of 3 inches while preventing material loss.

### (2) Planting a NUE Selection in the Greenhouse

[0134] (a) Seed Germination—Each pot is lightly altered twice using reverse osmosis purified water. The first watering is scheduled to occur just before planting; and the second watering, after the seed has been planted in the pot. Ten Seeds of each entry (1 seed per pot) are planted to select eight healthy uniform seedlings. Additional wild type controls are planted for use as border rows. Alternatively, 15 seeds of each entry (1 seed per pot) are planted to select 12 healthy uniform seedlings (this larger number of plantings is used for the second, or confirmation, planting). Place pots on each of the 12 shelves in the Conviron growth chamber for seven days. This is done to allow more uniform germination and early seedling growth. The following growth chamber settings are 25° C./day and 22° C./night, 14 hours light and ten hours dark, humidity ˜80%, and light intensity ˜350 μmol/m²/s (at pot level). Watering is done via capillary matting similar to greenhouse benches with duration of ten minutes three times a day.

[0135] (b) Seedling transfer—After seven days, the best eight or 12 seedlings for the first or confirmation pass runs, respectively, are chosen and transferred to greenhouse benches. The pots are spaced eight inches apart (center to center) and are positioned on the benches using the spacing patterns printed on the capillary matting. The Vattex matting creates a 384-position grid, randomizing all range, row combinations. Additional pots of controls are placed along the outside of the experimental block to reduce border effects.

[0136] Plants are allowed to grow for 28 days under the low N run or for 23 days under the high N run. The macronutrients are dispensed in the form of a macronutrient solution (see composition below) containing precise amounts of N added (2 mM NH₄NO₃ for limiting N selection and 20 mM NH₄NO₃ for high N selection runs). Each pot is manually dispensed 100 ml of nutrient solution three times a week on alternate days starting at eight and ten days after planting for high N and low N runs, respectively. On the day of nutrient application, two 20 min waterings at 05:00 and 13:00 are skipped. The vattex matting should be changed every third run to avoid N accumulation and buildup of root matter. Table 12 shows the amount of nutrients in the nutrient solution for either the low or high nitrogen selection.

TABLE 12

| | 2 mM NH₄NO₃ | 20 mM NH₄NO₃ |
|---|---|---|
| | (Low Nitrogen | (high Nitrogen |
| | Growth Condition) | Growth Condition) |
| Nutrient Stock | mL/L | mL/L |
| 1 M NH₄N0₃ | 2 | 20 |
| 1 M KH₂PO₄ | 0.5 | 0.5 |
| 1 M MgSO₄•7H₂O | 2 | 2 |
| 1 M CaCl₂ | 2.5 | 2.5 |
| 1 M K₂SO₄ | 1 | 1 |

Note:
Adjust pH to 5.6 with HCl or KOH

[0137] (c) Harvest Measurements and Data Collection—After 28 days of plant growth for low N runs and 23 days of plant growth for high N runs, the following measurements are taken (phenocodes in parentheses): total shoot fresh mass (g) (SFM) measured by Sartorius electronic balance, V6 leaf chlorophyll measured by Minolta SPAD meter (relative units) (LC), V6 leaf area (cm²) (LA) measured by a Li-Cor leaf area meter, V6 leaf fresh mass (g) (LFM) measured by Sartorius electronic balance, and V6 leaf dry mass (g) (LDM) measured by Sartorius electronic balance. Raw data were analyzed by SAS software. Results shown are the comparison of transgenic plants relative to the wildtype controls.

[0138] To take a leaf reading, samples were excised from the V6 leaf. Since chlorophyll meter readings of corn leaves are affected by the part of the leaf and the position of the leaf on the plant that is sampled, SPAD meter readings were done on leaf six of the plants. Three measurements per leaf were taken, of which the first reading was taken from a point one-half the distance between the leaf tip and the collar and halfway from the leaf margin to the midrib while two were taken toward the leaf tip. The measurements were restricted in the area from ½ to ¾ of the total length of the leaf (from the base) with approximately equal spacing between them. The average of the three measurements was taken from the SPAD machine.

[0139] Leaf fresh mass is recorded for an excised V6 leaf, the leaf is placed into a paper bag. The paper bags containing the leaves are then placed into a forced air oven at 80° C. for 3 days. After 3 days, the paper bags are removed from the oven and the leaf dry mass measurements are taken.

[0140] From the collected data, two derived measurements are made: (1) Leaf chlorophyll area (LCA), which is a product of V6 relative chlorophyll content and its leaf area (relative units). Leaf chlorophyll area=leaf chlorophyll X leaf area. This parameter gives an indication of the spread of chlorophyll over the entire leaf area; (2) specific leaf area (LSA) is calculated as the ratio of V6 leaf area to its dry mass (cm²/g dry mass), a parameter also recognized as a measure of NUE.

### Nitrogen Use Field Efficacy Assay

[0141] Level I. Transgenic plants provided by the present invention are planted in field without any nitrogen source being applied. Transgenic plants and control plants are grouped by genotype and construct with controls arranged randomly within genotype blocks. Each type of transgenic plants are tested by 3 replications and across 5 locations. Nitrogen levels in the fields are analyzed in early April pre-planting by collecting 30 sample soil cores from 0-24″ and 24 to 48″ soil layer. Soil samples are analyzed for nitrate-nitrogen, phosphorus(P), Potassium(K), organic matter and pH to provide baseline values. P, K and micronutrients are applied based upon soil test recommendations.

Level II. Transgenic plants provided by the present invention are planted in field with three levels of nitrogen (N) fertilizer being applied, i.e. low level (0 N), medium level (801b/ac) and high level (1801b/ac). Liquid 28% or 32% UAN (Urea, Ammonium Nitrogen) are used as the N source and apply by broadcast boom and incorporate with a field cultivator with rear rolling basket in the same direction as intended crop rows. Although there is no N applied to the 0 N treatment the soil should still be disturbed in the same fashion as the treated area. Transgenic plants and control plants are grouped by genotype and construct with controls arranged randomly within genotype blocks. Each type of transgenic plants is tested by 3 replications and across 4 locations. Nitrogen levels in the fields are analyzed in early April pre-planting by collecting 30 sample soil cores from 0-24″ and 24 to 48″ soil layer. Soil samples are analyzed for nitrate-nitrogen, phosphorus(P), Potassium(K), organic matter and pH to provide baseline values. P, K and micronutrients are applied based upon soil test recommendations.

### B. Selection for Increased Yield

[0142] Many transgenic plants of this invention exhibit improved yield as compared to a control plant. Improved yield can result from enhanced seed sink potential, i.e. the number and size of endosperm cells or kernels and/or enhanced sink strength, i.e. the rate of starch biosynthesis. Sink potential can be established very early during kernel development, as endosperm cell number and size are determined within the first few days after pollination.

[0143] Effective yield selection of enhanced yielding transgenic corn events uses hybrid progeny of the transgenic event over multiple locations with plants grown under optimal production management practices, and maximum pest control. A useful target for improved yield is a 5% to 10% increase in yield as compared to yield produced by plants grown from seed for a control plant. Selection methods may be applied in multiple and diverse geographic locations, for example up to 16 or more locations, over one or more plating seasons, for example at least two planting seasons to statistically distinguish yield improvement from natural environmental effects. It is to plant multiple transgenic plants, positive and negative control plants, and pollinator plants in standard plots, for example 2 row plots, 20 feet long by 5 feet wide with 30 inches distance between rows and a 3 foot alley between ranges. Transgenic events can be grouped by recombinant DNA constructs with groups randomly placed in the field. A pollinator plot of a high quality corn line is planted for every two plots to allow open pollination when using male sterile transgenic events. A useful planting density is about 30,000 plants/acre. High planting density is greater than 30,000 plants/acre, preferably about 40,000 plants/acre, more preferably about 42,000 plants/acre, most preferably about 45,000 plants/acre. Surrogate indicators for yield improvement include source capacity (biomass), source output (sucrose and photosynthesis), sink components (kernel size, ear size, starch in the seed), development (light response, height, density tolerance), maturity, early flowering trait and physiological responses to high density planting, for example at 45,000 plants per acre, for example as illustrated in Table 13 and 14.

TABLE 13

| Timing | Evaluation | Description | comments |
|---|---|---|---|
| V2-3 | Early stand | Can be taken any time after | |
| | | germination and prior to | |
| | | removal of any plants. | |
| Pollen shed | GDU to 50% shed | GDU to 50% plants shedding | |
| | | 50% tassel. | |
| Silking | GDU to 50% silk | GDU to 50% plants showing | |
| | | silks. | |
| Maturity | Plant height | Height from soil surface to | 10 plants per plot - Yield |
| | | flag leaf attachment (inches). | team assistance |
| Maturity | Ear height | Height from soil surface to | 10 plants per plot - Yield |
| | | primary ear attachment node. | team assistance |
| Maturity | Leaves above ear | visual scores: erect, size, | |
| | | rolling | |
| Maturity | Tassel size | Visual scores +/− vs. WT | |
| Pre-Harvest | Final Stand | Final stand count prior to | |
| | | harvest, exclude tillers | |
| Pre-Harvest | Stalk lodging | No. of stalks broken below | |
| | | the primary ear attachment. | |
| | | Exclude leaning tillers | |
| Pre-Harvest | Root lodging | No. of stalks leaning >45° | |
| | | angle from perpendicular. | |
| Pre-Harvest | Stay green | After physiological maturity | |
| | | and when differences among | |
| | | genotypes are evident: Scale | |
| | | 1 (90-100% tissue green)-9 | |
| | | (0-19% tissue green). | |
| Harvest | Grain Yield | Grain yield/plot (Shell | |
| | | weight) | |

TABLE 14

| Timing | Evaluation | Description |
|---|---|---|
| V8-V12 | Chlorophyll | |
| V12-VT | Ear leaf area | |
| V15-15DAP | Chl fluorescence | |
| V15-15DAP | CER | |
| 15-25 DAP | Carbohydrates | sucrose, starch |
| Pre-Harvest | 1st internode diameter | |
| Pre-Harvest | Base 3 internode diameter | |
| Pre-Harvest | Ear internode diameter | |
| Maturity | Ear traits | diameter, length, kernel |
| | | number, kernel weight |

[0144] Electron transport rates (ETR) and CO2 exchange rates (CER): ETR and CER are measured with Li640LCF (Licor, Lincoln, Nebr.) around V9-R1 stages. Leaf chlorophyll fluorescence is a quick way to monitor the source activity and is reported to be highly correlated with CO₂ assimilation under varies conditions (Photosyn Research, 37: 89-102). The youngest fully expanded leaf or 2 leaves above the ear leaf is measured with actinic light 1500 (with 10% blue light) micromol m⁻² s⁻¹, 28° C., CO2 levels 450 ppm. Ten plants are measured in each event. There are 2 readings for each plant.

[0145] A hand-held chlorophyll meter SPAD-502 (Minolta-Japan) is used to measure the total chlorophyll level on live transgenic plants and the wild type counterparts a. Three trifoliates from each plant are analyzed, and each trifoliate were analyzed three times. Then 9 data points are averaged to obtain the chlorophyll level. The number of analyzed plants of each genotype ranges from 5 to 8.

[0146] When selecting for yield improvement a useful statistical measurement approach comprises three components, i.e. modeling spatial autocorrelation of the test field separately for each location, adjusting traits of recombinant DNA events for spatial dependence for each location, and conducting an across location analysis. The first step in modeling spatial autocorrelation is estimating the covariance parameters of the semivariogram. A spherical covariance model is assumed to model the spatial autocorrelation. Because of the size and nature of the trial, it is likely that the spatial autocorrelation may change. Therefore, anisotropy is also assumed along with spherical covariance structure. The following set of equations describes the statistical form of the anisotropic spherical covariance model.

$$C ( h ; θ ) = vI ( h = 0 ) + {σ}^{2} ( 1 - \frac{3}{2} h + \frac{1}{2} {h}^{3} ) I ( h < 1 ) ,$$

where I(•) is the indicator function, h=\sqrt{\dot{x}²+\dot{y}²}, and

\dot{x}=[cos(ρπ/180)(x₁−x₂)−sin(ρπ/180)(y₁−y₂)]/ωₓ

\dot{y}=[sin(ρπ/180)(x₁−x₂)+cos(ρπ/180)(y₁−y₂)]/ω_{y}

where s₁=(x₁, y₁) are the spatial coordinates of one location and s₂=(x₂, y₂) are the spatial coordinates of the second location. There are 5 covariance parameters, θ=(v, σ², ρ, ωₙ, ωⱼ), where v is the nugget effect, σ² is the partial sill, ρ is a rotation in degrees clockwise from north, ωₙ is a scaling parameter for the minor axis and ωⱼ is a scaling parameter for the major axis of an anisotropical ellipse of equal covariance. The five covariance parameters that defines the spatial trend will then be estimated by using data from heavily replicated pollinator plots via restricted maximum likelihood approach. In a multi-location field trial, spatial trend are modeled separately for each location.

[0147] After obtaining the variance parameters of the model, a variance-covariance structure is generated for the data set to be analyzed. This variance-covariance structure contains spatial information required to adjust yield data for spatial dependence. In this case, a nested model that best represents the treatment and experimental design of the study is used along with the variance-covariance structure to adjust the yield data. During this process the nursery or the seed batch effects can also be modeled and estimated to adjust the yields for any yield parity caused by seed batch differences. After spatially adjusted data from different locations are generated, all adjusted data is combined and analyzed assuming locations as replications. In this analysis, intra and inter-location variances are combined to estimate the standard error of yield from transgenic plants and control plants. Relative mean comparisons are used to indicate statistically significant yield improvements.

### C. Selection for Enhanced Water Use Efficiency (WUE)

[0148] Described in this example is a high-throughput method for greenhouse selection of transgenic corn plants to wild type corn plants (tested as inbreds or hybrids) for water use efficiency and method for selection transgenic cotton plants for water use efficiency. This selection process imposes 3 drought/re-water cycles on plants over a total period of 15 days after an initial stress free growth period of 11 days. Each cycle consists of 5 days, with no water being applied for the first four days and a water quenching on the 5th day of the cycle. The primary phenotypes analyzed by the selection method are the changes in plant growth rate as determined by height and biomass during a vegetative drought treatment. The hydration status of the shoot tissues following the drought is also measured. The plant height is measured at three time points. The first is taken just prior to the onset drought when the plant is 11 days old, which is the shoot initial height (SIH). The plant height is also measured halfway throughout the drought/re-water regimen, on day 18 after planting, to give rise to the shoot mid-drought height (SMH). Upon the completion of the final drought cycle on day 26 after planting, the shoot portion of the plant is harvested and measured for a final height, which is the shoot wilt height (SWH) and also measured for shoot wilted biomass (SWM). The shoot is placed in water at 40 degree Celsius in the dark. Three days later, the shoot is weighted to give rise to the shoot turgid weight (STM). After drying in an oven for four days, the shoots are weighted for shoot dry biomass (SDM). The shoot average height (SAH) is the mean plant height across the 3 height measurements. The procedure described above may be adjusted for +/−˜one day for each step given the situation.

[0149] To correct for slight differences between plants, a size corrected growth value is derived from SIH and SWH. This is the Relative Growth Rate (RGR). Relative Growth Rate (RGR) is calculated for each shoot using the formula [RGR %=(SWH−SIH)/((SWH+SIH)/2)*100]. Relative water content (RWC) is a measurement of how much (%) of the plant was water at harvest. Water Content (RWC) is calculated for each shoot using the formula [RWC %=(SWM−SDM)/(STM−SDM)*100]. Fully watered corn plants of this age run around 98% RWC.

[0150] Progeny transgenic plants are selected from a population of transgenic cotton events under specified growing conditions and are compared with control cotton plants. Control cotton plants are substantially the same cotton genotype but without the recombinant DNA, for example, either a parental cotton plant of the same genotype that was not transformed with the identical recombinant DNA or a negative isoline of the transformed plant. Additionally, a commercial cotton cultivar adapted to the geographical region and cultivation conditions, i.e. cotton variety ST474, cotton variety FM 958, and cotton variety Siokra L-23, are used to compare the relative performance of the transgenic cotton plants containing the recombinant DNA. The specified culture conditions are growing a first set of transgenic and control plants under “wet” conditions, i.e. irrigated in the range of 85 to 100 percent of evapotranspiration to provide leaf water potential of −14 to −18 bars, and growing a second set of transgenic and control plants under “dry” conditions, i.e. irrigated in the range of 40 to 60 percent of evapotranspiration to provide a leaf water potential of −21 to −25 bars. Pest control, such as weed and insect control is applied equally to both wet and dry treatments as needed. Data gathered during the trial includes weather records throughout the growing season including detailed records of rainfall; soil characterization information; any herbicide or insecticide applications; any gross agronomic differences observed such as leaf morphology, branching habit, leaf color, time to flowering, and fruiting pattern; plant height at various points during the trial; stand density; node and fruit number including node above white flower and node above crack boll measurements; and visual wilt scoring. Cotton boll samples are taken and analyzed for lint fraction and fiber quality. The cotton is harvested at the normal harvest timeframe for the trial area. Enhanced water use efficiency is indicated by increased yield, improved relative water content, enhanced leaf water potential, increased biomass, enhanced leaf extension rates, and improved fiber parameters.

### D. Selection for Growth Under Cold Stress

[0151] (1) Cold germination assay—Three sets of seeds are used for the assay. The first set consists of positive transgenic events (F1 hybrid) where the genes of the present invention are expressed in the seed. The second seed set is nontransgenic, wild-type negative control made from the same genotype as the transgenic events. The third set consisted of two cold tolerant and one cold sensitive commercial check lines of corn. All seeds are treated with a fungicide “Captan” (MAESTRO® 80DF Fungicide, Arvesta Corporation, San Francisco, Calif., USA). 0.43 mL Captan is applied per 45 g of corn seeds by mixing it well and drying the fungicide prior to the experiment.

[0152] Corn kernels are placed embryo side down on blotter paper within an individual cell (8.9×8.9 cm) of a germination tray (54×36 cm). Ten seeds from an event are placed into one cell of the germination tray. Each tray can hold 21 transgenic events and 3 replicates of wildtype (LH244SDms+LH59), which is randomized in a complete block design. For every event there are five replications (five trays). The trays are placed at 9.7 C for 24 days (no light) in a Convrion growth chamber (Conviron Model PGV36, Controlled Environments, Winnipeg, Canada). Two hundred and fifty milliliters of deionized water are added to each germination tray. Germination counts are taken 10th, 11th, 12th, 13th, 14th, 17th, 19th, 21st, and 24th day after start date of the experiment. Seeds are considered germinated if the emerged radicle size is 1 cm. From the germination counts germination index is calculated.

[0153] The germination index is calculated as per.

Germination index=(Σ([T+l−nᵢ]*[Pᵢ−Pᵢ₋₁]))/T

[0154] Where T is the total number of days for which the germination assay is performed. The number of days after planting is defined by n. “i” indicated the number of times the germination had been counted, including the current day. P is the percentage of seeds germinated during any given rating. Statistical differences are calculated between transgenic events and wild type control. After statistical analysis, the events that show a statistical significance at the p level of less than 0.1 relative to wild-type controls will advance to a secondary cold selection. The secondary cold screen is conducted in the same manner of the primary selection only increasing the number of repetitions to ten. Statistical analysis of the data from the secondary selection is conducted to identify the events that show a statistical significance at the p level of less than 0.05 relative to wild-type controls.

TABLE 15

| | | | Germination Index | | | |
|---|---|---|---|---|---|---|
| | | | 1st Run | | 2nd Run | |
| PEP SEQ | | | % | P | % | P |
| ID | CONSTRUCT | Event | Change | value | Change | value |
| 266 | PMON92840 | MON810, ZM_M106115 | 28 | 0.079 | 15 | 0.233 |
| | PMON92840 | MON810, ZM_M107208 | 58 | 0.000 | 24 | 0.049 |
| | PMON92840 | MON810, ZM_M107212 | 36 | 0.026 | 34 | 0.006 |
| | PMON92840 | MON810, ZM_M107214 | 53 | 0.001 | 26 | 0.035 |
| | PMON92840 | MON810, ZM_M107221 | 29 | 0.072 | −5 | 0.663 |
| | PMON92840 | MON810, ZM_M107224 | 60 | 0.000 | 35 | 0.004 |
| | PMON92840 | MON810, ZM_M107228 | 39 | 0.017 | 30 | 0.016 |
| 284 | PMON92854 | MON810, ZM_M103991 | 28 | 0.070 | 9 | 0.364 |
| | PMON92854 | MON810, ZM_M104002 | 35 | 0.025 | 8 | 0.412 |
| | PMON92854 | MON810, ZM_M105195 | 27 | 0.082 | 10 | 0.321 |
| | PMON92854 | MON810, ZM_M105213 | 30 | 0.060 | 21 | 0.033 |
| | PMON92854 | MON810, ZM_M105218 | 74 | 0.000 | 49 | 0.000 |
| | PMON92854 | MON810, ZM_M105267 | 43 | 0.006 | 28 | 0.004 |
| | PMON92854 | MON810, ZM_M106123 | −1 | 0.965 | 30 | 0.002 |

[0155] (2) Cold Shock assay—The experimental set-up for the cold shock assay is the same as described in the above cold germination assay except seeds were grown in potted media for the cold shock assay.

[0156] The desired numbers of 2.5″ square plastic pots are placed on flats (n=32, 4×8). Pots were filled with Metro Mix 200 soil-less media containing 19:6:12 fertilizer (6 lbs/cubic yard) (Metro Mix, Pots and Flat are obtained from Hummert International, Earth City, Mo.). After planting seeds, pots are placed in a growth chamber set at 23° C., relative humidity of 65% with 12 hour day and night photoperiod (300 uE/m2-min). Planted seeds are watered for 20 minute every other day by sub-irrigation and flats were rotated every third day in a growth chamber for growing corn seedlings.

[0157] On the 10^{th} day after planting the transgenic positive and wild-type negative (WT) plants are positioned in flats in an alternating pattern. Chlorophyll fluorescence of plants is measured on the 10^{th} day during the dark period of growth by using a PAM-2000 portable fluorometer as per the manufacturer's instructions (Walz, Germany). After chlorophyll measurements, leaf samples from each event are collected for confirming the expression of genes of the present invention. For expression analysis six V1 leaf tips from each selection are randomly harvested. The flats are moved to a growth chamber set at 5° C. All other conditions such as humidity, day/night cycle and light intensity are held constant in the growth chamber. The flats are sub-irrigated every day after transfer to the cold temperature. On the 4^{th} day chlorophyll fluorescence is measured. Plants are transferred to normal growth conditions after six days of cold shock treatment and allowed to recover for the next three days. During this recovery period the length of the V3 leaf is measured on the 1^{st} and 3^{rd} days. After two days of recovery V2 leaf damage is determined visually by estimating percent of green V2 leaf.

[0158] Statistical differences in V3 leaf growth, V2 leaf necrosis and fluorescence during pre-shock and cold shock can be used for estimation of cold shock damage on corn plants.

[0159] (3) Early seedling growth assay—Three sets of seeds are used for the experiment. The first set consists of positive transgenic events (F1 hybrid) where the genes of the present invention are expressed in the seed. The second seed set is nontransgenic, wild-type negative control made from the same genotype as the transgenic events. The third seed set consists of two cold tolerant and two cold sensitive commercial check lines of corn. All seeds are treated with a fungicide “Captan”, (3a,4,7,a-tetrahydro-2-[(trichloromethly)thio]-1H-isoindole-1,3(2H)-dione, Drex Chemical Co. Memphis, Tenn.). Captan (0.43 mL) was applied per 45 g of corn seeds by mixing it well and drying the fungicide prior to the experiment.

[0160] Seeds are grown in germination paper for the early seedling growth assay. Three 12″×18″ pieces of germination paper (Anchor Paper #SD7606) are used for each entry in the test (three repetitions per transgenic event). The papers are wetted in a solution of 0.5% KNO₃ and 0.1% Thyram.

[0161] For each paper fifteen seeds are placed on the line evenly spaced down the length of the paper. The fifteen seeds are positioned on the paper such that the radical would grow downward, for example longer distance to the paper's edge. The wet paper is rolled up starting from one of the short ends. The paper is rolled evenly and tight enough to hold the seeds in place. The roll is secured into place with two large paper clips, one at the top and one at the bottom. The rolls are incubated in a growth chamber at 23° C. for three days in a randomized complete block design within an appropriate container. The chamber is set for 65% humidity with no light cycle. For the cold stress treatment the rolls are then incubated in a growth chamber at 12° C. for twelve days. The chamber is set for 65% humidity with no light cycle.

[0162] After the cold treatment the germination papers are unrolled and the seeds that did not germinate are discarded. The lengths of the radicle and coleoptile for each seed are measured through an automated imaging program that automatically collects and processes the images. The imaging program automatically measures the shoot length, root length, and whole seedling length of every individual seedling and then calculates the average of each roll.

[0163] After statistical analysis, the events that show a statistical significance at the p level of less than 0.1 relative to wild-type controls will advance to a secondary cold selection. The secondary cold selection is conducted in the same manner of the primary selection only increasing the number of repetitions to five. Statistical analysis of the data from the secondary selection is conducted to identify the events that show a statistical significance at the p level of less than 0.05 relative to wild-type controls.

### (4). Cold Field Efficacy Trial

[0164] This example sets forth a cold field efficacy trial to identify gene constructs that confer enhanced cold vigor at germination and early seedling growth under early spring planting field conditions in conventional-till and simulated no-till environments. Seeds are planted into the ground around two weeks before local farmers are beginning to plant corn so that a significant cold stress is exerted onto the crop, named as cold treatment. Seeds also are planted under local optimal planting conditions such that the crop has little or no exposure to cold condition, named as normal treatment. The cold field efficacy trials are carried out in five locations, including Glyndon Minn., Mason Mich., Monmouth Ill., Dayton Iowa, Mystic Conn. At each location, seeds are planted under both cold and normal conditions with 3 repetitions per treatment, 20 kernels per row and single row per plot. Seeds are planted 1.5 to 2 inch deep into soil to avoid muddy conditions. Two temperature monitors are set up at each location to monitor both air and soil temperature daily.

[0165] Seed emergence is defined as the point when the growing shoot breaks the soil surface. The number of emerged seedling in each plot is counted everyday from the day the earliest plot begins to emerge until no significant changes in emergence occur. In addition, for each planting date, the latest date when emergence is 0 in all plots is also recorded. Seedling vigor is also rated at V3-V4 stage before the average of corn plant height reaches 10 inches, with 1=excellent early growth, 5=Average growth and 9=poor growth. Days to 50% emergence, maximum percent emergence and seedling vigor are calculated using SAS software for the data within each location or across all locations.

E. Screens for Transgenic Plant Seeds with Increased Protein and/or Oil Levels

[0166] This example sets forth a high-throughput selection for identifying plant seeds with improvement in seed composition using the Infratec 1200 series Grain Analyzer, which is a near-infrared transmittance spectrometer used to determine the composition of a bulk seed sample. Near infrared analysis is a non-destructive, high-throughput method that can analyze multiple traits in a single sample scan. An NIR calibration for the analytes of interest is used to predict the values of an unknown sample. The NIR spectrum is obtained for the sample and compared to the calibration using a complex chemometric software package that provides a predicted values as well as information on how well the sample fits in the calibration.

[0167] Infratec Model 1221, 1225, or 1227 with transport module by Foss North America is used with cuvette, item #1000-4033, Foss North America or for small samples with small cell cuvette, Foss standard cuvette modified by Leon Girard Co. Corn and soy check samples of varying composition maintained in check cell cuvettes are supplied by Leon Girard Co. NIT collection software is provided by Maximum Consulting Inc. Software. Calculations are performed automatically by the software. Seed samples are received in packets or containers with barcode labels from the customer. The seed is poured into the cuvettes and analyzed as received.

TABLE 16

| | |
|---|---|
| Typical sample(s): | Whole grain corn and soybean seeds |
| Analytical time to run method: | Less than 0.75 min per sample |
| Total elapsed time per run: | 1.5 minute per sample |
| Typical and minimum | Corn typical: 50 cc; minimum 30 cc |
| sample size: | Soybean typical: 50 cc; minimum 5 cc |
| Typical analytical range: | Determined in part by the specific |
| | calibration. |
| | Corn - moisture 5-15%, oil 5-20%, |
| | protein 5-30%, starch 50-75%, and |
| | density 1.0-1.3%. |
| | Soybean - moisture 5-15%, oil |
| | 15-25%, and protein 35-50%. |

TABLE 17
Transgenic corn plants have an increased oil level in seeds

| | | | 2004 Data | | 2005 Data | |
|---|---|---|---|---|---|---|
| PEP SEQ | | | Oil | | Oil | |
| ID NO | Event | Construct | Delta | P value | delta | P value |
| 231 | ZM_S90572 | PMON17730 | 0.18 | 0.22 | 0.25 | 0.04 |
| | ZM_S90588 | PMON17730 | N/A | N/A | 0.10 | 0.33 |
| | ZM_S90610 | PMON17730 | N/A | N/A | −0.03 | 0.78 |
| | ZM_S90614 | PMON17730 | 0.26 | 0.08 | 0.47 | 0.00 |
| | ZM_S90622 | PMON17730 | −0.03 | 0.82 | 0.31 | 0.00 |

TABLE 18
Transgenic corn plants have an increased protein level in seeds

| | | | 1st Inbred protein trial | | | | 2nd Inbred protein trial | | | |
|---|---|---|---|---|---|---|---|---|---|---|
| PEP SEQ | | | Mean | Mean | | | Mean | Mean | | |
| ID NO | Construct | Event | transgenic | control | Delta | P value | transgenic | control | Delta | P value |
| 208 | PMON92607 | ZM_M106133 | 14.06 | 10.39 | 3.67 | 0 | 11.91 | 10.06 | 1.84 | 0.0023 |
| | | ZM_M106129 | 16.46 | 10.39 | 6.07 | 0 | 16.00 | 10.06 | 5.94 | 0 |
| | | ZM_M105269 | 15.80 | 10.39 | 5.41 | 0 | 14.89 | 10.06 | 4.83 | 0 |
| | | ZM_M105268 | 14.07 | 10.39 | 3.67 | 0 | 12.81 | 10.06 | 2.74 | 0 |
| | | ZM_M104742 | 12.57 | 10.39 | 2.18 | 0.0064 | 12.52 | 10.06 | 2.46 | 0 |
| | | ZM_M104740 | 14.45 | 10.39 | 4.06 | 0 | 12.93 | 10.06 | 2.86 | 0 |
| | | ZM_M104403 | 12.90 | 10.39 | 2.51 | 0.0017 | 12.60 | 10.06 | 2.53 | 0 |
| | | ZM_M104399 | 13.21 | 10.39 | 2.82 | 0.0004 | 14.04 | 10.06 | 3.98 | 0 |
| | | ZM_M104398 | 14.91 | 10.39 | 4.51 | 0 | 12.79 | 10.06 | 2.73 | 0 |
| | | ZM_M104396 | 12.13 | 10.39 | 1.74 | 0.0289 | 12.90 | 10.06 | 2.83 | 0 |
| | | ZM_M104385 | 13.12 | 10.39 | 2.72 | 0.0007 | 12.89 | 10.06 | 2.82 | 0 |
| | | ZM_M104371 | 12.23 | 10.39 | 1.83 | 0.0213 | 12.18 | 10.06 | 2.12 | 0.0004 |
| | | ZM_M104369 | 13.41 | 10.39 | 3.01 | 0.0002 | 11.35 | 10.06 | 1.29 | 0.0309 |
| | | ZM_M103621 | 12.26 | 10.39 | 1.86 | 0.0191 | 10.76 | 10.06 | 0.69 | 0.2425 |
| | | ZM_M106138 | 13.74 | 10.39 | 3.35 | 0 | 13.34 | 10.06 | 3.28 | 0 |

TABLE 19
Transgenic soybean plants have an increased seed oil level

| | | | | seed oil content | | | seed | protein content | |
|---|---|---|---|---|---|---|---|---|---|
| PEP SEQ | | | | control | transgenic | | control | transgenic | |
| ID NO | construct | event | run | mean | mean | delta | mean | mean | delta |
| 231 | PMON94697 | construct | 1 | 20.0 | 19.7 | −0.3 | 42.0 | 42.9 | 0.9 |
| | | analysis | 2 | 19.6 | 20.2 | 0.6 * | 43.3 | 43.6 | 0.3 |
| | | | 3 | 19.9 | 20.6 | 0.7 * | 42.5 | 43.1 | 0.6 |
| | | GM_A79833 | 1 | 20.2 | 19.7 | −0.3 | 42.0 | 42.9 | 0.9 |
| | | | 2 | 19.6 | 19.9 | 0.3 | 43.3 | 43.5 | 0.2 |
| | | GM_A79838 | 2 | 19.6 | 19.8 | 0.2 | 43.3 | 45.2 | 1.9 * |
| | | GM_A79839 | 2 | 19.6 | 20.4 | 0.8 * | 43.3 | 43.7 | 0.4 |
| | | GM_A79857 | 2 | 19.6 | 19.9 | 0.3 | 43.3 | 43.7 | 0.4 |
| | | GM_A79859 | 2 | 19.6 | 20.6 | 1.0 * | 43.3 | 43.7 | −0.6 |
| | | GM_A79894 | 2 | 19.6 | 20.4 | 0.8 * | 43.3 | 43.1 | −0.2 |
| | | GM_A79896 | 2 | 19.6 | 19.8 | 0.2 | 43.3 | 44.4 | 1.1 * |
| | | GM_A79914 | 2 | 19.6 | 20.9 | 1.3 * | 43.3 | 42.7 | −0.6 |
| | | | 3 | 19.9 | 20.6 | 0.7 | 42.5 | 43.4 | 0.9 |
| | | GM_A79934 | 3 | 19.9 | 20.3 | 0.4 * | 42.5 | 43.3 | 0.8 * |
| | | GM_A79936 | 3 | 19.9 | 21.0 | 1.1 * | 42.5 | 42.5 | 0.0 |

Data point with “*” indicate a statistically significant delta (the difference between transgenic and control plants).

Seed protein or oil is measured as a percentage of total seed composition.

The application's sequence listing, which the Patent Office published only in electronic form, follows.

SEQUENCE LISTING (12608 sequences)

SEQ ID NO: 1 - DNA, 2908 bp, Artificial Sequence
  Chimeric DNA of Arabidopsis thaliana and Zea mays
atgatcgtgcaacccatcgagctacgcgcgtggactgccttccctgggtcggcgcaggaggggatcggaaggatggcggcgtcggtttccagggccatctgcgttcagaagccgggctcaaaatgcaccagggacagggaagcgacctccttcgcccgccgatcggtcgcagcgccgaggcccccgcacgccaaagccgccggcgtcatccgctccgactccggcgcgggacggggccagcattgctcgccgctgagggccgtcgttgacgccgcgccgatacagacgaccaaaaagagggtgttccacttcggcaagggcaagagcgagggcaacaagaccatgaaggaactgctgggcggcaagggcgcgaacctggcggagatggcgagcatcgggctgtcggtgccgccggggttcacggtgtcgacggaggcgtgccagcagtaccaggacgccgggtgcgccctccccgcggggctctgggccgagatcgtcgacggcctgcagtgggtggaggagtacatgggcgccaccctgggcgatccgcagcgcccgctcctgctctccgtccgctccggcgccgccgtgtccatgcccggcatgatggacacggtgctcaacctggggctcaacgacgaagtggccgccgggctggcggccaagagcggggagcgcttcgcctacgactccttccgccgcttcctcgacatgttcggcaacgtcgtcatggacatcccccgctcactgttcgaagagaagcttgagcacatgaaggaatccaaggggctgaagaacgacaccgacctcacggcctctgacctcaaagagctcgtgggtcagtacaaggaggtctacctctcagccaagggagagccattcccctcagaccccaagaagcagctggagctagcagtgctggctgtgttcaactcgtgggagagccccagggccaagaagtacaggagcatcaaccagatcactggcctcaggggcaccgccgtgaacgtgcagtgcatggtgttcggcaacatggggaacacttctggcaccggcgtgctcttcactaggaaccccaacaccggagagaagaagctgtatggcgagttcctggtgaacgctcagggtgaggatgtggttgccggaataagaaccccagaggaccttgacgccatgaagaacctcatgccacaggcctacgacgagcttgttgagaactgcaacatcctggagagccactataaggaaatgcaggatatcgagttcactgtccaggaaaacaggctgtggatgttgcagtgcaggacagggaaacgtacgggcaaaagtgccgtgaagatcgccgtggacatggttaacgagggccttgttgagccccgctcagcgatcaagatggtagagccaggccacctggaccagcttctccatcctcagtttgagaacccgtcggcgtacaaggatcaagtcattgccactggtctgccagcctcacctggggctgctgtgggccaggttgtgttcactgctgaggatgctgaagcatggcattcccaagggaaagctgctattctggtaagggcggagaccagccctgaggacgttggtggcatgcacgctgctgtggggattcttacagagaggggtggcatgacttcccacgctgctgtggtcgcacgtgggtgggggaaatgctgcgtctcgggatgctcaggcattcgcgtaaacgatgcggagaagctcgtgacgatcggaggccatgtgctgcgcgaaggtgagtggctgtcgctgaatgggtcgactggtgaggtgatccttggaaagcagccgctttccccaccagcccttagtggcgatctgggaactttcatggcctgggtggatgatgttagaaagctcaaggtcctggctaacgccgatacccctgatgatgcattgactgcgcgaaacaatggggcacaaggaattggattatgccggacagagcacatgttctttgcttcagacgagaggattaaggctgtcaggcagatgattatggctcccacgcttgagctgaggcagcaggcgctcgaccgtctcttgccgtatcagaggtctgacttcgaaggcattttccgtgctatggatggactcccggtgaccatccgactcctggaccctcccctccacgagttccttccagaagggaacatcgaggacattgtaagtgaattatgtgctgagacgggagccaaccaggaggatgccctcgcgcgaattgaaaagctttcagaagtaaacccgatgcttggcttccgtgggtgcaggcttggtatatcgtaccctgaattgacagagatgcaagcccgggccatttttgaagctgctatagcaatgaccaaccagggtgttcaagtgttcccagagataatggttcctcttgttggaacaccacaggaactggggcatcaagtgactcttatccgccaagttgctgagaaagtgttcgccaatgtgggcaagactatcgggtacaaagttggaacaatgattgagatccccagggccgcgctcattgcagatgagattgcgaaagaggcggagtttttctcgttcgggacaaacgacttgacgcagatgacgtttggatacagtagagacgatgtcggcaagtttctaccgatttacctcgccaaaggaatcttacagcacgacccttttgaggttcttgatcagcaaggtgtagggcaattgatcaagatggcgacagaaaaaggacgagcagctaggcctagcctcaaggttgggatatgtggagaacatggaggagatccatcttctgtgggattctttgctgaagcaggacttgactatgtctcttgttctcctttcagggttccaattgcaaggcttgcagctgctcaagtag

SEQ ID NO: 2 - DNA, 2908 bp, Artificial Sequence; identical to SEQ ID NO: 1
  Chimeric DNA of Arabidopsis thaliana and Zea mays

SEQ ID NO: 3 - DNA, 777 bp, Zea mays
tacgtcctggacagggagctcggccgcggggagttcggggtcacgtacctgtgtatggatcgggacaccaaggagctgctcgcctgcaagtccatctccaagcgcaagctgcggacggccgtcgacgtggaggacgtgcgccgggaggtggccatcatgcgccacctgcccaagagccccagcgtcgtgtccctgcgggaggcgtgcgaggacgacggcgccgtccacctcgtcatggagctctgcgagggcggcgagctcttcgaccgcatcgtcgcgcggggccactacaccgagcgcgccgccgccagtgtcacccgcaccatcctcgaggtcgtccagctctgccaccgccacggcgtcatccaccgcgacctcaagccggagaacttcctcttcgccaataagaaggagaactcgccgctcaaggccatcgacttcggtctctccatcttcttcaagcctggtgaaaagttttcagaaattgtgggaagcccctattacatggctcctgaagtattgaagagaaactatgggccagaaatagacatatggagtgcgggagttatcctgtatattttattatgtggagtccctccattttgggctgagactgaacaaggggtggcgcaggctattcttcgtggaaatatcgattttaagcgggaaccctggcctaatgtttcggaaaatgcaaaagatttagttcgacacatgttggagcctgatccaaagctcaggctaactgcaaagcaggttcttgaacatcattggctt

SEQ ID NO: 4 - DNA, 777 bp, Zea mays
tacgagctgggcggcgagctgggccgcggcgagttcggcgtcacgtacctgtgcacggagtccgccacgggggcgcgctacgcgtgcaagtccatctccaagcgcaagctgcgcacgcccgtggacgtggaggacgtgcgccgggaggtggacatcatgcgccacatgccgccgcaccccaacatcgtcagcctccgcgccgcctacgaggacgaggacgccgtgcacctcgtcatggagctctgcgagggaggcgagctcttcgacaggatcgtcgcccggggccactacaccgagcgcgccgccgccgccgtcacgcgcaccatcgtcgaggtcgtccagatgtgccacaggcatggcgtcatgcaccgggatcttaaaccagagaactttttatatgcaaacaagaaggagagttcccctctgaaagcaatcgattttgggctgtcagtgttcttcaggcctggtgagcgatttactgaaatcgtaggcagtccatactacatggctccagaggttctaaagcgaaactatggccctgaagttgatgtttggagtgctggagtgatactttacatacttctctgtggtgtaccaccattttgggcagaaactgaacagggagtagcacaggcaattatacgatctgtggtagatttcaaaagagaaccatggcccagagtatctgagcctgctaaagatcttgtcaggcggatgctggacccaaatccattgacacggtttactgcagcacaagtacttgagcatccatggtta

SEQ ID NO: 5 - DNA, 777 bp, Glycine max
tatacaataggtaaagagctagggagaggccaatttggtgtcacacatttgtgcacaaacaaagccacggggcaacaatttgcatgcaaaacaattgcaaagaggaagcttgtgaacaaggaggacatagaggacgtgagaagagaggttcaaatcatgcaccatctctcgggtcaacctaacattgtggaacttaagggtgcatatgaggacaaacaatcggtgcatttggtcatggaactttgtgcgggtggtgagctttttgatcgtataattgctaagggacattacactgaacgtgccgcggcttcgttgttaagaaccataatgcaaattattcacactttccactccatgggtgtcattcatagagatcttaagcccgaaaatttcctcatgttgaataaggatgaaaattcacccgtcaaggctacggattttggtctatcagtttttttcaaagaaggagagacgttcaaagacattgttggaagtgcatattacattgctcctgaagtcttgaagaggaaatatgggccagaagttgacatatggagtgttggtgtcatgctatacattcttctaagtggtgtccctccgttttgggcagaatccgaacatggtatattcaatgccatcctaagaggccacgttgattttacaagcgatccatggccttcattgtccagtgcagcaaaggatcttgtaaggaaaatgttgaccacagaccccaaacaaagactgacagcacaagaagttttaaatcatccttggatc

SEQ ID NO: 6 - DNA, 778 bp, Glycine max
ttcactcttgggagaaaacttggacagggtcagttcgggacaacgttcttgtgcgtggaaaaggcaacagggctggagtgcgcctgcaaatctattgcaaagaggaagctcgtcaccgatgatgatgtcgaggatgtgagaagagaaattcagataatgcaccacttggccgggcatcctaatgttatatccatcaaaggtgcatatgaggatgccgtggctgttcatgttgtgatggaattatgtgcaggtggagagcttttcgataggattattcagcgtggccattataccgagagacaggcagccaagcttactaagactatagttggcgttgtggaagcttgccattctcttggtgtgatgcacagagaccttaaacctgagaattttctctttgtcaatcagcacgaggattcccttctcaaaaccattgactttggattatctgtcttctttaagccaggtgatatatttaatgatgtggtgggcagcccatactatgttgccccggatgttttgcgaaagcgttatggtcctgaggcagatgtttggagtgctggtgttatcctttacattcttttgagtggagtacctccattttgggctgaaaacgaacaaggaatatttgaacaagttctgcgtggtgatcttgacttttcttctgatccctggccttcaatttctgaaagtgcaaaagatttagtaagaaaaatgcttgttcgcgaccctagaaggcggttgactgcacatcaagtattatgtcatccttggattc

SEQ ID NO: 7 - DNA, 1383 bp, Oryza sativa
atggagaagaaggcgtccatcctcatgaaccggtatgagctcggccgcatgctcgggcaaggcaccttcgccaaggtgtaccatgcacggaaccttgcatccaaccagagcgtcgccatcaaggtcattgacaaggaaaaggtattgcgtgtcggcatgattgaccagatcaagcgagagatctccatcatgcgcctcgttcgccaccccaacatcgtccagctgcacgaggtcatggccagcaagagcaagatatactttgcaatggagtatgtccggggtggtgagctcttcagcagggtagccagggggcgactcaaggaggatgctgcgaggaagtacttccagcagttgataggggctgtggacttctgtcacagccgcggtgtctaccaccgagacctcaagccagagaacctcctcgtcgacgagaatggcaacctcaaagtgtcggactttgggctgagcgccttcaaggagtgtcagaagcaggacgggctgctccacacgacgtgtggcacacctgcatatgttgcaccagagataatcaataagaggggctatgatggagcaaaagcagacatatggtcttgcggtgtcatactctttgttctgcttgctggctacctcccattccatgactcaaatctaatggagatgtaccggaagataagcaaaggtgatgtcaagttcccacagtggttcactactgatgtccgaaggcttctgtccaggctgcttgatccaaatccaaacattaggatcaccgttgagaagctagttgagcatccatggttcaagaaggggtacaaaccagcagtgatgctatcacagccaaatgaatcaaacaacctcaaggatgtccatactgctttcagtgctgatcacaaggacaatgaaggcaaggcaaaagaaccagcaagctctttgaagccagtgagcttgaatgcatttgacatcatctccctctccaaaggatttgatctgtcaggcctgtttgagaacgacaaagagcagaaggcagactcacggttcatgacacaaaaaccagcatcagcaatagtgtcaaagctagagcagattgctgagacagagagcttcaaggtgaagaagcaggatggactggtgaagctccagggatccaaagaagggaggaaagggcagctcgcgatcgatgcagagatctttgaagtgacaccatccttctttgttgttgaggtgaagaagtctgcaggggacacgttggagtacgaaaaattctgcaacaagggcctaagaccttctctcagggacatctgctgggatggtcagtcagagcatccatcactggcacagtcatcaactctgactcagtcctctaagtcaatctcgagacatgccatt

SEQ ID NO: 8 - DNA, 816 bp, Oryza sativa
atgcttctcggtcgatcctttgaagtacacctccttgatcttgttgtagcacccgagggtcaacagcgagtcagagccggcctggtggcaggtccccacacgcttgacatcaagaagctcaccgagcctgctcaggccgccgtggaggttgctgcagaacctcatgaggtgcttgatgtcgtagagcaccgggaagtagattctgatgaggtcaaagaaggcgggcatgttgtccggcaggttccggccggtgagcagcctgagcaggtaaccgaagtcgtacccgctgtggaaggtgatccactgcacgtcggcgttgagcacgacgcccgacgacatgagcagctcggcgaagcggatcgggtcggccccctcagcggcgaaccgatcgaagtcgatgccgcaggtgcggagcatctggatggagtcggcgttggacgggtcggtccgggggtcgaacccgcggaagttgaactgccagatgcagcgcctgccccccgtcccccgccgcgggaggtcgccgccctcgtcggagagggtgaggccgagctggatgagcttgagcatgttgacgttggcctcgaggttggcgtagttgaactcgtcggtggtgcggaagttgccgacggggcggcacacgatgcccgggaactccgtgtccatggcgacgtacgggtaccggtcgacctcgtcgcggatcgccgcgatctccgcctccaggttccccgcccatacctcccggatctccacgccctcgtcggggctctctacgcaggctgcggcggcggcggccatcggcgcatccagccgacctag

SEQ ID NO: 9 - DNA, 1785 bp, Zea mays
cggcatcatgtgtggcatcttagccgtgctcggttgctccgactggtctcaggcaaagagggctcgcatcctcgcctgctccagaaggttgaagcacaggggccccgactggtcgggcctttaccagcacgagggcaacttcctggcgcagcagcggctcgccgtcgtctccccgctgtccggcgaccagccgctgttcaacgaggaccgcaccgtcgtggtggtggccaatggagagatctacaaccacaagaacgtccggaagcagttcaccggcacacacaacttcagcacgggcagtgactgcgaggtcatcatgcccctgtacgagaagtacggcgagaacttcgtggacatgctggacggggtgttcgcgttcgtgctctacgacacccgcgacaggacctacgtggcggcgcgcgacgccatcggcgtcaacccgctctacatcggctggggcagtgacggttccgtctggatcgcgtccgagatgaaggcgctgaacgaggactgcgtgcgcttcgagatcttcccgccgggccacctctactccagcgccggcggcgggttccggcggtggtacaccccgcactggttccaggagcaggtgccccggacgccgtaccagccgctcgtcctcagagaggccttcgagaaggcggtcatcaagaggctcatgactgacgtcccgttcggggtcctcctctccggcggcctcgactcctcgctagtcgcctccgtcaccaagcgccacctcgtcgagaccgaggccgccgagaagttcggcaccgagctccactcctttgtcgtcggcctcgagggctcccctgacctgaaggccgcacgagaggtcgctgactacctcggaaccatccatcacgagttccacttcaccgtacaggacggcatcgacgcgatcgaggaggtgatctaccacgacgagacgtacgacgtgacgacgatccgggccagcacgcccatgttcctgatggctcgcaagatcaagtcgctgggcgtgaagatggtgctgtccggggagggctccgacgagctcctgggcggctacctctacttccacttcgcccccaacaaggaggagttccacagggagacctgccgcaaggtgaaagccctgcaccagtacgactgcctgcgcgccaacaaggccacgtcggcgtggggcctggaggtccgcgtgccgttcctcgacaaggagttcatcaacgtcgccatgggcatggaccccgaatggaaaatgtacgacaagaacctgggccgcatcgagaagtgggtcatgaggaaggcgttcgacgacgacgagcacccttacctgcccaagcatattctctaccggcagaaagaacagttcagtgacggcgttggctacaactggatcgatggccttaaatccttcactgaacagcaggtgacggatgagatgatgaacaacgccgcccagatgttcccctacaacacgcccgtcaacaaggaggcctactactaccggatgatattcgagaggctcttccctcaggactcggcgagggagacggtgccgtggggcccgagcatcgcctgcagcacgcccgcggccatcgagtgggtggagcagtggaaggcctccaacgacccctccggccgcttcatctcctcccacgactccgccgccaccgaccacaccggcggtaagccggcggtggccaacggcggcggccacggcgcggcgaacggcacggtcaacggcaaggacgtcgcagtcgcgatcgcggtctgacgagagtacgt

SEQ ID NO: 10 - DNA, 1599 bp, Oryza sativa
atggcggcgatttacctgctgatcgccgcgctgatcgcctcctcccatgcactcgccgcgcatggcgccggcggcggcgttccgttggcggcggcggcgcctctcccgttccccggcgacctcgccgcgtccggcaagctccggaccgacccgaacgccaccgtgccggcgtcgatggacttcggcaacatcacggcggcgctgccggcggccgtgctgttcccgggctcccccggcgacgtggcggagctcctgcgcgccgcctacgccgccccggggcggccgttcaccgtctcgttccgcggccgcggccactccaccatgggccaggccctcgccgccggcggcgtcgtcgtccacatgcagtccatgggcggcggcggcgcgccgcggatcaacgtgtcggcggacggcgcgtacgtggacgccggcggcgagcagctgtgggtcgacgtgctccgcgccgcgctggcgcgcggcgtggcgccgcggtcgtggacggactacctccacctcaccgtcggcggcaccctctccaacgccggcgtcagcgggcagacttaccggcacgggccacagatctccaacgtgctcgagctcgacgtcatcaccgggcatggcgagacggtgacgtgctccaaggcggtcaactcggacctgttcgacgccgtcctgggcgggctgggccagttcggcgtgatcacgcgcgcgcgcgtcgccgtcgagccggcgccggcgcgggcgcggtgggtgcgcctcgtgtacgccgacttcgccgccttctccgccgaccaggagcgcctcgtcgcggcgcggcccgacgggtcgcacgggccatggagctacgtggagggcgcggtgtaccttgccggccgcggcctcgccgtggcgctcaagagctccggcgggttcttctccgacgccgacgccgcgcgcgtcgtcgcgctcgccgcggcgaggaacgccaccgccgtgtacagcatcgaggcgacgctcaactacgccgcgaacgcgacgccgtcgtccgtggacgcggcggtggcggcggcgctcggcgatctccacttcgaggaggggttctccttctcccgcgacgtcacctacgaggagttcctcgaccgggtgtacggcgaggaggaggccctcgagaaggccgggctatggcgcgtcccgcacccgtggctcaacctgttcgtcccgggctcccgcatcgccgacttcgaccgcggcgtcttcaagggcatcctccagacggccaccgacatcgccggacctctcatcatctaccccgtcaacaaatccaagtgggatgcggcgatgtcggcggtgacgccggagggggaggaggaggtgttctacgtggtgtcgctgctgttctcggcggtggcgaacgacgtggcggcgctggaggcgcagaacaggaggatactgaggttctgcgacctcgccgggatcgggtacaaggcgtacctggcgcactacgacagccgcggcgactgggtgaggcattttggcgccaaatgggatcgcttcgtgcagaggaaggacaagtacgaccccaagaagctgctctcccctggccaggacatcttcaactag

SEQ ID NO: 11 - DNA, 221 bp, Glycine max
atggctgactcggatcgctcttctagtgaaatttctacacattctactgattcagggaagcgagggtcttccaaagttgaattttctgaagatgaggaaactcttatcatcaggatgtataaactggtaggggagaggtggtctttaattgctggaaggattcctggaagaacagcagaggaaatagagaagtattggacttcaagattctcaggttctag

SEQ ID NO: 12 - DNA, 1539 bp, Zea mays
atggcgacgtgcgcgacggacctggcgccgctgctgggcccggcggcggcgaacgccacaggctacctctgcagccagttcgcggacacggcctccgcggtggacgccacgtacctgctcttctcggcctacctcgtcttcgccatgcagctgggcttcgccatgctgtgcgccggctccgtccgcgccaagaacaccatgaacatcatgctgaccaacgtgctggacgccgccgccggggcgctcttctactacctcttcggcttcgccttcgccttcggcacgccgtccaacggcttcatcggcaggcacttcttcgggctccagcgcctgcccaggaccggcttcgactacgacttcttcctctaccagtgggccttcgccatcgccgccgccggcatcacgtcgggctccatcgccgagaggacccagttcgtcgcctacctcatctactccgcgttcctgacggggttcgtgtaccccgtggcgtcccactggttctggtccgccgacgggtgggccgccgccggccgcacgtccggcccgctgctcttcgggtccggcgccatcgacttcgccggctccggcgtggtccacatggtcggcggcatcgcggggttctggggcgcgctcgtcgagggcccccgtatcgggcgcttcgaccacgccggccgctccgtagcgctcaggggccacagcgcgtcgctcgtggtgctcggcaccttcctgctgtggttcggctggtacgggttcaaccccgggtcgttcaccaccatcctcaagtcgtacggccccgccgggaccgtccacgggcagtggtcggccgtgggccgcaccgccgtcaccaccaccctcgccggcagcgtcgccgcgctgaccacgctattcgggaagcggctccaggcggggcactggaacgtggtggacgtctgcaacgggctcctcggcgggttcgcggccatcacggccgggtgcagcgtggtggagccgtgggcggccgtcgtgtgcgggttcgtgtccgcgtgggtgctcatcggcgccaacgccctcgccgcgcgcctcaggttcgacgacccgctggaggcggcgcagctgcacggcgggtgcggcgcgtggggcgtcctcttcacggggctcttcgcgaggcaagagtacgtggaggagatctacggcgccgggaggccctacgggctgttgatgggcggcggcgggaagctcctggccgcgcagatcgtccagatcgtggtgatcgccgggtgggtgagctgcaccatgggcccgctcttctacgcgctcaagaggctggatctgctgcgcatctcggcggacgacgagatgtccggcatggacctgacgcggcacggtgggttcgcttacgaggaccctggcgacaatgcaggggttggtgagttcacgctcaagtcggcgcagaaccgtgtcgagccgccggcgagcagcaaccgggtgtaaaattcaggaacgaatttaaaaaccgagatgaagttacgtgcttgtagaacccagcggtactcgctgagg

SEQ ID NO: 13 - DNA, 195 bp, Bacillus halodurans
atgcaaggaaaagtaaaatggtttaacgcagaaaaaggtttcggttttatcgagcgcgaagatggtgacgatgtatttgttcatttctctgccattaacacagacggtttcaaaacattagacgaaggtcaatctgttgagtttgatatcgttgaaggagctcgcggacctcaagctgcgaacgtcactaagctt

SEQ ID NO: 14 - DNA, 201 bp, Corynebacterium glutamicum
atggcacagggtactgtgaaatggttcaacggcgaaaagggatttggtttcatcgctcccaacgatggctccgcagatctcttcgtccactactctgagattcagggctccggtttccgtaatcttgaggaaaaccagccagttgaatttgaggtcggcgagggcgccaagggcccacaggctcagcaggttcgtgctctc

SEQ ID NO: 15 - DNA, 636 bp, Zea mays
atgccggactccgacaacgagtccggcgggccgagcaacgcggagttctcgtcgccgcgggagcaggaccggttcctgccgatcgcgaacgtgagccggatcatgaagaaggcgctcccggccaacgccaagatctccaaggacgccaaggagacggtgcaggagtgcgtgtccgagttcatctccttcatcaccggcgaggcctccgacaagtgccagcgcgagaagcgcaagaccatcaacggcgacgacctgctctgggccatgaccacgctcggcttcgaggactacgtcgagccgctcaagctctacctgcacaagttccgcgagctcgagggcgagaaggcggccacgacgagcgcctcctccggcccgcagccgccgctgcacagggagacgacgccgtcgtcgtcaacgcacaatggcgcgggcgggcccgtcgggggatacggcatgtacggcggcgcgggcgggggaagcggtatgatcatgatgatggggcagcccatgtacggcggctccccgccggccgcgtcgtccgggtcgtacccgcaccaccagatggccatgggcggaaaaggtggcgcctatggctacggcggaggctcgtcgtcgtcgccgtcagggctcggcagg

SEQ ID NO: 16 - DNA, 723 bp, Zea mays
atggggaggggaaagatcgtgatccgcaggatcgataactccacgagccggcaggtgaccttctccaagcgccggaacgggatcttcaagaaggccaaggagctcgccatcctctgcgatgcggaggtcggcctcgtcatcttctccagcaccggccgcctctacgagtactctagcaccagcatgaaatcagttatagatcggtacggcaaggccaaggaagagcagcaagtcgtcgcaaatcccaactcggagcttaagttttggcaaagggaggcagcaagcttgagacaacaactgcacaacttgcaagaaaattatcggcagttgacgggagatgatctttctgggctgaatgtcaaagaactgcagtccctggagaatcaattggaaacaagcctgcgtggtgtccgcgcaaagaaggaccatctcttgatagatgagattcacgatttgaatcgaaaggcaagtttatttcaccaagaaaatacagacttgtacaataagatcaacctgattcgccaagaaaatgatgagttacataaaaagatatatgagactgaaggaccaagtggagttaatcgggagtcaccgactccattcaactttgcagtagtagaaaccagagatgttcctgtgcaacttgaactcagcacactgccacagcaaaataacattgagccatctactgctcctaagctaggattgcaattaattccatag

SEQ ID NO: 17 - DNA, 642 bp, Zea mays
atggcttcggtttcacctttggcaaagtttaaactggtgttcttaggagaccaatctgtcggaaaaaccagcatcatcactcgtttcatgtatgacaaattcgacaccacgtaccagcctaccattggaatcgattttctatcgaaaacaatgtacctcgaagatcgaacagttcgtttgcagctatgggatactgctggacaagaaagattcaggagtctaatcccaagttacatcagagattcttctgttgccattgttgtatacgatgtatccaataggcaaacgtttctgaatacctcgaaatggattgaggatgttcacagagaaagaggtcaaagcaatgttatcatcgttcttgttggaaacaaaactgatcttgttgaaaaacggcaagtatcaatcagtgaaggagaagacaagggtaaagagtatggagtgatgttcattgagaccagtgccaaagaaaacttcaacattaaggctttgttccggaagattgctgcagctttacccggggtagactcatattcattggcaacaaaatcagatgacatggttgatgtgaatctaaagaccacttcaaattcatcacaaggtgagcaacaaggaggagcaggtggtggtggaggctgttcttgt

SEQ ID NO: 18 - DNA, 657 bp, Zea mays
atggagggtgtgggcgcgcggctagggcgcacttcggcgcgctacgggccggcgacgacgttcacgggccatgtcaggaagtggcgcaaggagtgggtaccagtggtcgccgccgccgccgccgccgccgccaacgccaacaccagcgccaacggtggcacgacgtcctccacggggatgggatctggcggaggatcccgcgggaataatcttctcctgtttaagtggaccccggtgaacggggctaacgggggaggaggggatggggagcagcagcagcaggctgagacggccacgagacgccggcggtatgtgccggtttctttaatggaagagcaaaggcaagaatctaccaaatctgatgatgagaacaaggctaatgatggagatccatcttcgaatgaaactgagccatcaaatggaaagactgatatcaatgatacacctatggatgaatctcaggcaacagatgaggatggtcgagattctggtaaaaacggcggtggaacagacctaaatttgaatttaggtttgaaagacccggatggtgataatgaagttgagacatcagagaaacatgtagcggcaaacaatccgcagacagagaatagatccaagaggaaatccgtaacccctgaccttgagatgacaatgtag

SEQ ID NO: 19 - DNA, 906 bp, Zea mays
atggctggcctatctttggaacatccttgggcgttcgccttcggtctcctaggcaacgtcatctccttcatgaccttcctggccccgataccgacgttctaccgcatctacaagagcaagtcgacggaaggtttccagtcggttccctacgtggttgcgctgttcagcgccatgctgtggatcttctacgcactgatcaagtccaacgagaccttcctcatcaccatcaacgccgccggctgcgtcatcgagaccatctacatcgtcatgtacttcgtctacgcgcccaagaaagccaagctgttcacggccaagatcatggccctcctcaatggcggcgtctttggggtcatcctcctgctcacccttctcctcttcaagggtagtaagcgcgttgtgctgcttggctggatctgcgtcggcttctccgtcagtgtcttcgtcgcgccactaagcatcatgaggcgcgtgatccagacgaagagcgtagagtacatgcccttctccctctccctctcgctcaccctcagcgccgtcgtctggttcctctacggcctcctcatcaaggacaaatacgtcgcgctaccaaacgtccttgggttcatcttcggcgtggtccagatggtgctctacgtgttctacatgaacaagacgccggtggcggctgccgtgggcaaggatgccggcaagcttccctcagctgcagacgagcacgtcctcgtcaacattgccaagctcaaccccgccctcccggagaggacctccgggatgcacccagtcacccagatggcggccgttcctgccaggagctgcgctgctgaagcaaccgcgccggcgatgctgcccaatagggacgtggtcgacgtcttcgtcagccgacacagccccgctgtccacgtggtctag

SEQ ID NO: 20 - DNA, 825 bp, Zea mays
atggcgcatgcggcggcggccgccgccgtgccgttacgtcgtccgctcctcttcctcaaggaggctcgactcctgtccacactcgcgacccccttacctgggctccgccacccgcgcgccctccgacccacaggccccttgccctccgatgccgaggacaccgacgatccagacgccggcgacggcgccgccgtgtccttcaagaagagccgcaacgaactgaagcgggaggcccgccgcgccgtgaagtggggaatggacctcgccaagttctccccacctcagatcaagcgcatcctcagtgccgcgtcgctggagcgcgaggtgttcgacgcgctaatgctcgtgaagaagtttgggccggatgtgcgggaaggaaggaggagacagttcaattacatcggaagtcttttgcgtgatgcacaaccagaattgatggatactctaatacaagcttctaaggatggagatgagaggaagttatataccttacttagtgaaggtaaactgttggtggaagaagaggaagaggaggaagaggacctacctgatggagaagaggagaatcaagagtatatgaaaattgcagatagatggtttgacggcctcctctgcaaagacatttcagttactaatgaagtttactctgtccatagtgttgaatttgatcgtcaggagctgcggaagcttgtgaagagagcccacatgttccaagaaagcacacaaaataaagatggggaagaatctaatgcgaagctttctggagcaaagaaaccacttatgaggttccttcgttcccttgcaaaggaggcttatgctccatag

SEQ ID NO: 21 - DNA, 1584 bp, Zea mays
atggcgacgccggagctttggtggtactggtggctatgggtgacgacgatgctggccgtcgtcgtctcgaccgtcgtctgctacctgaccaaccagcaccgccgctgggggggctggggctcctcctcagggcgtcgtcggccgccgggcccgcgtcctctcccgctcatcggcaacctgctggacctgcggcgcgcgcccggcagcctccaccacacgctggcgcgcctggcccgcgcgcacggcgcccccgtcatgcgcctcgacctgggcctggtcccggccgtggtcgtctcctcccgcgacgctgcacgggaggcgttcgcggcgcacgaccgccgcatcgcggcacgccccgtcccggacagcaagcgcgcgctcggcttctgcgaccgctccatgctctcgctgcccagctcggccccgctctggcggaccctgcgcggcgtcatggccgcgcacgtcctgtcgccgcgcagcctcgcggcgtcgcgcgccgcgcgggagcgcaaggtcgccgacctgatcgggtacctccgcgcgcgggccgggaccgtggtggatcttaaagaggccgtctatggcggcgtcgccaacctcgtctcgactgccatgttctccatcgacgtcgtcgacgtgggcgccgccgagtcgtcgtcatcgtcgtcggtggcggcccacgggttgcaggagctcctggaggagctcatgcagtgcatggcccagcctaacgtctccgacttcttcccgttcctcagcgcactcgacctccaggggtgtcgtcgccgggtggccgtgcaactgggccaggtcctacaggtcttggacgacatcactgaccgccgtttggcctcctcctcctcctcctccacgtccagcaagggcggggacaggcgcggcgacttcctcgacatcctcctagacctccagtccacgggcaagatcacgcgcgacaacgtgacgctgacgctcttcgacatcttcgcggccgggagcgacaccatggcgctgaccgtggtgtgggcgatggccgagctgctccgcaacccgggcgtgatggccaggctgcgcgcggaggtcagggacgcgctgggcggcagggacgccgtcgaggaggccgacgcggcgggcctgccgttcctgcaggccgtcgtgagggaggccatgcggctgcacccggcggcgcccgtgctgctgccgcacaaggccgtggaggacggggtacagataggcggctacgcggtgcccaggggttgcaccgtgatcttcaactcgtgggcgatcatgcgcgacccggcggcgtgggagaggcccgacgagttcctgccggagcggttcctggccagggacctggacttccgcgggaagcagctggagttcgtcccgttcggctccggccgtaggctgtgcccaggcgtgcccatggcggagcgggtggtgccgctggttctagcgtcgctggtgcacgcgttccagtggcagctgccggccggcatgtcggcggaccaggtcgacgtcagcgacaagttcaccaccaccagtgttttagccttccctcctatcaaagctgtgcctctgctctag

SEQ ID NO: 22 - DNA, 1470 bp, Zea mays
atggtgctctccaaggccgtctccgagagtgacatgtccgtgcactccacgttcgcgtcgcgctacgtccgctcgtctctcccaaggtaccgcatgccggagaactccatccccaaggaggcggcgtaccagatcatcaacgacgagctcatgctcgacgggaacccgcgcctcaacctggcgtccttcgtcaccacctggatggagcccgagtgcgacaagctcatcatggccgccatcaacaagaactacgtcgacatggacgagtaccccgtcaccaccgagctccagaaccggtgcgtgaacatgatcgcgcatctcttcaacgcgccgttgggcgagtccgagacggcggtgggcgtcggcacggtgggctcgtcggaggccatcatgcttgccgggctggccttcaagcgcaggtggcagaacaagcgcagggccgagggcaagccgttcgacaagcccaacattgtcaccggcgccaacgtccaggtttgctgggagaagttcgcgaggtacttcgaggtggagctcagggaggtgaagctgcgcgacggctactacgtgatggaccccgagaaggcggtggagatggtggacgagaacaccatctgcgtcgccgcgatcctgggctccacgctcaacggcgagttcgaggacgtgaagctgctcaacgacctgctccaagccaagaacagggagacccggtgggagacgcccatccacgtggacgcggcgagcggcggcttcatcgcgcccttcctgtacccggacctggagtgggacttccgcctgccgctggtcaagagcatcaacgtcagcggccacaagtacggcctcgtctacgccggcatcggctggtgcatctggcgcagcaaggaggacctgccggaggaactcatcttccacatcaactacctcggcgccgaccagcccacgttcacgctcaacttctccaagggctccagccaagtcatcgcgcagtactaccagctcatccgccacggcttcgaggggtacaggaacatcatggagaactgccacgagaacgccatggtgctcaaggagggcctggagaagacgggccgcttcgacatcgtgtccaaggacgaaggcgtcccgctggtggccttctccctcaaggaccgcagccggcacgacgagttcgagatctcggacatgctgcgccgcttcggctggatcgtgccggcatacaccatgccccccgacgcgcagcacgtcacggtgctccgcgtcgtcatccgggaggagttcagccgcaccctcgccgagcgcctcgttctcgacatcgagaaggtgatgtaccagctggacgcgctcccgtccaggctcccgccccctcccccggcggcgccgctgctcaggaaaaagacggagctggagacgcagaggtcggtcacggaggcgtggaagaagtttgtgctcgccaagaagaccaacggcgtctgc

SEQ ID NO: 23 - DNA, 660 bp, Zea mays
atgggcgaggaggcggtggacgactacgagctccacatggtgtgctacggcagcgacgaggacgagcgcgtgatggagtgggagtcggggctccctggcgccgacgagctgaccccgctctcgcagccgctggtgccgccggggctggccgcggcgttccgcatcccgccggagcccgggcgcaccctgctggacctgcaccgagcgtccgaagccacggtggcgcggctgcggcgcgcgccgccgtcgtcgccgggcacctcctcctccccccacggccaccaggaggcgagggggggcgaaggggcggactcggcggcggcgactaccacgaacagcaacagacggccccggctggtttggacgccgcagctgcacaagcggttcgtggacgtggtggcgcacctggggatcaagaaggcggtgcccaagaccatcatggagctgatgaacgtggaaggtctgacgcgggagaacgtggccagccacctgcagaagtaccggttgtacgtgaagcggatgcgggggcagggtccgtccccgtccgaccacatcttcgcacccacaccggtgcacggcgtcgccgtcggcatggtgcccatggtcagcggccaggcgtaccactacctgtacaacggaggagggggaggagacagatag

SEQ ID NO: 24 - DNA, 660 bp, Zea mays; identical to SEQ ID NO: 23

SEQ ID NO: 25 - DNA, 963 bp, Arabidopsis thaliana
atgggtgagcctaaagacagtctcgctctcttcctctgccacgaatcggagtcttctctaaacgaagacgacgacgagacgattgagagatctgataagcaagaacctcactttactactacgatcgatgatgaagattatgtggcagaccttgttcttaaagagaatctccggttcgaaaccctaccctctaaaacgacgtcgtcttccgatagattgattgccatcgattggattctcactacaagaacaagatttgggttccaacatcaaacagcttacattgcaatctcatacttcgatctgtttctccacaaaagattcatcggtaaagatgaaacatgggcgatgcgattgttatcagtagcttgtttatcattagctgctaaaatggaggaacgtattgttcctggtttatcacaataccctcaagatcatgacttcgttttcaaacccgatgtcattcgtaaaactgaactgttgattctatccacattggactggaagatgaacttgatcactccttttcattacctcaactacttccttgctaaaatctctcaggacaaccattctgtttctaaagacttggtgttgttaagatcctctgattctcttcctgctttaactaaagagataagttttacggagtatcgacagtttgttgttgctgctgtcactacattgctagcttcttcttctacctcatcggatattagattgactagagaagagatagctaacaagtttggttcgatctcttggtggacttctaatgagaatgaaaatgtatatttgtgttatcagagaacgctagagattgaggagaggaaacatatgacacctccaccggaaatagcggtttctcgcgaaccgccggcttcaggaagtggcgctaaacgccgattgtcttttgatgattctgatcaaagttctccaccagccaagagaatgcgtaggcta

SEQ ID NO: 26 - DNA, 1818 bp, Zea mays
atggacacccacatcggatccgtgaacggggcggcgtcgaaccagacggttggctgcccggcgtcggcgccggggtgcccgatggcgtccacgccggcgcagcccgcggcgaccctgtcggcgggggaggcgtcgctggggcgccacctcgcgcgtcgcctcgtgcaggtcggcgtcaacgacgtcttcgcggttccgggggacttcaacctcacgctgctcgaccacctgatcgccgagcccggcctgcgcctcgtcggctgctgcaacgagctcaacgccgggtacgccgccgacgggtacgcgcgcgcgcgcggcgtcggggcctgcgccgtcacgttcacagtcggggggctcagcgtgctcaacgccatcgcgggcgcctacagcgagaacctgcccgtcatctgcatcgccggcgggcccaactccaacgactacgggaccaaccgcatcctccaccacaccatcggcctccccgacttctcgcaggagctccgctgcttccagaccgtcacctgccatcaggcggtggtgaacaatctggatgacgcgcacgagcagatcgacacggccattgccacggcactgagggagagcaagcccgtgtacctcagcatcagctgcaacctccctgggctgcctcatcctaccttcagccgcgacccagtgcccttcttcctcacccccaggacgagcaacaagatggggctagaggctgcagtggaggcaactgtcgaattcctgaacaaggcggtgaagccagtccttgtcgccggccccaaactgcgtgtggcaaaggcaggaaaggcatttgtcgatatggtagatgccagtggctatgcctatgccgtgatgccatcggccaagggtcttgtgccagagactcacccccacttcatcggcacctactggggcgccgtcagcaccgccttctgtgcggagattgttgagtccgcagatgcctacctctttgcaggccccattttcaatgactacagctctgttggctactcattcctcctcaagaaggaaaaggccatcatcgtccagcctgagcgtgtgatagtggggaatgggccggcattcggatgtgtgatgatgaaagagttcttgtctgaattggctaagagggttaataagaacaccactgcctatgagaattacaagaggatctttgtacctgagggccagccgctggaaagcgagccaaatgagccactgcgagtgaatgtgctcttcaagcacgtccagaagatgttgactggtgatagtgcggtgattgctgagactggtgactcctggttcaactgccagaagcttaagctgccagaaggctgtgggtatgaattccaaatgcagtatggttcgattggatggtcagtgggtgcattgctcggatatgctcagggtgcgaaccacaagcgtgtgattgccttcattggtgatgggagcttccaggttacagcacaggatgtgtcaactatgctgcgatgtgagcagaacagcataatcttcctgatcaacaacggtgggtacacgattgaggtggaaatccatgacgggccatacaacgtcatcaagaactggaactacactggctttgtggacgccatccacaatggcttgggcaagtgctggacctccaaggtgaagagcgaggaggagctgacggctgccattgagacagcgctaggggagaaggactgcctgtgcttcatcgaggtgatcgcgcacaaggacgacaccagcaaagagctgctggaatggggctctagggtttctgccgccaactcccgaccaccaaatcctcagtag

SEQ ID NO: 27 - DNA, 1530 bp, Zea mays
atgggggccttcgcgaaggaggagcaccagttcctagccgagctcggcctcgcgcagcgcaacccaggcgcgttcgcatgcggtgcgtggggcggctcaggtcccaccgtcacctccacgagcccgaccaacaatcaggtcatcgcagaggtcgtggaggcgtccgtgcacgactacgaggagggcatgcgcgcctgcttcgatgccgccaagacatggatggcgattcctgctccaaagcgaggagagatcgttaggcaaatcggtgatgcactgagagcaaagctccatcaccttggcaggcttgtgtcacttgagatggggaaaattcttcctgaagggatcggtgaggttcaggaaatcatcgacatgtgtgattatgctgtggggctaagtcgccaactaaatggatccattataccatctgaacgaccaaaccatatgatgatggaggtgtggaatccccttggagttgtgggtgttataacggcatttaatttcccttgtgctgtgcttggttggaatgcttgcattgctttggtctgtggaaattgtgtcgtctggaaaggtgctccaacaactccactgatcactattgcaatgacaaaaatagtggctagtgtattggagaagaacaacttgccaggcgcaatttttacatctttttgtgggggcactgaaattggtcaagcaattgcccttgacattaggatacctttggtttcattcactggaagtacaagggctggtctaatggttcagcaacaagttagtgcaagatttggtaaatgccttcttgaacttagcggaaacaatgccatcattgttatggatgatgcagatatccagctagctgtgcgatctgtcttgttcgctgctgttggtacagcaggacaacgctgcactacatgtcgtaggctgattcttcatgagaacatatatcaaaccttccttgatcagcttgttgaggtatacaaacaagtccgaattggggatccgttggagaaaggcaccttactgggaccactgcacactcctgcttcaaaagagaactttttgaaaggcattcagactatcaaatctcagggagggaaaatcctttttggaggatctgccattgaatcagaaggaaactttgtgcaaccaacaattgtggaaattacaccttctgcaccagttgtgaaagaagaactctttggtcctgtcctttatgttatgaaatttcagtccttgaaggaagcaattgaaatcaataactctgttcctcaaggattgagcagttctatatttacaaagaggccagatattatttttaagtggctcgggccccatggtagtgattgtggtatagtgaatgtgaacatacctactaatggtgctgaaattggtggagcatttggtggagaaaaagcaactggtggtggacgagaagcagggagtgattcctggaagcagtacatgaggagggcgacttgtacaatcaactatgggagcgagctacctctagcccagggaatcaattttggttag

SEQ ID NO: 28 - DNA, 576 bp, Zea mays
atgagtctctgtacaatagcacgacggctatgtctttcaaaaccatcctctggcagtcgtctttcagcaatttgggctcatctatacagcactgaggctgcaaaggacatgggtgctaagaagtacaagtaccccgatgtatacgacccctacgggcctatgccgccgccttcggagaaagtcgtggaactagctgatcgcatcgctgctctccctcccgaggagatcaaacagattgctccagcccttctcctcagactgaaccaggagccgccacaggcggtatctggccagggtttcggtttcggtgcccaggtcggctctggggcaggttctggaaaggctgagaagaaagccgagaagacagtcttcgacgtcaggttggagaagttcgacgctgctgcgaagatcaagatcatcaaggagatcaggacgtttacggatctggggctgaaggaggccaaggagctggtggagaaggccccagtcgttctgaagcaatcgctcacaaaggaggaagcggaagcgatcatagcaaagataaaggcagctggcggtgttgctgtgatggagtag

SEQ ID NO: 29 - DNA, 1326 bp, Zea mays
atggcggggtcgaggttcgggtcgttcaagtcggagaagggcgactccgcctccgcagcggcggcagcgggtggagcggcgcagaggagggacccgtacgaggtgctcggggtgggccgcaccgccaccgaccaggagatcaagagtgcgttccgacgcatggcgctcaagtaccatccggacaagaatggcgatgaccctgttgcatcagacaggttccaggaagtcacattctcctataacatcctgtcagatcccgataagaggcggcagtacgatacatcaggatttgatgcaatcgaatctgatagtcaggaactggagctggacttgtcgagtctcaacactgtaaacacggtgtttgcagctctttttagtaagcttggtgtgccaattaaaacaactgtttcagctacagttttagaggaggcattgaatggttcggttatggtttctcaactccagctaggaaactcagtgcagagaaaggtggaaaagcaatcggcccatttctattctgtggatataactgaaaaacaagctaaaatggggctagtttgtcgtgttcactcaaacgataaaagcaaattcaagttgctatattttgagcttgaagaaaatggcgggcttagtcttgcactacaggaagacagtgtgaaggttgggaaagttactgctgcagggatgtatttccttggttttcctgtgtaccgttttgaacaaaataacctggcagctgctgcaaaagattctgatggtgcattctttaaaagattggatagctttcagccatgtgacatacatgaactgaaacctggaacacacttctttgctgtctacggtgacaacttcttcaagagcgctagttatactatagaggttgtatgtggtgaatcttttcctgccgaaaaggagatgctacgaaatgtggaggccaagatactcacaaaacgagctgaactttccaaatttgagtcagagtatagggaggttttggcgaagttcactgaaatgaccagcaaatacacacaagaaatgcaagcgattgatggtcttttgaaggaaaggaatgagatccatgcttcctataccaacaatccacctctaaaacggagttccagcaggaataaagccaagtcgccttcgaaagtggccaaaactggtacagaaaaacatcatcagaaggaaaagaaggtgaaggatcactgcatggagggatgtggaagtgacagcgataactcaagtgaaaagaaatcaaaagagcggttcccaaggaagaaatggctgaaccttccattcaaacttgacaggagaaagacgtgctag

SEQ ID NO: 30 - DNA, 981 bp, Zea mays
atggccgacaacgcgaaggccgcggcggcgcatgcgaggccggagtcgtcgcaggaggaggaggaggactggaaggaggccgagggggacgtcgccgaagtcgaccgcgccgccaccaatggcgccggcgaggggggcgtgcccacagacaggccgatccgggtctacgccgacggcatctacgacctcttccacttcggccacgccaagtcgctggagcaggccaagaagtcgtttccaaacacatatcttcttgttggatgctgcaatgatgagttgacacataaattcaaaggaagaactgttatgactgaggatgagcgatatgagtcacttcgtcattgcaagtgggttgatgaagtcattccagatgctccatgggtggtgacagaagagttcttggataagcataacattgattttgttgctcatgattctctgccgtatgctgatgctagtggagctggtaacgatgtttatgaacatgtaaaaaagcttggtaagtttaaggagactcagcgcactgatgggatatcaacatcggacattataatgcggattgttaaagattataatgagtatgttatgcggaatctggccaggggctacactagaaaggatcttggtgttagttatgtcaaggaaaaacgactgcgagtgaacatgggacttaaaaacctgcgtgacagagtgaaacagcaccaagaaaaagtaggggagaagtggagcacggttgcaaaactccaggaagagtgggtggaaaatgcagaccgctgggtggctggtttcttagagaagtttgaggaagggtgccactcaatggggacagccatcaaggagaggatccaggagaggctcatcaaggcacaatccagcgactttggcagcctcctacagtacgacagctacgattctgatgaagccaaagaaaacgacgaggacgaagacgaagatgaactctttgaagacgtcaaggaatag

SEQ ID NO: 31 - DNA, 645 bp, Zea mays
atggccgccgtggaggtgtgcgtgaaggccgccgcggggaaccccgacacgctcggcgattgcccgttctcgcagagggtgctgctcacgctggaggagaagaaggtcccgtacgaggtgaagctcgtcgacctcggcaacaagcccgaatggtttctgaacatcagcccagagggtaaggtgcctgtgttcaacggtggagatggcaaatgcattgctgattctgatgtaatcatccaagtcattgaggagaagttcccgactccttctctggtcacccctccagaatatgcatcagtgggatcaaagattttcccagcctttgtcaagttcttgaagagcaaggatggtagtgatgggtcagagaaggcgcttctggatgagctgcaggcactggatgatcatctcaaagctcatggcccctacataaatggggagaacgtgtcagcgactgatcttagcctggggccaaagcttttccacctacagatcgcactggagcatttcaaaggctggaagatcccagaaaacctaaccaatgtccatgcctacaccaaggctcttttcagccgtgaatcttttgtcaagactaagccatccgaggagcacgtgattgcgggatgggcgcccaaggtgaatgcatag

SEQ ID NO: 32 - DNA, 432 bp, Zea mays
atggacgcgagcgcggccaccgccaggcgcaagcgcaagcgccccgacgccgacatcaccgccgccgccgccgccgccgccccggtcgccgtcgacgaggcctcggacgccgaggtcgaggagttctacgccatcctgcggcgcatccgcgacgcctcccgccggctgtgcggcgccggcgcccggcccgccccgcgcgcgccggcgtggcggcccagcttctcctgggaggacttcgcgacgccggcccctggcgcgccggcgcctgagaccccgacccccgcgcagcaggagccagcgcagccgcggcccgacgagcctgtagccgtcgtccgcgctaccgccccgtcgccgcgtgccgggctggacctgaacgcggagccggagccggaggcgccggccacccctcgctcggcgcgcgtccaggcgtag

SEQ ID NO: 33 - DNA, 366 bp, Zea mays
atggccggctgctgcgtgttcctccggtggccgtcggcctcgccgtcgcgcatcggctaccgctccctcgtcgacgcggcggccgacgacgccgccccgccgtcgacggtgacggtcgtggtcgggaaggagcggcgggcgttcgcggtggaccgcctcgtgctcgactcctacccgctccggctgctcctggagacggcggcgcgcagggaggagcgcagggccgggggcggcgccatcttcgtggacgtcgacgccatcctcttcgagcacatcctctggctcgcctgcgacgcccgctccgtctcccagatcctgcacctcgacctcaaggagatcatcgacttctacgcccaggacgcgtag

SEQ ID NO: 34 - DNA, 606 bp, Zea mays
atgtcgtactacggcgaccggcgcgcggagtcgtcgatcgtggaggcgttcacgctgtcgccgctgccgtacccggtgatcctggtgctgctgatggtgacgctgctgctgggcgcctcgtggttcttcacgtacgacgacttcatcgaggaggcgtcgcagcagctgagctgggcgctgctgggcgtgcccatcgcgctcgtcctcctcatccgctggatctcctccgtcgactccttcgagggctacctgggcttctacccgagggagagccgctggaagggccgctacgagcggggccccgccgagggcagctcgccctggggcgtcgccttgctcgtcctcctcctcctcgtgctcgccagggctggctgcgggaaggtcgtgtatgggaaccctgggaggctggggaggaagaggaggggaggggataaggtgaaggagcaagctggggacgaggcggccaagttcccgtggtccgggatgcgcctggctaccgagaaacggaggagggtgagacgctctccatcgaagaagggaatagtcctgaagcaaaaatcacggaaggtatccctgcagcaccgctcaaagaagttgaaagcttag

SEQ ID NO: 35 - DNA, 756 bp, Glycine max
atggaaggagtaccgcacccaatacccagaacagtcgaagaggttttcaccgattttaagggcagacgcgccggtttgatcaaggctctcactaccgatgttgaaaagttttaccagcagtgcgatcctgagaaggagaatttgtgtctatatgggtttccaaatgaaacatgggaagtgaatttgcctgttgaggaagtgcctcctgaacttcctgagccagcattaggtataaactttgccagggacggcatgcaagagaaggactggctatcactggttgcagttcacagtgactcatggctgcttgctgttgctttctattttggtgcccgctttggatttggtaagaatgaaaggaaaaggctttttcagatgataaatgatctgccaacaatcttcgaacttgtgactggaagtgctaggcaatcaaaggatcaaccagctgcccacaacaatggtagcaaatgcaaatcaagtggaaagtcccgtcagtctgagtctcaggccaaggggatgaagatgtctgcaccacccaaagaagaggatgagagtggagaagaagaagaagaagatgatgaacaaggtgcgacatgtggtgcttgcggtgataattatggcactgatgaattctggatctgttgtgatatgtgtgaaagatggttccatggtaaatgtgttaaaattactcctgctaaggctgagcacatcaagcaatacaagtgccctagctgcagtaacaagagggttagagtt

SEQ ID NO: 36 - DNA, 1455 bp, Arabidopsis thaliana
atgtcggaaggagtagaagcgatagtagcaaatgacaacggaacagatcaggtaaacggaaaccgtaccgggaaagataacgaagaacacgacggctccaccggttctaacctaagcaatttcctatggcacggtggctctgtctgggacgcttggttcagctgcgcatctaaccaagtggctcaagtgttattgacattaccgtactcgtttagtcaactaggaatgttatcaggaatagtacttcagatcttctatggtttactaggaagctggactgcttatctcatctctgttctctacgtcgaatacagagctcgtaaagaaaaagaaggcaaaagcttcaaaaaccacgtcattcagtggtttgaagtacttgatggattacttggttcatactggaaagcactaggactcgcatttaattgcactttcctcttgtttggatctgttatccaactcattgcttgtgccagtaacatttattacataaacgatcatctggacaagagaacatggacttacatatttggcgcgtgttgtgcaaccactgtctttataccgtcgtttcacaattaccgaatttggtcattccttggccttggaatgaccacttacaccgcttggtacttagccattgcctccatcatccacggccaggcggaaggtgtgaaacattcaggtccaacaaagctagtgctttattttacgggagccacaaatattttgtacacctttggaggtcacgcggttactgttgagattatgcatgctatgtggaaaccacagaagtttaagtacatttacttgatggcgacgttatacgtgttcacgctaacgattccgtcagctgccgccgtttactgggctttcggagacgcacttctcgaccactccaacgctttctctcttatgcccaagaacgcgtggcgtgacgccgctgttatcctcatgctcattcatcagtttataacgttcgggttcgcttgtacacctttgtactttgtgtgggagaaagtgattgggatgcatgacacaaagagcatttgcttaagggctttggctagattgcctgtggtcatacctatttggttcttagctattatcttcccctttttcggtccaatcaattccgctgtcggtgctcttcttgttagcttcaccgtctatatcatcccatctctcgctcacatgctcacttaccgatctgcctccgctcgtcagaatgcggcggagaagccaccgttctttatgccgagctggacggcgatgtacgtgttgaatgctttcgtggtggtttgggttcttatagtcggatttgggttcggtggatgggctagtgtaaccaactttgttcgtcaagtcgacacttttggtctctttgccaagtgttaccaatgtaaaccagctgcagccgccgcacatgccccggtctccgctttacaccaccgtctt

SEQ ID NO: 37 - DNA, 1572 bp, Arabidopsis thaliana
atgactaatactctctgtttaagcctcatcaccctaataacgctttttataagtttaaccccaaccttaatcaaatcagatgagggcattgatgttttcttacccatatcactcaaccttacggtcctaaccgatcccttctccatctctgccgcttctcacgacttcggtaacataaccgacgaaaatcccggcgccgtcctctgcccttcctccaccacggaggtggctcgtctcctccgtttcgctaacggaggattctcttacaataaaggctcaaccagccccgcgtctactttcaaagtggctgctcgaggccaaggccactccctccgtggccaagcctctgcacccggaggtgtcgtcgtgaacatgacgtgtctcgccatggcggctaaaccagcggcggttgttatctcggcagacgggacttacgctgacgtggctgccgggacgatgtgggtggatgttctgaaggcggcggtggatagaggcgtctcgccggttacatggacggattatttgtatctcagcgtcggcgggacgttgtcgaacgctggaatcggtggtcagacgtttagacacggccctcagattagtaacgttcatgagcttgacgttattaccggaaaaggtgaaatgatgacttgctctccaaagttaaaccctgaattgttctatggagttttaggaggtttgggtcaattcggtattataacgagggccaggattgcgttggatcatgcacccacaagggtgaaatggtctcgcatactctacagtgacttctcggcttttaaaagagaccaagagcgtttaatatcaatgaccaatgatctcggagttgactttttggaaggtcaacttatgatgtcaaatggcttcgtagacacctctttcttcccactctccgatcaaacaagagtcgcatctcttgtgaatgaccaccggatcatctatgttctcgaagtagccaagtattatgacagaaccacccttcccattattgaccaggtgattgacacgttaagtagaactctaggtttcgctccagggtttatgttcgtacaagatgttccgtatttcgatttcttgaaccgtgtccgaaacgaagaagataaactcagatctttaggactatgggaagttcctcatccatggcttaacatctttgtcccggggtctcgaatccaagattttcatgatggtgttattaatggccttcttctaaaccaaacctcaacttctggtgttactctcttctatcccacaaaccgaaacaaatggaacaaccgcatgtcaacgatgacaccggacgaagatgttttttatgtgatcggattactacaatcagctggtggatctcaaaattggcaagaacttgaaaatctcaacgacaaggttattcagttttgtgaaaactcgggaattaagattaaggaatatttgatgcactatacaagaaaagaagattgggttaaacattttggaccaaaatgggatgattttttaagaaagaaaattatgtttgatcccaaaagactattgtctccaggacaagacatatttaat

SEQ ID NO: 38 - DNA, 1474 bp, Leuconostoc mesenteroides
accatggagattcaaaacaaggctatgcttattacttacgctgattctcttggaaagaaccttaaggatgttcatcaagttcttaaggaggatattggagatgctattggaggagttcatcttcttcctttcttcccttctactggagatagaggattcgctcctgctgattacactagagttgatgctgctttcggagattgggctgatgttgaggctcttggagaggagtactaccttatgttcgatttcatgattaaccatatttctagagagtctgttatgtaccaagatttcaagaagaaccatgatgattctaagtacaaggatttcttcattagatgggagaagttctgggctaaggctggagagaacagacctactcaagctgatgttgatcttatttacaagagaaaggataaggctcctactcaagagattactttcgatgatggaactactgagaacctttggaacactttcggagaggagcaaattgatattgatgttaactctgctattgctaaggagttcattaagactactcttgaggatatggttaagcatggagctaaccttattagacttgatgctttcgcttacgctgttaagaaggttgatactaacgatttcttcgttgagcctgagatttgggatactcttaacgaggttagagagattcttactcctcttaaggctgagattcttcctgagattcatgagcattactctattcctaagaagattaacgatcatggatacttcacttacgatttcgctcttcctatgactactctttacactctttactctggaaagactaaccaacttgctaagtggcttaagatgtctcctatgaagcaattcactactcttgatactcatgatggaattggagttgttgatgctagagatattcttactgatgatgagattgattacgcttctgagcaactttacaaggttggagctaacgttaagaagacttactcttctgcttcttacaacaaccttgatatttaccaaattaactctacttactactctgctcttggaaacgatgatgctgcttaccttctttctagagttttccaagttttcgctcctggaattcctcaaatttactacgttggacttcttgctggagagaacgatattgctcttcttgagtctactaaggagggaagaaacattaacagacattactacactagagaggaggttaagtctgaggttaagagacctgttgttgctaaccttcttaagcttctttcttggagaaacgagtctcctgctttcgatcttgctggatctattactgttgatactcctactgatactactattgttgttactagacaagatgagaacggacaaaacaaggctgttcttactgctgatgctgctaacaagactttcgagattgttgagaacggacaaactgttatgtcttctgataaccttactcaaaact

SEQ ID NO: 39 - DNA, 1476 bp, Arabidopsis thaliana
atgggaggttgcgtgtcaacgcctaagagctgtgtaggaggtaaaataaggtcaagcaaaaggagaaagactcggacaagacgaaagattcagaagaagagagttgtttcttcttctcgcttatctgacggatctttcgataataatcccactttcagagcaagtgttgatgaagcatggtttgattccaatctcgcctttgaaaccgattgtgatgatgactttcatagtgttcaggaagatacgttgtcagtgaacggatgtgagcgtatctcagtatcgagtatgtcatctgttaaagactctaaccttggtggttccgctcggaattctctaagcgatgtcatctcacaatcaaaatcagagagtgctttgattgacactaagcaggctgttttcatcgacgagatatcttcaaatgctgatggtagctctaataaagatgaagggttgttggaaaactgcgggattcttccgagtaattgtttgccttgtcttaattcaactgttccttctattgaaaagagaaggtctttaagctctagccctccaagtacgaggaaaaaagctgcggttaaactatctttcaagtggagagaagggcaccctactggtcctttattttctacaacaatgcagttgcagagaccgatggcaggttctcaggttccgttttgtccactcgaaaagaaaatgtttgattcttggtcaattattgagcctggtagtttccgggttcgtagcaaaacttatttcagagataagaagaaagagcttgcaccaaactatgctgcatataatccatttggtgtcgatgtatttttatctcaacgtaaagtaaaccatatagcgcaatacgtggagcttcctgttgttactaccaccccgactaagctcccatcaatccttgttgtaaatgttcagattccattgtatccagctgcaatttttcatggtgaaactgatggagaaggaatgaatttcgttttatactttaaactttcggataactatttaaaggagcttccaccacattttcaagaaagcattcagagattactagatgatgaggttgagaaagttagaggctacactactgacacgaatgtaccctttagagaacggttaaagatattgggtcgtgttgcgaatgtagacgatcttcagttgaatggtgcagagaaaaaactcatgaatgcttataacgaaaaacctgtgctttcacgtccacagcacgagttctactcgggtgaaaattactttgagattgatattgatatgcatagattcagttatatatcgcggaaaggatttgaagcatttttagacaggctaaagaactgtgttcttgatgttggactcacaattcaggggaataaaccggaggagttaccggagcagattttgtgttgcatccggttaaatgggattgattacatgaattatcatcagttagctcttagtcaagaagtccta

SEQ ID NO: 40 - DNA, 1470 bp, Arabidopsis thaliana
atgacaaagataagtcctgaagttgaaatcaggatgccaatggaggcatttccgccagtttcagctgatgtgagctttatttctaatagttttccgaagtacaaactggatgctgataatcaagttctggaagagccagttgaggataaccagggtccttctttgaaggacgttattgaacaagaagcttccaatttgtcagaccaacacaagcgtatctcagttcgtgaccttgccagtaaatttgacaagaacctggctgcagctgctaagttgtctaatgaggcaaagctaagagacgtggcatctttggagggacatgttcttttgaaaaagctaagagatgccttagaatctttaagaggccgttttgcaggaagaaacaaagaggatgtggagaaagctatctctatggtggaagctttagcagttaagttaacccaaaatgaaggagaattgattcaagagaagtttgaagtgaagaagcttgtaaactttctcaaacaggcttctgaagatgctaaaaatttggttaatcaagagaagtcttttgcttgtgccgaaattgaaagtgctagagctgtggtgctgagaattggggaggctcttgaagaacaagaaaaagcttcccaagcttctaaaccacaggatgtggatggactagtcgaagaggttcaagagtctagaagaatcaaattgttgcatcacccaagcaaggtgatggccatggaatatgaactacgtgctcttagggatcaaattcgagagaaatctatattttcaattaagcttcagaaagagctaatcatgagcaagaggaacgaggaaaataaatcttgtttatacatgttagatggttctgaagctttgggttcatatctgcgagtccagccttgctcagatgaagtgccacaggtttcgaaatgttcatttcagtggtaccgcttgtcttctgaaggcagctggagggaagttatttcaggtgccaacaagtcaatatatgctcctgacccctctgatgttgggagaatcttacaagtagatattgtctcaaatgggaaaaagctcaccctaacaactaatcccattcaaactgtttcaggacttggaagccatgtggagacacttctacgaaaatctaatactgattttaatgtagttatttctcaaatgaatggaaaagatcactcatcccattctactcattcatttaatgtggggagaatgaggataaagctatgcagaggttggattacaaaagctagagagatttactccccatcaatgcagctatgtggcgttagaagtgatgtcgtgaatgcagcgaaggtgttgttttggcaagcaagaaagggcctctcatttgtattaacctttgaatcagagagagaccgaaattcagccattatggttgccaggaaatatgctcttgattgcaatgtcgtgcttgccgggccagatgatctagtg

SEQ ID NO: 41 - DNA, 537 bp, Glycine max
atggccagttttggaggaaccacacaaaagtgcatggcttgtgccaaaactgtgtatcttgttgataagttaactgcagatagccgtgtctatcataaggcttgcttccgatgccaccattgccgtaatacccttaagcttagcaactactgttcttttgagggggtgctctactgcagacctcactatgatcaactctacaagcgaactggtagcctggacaaaagttttgaaggaatacccaaaattcagaaaccagagaaaccggtcactggtaatgagaatactaaggtcctcgcaaacgtgttcttgggcaccagagacaaatgtgtgtgttgcaacaagacagtgtatcccactgagagggttacggttaatgggacaccctaccacaagggctgcttcaagtgtacctatggaggttgtactgtaagctcatcaaactttatcacacacgagggaaagccctactgcaaacaccatcacattcaacttttcaaagagaaagggaattacagtcagctcgagaatgaatgc

SEQ ID NO: 42 - DNA, 537 bp, Glycine max; identical to SEQ ID NO: 41

SEQ ID NO: 43 - DNA, 501 bp, Arabidopsis thaliana
atgtacctgattgtgcttggttttgcaagttggtgtctcaataaatacatcaacggccaaactaaccacccaagttttggaggcaatggagcaacaccgttcttcttgacgttttcgatattggcggctgtggtaggagtagcgtcgaagttggccggagcaaatcatattaggttttggaggaatgatagtttagccgctgctggagcttcttccatcgttgcatgggctatcacagctcttgccatggggttggcatgcaaacaaataaacataggaggatggagaggatggagactgaagatgattgaagccttcattatcattttgacgttcacgcagcttctctacctcatgttgatccatgccggttcactcagcagcaaatatggtcctggatacagagaccaagactatgctacaggccaagctcatggtcatggtcatgtaccacacactgtgggagagcacaaggctggtgttggatctaccatggcagtc

SEQ ID NO: 44 - DNA, 681 bp, Arabidopsis thaliana
atgccggtgcacgatgagcaagagcatgaggtgtacggtggagagatcccagaagaggaagaaggtgagatggatacggaagagtacgaagaacacggcggagaagaaggtgccgccgccggagatgaggagcttgaacctggctctagctctagggacttggaggatatgaagaaacgaattaaggagattgaggaagaagctggagctttgcgtgaaatgcaagccaaggctgagaaagatatgggtgctagtcaagacccttcaggtggtgttagtgcggctgagaaggaagaagtggattcgcgttcaatatatgttggcaatgtggactatgcatgtactccagaggaagtccagcagcattttcaatcatgtgggacagtgaatagggttacaattctgacagataagtttggtcaacctaaaggttttgcgtatgtcgaatttgtggaagtagaagctgttcagaattcgcttattttgaacgagtcagaactacatggtcgtcagataaaggtatctgcaaagaggactaatgtacctggaatgaggcaatttcgaggaagagggcgtccctttagaccgatgaggggattcatgccaggagttccattttatcctccatatgcttatgggagagttcccaggttcagacggcctatgcgctacagaccgtac

SEQ ID NO: 45 - DNA, 1116 bp, Arabidopsis thaliana
atgtttgctcagttagcaccatcgccgtctccttctccggcgaacgttagccacttcgttcaccgtcgcaccttccgtcaatgtacatacgccgtctccgcttctcttcccactgcaaattcctctcgtccaccaccaattcagattgttggaggaaaggatttgaatttggatgttacacggaaagatgattcaattgggttcaaattagaggcaaatgaagatgaaattgattggatgaatctagaatctgatattcgtctatggactagagcattacgtcctgttcagtggtatccagggcacataatgaaaactgaaaaggaacttagggaacagcttaagttgatggatgttgtgattgaagtccgtgatgctaggattcctttatcgaccactcatccaaagatggatgcgtggcttgggaataggaaacggatattggtattaaatagagaagatatgatctcgaacgatgatcgaaatgattgggcgagatactttgcaaagcaaggaataaaggtcattttcactaatggcaaacttgggatgggagctatgaagctaggtcggttagccaaaagtttagcaggtgacgtaaatgggaaacggcgagaaaaaggacttctccctagatcagttagagctggaataattggataccctaatgttgggaaatcatctctgatcaatcgtctattgaaacgaaaaatttgcgcagcagctccaagaccaggtgtaactagagaaatgaaatgggtcaagcttgggaaagatcttgatctcttagattcacctggaatgcttcctatgcgtatcgatgatcaagcagctgctataaagctggcaatttgtgatgacattggagagaaagcttatgacttcactgatgttgctggaatccttgtgcagatgttagcacggattccagaagtaggcgcaaaggctctttacaaccgatacaagatccagctagaaggcaactgcgggaaaaaatttgtgaagacgcttggtcttaatttgtttggtggagatagtcatcaagctgcatttagaatactaacggattttcgcaaaggcaaattcgggtatgtctcgttggagagacctccactg

SEQ ID NO: 46 - DNA, 1116 bp, Arabidopsis thaliana; identical to SEQ ID NO: 45

SEQ ID NO: 47 - DNA, 1308 bp, Arabidopsis thaliana
atgaaagcatcgggttcattagatagctggagagaatatttccgacggcgaggagattccgatatattcgggatcatcgatcatgcgatcatggtggctgctactgattgtcctaacaaattcaaatccagaagagacaaaatcgccgagcttttattctcctgtagagtgaatcgttgcgtcggatgcgaccatcttgaattgtctgttcccggagacgacgaggctaaccgtggaaccaccggaaatggtggtggtggtacggcggttgatgaagattatgaggttgctggtggtagtaaagagagcaaagctaatagtagcagaggggataataatcagattgttagcaattatacatttgatgaagctgaggctttgagtgatgagattgaagagttttctgtggtttctaaggaggttgctaggatcaaagagatcttgctcaacaaagaagatgagccaaactcggtgttactcgattctttaagacatcttaagttgatgtctttgaatgtggatattcttaagagtactgagattggaaaggctgttaatggcctcaggaaacattcttctgataagattcgacaactcgctaagactcttatcgcagaatggaaggagttggtggatcaatgggtgaataccacaaaggaaatcactggtgctgaaggtacaccagagtctgcaaacccgtctgtccttgatgaagaagaggcgtttccatcgcttccatatgatgttgatatctttacacctgaaccaaacggatttgaaatctcacacttctttgattccttggactttgatggaaatcctcgtaactctgaagaacacaacacaagccgagagcatgaaagaaggccacaaaatatcgccaagagaaaacctgagggaacacaaatgaggatacaagatgctccttttagatctattaagccatcatcagctactgattttgatgggactagaagacctgtaaagcaaagtacagagcaaaggatgaagaacgaaacggtatctgttcacaagtctgaaaaacccatgatccaaaggaaaccggttgttacagaacagaagcggaaagctcctggacctcaacaagaaaaacttaaaggtcttgatgcagacgcaaagtttgagtttgcaaagaggaaacttcaagaaagctaccagcatcacgagaatgccaagaagcagcgaacgatacaagtacttgagatgatcccaaagcaaggtagtgctcagaaaccgcaactcaagagacctggaatgagcaacaggaattgggctaatgggagaaaa

SEQ ID NO: 48 - DNA, 708 bp, Arabidopsis thaliana
atggatgtttttgctttcaatgcttctttatccatgtgtaaagatgttgccggaatcgcaggcaacatatttgcatttggactcttcgtttcaccaatgccaacgtttaggaggatcatgaggaacaaatcgacggagcaattctccggtttaccatacatttacgctctcttaaactgcttgatctgcctttggtatggcacacctttcatatcacacagcaatgccatgcttatgactgtgaattccgttggagctacgtttcagctttgctacattatcctcttcatcatgcatacagacaagaagaacaagatgaagatgcttggtttgctttttgtggtgtttgctgtggttggagtgattgtagctggaagtttgcagatacctgaccagctcacacggtggtactttgtcgggttcttgagctgcggttctcttgtttcaatgtttgcctcgccgttgtttgttattaacctagtgattcggactaagagcgttgagtttatgccgttttatctctcgctatcgactttcttgatgagtgcttccttccttctttacgggttattcaacagcgatgcctttgtttatacaccaaatggaataggaacgattcttggcattgtgcagctggctttgtactgttactaccacaggaattctatagaagaagaaacaaaagagcctttgattgtttcttacgtg

SEQ ID NO: 49 - DNA, 747 bp, Arabidopsis thaliana
atgacgaagaactacccaaccgtgagcgaagattacaagaaggctgttgagaagtgcaggaggaagctcagaggtttgatcgctgagaagaactgtgcacccatcatggtccgactcgcatggcactctgctggaactttcgattgtcaatcaaggactggaggtccattcggaacaatgaggtttgacgctgagcaagctcatggagccaacagtggtatccacattgctcttaggttgttggaccccatcagggagcaattccctaccatctcttttgctgatttccatcagcttgctggtgttgtggccgttgaagttactggtggccctgacattcctttccaccctggaagagaggacaagccccaaccacctccagagggtcgtcttcctgatgctaccaagggttgtgaccatttgagagatgtctttgctaagcagatgggcttatctgacaaagacattgtcgctttatctggtgcccacactctgggacgatgccacaaggataggtctggcttcgaaggtgcatggacatcaaaccctctaatcttcgacaactcttacttcaaggaactcttgagcggagagaaggaaggccttcttcagcttgtctctgacaaagcactattggacgaccctgttttccgtcctttggtcgagaaatacgctgctgatgaagatgcctttttcgctgattacgctgaggcccacatgaagctttctgagcttgggtacttatcc

SEQ ID NO: 50 - DNA, 942 bp, Arabidopsis thaliana
atgtatttgttagtgtttaaactctttctatttttgtctcttcttcaaatctctgtctctgctagaaacctagcttcacaagaaccaaaccagtttcaactactcaagtaccacaaaggagctcttctctccggcaaaatctccgttaacctaatctggtacggcaaattcaaaccatctcaaagagcaatcatctccgacttcattacctcactcacacacacttctcctacgtccaaaactctccaccaaccatctgttgccacgtggtggaaaaccacagaaaaatactacaaactcgcaacacccagcaaaaactcatcacctctgtctctaactctcgggaaacaaatcatcgacgagtcttgctctctaggaaaatctttaaccgataaaaagattcaaaccctagcttcgaaaggagaccaacgcaacgccatcaacgtcgttttgacttcagctgacgttacggttacaggatttggtatgagtcgttgcgggactcacggacacgctcgtggtttaggtaaacgtggctccaagtttgcttacatttgggttggaaactctgagacacaatgtcctggtcaatgcgcgtggcctttccacgcgccggtgtacggtccacagagtccaccactagtggcaccaaacaatgacgtgggactcgatgggatggttattaacttagctagtcttttagctggaaccgcaacgaacccttttggtaatggttactatcaaggtccacaaaacgcaccgcttgaagctgcttctgcttgtcctggcgtttatggtaaaggagcttatcctggttacgctggagatttgcttgtggatactacaacgggaggtagttttaatgcgtatggtgcaaacggcaggaagtttttgcttcctgctttgtatgatcctacgacgtcggcttgctctactatggtc

SEQ ID NO: 51 - DNA, 1119 bp, Arabidopsis thaliana
atgggataccttttcgaagaaaccttaagctctaaccctaaaaccccaattgttgttgatgatgataacgagttgggtttgatggccgtgagacttgccaatgccgccgcctttccaatggttcttaaagcttccctcgagctcggtgtctttgacactctctacgcggaagcctctcgcactgactcgttcctttcaccctctgagatagcaagtaagctaccaactacaccccgtaaccctggggctccggtcttgttggaccgcatgcttcgtttactcgctagctattccatggtcaagtgtgagaaggtctccgtaggaaagggggagagggtctatcgagctgagccaatttgcaggtttttcttgaagaataacattcaggatattggatcccttgcctctcaagtcattgtcaatttcgacagtgtcttccttaatacctgggcacaactgaaagacgtggtgctagaaggaggagatgcgtttgggcgtgcacatggtggcatgaaactctttgactatatgggtacagatgagagattcagcaagctttttaaccagactggattcacaatcgcggtggtgaagaaggctcttgaagtttaccaaggcttcaaaggtgtgaatgtgttggttgatgtgggaggtggagttggtaacactcttggtgttgttacttctaaatatcccaatattaagggtatcaactttgatctaacttgcgccttggcacaagcaccctcgtatcccggtgtggagcatgttgccggagatatgtttgtggatgtcccaaccggagatgctatgatcttgaaacgtatacttcatgattggaccgacgaagactgtgtgaagattcttaagaattgttggaaatcactaccagagaacggtaaagtggtagtcatagaattagttactcctgatgaggcagagaacggagatatcaacgcaaacattgcctttgacatggacatgttaatgttcactcaatgttctggtggaaaagagagatcaagagctgagtttgaagctttggctgcagcttcttgcttcacccattgcaagtttgtttgccaagcttatcactgctggattattgagttctgtaaa

SEQ ID NO: 52 - DNA, 1119 bp, Arabidopsis thaliana; identical to SEQ ID NO: 51

SEQ ID NO: 53 - DNA, 510 bp, Arabidopsis thaliana
atgcagcagaggaagccgacggcgggtagacccagtggtaccgatggatccgatttctcataccgcatggtcgttgactctcgttacacgaaggtcactaaagaaaaagctcgtctccgtcctttgatctttgttcaggctgcgatttatgtaatcggattatcgtgtgcgtttctaacaacaactaaaaaggatgagaagaacacccttgctattgcagctgctgttgctggcttagtgtgttcattgataggagaattaggttgcagacgtagcagagtaaaccttttgaggctctacacggctgcatcaaccattgttatggttctttctgtgttttgtgctgttaggagcagattaaccatggaggaacgcaatagctctggaacaaccgcgaagcttgagctcgcaggtttcatttgtgctcaattaggagcggtggtgcagatattagcgatcatcgttacagggtcccttgtcaataatatgtctccacctacgaaagcagca

SEQ ID NO: 54 - DNA, 429 bp, Arabidopsis thaliana
atggcgatggctttcaagatggcgacgacggggatgcgtgtgacggatgagtgtacgagttcattcatggacatgaaatggaagaaagttcatagatacatcgttttcaagatcgaagagaagtcacgtaaagtcaccgtcgataaagtcggcggcgccggtgaaagctaccacgatctcgaagattctttaccggtggatgattgtcgctacgctgtctttgatttcgactttgtcaccgtcgataactgccgcaagagcaagatcttcttcattgcatggtcaccggaggcatcaaagataagggcaaagatattgtacgcaacgtcgaaagatgggctgaggagagtgttggaagggattcactatgaacttcaagctactgatccgacggagatgggtttcgatattatccaagaccgtgccaaa

SEQ ID NO: 55 - DNA, 1248 bp, Arabidopsis thaliana
atgtatcagcacatcaaggtgccggcaggcgagaagatcaaggtcaacgccgatctttcgctgaacgtgccggataatccgatcattccctacatcgaaggtgacggcacgggtgtcgatatcaccccggtgatgctgaaagtggtggatgccgccgtggccaaggcgtatggcggcaagcgcaagatctcgtggatggagatctacgcgggcgagaagtcgaccaaggtctatggcccggatgtgtggctgccggaagagaccatggaagtggtcaaggaatacgtggtgtcgatcaagggcccgctgaccacgccggtcggtggtggcatccgctcgctgaacgtggcactgcgtcagcagctcgatctctatgtctgcttgcgcccggtgcgttatttcaaaggcgtgccgtccccggtgcgcgagcccgagaagaccgacatggtgatcttccgcgagaactcggaagacatctatgccggcatcgagtgggaagccgaaagcgaaggcgcgaagaagctgatcgccttcctgcagaacgaaatgggcgtgaagaagatccgcttcccggaaacgtccggcatcggcatcaagcccgtctcgaaggaaggcacgcagcgcctggtgcgcaaggcgctccagtacgcgatcgacaacgacaagccgtcggtgacgctcgtgcacaagggcaacatcatgaagttcaccgaaggcggcttccgcgactggggctatgaactcgcgcagcaggaatttggcgcggaactggtcgatggcggcccgtggtgcaagttcaagaatccgaagactggccgcgatatcgtcgtcaaggacgctatcgccgacgcattcctgcagcagattctgctgcgtccagctgaatattcggtgatcgccacgctgaacctgaacggtgactacatctccgacgccctggccgcccaggtgggtggcatcggcatcgcaccgggcgcgaacatgtccgattcggtcgccatgttcgaagccacgcacggcaccgcgccgaagtatgcaggcaaggactacgtgaatccaggttcggaaatcctctccgcggaaatgatgctgcgccacatgggctggaccgaagcggccgacctgatcatccgctcgatggagaagtcgatccagtcgaagaaggtcacgtacgacttcgcccggctgctagaaggtgcgacgcaggtgtcgtgctcggggtttggtcaggtgatgatcgacaatatg

SEQ ID NO: 56 - DNA, 1080 bp, Arabidopsis thaliana
atggcttcctctatgctctcttccgctactatggttgcctctccggctcaggccactatggtcgctcctttcaacggacttaagtcctccgctgccttcccagccacccgcaaggctaacaacgacattacttccatcacaagcaacggcggaagagttaactgcatgcaggtgtggcctccgattggaaagaagaagtttgagactctctcttaccttcctgaccttaccgattccggtggtcgcgtcaactgcatgcaggccatgggtgaacctaacctcaaccccgcctataccctcgaccaggcgatcgccaatttgcaacaaacagaagatgccagtgcccgttactatgcggcctggtggattggtcgttttcgcgctgctcaaccggaaaccattgctgctttgttggtcgccttggaagatgaaactgatcgctccccggacggtggttatcccctgcggcgtaatgcggctaaagcgttgggaaaattaggcgatcgccaagtggtgccggccctaatcaaagccttggaatgtgaagattactatgtgcgagagtcagcggcccaggcgctggaaggtttgggggatgctagagcgatggcacctctaatggccaagttaacggggggattagcagcggcccagcttgtggagggtaaaccccatttagcccaaccctacgaagcgattattgaagccctgggtactctccaagctgtggagtccattggtttaattgaaccgtttctagagcatttttccccgaaagtccaatacgccgccgccagggccctatttcagttaactggggataaccgttacggcgaccttctcattactgctctgggggggacagacttacaattacgccgttccgccatgatggatttgggagccactggctacttgcccggcgcccaggcgatcgccaaagcctttgcagaaaatagcctcaagttgatcgccctgcgagatttgtgggccacccatcgccaaaggcaagcaagttctgaatcgaaggcgctcagtccagctagccgacaaatattggaattaatggatagtttactc

SEQ ID NO: 57 - DNA, 1080 bp, Arabidopsis thaliana; identical to SEQ ID NO: 56

SEQ ID NO: 58 - DNA, 880 bp, Glycine max
accatgaaaggagaatacgtagagcaacagcaacaacatcctaagagtgaaacaccacctagtatgttctcaaagcttcagcctcagcaccatcctttcccgcaccaccctttccaactctccgccgaggatgccaccaccatcaccccgagcaccgctcagaaggccaactcctccggcggcgacggcgcgaccatcgaggttgttcggcgtcccaggggacgtccgcccgggtccaaaaacaagcccaagccaccggttatcataacccgtgacccggaacccgctatgagtccctacattttagaagtgtctggcggaaacgacgtcgtcgaggccatcgcgcagttcagtcaccgcaagaacatgggaatctgcgtcctcacgggttctggaaccgtcgctaacgtcacgctccgtcaaccttccaccacgcccggcaccaccgttacttttcacggccgtttcgacatcctttctgtttccgccaccttccttccgcagcagtccggcgcttctccggcggttcccaacggattcgccatctcgctcgccggaccgcaggggcagatcgtcggaggacttgttgccggcgggctgatggctgccgggactgtttttgtgatcgctgcctcgttcaacaacccggcataccacaggcttccgccggaggaagagggcgcctccgccggagatggacattcgccgccagtctccggcggcggagacagcgggcatggacaggcggagtcgtgtggaatgtccatgtacagctgtcacttgccctctgatgtgatttgggctccaacggctagaccaccgccgccgccttactaggcgccaggcctggtagtctgattaattaagcgatcgcgggccc

SEQ ID NO: 59 - DNA, 1092 bp, Arabidopsis thaliana
atggggaaaggagggatgtctcaaggagaaggctcaaaggttgaagaagaaaacatggctgcttggttggttggtatcaataccctcaagatccaaccttttcttcttccttccgttggtcctcatgatgtgagagttaggatgaaagctgttggtatttgtggaagtgatgttcattaccttaagaccatgagatgtgcggattttgtggtgaaagagccgatggtgattggacatgaatgtgctgggatcattgaagaagtaggtgaagaagtgaaacatttagtggttggtgaccgtgtagctcttgaacctgggattagttgttggagatgcaatctctgcagggaaggacgatacaacctttgtccagaaatgaagttctttgcaactccaccggttcatggctctttagctaaccaagtggtacaccctgcggacctatgcttcaaattgcctgagaatgtgagtttggaggaaggagcaatgtgtgaaccacttagtgttggtgtccatgcttgtcgccgagctgaggttggtcctgaaacaaacgttttggtaatgggagctggacctattggccttgttacaatgttggctgctcgggctttcagtgtgcctagaattgttattgtggatgttgatgagaaccgtttagccgtagcaaaacagctcggcgcagatgagattgtacaagtgacaacaaacttagaggatgttggttctgaggttgaacagattcagaaagctatggggtcaaacatcgatgtaacattcgactgtgcgggttttaacaaaaccatgtcgacagcattagcagccactcgttgtggcggtaaagtctgtcttgtcggaatgggtcacggtataatgactgtccctctcactcctgcagctgcaagggaggtagatgtggtgggtgtgttcaggtacaagaacacatggccattgtgtcttgagttcctgacaagtggtaagattgatgtaaagccactcataacccacagattcggtttctctcaaaaggaagtggaagatgcctttgaaaccagtgctcgtgggagcaatgccatcaaagttatgttcaatctc

SEQ ID NO: 60 - DNA, 1104 bp, Arabidopsis thaliana
atgaggaagatggtgagagatctcaaggactcttcttctatgattgagcttagagatttccctggtggaccttcgacgtttgaactcaccatgaaattttgctacggcattaatttcgatatcactgcctttaacgtggtctctctccgttgcgctgctggttatcttgagatgactgaggactacaaagaacagaacttgatctttcgagccgagaattacctcgaccagatcgtttttcgcagttttcatgaatctgtcctagtactttgctcctgcgagacgcaagagattgctgaaacatatgaaattcctgaccggtgcgtggaggccatcgccatgaatgcttgcagaaagcagttagtatcaggtttatcagaggagctcaaggggagagattgtctcgagatgtggactgaagaactctctgctctcgggattgattactacgtccaagttgtatctgcgatggcgaggttaagcgtgcggtcagagagtatcgtcgcttctctggtgcattacgctaaaacatcattaaagggtatcatcgatcgaaactgccaggaacagaggaaaatcgttgaagccatggttaaccttttgccgaatgacgaaaaaggatcttactctttatcaattattcctctcggtttcctctttggaatgctcaaggtcggaactataatagatatagagatctcttgcaggctcgagcttgaacgtagaatcgggcatcagttagagaccgcgtctctcgatgatctgcttataccttctgtccaaaacgaagattcaatgtacgatgtggataccgtccacaggatactcacattctttcttgagaggattgaagaggaagatgatgaatgtggttacgattcggattccactggacaacacagttcgttgctgaaagtgggacggatcatggatgcttacttggttgagatcgcaccggatccatacctgagtctacacaagtttacggctattatagagacactacccgaacactcacgtatcgttgacgatgggatctacagagccattgatatgtatctcaaggtaaacaaaaacacaattgaacaaagtctttttatgttt

SEQ ID NO: 61 - DNA, 861 bp, Arabidopsis thaliana
atgtctgaggcattggaagatgttccttcaatgaaaggagggtgtgaagaagaagaagaagggttgaacctgaaggctactgagctgaggcttgggttaccagggtgtgagtcaccagagagggagggtgcgtttaggagtgtggtggtgtctggggccaagaggggtttctctgatgccattgatgaaaactggaatggtggatctgaaaaagatgctgccttgttttctccaaggggtgctgttagtgttagtgctgccaagtctctcactctcactgcaacagactgcaccaaccaaccaactgctttgggtgcttctgttctcaaggaaactgttccacgctctccaaaaccattgcatgagaaaaagccccagatttctgctccagctgctaaggcgcaggttgtgggatggccaccaatccgttcattcaggaagaactcaatggcttctcagcctcaaaagaatgatactgatgcagaagccaagtctggatgcctttatgttaaagtcagcatggaaggcgccccatacttgaggaaagtggatctgaatagttttaccacttacaaggacctctctttggcacttgaaaagatgtttagttgttttacactcagtcaatgtggctcttatggggtttctagtcgagaaaatttaagtgaaagtagattgatggatctccttcatggttcagaatatgttcttacctatgaagacaaggacggagattggatgctagttggtgatgttccgtgggagatgttcactgagtcttgcaagaggctgaggataatgaagagttttgaagcaattgggctagcacctagagccatggaaaagtgcaaaagtcgtaac

SEQ ID NO: 62 - DNA, 357 bp, Arabidopsis thaliana
atgtcaactttcttgataaggatacttcttcctttgcttatcatagcaatgactcttcctcgacgttcagaggcagagtcggaacaatggtgcatagcggatgaacaaacgccagacgatgagttgcaagcagccttagactgggcttgcggaaaaggtggagcagactgcagcaaaatgcagcaggaaaaccagccttgcttcttgcctaacacaatcagagatcatgcctcctttgctttcaacagttactaccaaacttataaaaacaaaggtggttcttgttacttcaaaggagctgccatgatcactgagcttgaccccagccatggttcttgccagtatgagtataacccc

SEQ ID NO: 63 - DNA, 276 bp, Arabidopsis thaliana
atggctttgttcttatctcctaaaaccatcactcttctcttcttctccctctccctcgcactctactgcagcatcgatcctttccacactgcgccatttccgatttccccaatttcgtctctcacgaagttatctctccacgtcccgacgaagttccatgggagagagattcacaaaattcacttcagaaatcaaagattctgttttttaaccaaatccaaggtccagagagcgtcgcctttgattctctcggacgtggtccgtacacggcgttgc

SEQ ID NO: 64 - DNA, 947 bp, Arabidopsis thaliana
ttttttatatggatgttgccgcgatggcgagatgtgtgggaaggtgctacgtttcgccggcgttcggtgagtctgaatcgcaccggttatcggagcggcggtttctgaaattgtctagctccacgaattcggatcccgccggtagtaaaagtttgaagcttcgcgggaaaattcatcggagaatgagctacttccgtccgatcatggcaaaagatgaatccatttcatcgcggtccggtgaaacgaagcaaatcaatggaaagcaaaagaacattgtctggcatgattgtcccgttactaaatccgacaggcaagaattaattaagcaaaagggatgtgtgatttggattactggcttaagtggttcaggtaaaagtagtctggcatgtgctcttagtcgagctttgcacaatcgtggaaagctttcgtatatacttgatggtgacaatgttcgacatggtttaaacagcgatcttagtttcgaagcagatgatcgagctgaaaacattcgaagagttggtgaagtggctaaactgtttgcagattctggtattatctgtattgcaagtttaatatctccttaccggatagaacgagctgcctgccgtgcattattaccacaaggagatttcattgaggtatttatggatgtgccactccatgtttgtgaagctagagatccaaagggcttatacaaacgtgcacgcgctggtaaaatcaaaggttttacaggagtagatgatccatatgaagcgcctttggattgcgagattgtaatacaaaacagtagagacaaggggctttcttcttcatcttcatcttcatcttcaccttcatcttcgtcttcttctctgtgtgaaatggcagatattgttgtgtcgtacttggaccaaaatggatacctgaagaaacactccacaaaatcacgtaattgtatgtaaatgtaa

SEQ ID NO: 65 - DNA, 1611 bp, Arabidopsis thaliana
atgggaatttcaaaaccactccctctattttcgattttagtcctctatttttcactctacaccattacaccaacttcttcattagcctccctccaagatcaattcatcaactgtgtccaaagaaacacacatgtttacttcccacttgagaaaacgttctttgctcctacaaaaaatgtctctatgttcagccaagttcttgaatcgacggctcaaaatctccggttcttgaaaaaatccatgcctaaaccgggattcatattcagccctattcacgagtctcacgtacaagcttccatcatttgttccaagaaactccgaatgcatctccgtgtcagaagcggcggtcacgactacgaaggcttgtcttatgtctctcagatcgataaaccgtttatattgatggatctgtcaaagatgagacaggtcaacattaatattcaagacaacagtgcttgggttcaatctggtgccactgttggtgaactttattacaggattgcggagaagagcaaagtccatgggttcccggcgggtttgtgctcgagcttaggcataggaggacacataacaggcggtgcgtacggttccatgatgcggaaatatggtctaggtgcagacaatgttctagacgcaaagattgttgatgccaacggtaaattactcgatagagccgcgatgggtgaggatacattttgggctattagaggaggcgctggagggagttttgggataattctagcatggaagatcaagcttgttcctgttcctaagaccgtgaccgtctttaccgtcaccaaaacgttacaacaagacgtgggtaacaagattatctcaaagtggcaaagagttgcggacaagcttgttgaagagctattcatcagagtgctcttcaacgtagctggaaccggtgggaacaagactgtgacgacgtcgtacaatgctctgtttcttggcgggaaaggaacgctgatgaacgttatgaagaagagtttccccgagctagggctaacatttaaagattgtatcgaaatgagctggcttgaatccattgcttacatttctggattcccgacccacacgcctactaatgttttgcttcaagggaagtctccgttcccaaaggtcagcttcaaagccaaatcggatttcgtgaaaaccccgattcccgaatccgggcttcaagggatcttcaagaagctacttaaagaagatattccattgatgatatggaatccttacggaggaatgatggcgaaaatccccgaatcccaaatcccttttccgcatcgaaaaggagtcctcttcaaggttcagtacgtaacaagttggctagacagtgacaagagaccgagcagacacatcaactggatcagagatctctatagttacatgacgccttatgtctcaagtaacccacgagaagcttacgtgaactaccgtgatttagacctgggaaggaacacgaaagacgtgaaaacatgcatcaaacaagctcaagtctggggagctaactacttcaaaaacaatttcaacagattgatgatgattaaagcaaaggttgatccagagaacttctttagacacgagcagagcattccacctatgatg

SEQ ID NO: 66 - DNA, 978 bp, Arabidopsis thaliana
atgtctttaaccacagtccctacgctcgccatcagatccggaccatccggtcatcactcgatgccggttcttggttttggaaccgccgcttctccgctaccggaaccaacgatgctgaaagagacggtgattgaggctattaagcttggttatcgccatttcgacacctctccaaggtaccaaacggaggagccgatcggcgaagctttagcggaggcggtttcactcggcttagttcgatctcgatctgaattctttgtcactaccaaactttggtgtgctgatgctcatggtggtctcgtcgtaccggcgatcaaacggagtttgaaaaaccttaaactggactatcttgatctttatataattcattggccggttagctcgaaacctggtaaatacaagtttcctattgatgaagatgattttatgccaatggatttcgaagtagtgtggtctgaaatggaggagtgtcagagacttgggctcgcaaaatgcataggagtaagcaatttttcatgtaagaagcttcaacacatactctctatcgcgacaatcccgcctagcgtcaatcaagttgagatgagtccaatatggcaacaaagaaagctaagggagctttgtagatcgaacgacattgttgtcacagcgtactcggtgttgggatctagaggagctttttggggaactcccaaaattatggaatctgatgttctcaaagaaatagcagaagcaaaggaaaaaacagtggcccaggtgagtatgagatgggcttatgaacaaggagtgagcatggtagtgaagagctttaccaaagagagattagaagagaatctaaagatatttgattggtctttgacagaggatgagacacagagaatttcaactgagattcctcagttcagaaacgtccacggagaggtttatacctctaagaaaggtcccatcaaatctgtcgccgagatgtgggacggggagatc

SEQ ID NO: 67 - DNA, 1140 bp, Arabidopsis thaliana
atgatatgtatcgacaactccgagtggatgcgaaacggagattactctccgtctaggttacaggcgcaaacggaagctgttaatcttctttgcggagccaaaacccagtcgaatccggagaatacggtggggattttgacaatggctggcaaaggagttagagtattgactactcctacctctgatcttggcaaaattctggcctgtatgcacggccttgatgtgggaggagagatcaacttaaccgcagctatccagatcgcccagctagctcttaagcatcgccaaaacaagaatcaacgccaaaggattattgtttttgctggaagtccaatcaagtacgagaagaaggccctagagatagttggaaaaaggctgaagaagaatagtgtctctcttgatattgtcaatttcggggaggatgatgatgaggaaaagcctcagaaactcgaggcgctccttacagctgtgaataacaatgacggtagccacattgttcatgttccttctggagccaatgctctctcagatgtgcttctcagcacacctgtattcacgggtgatgagggtgcaagtggctatgtttctgcggcagctgctgcagcggccgcaggtggggacttcgactttggtgtggacccaaatatcgatccagaacttgctcttgcccttcgggtctccatggaggaggagagagcaagacaagaagctgctgccaagaaggcggccgatgaggcaggtcagaaagacaaagatggggacacagcttccgcctcacaggagacagttgctaggacaactgacaagaacgctgaaccaatggatgaggacagtgcgttgctagatcaggcaattgctatgtctgttggtgatgtgaatatgtcagaagcggctgatgaggaccaggatctggctttagctctgcaaatgtcaatgagtggggaagagtcaagtgaagctacaggtgctggaaacaacctcttgggaaatcaagccttcatatcgtctgttctctcatcgcttcctggggtggatcccaatgatccggcagttaaagaactactagcgtctctgccagacgagtcaaagcgtaccgaggaggaagagagtagtagcaaaaaaggcgaggatgagaagaag

SEQ ID NO: 68 - DNA, 1533 bp, Arabidopsis thaliana
atggagattttgacgagcatagctattacagtagcaacaacgatcttcatcgttttgtgtttcactatctatcttatgatcagaatctttaccgggaaatcaagaaacgacaagagatatgctccagtgcatgccacggtctttgatcttctcttccacagcgacgagttatacgattacgagacagagatcgcgagagagaagccgacttacaggtttttgagtccaggacagagcgagatattaactgcagatcctcgtaacgtggagcatattctcaagacaagattcgataactatagtaaaggacacagtagtagagagaatatggcggatcttctaggacatgggatctttgctgttgatggagagaaatggagacaacagaggaagctttcgagctttgagttctctactagagttttaagagattttagctgctctgtttttaggagaaatgcatctaagcttgttggttttgtctcggagtttgctctctctggaaaagcttttgatgctcaagatttgttgatgagatgtacactggactccatctttaaagttgggtttggtgtggagttaaaatgtttggatgggtttagcaaagaagggcaagagtttatggaagcttttgatgaaggtaacgttgcaactagttccagattcatcgatcctctttggaagctgaaatggtttttcaacattggatcacaatctaagctcaagaagagcattgctactatagataaatttgtctatagtctcattaccactaaaaggaaagagcttgctaaggaacagaacactgttgttagagaggacatactatcgagattcctagtggagagtgagaaagatccggagaacatgaatgataagtacctgagggatataattctgaacttcatgattgctggtaaggacacaaccgctgcactactctcttggttcttgtacatgctctgcaaaaacccacttgttcaggagaaaatcgtacaagaaatcagagatgtgacatttagtcacgagaaaacgaccgatgtaaatggtttcgttgaaagtattaacgaagaggctcttgatgagatgcactacctccatgcagccttgtctgagaccttgaggctctaccctcctgtgcctgtggacatgaggtgtgcagaaaatgatgacgttcttccagatggacatagagtgagcaaaggggataatatctactacatagcctatgcaatgggtaggatgacttacatttggggtcaagatgctgaagaattcaagccagagagatggctcaaggacggcttattccaacccgaatcaccattcaaattcataagctttcatgctggtccaagaatctgtcttggcaaggatttcgcataccggcagatgaagatagtatcaatggcacttcttcacttctttcgcttcaaaatggctgatgagaacagcaaggtgtattacaagagaatgcttactcttcatgtcgatggaggactccatctctgtgcaatcccgaggacaagcact

SEQ ID NO: 69 - DNA, 993 bp, Arabidopsis thaliana
atgacggcaattccaaacgtcgtcgatattgaatcttcttcctcttcgctttgtcaagagacggcaacggagaccgtcaccgttgaaagaggctcgtctgattcatcttcaaagccagacgacgtcgttttactaatcaaggaagaggaggatgacgccgttaacttgtcacttggtttttggaaattgcacgagataggtttaataacaccgttcttgagaaagacgtttgagatcgtcgatgacaaagtaacagacccggttgtatcatggagcccgacccgtaaaagctttatcatttgggattcttacgagttctcagagaatctacttcccaaatacttcaagcacaagaacttctccagttttattcgtcagcttaactcttacggttttaaaaaggtcgattcagataggtgggaatttgctaacgaagggtttcaaggagggaagaaacatttgcttaagaacatcaagaggagaagcaaaaacactaaatgttgtaacaaggaagcgagtaccaccacgacagagactgaggttgagtcattgaaggaggaacagagtccaatgagattggagatgttgaagctgaaacaacaacaagaagaatctcaacatcagatggtcactgtgcaggagaagatccacggagttgataccgaacaacagcatatgcttagtttctttgcaaagttggctaaagatcaaagatttgtagagagactggtgaagaagagaaagatgaaaatacagagagagctagaagcagctgaattcgtgaagaagctcaagttgcttcaggatcaagaaactcaaaagaacttgttagatgtagaaagagaatttatggccatggctgcaacagaacacaatcccgagcctgacattttggtgaacaatcaaagcgggaatacgagatgtcagcttaactcagaggacctacttgttgacggtggctcaatggatgtaaatgggaggatagagatagag

SEQ ID NO: 70 - DNA, 894 bp, Arabidopsis thaliana
atgacggaagagtttgagatcgcaggaatctccaccggagcttggtggagctcgccaacaaacaccgccgcagtattctctggctactcgctgccatgttccactgagattagccctgatgtcacaaatttcggatggcaaaacttcgataacaagattaacgatcataatgatggttgtatgaacatgcataatagtttcttcgaaggactattaatcgatcctaacgatcaattactaccggatccatggtccaaaagtacaattcctaacgctaaatctgagctccttgaaaacttcccattcttagataacatgttcttggtcgattcagaagctgaatctttgttggatcatgaaatcagaaaccataagtcgtctaaggagcaaattacacaagactacaggaatcttacttcaaagaggagtgaagaattagaagagaacagcgatgagtattcaccgcgattactaaaaagaccgagactcgagacactatctccattgccaagcttcaaagttcgtaaagaaaaactcggagatagaatcactgcgcttcagcaactggtttctccatttggcaagacagatacagcttctgttctcaacgaagctgtagagtacataaagtttcttcaagaacaagtcactgtattgagtaatccagaacagaacaccataggatctgttcaacaacagcagtgttcaaacaagaaatctatcaatactcaaggagaagtagaagaagacgaatgtagtccaagaagatatgtagatctttcgagccgtggactatgtctaatgccgatctcagcttcatatcccgtggctgcagctgcggcttcggctgcagagatgaacgtacatctggtttctggcatcttccattctttg

SEQ ID NO: 71 - DNA, 906 bp, Arabidopsis thaliana
atgtcatcaagtggaaccatttggagctatgaggaagaaaaagcatttgagaatgccatagctatgcattggattgaggaatcctcaaaagagcaatgggagaaaattgcttcagcagttcccagcaaaagcatggaagatgtgaagcaacattaccaggttctagtagaggatgtaagtgcaatagaggcaggtcacatatcattcccaaactatgctgcttctgaggaaatcacatcttcaaataaggactttcatggctcttccaaggccacaagctcagataaaagatcaaattgtaattatggacgtggtttttctgggttaggacatgactccaccactcatagtagtggtaaaggaggcttgtcaaggtcatcagaacaagaaagaagaaaaggaatcccatggactgaagaggaacacaggttatttttacttggtctagagaagtttggaaaaggagattggagaagcatttcaaggaactttgtgatatctaggactcccactcaagtggcaagccatgcacaaaagtacttcataaggttgaattcaatgaatagagacaggaggaggtctagtatccatgatatcactagtgtgaacaatggagatgtggctaataaccaagcacctattacagggcagcatagtagcacaattccttcaaacacaatgggtgtaggacaatcccttaagcatagagttcagggtcacataccacctggtttaggcatgtatggaacaccagttggacatcctgtggctgctcctccagggcacatggcatctgcagttggcactcctgtcatgcttcctcctggaccccacccccatgctcatcctcatccaccttatgttcttcctcttgcttacccaatggcacctccaacaatgcatcaa

SEQ ID NO: 72 - DNA, 510 bp, Glycine max
atggctagcgatggcagcgaagagttcaggctagtgtcaccggcgttcaaaaacggggggaagttaccgaggcactacaccgacgatggtcagggtacgaagaagaacatatcccctccattggagtggtataacctcccggaggggacgaagactcttgccctcgtggtggaggatattgatgcgaccgattctggtgggcccatggtgccatggactcactgggtcgtcgcaaacatcttggccacggtgaagggcttgccggagggattttccggcaagtcggccgagatggggggcgactacgcggcgatcaaggaggggaacaatgacctgaaggtgcctgggtggaatgggcccaggctgcccacgcctggacacaggattcagtttaggctctatgctttggatgatgagctcaagcttggtaacaagttgacgaaggagaagttgttggaagataccattgaaggacatgtgttaggagaagcgaccttgatggctatattc

SEQ ID NO: 73 - DNA, 1260 bp, Arabidopsis thaliana
atggcgaacgtaatctcaatttcccattttacccttctcgcattaccttatttacttctcctcctatcttccaccgccgccgcaattaacgtcaccgccgtcctctcctctttccctaatctctcatctttctcaaacctcctcgtctcttccggcatcgctgccgaactctccggtagaaactcattaaccctcctcgccgttcccaattctcaattctcctccgcctccttggacctcacgcgccgcctacctccttccgccctagcagatctcctccgcttccatgtcctcctccagttcctttcagattccgatctccgacgtattccaccgtcaggctccgccgtcactactctctacgaagcttccggtcgtacattctttggatctggatccgttaacgtaacccgtgacccggcttcaggatccgtcacgatcggatctccagccaccaaaaacgtcactgtgttaaagcttctcgagaccaaacctcccaacataaccgtcctcaccgtggactccctcatcgtccccaccggaatcgatatcaccgcatcggagactctcactccaccgccgacgtcaacatctctctcccctccaccggcgggaatcaatctcactcagatactaatcaacggacacaacttcaacgtcgctctatccctcctcgtcgcttccggtgtcataacagaattcgaaaacgacgaacgtggcgccggcatcacagtcttcgtccccaccgactccgccttctccgatctcccttccaacgttaacctccagtcattaccggcggagcaaaaagcattcgtgttaaaattccacgtgctacattcatactacactctcggttcactagaatcaataaccaacccggttcaaccgacattagccactgaagaaatgggagccggttcatacactctcaacatctcccgggttaacgggtcaatcgtaacgatcaattcgggtgtggttttagctgttgtgactcaaacggcttttgatcaaaacccggtttctgttttcggagtatccaaagttcttttgcctaaagaactatttccaaaatcgggtcaacccgttgccacagctcctccacaggagatttctttgtcgccggagagttctagtgaacagccgtcacgactagtatcaccaccgcgtgagatagtttcttccggcgcggttaaaagaccacttggtttcttggtcttgtggtgttggtgtatagcattttgttatgttttggta

SEQ ID NO: 74 - DNA, 1647 bp, Zea mays
atggctcggagggccgcgtcctcgctcgtctcccgctgcctcctggcgagggcccctgccggcgcgccgcccgctgccccctctgcgctgcgcaggacagtgcctgcagatgggatgcacaggctgttgccaggtgtccttcagaggttcagcactgcagcagcagtagaggagcccatcacgccgtcagtccatgtgaactacacaaagctcctcattaatggcaactttgttgattccgcatccggcaagaccttcccaactctggaccctcgtacaggggaggtgattgctcatgtggctgagggtgacgcagaggacattaaccgtgcagtagctgcggctcgcaaggcttttgatgaagggccatggccgaagatgactgcctatgagaggtcccgtatcctactgcggtttgctgatttgatagagaagcacaatgacgagcttgctgctttggagacatgggacaacgggaagccatatgagcaagcagcccagattgaagtacccatggtggcccgtcttatgcgttactatgctggttgggctgataagatccatgggctcattgtgccggctgatggcccacaccatgtacagatcttgcatgagcccattggagttgcaggtcagatcatcccatggaactttcctcttctgatgtttgcctggaaagttggccctgctttggcatgtggaaatactctcgtgctcaagactgctgaacaaacccctctatcggctttgtatatctccaaattgttgcatgaggctggactgcctgagggtgttgtgaacgtcgtttctggttttggccctactgctggtgctgctcttgctagtcacatggatgttgataagatcgcatttactggatctaccgatactggaaaaattattctcgagttggctgcaaagagcaaccttaagacagtgacactggagttaggaggcaagtcccctttcatcataatggacgatgctgatgttgaccatgctgttgagcttgcgcactttgccctgttctttaaccagggacaatgctgctgcgctggatctcgcacgtttgtacatgagcgtgtttatgatgagtttgtggagaaggccaaggctcgtgcattgaagcgcgtcgttggtgatccgttcaggaaaggtgttgaacagggcccgcagattgacgacgagcaattcaacaagatcttgcgctacattaggtatggtgttgacggtggagctacccttgtgacgggtggtgataggttgggtgacaagggtttctacatccagccaacgattttctcagatgtccaggacggcatgaagattgctcaggaggagatatttgggcctgtgcagtcgatcctcaagttcaaagacctcaatgaggttatcaagagggcaaacgcgagccagtatggattggccgccggcgtgttcaccaacagcctggacacggccaacaccctgacgcgcgcgctcagggccgggaccgtctgggtgaactgcttcgacgtcttcgatgctgcgattccgtttggtgggtacaagatgagcggcatcgggagggagaagggcgttgacagcctgaagaactacctgcaggtgaaggcggtcgtcaccccaatcaagaacgccgcgtggttg

SEQ ID NO: 75 - DNA, 1647 bp, Oryza sativa
atggctgccgctgctgcaaggaggggctcatcgctgctctctcgctgcctgctgtccaggcccgccgccgccgcctcgcctgctgtcccctctgcgctccgcagggcagatgggacacaaggattgttgccgggaatccttcagaggttcagcactgcagcagtagcagaggagcccatatcacccccagtccaagtgaactacactcagctcctcattgatggaaaattcgttgattcagcatctggcaaaactttcccaactctggaccctcgtaccggggagctgattgcccatgtggctgaaggcgatgcggaggatattaaccgtgcggttcatgcggcccgcaaggctttcgatgaagggccatggccaaagatgactgcctatgagagatcccggattctgttgcggtttgctgacttgattgagaagcacaacgatgaaattgctgcattggagacatgggacaacggcaagccgtatgcgcaagctgccaacattgaagtgccaatggtggcacggctgatgcggtactatgctggttgggctgacaagatccatgggcttgtcgtgccggctgacggcccacaccatgtacaggtgctgcacgagcccattggtgtcgcaggtcagatcatcccatggaactttccgcttctgatgtttgcgtggaaagttggccctgctttggcttgtggaaacactgttgtgctcaagacggctgagcaaactcctctgtctgctctatttgcttctaagctgttgcatgaggctggactcccagacggtgttgttaacgtggtatctggttttggacctactgctggtgctgctcttgctagtcacatggatgtcgataagattgcattcactggatcgaccgatactggaaaagtcgtccttgagttggctgcaaggagcaaccttaagtcagtgacactggagctaggaggcaagtctcctttcatcatcatggatgatgctgatgttgaccatgctgttgagcttgcgcattttgcactgttctttaaccagggacaatgttgctgtgctgggtctcgtacatttgtgcatgagcgtatctatgatgagttcgtggagaaggccaaggctcgtgctctcaagcgtgtggttggtgatccattcaagaatggtgttgaacagggccctcagattgatgacgagcaattcaacaagatcttgcgctacatcaagtatggtgttgacagtggagccaaccttgtgactggtggcgacagattaggtgacaaaggttactacatccagccaacaattttctcggatgtacaggataacatgaggattgctcaagaagagatatttggccctgtgcagtccattctgaagttcaatgatctgaacgaggtcatcaagagggcaaatgcaagccagtacgggctggctgctggggtcttcaccaacaacctgaacacggccaacaccctgacccgcgcgctcagggtcgggaccgtgtgggtgaactgcttcgacgtcttcgacgccgcgatcccgttcggcggatacaagcagagcggcatcgggagggagaagggcatcgacagcctgaagaactacctgcaggtcaaggccgtcgtcacgccgatcaagaacgccgcgtggttg

SEQ ID NO: 76 - DNA, 165 bp, Oryza sativa
atggcgggaacggcgaactgcatcgacatcctcatcgccatcatcctcccgcccctcggcgtcttcctcaagttcggatgcgggcatgagttctggatctgcctgttgctcaccttcctcggctacatccccggcatcatctacgccatctacgccatcaccaag

SEQ ID NO: 77 - DNA, 165 bp, Saccharomyces cerevisiae
atggattctgccaagatcattaacattatattatcccttttcttaccaccagtcgccgtttttctagcccgtgggtggggtactgactgtatagtggatatcattttgaccattttggcttggttcccaggtatgctatatgccttgtacattgtcctacaagat

SEQ ID NO: 78 - DNA, 1218 bp, Arabidopsis thaliana
atggatccttcatttaggttcattaaagaggagtttcctgctggattcagtgattctccatcaccaccatcttcttcttcatacctttattcatcttccatggctgaagcagccataaatgatccaacaacattgagctatccacaaccattagaaggtctccatgaatcagggccacctccatttttgacaaagacatatgacttggtggaagattcaagaaccaatcatgtcgtgtcttggagcaaatccaataacagcttcattgtctgggatccacaggccttttctgtaactctccttcccagattcttcaagcacaataacttctccagttttgtccgccagctcaacacatatggtttcagaaaggtgaatccggatcggtgggagtttgcaaacgaagggtttcttagagggcaaaagcatctcctcaagaacataaggagaagaaaaacaagtaataatagtaatcaaatgcaacaacctcaaagttctgaacaacaatctctagacaatttttgcatagaagtgggtaggtacggtctagatggagagatggacagcctaaggcgagacaagcaagtgttgatgatggagctagtgagactaagacagcaacaacaaagcaccaaaatgtatctcacattgattgaagagaagctcaagaagaccgagtcaaaacaaaaacaaatgatgagcttccttgcccgcgcaatgcagaatccagattttattcagcagctagtagagcagaaggaaaagaggaaagagatcgaagaggcgatcagcaagaagagacaaagaccgatcgatcaaggaaaaagaaatgtggaagattatggtgatgaaagtggttatgggaatgatgttgcagcctcatcctcagcattgattggtatgagtcaggaatatacatatggaaacatgtctgaattcgagatgtcggagttggacaaacttgctatgcacattcaaggacttggagataattccagtgctagggaagaagtcttgaatgtggaaaaaggaaatgatgaggaagaagtagaagatcaacaacaagggtaccataaggagaacaatgagatttatggtgaaggtttttgggaagatttgttaaatgaaggtcaaaattttgattttgaaggagatcaagaaaatgttgatgtgttaattcagcaacttggttatttgggttctagttcacacactaat

SEQ ID NO: 79 - DNA, 530 bp, Arabidopsis thaliana
ggcgtgcgggcgcgccaccatggatttaggaaggtttccaataatctcaatcctcgaagacatgcttgaagtccccgaagaccacaacaacgagaagacccgcaacaacccttcacgagtttacatgcgagacgctaaggcaatggctgctacacctgctgacgtcatcgagcaccctaacgcatatgcattcgtcgtggacatgcctggaatcaaaggagatgagatcaaggttcaggtcgagaacgacaatgtgcttgtggtgagtggagagaggcagagagagaacaaagaaaacgaaggtgtgaagtatgtgaggatggagagaagaatgggtaagttcatgaggaagtttcagttgcctgaaaatgcagatttggacaagatctctgctgtttgtcatgacggtgtgttgaaggttactgttcagaaacttcctcctccggaaccaaagaaaccaaagacaattcaagttcaagttgcttaggcgccaggcctggtagtctgattaattaagcgatcgcgggccc

SEQ ID NO: 80 - DNA, 492 bp, Zea mays
atggccgacgacggcgggagccacgagggcagcggcggcggcggaggcgtccgggagcaggaccggttcccgcccatcgccaacatcagccggatcatgaagaaggccgtcccggccaacggcaagatcgccaaggacgctaaggagaccctgcaggagtgcgtctccgagttcatatcattcgtgaccagcgaggccagcgacaaatgccagaaggagaaacgaaagacaatcaacggggacgatttgctctgggcgatggccactttaggattcgaggagtacgtcgagcctctcaagatttacctacaaaagtacaaagagatggagggtgatagcaagctgtctacaaaggctggcgagggctctgtaaagaaggatgcaattagtccccatggtggcaccagtagctcaagtaatcagttggttcagcatggagtctacaaccaagggatgggctatatgcagccacagtaccacaatggggaaacc

SEQ ID NO: 81 - DNA, 840 bp, Zea mays
atggactccagcagcttcgtccctgccgccggcgcggagaatggctcggcggcgggcggcgccaacaatggccgcgttgctcagcagcaggcgccggcgatccgcgagcaggaccggctgatgccgatcgcgaacgtgatccgcatcatgcggcgcgtgctgccggcgcacgccaagatctcggacgacgccaaggagacgatccaggagtgcgtgtcggagtacatcagcttcatcacgggggaggccaacgagcggtgccagcgggagcagcgcaagaccatcaccgccgaggacgtgctgtgggccatgagccgcctcggcttcgacgactacgtcgagccgctcggcgcctacctccaccgctaccgcgagttcgagggcgacgcgcgcggcgtcgggctcgtcccgggggccgccccatcgcgcggcggcgaccaccacccgcacccccactccatgtcgccagcggcgatgctcaagtcccgcgggcccgtctccggagccgccatgctaccgcaccaccaccaacaccaccacgacatgcagatgcacggcgccatgtacgggggaacggccgtgcccccgccggccgggcctcctcaccacggcgggttcctcatgccacacccacagggtagtagccactacctgccttacgcgtacgagcccacgtacggcggtgagcacgccatggctgcatactatggaggcgccgcgtacgcgcccggcaacggcgggagcggcgacggcagtggcagtggcggtggtggcgggagcgcgtcgcacacaccgcagggcagcggcggcttggagcacccgcacccgttcgcgtacaag

SEQ ID NO: 82 - DNA, 672 bp, Oryza sativa
atgccggattcggacaacgagtcaggggggccgagcaacgcgggggagtacgcgtcggcgagggagcaggacaggttcctgccgatcgcgaacgtgagcaggatcatgaagagggcgctcccggcgaacgccaagatcagcaaggacgccaaggagacggtgcaggagtgcgtctcggagttcatctccttcatcaccggcgaggcctccgacaagtgccagcgggagaagcgcaagaccatcaacggcgacgacctcctctgggcgatgaccacgctcggcttcgaggactacatcgacccgctcaagctctacctccacaagttccgcgagctcgagggcgagaaggccatcggcgccgccggcagcggcggcggtggcgccgcctcctccggcggctccggctccggctccggctcgcaccaccaccaggatgcttcccggaacaatggcggatacggcatgtacggcggcggcggcggcatgatcatgatgatgggacagcctatgtacggctcgccgccggcgtcgtcagctgggtacgcgcagccgccgccgccccaccaccaccaccaccagatggtgatgggagggaaaggtgcgtatggccatggcggcggcggcggcggcgggccctccccgtcgtcgggatacggccggcaagacaggcta

SEQ ID NO: 83 - DNA, 531 bp, Oryza sativa
atggccgaccaccatggcggccaccacgccgacgggcatcgccggcagcagcagctgcagggggaggcggcggatcaggcggcggcggagatcatcaaggagcaggacaggttgctgccaatcgcgaacgtggggcgaatcatgaagcagatcctcccccccaacgccaagatctccaaggaggccaaggagacgatgcaggagtgcgtctcggagttcatcagcttcgtcaccggcgaggcctccgacaagtgccacaaggagaagcgcaagacggtcaacggcgacgacgtctgctgggccttcggcgccctcggcttcgacgactacgtcgaccccatgcgcaggtacctcaacaagtaccgcgagctcgagggcgaccgcgctgccgccgccgccacctcccgctccggcgccggcgccgccgcgggccccgaccacccttcctcctcctcctccgccgccgccgccaccgccggtcatttcatgttcaacgccatggacaggtcgacggatagctccaggcagttc

SEQ ID NO: 84 - DNA, 279 bp, Oryza sativa
atggcgtccttcgctcgccgtgccatgagcttagctcagatcccatctgctcgtatttcctctggagccgcttctattggtcagcgtcgttgcctcgccggcgccgctgatcaccatggatctaccaaggttgacttctggaaacagcccacgaacccaggaaactggaaagaggagcattttgtgcttatttctctgtctggctggggcttacttttctacagtggatacaagctcgccactgggggaaaaaaagagacgcctgtggagagtacacaa

SEQ ID NO: 85 - DNA, 429 bp, Oryza sativa
atgtcggaggggttcgacgggacggagaacggcggcggcggcggcggaggcggagtagggaaggagcaggaccggttcctgccgatcgccaacatcggccgcatcatgcgccgggccgtgccggagaacggcaagatcgccaaggactccaaggagtccgtccaggagtgcgtctccgagttcatcagcttcatcaccagcgaagcaagcgacaagtgcctcaaggagaagcgcaagaccatcaatggggacgacctgatctggtcaatgggcacgctcggattcgaggactatgtcgagcctctcaagctctacctcaggctctaccgggagacggagggtgacacaaagggttcaagagcttctgaactgccagtaaagaaagatgttgtacttaatggagatcctggatcatcgtttgaaggcatg

SEQ ID NO: 86 - DNA, 888 bp, Oryza sativa
atggatccgatggatatcgtggggaagtccaaggaggacgtctccctccccaaatcaacaatgtttaagattataaaggagatgttgccccctgatgttcgagtggcaagagatgcacaagatcttcttgtggaatgctgtgtagagttcatcaacctcctatcttctgaatccaatgaagtttgcagccgagaggacaagaaaactattgctcctgagcatgttcttagagctctgcaggatcttggctttagggagtacattgaagaggttcaagcggcctacgaacaccataagcatgataccctggattctccaaaagcaagcaaattcactggtgtggagatgacagaggaacaagctgtagctgagcaacagaggatgtttgctgaggcccgagcaaggatgaacaatggtgccgccaaaccgaaggagccagaacctgaagcgcagcaacaaacacaacagccaccacagcctcagctgcaccctcaaccacagcaacccctgcagcctcaacttcagctccatcctcaaccacaacaacagccctcacagctacatcctcaacagctgctgcatcctcaatcgcagcaaactccgcagcctcaacctcaggtccaccctcaaccacagcagcctccacagctgcaaccgcaacctcagcttctccagcaaccgcagctgccccaacagctgcagccgcaatctcagctccccccacaaccgcagcagcccccacagctgcagctgcaatctcagctccacccacaaccgcagcagcccccacagctgcagccgcaacctcagctccatcagcaaccgcagccgcaggcagagctgcaatcacagtcacaaccacaaacagaacatggcttggacagttca

SEQ ID NO: 87 - DNA, 762 bp, Zea mays
atgaggaagaagctcggcacccggttccccgcggctcgaatcaaaaagataatgcaagcagatgaggatgttggaaagattgcactagcagttcctgttttagtttcgaggtctcttgaattgtttttacaagatttaattgaccgtacttatgaaattactcttcaaagtggagcaaagacactgaattccttccacctgaagcaatgtgtgaagaggtacagttcttttgatttcctaactgaagttgtcagcaaggtaccagatcttggtggcgctgattcctgtggagatgaaagaggattacctagaagaagaaagtcaaatggcagtgacccagagaatgatgaatcaagatctagtaaaatggccataagaaatgcaaacatcagccccagaggacgtgggaggggtcgaggcagaggacgaggtcggccaccaaccaagagaaaggaggttggttatgtacaatttgaagatgagagcagcatgtttgctgaacaaggtgagcccttgccaggagaggaaacagttcaagagatcaatggcaacgagaccatgcctcaaagcacgcaacctccagtagaggctccgccaacagcccttgcacaagctacaacaagttctaaggcggaagaagcgaacagtgatcatcagtcagattggcctatgccagatgccattggaagcatcggtgtcgtgccatctggttttggacatctgacagtgcaggttgaagatgaggactacgacaatgaggat

SEQ ID NO: 88 - DNA, 1053 bp, Arabidopsis thaliana
atgtcgccggagatggaattcgtgaaggttttgggaaagggtacttacggctccgtcgagctcttcagccacaaacaaaacgacggatcgttgctctacaacgcagtgaagatcatggactctgagaactacggttctatagaccaagagtttcgaattctgtcggaactcagaggatgtccttgtatcgtgcaattgtgtgggaactctcttgttcaaggaattgattgcaatggaaaaaaagtttacatgatgtcaatggagtatgcagctgctggtactctaactaatttcatcaaaagaaaccgaacgaagttgtcggattctgttattaaagacttcactcgtatgattctacaaggattggtctcgattcataatcatggttatgttcattgtgatcttaaaccggacaatatccttctttttcctctttacgataaagatacgtggaattgttcttacgagttgaagatttcggatttcggaatatcgacaagggccggagacaaatctggttgttggagagtcgatgaaccgtgggtgggaacgtctatctacatgtctcctgagtcagtcagcgacggcaccaccgttgagaaaaccctagatttgtggtcacttggttgcattgtgttgaagatgtataccggtaagcggccatggttagggtttgagaaagatgttaagtctcttcttttgaatcaaaaggcaccagagattccagagactctgccgtgtgatgcaaggctgtttttggagaagtgtttctcaagaaaacctgaggagagaggatcagcttcggagttgctgttgcatccgtttttgaccggagatgagaagaagggttcttccgtcgccggtggagagaggacggggatggtgttgaggctcagaaaacctccgccgatatcgaaagatattccaacgaagccacggaaattgaaggttatttcacaaaagccccaacagttaaagaaagtctcgaataaacccctaaaggtgaagattgttcctccgagacccccaagatccgattttgtccccgttcta

SEQ ID NO: 89 - DNA, 1053 bp, Arabidopsis thaliana; identical to SEQ ID NO: 88

SEQ ID NO: 90 - DNA, 1032 bp, Arabidopsis thaliana
atggcaaccatttccttctctcacaaccaccaatcctccgacaaccgccgtggtggatcccatcaccaccgtcacggccccgtcgtggaagagatcgaaggactcatcaaagttttcaacgacggctgcgtcgaaagacctcccatagttcccatcgtctcaccaaccattcacccatcttctaaagccacagcctttgacatcaaactatccaacgacacatggacacgtgtctacatccccgatgccgcagcagcctcgccgtccgttactctccctctcctcgtttacttccacggcggtggtttctgcgttggctccgccgcttggagttgctaccatgacttcttgaccagccttgccgttaaagcccgttgcgtcatcgtttccgtaaactaccgtttagcccctgaacaccgtctcccggcggcgtacgacgacggcgttaatgtcgtctcgtggctagtcaagcaacaaatatctaccggtggtggatatccttcttggttgagtaaatgtaacctctcaaacgttttcttggccggagatagcgccggagccaacatagcttaccaagtcgccgtaagaatcatggccagtggcaaatacgcaaacactctacacctcaagggcattattctcatccaccctttcttcggcggcgaatcaagaacgtcttcggagaaacaacaacatcacaccaagtcatcggcgcttactctttcagcttccgacgcatattggcgtctagctctgccacgtggagcgagtagagaccatccatggtgtaaccctctgatgagctcggcgggagcgaagttaccgacgacgatggtgttcatggcggagtttgatatactaaaagaacgaaacttggagatgtgtaaagtgatgagaagccatgggaagagagttgaaggtatagttcatggaggtgttggtcacgcttttcatattctcgacaactcgtcggtgtcacgtgatcgaatccacgacatgatgtgtcgtcttcacaacttcatacatccatca

SEQ ID NO: 91 - DNA, 279 bp, Arabidopsis thaliana; identical to SEQ ID NO: 84

SEQ ID NO: 92 - DNA, 882 bp, Arabidopsis thaliana
atggcgatccctacggagacacaacaccaggagaaggaggcttcagatgcttctgcagcagctgcacaaaagagatggactttaagcgatttcgacatcggtaagcctcttggcagaggcaaattcggtcacgtctatctcgccagagaaaaacggagcaatcacgttgtcgctctaaaggttcttttcaagagccagcttcaacaatcccaagttgaacatcagctcagaagagaagttgagattcagtctcatcttcgtcaccccaacatactccggctttatggctatttctatgatcaaaaaagagtttatttgatacttgagtatgctgctagaggcgaactttacaaggatcttcagaaatgcaaatacttcagcgaaagacgagctgctacttatgttgcctcattggcgagggctctcatctattgccatggcaagcatgtgatacacagagatattaaaccagagaatctgctaattggtgctcagggtgagctcaagattgcagactttggttggtcggtacacacatttaaccgaagaaggaccatgtgtggcacactagattaccttcctcctgagatggtcgaaagcgtagaacatgatgctagtgtagatatctggagccttgggattctctgttacgagtttctttatggtgtacctccttttgaagccatggagcactcagacacatacagaaggattgtgcaagtggatctcaagttccctcccaaaccaataatctctgcatctgcaaaggatcttattagccagatgcttgtcaaggagtcttcgcaacgtctgccattgcacaagcttctggagcatccgtggatcgtgcaaaacgctgatccttctggaatctacagagtt

SEQ ID NO: 93 - DNA, 882 bp, Arabidopsis thaliana; identical to SEQ ID NO: 92

SEQ ID NO: 94 - DNA, 1239 bp, Arabidopsis thaliana
atgggtctttgttggggatctccatctgattctcctccaacaacaacaccttcctctactggtaacatcagttcagggacttttaagtcatcaaacaacacgacgactacaggaacatcaaggggaagtaacatatctagcaatagtgggttctctgtggcaagtggtgaagatgcttaccccgatggtcagatacttcccattccgaatttgaggatattcagcttagcagaacttagagcttcaacaaggaatttcaggtctgagaatgttcttggagagggaggatttgggaaagtctttaaaggctggcttgaagacaagactccagggaaacaaagcaacggaactgtgattgctgttaagaaactgaatgcagaaagcttccaaggattcgaagaatggcaatgtgaagtgaattttcttgggagggtttctcatccaaacctcgtgaagctgttgggatactgcttggaaggtgaagagttgcttcttgtgtatgagtatatgcaaaaagggagcttagagaatcatctcttccgaaaggggtctgccgttcagccactctcatgggagataaggcttaagattgcaataggagcagctaaaggcttagcattcttacacgcttcagagaagcaagtaatttatcgagacttcaaagcgtcaaacattctacttgatgggtcatataacgcaaagatatcagattttggattggcgaaattaggaccttccgctagtcaatctcacatcacaacacgggttatgggtacacacggttacgcagctccagagtatgttgctacaggtcacttgtatgtaaagagcgatgtttacgggtttggcgttgttttggctgagatcttaactggtttacatgcgcttgatcctactcgtcctaccgggcaacacaatctaaccgaatggatcaaacctcatctatccgaaagaagaaagctaagaagcataatggaccctcgtctagaaggaaaataccctttcaaatctgctttccgagtagctcaactggctctgaaatgccttggacccgaacccaaaaaccgtccatcgatgaaagaagtggtggaatcgctcgaactcatcgaagctgccaatgagaaaccgttagaacgaaggaccactagagcttccccatccatccgtcaacaacaaggccattatcgcccgcaacaactctcttcgtttcgtcctagacaaaacgtgtctcgagctcac

SEQ ID NO: 95 - DNA, 1239 bp, Arabidopsis thaliana; identical to SEQ ID NO: 94

SEQ ID NO: 96 - DNA, 540 bp, Arabidopsis thaliana
atggcttcttctctcatcttcctcctcctcgttaccctaaccttttcagcatcaaccctaatctcagccaaatccaacacaacaacaataatcgaatcaacttgcaaaaccacaaactactacaaattctgcgtctcagctctcaaatccgacccaagaagtcccacagccgacacaaaaggtctcgcctccattatggtcggcgttggtatgacaaacgccacctccaccgcaaattacatcgctggaaacctatccgccaccgtaaaagacaccgttctcaaaaaggtcttacaagattgctccgagaagtatgctctcgccgctgattctctccggctgacgattcaagatcttgatgatgaagcttatgactatgcctccatgcatgtgttggcggcgcaggattatcctaatgtttgccggaatatttttaggcgggttaaagggttggcttatccggtggagattcgccggcgtgaagctagtctgagacgtatttgtggtgttgtctccgggattcttgatcgccttgttgaa

SEQ ID NO: 97 - DNA, 540 bp, Arabidopsis thaliana; identical to SEQ ID NO: 96

SEQ ID NO: 98 - DNA, 933 bp, Saccharomyces cerevisiae
atgctacgtataactgtcaaaactttgcagcagcgggcatccttccatcatagcttcaaacatattagcgttcctgatcttcatacccgtgctcaaaatgatcaaacaaactgttattgccaagaaataaacgcaaggctgccttcaaaaactgatccattagatcctcatatcaagcttcctcatagaacgcccaattacaataagcatgttttgctgttatcaccgggtgataggtttgctcaaccatggaaggtagcatggaatcataatttggatactaatacaaatcggccatataatgccattagtaaattgcgctcccatttaggtggttctccaggaatactaataaatgcggtgcatttgcaaaatgaatttattccaaggccaaaacaacacgatgaatggctttatttttttgttattcctgacatgaagctttatgtaattaaggaaacggacatcgaggaatttgcatcttttttagatgaaggagctattcaagcaccaaagctatccttccaggattatttaagcggtaaggccaaggcttcccaacaggttcatgaagtgcatcatagaaagcttacaaggtttcagggtgaaacttttctaagagattggaacttagtctgtgggcattataagagggatgctaagtgtggagaaatgggacccgacataattgcagcatttcaagatgaaaagctttttcctgagaataatctagccttaatttctcatattgggggtcatatttttgctggtaatgtcattttctataaactattcggcagagaaaagatgcaaaacaagctggattcattatggtttggtaaagtttacccacacaacttgaagctgttatgtgaaaacttggaaaacggtaaaatcatcgacgaaatgtacagaggtggcatatcgatgaat

SEQ ID NO: 99 - DNA, 933 bp, Saccharomyces cerevisiae
atgctacgtataactgtcaaaactttgcagcagcgggcatccttccatcatagcttcaaacatattagcgttcctgatcttcatacccgtgctcaaaatgatcaaacaaactgttattgccaagaaataaacgcaaggctgccttcaaaaactgatccattagatcctcatatcaagcttcctcatagaacgcccaattacaataagcatgttttgctgttatcaccgggtgataggtttgctcaaccatggaaggtagcatggaatcataatttggatactaatacaaatcggccatataatgccattagtaaattgcgctcccatttaggtggttctccaggaatactaataaatgcggtgcatttgcaaaatgaatttattccaaggccaaaacaacacgatgaatggctttatttttttgttattcctgacatgaagctttatgtaattaaggaaacggacatcgaggaatttgcatcttttttagatgaaggagctattcaagcaccaaagctatccttccaggattatttaagcggtaaggccaaggcttcccaacaggttcatgaagtgcatcatagaaagcttacaaggtttcagggtgaaacttttctaagagattggaacttagtctgtgggcattataagagagatgctaagtgtggagaaatgggacccgacataattgcagcatttcaagatgaaaagctttttcctgagaataatctagccttaatttctcatattgggggtcatatttttgctggtaatgtcattttctataaactattcggcagagaaaagatgcaaaacaagctggattcattatggtttggtaaagtttacccacacaacttgaagctgttatgtgaaaacttggaaaacggtaaaatcatcgacgaaatgtacagaggtggcatatcgatgaat

SEQ ID NO: 100 - DNA, 1605 bp, Arabidopsis thaliana
atggtcattaccgctaacgatttatcaaaatgggaaaattttcctaaaggacttaaggttcttcttctcctcaacggctgtgacagcgacggagatggctcctcagccgccgagactcgatcagagctcgaatcaatggactatatcgttactacattcaccgatgaaactgaagcactctctgcggttgtcaagaacccggagagcttctacattgccatcgtcgaggtgaatatgagcgctgagagtgagagtttcaagtttcttgaggctgccaaagacgttcttcctactataatgatttcaaccgatcattgcatcactactacaatgaaatgcatagcgcttggtgcagttgagttcctacaaaaaccgctctcaccggagaaattaaagaacatttggcagcatgttgttcataaggcattcaatgatggtggaagtaatgtttcgatatcacttaagccagtgaaagaatccgttgtctcgatgcttcatcttgagaccgacatgacaatcgaggagaaagatccagcgccatcaacaccgcaattgaaacaagattcacggttactagacggtgattgccaagagaacataaatttctcgatggaaaatgtaaattcctcgaccgagaaagataacatggaagatcatcaagacatcggtgaatctaaatcagtcgacactacaaaccgcaaattagatgacgacaaagtggttgtcaaagaagagagaggagacagtgaaaaagaagaagaaggtgaaaccggagatctcataagcgagaagacagattcagttgatattcataagaaagaagatgagactaaaccgattaataaatcatccgggatcaagaacgtgtctggtaacaaaactagtcgaaagaaggtggattggacaccagagctgcacaagaagtttgtgcaagcagttgagcaactcggcgttgatcaagcgataccctcgcggattcttgagttgatgaaagtaggcaccttaacaagacacaatgtagctagtcaccttcagaaatttcggcagcataggaagaatattcttccaaaggatgatcataaccatagatggatacaatctagagagaaccatagaccaaatcaacgtaattataacgtttttcaacagcaacaccgtcccgtgatggcttatcccgtttggggtcttcccggtgtttatccgccaggagcgattccacctttgtggccaccgccgctgcagtccattggtcaaccacctccgtggcattggaaaccaccttatccaacggtgagcggtaatgcatggggttgtccggttggaccgcctgtgaccggatcatatattactccttcgaatactaccgccggcggatttcaatatcccaacggagctgaaaccggcttcaaaataatgccggcgagtcagccggacgaggaaatgttagatcaagtggttaaagaagcgataagcaaaccgtggctgccgctaccgctcgggctaaaaccgccgtccgcggagagcgttttggctgagctaacgcgtcaaggcatctcagccgtcccttcttcttcttgtctaatcaacggctctcatcgtctccgc

SEQ ID NO: 101 - DNA, 1423 bp, Arabidopsis thaliana
aattatatgtatatatatacgtacacaaaatcatacgtttttccacaaatggatcaagaagaggaagagatcgagattcctaattactttatctgcccaatctcactagagatcatgaaagatccagtcacgaccgtttctggcatcacttacgaccgtcaaaacatcgttaaatggctcgaaaaggtcccttcttgtcccgtcacgaagcaacctcttcccttagactccgatcttacacctaaccacatgcttcgccgtcttatccaacactggtgcgtcgagaacgagacacgtggcgttgtcagaatctctacacctcgagttcctcctggaaaacttaacgtcgtcgaagagatcaagaatctcaaaaagttcggccaagaagccttaggaagagaagaaacgttgcagaagcttgaagttttggcaatggacggaaataacagaagattgatgtgtgaatgtggcgtacataagtctttgatcttgttcgtagtcaagtgtactagtgaagacgaagacggacgacgtcgtatcaaaggactagatgagtctcttcgtcttcttcacttgatcggtattccatcaaacgacgcaaaaacaatcttgatggaaaacgatcgagttatggaatcgttgacttgggttttacaccaagaagactttctcagtaaggcttatacaattgtgctattgaggaatctaacggaatacacttcctctcatatcgtagagagattgaatcccgagatttttaaagggatcatagggtttctcaaggatgttgtaaatagtgttaatcggacgagccctaccgtgagagaaacggtacagtcatcatcaaggcctagcttgggaaaaacggaaccatcaaaacttgatcatagtttggtcatcaaacaagcggtgactgccgcgctgatgattcttttagagacttcttcgtggagccgaaaccgatcactccttgtggatctcggtgcggtttctgaactcatcgaactcgaaataagctacactggcgagaaaagaatcacagaacttatgttaggagttttatctcgtttatgttgctgtgcgaacggtagagccgagattcttgctcataggggcggaatcgcggttgtgacaaagcggctattgagggtttcacctgcggcagacgatagagctatctctatcctaactacagtgtcaaaattctcgccggaaaacatggtggtggaagagatggttaatgttgggacggtagagaagctctgttccgttctaggaatggattgtggtttgaacttgaaggagaaagcaaaagagatactaaaagatcattttgatgagtggaagaagtttccatgtattgacataactcttctcactaagctgctaagcatctcacccaaagggccaaagatctaagtaa

SEQ ID NO: 102 - DNA, 891 bp, Arabidopsis thaliana
atgaagagtaggaagagctatgggcacttgctgagcccggtgggcagcccgccgttggacaacgagtccggcgaggcggcggcggcggctgcggctggcggcggcggctgcgggagcagcgccgggtatgtcgtctacggcggcggcggcggtggggactcgccggcgaaggagcaggacaggttcctgccgatcgcgaacgtgagccgcatcatgaagcggtcgctgccggcgaacgccaagatctccaaggagtcgaaggagacggtgcaggagtgcgtgtcggagttcatcagcttcgttacaggcgaggcctccgacaagtgccagcgcgagaagcggaagaccatcaacggcgacgacctcctctgggccatgaccacgctggggttcgaggcctacgtcggcccgctcaagtcctacctcaaccgctaccgcgaggccgagggcgagaaggccgacgtgctcggcggcgccggcggcgccgccgcggcgcgccacggcgagggcggttgctgcggcggcggcggcggcggcgccgatggcgtcgtcatcgacgggcattacccgctcgccggcggcctgtcacactcacaccatggtcatcagcagcaggacggcggcggcgacgtcgggctcatgatgggcggcggcgacgccggcgtcgggtacaacgccggggccgggtcgacgacgacggcgttctacgcgccggcggcgacggcggcgtcagggaacaaggcgtactgcggcggcgacgggtcgagggtgatggagttcgagggcatcggcggtgaggaggagagcggaggcggcggcggcggcggcgagagggggttcgccggccacctccatggcgtgcaatggtttagactaaagaggaatactaat

SEQ ID NO: 103 - DNA, 1728 bp, Brassica napus
atggctgcatctttctctgtcccctctatgataatggaagaagaagggagattcgaggcggaagttgcggaagtgcagacttggtggaactcagagaggttcaagctaacaaggcgtccttacacagcccgtgacgtggtggctctacgtggccatctcaagcaaggttatgcttcgaacgagatggctaagaaactgtggagaacactcaagagtcaccaagccaacggcacggcgtctcgcacgtttggtgccttggaccctgttcaggtgacaatgatggctaaacatttggacaccatttatgtctctggttggcagtgctcgtctactcacacctccactaacgagcctggtccggatcttgctgactatccatacgataccgttcctaacaaagtcgaacatctcttcttcgctcagcagtaccatgacagaaaacagagggaggcgagaatgagcatgagcagagaagaaagagcaaaaactccgtttgtggactacttgaagcccatcatcgccgacggagacaccggtttcggtggcactaccgccaccgtcaaactctgtaagctcttcgtcgagagaggcgcagctggggtccacatcgaggaccagtcctccgtcaccaagaagtgtggccacatggccggaaaagtcctcgtggcggtaagtgagcacattaaccgccttgtcgcggctcggctccagttcgatgtgatgggcacagagaccgttctggtcgctagaacggatgcggtggcggctactttgatccagtcgaacattgactcgagggaccatcagttcatcctcggtgtcactaacccgagccttagaggcaagagtttgtcctcgcttctggccgagggaatggctgtaggcaagaacggtccagcgttgcaagcgattgaggatcaatggcttagctccgctcgtctcatgactttctcggacgctgtcgtggaggctctcaagcgcatgaacctaagtgagaatgagaagagccggagagtgaacgagtggctaaaccatgcaaggtacgagaactgcctgtcaaacgagcaaggccgagaattagcagcaaaactcggtgtgactgatcttttctgggactgggacctgcccagaaccagagaaggattctaccggttccaaggctcggtcacagcagccgtggtccgtggctgggcctttgcacagatagctgatctcatctggatggaaaccgcaagccctgacctcaacgaatgcacccaattcgcagaaggagtcaagtccaagacaccagaggtaatgctcgcctacaacctctccccgtccttcaactgggacgcctctggcatgacggatcagcagatgatggagttcattccgcggatcgctaggctcggttattgctggcagttcataacccttgcgggtttccatgcggatgctcttgtggtcgatacgttcgcaaaggattacgcgaggagagggatgctggcttatgtcgagaggatacagagagaagagaggagcaatggggttgacacattggctcatcagaaatggtcaggtgctaattactatgatcgttatcttaagaccgtccaaggtggaatctcctccactgcagcaatgggcaaaggtgttactgaggaacaattcaaagagacctggacgaggccgggagctgctggaatgggcgaagggactagccttgtggtagccaagtccagaatg

SEQ ID NO: 104 - DNA, 1716 bp, Zea mays
atggcgtcgccgttctccgtgccttcgctgatcatggaggaggaagggcggttcgaggcggaggtggcggaggtggagtcgtggtggggcacggagcggttccggctcaccaagcgcccctacaccgcccgcgacgtggtcctcctccggggcacgctccggcagagctacgcgtcgggggagatggccaagaagctgtggcgcacgctcaaggcgcaccaggccggcggcaccgcctcccgcaccttcggcgcgctcgaccccgtccaggtcaccatgatggccaagcacctggacaccatctacgtctccgggtggcagtgctcgtccacgcacacctccaccaacgagcccggcccggacctcgccgactacccctacgacaccgtgcccaacaaggtggagcacctcttcttcgcgcagatctaccacgaccgcaagcagcgggaggcgcgcatgtcgctgccccgcgccgagcgcgcgcgggcgccgtacgtcgacttcctcaagcccatcatcgccgacggcgacacgggcttcggcggcgccacggccaccgtcaagctctgcaagctcttcgtggagcgcggggcggccggggtccacctcgaggaccagtcctccgtcaccaagaagtgcggccacatggcgggcaaggtgctcgtcgccgtctccgagcacgtgaaccgcctcgtcgccgcgcggctccagttcgacgtcatgggcgtcgagaccgtcctcgtcgcgcgcaccgacgccgtcgccgccacgctcatccagaccaacgtcgacgcgcgcgaccaccagttcatagtcggcgccaccaacccgggcctcaggggccagagcctcgcggccgtgctgtcggccggcatgtcggcgggcaagagcggcagggagctccaggccatcgaggacgagtggctggccgcggcgcggctcaagaccttctccgagtgcgtcagggacgccatcgcgggcctcggcgtcgcgggccaggagaagcagcgcaggctccaggagtgggaccgcgccaccggcggctacgacaggtgcgtgtccaacgaccaggcgcgcgacatcgccgccagcctcggcgtcacgtccgtgttctgggactgggacctgccgcggaccagggaagggttctaccgcttcagggggtccgtggcggcggccgtggtccggggccgcgccttcgcgccgcacgccgacgtgctgtggatggagacgtccagccccaacgtggccgagtgcaccgccttcgccgagggcgtcaaggcggcgtgccccgaggcgatgctcgcctacaacctctcgccgtccttcaactgggacgcgtctgggatgacggacgccgagatggccgccttcatcccgagcgtcgcgcgcctcggctacgtctggcagttcatcacgctcgccgggttccacgccgacgcgctcgtcaccgacacgttcgcgcgggacttcgcacgccgcggcatgctggcctacgtggagaggatccagagggaggagaggatcaacggcgtggagacgctggagcatcagaagtggtcgggcgccaatttctacgacagggtgctcaaggctgtgcagggtggcatctcctcgactgcagccatgggcaaaggagttactgaagagcagttcaaggatccacggcccgcaactgggagcagtggcctgcaagttatggccaaatccaggatt

SEQ ID NO: 105 - DNA, 993 bp, Zea mays
atggacgccgccgtctccaccctcaccgctctcgccatcttcgcgagcaccgtcgagcacgccgcctacaggagcgtgcaggggtatagggtggtcgggaggaaaggcggcgggtgggtccgttgggagaggtgggtggagcggcagttcgtcctctccctctccttcccacggtgcgtcgaggttgccctgcccgccgccgcgccgcggatactgccagcggggtggcgcagccggccggtgttccgcgagggacagaccgtcgacacttggcgttgcattgtggcattcgactccgtcgccgccgtcgctccgtcctccccgccgccgcccgtgctctcccccttcgtgaacccacagctgcagtatctgtctaatctgtacaatgacctgctgatggtgtttcggtttcgagaagagaaaacggtcccacaactcgttaattcaaagcaacccatccgttgtggtgaacaggggaaaacttctgatttgggtgatgcatcggagtccgattcggatggggattgtcaatctggcaaagaacttgcaccaccagttcagaagcatacaagagccaaccggaagcatatagatagcattactttagttgatatagctcagtacttccatcttccaatccgagatgcatcaaagacactcaagattggggtcagcatattgaagaggaaatgccgacagtatgggatacctcgttggcctcaccggaagatcaagtcacttgactctctcattcatgaccttgagttcgtgctagcaagagaggatgaggatgaggaggaggagaagcagctgcagaaggacaggctggctgctgcgataaacgccctcacaaaacggaagagcatgctggagagcgagaaggaaaccatacagcagaaaccggccatggacctgatggctgaaaccaagctattcagggaagatgttttcaagaggagatatagggccaaaagttcagtcatggatatggat

SEQ ID NO: 106 - DNA, 623 bp, Glycine max
tgtcctactcctcttcgatatgagtcaactcggcgccgtgttgcggactcagagggagcccaggaggagtaccattctgggtttgttgacggagcaaatggacggcgttgatagtgggacccgcaggaggcgcagcttcaaggaacgcttcggattcatcggcatggggtgctgtggggccacctggggcttccgttccgacgcgctaagtgtcacccaaggagaacagcaacagcaggaaacggatccagagtgcgtgggtccagcaggtttgggttcgggtatgaatctcgcggcggcgttagcggcggagaggcagctccgggggccgcaggaggaggcagtgagagcgccggggacgccgtggagggtgtcgctgatgaggctgctggaggagaccgaggcggagaaggagaaggagaaagagaaagaggagaatgttgtggggaatgattcggtgtgctgcgtgtgcatgggaaggaagaaaggcgcagcgttcatcccatgtggacacactttttgcagggtgtgttccagggaactgtggcttaatcgaggctcttgtcccctttgcaatcgctccatcctcgagattctcgacattttctagaatttcttctaac

SEQ ID NO: 107 - DNA, 696 bp, Arabidopsis thaliana
atgcttcgctcctcaattcgacttctctatataagaagaaccagtcctctgcttcgaagtttatcatcatcatcatcatcatcatcatcaaaacgattcgattctgcgaaaccacttttcaattctcatcggattatttctcttccaatttctacaacgggagctaaactatctagatcggagcattcaatggctgcttcttccgaacccaaatctctttacgatttcaccgtcaaggatgctaagggaaacgatgttgatctaagcatctacaaagggaaggttcttttgattgtgaacgttgcttctcaatgtggcttgactaattcgaattatactgagcttgcgcagctgtatgagaagtacaaaggccatggtttcgagattcttgcgtttccgtgtaaccagtttgggaatcaagagcctggtactaatgaagagattgttcagtttgcttgtactcgtttcaaggctgagtacccgattttcgacaaggttgatgttaacggtgacaaagctgccccagtctacaagtttctgaaatcaagcaaaggcgggctctttggagacggcattaagtggaacttcgcaaagttcttggttgacaaagatggaaatgttgtcgatcgtttcgcaccaactacctcacctctcagcattgagaaggatgtgaagaagttgttgggagttactgct

SEQ ID NO: 108 - DNA, 696 bp, Arabidopsis thaliana; identical to SEQ ID NO: 107

SEQ ID NO: 109 - DNA, 456 bp, Zea mays
atggcagctgaggaagatgtcaagcagaggcagatcattgaaaatcgtgccagaaatataagccacaatgttaggtgcactgagtgtggtagccaatcgattgaagattcacaggctgatgttgctattctcctaaggaagctcattcgtgatgaaataaaagcaggaaagagtgataaagagatctacaagaaactagaggatgattatggggagacagtactatatgcccctaaatttgatcttcagactgctgggatttggctttcgcctgtcattgttggtggtatagcagctggaatctgggcttaccaaaggcataggcaaaggacaaatgttcacattatggctctgaacctggtccgaggggtaccactgactccaagggagaaggagaccatgctagacatccttacacctccaccggctccaaggaaatggtggtggccaggcaaa

SEQ ID NO: 110 - DNA, 1032 bp, Arabidopsis thaliana
atgttttcttgcatagcttgtaccaaagcagacggaggtgaagaagtcgaacatggagcgcgtggaggcaccactcccaatactaaagaagccgtcaaaagcctaaccattcagattaaagatatggctttgaaattctctggtgcttataaacaatgcaagccatgcactggttcctctagtagtcccttgaagaaaggacatagatcatttccggattatgacaatgcctctgaaggtgttccataccctttcatgggtggaagtgctggttcaactcctgcttgggacttcacaaactcctctcatcatccagctggacggttagaatcaaagttcacttcaatatatggaaatgatcgagaatctatctctgcacagtcttgtgatgttgtactggatgatgatggaccaaaagagtggatggctcaagtagaacctggtgttcatatcacatttgcttctcttcccactggaggaaatgatctcaaacggatccgtttcagccgagagatgtttgataagtggcaagctcaacggtggtggggtgagaactatgacaagatcgttgagctttacaatgtacagagatttaaccgccaagctctccaaacgcctgcaagatccgacgatcagtcacagagagattcaacgtactcaaagatggattcagcaagagaaagcaaagactggactccaagacacaatttcagacctccaggatctgtcccgcatcacttttatggcggctctagcaactatggaccaggaagttatcatggaggaccaccgatggatgcagcaagaaccacaacttcttccagagatgatccaccttccatgagcaatgctagtgaaatgcaagctgagtggattgaagaggacgagcctggtgtttacattaccatcagacaattatcagatgggactagagagctacgtcgagtcagattcagccgggaacggtttggggaagtgcatgcaaagacatggtgggagcagaacagagagagaatacaaacacagtacctc

SEQ ID NO: 111 - DNA, 1215 bp, Zea mays
atgctcacgtgcatcgcgtgctccaagcagctcccgggcgacgcgccgccgctgcgcgagccgtcggacgacgatgaccgcgccaacgccggaggcgggggcgaatcggcggcaacgcccggcacgaggcaggccatcagggtgctcaccgcccagatcaaggacatggcgctgaaggcatcgggcgcgtaccggcactgcaagccctgcgccggttcgtcctccccggcggcgtcgcggcggcagcaaccgtactaccacggcgcgtacgcggagtccgggtccgaccgcttccactgcgcgtaccagcgcgccggcagctccgcagcatccacgccggggctgcgcacggggggcgcgatgtccagcggtgacatcacgccatcggtcagcgcgcgcaccgacttcctcgccgacgacgaggaaggggacgatgaagagggaacggcgactggcagcagcgaggaggatgaggagaaggagtgggtcgcccaggtggagcccggggtgctcatcaccttcctctcgctgccgcggggcggcaatggtctgaagcgcatccgattcagccgtgaaatgttcaacaaatggcaagcacaaagatggtggactgaaaattacgagaaggtcatggagctttacaacgttcagaagtctaacagtcaagttgatcctctgccaagcattccaaggtctgacagtgagatctccaaagacgataccccagctacagcaccgcttaacaaggggcaattgctacgtacttcacccagaccactaaaaggcagtgaagccataggctattcatcttcggattgtcctcagcaccaatccagtcattttcgcaacgtttaccgcaaagaccgctaccttgggcaccagttctgtgatccagttgaactggcatcgacgcctgagttatcaagcatcagtggtgcgaagacagagacgtctattggtgcatcagtgaggacaagctcatctcctgaagaggtcgatggatcgggcgaactttcagcctctgtcagcaacgcaagtgacgaagagagggaatgggtagaagaggacgagcctggcgtgtatattactattcgagctttgcctggtagcatcagagaactacgccgcgtcagattcagccgggagagattcagtgagatgcatgccaggttatggtgggaagaaaaccaagcgagaatatatgagcagtatctc

SEQ ID NO: 112 - DNA, 1872 bp, Zea mays
atgaacgccgtcgaaccctccgccgccgccatcgccgaagaccccattactccggccgcctccgcagccccgtaccctggccgcctccgcgaagcacttaccgccctttccgaggcttgcgagtccggcaacttcaatgcttccgaaaccgcctccttcaccatctccgacattcttgacaccgcagccggcgtaagtggcgagctcgatgacgggagcgacgacagccaagacgcgtcgaggtcaggggcctccgaagtgctgcttcgcgaggtgctcgagttcctctctcgcccgtcatcgatctcgaaccagatggcccttgacgcgctctcgcttgtgcttcccaaacccgtggcgaagctaggggctcgaatggggagatgccgggatgttgccgcagctatcctaaagttcttcgtgacgaattgcaatccgagggacatgctctccatcctctgtgaggcattagatgcaccaatggagctaccaaatggcttatccagttttgttcttctactcgatgcacttgctaaagtgtttactttaattcagaggcgacatatcgagcaagtaaaggtggcactgcccgttgtacttaaagttatgcatgctactgtatcagaatgtgttgaggaacatggaagtgctgctgttgatcttttcaatgcagcacatggtgttggcaaggccattcaagaaatgtgcatatcaatgttcaacaaaaacaaagatctctgtgcaattcttggtttatactcccttcagaatatagctcttgtatcacgaagcagacagcaggatattctctctgcttgtggttcagttgtttttcagagtttcagatttcttaaaactagtggattcacctatcgtggcctactaactggcagtgatgtcacagctgcaacggttgaactttccaaagaggaagatgctgattttatggagcatttttcctttgctatggatggtgcagcactttcagttgtgtggacacttatgcatgatgataaagatatgtcaaagtatgctggagaagagttggaattagcagtaaaggaagttcagggcaaccatatggaaaaatgggaagcaattaacatgcttaaatatgtcctatcctcaattcattacccatggataatcaaatcccacagtttaaacttaatgctgattctatccggtgaagatcatgttgaagagatcaataatcatgtagatttcacatgctttgctcatcgcatttttgaaacactcaaggccattgaaagcgttatgattgctgcccctatggcattggtgcggaaaaaagcatttgctgctttgaaaaaggttatttcaatggtgccatcatcccagagatttgacatcttacatggtcttgtaaacaatagtacatctccagctttgactgcaattctccttgatctagtgaggcaggaagtttcgagagagagtcgccaagctgacaatgattgtattgaagacgaaggatttcgaggtaatgggttaccgcgctgggcatctcatgcacttgagttagttgagctgattttgaggcctccagaaggtggtcctccttgccttcctgatcacagtgaacaggtaatatcagctctaaacttgctaagatttattctgataatagattcaagaggacaaagatctgcaaaattgtttcggaaagagacattgcacaaggtgcactcggagtggctgaccccattaagaccaatcgcggagcaaattcagttggaaaatgaaaaggatgctgatgagattacaaaacaaatagtgtgcatgttaaatcttgttcaactggtgctataccgctgcatcgagttggtggaggaaaagatgaaaggctgc

SEQ ID NO: 113 - DNA, 198 bp, Thermotoga maritima MSB8
atgcgcggcaaggtgaagtggttcgactccaagaagggctacggcttcatcacgaaggacgagggcggcgatgtcttcgtgcactggagcgccatcgagatggagggcttcaagacgctcaaggagggtcaagtggtcgagttcgagattcaagagggaaagaaaggtccgcaggccgcgcacgtcaaggtcgtcgaa

SEQ ID NO: 114 - DNA, 198 bp, Thermotoga maritima MSB8
atgaggggcaccgtgaagtggttcgactccaagaagggctacggcttcatcacgatggagaacggcgaggacatcttcgtgcactggagcgccatccagatggacgggttcaagaccctccgcgagaacgagaccgtggagttcgaagtgcaaaagggaacgaagggtccacaggcggtcaacgtcaggcccgtccgg

SEQ ID NO: 115 - DNA, 198 bp, Thermoanaerobacter tengcongensis MB4
atggtgaggggcaaggtgaagtggttcaacgctgagaagggctacggcttcatcgagcgcgaggacggcaccgacgtcttcgtgcactactccgccatcgagggcgagggtttcaagacgctggaggagggacaggccgtcgagttcgaagtcgtccaagccgcgaagggtccacaggcgagcaaggtccggaaactg

SEQ ID NO: 116 - DNA, 198 bp, Bacillus caldolyticus
atgcaacgcggcaaggtgaagtggttcaacaacgagaagggctacggcttcatcgaggtggagggcgggtccgacgtcttcgtgcacttcaccgccattcagggcgagggcttcaagacgctggaggagggtcaagaggtcagcttcgaaatcgtgcaaggaaacaggggtccgcaggccgcgaacgtcgtcaagctg

SEQ ID NO: 117 - DNA, 240 bp, Triticum aestivum
atgcagattactggtaaggtgaagtggttcaacgaatccaaggggttcggcttcatcacccccgacgacggcagcaaggacgtcttcgtccacttcaccgcaatcgctggcaacggcttcaagaccctcgccgagggccagcgtgtcgaattcgaaattcaagacggccaaaaaggcccgtccgccgtcaatgtcaaggccctagagctagaggaggataagagcatttcgagcaaatta

SEQ ID NO: 118 - DNA, 234 bp, Zea mays
atgggcctgtggacattgctggagggttttttgcttcttgcaaatgcgttagcgatattgaacgaagaccgcttccttggtccaaggggatggagcatgtctgaagtatcaggaaacgggcaaaccaagtcgttcaagggccagatcgtggggcttatctacgctacacagtttctgcggatgcccttaattgctctcaacgttctcatcatcgttgtcaaattggtgtctggc

SEQ ID NO: 119 - DNA, 513 bp, Arabidopsis thaliana
atgttgttttttaatcctggcttcacatgtatgcaggaggagtttcaacttgctttgttcaaaagccggaagagggagaatatatttgctaataggatatttgatatgtttgatgttaaacgaaaaggagtcatcgatttcggggactttgtaagatcactcaatgttttccaccccaatgcttctctagaagacaaaatagattttacgtttaggctttacgacatggactgcacgggttacattgaacgacaagaggtcaagcaaatgttgatcgcgcttctctgcgaatctgaaatgaaactggctgatgaaaccatagagataatactcgataagacatttgaagatgcagacgtgaatcaagatggaaaaattgataaattagagtggagtgatttcgtaaacaaaaatccatcattgcttaagatcatgactcttccatatctcagggatattacgacaacgtttccgagttttgtcttccattcggaggtcgatgagattgccaca

SEQ ID NO: 120 - DNA, 2571 bp, Arabidopsis thaliana
atggcggagaaagtatcggaggacgttatgcttctacacggtgacctcgatttgaaaattgttaaggctaggaggttacctaacatggatatgttctcagaacatttgcgccgtctcttcaccgcctgtaacgcctgtgctagacccaccgataccgatgatgtcgatcccagagataaaggcgaattcggtgataaaaacatccgtagccaccgtaaggttatcaccagcgatccttacgtcaccgtcgtcgttcctcaagcgactctagctcgaacacgtgttttgaaaaactcacaagagcctctttgggacgagaaattcaacatttctatagcgcatccgtttgcttatctcgagttccaggtcaaagacgacgatgttttcggtgctcaaatcattggcacggctaagatcccggttcgagacatcgcatcgggagaacgcatttctggttggtttcctgtactcggtgcttcgggaaaaccgcctaaggcagaaactgctattttcatcgatatgaaatttactccgtttgaccagatccatagctaccgatgtggaatcgccggagatccggagcgtaggggtgttagacggacttatttccctgtgaggaaaggaagtcaggtgaggctttaccaggacgctcatgttatggacggaacgttgccggcgattgggttagataacgggaaagtttatgagcatgggaagtgttgggaagatatatgttatgctatatctgaggctcaccatatgatttacattgttggttggtctatcttccataagattaagcttgttagggaaacaaaagttccaagagataaggatatgacgcttggggaattgctcaaatacaaatcccaggaaggtgttcgagttttgctacttgtatgggatgataagacttctcatgataagtttgggataaaaacgcctggagttatggggacacatgatgaggagactaggaagttcttcaagcattcttctgtgatatgcgttttgtcaccccggtatgccagcagtaagcttgggttgttcaaacaacaggttgttggaactctcttcacgcaccatcaaaagtgtgttcttgtagacactcaggctgttggtaataatcgcaaggtcaccgcttttattggaggtctagatctttgtgatggccgttatgacacacctgagcataggatactccacgatcttgacactgtatttaaggatgatttccacaatcctacatttccagctggtaccaaggccccaagacaaccttggcacgatttgcactgtaggatagatgggcctgcggcatatgatgttctcataaactttgagcagcgatggagaaaggcaacacgatggaaggagtttagcttacgtttaaaggggaaaactcactggcaagatgatgctttgatccggatagggcgtatatcatggattctgagtccagtgtttaaatttctgaaggatggtacttcgataattccagaggacgatccatgtgtttgggtttctaaagaagatgatccagagaactggcatgttcagatattccgttctatcgactcaggatccgtgaaaggatttccaaaatatgaagatgaggctgaggcccagcatctggaatgtgccaagcgtcttgttgtagataaaagcatccagactgcatacatccagacaatcagatctgctcagcatttcatatatatcgagaatcagtatttcctgggttcttcttatgcttggccttcttatagagacgcaggagctgacaatcttattcctatggagttggcactaaagattgttagcaaaatcagagctaaggaaagatttgccgtatatgttgtcataccattgtggcctgaaggcgacccaaagtctggccctgtgcaagaaattctatattggcagagccaaactatgcagatgatgtatgatgttatagcaaaagaactgaaagcggtgcaatcagatgctcatcctctcgattaccttaacttttactgccttggtaaacgagagcagcttccagatgatatgccagccaccaatggcagtgtggtatcagattcttataatttccagcgtttcatgatttacgtgcacgcaaaagggatgatagtagatgatgagtatgtactcatgggatctgctaatatcaaccaaagatctatggcaggcaccaaagatactgaaatcgccatgggcgcataccaacctaatcatacatgggctcacaagggaagacacccacgtggccaggtgtatggatacagaatgtcactatgggcagagcatttaggcaaaactggagatgagtttgtggagccatcagatctggaatgtctgaagaaggtgaacacaatctctgaagaaaactggaaaagattcatagacccgaaattctcagagctacaaggtcacttaataaagtatcctctacaagtagacgttgatggtaaagtaagccctcttcctgattacgagaccttcccagatgttggtggtaagatcattggagctcattccatggctcttcctgacactttaaccacg

SEQ ID NO: 121 - DNA, 2133 bp, Arabidopsis thaliana
atgcctgctttagcttgcgttgatacgtcctttgtacctcctgcctacgccttctccgacaccgccggtgatgtttttatcccggcgtcatcaccaacttccgccgccgttgttgttgaccgttggtctccgtcgctctcatcgtctctctatcgaatcgatggatggggagccccttatttcatagccaattcgtctggtaacatctctgttcgtcctcatggctctgaaactttgcctcaccaagacatcgatttgctcaaaatcgttaagaaggtgacgggtccgaaatcttccggtggtttaggattgcagcttccgttgatcgttcgtttccctgatgtgttgaagaaccgtctcgagtgtcttcaatctgcgtttgattacgcgattaaaagtcaaggatatgattctcattaccaaggtgtttatccggtgaaatgtaaccaagatcgattcgttgttgaagatattgtcaagtttggatcttcgtttcgatttggattagaagctggttctaaacctgagatccttcttgctatgagctgcttgtgtaaaggtagccctgatgcctttcttgtgtgcaatggattcaaagatgctgagtatatatcattggctctgcttgggagaaaactggcgttgaatactgtgattgtgcttgagcaagaagaagagcttgatctggttattgagctgagccagaagatgaatgtgaggcctgtcattgggttaagggctaagctgaggactaagcattcgggtcatttcggatcaacttctggtgaaaagggtaaatttggattgactactactcagattgttcgtgtggtgaggaagctgcgtcaatctggtatgcttgattgtctccagcttctgcattttcatattggttcacagattccgtcgacttcgttgctctctgatggtgtcgccgaggctgctcagctttactgtgaacttgtgcgtcttggtgcacatatgaaagttattgatatcggtggtggtttggggattgactacgacgggtctaaatctggagaatcggatctctctgttgcttatagtctcgaggagtatgctgaagctgttgtagcttctgttcgggttgtgtgtgaccggagctcagtgaaacatccggtgatatgcagcgaaagcggtagagcgatagtctctcatcattctgtgctgatctttgaagctgtttcagcagataaaccaatggttcatcaagcaactcccggcgatattcagttcctgcttgaaggtaatgaggaagctcgagccaattatgaggatctttatgctgctgtgatgcgtggagaccacgaaagctgccttctttatgtcgatcagctgaagcagaggtgtgttgaaggtttcaaagaaggtgttttgagcatcgagcagttagcttctgttgatggtttatgcgagtgggtgttgaaggctataggcgcatcggatccggttcatacttacaatatcaatctatcagttttcacttcgattcctgatctctgggggattgatcagctgttccctatagttcctatccataagctcgatcaaaggcccggggctcgcggaatcctttcagatttaacgtgtgatagtgacgggaagatcaacaagttcataggcggtgaatccagcttgccgttgcacgagctggacaagaatggcagtggaggaaggtactttttgggtatgttccttggaggggcttacgaggaggctctcggtggagtccacaatctgtttggtggaccaagcgttgtccgggtctcccagagcgatggaccacacagctttgcagtgacccgagcggtgcctggtcagtcctcagcggatgttctccgagcaatgcagcatgagccggagctaatgtttcagaccctaaagcaccgagcagaggaaatgatgcataccaaaggtggtagcgaaggtgaaaatgaagaggaagaagaagatgatgagttcaacaatgtggcggcttctctcgaccgttcgttccacaacatgccgtatcttgcaactgagcaggcatcgccaagtaactctctttcagctgcgatcagtaaccttgggttttactactgcgacgaagacgtctacgattacatctctgcg

SEQ ID NO: 122 - DNA, 879 bp, Saccharomyces cerevisiae
atggcacaagaaatcactcacccaactattgtagacggctggttcagagaaatttctgataccatgtggccaggccaggccatgactttaaaagtggagaaagttttacaccatgagaagtcaaaatatcaagacgttttgatcttcaaatccactacatatggtaatgttctagttttagataatgtaattcaagccaccgaaagggatgaatttgcctaccaagaaatgattgcccatcttgccttgaattcccatccaaatcctaagaaggttcttgttattggtgggggtgatggtggtgttttgagagaggttgtcaagcatgattccgttgaggaagcctggttatgtgacattgatgaagctgttattagactatcaaaggagtacctaccagaaatggctgcctcttattctcacccaaaggttaagacccacattggtgatggtttccaatttttaagagattaccaaaacacatttgacgtaatcattactgactcttctgacccagaaggtccagctgaaacccttttccaaaaggaatatttccaattgttgaacagtgcgttgacagaaaagggtgtaatcactacacaagcagaaagtatgtggattcacttgccaatcattaaggacttaaagaaagcctgttctgaagttttcccagttgcagaatactctttcgttactattccaacttacccaactggtacgattggttttatggtttgctccaaagataaaacttgcaatgtcaagaagccactacgtgaaatctctgatgagaaggaggctgaattatacagatactataacaagaaaattcacgaagcttcctttgttctaccaacctgggcagccaaggaattaaat

SEQ ID NO: 123 - DNA, 1524 bp, Saccharomyces cerevisiae
atgaatacagtttcaccagccaaaaaaaaggttattataattggtgccggtattgctgggcttaaagctgcatctacgctacaccaaaacggtattcaagattgtcttgttcttgaggccagagatcgggtcggtggtaggttgcaaactgtcacaggctatcaaggtcggaaatatgatataggtgctagctggcaccatgatacgttgacaaaccctttatttttggaagaggctcaactgagtttgaatgatgggagaacgaggtttgtttttgatgacgataattttatttatatcgacgaagaacgtggaagggtagaccatgacaaggaactgcttcttgaaattgtggacaatgaaatgagcaaattcgcagagttagaattccatcaacacttaggagtttcagattgctccttttttcaattagtaatgaaatacttactacaaagacgccaatttctcacaaatgaccaaataagatatttgccacaactctgtcgatatctggaattgtggcacggcttagattggaagcttttgagtgccaaggatacatacttcggtcaccaaggaaggaacgcctttgctttgaactatgattctgtggttcaaagaattgctcaaagctttcctcaaaattggttaaagctaagttgtgaagtgaaatcaattacacgagaaccttcaaaaaatgtgacagtgaactgtgaagatggtactgtgtacaatgctgattatgttattattacagtacctcaaagtgtattgaatttgtctgtacaacctgaaaaaaatttacggggaagaatagaatttcaaccacccttgaaaccagtgattcaagatgcttttgacaagatccattttggagcgctaggtaaagtaatttttgagtttgaagaatgttgttggtcgaacgaaagttcaaaaattgtaactttggctaactctaccaatgaatttgtcgaaatagtacgtaatgcggaaaatttagatgaattagactctatgctagaaagggaagattctcaaaagcatacgagtgttacttgttggagccagcctttatttttcgtaaatttgtcaaaaagcacaggagtagcaagctttatgatgttgatgcaggcaccgcttacaaatcacatagaatccattagagaagataaagagcgtctttttagttttttccaacctgtgctgaacaagattatgaagtgtctagattctgaggatgtcatcgacggaatgaggccgatagaaaacattgcaaacgctaataaaccagtcttaagaaacatcatcgttagcaactggacacgcgatccttactcacgcggtgcttattcggcctgttttccaggagatgatccagttgatatggttgttgcaatgtctaatggtcaagactcccgcataagatttgcaggcgaacatactatcatggacggcgccggctgtgcctatggtgcttgggaaagcggaagacgggaggcgactcgaatctctgacttactgaaa

SEQ ID NO: 124 - DNA, 1518 bp, Zea mays
atggcggcatcggccaagggacggctcgtgcccgtgctcgcggtggcggcggcgctcgcggccgtgctcctctaccgcgcgcccttctccaagagcttgggcggcgaagggtgcagcctcctcccgcacgaccacttctggatcgccagcgaccgcgtcgtcacgctcggacgcgtcggccccgccgcagtagaggtcaaaggagggctcatcaacgccatcgccgtcggggactaccggagcttcgtgctccgccgaccgctccttgactacggggacgccgtcatcatgcccggcctcatcgacgtgcatgcccatctggatgagcctggacgtgccgagtgggaaggcttctccaatggcacaagagcagctgcggcaggtgggataacgacgctggtggatatgccactcaacagcttcccgtcaacagtctctgaagaaactctcaaactgaagctggaagcagctcgggataagctatatgttgatgtggggttttggggaggccttgtgccagagaatgccttcaacccaagtgctttggagggcctcctaaaggcaggcgttttaggactcaagtcttttatgtgcccctcaggcatcaacgactttcccatgacaaattcaactcatatcgaagaaggattggttacactggcaaaatacaagagatctttacttatccatgcagaacgtatacctgaggctgaggatcatgatttgcaagaagatgaattagatcctcggtcctatatgacgtatctgaagtctaggccaccatcatgggaggaagcggctatcagagatctgcaacgtgcaatgaaggatacggagttggggggtcggtccgaaggagctcatattcacattgttcatctatcagatgcaaaaactagcttggaacttatgaaggatgctaaacgcagtggtgcaagtctgtctatagaaacatgccctcattacctggcattttcgtctgaagaagttccagatggagatactcgctttaaatgttctcctcccatacgtgatgacacaaacagagaaaatctttggaaagctctgcttgatggacacatagacatgctaagttcagaccactcaccatccactcctgacctcaaactaatggaggaaggcgactttttaagggcatggggaggcatatcatcattgcagtttgtcctcccggtgacatggtcatatgggcgaaagtatggcgttactctgaatcagctagcctcatggtggagcgaaaggccagccaagcttgcaggccaaaagaataagggagctattctaccaggataccatgctgacattgtagtatggaaacccgaaacagagtttcaacttgacaacaaccatgctatatatcataaacatcagaatatttcagcgtatttaggaaagcaactttctggtaaggtcctgtcgacttttgtgagaggaaatcttgtgtttgctgaagacaagcatgcaaatgctgcttgtggtgttcctatcctcgctaag

SEQ ID NO: 125 - DNA, 387 bp, Zea mays
atggcttgcccaaccaagaaggggatgaccggagagccgagctcgccatgcagctcggcatcagcctcgaccttaccggagcaccaccagacggtgtggacgtcgccgccgaagcggccagcggggcggaccaagttccgggagacgcggcacccggtgttccgcggcgtccggcgccggggcagcgccgggcggtgggtgtgcgaggtgcgcgtgccggggaggcgcggctgcaggctctggctcggcaccttcgacacggccgaggcggcggcccgcgcgcacgacgccgccatgctcgccctcgccggcgcgggcgcctgctgcctcaacttcgccgactcggcctggctcctcgcggtcccggcctcgtgcgccagcctcgcc

SEQ ID NO: 126 - DNA, 411 bp, Zea mays
atggacatgggccggctccagctccagctccagcacgcggcctcctcgtcctccacctcggcgtcgtcctcgtcctcgtccgagcagaacaagctggcctggtccccgtcctccccgcagccgcccaagaagcgccccgcggggcgcaccaagttccgggagacgcggcacccggtgttccgcggcgtgcggcggcggggcgccgcgggccggtgggtgtgcgaggtgcgcgtccccgggcggcgcggcgcgcggctgtggctcggcacctacctcggcgccgaggcggcggcgcgcgcgcacgacgccgcgatgctcgccctgggccgcggcgcggcctgcctcaacttccccgactccgcgtggctgctcgccgtgccgcccccgcccgcgctctcgggcggcctggac

SEQ ID NO: 127 - DNA, 219 bp, Arabidopsis thaliana
atggtgtttccggcgtgtgtacagtgcggaacaagacaaaacccctgtcggtgcaaagtggttggaccaactttagggttcgtggcttttctgataaccggaatcatcgagtggccagttggtgcggtggtgtatatctttaaacacgccaagggtcgtcgtataatgggtcatccggccagaaaagtttatcccaaagtctctcgatctattcccatt

SEQ ID NO: 128 - DNA, 855 bp, Saccharomyces cerevisiae
atggagctaagttcaccatcaaaaaaaaccacaacatcgccaataaatataccaggggggaatagagataacctaataatcggaccacattctcacagcttcaagaccgatccattttcaagtaacaatagtagtttgctgtccaaaatatctactaaccccagtttggaaagccctttctcttcgaaatctttactagattgttctcctgtacaagctgtaaagaagtctttagagtcggaagcaaaaacgcatagcctggacgaggagacaaatgaacagactgatgtaaagatcttaaacatagcagactttcccacagatgaactcatactaatgataagtgcgctacttaacagaattataacagcaaacgatgaaactacagatgtctcacaacaagtgtcggaagagaccgaagacgaactcttaactccaatccttgctttctatggaaagaatgttccagagatagctgttgttcagtacttagagagaattcaaaagtactgtcccaccacaaatgatatttttctttctctccttgtatatttcgatagaatctccaaaaattatgggcattcttctgagcgtaatggttgcgcaaagcaattattcgtcatggactccgggaacattcatagattgctcataacaggtgtcacaatttgcacgaagttcttgagtgattttttttacagtaactctcgatacgccaaggttggaggtatttctttgcaagagttaaaccatttagaattacaattcctgatactatgtgatttcaagttattggtttcagtcgaagaaatgcagaaatatgcaaacttgttatataaattctggaacgaccag

SEQ ID NO: 129 - DNA, 1797 bp, Agrobacterium tumefaciens
atgcagggtgacaaaccggttccgcatcggcccggtcgatcagatggttcaacaggtccgatgctggataaaggtggcgggcgcggcaaattgtcgtcgcctgagcgctttcgtgaatggacaagaaaaacaatggctaaacaggacgaactggtctttgtgccgcttggcggcgttggtgaaatcggcatgaatctggcgctttacggttatgggccggagagcaagcgccaatggatcatggtggattgcggcgtgactttcgccggcccggacctgccgggcgtcgatcttgtgctgcctgacatcagctacatcgccgagcagaaaaagaacctcaagggcatcatcatcacccacgcccatgaggaccattatggtgcaatgaacgatctctggccgggtctcaatgtgccggtctatgcctcgcctttcaccgccggcatgctggaagccaagcgcgcctatgagggtacccgtgccgaaatcccggtgacgattttcaaggccggcgaccgcatcaatgtcgggccgttcgaaatcgaggctgttggcgtcaaccactccattccggagccgatgtcgctgatcattcgcacgccgcttggcaatgtcatccacaccggcgactggaagatcgacgaggccccgtcgcttgggccgttgacggatgaagcccgtttccgcgcgatcggtgaagagggcgtgctggcgctgatgtgcgacagcaccaacgcgctgcgcgacggcgtgtcgccctccgagcatgaggtttccgaaggcctgcgccagatcatcgaaagtgccgaaggccgcgtggccgtcaccactttctcctccaatgtcgggcgcatccgctcgattgcgcaagcggcggaggcggccggccgcgaggtattgctgctcggctcttcgctgaagcgtgtcgtgaatgtctcgcaggatcttggcatcatggaaggcatcaagccgttcctcgccgaagacgaatatggttatattccgcgcgaccgtgtggtggtgatcctgaccggttcgcagggcgaaccgcgcgcagcgctcgccaagctttcccgcgacgagatgcgcaatgtggcgctcgcttcgggagataccgtcgtcttttcctcacgcgccattcccggcaacgaaaaggcgatcatcgagatcaagaacggcctgatcgaacagggcgttcacatcgtgaccgacaatgaagctctggtgcatgtctcgggccatccgcgccgcaacgagcttttgcggatgtatgagtggacgaagccgcagatcctggtgcctgtccacggcgaggcggcgcatctggtggcgcagaaggaactggccgagcaggccggcatctcgcaggtgccgaaggtgcgcaacggcaatgttctgcgcctggcacccggcccggcggaagtcatcaacgatgtgccgcatggacgcgtcttcaaggacggtaatctcgtcggcgatatggacgagatgggcatcagcaatcgccgcaaactgtccttcgccggccatgtcgctgtcaacgtcgtgctggacagccgttacgacttcctcggcgatcccgatgtcgtgccgttcggcctgccggaatttgatgacgaggacgaggcgatggaggacacgctttatgacgccgtactcggcgccgtcgagagcattccgcgcgcccgccgcaaggacctggcactgctgcgcgaatcggtgcgccgcgccgtgcgcgccgctgccaaccagagctggggcaagaagccgatcgtcacggttttcgtaacgaaggtc

SEQ ID NO: 130 - DNA, 648 bp, Arabidopsis thaliana
atggaacctcgaatcaatgaccttcaggtggaatctcgggttcatgagttgctcgattttccggttcatacaaaccagatatcctctgcaatctacgagtgtcccaacgaccacatcgaaaaccctaagaagaaaccgtacaattgtccacactcaggagccaagtgtgatgtcacaggagatattcaaaggctactactgcatctaaggaatgatcacaatgttgaaatgagtgatgggcgtagtttcagtcacagatatgttcatcatgatcctaaacatcttcatcatgctacttggatgttaacacttctcgattgttgtggtcgaaaattctgcttgtacttcgaagcgtttcacctgaggaaaacaccaatgtacatggccttcatgcagtttatgggagatgaagaagaggcaatgagcttcagctatagtttgcaggtcggagggaatggcagaaagctgacatggcaaggcgtgccgaggagcattcgtgacagtcacaagacggttcgtgatagtcaagatggcttaatcatcactcgcaaattggctttgttcttctctaccgacaacaacaccaccgacaaggagctgaagttgaaggtttcaggtcgtgtatggagagaacagcctgtttcgata

SEQ ID NO: 131 - DNA, 648 bp, Arabidopsis thaliana; identical to SEQ ID NO: 130

SEQ ID NO: 132 - DNA, 654 bp, Arabidopsis thaliana
atgagctctatcaatatcactaacgtcaccgtcttggacaatcctgctccgtttgtgaatccattccagttcgagatttcttacgaatgcttgacctctctcaaagacgatttggaatggaagcttatatacgtagggtcagctgaagacgaaacgtatgatcaagttttggaaagtgttcttgttggtcctgttaacgttgggaactatcgatttgtgttgcaggctgactctccagatccgttaaagattcgtgaggaagatattattggtgttactgtgttattgttgacttgctcatacatggatcaagagtttataagagttggctattatgtgaacaatgactatgatgatgaacagctcagggaagagcctcctaccaaggttttgattgataaggtccaaaggaacatactcacagacaaacctagagtaactaagttccctatcaactttcatcctgagaatgagcagactcttggtgatgggcctgcacctactgaaccatttgctgattctgttgtaaatggagaagctccggtgtttcttgagcagccacaaaagcttcaggagatagaacaatttgatgattctgatgtaaatggagaagctatagcgttgcttgatcagccacaaaatctccaggagaca

SEQ ID NO: 133 - DNA, 306 bp, Arabidopsis thaliana
atgcacgggagaaccgccatggcagtggcctgccttctgtgcatgacggctctgctgctagtccaggatgtccagtccaggaggctactgtggacggagcaggagaagaaacaatcccatggtggccttggcaaccatggcgccgctgaccggcgaagcacctccctggaaccgtgcagtggcgctatgggaggaggcggcacaggaagtgcagacaagcagggcgaattcccgtgtgatgatgatacgtcaaaatggacagaactgcacacggattacatatacacccaagacttcaagcaccca

SEQ ID NO: 134 - DNA, 1707 bp, Arabidopsis thaliana
atggctaactccaagaagcaagcatggtttttttataccacaggcttaccaagtgacatagaaatcgaagttgatgatataacatttcatcttcataagtttcctctaatgtcaaaaagcaaaaaacttcaccaactaataacagagcaagaacagagtaaagtttattctcacatcaagctcgagaattttccaggaggttcagagattttcgagatggtgataaagataagctacggtttcaaagtcgacatctctgtttccacagctgttccactccgttgcgccgccgagtatctagaaatgacggaagagtactcaccggagaatctcatttcaaaaacagagaagtttctttcagagttcgtcttcactaacgtacaagaatccatcaaagcgttgaaagcttgtgaatcagtctcgtctttagctgaatcactctgtataacggaacagtgtatagactccatcgtcttccaagcttcctcaaccgatccgtcgtcgttttacggttggccaataaacaacggaggtatattcaccgttgaccggaagaaacagagcaaagattcgaaaacagagctttggttcgaagatctaacggagttgagttttccaatcttcagacgtgtgatcttatccatgaagtcgagtgtcctgagtcctgagattgtagagagatctctacttacttacgcgaagaaacacattccaggaatctcgcgttcatcgtcagcatcttcatcttcttcttcttcttccaccaccatagcttccgagaatcaacaaagagaattattagagacgataacttcagatcttccattaactgcgacgactacgagatctctcttcggtttgttacgagccgcgatcattctcaacgcctccgagaattgcaggaagtttctagagaaaaaaatcggatcgaatcttgagaaagctacgcttgatgatcttctcattccaagttactcgtatctcaacgaaacgttatacgatattgatttggtggagagactcttacgtcgttttctcgaaaacgtcgccgtgtcgtcgtcgtcattgacggtggttgggagattgatcgacggagttctcggtgaaattgcatcggacgctaatcttaaaccggaacagttttataatctggcggttttgcttccggttcaagcacgggtttacgatgatggactatacagagccgtcgatatatatttcaagactcattcatggatattggaggaagagaaggagaagatttgtagcgtgatggattgtagaaaactgactgttgaaggatgcacacacgcggcacaaaacgagcgtttaccactacgagccgtcgtacaagttctgtttttggagcagctacagctccggcaagtaatcactgggactttactgacggaggaagacggtgataaaacggtggtggacttgggtagatggaaggaagcggtgaaggagaatcaggtgcttcgtttggatatggatacgatgaggacacgagtgaaccagctagagaaagaatgcttgtacttgaagaaagtgatcgcgaagatcgacaaagaaagtttgttgaaggcgaagcatggggcggggaaatggtcaatcgggaagaagttcggatgcaaattttcggctcaagtttgtgattcacaggaggcaacgatggtcgatagaagatcacgacgttttcttagt

SEQ ID NO: 135 - DNA, 588 bp, Arabidopsis thaliana
atggcgacagctttagcttccaagctctccaaaggacgttcattgcttggaggtctttgcaatgctttctctggtttgatgaattcctcctccaatggaatgatgaatggaagcatcctctctcagcaacaacataggacattcattcaaatggggacgattctcaaatgcgtggataactcgtgtgctaaagaggtgatgtgcattcaatccctgagaggtaagaaaggagcaagacttggcgatatcattgttggttcagtgaaagaagctaacccaattgttcaaaaaaaagtaaagaaagacgctatcccaaaaggtaaagtgaagaaagggatggtcgtgtacggtgtggttgtgcgtgctgcgatgcctaaaggacgtgctgatggaagccaagtcaagtttgatgacaatgccattgtagttgttggcattaaggaaaagaaagggcagaataattcacatggttccaagaggaaaatggagtacaaccaaccgactggtacccgagtgtttggtcctgtcccgcacgagatgcgcctcaggaaacagctcaagatcctttctttggctcagcacattgtt

SEQ ID NO: 136 - DNA, 1437 bp, Synechocystis sp. PCC 6803
atggcttcctctatgctctcttccgctactatggttgcctctccggctcaggccactatggtcgctcctttcaacggacttaagtcctccgctgccttcccagccacccgcaaggctaacaacgacattacttccatcacaagcaacggcggaagagttaactgcatgcaggtgtggcctccgattggaaagaagaagtttgagactctctcttaccttcctgaccttaccgattccggtggtcgcgtcaactgcatgcaggccatgggtaagaatctcctcgaacaactgcgccaatttacagtggtggtggccgacaccggcgacatccaagccattgaaacctttacccccagggattccaccactaatccttctttgattacggcggcggcccagatgccccagtaccaggaaattgtggacagcaccctgctcaaagctaaggacgaagctggggaaaatgcatctattaaagacattgtccgattggcctttgaccgtttggcggtggcttttggcctcaaaattctgcaaattatccccggccgggtttctacggaagttgatgcccgcctttcctacgacacggaagccaccattgccaaagctcgctacctaattggggaatatgccaaagctggcattgataaaaaacgcattctgatcaaaattgcttccacttgggagggtattaaggctgcagaagtattggaacaagaaggtattcactgtaaccttactctactattcggtctccaccaggcgatcgcctgtgccgaagccaaagtcaccctaatttccccctttgtgggacgcattttggattggtacaaaaaaagtactggcaaggaatatgacagccacgaagacccaggggtacagtctgttacaaccatttacaactactacaaacgctttggttacaaaactgaagtgatgggagccagcttccgtaacattggcgaaatcatcgaactggccggctgtgacctgttgaccatttccccccaactgttggatcaactgcggaacaccgaaggggatttacctcgcaaactcgaccccgccacggtgccccaggacattgaaaaaattgttatggacaaggccaccttcgacaaaatgcatgccgaagatccgatggcctcggaaaaactggccgaaggcattgccggtttcaccaaggctctggaggtgttggaacatttattggaagaaaggttaaaagttctcgatggccaagagcacatcaaacatggggcagaggaaattttccatgcctatgatctagatggggacggttttattaccagggaggaatgggccggcaccgatgtggtttttgatgccctagaccgggaccatgatggcaaaatcaccgccgctgaaatgtccgctgggttgggagccgctttccgtttagcctctgttggt

SEQ ID NO: 137 - DNA, 951 bp, Arabidopsis thaliana
atggatccggcgttgctggacgacgtcatacgccggcttctggaggtgaagaatctcaagcctgggaagaacgcgcagctgtcagagtcggagattaagcagctctgcgctgccgccaaggagatcttcctgcagcagcccaacctgctggagctcgaggcccccatcaaaatctgcggtgatgtccatggccagtactctgatctcctgaggctatttgattatggtggctatccgcctcaggccaactaccttttcttgggtgattatgtggatcgtggaaagcaaagcctagaaacaatatgtcttcttttggcttacaaggtcaagtacccggagaacttctttcttctaaggggcaaccatgaatgcgcatcagtaaatcgcatctatggtttttatgacgagtgcaaacgcagattcagtgtaaagctgtggaaaacattcacagactgttttaactgcttgccagtgtcagcattgatagatgaaaagattctctgtatgcatggtggtctatctccggagttgaacaagcttgagcaaatactcaacctgaatcgccccacagacgtgcctgatactggattgctctgtgatcttctttggtctgatccttccaatgaagcaacaggctgggccatcaatgatcgtggtgtttcattcacatttggtcctgataaagtttctgaatttcttgagaagcatgatttggaccttatctgccgagcacatcaggttgtcgaagatggatacgagtttttcgctagccgtcaactcgtaacaatattttcagcccctaactactgtggagaattcgacaacgctggtgccatgatgagtgtagatgatacattgatgtgctcgttccaaatattgaagcctgcaaggaagatgatgggtggttcaactaataacaaatctggcttcaagtcattcaggggatggtag

SEQ ID NO: 138 - DNA, 998 bp, Desulfitobacterium hafniense
gcaggaccatgaccaataccgtcaggaagatcgctgttcttaccagcgggggggatgctccgggaatgaatgcggccattcgggcagtggttcgcaagggaatttatcatggacttgaggtttttgggattcgcaaggggtatgaaggcctgattcatggggaattcataaccatgcatctgggagcagtagcggatatcattcataggggcggtaccatgctcatgaccgcacgttcccaggagatgctcaccccggagggacaaaaaaacgccgcggctcaattgcgttatcgcggtatcgatgcgctgattgtgatcgggggggatggttcttttcggggagcacagaccttgtctgctcaaggaatagccatcgtcggtataccgggtaccattgataacgatattaccggcacggatttaactatcggatttgatactgccgtcaataatgtggttcaagcggttagtaaaatccgggatacggcaacatcccatgatcgaacctttttagtggaagtcatgggacgggattgcggcaacatcgccttgcaatccggcgtagcctgcggtgcagaatccatccttgtgccggaaatcgaaccggatctggatgatattgtcgcgaaattggaacgcggccaccaacggggcaaacatcacagtatcattatggtggcagaaggggctatgagtgcttggaatctgggggaagaactccgtcagagaaccggctttgaaacccgggtcaccatcttaggccatatccaaaggggcggcaatccaagtgccctcgatgtggtcctggcctcgcaaatgggcgggaaagcagtggagatactctgcgccggggaaaccgatcggatgacagcctgtgtcaaccaggaaatccaatccctgcctttggaggtggcttatggtgagcgcaaacccttcaacaaagttctctatgatctggccaatcaattggctatctgagcaaaagaaatcagcggt

SEQ ID NO: 139 - DNA, 998 bp, Desulfitobacterium hafniense; identical to SEQ ID NO: 138

SEQ ID NO: 140 - DNA, 1263 bp, Arabidopsis thaliana
atggacagtataagtttgttgcccgatgatttcctcttgcgcatactgtcattgcttcctacaaaagacgtgttgaacactagtgttttgtctaaacgatggcggtatctttggaagttggtgccaaaacttcagtacagccttatcgataagaatgctgatcatgggacatttgtgcggtttgtggacagatcgttgctacttagcatggctccggttttagagagtttacatttaaagttaggtcgacaatgcagcgaagtagatatcgggttttgggttagaattgcagtggaaaaaggtttgtgtgagctagatttcgattatgagcattataagactgagccttgcagattgcctcagagcttgttcacatgcggaacactcacggtgctaaaactaaaaaacgtatcgctcaaggatgtacaattcccggtatgttttaagttgctcaaaacgctgcacctggagtatgtgattttcctagacaaggaaactcctcagaagcttttatcaagctgccctattcttgaagtctttgatttgactcgagatgacgacgacgttgataatgttatgagtttctctgttatggtgccttcgttacaaagatttatctattgtggaggatctggtgctgagcttgtgatgaatacgccttctttgaagtacttaaagctttcaggttgtggttacgagtgtatgattgggaatttgcctgagattgtggaagcacatgttgaggttgcatgttccactgatgatatccttacatctcttgcatcagtcaaacgcctcttgctatgtttacccacagagcctgagttacctactggtaccatcttccaccagcttgaacacttggagttttgttcttgttgcacagaatgggatatacttatgtttatgctcaaacattccccgaaacttcgatctctcaagcttaacgagacccacggctacactattgtttctcaaagtgatcctatgtttcattgggaggaaccaagctcggttcctgaaactttgatgtttgttcttgagactttggagtggagaaactacagagggttgaagatggaaaacgaactcgcaagttttctcttgaaacattcaagacgtctgaagattgcaaccttttcgccagcagactgcaaacaagtgagaatcgaattacgtacgacagttggaatgaaatatcgtatactcatggaattggcgcgtttgccaaggggttcagcagagtgtgagcttgtgtttggt

SEQ ID NO: 141 - DNA, 1527 bp, Zea mays
atgatcgcaaacggcctccgcaaatccagtgctgcctcctcccaggttagcaagctggtgaaatacattgctagtgctggaagcttgcaaggggggcacagtttatcagagccgtctgccagacattacagctctgaaccttcacttcaggcgacagaagaaaatgggtttaaggggcacagcatgctggctccattcacagcgggatggcagagcactgatgtacacccattggttatagagagatcagagggttcttatgtctatgacagcaatgggaagaagtatattgatgctcttgcaggactgtggtgcacagctttaggtggtaatgagcctcgactagtcaaagcggcaactgagcaattaaacaaattaccgttctaccattccttttggaaccgtacaaccaaaccctcattggatttcgcaaatgatattctcagcatgttcaccgcaagggagatgggaaaggtgttcttcacaaatagtggttcagaagcaaatgactcccaggttaaactagtgtggtattataataatgcactgggaaggccagacaagaagaaatttattgctcgctcaaaatcgtaccatggatcaaccttgattgcagctagtctatcaggtctgccagcgcttcatcagaagtttgatctaccagcaccttttgtcctgcacacagactgccctcactactggcgattccgtcttcctgatgagacagaagaagagttttcaactagacttgccaataatttggagaatcttgtcctcaaagaaggacctgaaacaattgctgctttcattgctgaacctgtgatgggcgctggtggtgttatccttcctccaaagacctattttgagaagattcaggcagttctgaagaagtatgacatcttgttaattgcggatgaggtcattactgcatttggaagactagggacaatgtttggatgtgatatgtataatattaaaccagatcttgtttccatagccaaggctctttcttctgcatatatgccaattggagcaattctcgttagcccagaaataacggatgtaatctattctcagagcaataaacttggttcttttgctcatggctttacatactcgggacatcctgtttcttgtgccgttgctgtagaaaccttgaagatatataaggaaaggaatattgtagaacacgtcaacaaaattgctccaaggttccaggagggaatcaaggccttctcaggcagcccaattgttggggagatacgcggtctgggactgatacttggaactgaatttgtcgacaacaaatctccaaatgatccatttccagctgaatggggtgttggttcgatatttggcgcggagtgcgagaagcgtgggatgctcatcagggtggctggggacagcatcatgctgtcacccccgctgatcatgactcccaatgaagtcgaagaaatcataagcaaattcggcgatgctctgaaggctacagaggaacggattggagaactgaaatccaggaagaat

SEQ ID NO: 142 - DNA, 1104 bp, Arabidopsis thaliana
atggcgagaagatccgtttcgatatttaatcgccttctggcgaatcctccttctccattcacatcactgtcccgatccatcacctacatgcctagacccggagatggagctccacgaaccgtaaccctaattcccggcgacggaatcggacctttggtgaccggtgcggtggaacaggtcatggaagcgatgcacgcgccagtgcatttcgagagatacgaggttctaggaaacatgagaaaagtccctgaagaagtgatcgagtctgtgaagagaaacaaggtttgtctcaaaggtggattagcgactcctgttggtgggggtgtcagttctttgaatatgcaattgaggaaagaactcgatatcttcgcttctcttgtcaattgcatcaatgtccctggattagtgacgcgacacgaaaatgttgatatcgttgtgataagagagaacactgaaggagagtactcaggtctcgagcatgaggttgttcctggtgttgtcgagagccttaaggtgataacaaagttttgttctgagagaatagcgagatatgcatttgagtatgcgtatctaaacaataggaagaaagtgactgctgttcataaagctaacattatgaagcttgcggatgggctcttccttgaatcttgtagagaggttgctaaacattattcggggattacttacaatgaaataatcgtagacaattgctgtatgcagcttgtcgccaagcctgagcaatttgatgtcatggtgacacctaatttgtatggtaaccttatagcaaacacggcggctggaatagccggtggcactggagtgatgccaggagggaatgttggtgcagaacatgcgatattcgagcaaggtgcatcagcagggaatgtggggaatgataagatggtggaacagaagaaagcgaatccggtggctctacttctctcgtcggctatgatgctaagacatctccggtttcctacttttgctgatcggcttgaaacagcagtgaaacaagtgattaaagaaggaaaatatagaacaaaagatcttggaggagattgtaccacgcaggaagttgttgatgctgtcatagcagctcttgag

SEQ ID NO: 143 - DNA, 543 bp, Arabidopsis thaliana
atggaaaacgacgatatcaccgtggcggagatgaagccaaagaagcgtgctggacggaggattttcaaggagacacgtcacccaatctacagaggcgtgcggcgtagggacggcgacaaatgggtatgcgaagtccgtgaaccgattcatcagcgtcgagtctggctcggaacttatccgacggcagatatggccgcacgtgctcacgacgtggcggttcttgctctgcgcgggagatccgcgtgtttgaatttctccgattctgcttggaggttgccggtgccggcatccactgatccggacacgatcaggcgcacggcggccgaagcagcggagatgttcaggccgccggagtttagtacaggaattacggttttaccctcagccagtgagtttgacacgtcggatgaaggagtcgctggaatgatgatgaggctcgcggaggagccgttgatgtcgccgccaagatcgtacattgatatgaatacgagtgtgtacgtggacgaagaaatgtgttacgaagatttgtcactttggagttac

SEQ ID NO: 144 - DNA, 1482 bp, Zea mays
atggcgccgggatcgtcgtcgtctcgtaaggccaaggccctcaaggcatcgtaccggctcgtcgccgacaacttcctcgccgtcctcgccatggtttctgtcgtcgccgtgctcttcgctgcatggccgatcagcatcgaggaccttgcctgccggctgcacgcggtgcggccactccacgtcctcacggcggcgatcctgacggcggccctcgcgaagctgaggcgcatgagccggccgagcgacgtgtatctcgtggagtacggctgcttctggcccaagccgtgcttccgggcgccgttcgcgacgtgcctggagcacgtgcggctcttgccgtacctggtcaacgaggacgacatcagctggggctggcggctcctccagcggtccgggatcggcgaggagacctgcgtgccgtacgcctaccactacctgcccccggaccgcagctttagggcctccctggacgagaccgagctggtcatcttctccgccgtcgacgatgtgttcgcccggacgacggccgtgacgcccgcggacatcggcgtggtgatcgtgaactgcagcatcttcacgcccacgccggtgttcacggacatgatcgtgaacaggtacaagctgcgcgccgacgtgcggagcgtgaacctgtccgggatggggtgcagcgcggcgctcatctcgatcggtctcgccaggaacatgctgcaggtggcgccgccgggcacgcacgcgctgatcgtgtccacggagatcctctcgtcgcagtactacgtcggcatggaccgctccatgctcctgcccaactgcctcttccgcatgggcgccgccgccatgatcatgtccaacaccgcggcccgaggcgcgcggttccggctcgcccgcgtcgtgcgcacggtggcctccgcgcgggacgccgcctaccggtgcgtgttccaggtggaggacgaggagagcaacacggggatccggctctccaaggacctcgtgcccactgccgcccagaccctgaaaagcaacatcgtcgccttcgggcccctggtcctgcctgcctcggagaagctcctcgtcgctctgtccatcctgaggcggaggctagtacagagcagccgggggagggtgtaccgcccggacttccgcaccgcgttcgagcacttctgcatccacgccggcgggcgcggggtcatcgacgaggtgcagcgcggcctcggcctctccgacgaggacgtggaggcgtcgcggatgacgctgcaccggttcgggaacacgtccagcagttcggtggtgtacgagctggcgtacatcgaggccaagggcagcatgaggaagggagaccgcgtgtggatgatctccttcggcgccggcttcgactgcagcagcgtggcgtgggagtgcatcgagcccgccgccgacgctgctgggccgtgggccgactgtatccaccgctacccagtgcagctccctaaattgatggaggcccttgat

SEQ ID NO: 145 - DNA, 735 bp, Arabidopsis thaliana
atggagaatgagagagaaaagctgatttacttggctaagctcggttgccaagctggaagatatgatgatgtgatgaaatcgatgagaaaagtatgtgagcttgatatagagctaagtgaagaggaaagagacctactaacaactggatacaagaatgtcatggaggctaagagagtttcattgagagtaatatcatccattgaaaaaatggaagactcgaaaggaaacgaccaaaatgtgaaactgataaaaggacaacaagaaatggttaaatatgagtttttcaatgtttgtaatgacattttgtctctcattgattctcatctcataccatcaactactactaatgtcgaatcaattgtcctttttaacagagtgaaaggagattattttcgatatatggcagagtttggttctgatgctgaacgtaaagaaaatgcagataattctctagatgcatataaggttgcaatggaaatggcagagaatagtttagcacccaccaatatggttagacttggattggctttaaatttctcgatattcaattatgagatccataaatctattgaaagcgcatgtaaattggttaagaaagcttacgatgaagcaatcactgaactcgatggccttgacaagaatatatgcgaagagagcatgtatatcatagagatgcttaaatacaatctttctacgtggacttcaggcgatggtaatggtaataagacagacggt

SEQ ID NO: 146 - DNA, 735 bp, Arabidopsis thaliana; identical to SEQ ID NO: 145

SEQ ID NO: 147 - DNA, 624 bp, Arabidopsis thaliana
atggagaagatcgttcgttcttcttcgctgattctacttgttggcctccttctttttatgaattttcacggatttgtccggatcgccgaagcaacgaagcgacggatcgagatctccgatgacctagacgacgttgaagacaatgaagaagacgagtcatggaaagagtgggggaagaaagcaacgaccccggaatttgatccgcctccggatttcaccaatatgggattcgatcagatccaagaggaaatggctaaacggacttttggaaccgtcgtcggtttcgtcaagctccggttaggcgtcccccgtaccaaggatgtggtgattgatattgctatgaaatggacaaaagttttaagaacaggagggataggagtaagattcatggctgtagatcgaagcacagtgatgttcaatatgcaaaatgggaagcttgtgactgagctaagggaattcgtgctgagccaagaagaagcttacgaggtcaagatagggaagcaagagtttagaagacctggagatcctccatttgaagatgtctttgacaaatttcaagctgagcaaaggaaagatcacgaagatggtgatggtaacaagaatgatcttactaaggatgaatta

SEQ ID NO: 148 - DNA, 624 bp, Arabidopsis thaliana; identical to SEQ ID NO: 147

SEQ ID NO: 149 - DNA, 600 bp, Arabidopsis thaliana
atgtcttcgaaaaagattgtgttgacaagctccgatggtgaatctttcaaggttgaagaagtggtggcaagaaaactgcagatcgtaggacacattatcgaagacgactgtgctacaaacaaaatccctattccaaacgttaccggagagattctcgccaaggttatcgagtactgcaagaaacacgttgaagacgatgatgacgtggtggagacgcatgaatcatcgacgaaaggagataaaacagttgaggaggcgaagaagaagcctgatgatgtggccgtacctgaatcaactgaaggagatgatgaagctgaggataagaaggagaagcttaatgagtgggatgcaaagttcatgaaggatttcgatattaagacgatcttcgacattattctggctgctaactatctcaacgtccaaggtctttttgatctctgtagcaagaccattgcagattacataaaagatatgacgccagaggaagttcgagaactctttaacatcgagaatgatttcacacctgaagaagaagaagcaattcgcaatgaaaacgcttggacttttgagcaagatggaaaacaacaagttccaaaaccc

SEQ ID NO: 150 - DNA, 741 bp, Arabidopsis thaliana
atgtataagtggaatcttccttaccgaaaagatgacgtggagaccggccgtgaaggcggtgagagatctctgtatccgactatgcttgagagccccgaactccgatggggtttcatcagaaaggtatattccataatcgcattccagcttttagcaaccatcgccgtcgcctccacggtggtttttgtccgtccgatcgccgtgttcttcgccactactagtgccggtctcgctctctggattgtcttaatcatcacgcctcttatagtaatgtgtcctttgtactattaccaccagaaacatccagtgaattatttgcttctagggattttcacggtagctttggctttcgccgtcggattaacatgtgctttcaccagcgggaaagtgattcttgaggcagcgattttgacaacagtagtggtgctttccttaaccgtctacaccttttgggcagcaaagaaaggatatgactttaacttcctcggtccattcttgtttggtgctctcatcgttctcatggtctttgcccttattcagattttcttcccgttgggacggatctcagtgatgatctatggatgtttggctgcgataatattctgcgggtacatagtttacgatacagacaatctcatcaaacgttacagctacgatgagtatatttgggcagcagtttcgctctacttagatattatcaacctcttcttggctctccttaccattttcagagctgccgag

SEQ ID NO: 151 - DNA, 741 bp, Arabidopsis thaliana; identical to SEQ ID NO: 150

SEQ ID NO: 152 - DNA, 348 bp, Glycine max
atggcgactcttgattccgacgtgcctatggttcccgccggcgagccctcgagcagcgccggtccttcttccaagaagcccaagcgcttcgagatcaagaagtggaacgccgtcgctctctgggcttgggacatcgttgtcgataactgtgctatctgccggaaccacatcatggatctctgcatcgagtgccaagccaaccaggctagcgccactagcgaggaatgcactgtggcttggggagtttgtaaccatgcttttcacttccattgcatcagtcgatggctcaagactcgtcaagtttgtcctctagataacagtgagtgggagtttcagaaatatggccac

SEQ ID NO: 153 - DNA, 1329 bp, Arabidopsis thaliana
atgatggtgtttgtggtttttgttatgtgtaggtataagattttggaagagcttggtgatggtacttgtggtagtgtatataaagcagtaaatttggaaacatatgaagttgttgctgttaagaagatgaagagaaagttttattattgggaagagtgtgtgaatctgcgagaagttaaggctcttcgtaagctaaatcatcctcatatcataaagttgaaggagattgtgagagaacataatgagctttttttcatctttgagtgcatggatcacaatctgtaccatataatgaaagaaagggaacgacctttttctgaaggagaaataagaagttttatgtctcagatgctgcaagggctcgcacacatgcataaaaacggttatttccatcgagacctgaaacctgagaatttgctggtgaccaacaatatcctgaaaattgctgactttgggttggctagagaagttgcatctatgcctccttacactgaatatgtgtccacacgttggtatcgagctccagaagttttgctacagtcttcattatacactcctgcagttgacatgtgggcagttggagcgatactagctgagctttacgctttaactccgttatttcctggtgaaagtgagatagatcaattatacaaaatctgctgtgttcttggcaagccggactggaccacgttccctgaagcgaaaagcatatctcgaattatgagtattagtcacacagagtttccgcagacacgaattgctgatttacttcccaatgctgctcctgaagctattgatttgatcaatcgactttgctcatgggatccattgaaacgaccaactgctgatgaggcactaaatcatccatttttcagtatggctacgcaggcttcatatcctatccatgaccttgagctgaggcttgataatatggcggcgttgcctaatcttgagctaaatctctgggactttaacagagaacctgaagaatgttttcttggcttgacactagctgtgaaaccaagtgctcccaaactagaaatgctccgcaatgtatctcaggacatgagcgagaattttctcttttgccccggggtcaacaatgatcgagaaccatcagttttctggtctctgctctctcctgatgaaaacggcctccacgcgccagttgaatcatctcctttatctttgtctttcagtccaatgcagcaacacacagttggacctccacagtcgagtggcttcacaatgacatcatcaatgcaaccgaatatgttggaccgcccgtggatggccgtgtctgcgccgtttcaacaaagtcattacctc

SEQ ID NO: 154 - DNA, 1013 bp, Arabidopsis thaliana
gcctcgccgtgctctaggttctcggatggaggccgaggcggcggcgaagagggcgcgggagagcggtgacgcggcggcggccggtgccggcgagcaggcgggtatctctgccgtcatccctggatggttctccgagattagccccatgtggcctggtgaggcacactcattgaaggtcgaaaaggtactattccaaggaaagtcggactaccaaaatgtgatggtgtttcagtcctccacgtacggcaaggtgcttgtgctggatggagtgattcaggtcactgagagggatgagtgtgcttaccaagagatgattacccacctccccctttgctctatcaaagatcccaagaaggtgttagttattggaggtggagatggtggtgttttgcgtgaagtttcacgacattcctcggtggagcaaattgacatatgtgaaattgataagatggtggtagatgtctccaaacaattttttcctcatctggctgttggatttgaagacccccgtgtgtcattacacattggagatggcgtggcctttttgaaaaatgctccagagggtacttatgatgcagttattgtggattcctctgatccaataggaccggctcaagagcttttcgagaagcctttcttccagtcagttgccagagctttgcgtcctggtggtgttgtatgtacccaggcagagagcatatggttgcatatgcatattattgaagatattgtagctaattgtcgccaagtttttaaaggctcagtgaattatgcttggacaacagtaccaacataccctagtggtgttattggttttatgctttgctccaccgaggggcctactgttgatttccagcatcctatttttaacattgaggataatgagttctcaacaaaatcgaaaggaccacttaagttctacaattccgagatccactcagcatcattttgtttgccgtcttttgcgaagagagtcattggatccaaggccaactagatcaaagatcactgag

SEQ ID NO: 155 - DNA, 750 bp, Arabidopsis thaliana
atgacgagcgcatcggaactcttctctacacgaagatcacgtccgggtcgatccgacccggctttagaatccgacacttcttcctatcgacaccactcacaccatcatcatcgccgtcacggcgtccatcatcataatcagcgtcatgattccgacggctgtgatcctctccggcgacccactccccgtctccgacgcttctttcaccatccgattcaggaacgtagtagacctattcgtgatgttcaaggcactagtcagtatttaaatacggatagtactgatactgaaactcagagtagcagctttgttaacctaaatggatccgagaggcttcctggagctgttctgcttgcaagggatagacttttcgaaagattgagaggtgtttctttgtctagtaacagtcgaagcaacagagtttcattggatgatcaaagggagtcttcatttcattctatagatggagatccaatttttcaactagcagggcttcaagtgacctatgaatgcaacaagaaaccacaaggtcttactcaagatgctattaactgtttacaccggcaaacttttagctcagccgaggttaaatccgagatgagagattgtagcatatgtttagagagtttcactaaaggtgacatgctaatatccttaccctgtacccatagtttccattcttcttgcttaaacccttggcttagagcttgtggagattgtccttgttgccgtagagccatagcaaaggaa

SEQ ID NO: 156 - DNA, 750 bp, Arabidopsis thaliana; identical to SEQ ID NO: 155

SEQ ID NO: 157 - DNA, 474 bp, Arabidopsis thaliana
atgtccgacgaggagcatcactttgagtccagtgacgccggagcgtccaaaacctaccctcaacaagctggaaccatccgtaagaatggttacatcgtcatcaaaaatcgtccctgcaaggttgttgaggtttcaacctcgaagactggcaagcatggtcatgctaaatgtcattttgtagctattgatatcttcaccagcaagaaactcgaagatattgttccttcttcccacaattgtgatgttcctcatgtcaaccgtactgattatcagctgattgacatttctgaagatggatatgtcagtttgttgactgataacggtagtaccaaggatgaccttaagctccctaatgatgacactctgctccaacagatcaagagtgggtttgatgatggaaaagatctagtggtgagtgtgatgtcagctatgggagaggaacagatcaatgctcttaaggacatcggtcccaag

SEQ ID NO: 158 - DNA, 474 bp, Arabidopsis thaliana
atgtcagacgacgagcatcacttcgaatccagcgacgccggagcttctaagacttatcctcaacaagccggtaacattcgtaaaggtggtcacatcgtcatcaagggacgtccctgcaaggtggttgaggtatcgacttcgaagactgggaagcatggtcacgccaagtgtcactttgttgccattgatatctttacttctaagaagcttgaagatatcgttccttcttcccacaattgtgatgttccacatgtgaatcgtgttgattatcagttgattgatatctctgaagatggctttgttagtcttcttactgataatggtagcactaaggatgatctgaagctgccaacagatgaagctttactcacacagctcaagaatggatttgaggagggtaaggatattgttgtgtctgtcatgtctgcaatgggagaggagcagatgtgtgctctcaaggaagttggtcccaag

SEQ ID NO: 159 - DNA, 591 bp, Arabidopsis thaliana
atgagcgcttcgaggttcgtaaagtgcgtgacggttggtgatggagctgtcggaaaaacttgtttgttgatttcttacacaagcaacactttccctacggattatgtgcctaccgttttcgataatttcagtgccaatgttgtggttaatggaagcactgtgaatcttggattgtgggacactgcagggcaagaggattacaatagattaagaccactgagttaccgtggagcagatgttttcattttggccttctctcttatcagtaaagccagttatgaaaacgtctccaaaaagtggatcccggagttgaaacattacgcgcctggtgtccccatcgtccttgttggaacaaagcttgatcttcgagatgataaacagttctttatcgaccatcctggtgctgttccgattactactgctcagggagaggagctgaggaagcaaataggagcacctacttacatcgaatgcagttccaaaactcaagagaatgtgaaggcggtgtttgacgcagccatccgagtggtgttgcaaccgccaaagcagaagaagaagaagagcaaagcgcagaaggcatgctccattcta

SEQ ID NO: 160 - DNA, 1584 bp, Arabidopsis thaliana
atggtaataggagcagcagcgcgtgtagccatcggcggttgtcgaaagctcatctcgtcacatacctccctcctcctcgtctcttctcagtgtcgccagatgagtatggacgcacaaagcgtttctgaaaagcttaggagttctggtctattacgaactcaaggtctaattggaggcaagtggcttgactcgtatgacaataagacaatcaaggttaacaatccagcaaccggtgaaattatagctgatgttgcatgtatgggaacaaaagagacaaatgatgctattgcttcttcttatgaagcatttacttcttggagcagattgactgctggagagaggagtaaagttttacggagatggtatgacctcctgattgcacacaaggaagaacttggacaacttataactttggagcaaggaaaaccactcaaggaagccatcggagaggtagcatatggggcaagttttattgagtactatgcggaggaggcaaaacgtgtatatggtgatataattcctccgaatctgtctgatcgccgactgttggttctaaaacagcctgtcggtgttgttggtgcaattaccccttggaacttccccttagccatgattactcggaaggtcggccctgctcttgcttctggatgcacggtggttgttaaaccatctgaacttacgcccctaacagcacttgctgcggctgaacttgcacttcaagctggagttcctccgggggcacttaatgtggtcatgggaaatgctcctgaaattggggatgctttgcttacgagtccacaggtgagaaaaatcacgttcacgggatcaacagcagttgggaagaagttgatggcagctgctgcacctaccgtcaagaaggtttctctagaacttggcggcaacgcaccctctatagtatttgatgatgcagacctggatgtagctgtaaaaggaacgcttgcagcgaaatttaggaatagtggtcagacatgtgtttgtgcgaacagagtacttgtgcaagatggtatctatgataaatttgctgaggccttttctgaagcggttcaaaaattagaagtaggagatgggtttagggatgggacaacccagggtccacttataaatgatgcagcagtgcaaaaggtagagacatttgtacaagatgctgtttctaagggagcaaaaatcatcattggtggcaaaaggcacagtctagggatgactttctatgagcctactgttatccgcgatgtttcggataacatgatcatgtctaaggaggagatttttggacctgtagctccccttattcggttcaaaaccgaggaggacgctatcagaattgctaatgacacaattgcaggacttgctgcttatatattcacaaacagtgtccaaagatcttggcgtgtatttgaagcacttgaatatggacttgtaggggtgaacgaaggactcatatcaacagaggtggctccattcgggggagtgaagcagtctggtcttggaagggaaggatccaagtatggtatggacgaataccttgagatcaaatacgtatgcttgggagatatgaatagacac

SEQ ID NO: 161 - DNA, 1413 bp, Arabidopsis thaliana
atgtggcggcgaagtaacttaccggggaatccagattccgatcagagcatatctgaggaagaagaagaaaatgatatttcgccgaaggagaatgcgaaggaacaagagagaggattactacttcaaacaaagctcgaaaaactcataggttgtggtgagctaaattatgctagggaaaccggtgatgtaactctggaagcaactctacggaagatatcatcctctcttgaagatgtggtcgaagttcctgactcccccgaggagagttatatttcttcttccagaagaactggattagcatgcatatctgctcaggaaaatgggtcagatgatgagattacacatgatgaacaagtggcaacttggtctgctataagtaaagaaaccaagtcactaatccatttgaatggtgttgcttcagtcgcatcatcccatctatctggcttcagagccaagaaaagtagtaatggtctcaaagatcatgggaggccaaaattttcatttaactcacatactcatggagaaacgtcatccaagataagtgacatggctgaaatctttgagcctgatgtggaggatcaggctatagaagaggatccaattattgaatgccccaacagttttgatgaaagatcagaaaacaggcagggtgtttctgttgctgagtcgagagaagttttgcacgagtgcactaaagatgcggtacccaagcttcaagaaattcctctagataaaattagactgataaaaagaagctctgaactggacagcagacatgaagcaaaaagtcggaaatttactcataagggaaattcatctaacttccaagatagtgatactgatgatgaacttcctggacctatggatagtggatcatcaagcgatgatgagcctagttatcaaagctcagtgccaaacatttccaaccagaagaaacaatttgttggggaccggtttgatgaagcaataaaagcttcctctttgagcaaagaaggtctcttgttcggttcacctaaattatctggtggctctagcctgtatggcaagctgcaacagatcatgaaacaagaaaaagagacggaaatggaaatcatgaggaaattgcaaagcggaatcggagaagcagattcatcgggctatgttgatgttaaagtcatgtcaagacacttggagggaaagcttgtcgtctgcaaatgctctgtcattgacctctctggggactccctattactcaagaacacacaagctcttgcggcaaaagaaacagaaacaacaattatttttagtccgaaagtttgtgcggatgttgatatcgaaatagggaactttatccgagtatatgcgccatggaaggagttggaagtgcagaaaaccaatgatgtgattattttgtcttcatatttctcaagtttg

SEQ ID NO: 162 - DNA, 210 bp, Zea mays
atgtcggcgctgttcaacttcaactccttcctgaccgtggtgttgctggtgatctgcacctgctcctacatcaagatgcagttcccggcaatcctcaacgaccgcaccggattccgtggtttcttttggaaagctgccaggataggtgagcgattgagcccttgggtatcagtcgggtgcttggctatgggaatatccactattttcttc

SEQ ID NO: 163 - DNA, 948 bp, Arabidopsis thaliana
atgggtgggggaggagctatgaggtcggcggcgaagatagccggaattggcgtgtccaaggcggcgctccggccttcggcgctccctacggagcagacggtccgcaacgcgtcgcgaccaacggcggtctccggagtgtcgtcgcagtcggcgaaatccgcggaggtggcgccgctgcacacggcagctgcctgggacgattgggacttcgccgaggatggcgaattggtcgtgccgaggatggtgttcggttctgtccccactctcgatgaagctaaggaagccaccgcagagttgaaggacgctattgatcaagtatatctttgtcctgagacttctcaatattcatctcccggtggtcaagtctctgctttgtctcccactctctatgggccagtgaacagatcttgtgtcattgatgctatttcagatcctacggccccaaagcatgccattcaggcttttcatttgcttagcactagtcgtgaggcccaggctgttgtggcttcacttgcttgtgacccaaatgtatggaatgcagtcatggaaaattctgctgtcagtagtttcttccaatcacaacagtcagtggctggttttggagcagcagaaaattctgaggaagtggataagttatcaagctgtgcttctgaaacagtcgaatcccctgagaaattggaagggtcggctgagtctcacccggggaacatgtttgacgatttcatgggtcttctgcagaatgtgaagcttacagttattgaattggtaagtaggttgtctggtttccttcagaacatattcccaacacctgatgctatgagagagaaaatgtctttcgatgctgatgggaacactaaagcaagtttcatggatagtaaaattagcatgggaggaaccttcataggtttggcagtgctggtgataatggtgatcgtgacaaagagagct

SEQ ID NO: 164 - DNA, 456 bp, Arabidopsis thaliana
atggcggaggagcagcagcatcagagatggcaggagggccaccgcctgtgcgccaacaattgcggcttcttcggcagccccgcgacgctggacctctgctccaagtgctaccgcgacctataccagcagcagccagcaggcgcggcggcgggcccctccgctcccaccgcgtcggccttccagcattcctcctcggcagtctccggcgcggcggcggtctctcccgatctcgaacctcccgcgacggcccctgctggcgccaaggcgggcaggtgctccagctgccggaagcgcgtgggcctgacggggttcgcgtgccgctgcggagctaccttctgcggcgtgcaccgctacccggagcggcacgcgtgcgccttcgatttccgggccgccggccgcgacgccatcgcgcgcgccaaccccgtcgtcaagggcgataagctcaaggacaagatc

SEQ ID NO: 165 - DNA, 366 bp, Arabidopsis thaliana
atggagcacggttcgttcacgaatgttagtcatgcttcgtttactttatcggaagaagatcacacacttgctaatgctgttagattcgtcttaaaccaagatcccagagtaaccgtggctgcatacaccatcccacatccttcccttgaacaggtcaatatccgggtccagacaacaggtgatccagcaagagaggtttttaaagatgcatgtcaagagctcatgcaaatgaacagacatgtgagaagcgtttttgataaggctgttgctgagtataaggatgaacaaaagcgtaaggaggaggctgaagaagaagagcttaagaggcagagggatctatttgggtccatggacattgaaaacaac

SEQ ID NO: 166 - DNA, 894 bp, Glycine max
atggtgtacgtcaaggctcagaaatcaaaagcctacttcaagagatatcaagtcaagttcaagagaagaagagagggaaaaaccgattaccgtgccaggattcggttgattaatcaggacaagaacaaatataacactccgaaataccgatttgtggttcgctttagcaacaaggacattgttgcacaaataatatctgctagcattgccggcgatttagttcttgctacagcatattcacatgagctgccacgatatggtcttgaagtaggacttacaaattatgcagcagcttattgcactggtctcctgttggcccgaagagtcctcaaaacacttgaaatggatgaggagtatgaaggaaatgttgaggctactggagaggattattcagtggaacctgccgagagcaggaggccattccgtgcactccttgatgttggtcttgttaggactacaacaggaaatcgcgtctttggtgcccttaagggagctctggatgggggtttggatattcctcacagcgacaagaggtttgctgggtttgataaggagaagaaggagcttgatgctgaggttcatcgcaaatatgtttttggtggacatgttgctgcctatatgaagatcttggcagaagatgaaccagagaaataccagtcacacttcagcgaatacatcaaacgtgggatagaggctgatggtattgaggcactttacaagaaggttcatgctgccatccgtgctgatcctactctcaggaaatctgataaggagcccccgaaggagcacaagaggtacaacatgaagaagctgacttatgaggaaaggaaggctaagttgattgcacgcgtggcggctatcaactctgctgctgatagtgatgaagatgatgag

SEQ ID NO: 167 - DNA, 942 bp, Zea mays; identical to SEQ ID NO: 50

SEQ ID NO: 168 - DNA, 1137 bp, Zea mays
atgggtgccgagttgggagaagcgggtgtccctgcccgggacatggtggacgcgctggaaggcgtgcgctccatcctgctgaaaccgtcggagcgcctcgacgacaagcgcttcacgaggatcgccggcgccgacttcgacgacgccggcctcggcctcgccgggttgctcggctcgctcgcgtccacggggttccaggcctccaacctcggcgacgccatcgacgtcgtcaaccagatgttggactggaggttgtcccacgagaagccaagcgacgactgcgctgaagctgaactcgatcctgcgtacagagaatccgtcaagtgcaagatattcctggggttcacttcgaaccttgtgtcttccggtgttcgggagatcatccggtttcttgttcagcatcgcatggtggacgttattgttacgactgctgggggtatagaggaggacctcatcaaatgccttgcgccaacctacagaggcgacttcactctgcccggagcgctgctgcggtccagaggacttaaccggataggaaacctgctggtgcccaatgacaactactgcaagttcgagcactggatcatgccgatcctcgacaagatgctgctggaacagtccacccaaaatgtttggacgccgtccaaggtgattgctcgccttggcaaggaaataaatgacgaaagctcctacctttattgggcgtacaagaacaacatccctgtgttctgcccagcattgactgacggatcaattggggacatgctgttctgtcactcggttcacagtccaggtcttgttgtcgacattgtacaagatgtacggctgatgaacgcggaaaccatccacgcaagcccaaggaagacagggattatactccttggcggaggccttccgaagcatcatatatgcaacgccaatatgctgcgcgacggagctgactatgcggtgtatgtcaacacagctcaggagttcgatggcagtgattccggggcgcggcctgacgaagcggtttcatggggaaagatcaagagctcagcgagaactgtgaaggtgcattgtgatgcgacgattgcctttccacttcttgtggctgcaacatttgcacgcaaggttcacggcactaaatcaacaaac

SEQ ID NO: 169 - DNA, 1500 bp, Oryza sativa
atgagttcctccccgtcctttggtctcctggccttagcagcagtactcctagcactgaacttagcacaacatggctccctcgccgcaaccgtcggccccagggtcatcgtcgtcggcgccggcatgtctgggatctcggcggcgaagaggctgtcggaggccgggataaccgacctgcttattctggaagcgacggaccacatcggcgggcggatgcacaagacgaacttcgccggcatcaacgtcgagttaggcgccaactgggtggagggcgtgaacggcggcaagatgaaccccatctggcccatcgtcaactccaccctcaagctccgcaacttccgctccgacttcgactacctcgctcagaacgtctacaaggaggacggtggcgtctacgatgaagattacgtccagaagagaattgaactggcggacagcgtggaagagatgggggagaagctctctgccactttgcacgccagtggcagagacgacatgtctatccttgccatgcagcgcctcaacgaacaccagccgaacgggccggcgacgccggtggacatggtggtggactactacaagttcgactacgagttcgcggagccgccgcgcgtgaccagcctgcagaacaccgtgcctctcgcgaccttcagcgacttcggcgacgacgtctacttcgtcgccgaccagcggggctacgaggccgtcgtctactacctcgccggccagtacctcaagaccgacgataagtctggaaagatcgtcgacccgcgcctgcagctcaacaaggtggtgcgagagatcaagtattccccgggtggcgtcaccgtcaagacagaggacaactcggtgtacagcgcagattacgtcatggtttctgcgagcctgggtgtcctgcaatccgatctcattcagttcaagcccaagctacctacatggaaggttagggcgatctaccaattcgacatggccgtgtacaccaagatcttcctcaagttccccaggaagttctggcctgaagggaaaggaagggagttcttcctctacgccagcagcaggagaggttactacggagtgtggcaggagttcgagaagcagtaccctgacgccaatgtcctcctggtcaccgtgaccgacgaggagtcgaggcgcatcgagcagcagtcggacgagcagaccaaggcggagatcatgcaggtgctgcggaagatgttccccggcaaggacgtcccggacgccaccgacatccttgtcccgaggtggtggtccgacaggttctacaagggcaccttctccaactggccagttggcgtcaaccgctacgaatacgaccagcttagggcaccggttgggagggtatacttcaccggcgagcacaccagcgagcactacaatggctatgtccatggagcctatctttcaggtatcgactccgctgaaattctcatcaactgcgcccagaaaaagatgtgcaagtaccatgtccagggaaagtatgac

SEQ ID NO: 170 - DNA, 2130 bp, Arabidopsis thaliana
atgtcagcgtcgccgtcgtcgatgagcggcgccggcgccggcgaggcgggggtgcggacggtggtgtggttcaggcgggacctgcgcgtggaggacaacccggcgctggcggcggcggcgcgggcggccggggaggtggtgccggtgtacgtgtgggcgccggaggaggacgggccgtactacccggggcgggtgtcccggtggtggctcagccagagcctcaagcacctggacgcctcgctccggcggctcggcgccagcaggctcgtcacccgccgctccgccgacgccgtcgtcgcgctcatcgagctcgtccgcagcatcggcgccacgcatctcttcttcaaccacctctacgacccgctgtcgctggtgagggaccaccgggtgaaggcgctgctgacggccgagggcatcgccgtgcagtcgttcaacgccgacctgctgtacgagccatgggaggtggtcgacgacgacggctgcccgttcaccatgttcgcgccgttctgggacaggtgcctgtgcatgcccgacccggcggcgccgctgctgccgcccaagaggatcgcgcccggcgagctgccggcgaggaggtgcccctccgacgagctggtgttcgaggacgagtccgagcgggggagcaacgcgctgctggcgagggcgtggtcgcccgggtggcagaacgccgacaaggcgctggccgcgttcctcaacgggccactcatggactactcggtgaaccggaagaaggccgacagcgccagcacgtcactgctgtcgccgtacctgcacttcggcgagctcagcgtacgcaaggtgttccaccaggtgaggatgaagcagctcatgtggagcaacgaggggaaccacgccggcgacgagagctgcgtcctcttcctccggtccatcggcctcagggagtactcgaggtacctcacgttcaaccacccgtgcagcctggagaagccactcctggcgcacctcaggttcttcccctgggtggtcgacgaggtgtacttcaaggtgtggaggcaggggaggacagggtaccctctcgtcgacgccgggatgcgcgagctctgggccaccggctggctgcacgaccggatacgcgtcgtcgtctccagcttcttcgtcaaggtgctccagcttccatggcgctgggggatgaagtacttctgggacaccctgctcgacgccgacctcgagagcgacgcgctcggctggcagtacatctccggctctctccccgatggccgtgagctcgaccgcatcgacaaccctcagcttgaaggatacaagtttgatccgcacggggagtatgtccggcgatggctgccggagctggcaaggctgccgacggagtggatacaccacccatgggacgcaccggagtcggtgctccaggctgcagggattgagctaggctccaactatcctctccccatcgtggagctggacgcggcgaagaccaggctgcaggatgcactgtcagagatgtgggagctcgaggccgcgtcacgcgcagcgatggagaacggaatggaggagggcctcggcgactcctccgacgtgccgccgatcgccttcccaccggagctgcagatggaagttgaccgagcaccggcccagcctactgttcacggaccgacaacggctggccggcgacgagaggatcagatggttcccagcatgacctcctcgctggtcagagctgaaacagaactttcagcggattttgacaacagcatggacagtaggccggaggtgccgtcgcaggtgctcttccagcctcggatggaaagggaagaaacagtggacggcggcggtggcggcggaatggtcggcaggagcaacggcggcggccaccaaggccaacaccagcagcaacagcacaactttcagactacaattcaccgggcacggggcgttgcgccgtctacgtcagaggcatcaagcaactggactgggagagaaggcggcgtggtgcccgtctggtcgcctccggcagcgtcaggcccctcagatcactacgctgccgatgaagctgacattaccagtagaagttatttggacaggcatccacagtcgcatacgttgatgaactggagtcagctctcgcagtcattg

SEQ ID NO: 171 - DNA, 315 bp, Synechocystis sp. PCC 6803
atggaaggtgtaggtgctaggcagaggaggaaccctctgatacccagaccaaacggttcaaagaggcatctgcagcatcagcatcagccaaatgctgccgagaagaagaccgccgcgacatcgaattacttcagtatcgaggcgttcctcgtgctcgtcttcctcaccatgtcattgctcatacttccattggtgcttcccccattgcctccgccgccatcgctgctgctgctgctgccagtctgcctgctcatcctgctggttgtgctggccttcatgccaacggatgtgcggagcatggcttcctcttacttg

SEQ ID NO: 172 - DNA, 888 bp, Arabidopsis thaliana
atggttactgcgacagcatcaactccattttcactctcgtcgtccgtggttttcacgcgccgtcgtaatttcaaacgttttccagtttgcgccagtctttctccggaggtttctcctcttctcagagcagctcatcacactgtggataattatgtaaagagtgggatgattattggtttaggatctggagaagcttcagattttgctatacgttatttgggtcaacaacttggttctggttctttacataatgttgttggtgtaccaatgtctgctcgaagtgcgagtgaagcagcaaagtatggaatccccttggaatattaccgggatggtgttcagattgattttgcatttcatgatgctgatgctgtagaagagaatacgcttattgcagttattggacggcggagaagttcacaggaagatgactatattctgaaacaaaagtctattgtaaaagtagctgatgaggcagtcttcatgataaaggaagaacaatacaaagccggtcttgaaggttctatccctgttttagttcaatctcttaattggttggccatagctgaggagatagatgacttgtatctaggcgatgcagaggtgtggagaagagcttctgttgaaaatgaaggccctcttggaggagactttcctatagttaccagtgatggtcacaacattcttgatgttatatttacaactccgattcgaagcctcgctgacttggctacaagccttgataagattgatggggttgtggaccatggactaattatcaaaactcgatgcacggtggtgattgcagaagaaactgttgtaagaagtgttaccttgcagaccagtgcattggagggtggtgtacgaacctatggacagactttgcaaaag

SEQ ID NO: 173 - DNA, 327 bp, Zea mays
atgtcaggggtttgggtgttcaagaacggggtggtgagattggtggagaagcagcaggcgacggcggggacggcggtggcgggagggaggaggaaggcgctggtgcacacgccgagcgggcaggtggtgtcgtcgtacgcggcgctggaggcgcggctgacggcgctcgggtgggagcgctactacgaggacccctccctcttccagttccacaagcgtggctccctcgacctcatctccctccccgccgacttctccgccttctcctccgtccacatgtacgacatcgtcgtcaagaaccgcgactccttccgcgtcgtcgacgcc

SEQ ID NO: 174 - DNA, 1254 bp, Oryza sativa
atgaccctcaccgacgcccaaatatccatcgtcaaatccaccgcccctgtcctcaagcaacacggcgaagccatcaccaccgtcttctacaacgacctcatcacggagaacccctccctcaaaaacatcttcagccttacctcgcaagccaccggcgcccaaccgcgcgccctcgcccacgccgtcctcgcctatgccacctacatcgacaacctttccgcgctctcggaggcggtcgcgcgcattgcgcacaagcacgtgtctctccaagtcgagccggcgcagtacgctattgtcggccaatacctgatccaagccatcggcaaggttctgggcgatgcggcgactcccgagattgtagacgcttggacggcggcatatggagttttggcgaacgtttttattggcgtcgagggaggcatgtacgaggagaatgaaaagaaagaccactggaaggggtggaggaagttcaggattgcgaggaaggtggaggagagcagttccatttcgagcttttacctgaggcccgtggatggggccactctgcccaagtatctgcctggccagtatgtgtctgtgcaggtgctggtctcgcagttggggtatttgcagagtaggcagtacagcttgagcgaggcgccgaaggagggcgggatggaggaatatcgtattagtgtcaagagggaggaaggggaaaccggtgcgccgggactggtttccaacttgctccatggtatgcaagagggcgcggaggtggaggttagtcatccccagggcgagttcttccttgaccccgcggatgcaagcaaggagggggtgccggctgtgttgatctcggtgggcgtgggcgctactccgatgatggctatcctcaagagcttgcttcaggagaatgtcaagaggagaccggtgtcgtggatccatgcgagcaagtcgagctcgacgcagccgtttggcgaggaggtgaggcgcatcgtcaaggagaaccctgagcaggtgtcggcacatgtgtttctgaagacggtggctggtacggatcaggccggtgtgcattacgattttgcggatacgaggatggacttgaccaagttggatggggagcgggatctgcatttggcggataagaggaccgagtactacatctgcggaccggagacgtttatggtggaaaccaggaaagtgttggttggtcttggagtagataagagcaaggtgcacttggagctttttgctacgggtttcgttgctgatgag

SEQ ID NO: 175 - DNA, 867 bp, Arabidopsis thaliana
atggcgaggaacgggattgggagttcaggagggaagaagaatggggctgggcagtttttcttagcgacgctgcttctttggcttgtctccgtcgtgtttgagattgctttcaatctccggacggagcttctctgggtgatttgcggtggatgcttctttcaattgatgaattgggttgttcgttcatggatttctcgtgaccctatatttgttaatacctctgtctcgcttttgcactcaatcatcacctccgcatcagtggttttcatacttctcaatcaatgcttagccaaaggtttagacgagatgtttgatcattctgagttggttggtgggacttggaaatgggcatatccagctttgtgtttctcatgcggctactttgcatatgaccagtgggatatgcttcagtaccggttatacagcggcttaataccttctattcttgttcaccatctagtcctccttgtttgcttcacattggcactataccgaaatgtaaccatcaactaccttattcttactctcatctgtgagatgcattcgatctttctacacgtgaggaagctaaggagaatggcaggaatccgagacagcaacacagcattggtgaaactggagtgggtattaaactggacagcctttgtgtttgcgagatgcattcctcacattctcatcactatcaagctgatcaaagacgcacacaagtttgggaaaggcgtggagttaccactcgctctgtctggtatggcaggaatgaacattcttaatgttggcctcgggttggatctgtttcatgctttcagaagagagagaagccacagaagaaaccaagagaacggcaaccttcacgaccatggagaataa

SEQ ID NO: 176 - DNA, 2175 bp, Arabidopsis thaliana
atggagtttggatcttttcttgtgtccttagggacatcttttgttatcttcgtcattctcatgcttctcttcacctggctttctcgcaaatctggaaatgctcccatttattacccgaatcggatccttaaagggctggagccatgggaaggcacctccttgactcgaaacccttttgcttggatgcgtgaagctttgacttcctctgaacaagatgtcgttaacttatccggcgtcgatactgctgtccactttgtcttcttgagcactgttctggggatatttgcttgttccagtcttcttctcctaccaactctactgcctctagccgctacagacaacaacataaagaacacaaagaatgcgacagataccacaagcaaaggaacttttagccaacttgataatctatcaatggctaacatcacaaaaaaaagttcgaggctgtgggcgttcctaggagctgtttactggatatctttggtcacatatttcttcttgtggaaagcttataagcatgtctcttcattgagagctcaagctctgatgtctgctgatgtaaaacccgagcaattcgctattcttgttagggatatgcctgcaccacctgacgggcagacacagaaagagtttattgattcttatttcagagaaatataccctgagacattctacagatcgcttgtcgcaacagaaaacagcaaggttaataaaatatgggaaaaattggaaggttacaagaagaagcttgcgcgagcagaagcaatattagcagcaactaataaccgtcccacgaacaaaaccggcttctgtgggctagtcggtaaacaagtagacagcattgagtattacactgagctaatcaacgagtctgtagccaaactggaaacagagcagaaagcggttcttgctgagaagcagcaaaccgcagcagtggttttcttcacaaccagggttgctgctgcatcagcagctcagtctctgcactgccagatggttgataaatggactgtgaccgaagctcctgagccacggcagctcctatggcagaatctcaacatcaagctcttcagcagaataatccggcaatacttcatctacttctttgttgcagtgaccattctgttttacatgataccaatcgcgttcgtctctgccatcaccactcttaagaatcttcagaggattattccgttcataaagccggttgtggagataaccgccataagaaccgttttggagtctttccttcctcagattgcgctcattgttttcttggccatgttgccgaagcttctcttgtttctctccaaagccgaggggattccttcacagagccatgccattagggctgcttcagggaagtacttttacttctcggtctttaatgtcttcattggtgttacccttgctgggactttgttcaacacagtgaaggatatcgcgaaaaatcccaaactcgacatgattattaaccttttggctactagcctccctaagagcgcaactttcttcctgacctacgttgctctcaagttctttatcggttatggccttgagctgtctcggatcatacctttgataatcttccacctgaaaaagaagtatctctgcaaaaccgaagcggaggtcaaagaagcttggtacccgggagacttaagctatgcgactagggttcccggagacatgctcatcctcacaatcacgttctgctattcagtcattgctcctcttatcctcatattcggcatcacctactttggtttaggctggctagtcctcaggaatcaggcgttgaaagtgtacgttccatcatacgagagctatggaagaatgtggccgcatattcaccagcgcatactagcagcgttgtttctattccaagtggtaatgtttggctacttaggagccaagacattcttctacacggcccttgtgatccctctcattatcacctctctcatcttcggatatgtgtgccgccagaaattctacggagggttcgaacacacagctctcgaggtagcttgccgtgagctgaagcagagtccagacctagaggagattttcagagcatacattccgcatagcttgagctctcacaaaccagaagaacacgagttcaaaggcgcaatgtctcgttatcaagatttcaacgcaatagcaggcgtttaa

SEQ ID NO: 177 - DNA, 1344 bp, Arabidopsis thaliana
atggatattttcgacaactctgatcttgaataccttgttgatgaatttcacgctgatttcgatgatgatgagccctttggagaggttgatgtcaccagtgagtctgattccgatttcatggactccgattttgatttcgagctgagtgagagtaagacgaacaatgaaacatcagcgttagaagctaggaatggaaaagatattcaagggattccatgggagagcttgaattacacgagggatagataccgtgagaatagattgctgcactataaaaactttgagagtctgtttcgatccagagaagagcttgataaggaatgcttgcaagtagagaaaggaaagaacttttatgactttcagttcaatacaaggcttgtcaagtccacaatagcgcattttcagctgaggaacttggtatgggcaacatcaaagcacgatgtgtatttcatgaacaactactctctcatgcactggtcatctttgttgcaaaggggcaaagaagtacttaatgtggcaaagcccattgttccttcaatgaagcagcatggatcgttgtcacagtctgtatcaagagtccagataagcaccatggcagttaaagacgatttgaagttgcgggagggttccaaggagagcttatctaaaatcaacgaacctgaggttgctttctgcactaaactaacatcagctgataacgacatcaccaattcggttgacatctacaacgcacctagtggctcgttaagggttatgaccgcgaacaatgactgtactgtccggctatttgatgccacaaactttgccttgctcaacagatttgcctttcactggtctgtaaataacatctccaccagtccagatggtaagctagtggctgttctaggagacagtcctgagtgcttactagcagataccggatctggaaaagtgatccacggactcgaaggccatctcgactactcgttttcatcagcatggcacccaaacggtcaaatcttagccacgggtaaccaagacacaacctgtagactatgggacgtaaggaacctgtctcaatcactcaaagtcttgaaaggaaacatgggagctatcagagccttgaggttcacgtctgatggacggttcttagccatggctgagccagcggactttgtacacttgtttgacacggaagctggttacagtcagtgtcaagagattgatctgtttggagaaatagcgggaatctcgtttagccccgacacggaggcactgttcgtgggagtagctgatcgtacgtacggcagcttgttggagtttaacaggaagcgaaaccactcgtatgttgattccatattctga

SEQ ID NO: 178 - DNA, 690 bp, Arabidopsis thaliana
atggatattttcgacaactctgatcttgaataccttgttgatgaatttcacgctgatttcgatgatgatgagccctttggagaggttgatgtcaccagtgagtctgattccgatttcatggactccgattttgatttcgagctgagtgagagtaagacgaacaatgaaacatcagcgttagaagctaggaatggaaaagatattcaagggattccatgggagagcttgaattacacgagggatagataccgtgagaatagattgctgcactataaaaactttgagagtctgtttcgatccagagaagagcttgataaggaatgcttgcaagtagagaaaggaaagaacttttatgactttcagttcaatacaaggcttgtcaagtccacaatagcgcattttcagctgaggaacttggtatgggcaacatcaaagcacgatgtgtatttcatgaacaactactctctcatgcactggtcatctttgttgcaaaggggcaaagaagtacttaatgtggcaaagcccattgttccttcaatgaagcagcatggatcgttgtcacagtctgtatcaagagtccagataagcaccatggcagttaaagacgatttgaagttgcgggagggttccaaggagagcttatctgtaagaaaatcaacgaacctgaggttgctttctgcactaaactaa

SEQ ID NO: 179 - DNA, 1755 bp, Arabidopsis thaliana
atgtgtggaatacttgccgtgttaggatgttccgatgattctcaggccaagagagttcgtgttcttgagctttctcgcagattgaggcacagaggacctgactggagtggcttatatcagaacggagataattacttggcccatcaacgtcttgccgtcatcgatcctgcttccggtgatcaacctcttttcaacgaggacaagaccattgttgtcacggtgaacggagagatttataaccatgaggagctgagaaaacgtctgaagaatcacaagttccgtactggtagtgattgtgaagtcattgctcacttgtacgaggagtatggtgtggattttgttgatatgttggatggaatattctcctttgtgttgctcgacacacgagataactctttcatggtggctcgtgatgcgattggtgtcacttcgctctacattggttggggactagacggatctgtgtggatatcttcagagatgaaaggcctaaacgatgactgtgagcatttcgaaacgtttcctccaggtcatttttattcaagcaaattaggagggtttaagcaatggtataatcctccttggttcaatgaatctgttccttcaacgccttatgagcctcttgcgataagacgcgcctttgaaaacgctgtgattaagcggttgatgactgatgttccatttggagttttgctctctggtggtcttgattcttcccttgttgcctccatcactgcacgtcacttggccggtactaaggcggctaagcaatggggtcctcagctccattccttttgcgttggtcttgagggctcaccggacttgaaggcagggaaagaggtggcggaatatttggggacggtgcaccacgagttccacttctcggtgcaggacgggattgatgcgatagaggatgtgatttaccatgttgagacctatgatgtgacgactatcagagcgagcacaccgatgttcttgatgtcccggaaaatcaagtctctaggggtcaagatggttctctccggcgaaggtgcggacgagatctttggagggtacctctatttccacaaggcacctaacaagaaagagtttcaccaagaaacttgtcgcaagatcaaggctcttcacaagtatgactgtctaagagccaacaaatctacctctgcctttggactagaggcacgtgttcctttccttgacaaagacttcatcaacacagctatgtctctcgaccctgaatccaagatgatcaagccagaggaaggaaggatcgagaaatgggttctaaggagagcctttgacgacgaagaacgtccttatctaccaaaacacattctctacagacagaaagaacagttcagtgatggtgttggctacagttggatcgatggcctgaaagatcacgctgctcaaaatgtcaatgacaagatgatgtcgaacgcggggcatatcttccctcacaacactccaaacactaaagaagcttactactacagaatgatctttgaaaggttcttcccgcagaactctgcgagactaacggttcctggaggtgccaccgtggcttgttcgactgcaaaggcagtggagtgggatgcaagctggtccaacaatatggatccatcaggaagagccgctatcggagttcacctttcggcctacgatggcaagaacgtggcattgaccataccaccacttaaggcaattgacaacatgccgatgatgatgggtcaaggagttgtgattcagtcataa

SEQ ID NO: 180 - DNA, 1371 bp, Arabidopsis thaliana
atgtgtggaatacttgccgtgttaggatgttccgatgattctcaggccaagagagttcgtgttcttgagctttctcgcagattgaggcacagaggacctgactggagtggcttatatcagaacggagataattacttggcccatcaacgtcttgccgtcatcgatcctgcttccggtgatcaacctcttttcaacgaggacaagaccattgttgtcacggtgaacggagagatttataaccatgaggagctgagaaaacgtctgaagaatcacaagttccgtactggtagtgattgtgaagtcattgctcacttgtacgaggagtatggtgtggattttgttgatatgttggatggaatattctcctttgtgttgctcgacacacgagataactctttcatggtggctcgtgatgcgattggtgtcacttcgctctacattggttggggactagacggatctgtgtggatatcttcagagatgaaaggcctaaacgatgactgtgagcatttcgaaacgtttcctccaggtcatttttattcaagcaaattaggagggtttaagcaatggtataatcctccttggttcaatgaatctgttccttcaacgccttatgagcctcttgcgataagacgcgcctttgaaaacgctgtgattaagcggttgatgactgatgttccatttggagttttgctctctggtggtcttgattcttcccttgttgcctccatcactgcacgtcacttggccggtactaaggcggctaagcaatggggtcctcagctccattccttttgcgttggtcttgagggctcaccggacttgaaggcagggaaagaggtggcggaatatttggggacggtgcaccacgagttccacttctcggtgcaggacgggattgatgcgatagaggatgtgatttaccatgttgagacctatgatgtgacgactatcagagcgagcacaccgatgttcttgatgtcccggaaaatcaagtctctaggggtcaagatggttctctccggcgaaggtgcggacgagatctttggagggtacctctatttccacaaggcacctaacaagaaagagtttcaccaagaaacttgtcgcaagatcaaggctcttcacaagtatgactgtctaagagccaacaaatctacctctgcctttggactagaggcacgtgttcctttccttgacaaagacttcatcaacacagctatgtctctcgaccctgaatccaagatggtaactacaaaactcacatcacaaactcaataccttccttcacaagttaacgttgaacaaattttctatatgggtttttctagatcaagccagaggaaggaaggatcgagaaatgggttctaa

SEQ ID NO: 181 - DNA, 1539 bp, Arabidopsis thaliana
atgtgtggaatacttgccgtgttaggatgttccgatgattctcaggccaagagagttcgtgttcttgagctttctcgcagattgaggcacagaggacctgactggagtggcttatatcagaacggagataattacttggcccatcaacgtcttgccgtcatcgatcctgcttccggtgatcaacctcttttcaacgaggacaagaccattgttgtcacggtgaacggagagatttataaccatgaggagctgagaaaacgtctgaagaatcacaagttccgtactggtagtgattgtgaagtcattgctcacttgtacgaggagtatggtgtggattttgttgatatgttggatggaatattctcctttgtgttgctcgacacacgagataactctttcatggtggctcgtgatgcgattggtgtcacttcgctctacattggttggggactagacggatctgtgtggatatcttcagagatgaaaggcctaaacgatgactgtgagcatttcgaaacgtttcctccaggtcatttttattcaagcaaattaggagggtttaagcaatggtataatcctccttggttcaatgaatctgttccttcaacgccttatgagcctcttgcgataagacgcgcctttgaaaacgctgtgattaagcggttgatgactgatgttccatttggagttttgctctctggtggtcttgattcttcccttgttgcctccatcactgcacgtcacttggccggtactaaggcggctaagcaatggggtcctcagctccattccttttgcgttggtcttgagggctcaccggacttgaaggcagggaaagaggtggcggaatatttggggacggtgcaccacgagttccacttctcggtgcaggacgggattgatgcgatagaggatgtgatttaccatgttgagacctatgatgtgacgactatcagagcgagcacaccgatgttcttgatgtcccggaaaatcaagtctctaggggtcaagatggttctctccggcgaaggtgcggacgagatctttggagggtacctctatttccacaaggcacctaacaagaaagagtttcaccaagaaacttgtcgcaagatcaaggctcttcacaagtatgactgtctaagagccaacaaatctacctctgcctttggactagaggcacgtgttcctttccttgacaaagacttcatcaacacagctatgtctctcgaccctgaatccaagatgatcaagccagaggaaggaaggatcgagaaatgggttctaaggagagcctttgacgacgaagaacgtccttatctaccaaaacacattctctacagacagaaagaacagttcagtgatggtgttggctacagttggatcgatggcctgaaagatcacgctgctcaaaatgtcaatgacaagatgatgtcgaacgcggggcatatcttccctcacaacactccaaacactaaagaagcttactactacagaatgatctttgaaaggttcttcccgcaggtgagagtcttataa

SEQ ID NO: 182 - DNA, 879 bp, Arabidopsis thaliana
atgggagtcatgatcaatcaccatttcctcgcttttatcttcggcatcttaggaaacgtgatatccttccttgtattcctcgctccagtgccaactttttatagaatatacaagagaaaatcgacggaaagtttccagtcgctaccgtaccaagtgtcgctatttagctgcatgctatggctctactacgcattgattaagaaagacgcttttctcctaattaccatcaactcctttggctgcgtcgtggagactctctacatagccatgttcttcgcttacgccaccagggagaaaaggatatcggctatgaagttgttcatagcaatgaacgttgccttcttctcgttgattctaatggtaacacatttcgtggttaaaactcctcccctccaagtctctgtactcggctggatttgtgttgccatttctgtttctgttttcgctgcccctctaatgatcgtggctcgtgtgataaagacaaagagtgtggagtacatgcccttcacgctttctttcttcctcactataagcgccgttatgtggttcgcttatggtttattcctcaatgacatatgcatagcgattccaaacgtggtgggattcgtactagggctgttgcaaatggttttgtacttggtttacaggaactcaaatgagaaaccagagaagattaattcgtcagaacaacaacttaagagtattgtcgtgatgagtccgttaggtgtgtcggaagtgcacccagttgtgacggaatcggtggacccactctctgaagccgttcatcatgaggatctgtccaaagttactaaagtggaggagccgtcaattgaaaacggcaagtgctacgtggaggctactcgtcctgaaaccgtttga

SEQ ID NO: 183 - DNA, 1746 bp, Arabidopsis thaliana
atggagaaagtgaccaactcagacttgaaatcctctgttgatggtggcgttgttgatgtgtatggagaagattcagccaccattgagcacaacataactccttggtctctctctgtttctagtggatattcattgctgagagatcctcgctacaacaaaggacttgctttcactgagaaagagagagacactcattacttgcgtggtcttctccctccagttgttcttgatcaaaagcttcaggagaagaggctgttgaacaatatccgacaatatcaattcccattacaaaagtacatggctctgacagaacttcaggaaagaaacgagagactgttttacaagctattgatagataatgttgaggagctacttcctattgtttatactccaactgttggtgaagcttgtcagaaatttggaagtattttcaggcgacctcagggtttattcatcagtttaaaagacaagggaaagattctagatgtgttaaagaactggcctgaaaggaacatacaggttattgttgttactgacggtgaaaggattttaggattaggagatcttggatgtcaggggatgggtataccggttggtaagttggcgttatattcagcacttggaggtgttcgtccttcagcgtgtttacctgtcaccattgatgtgggaacaaacaatgagaaactgttgaatgatgagttctacataggactcaggcaaaagagagcaacgggacaggaatatagtgaactcttgaatgaattcatgagtgctgtgaaacagaactatggtgaaaaagttcttattcagtttgaagattttgctaatcataatgcctttgagttgcttgcaaaatacagcgatactcatctcgtcttcaacgatgatatacaggggacagcatcagttgttttagcaggattagtttccgcacagaagttaacgaatagcccacttgcagagcataccttcctctttcttggtgctggtgaagctggaactggaatagcagaactcatagctctctatatgtcaaaacagatgaatgcttcggtagaggaaagccgcaagaaaatctggcttgttgattccaagggattgattgttaactcccgcaaagattcacttcaagactttaagaaaccatgggctcatgaacatgaaccagtcaaagacctcttaggtgctatcaaggcaataaaaccgactgttctgattggatcttctggcgttggacggtcttttacaaaagaagtgatagaagccatgtcctccattaatgagagaccactgataatggctctctctaaccccacaacacaatctgaatgtacagccgaagaagcttatacttggagtaagggccgtgccatttttgctagtggaagcccttttgatccagttgagtatgaaggaaaggtgtttgtatctacacaggcgaacaatgcgtacatattcccgggctttggacttggtttggttatctctggagcaatacgggtacatgacgatatgcttctagctgctgctgaggcattagctggacaagtaagcaaagagaactatgagaaaggaatgatatatccttcattctcttccatccggaaaatatcagctcagattgcagccaatgtagcaactaaggcgtatgaactaggattggcagggcggcttccacggccgaaagatattgtcaaatgtgcagagagtagcatgtacagccccacataccgtctctaccgttga

SEQ ID NO: 184 - DNA, 435 bp, Arabidopsis thaliana
atgactaatgttcgccttcctattctcgtctcctcggtcttgttccttgtctttatttcatcgtccctcttgttccctacacctagttttgctgctagagtaagtcattctctggtgcaagaagaggtcaaaaaggttccagaatacacagaacctgaggagccggaagttccagaagagccggagctgccctcaccggaggagcctgagattccagaagagcctgagattccagaagagcctgaggttcctggagaacccgaagttcctgaagagcccgaagaaccagaagagccagaagggtcaacatttgaatttccatcatggtttccgagctttcctattcccggtgttaatggcggtttgccaaagactgaaaagacaaaacctacatcaacagttgaagaggttaacgtttctaacaagaagccatag

SEQ ID NO: 185 - DNA, 1113 bp, Arabidopsis thaliana
atggcactaatgaagaagagtctctctgctgctcttctctcatcaccacttctgatcatatgtcttatcgcattgctcgctgatccgttttcagtcggtgctcgccggttattggaggatcctaaaccggagataccaaaattgcctgagctacctaaattcgaagttcccaagttgccggagttccctaaaccagagttgcccaagttacccgaatttccaaagcctgagttgccaaagatcccggagattccaaagccagagttaccaaaggtaccggagattccaaagcctgaggaaactaaactgccagatattcccaagcttgaattgcccaagtttccggaaattccaaaacctgagctcccaaagatgccagagattccaaaacctgagttaccaaaggtaccggagattcagaagcccgagttaccaaaaatgccggagattccaaagcctgaattaccaaagtttccagagattccaaagcctgatttgccaaagtttccagagaattcaaagcctgaggtgcctaagctaatggagactgaaaagcctgaggctcctaaggtgccagagattccaaagcctgagttgccaaagttgccagaagttcccaagcttgaggctcctaaggtaccagagatccagaagccggagttgcccaaaatgccggagttacctaagatgccggagattcagaaacctgagttgccaaagttgccagaagttcccaagcttgaggctcctaaggtaccggagatccagaagccggagttgcccaaaatgccggagttacctaagatgccggagattcagaaacccgagttgcccaagatgccggagattcagaagcctgagttgccgaaggtgccagaggttccaaagcccgaattgccaacggttccagaggttccaaagtctgaggctcctaagtttccagagattccaaagcctgaactgccgaagattccagaagttccaaaacctgaactgcccaaggttccagaaattacaaaacctgcagttccagagattccaaagccagagctaccgacgatgcctcaacttcccaagttgccggaattcccaaaagttcccggaactccttaa

SEQ ID NO: 186 - DNA, 1530 bp, Arabidopsis thaliana
atggagatatcagagagagttcgagctcgattagctgttctctcaggtcatttatcggaaggaaaacaggattctccagcgatcgagcgatggtgcacgtcggcggatacgagtgtcgcaccgcttggatctttgaagggaacactgacgatcgtcgacgaacgcaccggaaaaaattataaagttccggtctcagatgatggtaccgttaaagccgttgatttcaaaaagatagtgacggggaaggaagacaaggggcttaagttatacgatccaggttacttgaacacggctcctgttcgatcttcgatttcttacatcgatggagatgaagggatccttcgttaccgtggctacccaattgaggaaatggctgagaacagtacttttctggaggtggcttatcttctcatgtatgggaatctgccctctgaaagtcagctatctgattgggagtttgcagtttctcagcattcagctgtgccacaaggtgtattagatattatacagtctatgcctcatgatgcacacccaatgggagttcttgtgagtgcaatgagtgcgctttccatctttcatcctgatgctaatcctgctcttaggggccaggatatttacgattcaaaacaagttagagataaacaaattatccgcattattggaaaggcaccaacaattgcagcagctgcttatctgaggatggcaggaaggcctcctgttcttccttcaggaaaccttccttatgcagataatttcctctatatgcttgattccctgggaaatagatcctacaaacctaatcctcggctggctcgggtgttggacatcctcttcatactgcatgcagagcatgaaatgaactgctccaccgctgctgctcggcatcttgcctctagcggtgttgatgtctacactgctgttgctggagctgtgggagcgctttatggtccacttcatggtggtgcaaacgaggctgtgcttaagatgttgtcagagattgggactgttgaaaatattccagagttcattgagggtgtgaagaacaggaagaggaagatgtctggttttggacaccgtgtgtacaaaaactatgaccctcgagctaaagtcatcaagaacctggctgatgaagtattttccattgttggaaaggatcctctaattgaggttgctgttgcacttgagaaggcagctctctctgacgattactttgttaagagaaagctgtatccaaatgttgacttctactctggattaatatacagggcaatgggatttccaccggagttcttcacggtcttattcgcgattcctcgcatggctggatacttgtcacattggaaagagtcactggatgatcctgacaccaagatcatgagaccacaacaggtgtacacaggcgtgtggctgaggcattacacaccagtgagagagagaatagtgacggatgactcgaaagagtcagacaaattgggtcaagtcgcgacttcaaatgcatcaagaagacgtttggctggatcttcagtttag

SEQ ID NO: 187 - DNA, 1308 bp, Arabidopsis thaliana
atgacaccacagatcaaaactcatctcttgccgaagcaagaaccttcttcgtctgagaaccatggatcatcaacctccggcatcgttttcaacgtgtcaacgagtataatcggagccggaataatgtcgatgccggcggcgtttaaagttcttggaatagttccagcgtttttgattatcacgatcatagcttggctttccacaatttccgttggatttctgatgaaatcaactctcgccggagaatcaactacttacgccggagttatgaaagagtcgtttggtaaaacaggatccatcgctgtacagattgctacgatggttgctacttttggttgtatgattatattttcgattattataggagatgtgctttctggtaatgaaaatggtggtcctgaacatattggagttttgcaagaatggtttggttcttactggtggaacacgagaatcttcgctttgttatttgtctacggctttgtcttgcttccattggtcctgcgtagacgagtcgaaagactggcaattagttccgctgtatcgtttcttcttgcggttctatttgttgtcataagctcggtgctggcgatttccgcgctggtgaatggacaaacgaagaatccaagactgtttccggagttgagcaatggaggatcgttctggcaactcttcacagcttcccctgttatagttacagccttcacgtttcacttcaatgttcatccaattggattcgagctcaaagatccattacaagtgatcccagcaactaagatctctgtcatcttgtgtgctgctatctacttcgcaactggactctttggttaccttctctttggagatgcaactatgtcggatattctagtgaactttgaccagagctctggttcttccattggttctcttctcaacgacattgtcagactcagctacgtgcttcacctcatgctggtctttcctctcctgaacttctcattgagagcaaatctcgacgaactcttgtaccccaagaagccgtccttggaaaaagacacaaaaagattcatcggactcactctggctctactgatttgctgtttcttgtctgcaatcgctgtaccagacatttggtacttctttcagttcatgggatcaaccatcacagtctccatagcattcatatttccagccgccattgttctaaggaatatccatggtgtatcaacctcaagagagaagatcgtagctgcaataatgcttgttcttgctgttgccactagcattattgctatctcgacaaatttatacagcctcgcagcaaactag

SEQ ID NO: 188 - DNA, 729 bp, Arabidopsis thaliana
atgcgaaaatcgttcaaggattcactcaaggctcttgaagctgatatccagttcgccaacactctggcgtcagagtacccagaggagtatgatggtggctacgttcagatgagattatcttacagcccggcggctcatctctttctcttccttcttcagtggactgattgtcatttcgctggcgctttgggcttgcttaggatccttatttataaggcatatgttgatgggaagaccacaatgtcgctacatgaacgcaaaactagtatcagagaattctatgatgtgttgtttccttcgctattgcaacttcatggagggatcaccgatgtagaagaaaggaaacagaaggagatatgcgacaaaagataccgtaaaaaggacagaacagataaaggaaagatgtcggagatcgatttggagagggaagaagagtgtggaatctgcttggagattcgaaacaaagttgttcttcctacgtgcaatcactccatgtgtataaactgctacagaaactggcgtgcacggtcacagtcgtgcccgttctgtcgaggcagcttgaaaagagtgaattctggtgatctatggatatacacttgtagcgccgagattgcagatttaccagcgatttacaaggagaatctgaagaggttgttgatatacattgacaagttgcctctcgttacttctgatccaaatcttgtcccttatgctcctcttcctcggtga

SEQ ID NO: 189 - DNA, 519 bp, Arabidopsis thaliana
atgcgaaaatcgttcaaggattcactcaaggctcttgaagctgatatccagttcgccaacactctggcgtcagagtacccagaggagtatgatggtggctacgttcagatgagattatcttacagcccggcggctcatctctttctcttccttcttcagtggactgattgtcatttcgctggcgctttgggcttgcttaggatccttatttataaggcatatgttgatgggaagaccacaatgtcgctacatgaacgcaaaactagtatcagagaattctatgatgtgttgtttccttcgctattgcaacttcatggagggatcaccgatgtagaagaaaggaaacagaaggagatatgcgacaaaagataccgtaaaaaggacagaacagataaaggaaagatgtcggagatcgatttggagagggaagaagagtgtggaatctgcttggagattcgaaacaaagttgttcttcctacgtgcaatcactccatgtgtataaactgctacagaaactga

SEQ ID NO: 190 - DNA, 366 bp, Arabidopsis thaliana
atgatcaacgcttttaagactatccgatcactgccctcgaataccaccgtctcgttctgctcaacaccatctcgattaggccggaaagtcactggagttagttttgccaccacttctgatcagcaaaagatggataaaaagcctgaaaatccaaacgagaaaaccggtgacgtgatgtcgcattcttatggagaagggtacgcaacaaggtctgacgaagaagggtttggaggaatctatggaggaaatcaaacacttcagaaggaaaacgagatccatgagaatcaccctgattacgacaaaacgcaaggtagcgaatcgaaggagaaggagaaagcaaggaaccagacacaatcccactgctaa

SEQ ID NO: 191 - DNA, 348 bp, Arabidopsis thaliana
atggctttcgctttgaggttcttcacatgccttgttttaacggtgtgcatagttgcatcagtcgatgctgcaatctcatgtggcacagtggcaggtagcttggctccatgtgcaacctatctatcaaaaggtgggttggtgccaccttcatgttgtgcaggagtcaaaactttgaacagtatggctaaaaccacaccagaccgccaacaagcttgcagatgcatccagtccactgcgaagagcatttctggtctcaacccaagtctagcctctggccttcctggaaagtgcggtgttagcattccatatccaatctccatgagcactaactgcaacaacatcaagtga

SEQ ID NO: 192 - DNA, 777 bp, Arabidopsis thaliana
atgacagaaggtggagaatattctccggcgatgatgtcagcagagccattcttgaccatgaagaagatgaagaagagcaaccacaacaagaacaatcagagaaggtttagcgacgagcagatcaagtcactggagatgatgtttgagtctgagacaaggcttgagccaaggaagaaggttcaattagctagagagctagggttgcagccgaggcaagtggctatatggtttcagaacaagagggctcgttggaaatccaagcagctcgagactgagtacaacattctcagacaaaactacgacaacttggcttctcagttcgagtccttaaagaaagaaaaacaagctttagtctctgagttgcagaggctaaaagaggcgacgcaaaagaagacacaggaggaggaaaggcagtgtagtggagatcaagcggtggttgctctaagcagcacacatcatgaatcagaaaacgaagagaaccggaggcgtaaaccggaagaggttagaccggagatggagatgaaagatgataagggtcatcatggggttatgtgtgatcatcatgattatgaagatgatgataatggttatagtaacaacatcaagagagagtattttggtgggtttgaggaagaaccagatcacttaatgaacattgttgaaccagctgatagttgtttgacatcatctgatgattggagaggtttcaaatcagatactactactctcttggaccaatccagcaacaattacccttggcgggatttttggtcatga

SEQ ID NO: 193 - DNA, 711 bp, Arabidopsis thaliana
atggcaggagaggcagaggctttggccacgacggcaccgttagctccggtcaccagtcagcgaaaagtacggaacgatttggaggaaacattaccaaaaccatacatggcaagagcattagcagctccagatacagagcatccgaatggaacagaaggtcacgatagcaaaggaatgagtgttatgcaacaacatgttgctttcttcgaccaaaacgacgatggaatcgtctatccttgggagacttataagggatttcgtgaccttggtttcaacccaatttcctctatcttttggaccttactcataaacttagcgttcagctacgttacacttccgagttgggtgccatcaccattattgccggtttatatcgacaacatacacaaagccaagcatgggagtgattcgagcacctatgacaccgaaggaaggtatgtcccagttaacctcgagaacatatttagcaaatacgcgctaacggttaaagataagttatcatttaaagaggtttggaatgtaaccgagggaaatcgaatggcaatcgatccttttggatggctttcaaacaaagttgaatggatactactctatattcttgctaaggacgaagatggtttcctatctaaagaagctgtgagaggttgctttgatggaagtttatttgaacaaattgccaaagagagggccaattctcgcaaacaagactaa

SEQ ID NO: 194 - protein, 969 aa, Artificial Sequence
  Chimeric protein of Arabidopsis thaliana and Zea mays
MIVQPIELRAWTAFPGSAQEGIGRMAASVSRAICVQKPGSKCTRDREATSFARRSVAAPRPPHAKAAGVIRSDSGAGRGQHCSPLRAVVDAAPIQTTKKRVFHFGKGKSEGNKTMKELLGGKGANLAEMASIGLSVPPGFTVSTEACQQYQDAGCALPAGLWAEIVDGLQWVEEYMGATLGDPQRPLLLSVRSGAAVSMPGMMDTVLNLGLNDEVAAGLAAKSGERFAYDSFRRFLDMFGNVVMDIPRSLFEEKLEHMKESKGLKNDTDLTASDLKELVGQYKEVYLSAKGEPFPSDPKKQLELAVLAVFNSWESPRAKKYRSINQITGLRGTAVNVQCMVFGNMGNTSGTGVLFTRNPNTGEKKLYGEFLVNAQGEDVVAGIRTPEDLDAMKNLMPQAYDELVENCNILESHYKEMQDIEFTVQENRLWMLQCRTGKRTGKSAVKIAVDMVNEGLVEPRSAIKMVEPGHLDQLLHPQFENPSAYKDQVIATGLPASPGAAVGQVVFTAEDAEAWHSQGKAAILVRAETSPEDVGGMHAAVGILTERGGMTSHAAVVARGWGKCCVSGCSGIRVNDAEKLVTIGGHVLREGEWLSLNGSTGEVILGKQPLSPPALSGDLGTFMAWVDDVRKLKVLANADTPDDALTARNNGAQGIGLCRTEHMFFASDERIKAVRQMIMAPTLELRQQALDRLLPYQRSDFEGIFRAMDGLPVTIRLLDPPLHEFLPEGNIEDIVSELCAETGANQEDALARIEKLSEVNPMLGFRGCRLGISYPELTEMQARAIFEAAIAMTNQGVQVFPEIMVPLVGTPQELGHQVTLIRQVAEKVFANVGKTIGYKVGTMIEIPRAALIADEIAKEAEFFSFGTNDLTQMTFGYSRDDVGKFLPIYLAKGILQHDPFEVLDQQGVGQLIKMATEKGRAARPSLKVGICGEHGGDPSSVGFFAEAGLDYVSCSPFRVPIARLAAAQV

SEQ ID NO: 195 - protein, 969 aa, Artificial Sequence; identical to SEQ ID NO: 194
  Chimeric protein of Arabidopsis thaliana and Zea mays

SEQ ID NO: 196 - protein, 259 aa, Zea mays
YVLDRELGRGEFGVTYLCMDRDTKELLACKSISKRKLRTAVDVEDVRREVAIMRHLPKSPSVVSLREACEDDGAVHLVMELCEGGELFDRIVARGHYTERAAASVTRTILEVVQLCHRHGVIHRDLKPENFLFANKKENSPLKAIDFGLSIFFKPGEKFSEIVGSPYYMAPEVLKRNYGPEIDIWSAGVILYILLCGVPPFWAETEQGVAQAILRGNIDFKREPWPNVSENAKDLVRHMLEPDPKLRLTAKQVLEHHWL

SEQ ID NO: 197 - protein, 259 aa, Zea mays
YELGGELGRGEFGVTYLCTESATGARYACKSISKRKLRTPVDVEDVRREVDIMRHMPPHPNIVSLRAAYEDEDAVHLVMELCEGGELFDRIVARGHYTERAAAAVTRTIVEVVQMCHRHGVMHRDLKPENFLYANKKESSPLKAIDFGLSVFFRPGERFTEIVGSPYYMAPEVLKRNYGPEVDVWSAGVILYILLCGVPPFWAETEQGVAQAIIRSVVDFKREPWPRVSEPAKDLVRRMLDPNPLTRFTAAQVLEHPWL

SEQ ID NO: 198 - protein, 259 aa, Glycine max
YTIGKELGRGQFGVTHLCTNKATGQQFACKTIAKRKLVNKEDIEDVRREVQIMHHLSGQPNIVELKGAYEDKQSVHLVMELCAGGELFDRIIAKGHYTERAAASLLRTIMQIIHTFHSMGVIHRDLKPENFLMLNKDENSPVKATDFGLSVFFKEGETFKDIVGSAYYIAPEVLKRKYGPEVDIWSVGVMLYILLSGVPPFWAESEHGIFNAILRGHVDFTSDPWPSLSSAAKDLVRKMLTTDPKQRLTAQEVLNHPWI

SEQ ID NO: 199 - protein, 259 aa, Glycine max
FTLGRKLGQGQFGTTFLCVEKATGLECACKSIAKRKLVTDDDVEDVRREIQIMHHLAGHPNVISIKGAYEDAVAVHVVMELCAGGELFDRIIQRGHYTERQAAKLTKTIVGVVEACHSLGVMHRDLKPENFLFVNQHEDSLLKTIDFGLSVFFKPGDIFNDVVGSPYYVAPDVLRKRYGPEADVWSAGVILYILLSGVPPFWAENEQGIFEQVLRGDLDFSSDPWPSISESAKDLVRKMLVRDPRRRLTAHQVLCHPWI

SEQ ID NO: 200 - protein, 461 aa, Oryza sativa
MEKKASILMNRYELGRMLGQGTFAKVYHARNLASNQSVAIKVIDKEKVLRVGMIDQIKREISIMRLVRHPNIVQLHEVMASKSKIYFAMEYVRGGELFSRVARGRLKEDAARKYFQQLIGAVDFCHSRGVYHRDLKPENLLVDENGNLKVSDFGLSAFKECQKQDGLLHTTCGTPAYVAPEIINKRGYDGAKADIWSCGVILFVLLAGYLPFHDSNLMEMYRKISKGDVKFPQWFTTDVRRLLSRLLDPNPNIRITVEKLVEHPWFKKGYKPAVMLSQPNESNNLKDVHTAFSADHKDNEGKAKEPASSLKPVSLNAFDIISLSKGFDLSGLFENDKEQKADSRFMTQKPASAIVSKLEQIAETESFKVKKQDGLVKLQGSKEGRKGQLAIDAEIFEVTPSFFVVEVKKSAGDTLEYEKFCNKGLRPSLRDICWDGQSEHPSLAQSSTLTQSSKSISRHAI

SEQ ID NO: 201 - protein, 265 aa, Oryza sativa
MAAAAAACVESPDEGVEIREVWAGNLEAEIAAIRDEVDRYPYVAMDTEFPGIVCRPVGNFRTTDEFNYANLEANVNMLKLIQLGLTLSDEGGDLPRRGTGGRRCIWQFNFRGFDPRTDPSNADSIQMLRTCGIDFDRFAAEGADPIRFAELLMSSGVVLNADVQWITFHSGYDFGYLLRLLTGRNLPDNMPAFFDLIRIYFPVLYDIKHLMRFCSNLHGGLSRLGELLDVKRVGTCHQAGSDSLLTLGCYNKIKEVYFKGSTEKH

SEQ ID NO: 202 - protein, 588 aa, Zea mays
MCGILAVLGCSDWSQAKRARILACSRRLKHRGPDWSGLYQHEGNFLAQQRLAVVSPLSGDQPLFNEDRTVVVVANGEIYNHKNVRKQFTGTHNFSTGSDCEVIMPLYEKYGENFVDMLDGVFAFVLYDTRDRTYVAARDAIGVNPLYIGWGSDGSVWIASEMKALNEDCVRFEIFPPGHLYSSAGGGFRRWYTPHWFQEQVPRTPYQPLVLREAFEKAVIKRLMTDVPFGVLLSGGLDSSLVASVTKRHLVETEAAEKFGTELHSFVVGLEGSPDLKAAREVADYLGTIHHEFHFTVQDGIDAIEEVIYHDETYDVTTIRASTPMFLMARKIKSLGVKMVLSGEGSDELLGGYLYFHFAPNKEEFHRETCRKVKALHQYDCLRANKATSAWGLEVRVPFLDKEFINVAMGMDPEWKMYDKNLGRIEKWVMRKAFDDDEHPYLPKHILYRQKEQFSDGVGYNWIDGLKSFTEQQVTDEMMNNAAQMFPYNTPVNKEAYYYRMIFERLFPQDSARETVPWGPSIACSTPAAIEWVEQWKASNDPSGRFISSHDSAATDHTGGKPAVANGGGHGAANGTVNGKDVAVAIAV

SEQ ID NO: 203 - protein, 532 aa, Oryza sativa
MAAIYLLIAALIASSHALAAHGAGGGVPLAAAAPLPFPGDLAASGKLRTDPNATVPASMDFGNITAALPAAVLFPGSPGDVAELLRAAYAAPGRPFTVSFRGRGHSTMGQALAAGGVVVHMQSMGGGGAPRINVSADGAYVDAGGEQLWVDVLRAALARGVAPRSWTDYLHLTVGGTLSNAGVSGQTYRHGPQISNVLELDVITGHGETVTCSKAVNSDLFDAVLGGLGQFGVITRARVAVEPAPARARWVRLVYADFAAFSADQERLVAARPDGSHGPWSYVEGAVYLAGRGLAVALKSSGGFFSDADAARVVALAAARNATAVYSIEATLNYAANATPSSVDAAVAAALGDLHFEEGFSFSRDVTYEEFLDRVYGEEEALEKAGLWRVPHPWLNLFVPGSRIADFDRGVFKGILQTATDIAGPLIIYPVNKSKWDAAMSAVTPEGEEEVFYVVSLLFSAVANDVAALEAQNRRILRFCDLAGIGYKAYLAHYDSRGDWVRHFGAKWDRFVQRKDKYDPKKLLSPGQDIFN

SEQ ID NO: 204 - protein, 73 aa, Glycine max
MADSDRSSSEISTHSTDSGKRGSSKVEFSEDEETLIIRMYKLVGERWSLIAGRIPGRTAEEIEKYWTSRFSGS

SEQ ID NO: 205 - protein, 489 aa, Zea mays
MATCATDLAPLLGPAAANATGYLCSQFADTASAVDATYLLFSAYLVFAMQLGFAMLCAGSVRAKNTMNIMLTNVLDAAAGALFYYLFGFAFAFGTPSNGFIGRHFFGLQRLPRTGFDYDFFLYQWAFAIAAAGITSGSIAERTQFVAYLIYSAFLTGFVYPVASHWFWSADGWAAAGRTSGPLLFGSGAIDFAGSGVVHMVGGIAGFWGALVEGPRIGRFDHAGRSVALRGHSASLVVLGTFLLWFGWYGFNPGSFTTILKSYGPAGTVHGQWSAVGRTAVTTTLAGSVAALTTLFGKRLQAGHWNVVDVCNGLLGGFAAITAGCSVVEPWAAVVCGFVSAWVLIGANALAARLRFDDPLEAAQLHGGCGAWGVLFTGLFARQEYVEEIYGAGRPYGLLMGGGGKLLAAQIVQIVVIAGWVSCTMGPLFYALKRLDLLRISADDEMSGMDLTRHGGFAYEDPGDNAGVGEFTLKSAQNRVEPPASSNRV

SEQ ID NO: 206 - protein, 65 aa, Bacillus halodurans
MQGKVKWFNAEKGFGFIEREDGDDVFVHFSAINTDGFKTLDEGQSVEFDIVEGARGPQAANVTKL

SEQ ID NO: 207 - protein, 67 aa, Corynebacterium glutamicum
MAQGTVKWFNGEKGFGFIAPNDGSADLFVHYSEIQGSGFRNLEENQPVEFEVGEGAKGPQAQQVRAL

SEQ ID NO: 208 - protein, 212 aa, Zea mays
MPDSDNESGGPSNAEFSSPREQDRFLPIANVSRIMKKALPANAKISKDAKETVQECVSEFISFITGEASDKCQREKRKTINGDDLLWAMTTLGFEDYVEPLKLYLHKFRELEGEKAATTSASSGPQPPLHRETTPSSSTHNGAGGPVGGYGMYGGAGGGSGMIMMMGQPMYGGSPPAASSGSYPHHQMAMGGKGGAYGYGGGSSSSPSGLGR

SEQ ID NO: 209 - protein, 240 aa, Zea mays
MGRGKIVIRRIDNSTSRQVTFSKRRNGIFKKAKELAILCDAEVGLVIFSSTGRLYEYSSTSMKSVIDRYGKAKEEQQVVANPNSELKFWQREAASLRQQLHNLQENYRQLTGDDLSGLNVKELQSLENQLETSLRGVRAKKDHLLIDEIHDLNRKASLFHQENTDLYNKINLIRQENDELHKKIYETEGPSGVNRESPTPFNFAVVETRDVPVQLELSTLPQQNNIEPSTAPKLGLQLIP

SEQ ID NO: 210 - protein, 214 aa, Zea mays
MASVSPLAKFKLVFLGDQSVGKTSIITRFMYDKFDTTYQPTIGIDFLSKTMYLEDRTVRLQLWDTAGQERFRSLIPSYIRDSSVAIVVYDVSNRQTFLNTSKWIEDVHRERGQSNVIIVLVGNKTDLVEKRQVSISEGEDKGKEYGVMFIETSAKENFNIKALFRKIAAALPGVDSYSLATKSDDMVDVNLKTTSNSSQGEQQGGAGGGGGCSC

SEQ ID NO: 211 - protein, 218 aa, Zea mays
MEGVGARLGRTSARYGPATTFTGHVRKWRKEWVPVVAAAAAAAANANTSANGGTTSSTGMGSGGGSRGNNLLLFKWTPVNGANGGGGDGEQQQQAETATRRRRYVPVSLMEEQRQESTKSDDENKANDGDPSSNETEPSNGKTDINDTPMDESQATDEDGRDSGKNGGGTDLNLNLGLKDPDGDNEVETSEKHVAANNPQTENRSKRKSVTPDLEMTM

SEQ ID NO: 212 - protein, 301 aa, Zea mays
MAGLSLEHPWAFAFGLLGNVISFMTFLAPIPTFYRIYKSKSTEGFQSVPYVVALFSAMLWIFYALIKSNETFLITINAAGCVIETIYIVMYFVYAPKKAKLFTAKIMALLNGGVFGVILLLTLLLFKGSKRVVLLGWICVGFSVSVFVAPLSIMRRVIQTKSVEYMPFSLSLSLTLSAVVWFLYGLLIKDKYVALPNVLGFIFGVVQMVLYVFYMNKTPVAAAVGKDAGKLPSAADEHVLVNIAKLNPALPERTSGMHPVTQMAAVPARSCAAEATAPAMLPNRDVVDVFVSRHSPAVHVV

SEQ ID NO: 213 - protein, 274 aa, Zea mays
MAHAAAAAAVPLRRPLLFLKEARLLSTLATPLPGLRHPRALRPTGPLPSDAEDTDDPDAGDGAAVSFKKSRNELKREARRAVKWGMDLAKFSPPQIKRILSAASLEREVFDALMLVKKFGPDVREGRRRQFNYIGSLLRDAQPELMDTLIQASKDGDERKLYTLLSEGKLLVEEEEEEEEDLPDGEEENQEYMKIADRWFDGLLCKDISVTNEVYSVHSVEFDRQELRKLVKRAHMFQESTQNKDGEESNAKLSGAKKPLMRFLRSLAKEAYAP

SEQ ID NO: 214 - protein, 527 aa, Zea mays
MATPELWWYWWLWVTTMLAVVVSTVVCYLTNQHRRWGGWGSSSGRRRPPGPRPLPLIGNLLDLRRAPGSLHHTLARLARAHGAPVMRLDLGLVPAVVVSSRDAAREAFAAHDRRIAARPVPDSKRALGFCDRSMLSLPSSAPLWRTLRGVMAAHVLSPRSLAASRAARERKVADLIGYLRARAGTVVDLKEAVYGGVANLVSTAMFSIDVVDVGAAESSSSSSVAAHGLQELLEELMQCMAQPNVSDFFPFLSALDLQGCRRRVAVQLGQVLQVLDDITDRRLASSSSSSTSSKGGDRRGDFLDILLDLQSTGKITRDNVTLTLFDIFAAGSDTMALTVVWAMAELLRNPGVMARLRAEVRDALGGRDAVEEADAAGLPFLQAVVREAMRLHPAAPVLLPHKAVEDGVQIGGYAVPRGCTVIFNSWAIMRDPAAWERPDEFLPERFLARDLDFRGKQLEFVPFGSGRRLCPGVPMAERVVPLVLASLVHAFQWQLPAGMSADQVDVSDKFTTTSVLAFPPIKAVPLL

SEQ ID NO: 215 - protein, 490 aa, Zea mays
MVLSKAVSESDMSVHSTFASRYVRSSLPRYRMPENSIPKEAAYQIINDELMLDGNPRLNLASFVTTWMEPECDKLIMAAINKNYVDMDEYPVTTELQNRCVNMIAHLFNAPLGESETAVGVGTVGSSEAIMLAGLAFKRRWQNKRRAEGKPFDKPNIVTGANVQVCWEKFARYFEVELREVKLRDGYYVMDPEKAVEMVDENTICVAAILGSTLNGEFEDVKLLNDLLQAKNRETRWETPIHVDAASGGFIAPFLYPDLEWDFRLPLVKSINVSGHKYGLVYAGIGWCIWRSKEDLPEELIFHINYLGADQPTFTLNFSKGSSQVIAQYYQLIRHGFEGYRNIMENCHENAMVLKEGLEKTGRFDIVSKDEGVPLVAFSLKDRSRHDEFEISDMLRRFGWIVPAYTMPPDAQHVTVLRVVIREEFSRTLAERLVLDIEKVMYQLDALPSRLPPPPPAAPLLRKKTELETQRSVTEAWKKFVLAKKTNGVC

SEQ ID NO: 216 - protein, 219 aa, Zea mays
MGEEAVDDYELHMVCYGSDEDERVMEWESGLPGADELTPLSQPLVPPGLAAAFRIPPEPGRTLLDLHRASEATVARLRRAPPSSPGTSSSPHGHQEARGGEGADSAAATTTNSNRRPRLVWTPQLHKRFVDVVAHLGIKKAVPKTIMELMNVEGLTRENVASHLQKYRLYVKRMRGQGPSPSDHIFAPTPVHGVAVGMVPMVSGQAYHYLYNGGGGGDR

SEQ ID NO: 217 - protein, 219 aa, Zea mays; identical to SEQ ID NO: 216

SEQ ID NO: 218 - protein, 321 aa, Arabidopsis thaliana
MGEPKDSLALFLCHESESSLNEDDDETIERSDKQEPHFTTTIDDEDYVADLVLKENLRFETLPSKTTSSSDRLIAIDWILTTRTRFGFQHQTAYIAISYFDLFLHKRFIGKDETWAMRLLSVACLSLAAKMEERIVPGLSQYPQDHDFVFKPDVIRKTELLILSTLDWKMNLITPFHYLNYFLAKISQDNHSVSKDLVLLRSSDSLPALTKEISFTEYRQFVVAAVTTLLASSSTSSDIRLTREEIANKFGSISWWTSNENENVYLCYQRTLEIEERKHMTPPPEIAVSREPPASGSGAKRRLSFDDSDQSSPPAKRMRRL

SEQ ID NO: 219 - protein, 605 aa, Zea mays
MDTHIGSVNGAASNQTVGCPASAPGCPMASTPAQPAATLSAGEASLGRHLARRLVQVGVNDVFAVPGDFNLTLLDHLIAEPGLRLVGCCNELNAGYAADGYARARGVGACAVTFTVGGLSVLNAIAGAYSENLPVICIAGGPNSNDYGTNRILHHTIGLPDFSQELRCFQTVTCHQAVVNNLDDAHEQIDTAIATALRESKPVYLSISCNLPGLPHPTFSRDPVPFFLTPRTSNKMGLEAAVEATVEFLNKAVKPVLVAGPKLRVAKAGKAFVDMVDASGYAYAVMPSAKGLVPETHPHFIGTYWGAVSTAFCAEIVESADAYLFAGPIFNDYSSVGYSFLLKKEKAIIVQPERVIVGNGPAFGCVMMKEFLSELAKRVNKNTTAYENYKRIFVPEGQPLESEPNEPLRVNVLFKHVQKMLTGDSAVIAETGDSWFNCQKLKLPEGCGYEFQMQYGSIGWSVGALLGYAQGANHKRVIAFIGDGSFQVTAQDVSTMLRCEQNSIIFLINNGGYTIEVEIHDGPYNVIKNWNYTGFVDAIHNGLGKCWTSKVKSEEELTAAIETALGEKDCLCFIEVIAHKDDTSKELLEWGSRVSAANSRPPNPQ

SEQ ID NO: 220 - protein, 509 aa, Zea mays
MGAFAKEEHQFLAELGLAQRNPGAFACGAWGGSGPTVTSTSPTNNQVIAEVVEASVHDYEEGMRACFDAAKTWMAIPAPKRGEIVRQIGDALRAKLHHLGRLVSLEMGKILPEGIGEVQEIIDMCDYAVGLSRQLNGSIIPSERPNHMMMEVWNPLGVVGVITAFNFPCAVLGWNACIALVCGNCVVWKGAPTTPLITIAMTKIVASVLEKNNLPGAIFTSFCGGTEIGQAIALDIRIPLVSFTGSTRAGLMVQQQVSARFGKCLLELSGNNAIIVMDDADIQLAVRSVLFAAVGTAGQRCTTCRRLILHENIYQTFLDQLVEVYKQVRIGDPLEKGTLLGPLHTPASKENFLKGIQTIKSQGGKILFGGSAIESEGNFVQPTIVEITPSAPVVKEELFGPVLYVMKFQSLKEAIEINNSVPQGLSSSIFTKRPDIIFKWLGPHGSDCGIVNVNIPTNGAEIGGAFGGEKATGGGREAGSDSWKQYMRRATCTINYGSELPLAQGINFG

SEQ ID NO: 221 - protein, 191 aa, Zea mays
MSLCTIARRLCLSKPSSGSRLSAIWAHLYSTEAAKDMGAKKYKYPDVYDPYGPMPPPSEKVVELADRIAALPPEEIKQIAPALLLRLNQEPPQAVSGQGFGFGAQVGSGAGSGKAEKKAEKTVFDVRLEKFDAAAKIKIIKEIRTFTDLGLKEAKELVEKAPVVLKQSLTKEEAEAIIAKIKAAGGVAVME

SEQ ID NO: 222 - protein, 441 aa, Zea mays
MAGSRFGSFKSEKGDSASAAAAAGGAAQRRDPYEVLGVGRTATDQEIKSAFRRMALKYHPDKNGDDPVASDRFQEVTFSYNILSDPDKRRQYDTSGFDAIESDSQELELDLSSLNTVNTVFAALFSKLGVPIKTTVSATVLEEALNGSVMVSQLQLGNSVQRKVEKQSAHFYSVDITEKQAKMGLVCRVHSNDKSKFKLLYFELEENGGLSLALQEDSVKVGKVTAAGMYFLGFPVYRFEQNNLAAAAKDSDGAFFKRLDSFQPCDIHELKPGTHFFAVYGDNFFKSASYTIEVVCGESFPAEKEMLRNVEAKILTKRAELSKFESEYREVLAKFTEMTSKYTQEMQAIDGLLKERNEIHASYTNNPPLKRSSSRNKAKSPSKVAKTGTEKHHQKEKKVKDHCMEGCGSDSDNSSEKKSKERFPRKKWLNLPFKLDRRKTC

SEQ ID NO: 223 - protein, 326 aa, Zea mays
MADNAKAAAAHARPESSQEEEEDWKEAEGDVAEVDRAATNGAGEGGVPTDRPIRVYADGIYDLFHFGHAKSLEQAKKSFPNTYLLVGCCNDELTHKFKGRTVMTEDERYESLRHCKWVDEVIPDAPWVVTEEFLDKHNIDFVAHDSLPYADASGAGNDVYEHVKKLGKFKETQRTDGISTSDIIMRIVKDYNEYVMRNLARGYTRKDLGVSYVKEKRLRVNMGLKNLRDRVKQHQEKVGEKWSTVAKLQEEWVENADRWVAGFLEKFEEGCHSMGTAIKERIQERLIKAQSSDFGSLLQYDSYDSDEAKENDEDEDEDELFEDVKE

SEQ ID NO: 224 - protein, 214 aa, Zea mays
MAAVEVCVKAAAGNPDTLGDCPFSQRVLLTLEEKKVPYEVKLVDLGNKPEWFLNISPEGKVPVFNGGDGKCIADSDVIIQVIEEKFPTPSLVTPPEYASVGSKIFPAFVKFLKSKDGSDGSEKALLDELQALDDHLKAHGPYINGENVSATDLSLGPKLFHLQIALEHFKGWKIPENLTNVHAYTKALFSRESFVKTKPSEEHVIAGWAPKVNA

SEQ ID NO: 225 - protein, 143 aa, Zea mays
MDASAATARRKRKRPDADITAAAAAAAPVAVDEASDAEVEEFYAILRRIRDASRRLCGAGARPAPRAPAWRPSFSWEDFATPAPGAPAPETPTPAQQEPAQPRPDEPVAVVRATAPSPRAGLDLNAEPEPEAPATPRSARVQA

SEQ ID NO: 226 - protein, 121 aa, Zea mays
MAGCCVFLRWPSASPSRIGYRSLVDAAADDAAPPSTVTVVVGKERRAFAVDRLVLDSYPLRLLLETAARREERRAGGGAIFVDVDAILFEHILWLACDARSVSQILHLDLKEIIDFYAQDA

SEQ ID NO: 227 - protein, 201 aa, Zea mays
MSYYGDRRAESSIVEAFTLSPLPYPVILVLLMVTLLLGASWFFTYDDFIEEASQQLSWALLGVPIALVLLIRWISSVDSFEGYLGFYPRESRWKGRYERGPAEGSSPWGVALLVLLLLVLARAGCGKVVYGNPGRLGRKRRGGDKVKEQAGDEAAKFPWSGMRLATEKRRRVRRSPSKKGIVLKQKSRKVSLQHRSKKLKA

SEQ ID NO: 228 - protein, 252 aa, Glycine max
MEGVPHPIPRTVEEVFTDFKGRRAGLIKALTTDVEKFYQQCDPEKENLCLYGFPNETWEVNLPVEEVPPELPEPALGINFARDGMQEKDWLSLVAVHSDSWLLAVAFYFGARFGFGKNERKRLFQMINDLPTIFELVTGSARQSKDQPAAHNNGSKCKSSGKSRQSESQAKGMKMSAPPKEEDESGEEEEEDDEQGATCGACGDNYGTDEFWICCDMCERWFHGKCVKITPAKAEHIKQYKCPSCSNKRVRV

SEQ ID NO: 229 - protein, 485 aa, Arabidopsis thaliana
MSEGVEAIVANDNGTDQVNGNRTGKDNEEHDGSTGSNLSNFLWHGGSVWDAWFSCASNQVAQVLLTLPYSFSQLGMLSGIVLQIFYGLLGSWTAYLISVLYVEYRARKEKEGKSFKNHVIQWFEVLDGLLGSYWKALGLAFNCTFLLFGSVIQLIACASNIYYINDHLDKRTWTYIFGACCATTVFIPSFHNYRIWSFLGLGMTTYTAWYLAIASIIHGQAEGVKHSGPTKLVLYFTGATNILYTFGGHAVTVEIMHAMWKPQKFKYIYLMATLYVFTLTIPSAAAVYWAFGDALLDHSNAFSLMPKNAWRDAAVILMLIHQFITFGFACTPLYFVWEKVIGMHDTKSICLRALARLPVVIPIWFLAIIFPFFGPINSAVGALLVSFTVYIIPSLAHMLTYRSASARQNAAEKPPFFMPSWTAMYVLNAFVVVWVLIVGFGFGGWASVTNFVRQVDTFGLFAKCYQCKPAAAAAHAPVSALHHRL

SEQ ID NO: 230 - protein, 524 aa, Arabidopsis thaliana
MTNTLCLSLITLITLFISLTPTLIKSDEGIDVFLPISLNLTVLTDPFSISAASHDFGNITDENPGAVLCPSSTTEVARLLRFANGGFSYNKGSTSPASTFKVAARGQGHSLRGQASAPGGVVVNMTCLAMAAKPAAVVISADGTYADVAAGTMWVDVLKAAVDRGVSPVTWTDYLYLSVGGTLSNAGIGGQTFRHGPQISNVHELDVITGKGEMMTCSPKLNPELFYGVLGGLGQFGIITRARIALDHAPTRVKWSRILYSDFSAFKRDQERLISMTNDLGVDFLEGQLMMSNGFVDTSFFPLSDQTRVASLVNDHRIIYVLEVAKYYDRTTLPIIDQVIDTLSRTLGFAPGFMFVQDVPYFDFLNRVRNEEDKLRSLGLWEVPHPWLNIFVPGSRIQDFHDGVINGLLLNQTSTSGVTLFYPTNRNKWNNRMSTMTPDEDVFYVIGLLQSAGGSQNWQELENLNDKVIQFCENSGIKIKEYLMHYTRKEDWVKHFGPKWDDFLRKKIMFDPKRLLSPGQDIFN

SEQ ID NO: 231 - protein, 490 aa, Leuconostoc mesenteroides
MEIQNKAMLITYADSLGKNLKDVHQVLKEDIGDAIGGVHLLPFFPSTGDRGFAPADYTRVDAAFGDWADVEALGEEYYLMFDFMINHISRESVMYQDFKKNHDDSKYKDFFIRWEKFWAKAGENRPTQADVDLIYKRKDKAPTQEITFDDGTTENLWNTFGEEQIDIDVNSAIAKEFIKTTLEDMVKHGANLIRLDAFAYAVKKVDTNDFFVEPEIWDTLNEVREILTPLKAEILPEIHEHYSIPKKINDHGYFTYDFALPMTTLYTLYSGKTNQLAKWLKMSPMKQFTTLDTHDGIGVVDARDILTDDEIDYASEQLYKVGANVKKTYSSASYNNLDIYQINSTYYSALGNDDAAYLLSRVFQVFAPGIPQIYYVGLLAGENDIALLESTKEGRNINRHYYTREEVKSEVKRPVVANLLKLLSWRNESPAFDLAGSITVDTPTDTTIVVTRQDENGQNKAVLTADAANKTFEIVENGQTVMSSDNLTQN

SEQ ID NO: 232 - protein, 492 aa, Arabidopsis thaliana
MGGCVSTPKSCVGGKIRSSKRRKTRTRRKIQKKRVVSSSRLSDGSFDNNPTFRASVDEAWFDSNLAFETDCDDDFHSVQEDTLSVNGCERISVSSMSSVKDSNLGGSARNSLSDVISQSKSESALIDTKQAVFIDEISSNADGSSNKDEGLLENCGILPSNCLPCLNSTVPSIEKRRSLSSSPPSTRKKAAVKLSFKWREGHPTGPLFSTTMQLQRPMAGSQVPFCPLEKKMFDSWSIIEPGSFRVRSKTYFRDKKKELAPNYAAYNPFGVDVFLSQRKVNHIAQYVELPVVTTTPTKLPSILVVNVQIPLYPAAIFHGETDGEGMNFVLYFKLSDNYLKELPPHFQESIQRLLDDEVEKVRGYTTDTNVPFRERLKILGRVANVDDLQLNGAEKKLMNAYNEKPVLSRPQHEFYSGENYFEIDIDMHRFSYISRKGFEAFLDRLKNCVLDVGLTIQGNKPEELPEQILCCIRLNGIDYMNYHQLALSQEVL

SEQ ID NO: 233 - protein, 490 aa, Arabidopsis thaliana
MTKISPEVEIRMPMEAFPPVSADVSFISNSFPKYKLDADNQVLEEPVEDNQGPSLKDVIEQEASNLSDQHKRISVRDLASKFDKNLAAAAKLSNEAKLRDVASLEGHVLLKKLRDALESLRGRFAGRNKEDVEKAISMVEALAVKLTQNEGELIQEKFEVKKLVNFLKQASEDAKNLVNQEKSFACAEIESARAVVLRIGEALEEQEKASQASKPQDVDGLVEEVQESRRIKLLHHPSKVMAMEYELRALRDQIREKSIFSIKLQKELIMSKRNEENKSCLYMLDGSEALGSYLRVQPCSDEVPQVSKCSFQWYRLSSEGSWREVISGANKSIYAPDPSDVGRILQVDIVSNGKKLTLTTNPIQTVSGLGSHVETLLRKSNTDFNVVISQMNGKDHSSHSTHSFNVGRMRIKLCRGWITKAREIYSPSMQLCGVRSDVVNAAKVLFWQARKGLSFVLTFESERDRNSAIMVARKYALDCNVVLAGPDDLV

SEQ ID NO: 234 - protein, 179 aa, Glycine max
MASFGGTTQKCMACAKTVYLVDKLTADSRVYHKACFRCHHCRNTLKLSNYCSFEGVLYCRPHYDQLYKRTGSLDKSFEGIPKIQKPEKPVTGNENTKVLANVFLGTRDKCVCCNKTVYPTERVTVNGTPYHKGCFKCTYGGCTVSSSNFITHEGKPYCKHHHIQLFKEKGNYSQLENEC

SEQ ID NO: 235 - protein, 179 aa, Glycine max; identical to SEQ ID NO: 234

SEQ ID NO: 236 - protein, 167 aa, Arabidopsis thaliana
MYLIVLGFASWCLNKYINGQTNHPSFGGNGATPFFLTFSILAAVVGVASKLAGANHIRFWRNDSLAAAGASSIVAWAITALAMGLACKQINIGGWRGWRLKMIEAFIIILTFTQLLYLMLIHAGSLSSKYGPGYRDQDYATGQAHGHGHVPHTVGEHKAGVGSTMAV

SEQ ID NO: 237 - protein, 227 aa, Arabidopsis thaliana
MPVHDEQEHEVYGGEIPEEEEGEMDTEEYEEHGGEEGAAAGDEELEPGSSSRDLEDMKKRIKEIEEEAGALREMQAKAEKDMGASQDPSGGVSAAEKEEVDSRSIYVGNVDYACTPEEVQQHFQSCGTVNRVTILTDKFGQPKGFAYVEFVEVEAVQNSLILNESELHGRQIKVSAKRTNVPGMRQFRGRGRPFRPMRGFMPGVPFYPPYAYGRVPRFRRPMRYRPY

SEQ ID NO: 238 - protein, 372 aa, Arabidopsis thaliana
MFAQLAPSPSPSPANVSHFVHRRTFRQCTYAVSASLPTANSSRPPPIQIVGGKDLNLDVTRKDDSIGFKLEANEDEIDWMNLESDIRLWTRALRPVQWYPGHIMKTEKELREQLKLMDVVIEVRDARIPLSTTHPKMDAWLGNRKRILVLNREDMISNDDRNDWARYFAKQGIKVIFTNGKLGMGAMKLGRLAKSLAGDVNGKRREKGLLPRSVRAGIIGYPNVGKSSLINRLLKRKICAAAPRPGVTREMKWVKLGKDLDLLDSPGMLPMRIDDQAAAIKLAICDDIGEKAYDFTDVAGILVQMLARIPEVGAKALYNRYKIQLEGNCGKKFVKTLGLNLFGGDSHQAAFRILTDFRKGKFGYVSLERPPL

SEQ ID NO: 239 - protein, 372 aa, Arabidopsis thaliana; identical to SEQ ID NO: 238

SEQ ID NO: 240 - protein, 436 aa, Arabidopsis thaliana
MKASGSLDSWREYFRRRGDSDIFGIIDHAIMVAATDCPNKFKSRRDKIAELLFSCRVNRCVGCDHLELSVPGDDEANRGTTGNGGGGTAVDEDYEVAGGSKESKANSSRGDNNQIVSNYTFDEAEALSDEIEEFSVVSKEVARIKEILLNKEDEPNSVLLDSLRHLKLMSLNVDILKSTEIGKAVNGLRKHSSDKIRQLAKTLIAEWKELVDQWVNTTKEITGAEGTPESANPSVLDEEEAFPSLPYDVDIFTPEPNGFEISHFFDSLDFDGNPRNSEEHNTSREHERRPQNIAKRKPEGTQMRIQDAPFRSIKPSSATDFDGTRRPVKQSTEQRMKNETVSVHKSEKPMIQRKPVVTEQKRKAPGPQQEKLKGLDADAKFEFAKRKLQESYQHHENAKKQRTIQVLEMIPKQGSAQKPQLKRPGMSNRNWANGRK

SEQ ID NO: 241 - protein, 236 aa, Arabidopsis thaliana
MDVFAFNASLSMCKDVAGIAGNIFAFGLFVSPMPTFRRIMRNKSTEQFSGLPYIYALLNCLICLWYGTPFISHSNAMLMTVNSVGATFQLCYIILFIMHTDKKNKMKMLGLLFVVFAVVGVIVAGSLQIPDQLTRWYFVGFLSCGSLVSMFASPLFVINLVIRTKSVEFMPFYLSLSTFLMSASFLLYGLFNSDAFVYTPNGIGTILGIVQLALYCYYHRNSIEEETKEPLIVSYV

SEQ ID NO: 242 - protein, 249 aa, Arabidopsis thaliana
MTKNYPTVSEDYKKAVEKCRRKLRGLIAEKNCAPIMVRLAWHSAGTFDCQSRTGGPFGTMRFDAEQAHGANSGIHIALRLLDPIREQFPTISFADFHQLAGVVAVEVTGGPDIPFHPGREDKPQPPPEGRLPDATKGCDHLRDVFAKQMGLSDKDIVALSGAHTLGRCHKDRSGFEGAWTSNPLIFDNSYFKELLSGEKEGLLQLVSDKALLDDPVFRPLVEKYAADEDAFFADYAEAHMKLSELGYLS

SEQ ID NO: 243 - protein, 314 aa, Arabidopsis thaliana
MYLLVFKLFLFLSLLQISVSARNLASQEPNQFQLLKYHKGALLSGKISVNLIWYGKFKPSQRAIISDFITSLTHTSPTSKTLHQPSVATWWKTTEKYYKLATPSKNSSPLSLTLGKQIIDESCSLGKSLTDKKIQTLASKGDQRNAINVVLTSADVTVTGFGMSRCGTHGHARGLGKRGSKFAYIWVGNSETQCPGQCAWPFHAPVYGPQSPPLVAPNNDVGLDGMVINLASLLAGTATNPFGNGYYQGPQNAPLEAASACPGVYGKGAYPGYAGDLLVDTTTGGSFNAYGANGRKFLLPALYDPTTSACSTMV

SEQ ID NO: 244 - protein, 373 aa, Arabidopsis thaliana
MGYLFEETLSSNPKTPIVVDDDNELGLMAVRLANAAAFPMVLKASLELGVFDTLYAEASRTDSFLSPSEIASKLPTTPRNPGAPVLLDRMLRLLASYSMVKCEKVSVGKGERVYRAEPICRFFLKNNIQDIGSLASQVIVNFDSVFLNTWAQLKDVVLEGGDAFGRAHGGMKLFDYMGTDERFSKLFNQTGFTIAVVKKALEVYQGFKGVNVLVDVGGGVGNTLGVVTSKYPNIKGINFDLTCALAQAPSYPGVEHVAGDMFVDVPTGDAMILKRILHDWTDEDCVKILKNCWKSLPENGKVVVIELVTPDEAENGDINANIAFDMDMLMFTQCSGGKERSRAEFEALAAASCFTHCKFVCQAYHCWIIEFCK

SEQ ID NO: 245 - protein, 373 aa, Arabidopsis thaliana; identical to SEQ ID NO: 244

SEQ ID NO: 246 - protein, 170 aa, Arabidopsis thaliana
MQQRKPTAGRPSGTDGSDFSYRMVVDSRYTKVTKEKARLRPLIFVQAAIYVIGLSCAFLTTTKKDEKNTLAIAAAVAGLVCSLIGELGCRRSRVNLLRLYTAASTIVMVLSVFCAVRSRLTMEERNSSGTTAKLELAGFICAQLGAVVQILAIIVTGSLVNNMSPPTKAA

SEQ ID NO: 247 - protein, 143 aa, Arabidopsis thaliana
MAMAFKMATTGMRVTDECTSSFMDMKWKKVHRYIVFKIEEKSRKVTVDKVGGAGESYHDLEDSLPVDDCRYAVFDFDFVTVDNCRKSKIFFIAWSPEASKIRAKILYATSKDGLRRVLEGIHYELQATDPTEMGFDIIQDRAK

SEQ ID NO: 248 - protein, 416 aa, Arabidopsis thaliana
MYQHIKVPAGEKIKVNADLSLNVPDNPIIPYIEGDGTGVDITPVMLKVVDAAVAKAYGGKRKISWMEIYAGEKSTKVYGPDVWLPEETMEVVKEYVVSIKGPLTTPVGGGIRSLNVALRQQLDLYVCLRPVRYFKGVPSPVREPEKTDMVIFRENSEDIYAGIEWEAESEGAKKLIAFLQNEMGVKKIRFPETSGIGIKPVSKEGTQRLVRKALQYAIDNDKPSVTLVHKGNIMKFTEGGFRDWGYELAQQEFGAELVDGGPWCKFKNPKTGRDIVVKDAIADAFLQQILLRPAEYSVIATLNLNGDYISDALAAQVGGIGIAPGANMSDSVAMFEATHGTAPKYAGKDYVNPGSEILSAEMMLRHMGWTEAADLIIRSMEKSIQSKKVTYDFARLLEGATQVSCSGFGQVMIDNM

SEQ ID NO: 249 - protein, 360 aa, Arabidopsis thaliana
MASSMLSSATMVASPAQATMVAPFNGLKSSAAFPATRKANNDITSITSNGGRVNCMQVWPPIGKKKFETLSYLPDLTDSGGRVNCMQAMGEPNLNPAYTLDQAIANLQQTEDASARYYAAWWIGRFRAAQPETIAALLVALEDETDRSPDGGYPLRRNAAKALGKLGDRQVVPALIKALECEDYYVRESAAQALEGLGDARAMAPLMAKLTGGLAAAQLVEGKPHLAQPYEAIIEALGTLQAVESIGLIEPFLEHFSPKVQYAAARALFQLTGDNRYGDLLITALGGTDLQLRRSAMMDLGATGYLPGAQAIAKAFAENSLKLIALRDLWATHRQRQASSESKALSPASRQILELMDSLL

SEQ ID NO: 250 - protein, 360 aa, Arabidopsis thaliana; identical to SEQ ID NO: 249

SEQ ID NO: 251 - protein, 277 aa, Glycine max
MKGEYVEQQQQHPKSETPPSMFSKLQPQHHPFPHHPFQLSAEDATTITPSTAQKANSSGGDGATIEVVRRPRGRPPGSKNKPKPPVIITRDPEPAMSPYILEVSGGNDVVEAIAQFSHRKNMGICVLTGSGTVANVTLRQPSTTPGTTVTFHGRFDILSVSATFLPQQSGASPAVPNGFAISLAGPQGQIVGGLVAGGLMAAGTVFVIAASFNNPAYHRLPPEEEGASAGDGHSPPVSGGGDSGHGQAESCGMSMYSCHLPSDVIWAPTARPPPPPY

SEQ ID NO: 252 - protein, 364 aa, Arabidopsis thaliana
MGKGGMSQGEGSKVEEENMAAWLVGINTLKIQPFLLPSVGPHDVRVRMKAVGICGSDVHYLKTMRCADFVVKEPMVIGHECAGIIEEVGEEVKHLVVGDRVALEPGISCWRCNLCREGRYNLCPEMKFFATPPVHGSLANQVVHPADLCFKLPENVSLEEGAMCEPLSVGVHACRRAEVGPETNVLVMGAGPIGLVTMLAARAFSVPRIVIVDVDENRLAVAKQLGADEIVQVTTNLEDVGSEVEQIQKAMGSNIDVTFDCAGFNKTMSTALAATRCGGKVCLVGMGHGIMTVPLTPAAAREVDVVGVFRYKNTWPLCLEFLTSGKIDVKPLITHRFGFSQKEVEDAFETSARGSNAIKVMFNL

SEQ ID NO: 253 - protein, 368 aa, Arabidopsis thaliana
MRKMVRDLKDSSSMIELRDFPGGPSTFELTMKFCYGINFDITAFNVVSLRCAAGYLEMTEDYKEQNLIFRAENYLDQIVFRSFHESVLVLCSCETQEIAETYEIPDRCVEAIAMNACRKQLVSGLSEELKGRDCLEMWTEELSALGIDYYVQVVSAMARLSVRSESIVASLVHYAKTSLKGIIDRNCQEQRKIVEAMVNLLPNDEKGSYSLSIIPLGFLFGMLKVGTIIDIEISCRLELERRIGHQLETASLDDLLIPSVQNEDSMYDVDTVHRILTFFLERIEEEDDECGYDSDSTGQHSSLLKVGRIMDAYLVEIAPDPYLSLHKFTAIIETLPEHSRIVDDGIYRAIDMYLKVNKNTIEQSLFMF

SEQ ID NO: 254 - protein, 287 aa, Arabidopsis thaliana
MSEALEDVPSMKGGCEEEEEGLNLKATELRLGLPGCESPEREGAFRSVVVSGAKRGFSDAIDENWNGGSEKDAALFSPRGAVSVSAAKSLTLTATDCTNQPTALGASVLKETVPRSPKPLHEKKPQISAPAAKAQVVGWPPIRSFRKNSMASQPQKNDTDAEAKSGCLYVKVSMEGAPYLRKVDLNSFTTYKDLSLALEKMFSCFTLSQCGSYGVSSRENLSESRLMDLLHGSEYVLTYEDKDGDWMLVGDVPWEMFTESCKRLRIMKSFEAIGLAPRAMEKCKSRN

SEQ ID NO: 255 - protein, 119 aa, Arabidopsis thaliana
MSTFLIRILLPLLIIAMTLPRRSEAESEQWCIADEQTPDDELQAALDWACGKGGADCSKMQQENQPCFLPNTIRDHASFAFNSYYQTYKNKGGSCYFKGAAMITELDPSHGSCQYEYNP

SEQ ID NO: 256 - protein, 92 aa, Arabidopsis thaliana
MALFLSPKTITLLFFSLSLALYCSIDPFHTAPFPISPISSLTKLSLHVPTKFHGREIHKIHFRNQRFCFLTKSKVQRASPLILSDVVRTRRC

SEQ ID NO: 257 - protein, 310 aa, Arabidopsis thaliana
MDVAAMARCVGRCYVSPAFGESESHRLSERRFLKLSSSTNSDPAGSKSLKLRGKIHRRMSYFRPIMAKDESISSRSGETKQINGKQKNIVWHDCPVTKSDRQELIKQKGCVIWITGLSGSGKSSLACALSRALHNRGKLSYILDGDNVRHGLNSDLSFEADDRAENIRRVGEVAKLFADSGIICIASLISPYRIERAACRALLPQGDFIEVFMDVPLHVCEARDPKGLYKRARAGKIKGFTGVDDPYEAPLDCEIVIQNSRDKGLSSSSSSSSSPSSSSSSLCEMADIVVSYLDQNGYLKKHSTKSRNCM

SEQ ID NO: 258 - protein, 537 aa, Arabidopsis thaliana
MGISKPLPLFSILVLYFSLYTITPTSSLASLQDQFINCVQRNTHVYFPLEKTFFAPTKNVSMFSQVLESTAQNLRFLKKSMPKPGFIFSPIHESHVQASIICSKKLRMHLRVRSGGHDYEGLSYVSQIDKPFILMDLSKMRQVNINIQDNSAWVQSGATVGELYYRIAEKSKVHGFPAGLCSSLGIGGHITGGAYGSMMRKYGLGADNVLDAKIVDANGKLLDRAAMGEDTFWAIRGGAGGSFGIILAWKIKLVPVPKTVTVFTVTKTLQQDVGNKIISKWQRVADKLVEELFIRVLFNVAGTGGNKTVTTSYNALFLGGKGTLMNVMKKSFPELGLTFKDCIEMSWLESIAYISGFPTHTPTNVLLQGKSPFPKVSFKAKSDFVKTPIPESGLQGIFKKLLKEDIPLMIWNPYGGMMAKIPESQIPFPHRKGVLFKVQYVTSWLDSDKRPSRHINWIRDLYSYMTPYVSSNPREAYVNYRDLDLGRNTKDVKTCIKQAQVWGANYFKNNFNRLMMIKAKVDPENFFRHEQSIPPMM

SEQ ID NO: 259 - protein, 326 aa, Arabidopsis thaliana
MSLTTVPTLAIRSGPSGHHSMPVLGFGTAASPLPEPTMLKETVIEAIKLGYRHFDTSPRYQTEEPIGEALAEAVSLGLVRSRSEFFVTTKLWCADAHGGLVVPAIKRSLKNLKLDYLDLYIIHWPVSSKPGKYKFPIDEDDFMPMDFEVVWSEMEECQRLGLAKCIGVSNFSCKKLQHILSIATIPPSVNQVEMSPIWQQRKLRELCRSNDIVVTAYSVLGSRGAFWGTPKIMESDVLKEIAEAKEKTVAQVSMRWAYEQGVSMVVKSFTKERLEENLKIFDWSLTEDETQRISTEIPQFRNVHGEVYTSKKGPIKSVAEMWDGEI

SEQ ID NO: 260 - protein, 380 aa, Arabidopsis thaliana
MICIDNSEWMRNGDYSPSRLQAQTEAVNLLCGAKTQSNPENTVGILTMAGKGVRVLTTPTSDLGKILACMHGLDVGGEINLTAAIQIAQLALKHRQNKNQRQRIIVFAGSPIKYEKKALEIVGKRLKKNSVSLDIVNFGEDDDEEKPQKLEALLTAVNNNDGSHIVHVPSGANALSDVLLSTPVFTGDEGASGYVSAAAAAAAAGGDFDFGVDPNIDPELALALRVSMEEERARQEAAAKKAADEAGQKDKDGDTASASQETVARTTDKNAEPMDEDSALLDQAIAMSVGDVNMSEAADEDQDLALALQMSMSGEESSEATGAGNNLLGNQAFISSVLSSLPGVDPNDPAVKELLASLPDESKRTEEEESSSKKGEDEKK

SEQ ID NO: 261 - protein, 511 aa, Arabidopsis thaliana
MEILTSIAITVATTIFIVLCFTIYLMIRIFTGKSRNDKRYAPVHATVFDLLFHSDELYDYETEIAREKPTYRFLSPGQSEILTADPRNVEHILKTRFDNYSKGHSSRENMADLLGHGIFAVDGEKWRQQRKLSSFEFSTRVLRDFSCSVFRRNASKLVGFVSEFALSGKAFDAQDLLMRCTLDSIFKVGFGVELKCLDGFSKEGQEFMEAFDEGNVATSSRFIDPLWKLKWFFNIGSQSKLKKSIATIDKFVYSLITTKRKELAKEQNTVVREDILSRFLVESEKDPENMNDKYLRDIILNFMIAGKDTTAALLSWFLYMLCKNPLVQEKIVQEIRDVTFSHEKTTDVNGFVESINEEALDEMHYLHAALSETLRLYPPVPVDMRCAENDDVLPDGHRVSKGDNIYYIAYAMGRMTYIWGQDAEEFKPERWLKDGLFQPESPFKFISFHAGPRICLGKDFAYRQMKIVSMALLHFFRFKMADENSKVYYKRMLTLHVDGGLHLCAIPRTST

SEQ ID NO: 262 - protein, 331 aa, Arabidopsis thaliana
MTAIPNVVDIESSSSSLCQETATETVTVERGSSDSSSKPDDVVLLIKEEEDDAVNLSLGFWKLHEIGLITPFLRKTFEIVDDKVTDPVVSWSPTRKSFIIWDSYEFSENLLPKYFKHKNFSSFIRQLNSYGFKKVDSDRWEFANEGFQGGKKHLLKNIKRRSKNTKCCNKEASTTTTETEVESLKEEQSPMRLEMLKLKQQQEESQHQMVTVQEKIHGVDTEQQHMLSFFAKLAKDQRFVERLVKKRKMKIQRELEAAEFVKKLKLLQDQETQKNLLDVEREFMAMAATEHNPEPDILVNNQSGNTRCQLNSEDLLVDGGSMDVNGRIEIE

SEQ ID NO: 263 - protein, 298 aa, Arabidopsis thaliana
MTEEFEIAGISTGAWWSSPTNTAAVFSGYSLPCSTEISPDVTNFGWQNFDNKINDHNDGCMNMHNSFFEGLLIDPNDQLLPDPWSKSTIPNAKSELLENFPFLDNMFLVDSEAESLLDHEIRNHKSSKEQITQDYRNLTSKRSEELEENSDEYSPRLLKRPRLETLSPLPSFKVRKEKLGDRITALQQLVSPFGKTDTASVLNEAVEYIKFLQEQVTVLSNPEQNTIGSVQQQQCSNKKSINTQGEVEEDECSPRRYVDLSSRGLCLMPISASYPVAAAAASAAEMNVHLVSGIFHSL

SEQ ID NO: 264 - protein, 302 aa, Arabidopsis thaliana
MSSSGTIWSYEEEKAFENAIAMHWIEESSKEQWEKIASAVPSKSMEDVKQHYQVLVEDVSAIEAGHISFPNYAASEEITSSNKDFHGSSKATSSDKRSNCNYGRGFSGLGHDSTTHSSGKGGLSRSSEQERRKGIPWTEEEHRLFLLGLEKFGKGDWRSISRNFVISRTPTQVASHAQKYFIRLNSMNRDRRRSSIHDITSVNNGDVANNQAPITGQHSSTIPSNTMGVGQSLKHRVQGHIPPGLGMYGTPVGHPVAAPPGHMASAVGTPVMLPPGPHPHAHPHPPYVLPLAYPMAPPTMHQ

SEQ ID NO: 265 - protein, 170 aa, Glycine max
MASDGSEEFRLVSPAFKNGGKLPRHYTDDGQGTKKNISPPLEWYNLPEGTKTLALVVEDIDATDSGGPMVPWTHWVVANILATVKGLPEGFSGKSAEMGGDYAAIKEGNNDLKVPGWNGPRLPTPGHRIQFRLYALDDELKLGNKLTKEKLLEDTIEGHVLGEATLMAIF

SEQ ID NO: 266 - protein, 420 aa, Arabidopsis thaliana
MANVISISHFTLLALPYLLLLLSSTAAAINVTAVLSSFPNLSSFSNLLVSSGIAAELSGRNSLTLLAVPNSQFSSASLDLTRRLPPSALADLLRFHVLLQFLSDSDLRRIPPSGSAVTTLYEASGRTFFGSGSVNVTRDPASGSVTIGSPATKNVTVLKLLETKPPNITVLTVDSLIVPTGIDITASETLTPPPTSTSLSPPPAGINLTQILINGHNFNVALSLLVASGVITEFENDERGAGITVFVPTDSAFSDLPSNVNLQSLPAEQKAFVLKFHVLHSYYTLGSLESITNPVQPTLATEEMGAGSYTLNISRVNGSIVTINSGVVLAVVTQTAFDQNPVSVFGVSKVLLPKELFPKSGQPVATAPPQEISLSPESSSEQPSRLVSPPREIVSSGAVKRPLGFLVLWCWCIAFCYVLV

SEQ ID NO: 267 - protein, 549 aa, Zea mays
MARRAASSLVSRCLLARAPAGAPPAAPSALRRTVPADGMHRLLPGVLQRFSTAAAVEEPITPSVHVNYTKLLINGNFVDSASGKTFPTLDPRTGEVIAHVAEGDAEDINRAVAAARKAFDEGPWPKMTAYERSRILLRFADLIEKHNDELAALETWDNGKPYEQAAQIEVPMVARLMRYYAGWADKIHGLIVPADGPHHVQILHEPIGVAGQIIPWNFPLLMFAWKVGPALACGNTLVLKTAEQTPLSALYISKLLHEAGLPEGVVNVVSGFGPTAGAALASHMDVDKIAFTGSTDTGKIILELAAKSNLKTVTLELGGKSPFIIMDDADVDHAVELAHFALFFNQGQCCCAGSRTFVHERVYDEFVEKAKARALKRVVGDPFRKGVEQGPQIDDEQFNKILRYIRYGVDGGATLVTGGDRLGDKGFYIQPTIFSDVQDGMKIAQEEIFGPVQSILKFKDLNEVIKRANASQYGLAAGVFTNSLDTANTLTRALRAGTVWVNCFDVFDAAIPFGGYKMSGIGREKGVDSLKNYLQVKAVVTPIKNAAWL

SEQ ID NO: 268 - protein, 549 aa, Oryza sativa
MAAAAARRGSSLLSRCLLSRPAAAASPAVPSALRRADGTQGLLPGILQRFSTAAVAEEPISPPVQVNYTQLLIDGKFVDSASGKTFPTLDPRTGELIAHVAEGDAEDINRAVHAARKAFDEGPWPKMTAYERSRILLRFADLIEKHNDEIAALETWDNGKPYAQAANIEVPMVARLMRYYAGWADKIHGLVVPADGPHHVQVLHEPIGVAGQIIPWNFPLLMFAWKVGPALACGNTVVLKTAEQTPLSALFASKLLHEAGLPDGVVNVVSGFGPTAGAALASHMDVDKIAFTGSTDTGKVVLELAARSNLKSVTLELGGKSPFIIMDDADVDHAVELAHFALFFNQGQCCCAGSRTFVHERIYDEFVEKAKARALKRVVGDPFKNGVEQGPQIDDEQFNKILRYIKYGVDSGANLVTGGDRLGDKGYYIQPTIFSDVQDNMRIAQEEIFGPVQSILKFNDLNEVIKRANASQYGLAAGVFTNNLNTANTLTRALRVGTVWVNCFDVFDAAIPFGGYKQSGIGREKGIDSLKNYLQVKAVVTPIKNAAWL

SEQ ID NO: 269 - protein, 55 aa, Oryza sativa
MAGTANCIDILIAIILPPLGVFLKFGCGHEFWICLLLTFLGYIPGIIYAIYAITK

SEQ ID NO: 270 - protein, 55 aa, Saccharomyces cerevisiae
MDSAKIINIILSLFLPPVAVFLARGWGTDCIVDIILTILAWFPGMLYALYIVLQD

SEQ ID NO: 271 - protein, 406 aa, Arabidopsis thaliana
MDPSFRFIKEEFPAGFSDSPSPPSSSSYLYSSSMAEAAINDPTTLSYPQPLEGLHESGPPPFLTKTYDLVEDSRTNHVVSWSKSNNSFIVWDPQAFSVTLLPRFFKHNNFSSFVRQLNTYGFRKVNPDRWEFANEGFLRGQKHLLKNIRRRKTSNNSNQMQQPQSSEQQSLDNFCIEVGRYGLDGEMDSLRRDKQVLMMELVRLRQQQQSTKMYLTLIEEKLKKTESKQKQMMSFLARAMQNPDFIQQLVEQKEKRKEIEEAISKKRQRPIDQGKRNVEDYGDESGYGNDVAASSSALIGMSQEYTYGNMSEFEMSELDKLAMHIQGLGDNSSAREEVLNVEKGNDEEEVEDQQQGYHKENNEIYGEGFWEDLLNEGQNFDFEGDQENVDVLIQQLGYLGSSSHTN

SEQ ID NO: 272 - protein, 155 aa, Arabidopsis thaliana
MDLGRFPIISILEDMLEVPEDHNNEKTRNNPSRVYMRDAKAMAATPADVIEHPNAYAFVVDMPGIKGDEIKVQVENDNVLVVSGERQRENKENEGVKYVRMERRMGKFMRKFQLPENADLDKISAVCHDGVLKVTVQKLPPPEPKKPKTIQVQVA

SEQ ID NO: 273 - protein, 164 aa, Zea mays
MADDGGSHEGSGGGGGVREQDRFPPIANISRIMKKAVPANGKIAKDAKETLQECVSEFISFVTSEASDKCQKEKRKTINGDDLLWAMATLGFEEYVEPLKIYLQKYKEMEGDSKLSTKAGEGSVKKDAISPHGGTSSSSNQLVQHGVYNQGMGYMQPQYHNGET

SEQ ID NO: 274 - protein, 280 aa, Zea mays
MDSSSFVPAAGAENGSAAGGANNGRVAQQQAPAIREQDRLMPIANVIRIMRRVLPAHAKISDDAKETIQECVSEYISFITGEANERCQREQRKTITAEDVLWAMSRLGFDDYVEPLGAYLHRYREFEGDARGVGLVPGAAPSRGGDHHPHPHSMSPAAMLKSRGPVSGAAMLPHHHQHHHDMQMHGAMYGGTAVPPPAGPPHHGGFLMPHPQGSSHYLPYAYEPTYGGEHAMAAYYGGAAYAPGNGGSGDGSGSGGGGGSASHTPQGSGGLEHPHPFAYK

SEQ ID NO: 275 - protein, 224 aa, Oryza sativa
MPDSDNESGGPSNAGEYASAREQDRFLPIANVSRIMKRALPANAKISKDAKETVQECVSEFISFITGEASDKCQREKRKTINGDDLLWAMTTLGFEDYIDPLKLYLHKFRELEGEKAIGAAGSGGGGAASSGGSGSGSGSHHHQDASRNNGGYGMYGGGGGMIMMMGQPMYGSPPASSAGYAQPPPPHHHHHQMVMGGKGAYGHGGGGGGGPSPSSGYGRQDRL

SEQ ID NO: 276 - protein, 177 aa, Oryza sativa
MADHHGGHHADGHRRQQQLQGEAADQAAAEIIKEQDRLLPIANVGRIMKQILPPNAKISKEAKETMQECVSEFISFVTGEASDKCHKEKRKTVNGDDVCWAFGALGFDDYVDPMRRYLNKYRELEGDRAAAAATSRSGAGAAAGPDHPSSSSSAAAATAGHFMFNAMDRSTDSSRQF

SEQ ID NO: 277 - protein, 93 aa, Oryza sativa
MASFARRAMSLAQIPSARISSGAASIGQRRCLAGAADHHGSTKVDFWKQPTNPGNWKEEHFVLISLSGWGLLFYSGYKLATGGKKETPVESTQ

SEQ ID NO: 278 - protein, 143 aa, Oryza sativa
MSEGFDGTENGGGGGGGGVGKEQDRFLPIANIGRIMRRAVPENGKIAKDSKESVQECVSEFISFITSEASDKCLKEKRKTINGDDLIWSMGTLGFEDYVEPLKLYLRLYRETEGDTKGSRASELPVKKDVVLNGDPGSSFEGM

SEQ ID NO: 279 - protein, 296 aa, Oryza sativa
MDPMDIVGKSKEDVSLPKSTMFKIIKEMLPPDVRVARDAQDLLVECCVEFINLLSSESNEVCSREDKKTIAPEHVLRALQDLGFREYIEEVQAAYEHHKHDTLDSPKASKFTGVEMTEEQAVAEQQRMFAEARARMNNGAAKPKEPEPEAQQQTQQPPQPQLHPQPQQPLQPQLQLHPQPQQQPSQLHPQQLLHPQSQQTPQPQPQVHPQPQQPPQLQPQPQLLQQPQLPQQLQPQSQLPPQPQQPPQLQLQSQLHPQPQQPPQLQPQPQLHQQPQPQAELQSQSQPQTEHGLDSS

SEQ ID NO: 280 - protein, 254 aa, Zea mays
MRKKLGTRFPAARIKKIMQADEDVGKIALAVPVLVSRSLELFLQDLIDRTYEITLQSGAKTLNSFHLKQCVKRYSSFDFLTEVVSKVPDLGGADSCGDERGLPRRRKSNGSDPENDESRSSKMAIRNANISPRGRGRGRGRGRGRPPTKRKEVGYVQFEDESSMFAEQGEPLPGEETVQEINGNETMPQSTQPPVEAPPTALAQATTSSKAEEANSDHQSDWPMPDAIGSIGVVPSGFGHLTVQVEDEDYDNED

SEQ ID NO: 281 - protein, 351 aa, Arabidopsis thaliana
MSPEMEFVKVLGKGTYGSVELFSHKQNDGSLLYNAVKIMDSENYGSIDQEFRILSELRGCPCIVQLCGNSLVQGIDCNGKKVYMMSMEYAAAGTLTNFIKRNRTKLSDSVIKDFTRMILQGLVSIHNHGYVHCDLKPDNILLFPLYDKDTWNCSYELKISDFGISTRAGDKSGCWRVDEPWVGTSIYMSPESVSDGTTVEKTLDLWSLGCIVLKMYTGKRPWLGFEKDVKSLLLNQKAPEIPETLPCDARLFLEKCFSRKPEERGSASELLLHPFLTGDEKKGSSVAGGERTGMVLRLRKPPPISKDIPTKPRKLKVISQKPQQLKKVSNKPLKVKIVPPRPPRSDFVPVL

SEQ ID NO: 282 - protein, 351 aa, Arabidopsis thaliana; identical to SEQ ID NO: 281

SEQ ID NO: 283 - protein, 344 aa, Arabidopsis thaliana
MATISFSHNHQSSDNRRGGSHHHRHGPVVEEIEGLIKVFNDGCVERPPIVPIVSPTIHPSSKATAFDIKLSNDTWTRVYIPDAAAASPSVTLPLLVYFHGGGFCVGSAAWSCYHDFLTSLAVKARCVIVSVNYRLAPEHRLPAAYDDGVNVVSWLVKQQISTGGGYPSWLSKCNLSNVFLAGDSAGANIAYQVAVRIMASGKYANTLHLKGIILIHPFFGGESRTSSEKQQHHTKSSALTLSASDAYWRLALPRGASRDHPWCNPLMSSAGAKLPTTMVFMAEFDILKERNLEMCKVMRSHGKRVEGIVHGGVGHAFHILDNSSVSRDRIHDMMCRLHNFIHPS

SEQ ID NO: 284 - protein, 93 aa, Arabidopsis thaliana; identical to SEQ ID NO: 277

SEQ ID NO: 285 - protein, 294 aa, Arabidopsis thaliana
MAIPTETQHQEKEASDASAAAAQKRWTLSDFDIGKPLGRGKFGHVYLAREKRSNHVVALKVLFKSQLQQSQVEHQLRREVEIQSHLRHPNILRLYGYFYDQKRVYLILEYAARGELYKDLQKCKYFSERRAATYVASLARALIYCHGKHVIHRDIKPENLLIGAQGELKIADFGWSVHTFNRRRTMCGTLDYLPPEMVESVEHDASVDIWSLGILCYEFLYGVPPFEAMEHSDTYRRIVQVDLKFPPKPIISASAKDLISQMLVKESSQRLPLHKLLEHPWIVQNADPSGIYRV

SEQ ID NO: 286 - protein, 294 aa, Arabidopsis thaliana; identical to SEQ ID NO: 285

SEQ ID NO: 287 - protein, 413 aa, Arabidopsis thaliana
MGLCWGSPSDSPPTTTPSSTGNISSGTFKSSNNTTTTGTSRGSNISSNSGFSVASGEDAYPDGQILPIPNLRIFSLAELRASTRNFRSENVLGEGGFGKVFKGWLEDKTPGKQSNGTVIAVKKLNAESFQGFEEWQCEVNFLGRVSHPNLVKLLGYCLEGEELLLVYEYMQKGSLENHLFRKGSAVQPLSWEIRLKIAIGAAKGLAFLHASEKQVIYRDFKASNILLDGSYNAKISDFGLAKLGPSASQSHITTRVMGTHGYAAPEYVATGHLYVKSDVYGFGVVLAEILTGLHALDPTRPTGQHNLTEWIKPHLSERRKLRSIMDPRLEGKYPFKSAFRVAQLALKCLGPEPKNRPSMKEVVESLELIEAANEKPLERRTTRASPSIRQQQGHYRPQQLSSFRPRQNVSRAH

SEQ ID NO: 288 - protein, 413 aa, Arabidopsis thaliana; identical to SEQ ID NO: 287

SEQ ID NO: 289 - protein, 180 aa, Arabidopsis thaliana
MASSLIFLLLVTLTFSASTLISAKSNTTTIIESTCKTTNYYKFCVSALKSDPRSPTADTKGLASIMVGVGMTNATSTANYIAGNLSATVKDTVLKKVLQDCSEKYALAADSLRLTIQDLDDEAYDYASMHVLAAQDYPNVCRNIFRRVKGLAYPVEIRRREASLRRICGVVSGILDRLVE

SEQ ID NO: 290 - protein, 180 aa, Arabidopsis thaliana; identical to SEQ ID NO: 289

SEQ ID NO: 291 - protein, 311 aa, Saccharomyces cerevisiae
MLRITVKTLQQRASFHHSFKHISVPDLHTRAQNDQTNCYCQEINARLPSKTDPLDPHIKLPHRTPNYNKHVLLLSPGDRFAQPWKVAWNHNLDTNTNRPYNAISKLRSHLGGSPGILINAVHLQNEFIPRPKQHDEWLYFFVIPDMKLYVIKETDIEEFASFLDEGAIQAPKLSFQDYLSGKAKASQQVHEVHHRKLTRFQGETFLRDWNLVCGHYKRDAKCGEMGPDIIAAFQDEKLFPENNLALISHIGGHIFAGNVIFYKLFGREKMQNKLDSLWFGKVYPHNLKLLCENLENGKIIDEMYRGGISMN

SEQ ID NO: 292 - protein, 311 aa, Saccharomyces cerevisiae; identical to SEQ ID NO: 291

SEQ ID NO: 293 - protein, 535 aa, Arabidopsis thaliana
MVITANDLSKWENFPKGLKVLLLLNGCDSDGDGSSAAETRSELESMDYIVTTFTDETEALSAVVKNPESFYIAIVEVNMSAESESFKFLEAAKDVLPTIMISTDHCITTTMKCIALGAVEFLQKPLSPEKLKNIWQHVVHKAFNDGGSNVSISLKPVKESVVSMLHLETDMTIEEKDPAPSTPQLKQDSRLLDGDCQENINFSMENVNSSTEKDNMEDHQDIGESKSVDTTNRKLDDDKVVVKEERGDSEKEEEGETGDLISEKTDSVDIHKKEDETKPINKSSGIKNVSGNKTSRKKVDWTPELHKKFVQAVEQLGVDQAIPSRILELMKVGTLTRHNVASHLQKFRQHRKNILPKDDHNHRWIQSRENHRPNQRNYNVFQQQHRPVMAYPVWGLPGVYPPGAIPPLWPPPLQSIGQPPPWHWKPPYPTVSGNAWGCPVGPPVTGSYITPSNTTAGGFQYPNGAETGFKIMPASQPDEEMLDQVVKEAISKPWLPLPLGLKPPSAESVLAELTRQGISAVPSSSCLINGSHRLR

SEQ ID NO: 294 - protein, 470 aa, Arabidopsis thaliana
MYIYTYTKSYVFPQMDQEEEEIEIPNYFICPISLEIMKDPVTTVSGITYDRQNIVKWLEKVPSCPVTKQPLPLDSDLTPNHMLRRLIQHWCVENETRGVVRISTPRVPPGKLNVVEEIKNLKKFGQEALGREETLQKLEVLAMDGNNRRLMCECGVHKSLILFVVKCTSEDEDGRRRIKGLDESLRLLHLIGIPSNDAKTILMENDRVMESLTWVLHQEDFLSKAYTIVLLRNLTEYTSSHIVERLNPEIFKGIIGFLKDVVNSVNRTSPTVRETVQSSSRPSLGKTEPSKLDHSLVIKQAVTAALMILLETSSWSRNRSLLVDLGAVSELIELEISYTGEKRITELMLGVLSRLCCCANGRAEILAHRGGIAVVTKRLLRVSPAADDRAISILTTVSKFSPENMVVEEMVNVGTVEKLCSVLGMDCGLNLKEKAKEILKDHFDEWKKFPCIDITLLTKLLSISPKGPKI

SEQ ID NO: 295 - protein, 297 aa, Arabidopsis thaliana
MKSRKSYGHLLSPVGSPPLDNESGEAAAAAAAGGGGCGSSAGYVVYGGGGGGDSPAKEQDRFLPIANVSRIMKRSLPANAKISKESKETVQECVSEFISFVTGEASDKCQREKRKTINGDDLLWAMTTLGFEAYVGPLKSYLNRYREAEGEKADVLGGAGGAAAARHGEGGCCGGGGGGADGVVIDGHYPLAGGLSHSHHGHQQQDGGGDVGLMMGGGDAGVGYNAGAGSTTTAFYAPAATAASGNKAYCGGDGSRVMEFEGIGGEEESGGGGGGGERGFAGHLHGVQWFRLKRNTN

SEQ ID NO: 296 - protein, 576 aa, Brassica napus
MAASFSVPSMIMEEEGRFEAEVAEVQTWWNSERFKLTRRPYTARDVVALRGHLKQGYASNEMAKKLWRTLKSHQANGTASRTFGALDPVQVTMMAKHLDTIYVSGWQCSSTHTSTNEPGPDLADYPYDTVPNKVEHLFFAQQYHDRKQREARMSMSREERAKTPFVDYLKPIIADGDTGFGGTTATVKLCKLFVERGAAGVHIEDQSSVTKKCGHMAGKVLVAVSEHINRLVAARLQFDVMGTETVLVARTDAVAATLIQSNIDSRDHQFILGVTNPSLRGKSLSSLLAEGMAVGKNGPALQAIEDQWLSSARLMTFSDAVVEALKRMNLSENEKSRRVNEWLNHARYENCLSNEQGRELAAKLGVTDLFWDWDLPRTREGFYRFQGSVTAAVVRGWAFAQIADLIWMETASPDLNECTQFAEGVKSKTPEVMLAYNLSPSFNWDASGMTDQQMMEFIPRIARLGYCWQFITLAGFHADALVVDTFAKDYARRGMLAYVERIQREERSNGVDTLAHQKWSGANYYDRYLKTVQGGISSTAAMGKGVTEEQFKETWTRPGAAGMGEGTSLVVAKSRM

SEQ ID NO: 297 - protein, 572 aa, Zea mays
MASPFSVPSLIMEEEGRFEAEVAEVESWWGTERFRLTKRPYTARDVVLLRGTLRQSYASGEMAKKLWRTLKAHQAGGTASRTFGALDPVQVTMMAKHLDTIYVSGWQCSSTHTSTNEPGPDLADYPYDTVPNKVEHLFFAQIYHDRKQREARMSLPRAERARAPYVDFLKPIIADGDTGFGGATATVKLCKLFVERGAAGVHLEDQSSVTKKCGHMAGKVLVAVSEHVNRLVAARLQFDVMGVETVLVARTDAVAATLIQTNVDARDHQFIVGATNPGLRGQSLAAVLSAGMSAGKSGRELQAIEDEWLAAARLKTFSECVRDAIAGLGVAGQEKQRRLQEWDRATGGYDRCVSNDQARDIAASLGVTSVFWDWDLPRTREGFYRFRGSVAAAVVRGRAFAPHADVLWMETSSPNVAECTAFAEGVKAACPEAMLAYNLSPSFNWDASGMTDAEMAAFIPSVARLGYVWQFITLAGFHADALVTDTFARDFARRGMLAYVERIQREERINGVETLEHQKWSGANFYDRVLKAVQGGISSTAAMGKGVTEEQFKDPRPATGSSGLQVMAKSRI

SEQ ID NO: 298 - protein, 331 aa, Zea mays
MDAAVSTLTALAIFASTVEHAAYRSVQGYRVVGRKGGGWVRWERWVERQFVLSLSFPRCVEVALPAAAPRILPAGWRSRPVFREGQTVDTWRCIVAFDSVAAVAPSSPPPPVLSPFVNPQLQYLSNLYNDLLMVFRFREEKTVPQLVNSKQPIRCGEQGKTSDLGDASESDSDGDCQSGKELAPPVQKHTRANRKHIDSITLVDIAQYFHLPIRDASKTLKIGVSILKRKCRQYGIPRWPHRKIKSLDSLIHDLEFVLAREDEDEEEEKQLQKDRLAAAINALTKRKSMLESEKETIQQKPAMDLMAETKLFREDVFKRRYRAKSSVMDMD

SEQ ID NO: 299 - protein, 196 aa, Glycine max
MSQLGAVLRTQREPRRSTILGLLTEQMDGVDSGTRRRRSFKERFGFIGMGCCGATWGFRSDALSVTQGEQQQQETDPECVGPAGLGSGMNLAAALAAERQLRGPQEEAVRAPGTPWRVSLMRLLEETEAEKEKEKEKEENVVGNDSVCCVCMGRKKGAAFIPCGHTFCRVCSRELWLNRGSCPLCNRSILEILDIF

SEQ ID NO: 300 - protein, 232 aa, Arabidopsis thaliana
MLRSSIRLLYIRRTSPLLRSLSSSSSSSSSKRFDSAKPLFNSHRIISLPISTTGAKLSRSEHSMAASSEPKSLYDFTVKDAKGNDVDLSIYKGKVLLIVNVASQCGLTNSNYTELAQLYEKYKGHGFEILAFPCNQFGNQEPGTNEEIVQFACTRFKAEYPIFDKVDVNGDKAAPVYKFLKSSKGGLFGDGIKWNFAKFLVDKDGNVVDRFAPTTSPLSIEKDVKKLLGVTA

SEQ ID NO: 301 - protein, 232 aa, Arabidopsis thaliana; identical to SEQ ID NO: 300

SEQ ID NO: 302 - protein, 152 aa, Zea mays
MAAEEDVKQRQIIENRARNISHNVRCTECGSQSIEDSQADVAILLRKLIRDEIKAGKSDKEIYKKLEDDYGETVLYAPKFDLQTAGIWLSPVIVGGIAAGIWAYQRHRQRTNVHIMALNLVRGVPLTPREKETMLDILTPPPAPRKWWWPGK

SEQ ID NO: 303 - protein, 344 aa, Arabidopsis thaliana
MFSCIACTKADGGEEVEHGARGGTTPNTKEAVKSLTIQIKDMALKFSGAYKQCKPCTGSSSSPLKKGHRSFPDYDNASEGVPYPFMGGSAGSTPAWDFTNSSHHPAGRLESKFTSIYGNDRESISAQSCDVVLDDDGPKEWMAQVEPGVHITFASLPTGGNDLKRIRFSREMFDKWQAQRWWGENYDKIVELYNVQRFNRQALQTPARSDDQSQRDSTYSKMDSARESKDWTPRHNFRPPGSVPHHFYGGSSNYGPGSYHGGPPMDAARTTTSSRDDPPSMSNASEMQAEWIEEDEPGVYITIRQLSDGTRELRRVRFSRERFGEVHAKTWWEQNRERIQTQYL

SEQ ID NO: 304 - protein, 405 aa, Zea mays
MLTCIACSKQLPGDAPPLREPSDDDDRANAGGGGESAATPGTRQAIRVLTAQIKDMALKASGAYRHCKPCAGSSSPAASRRQQPYYHGAYAESGSDRFHCAYQRAGSSAASTPGLRTGGAMSSGDITPSVSARTDFLADDEEGDDEEGTATGSSEEDEEKEWVAQVEPGVLITFLSLPRGGNGLKRIRFSREMFNKWQAQRWWTENYEKVMELYNVQKSNSQVDPLPSIPRSDSEISKDDTPATAPLNKGQLLRTSPRPLKGSEAIGYSSSDCPQHQSSHFRNVYRKDRYLGHQFCDPVELASTPELSSISGAKTETSIGASVRTSSSPEEVDGSGELSASVSNASDEEREWVEEDEPGVYITIRALPGSIRELRRVRFSRERFSEMHARLWWEENQARIYEQYL

SEQ ID NO: 305 - protein, 624 aa, Zea mays
MNAVEPSAAAIAEDPITPAASAAPYPGRLREALTALSEACESGNFNASETASFTISDILDTAAGVSGELDDGSDDSQDASRSGASEVLLREVLEFLSRPSSISNQMALDALSLVLPKPVAKLGARMGRCRDVAAAILKFFVTNCNPRDMLSILCEALDAPMELPNGLSSFVLLLDALAKVFTLIQRRHIEQVKVALPVVLKVMHATVSECVEEHGSAAVDLFNAAHGVGKAIQEMCISMFNKNKDLCAILGLYSLQNIALVSRSRQQDILSACGSVVFQSFRFLKTSGFTYRGLLTGSDVTAATVELSKEEDADFMEHFSFAMDGAALSVVWTLMHDDKDMSKYAGEELELAVKEVQGNHMEKWEAINMLKYVLSSIHYPWIIKSHSLNLMLILSGEDHVEEINNHVDFTCFAHRIFETLKAIESVMIAAPMALVRKKAFAALKKVISMVPSSQRFDILHGLVNNSTSPALTAILLDLVRQEVSRESRQADNDCIEDEGFRGNGLPRWASHALELVELILRPPEGGPPCLPDHSEQVISALNLLRFILIIDSRGQRSAKLFRKETLHKVHSEWLTPLRPIAEQIQLENEKDADEITKQIVCMLNLVQLVLYRCIELVEEKMKGC

SEQ ID NO: 306 - protein, 66 aa, Thermotoga maritima MSB8
MRGKVKWFDSKKGYGFITKDEGGDVFVHWSAIEMEGFKTLKEGQVVEFEIQEGKKGPQAAHVKVVE

SEQ ID NO: 307 - protein, 66 aa, Thermotoga maritima MSB8
MRGTVKWFDSKKGYGFITMENGEDIFVHWSAIQMDGFKTLRENETVEFEVQKGTKGPQAVNVRPVR

SEQ ID NO: 308 - protein, 66 aa, Thermoanaerobacter tengcongensis MB4
MVRGKVKWFNAEKGYGFIEREDGTDVFVHYSAIEGEGFKTLEEGQAVEFEVVQAAKGPQASKVRKL

SEQ ID NO: 309 - protein, 66 aa, Bacillus caldolyticus
MQRGKVKWFNNEKGYGFIEVEGGSDVFVHFTAIQGEGFKTLEEGQEVSFEIVQGNRGPQAANVVKL

SEQ ID NO: 310 - protein, 80 aa, Triticum aestivum
MQITGKVKWFNESKGFGFITPDDGSKDVFVHFTAIAGNGFKTLAEGQRVEFEIQDGQKGPSAVNVKALELEEDKSISSKL

SEQ ID NO: 311 - protein, 78 aa, Zea mays
MGLWTLLEGFLLLANALAILNEDRFLGPRGWSMSEVSGNGQTKSFKGQIVGLIYATQFLRMPLIALNVLIIVVKLVSG

SEQ ID NO: 312 - protein, 171 aa, Arabidopsis thaliana
MLFFNPGFTCMQEEFQLALFKSRKRENIFANRIFDMFDVKRKGVIDFGDFVRSLNVFHPNASLEDKIDFTFRLYDMDCTGYIERQEVKQMLIALLCESEMKLADETIEIILDKTFEDADVNQDGKIDKLEWSDFVNKNPSLLKIMTLPYLRDITTTFPSFVFHSEVDEIAT

SEQ ID NO: 313 - protein, 857 aa, Arabidopsis thaliana
MAEKVSEDVMLLHGDLDLKIVKARRLPNMDMFSEHLRRLFTACNACARPTDTDDVDPRDKGEFGDKNIRSHRKVITSDPYVTVVVPQATLARTRVLKNSQEPLWDEKFNISIAHPFAYLEFQVKDDDVFGAQIIGTAKIPVRDIASGERISGWFPVLGASGKPPKAETAIFIDMKFTPFDQIHSYRCGIAGDPERRGVRRTYFPVRKGSQVRLYQDAHVMDGTLPAIGLDNGKVYEHGKCWEDICYAISEAHHMIYIVGWSIFHKIKLVRETKVPRDKDMTLGELLKYKSQEGVRVLLLVWDDKTSHDKFGIKTPGVMGTHDEETRKFFKHSSVICVLSPRYASSKLGLFKQQVVGTLFTHHQKCVLVDTQAVGNNRKVTAFIGGLDLCDGRYDTPEHRILHDLDTVFKDDFHNPTFPAGTKAPRQPWHDLHCRIDGPAAYDVLINFEQRWRKATRWKEFSLRLKGKTHWQDDALIRIGRISWILSPVFKFLKDGTSIIPEDDPCVWVSKEDDPENWHVQIFRSIDSGSVKGFPKYEDEAEAQHLECAKRLVVDKSIQTAYIQTIRSAQHFIYIENQYFLGSSYAWPSYRDAGADNLIPMELALKIVSKIRAKERFAVYVVIPLWPEGDPKSGPVQEILYWQSQTMQMMYDVIAKELKAVQSDAHPLDYLNFYCLGKREQLPDDMPATNGSVVSDSYNFQRFMIYVHAKGMIVDDEYVLMGSANINQRSMAGTKDTEIAMGAYQPNHTWAHKGRHPRGQVYGYRMSLWAEHLGKTGDEFVEPSDLECLKKVNTISEENWKRFIDPKFSELQGHLIKYPLQVDVDGKVSPLPDYETFPDVGGKIIGAHSMALPDTLTT

SEQ ID NO: 314 - protein, 711 aa, Arabidopsis thaliana
MPALACVDTSFVPPAYAFSDTAGDVFIPASSPTSAAVVVDRWSPSLSSSLYRIDGWGAPYFIANSSGNISVRPHGSETLPHQDIDLLKIVKKVTGPKSSGGLGLQLPLIVRFPDVLKNRLECLQSAFDYAIKSQGYDSHYQGVYPVKCNQDRFVVEDIVKFGSSFRFGLEAGSKPEILLAMSCLCKGSPDAFLVCNGFKDAEYISLALLGRKLALNTVIVLEQEEELDLVIELSQKMNVRPVIGLRAKLRTKHSGHFGSTSGEKGKFGLTTTQIVRVVRKLRQSGMLDCLQLLHFHIGSQIPSTSLLSDGVAEAAQLYCELVRLGAHMKVIDIGGGLGIDYDGSKSGESDLSVAYSLEEYAEAVVASVRVVCDRSSVKHPVICSESGRAIVSHHSVLIFEAVSADKPMVHQATPGDIQFLLEGNEEARANYEDLYAAVMRGDHESCLLYVDQLKQRCVEGFKEGVLSIEQLASVDGLCEWVLKAIGASDPVHTYNINLSVFTSIPDLWGIDQLFPIVPIHKLDQRPGARGILSDLTCDSDGKINKFIGGESSLPLHELDKNGSGGRYFLGMFLGGAYEEALGGVHNLFGGPSVVRVSQSDGPHSFAVTRAVPGQSSADVLRAMQHEPELMFQTLKHRAEEMMHTKGGSEGENEEEEEDDEFNNVAASLDRSFHNMPYLATEQASPSNSLSAAISNLGFYYCDEDVYDYISA

SEQ ID NO: 315 - protein, 293 aa, Saccharomyces cerevisiae
MAQEITHPTIVDGWFREISDTMWPGQAMTLKVEKVLHHEKSKYQDVLIFKSTTYGNVLVLDNVIQATERDEFAYQEMIAHLALNSHPNPKKVLVIGGGDGGVLREVVKHDSVEEAWLCDIDEAVIRLSKEYLPEMAASYSHPKVKTHIGDGFQFLRDYQNTFDVIITDSSDPEGPAETLFQKEYFQLLNSALTEKGVITTQAESMWIHLPIIKDLKKACSEVFPVAEYSFVTIPTYPTGTIGFMVCSKDKTCNVKKPLREISDEKEAELYRYYNKKIHEASFVLPTWAAKELN

SEQ ID NO: 316 - protein, 508 aa, Saccharomyces cerevisiae
MNTVSPAKKKVIIIGAGIAGLKAASTLHQNGIQDCLVLEARDRVGGRLQTVTGYQGRKYDIGASWHHDTLTNPLFLEEAQLSLNDGRTRFVFDDDNFIYIDEERGRVDHDKELLLEIVDNEMSKFAELEFHQHLGVSDCSFFQLVMKYLLQRRQFLTNDQIRYLPQLCRYLELWHGLDWKLLSAKDTYFGHQGRNAFALNYDSVVQRIAQSFPQNWLKLSCEVKSITREPSKNVTVNCEDGTVYNADYVIITVPQSVLNLSVQPEKNLRGRIEFQPPLKPVIQDAFDKIHFGALGKVIFEFEECCWSNESSKIVTLANSTNEFVEIVRNAENLDELDSMLEREDSQKHTSVTCWSQPLFFVNLSKSTGVASFMMLMQAPLTNHIESIREDKERLFSFFQPVLNKIMKCLDSEDVIDGMRPIENIANANKPVLRNIIVSNWTRDPYSRGAYSACFPGDDPVDMVVAMSNGQDSRIRFAGEHTIMDGAGCAYGAWESGRREATRISDLLK

SEQ ID NO: 317 - protein, 506 aa, Zea mays
MAASAKGRLVPVLAVAAALAAVLLYRAPFSKSLGGEGCSLLPHDHFWIASDRVVTLGRVGPAAVEVKGGLINAIAVGDYRSFVLRRPLLDYGDAVIMPGLIDVHAHLDEPGRAEWEGFSNGTRAAAAGGITTLVDMPLNSFPSTVSEETLKLKLEAARDKLYVDVGFWGGLVPENAFNPSALEGLLKAGVLGLKSFMCPSGINDFPMTNSTHIEEGLVTLAKYKRSLLIHAERIPEAEDHDLQEDELDPRSYMTYLKSRPPSWEEAAIRDLQRAMKDTELGGRSEGAHIHIVHLSDAKTSLELMKDAKRSGASLSIETCPHYLAFSSEEVPDGDTRFKCSPPIRDDTNRENLWKALLDGHIDMLSSDHSPSTPDLKLMEEGDFLRAWGGISSLQFVLPVTWSYGRKYGVTLNQLASWWSERPAKLAGQKNKGAILPGYHADIVVWKPETEFQLDNNHAIYHKHQNISAYLGKQLSGKVLSTFVRGNLVFAEDKHANAACGVPILAK

SEQ ID NO: 318 - protein, 129 aa, Zea mays
MACPTKKGMTGEPSSPCSSASASTLPEHHQTVWTSPPKRPAGRTKFRETRHPVFRGVRRRGSAGRWVCEVRVPGRRGCRLWLGTFDTAEAAARAHDAAMLALAGAGACCLNFADSAWLLAVPASCASLA

SEQ ID NO: 319 - protein, 137 aa, Zea mays
MDMGRLQLQLQHAASSSSTSASSSSSSEQNKLAWSPSSPQPPKKRPAGRTKFRETRHPVFRGVRRRGAAGRWVCEVRVPGRRGARLWLGTYLGAEAAARAHDAAMLALGRGAACLNFPDSAWLLAVPPPPALSGGLD

SEQ ID NO: 320 - protein, 73 aa, Arabidopsis thaliana
MVFPACVQCGTRQNPCRCKVVGPTLGFVAFLITGIIEWPVGAVVYIFKHAKGRRIMGHPARKVYPKVSRSIPI

SEQ ID NO: 321 - protein, 285 aa, Saccharomyces cerevisiae
MELSSPSKKTTTSPINIPGGNRDNLIIGPHSHSFKTDPFSSNNSSLLSKISTNPSLESPFSSKSLLDCSPVQAVKKSLESEAKTHSLDEETNEQTDVKILNIADFPTDELILMISALLNRIITANDETTDVSQQVSEETEDELLTPILAFYGKNVPEIAVVQYLERIQKYCPTTNDIFLSLLVYFDRISKNYGHSSERNGCAKQLFVMDSGNIHRLLITGVTICTKFLSDFFYSNSRYAKVGGISLQELNHLELQFLILCDFKLLVSVEEMQKYANLLYKFWNDQ

SEQ ID NO: 322 - protein, 599 aa, Agrobacterium tumefaciens
MQGDKPVPHRPGRSDGSTGPMLDKGGGRGKLSSPERFREWTRKTMAKQDELVFVPLGGVGEIGMNLALYGYGPESKRQWIMVDCGVTFAGPDLPGVDLVLPDISYIAEQKKNLKGIIITHAHEDHYGAMNDLWPGLNVPVYASPFTAGMLEAKRAYEGTRAEIPVTIFKAGDRINVGPFEIEAVGVNHSIPEPMSLIIRTPLGNVIHTGDWKIDEAPSLGPLTDEARFRAIGEEGVLALMCDSTNALRDGVSPSEHEVSEGLRQIIESAEGRVAVTTFSSNVGRIRSIAQAAEAAGREVLLLGSSLKRVVNVSQDLGIMEGIKPFLAEDEYGYIPRDRVVVILTGSQGEPRAALAKLSRDEMRNVALASGDTVVFSSRAIPGNEKAIIEIKNGLIEQGVHIVTDNEALVHVSGHPRRNELLRMYEWTKPQILVPVHGEAAHLVAQKELAEQAGISQVPKVRNGNVLRLAPGPAEVINDVPHGRVFKDGNLVGDMDEMGISNRRKLSFAGHVAVNVVLDSRYDFLGDPDVVPFGLPEFDDEDEAMEDTLYDAVLGAVESIPRARRKDLALLRESVRRAVRAAANQSWGKKPIVTVFVTKV

SEQ ID NO: 323 - protein, 216 aa, Arabidopsis thaliana
MEPRINDLQVESRVHELLDFPVHTNQISSAIYECPNDHIENPKKKPYNCPHSGAKCDVTGDIQRLLLHLRNDHNVEMSDGRSFSHRYVHHDPKHLHHATWMLTLLDCCGRKFCLYFEAFHLRKTPMYMAFMQFMGDEEEAMSFSYSLQVGGNGRKLTWQGVPRSIRDSHKTVRDSQDGLIITRKLALFFSTDNNTTDKELKLKVSGRVWREQPVSI

SEQ ID NO: 324 - protein, 216 aa, Arabidopsis thaliana; identical to SEQ ID NO: 323

SEQ ID NO: 325 - protein, 218 aa, Arabidopsis thaliana
MSSINITNVTVLDNPAPFVNPFQFEISYECLTSLKDDLEWKLIYVGSAEDETYDQVLESVLVGPVNVGNYRFVLQADSPDPLKIREEDIIGVTVLLLTCSYMDQEFIRVGYYVNNDYDDEQLREEPPTKVLIDKVQRNILTDKPRVTKFPINFHPENEQTLGDGPAPTEPFADSVVNGEAPVFLEQPQKLQEIEQFDDSDVNGEAIALLDQPQNLQET

SEQ ID NO: 326 - protein, 102 aa, Arabidopsis thaliana
MHGRTAMAVACLLCMTALLLVQDVQSRRLLWTEQEKKQSHGGLGNHGAADRRSTSLEPCSGAMGGGGTGSADKQGEFPCDDDTSKWTELHTDYIYTQDFKHP

SEQ ID NO: 327 - protein, 569 aa, Arabidopsis thaliana
MANSKKQAWFFYTTGLPSDIEIEVDDITFHLHKFPLMSKSKKLHQLITEQEQSKVYSHIKLENFPGGSEIFEMVIKISYGFKVDISVSTAVPLRCAAEYLEMTEEYSPENLISKTEKFLSEFVFTNVQESIKALKACESVSSLAESLCITEQCIDSIVFQASSTDPSSFYGWPINNGGIFTVDRKKQSKDSKTELWFEDLTELSFPIFRRVILSMKSSVLSPEIVERSLLTYAKKHIPGISRSSSASSSSSSSSTTIASENQQRELLETITSDLPLTATTTRSLFGLLRAAIILNASENCRKFLEKKIGSNLEKATLDDLLIPSYSYLNETLYDIDLVERLLRRFLENVAVSSSSLTVVGRLIDGVLGEIASDANLKPEQFYNLAVLLPVQARVYDDGLYRAVDIYFKTHSWILEEEKEKICSVMDCRKLTVEGCTHAAQNERLPLRAVVQVLFLEQLQLRQVITGTLLTEEDGDKTVVDLGRWKEAVKENQVLRLDMDTMRTRVNQLEKECLYLKKVIAKIDKESLLKAKHGAGKWSIGKKFGCKFSAQVCDSQEATMVDRRSRRFLS

SEQ ID NO: 328 - protein, 196 aa, Arabidopsis thaliana
MATALASKLSKGRSLLGGLCNAFSGLMNSSSNGMMNGSILSQQQHRTFIQMGTILKCVDNSCAKEVMCIQSLRGKKGARLGDIIVGSVKEANPIVQKKVKKDAIPKGKVKKGMVVYGVVVRAAMPKGRADGSQVKFDDNAIVVVGIKEKKGQNNSHGSKRKMEYNQPTGTRVFGPVPHEMRLRKQLKILSLAQHIV

SEQ ID NO: 329 - protein, 479 aa, Synechocystis sp. PCC 6803
MASSMLSSATMVASPAQATMVAPFNGLKSSAAFPATRKANNDITSITSNGGRVNCMQVWPPIGKKKFETLSYLPDLTDSGGRVNCMQAMGKNLLEQLRQFTVVVADTGDIQAIETFTPRDSTTNPSLITAAAQMPQYQEIVDSTLLKAKDEAGENASIKDIVRLAFDRLAVAFGLKILQIIPGRVSTEVDARLSYDTEATIAKARYLIGEYAKAGIDKKRILIKIASTWEGIKAAEVLEQEGIHCNLTLLFGLHQAIACAEAKVTLISPFVGRILDWYKKSTGKEYDSHEDPGVQSVTTIYNYYKRFGYKTEVMGASFRNIGEIIELAGCDLLTISPQLLDQLRNTEGDLPRKLDPATVPQDIEKIVMDKATFDKMHAEDPMASEKLAEGIAGFTKALEVLEHLLEERLKVLDGQEHIKHGAEEIFHAYDLDGDGFITREEWAGTDVVFDALDRDHDGKITAAEMSAGLGAAFRLASVG

SEQ ID NO: 330 - protein, 316 aa, Arabidopsis thaliana
MDPALLDDVIRRLLEVKNLKPGKNAQLSESEIKQLCAAAKEIFLQQPNLLELEAPIKICGDVHGQYSDLLRLFDYGGYPPQANYLFLGDYVDRGKQSLETICLLLAYKVKYPENFFLLRGNHECASVNRIYGFYDECKRRFSVKLWKTFTDCFNCLPVSALIDEKILCMHGGLSPELNKLEQILNLNRPTDVPDTGLLCDLLWSDPSNEATGWAINDRGVSFTFGPDKVSEFLEKHDLDLICRAHQVVEDGYEFFASRQLVTIFSAPNYCGEFDNAGAMMSVDDTLMCSFQILKPARKMMGGSTNNKSGFKSFRGW

SEQ ID NO: 331 - protein, 323 aa, Desulfitobacterium hafniense
MTNTVRKIAVLTSGGDAPGMNAAIRAVVRKGIYHGLEVFGIRKGYEGLIHGEFITMHLGAVADIIHRGGTMLMTARSQEMLTPEGQKNAAAQLRYRGIDALIVIGGDGSFRGAQTLSAQGIAIVGIPGTIDNDITGTDLTIGFDTAVNNVVQAVSKIRDTATSHDRTFLVEVMGRDCGNIALQSGVACGAESILVPEIEPDLDDIVAKLERGHQRGKHHSIIMVAEGAMSAWNLGEELRQRTGFETRVTILGHIQRGGNPSALDVVLASQMGGKAVEILCAGETDRMTACVNQEIQSLPLEVAYGERKPFNKVLYDLANQLAI

SEQ ID NO: 332 - protein, 323 aa, Desulfitobacterium hafniense; identical to SEQ ID NO: 331

SEQ ID NO: 333 - protein, 421 aa, Arabidopsis thaliana
MDSISLLPDDFLLRILSLLPTKDVLNTSVLSKRWRYLWKLVPKLQYSLIDKNADHGTFVRFVDRSLLLSMAPVLESLHLKLGRQCSEVDIGFWVRIAVEKGLCELDFDYEHYKTEPCRLPQSLFTCGTLTVLKLKNVSLKDVQFPVCFKLLKTLHLEYVIFLDKETPQKLLSSCPILEVFDLTRDDDDVDNVMSFSVMVPSLQRFIYCGGSGAELVMNTPSLKYLKLSGCGYECMIGNLPEIVEAHVEVACSTDDILTSLASVKRLLLCLPTEPELPTGTIFHQLEHLEFCSCCTEWDILMFMLKHSPKLRSLKLNETHGYTIVSQSDPMFHWEEPSSVPETLMFVLETLEWRNYRGLKMENELASFLLKHSRRLKIATFSPADCKQVRIELRTTVGMKYRILMELARLPRGSAECELVFG

SEQ ID NO: 334 - protein, 509 aa, Zea mays
MIANGLRKSSAASSQVSKLVKYIASAGSLQGGHSLSEPSARHYSSEPSLQATEENGFKGHSMLAPFTAGWQSTDVHPLVIERSEGSYVYDSNGKKYIDALAGLWCTALGGNEPRLVKAATEQLNKLPFYHSFWNRTTKPSLDFANDILSMFTAREMGKVFFTNSGSEANDSQVKLVWYYNNALGRPDKKKFIARSKSYHGSTLIAASLSGLPALHQKFDLPAPFVLHTDCPHYWRFRLPDETEEEFSTRLANNLENLVLKEGPETIAAFIAEPVMGAGGVILPPKTYFEKIQAVLKKYDILLIADEVITAFGRLGTMFGCDMYNIKPDLVSIAKALSSAYMPIGAILVSPEITDVIYSQSNKLGSFAHGFTYSGHPVSCAVAVETLKIYKERNIVEHVNKIAPRFQEGIKAFSGSPIVGEIRGLGLILGTEFVDNKSPNDPFPAEWGVGSIFGAECEKRGMLIRVAGDSIMLSPPLIMTPNEVEEIISKFGDALKATEERIGELKSRKN

SEQ ID NO: 335 - protein, 368 aa, Arabidopsis thaliana
MARRSVSIFNRLLANPPSPFTSLSRSITYMPRPGDGAPRTVTLIPGDGIGPLVTGAVEQVMEAMHAPVHFERYEVLGNMRKVPEEVIESVKRNKVCLKGGLATPVGGGVSSLNMQLRKELDIFASLVNCINVPGLVTRHENVDIVVIRENTEGEYSGLEHEVVPGVVESLKVITKFCSERIARYAFEYAYLNNRKKVTAVHKANIMKLADGLFLESCREVAKHYSGITYNEIIVDNCCMQLVAKPEQFDVMVTPNLYGNLIANTAAGIAGGTGVMPGGNVGAEHAIFEQGASAGNVGNDKMVEQKKANPVALLLSSAMMLRHLRFPTFADRLETAVKQVIKEGKYRTKDLGGDCTTQEVVDAVIAALE

SEQ ID NO: 336 - protein, 181 aa, Arabidopsis thaliana
MENDDITVAEMKPKKRAGRRIFKETRHPIYRGVRRRDGDKWVCEVREPIHQRRVWLGTYPTADMAARAHDVAVLALRGRSACLNFSDSAWRLPVPASTDPDTIRRTAAEAAEMFRPPEFSTGITVLPSASEFDTSDEGVAGMMMRLAEEPLMSPPRSYIDMNTSVYVDEEMCYEDLSLWSY

SEQ ID NO: 337 - protein, 494 aa, Zea mays
MAPGSSSSRKAKALKASYRLVADNFLAVLAMVSVVAVLFAAWPISIEDLACRLHAVRPLHVLTAAILTAALAKLRRMSRPSDVYLVEYGCFWPKPCFRAPFATCLEHVRLLPYLVNEDDISWGWRLLQRSGIGEETCVPYAYHYLPPDRSFRASLDETELVIFSAVDDVFARTTAVTPADIGVVIVNCSIFTPTPVFTDMIVNRYKLRADVRSVNLSGMGCSAALISIGLARNMLQVAPPGTHALIVSTEILSSQYYVGMDRSMLLPNCLFRMGAAAMIMSNTAARGARFRLARVVRTVASARDAAYRCVFQVEDEESNTGIRLSKDLVPTAAQTLKSNIVAFGPLVLPASEKLLVALSILRRRLVQSSRGRVYRPDFRTAFEHFCIHAGGRGVIDEVQRGLGLSDEDVEASRMTLHRFGNTSSSSVVYELAYIEAKGSMRKGDRVWMISFGAGFDCSSVAWECIEPAADAAGPWADCIHRYPVQLPKLMEALD

SEQ ID NO: 338 - protein, 245 aa, Arabidopsis thaliana
MENEREKLIYLAKLGCQAGRYDDVMKSMRKVCELDIELSEEERDLLTTGYKNVMEAKRVSLRVISSIEKMEDSKGNDQNVKLIKGQQEMVKYEFFNVCNDILSLIDSHLIPSTTTNVESIVLFNRVKGDYFRYMAEFGSDAERKENADNSLDAYKVAMEMAENSLAPTNMVRLGLALNFSIFNYEIHKSIESACKLVKKAYDEAITELDGLDKNICEESMYIIEMLKYNLSTWTSGDGNGNKTDG

SEQ ID NO: 339 - protein, 245 aa, Arabidopsis thaliana; identical to SEQ ID NO: 338

SEQ ID NO: 340 - protein, 208 aa, Arabidopsis thaliana
MEKIVRSSSLILLVGLLLFMNFHGFVRIAEATKRRIEISDDLDDVEDNEEDESWKEWGKKATTPEFDPPPDFTNMGFDQIQEEMAKRTFGTVVGFVKLRLGVPRTKDVVIDIAMKWTKVLRTGGIGVRFMAVDRSTVMFNMQNGKLVTELREFVLSQEEAYEVKIGKQEFRRPGDPPFEDVFDKFQAEQRKDHEDGDGNKNDLTKDEL

SEQ ID NO: 341 - protein, 208 aa, Arabidopsis thaliana; identical to SEQ ID NO: 340

SEQ ID NO: 342 - protein, 200 aa, Arabidopsis thaliana
MSSKKIVLTSSDGESFKVEEVVARKLQIVGHIIEDDCATNKIPIPNVTGEILAKVIEYCKKHVEDDDDVVETHESSTKGDKTVEEAKKKPDDVAVPESTEGDDEAEDKKEKLNEWDAKFMKDFDIKTIFDIILAANYLNVQGLFDLCSKTIADYIKDMTPEEVRELFNIENDFTPEEEEAIRNENAWTFEQDGKQQVPKP

SEQ ID NO: 343 - protein, 247 aa, Arabidopsis thaliana
MYKWNLPYRKDDVETGREGGERSLYPTMLESPELRWGFIRKVYSIIAFQLLATIAVASTVVFVRPIAVFFATTSAGLALWIVLIITPLIVMCPLYYYHQKHPVNYLLLGIFTVALAFAVGLTCAFTSGKVILEAAILTTVVVLSLTVYTFWAAKKGYDFNFLGPFLFGALIVLMVFALIQIFFPLGRISVMIYGCLAAIIFCGYIVYDTDNLIKRYSYDEYIWAAVSLYLDIINLFLALLTIFRAAE

SEQ ID NO: 344 - protein, 247 aa, Arabidopsis thaliana; identical to SEQ ID NO: 343

SEQ ID NO: 345 - protein, 116 aa, Glycine max
MATLDSDVPMVPAGEPSSSAGPSSKKPKRFEIKKWNAVALWAWDIVVDNCAICRNHIMDLCIECQANQASATSEECTVAWGVCNHAFHFHCISRWLKTRQVCPLDNSEWEFQKYGH

SEQ ID NO: 346 - protein, 443 aa, Arabidopsis thaliana
MMVFVVFVMCRYKILEELGDGTCGSVYKAVNLETYEVVAVKKMKRKFYYWEECVNLREVKALRKLNHPHIIKLKEIVREHNELFFIFECMDHNLYHIMKERERPFSEGEIRSFMSQMLQGLAHMHKNGYFHRDLKPENLLVTNNILKIADFGLAREVASMPPYTEYVSTRWYRAPEVLLQSSLYTPAVDMWAVGAILAELYALTPLFPGESEIDQLYKICCVLGKPDWTTFPEAKSISRIMSISHTEFPQTRIADLLPNAAPEAIDLINRLCSWDPLKRPTADEALNHPFFSMATQASYPIHDLELRLDNMAALPNLELNLWDFNREPEECFLGLTLAVKPSAPKLEMLRNVSQDMSENFLFCPGVNNDREPSVFWSLLSPDENGLHAPVESSPLSLSFSPMQQHTVGPPQSSGFTMTSSMQPNMLDRPWMAVSAPFQQSHYL

SEQ ID NO: 347 - protein, 323 aa, Arabidopsis thaliana
MEAEAAAKRARESGDAAAAGAGEQAGISAVIPGWFSEISPMWPGEAHSLKVEKVLFQGKSDYQNVMVFQSSTYGKVLVLDGVIQVTERDECAYQEMITHLPLCSIKDPKKVLVIGGGDGGVLREVSRHSSVEQIDICEIDKMVVDVSKQFFPHLAVGFEDPRVSLHIGDGVAFLKNAPEGTYDAVIVDSSDPIGPAQELFEKPFFQSVARALRPGGVVCTQAESIWLHMHIIEDIVANCRQVFKGSVNYAWTTVPTYPSGVIGFMLCSTEGPTVDFQHPIFNIEDNEFSTKSKGPLKFYNSEIHSASFCLPSFAKRVIGSKAN

SEQ ID NO: 348 - protein, 250 aa, Arabidopsis thaliana
MTSASELFSTRRSRPGRSDPALESDTSSYRHHSHHHHRRHGVHHHNQRHDSDGCDPLRRPTPRLRRFFHHPIQERSRPIRDVQGTSQYLNTDSTDTETQSSSFVNLNGSERLPGAVLLARDRLFERLRGVSLSSNSRSNRVSLDDQRESSFHSIDGDPIFQLAGLQVTYECNKKPQGLTQDAINCLHRQTFSSAEVKSEMRDCSICLESFTKGDMLISLPCTHSFHSSCLNPWLRACGDCPCCRRAIAKE

SEQ ID NO: 349 - protein, 250 aa, Arabidopsis thaliana; identical to SEQ ID NO: 348

SEQ ID NO: 350 - protein, 158 aa, Arabidopsis thaliana
MSDEEHHFESSDAGASKTYPQQAGTIRKNGYIVIKNRPCKVVEVSTSKTGKHGHAKCHFVAIDIFTSKKLEDIVPSSHNCDVPHVNRTDYQLIDISEDGYVSLLTDNGSTKDDLKLPNDDTLLQQIKSGFDDGKDLVVSVMSAMGEEQINALKDIGPK

SEQ ID NO: 351 - protein, 158 aa, Arabidopsis thaliana
MSDDEHHFESSDAGASKTYPQQAGNIRKGGHIVIKGRPCKVVEVSTSKTGKHGHAKCHFVAIDIFTSKKLEDIVPSSHNCDVPHVNRVDYQLIDISEDGFVSLLTDNGSTKDDLKLPTDEALLTQLKNGFEEGKDIVVSVMSAMGEEQMCALKEVGPK

SEQ ID NO: 352 - protein, 197 aa, Arabidopsis thaliana
MSASRFVKCVTVGDGAVGKTCLLISYTSNTFPTDYVPTVFDNFSANVVVNGSTVNLGLWDTAGQEDYNRLRPLSYRGADVFILAFSLISKASYENVSKKWIPELKHYAPGVPIVLVGTKLDLRDDKQFFIDHPGAVPITTAQGEELRKQIGAPTYIECSSKTQENVKAVFDAAIRVVLQPPKQKKKKSKAQKACSIL

SEQ ID NO: 353 - protein, 528 aa, Arabidopsis thaliana
MVIGAAARVAIGGCRKLISSHTSLLLVSSQCRQMSMDAQSVSEKLRSSGLLRTQGLIGGKWLDSYDNKTIKVNNPATGEIIADVACMGTKETNDAIASSYEAFTSWSRLTAGERSKVLRRWYDLLIAHKEELGQLITLEQGKPLKEAIGEVAYGASFIEYYAEEAKRVYGDIIPPNLSDRRLLVLKQPVGVVGAITPWNFPLAMITRKVGPALASGCTVVVKPSELTPLTALAAAELALQAGVPPGALNVVMGNAPEIGDALLTSPQVRKITFTGSTAVGKKLMAAAAPTVKKVSLELGGNAPSIVFDDADLDVAVKGTLAAKFRNSGQTCVCANRVLVQDGIYDKFAEAFSEAVQKLEVGDGFRDGTTQGPLINDAAVQKVETFVQDAVSKGAKIIIGGKRHSLGMTFYEPTVIRDVSDNMIMSKEEIFGPVAPLIRFKTEEDAIRIANDTIAGLAAYIFTNSVQRSWRVFEALEYGLVGVNEGLISTEVAPFGGVKQSGLGREGSKYGMDEYLEIKYVCLGDMNRH

SEQ ID NO: 354 - protein, 471 aa, Arabidopsis thaliana
MWRRSNLPGNPDSDQSISEEEEENDISPKENAKEQERGLLLQTKLEKLIGCGELNYARETGDVTLEATLRKISSSLEDVVEVPDSPEESYISSSRRTGLACISAQENGSDDEITHDEQVATWSAISKETKSLIHLNGVASVASSHLSGFRAKKSSNGLKDHGRPKFSFNSHTHGETSSKISDMAEIFEPDVEDQAIEEDPIIECPNSFDERSENRQGVSVAESREVLHECTKDAVPKLQEIPLDKIRLIKRSSELDSRHEAKSRKFTHKGNSSNFQDSDTDDELPGPMDSGSSSDDEPSYQSSVPNISNQKKQFVGDRFDEAIKASSLSKEGLLFGSPKLSGGSSLYGKLQQIMKQEKETEMEIMRKLQSGIGEADSSGYVDVKVMSRHLEGKLVVCKCSVIDLSGDSLLLKNTQALAAKETETTIIFSPKVCADVDIEIGNFIRVYAPWKELEVQKTNDVIILSSYFSSL

SEQ ID NO: 355 - protein, 70 aa, Zea mays
MSALFNFNSFLTVVLLVICTCSYIKMQFPAILNDRTGFRGFFWKAARIGERLSPWVSVGCLAMGISTIFF

SEQ ID NO: 356 - protein, 316 aa, Arabidopsis thaliana
MGGGGAMRSAAKIAGIGVSKAALRPSALPTEQTVRNASRPTAVSGVSSQSAKSAEVAPLHTAAAWDDWDFAEDGELVVPRMVFGSVPTLDEAKEATAELKDAIDQVYLCPETSQYSSPGGQVSALSPTLYGPVNRSCVIDAISDPTAPKHAIQAFHLLSTSREAQAVVASLACDPNVWNAVMENSAVSSFFQSQQSVAGFGAAENSEEVDKLSSCASETVESPEKLEGSAESHPGNMFDDFMGLLQNVKLTVIELVSRLSGFLQNIFPTPDAMREKMSFDADGNTKASFMDSKISMGGTFIGLAVLVIMVIVTKRA

SEQ ID NO: 357 - protein, 152 aa, Arabidopsis thaliana
MAEEQQHQRWQEGHRLCANNCGFFGSPATLDLCSKCYRDLYQQQPAGAAAGPSAPTASAFQHSSSAVSGAAAVSPDLEPPATAPAGAKAGRCSSCRKRVGLTGFACRCGATFCGVHRYPERHACAFDFRAAGRDAIARANPVVKGDKLKDKI

SEQ ID NO: 358 - protein, 122 aa, Arabidopsis thaliana
MEHGSFTNVSHASFTLSEEDHTLANAVRFVLNQDPRVTVAAYTIPHPSLEQVNIRVQTTGDPAREVFKDACQELMQMNRHVRSVFDKAVAEYKDEQKRKEEAEEEELKRQRDLFGSMDIENN

SEQ ID NO: 359 - protein, 298 aa, Glycine max
MVYVKAQKSKAYFKRYQVKFKRRREGKTDYRARIRLINQDKNKYNTPKYRFVVRFSNKDIVAQIISASIAGDLVLATAYSHELPRYGLEVGLTNYAAAYCTGLLLARRVLKTLEMDEEYEGNVEATGEDYSVEPAESRRPFRALLDVGLVRTTTGNRVFGALKGALDGGLDIPHSDKRFAGFDKEKKELDAEVHRKYVFGGHVAAYMKILAEDEPEKYQSHFSEYIKRGIEADGIEALYKKVHAAIRADPTLRKSDKEPPKEHKRYNMKKLTYEERKAKLIARVAAINSAADSDEDDE

SEQ ID NO: 360 - protein, 314 aa, Zea mays; identical to SEQ ID NO: 243

SEQ ID NO: 361 - protein, 379 aa, Zea mays
MGAELGEAGVPARDMVDALEGVRSILLKPSERLDDKRFTRIAGADFDDAGLGLAGLLGSLASTGFQASNLGDAIDVVNQMLDWRLSHEKPSDDCAEAELDPAYRESVKCKIFLGFTSNLVSSGVREIIRFLVQHRMVDVIVTTAGGIEEDLIKCLAPTYRGDFTLPGALLRSRGLNRIGNLLVPNDNYCKFEHWIMPILDKMLLEQSTQNVWTPSKVIARLGKEINDESSYLYWAYKNNIPVFCPALTDGSIGDMLFCHSVHSPGLVVDIVQDVRLMNAETIHASPRKTGIILLGGGLPKHHICNANMLRDGADYAVYVNTAQEFDGSDSGARPDEAVSWGKIKSSARTVKVHCDATIAFPLLVAATFARKVHGTKSTN

SEQ ID NO: 362 - protein, 500 aa, Oryza sativa
MSSSPSFGLLALAAVLLALNLAQHGSLAATVGPRVIVVGAGMSGISAAKRLSEAGITDLLILEATDHIGGRMHKTNFAGINVELGANWVEGVNGGKMNPIWPIVNSTLKLRNFRSDFDYLAQNVYKEDGGVYDEDYVQKRIELADSVEEMGEKLSATLHASGRDDMSILAMQRLNEHQPNGPATPVDMVVDYYKFDYEFAEPPRVTSLQNTVPLATFSDFGDDVYFVADQRGYEAVVYYLAGQYLKTDDKSGKIVDPRLQLNKVVREIKYSPGGVTVKTEDNSVYSADYVMVSASLGVLQSDLIQFKPKLPTWKVRAIYQFDMAVYTKIFLKFPRKFWPEGKGREFFLYASSRRGYYGVWQEFEKQYPDANVLLVTVTDEESRRIEQQSDEQTKAEIMQVLRKMFPGKDVPDATDILVPRWWSDRFYKGTFSNWPVGVNRYEYDQLRAPVGRVYFTGEHTSEHYNGYVHGAYLSGIDSAEILINCAQKKMCKYHVQGKYD

SEQ ID NO: 363 - protein, 710 aa, Arabidopsis thaliana
MSASPSSMSGAGAGEAGVRTVVWFRRDLRVEDNPALAAAARAAGEVVPVYVWAPEEDGPYYPGRVSRWWLSQSLKHLDASLRRLGASRLVTRRSADAVVALIELVRSIGATHLFFNHLYDPLSLVRDHRVKALLTAEGIAVQSFNADLLYEPWEVVDDDGCPFTMFAPFWDRCLCMPDPAAPLLPPKRIAPGELPARRCPSDELVFEDESERGSNALLARAWSPGWQNADKALAAFLNGPLMDYSVNRKKADSASTSLLSPYLHFGELSVRKVFHQVRMKQLMWSNEGNHAGDESCVLFLRSIGLREYSRYLTFNHPCSLEKPLLAHLRFFPWVVDEVYFKVWRQGRTGYPLVDAGMRELWATGWLHDRIRVVVSSFFVKVLQLPWRWGMKYFWDTLLDADLESDALGWQYISGSLPDGRELDRIDNPQLEGYKFDPHGEYVRRWLPELARLPTEWIHHPWDAPESVLQAAGIELGSNYPLPIVELDAAKTRLQDALSEMWELEAASRAAMENGMEEGLGDSSDVPPIAFPPELQMEVDRAPAQPTVHGPTTAGRRREDQMVPSMTSSLVRAETELSADFDNSMDSRPEVPSQVLFQPRMEREETVDGGGGGGMVGRSNGGGHQGQHQQQQHNFQTTIHRARGVAPSTSEASSNWTGREGGVVPVWSPPAASGPSDHYAADEADITSRSYLDRHPQSHTLMNWSQLSQSL

SEQ ID NO: 364 - protein, 105 aa, Synechocystis sp. PCC 6803
MEGVGARQRRNPLIPRPNGSKRHLQHQHQPNAAEKKTAATSNYFSIEAFLVLVFLTMSLLILPLVLPPLPPPPSLLLLLPVCLLILLVVLAFMPTDVRSMASSYL

SEQ ID NO: 365 - protein, 296 aa, Arabidopsis thaliana
MVTATASTPFSLSSSVVFTRRRNFKRFPVCASLSPEVSPLLRAAHHTVDNYVKSGMIIGLGSGEASDFAIRYLGQQLGSGSLHNVVGVPMSARSASEAAKYGIPLEYYRDGVQIDFAFHDADAVEENTLIAVIGRRRSSQEDDYILKQKSIVKVADEAVFMIKEEQYKAGLEGSIPVLVQSLNWLAIAEEIDDLYLGDAEVWRRASVENEGPLGGDFPIVTSDGHNILDVIFTTPIRSLADLATSLDKIDGVVDHGLIIKTRCTVVIAEETVVRSVTLQTSALEGGVRTYGQTLQK

SEQ ID NO: 366 - protein, 109 aa, Zea mays
MSGVWVFKNGVVRLVEKQQATAGTAVAGGRRKALVHTPSGQVVSSYAALEARLTALGWERYYEDPSLFQFHKRGSLDLISLPADFSAFSSVHMYDIVVKNRDSFRVVDA

SEQ ID NO: 367 - protein, 418 aa, Oryza sativa
MTLTDAQISIVKSTAPVLKQHGEAITTVFYNDLITENPSLKNIFSLTSQATGAQPRALAHAVLAYATYIDNLSALSEAVARIAHKHVSLQVEPAQYAIVGQYLIQAIGKVLGDAATPEIVDAWTAAYGVLANVFIGVEGGMYEENEKKDHWKGWRKFRIARKVEESSSISSFYLRPVDGATLPKYLPGQYVSVQVLVSQLGYLQSRQYSLSEAPKEGGMEEYRISVKREEGETGAPGLVSNLLHGMQEGAEVEVSHPQGEFFLDPADASKEGVPAVLISVGVGATPMMAILKSLLQENVKRRPVSWIHASKSSSTQPFGEEVRRIVKENPEQVSAHVFLKTVAGTDQAGVHYDFADTRMDLTKLDGERDLHLADKRTEYYICGPETFMVETRKVLVGLGVDKSKVHLELFATGFVADE

SEQ ID NO: 368 - protein, 288 aa, Arabidopsis thaliana
MARNGIGSSGGKKNGAGQFFLATLLLWLVSVVFEIAFNLRTELLWVICGGCFFQLMNWVVRSWISRDPIFVNTSVSLLHSIITSASVVFILLNQCLAKGLDEMFDHSELVGGTWKWAYPALCFSCGYFAYDQWDMLQYRLYSGLIPSILVHHLVLLVCFTLALYRNVTINYLILTLICEMHSIFLHVRKLRRMAGIRDSNTALVKLEWVLNWTAFVFARCIPHILITIKLIKDAHKFGKGVELPLALSGMAGMNILNVGLGLDLFHAFRRERSHRRNQENGNLHDHGE

SEQ ID NO: 369 - protein, 724 aa, Arabidopsis thaliana
MEFGSFLVSLGTSFVIFVILMLLFTWLSRKSGNAPIYYPNRILKGLEPWEGTSLTRNPFAWMREALTSSEQDVVNLSGVDTAVHFVFLSTVLGIFACSSLLLLPTLLPLAATDNNIKNTKNATDTTSKGTFSQLDNLSMANITKKSSRLWAFLGAVYWISLVTYFFLWKAYKHVSSLRAQALMSADVKPEQFAILVRDMPAPPDGQTQKEFIDSYFREIYPETFYRSLVATENSKVNKIWEKLEGYKKKLARAEAILAATNNRPTNKTGFCGLVGKQVDSIEYYTELINESVAKLETEQKAVLAEKQQTAAVVFFTTRVAAASAAQSLHCQMVDKWTVTEAPEPRQLLWQNLNIKLFSRIIRQYFIYFFVAVTILFYMIPIAFVSAITTLKNLQRIIPFIKPVVEITAIRTVLESFLPQIALIVFLAMLPKLLLFLSKAEGIPSQSHAIRAASGKYFYFSVFNVFIGVTLAGTLFNTVKDIAKNPKLDMIINLLATSLPKSATFFLTYVALKFFIGYGLELSRIIPLIIFHLKKKYLCKTEAEVKEAWYPGDLSYATRVPGDMLILTITFCYSVIAPLILIFGITYFGLGWLVLRNQALKVYVPSYESYGRMWPHIHQRILAALFLFQVVMFGYLGAKTFFYTALVIPLIITSLIFGYVCRQKFYGGFEHTALEVACRELKQSPDLEEIFRAYIPHSLSSHKPEEHEFKGAMSRYQDFNAIAGV

SEQ ID NO: 370 - protein, 447 aa, Arabidopsis thaliana
MDIFDNSDLEYLVDEFHADFDDDEPFGEVDVTSESDSDFMDSDFDFELSESKTNNETSALEARNGKDIQGIPWESLNYTRDRYRENRLLHYKNFESLFRSREELDKECLQVEKGKNFYDFQFNTRLVKSTIAHFQLRNLVWATSKHDVYFMNNYSLMHWSSLLQRGKEVLNVAKPIVPSMKQHGSLSQSVSRVQISTMAVKDDLKLREGSKESLSKINEPEVAFCTKLTSADNDITNSVDIYNAPSGSLRVMTANNDCTVRLFDATNFALLNRFAFHWSVNNISTSPDGKLVAVLGDSPECLLADTGSGKVIHGLEGHLDYSFSSAWHPNGQILATGNQDTTCRLWDVRNLSQSLKVLKGNMGAIRALRFTSDGRFLAMAEPADFVHLFDTEAGYSQCQEIDLFGEIAGISFSPDTEALFVGVADRTYGSLLEFNRKRNHSYVDSIF

SEQ ID NO: 371 - protein, 229 aa, Arabidopsis thaliana
MDIFDNSDLEYLVDEFHADFDDDEPFGEVDVTSESDSDFMDSDFDFELSESKTNNETSALEARNGKDIQGIPWESLNYTRDRYRENRLLHYKNFESLFRSREELDKECLQVEKGKNFYDFQFNTRLVKSTIAHFQLRNLVWATSKHDVYFMNNYSLMHWSSLLQRGKEVLNVAKPIVPSMKQHGSLSQSVSRVQISTMAVKDDLKLREGSKESLSVRKSTNLRLLSALN

SEQ ID NO: 372 - protein, 584 aa, Arabidopsis thaliana
MCGILAVLGCSDDSQAKRVRVLELSRRLRHRGPDWSGLYQNGDNYLAHQRLAVIDPASGDQPLFNEDKTIVVTVNGEIYNHEELRKRLKNHKFRTGSDCEVIAHLYEEYGVDFVDMLDGIFSFVLLDTRDNSFMVARDAIGVTSLYIGWGLDGSVWISSEMKGLNDDCEHFETFPPGHFYSSKLGGFKQWYNPPWFNESVPSTPYEPLAIRRAFENAVIKRLMTDVPFGVLLSGGLDSSLVASITARHLAGTKAAKQWGPQLHSFCVGLEGSPDLKAGKEVAEYLGTVHHEFHFSVQDGIDAIEDVIYHVETYDVTTIRASTPMFLMSRKIKSLGVKMVLSGEGADEIFGGYLYFHKAPNKKEFHQETCRKIKALHKYDCLRANKSTSAFGLEARVPFLDKDFINTAMSLDPESKMIKPEEGRIEKWVLRRAFDDEERPYLPKHILYRQKEQFSDGVGYSWIDGLKDHAAQNVNDKMMSNAGHIFPHNTPNTKEAYYYRMIFERFFPQNSARLTVPGGATVACSTAKAVEWDASWSNNMDPSGRAAIGVHLSAYDGKNVALTIPPLKAIDNMPMMMGQGVVIQS

SEQ ID NO: 373 - protein, 456 aa, Arabidopsis thaliana
MCGILAVLGCSDDSQAKRVRVLELSRRLRHRGPDWSGLYQNGDNYLAHQRLAVIDPASGDQPLFNEDKTIVVTVNGEIYNHEELRKRLKNHKFRTGSDCEVIAHLYEEYGVDFVDMLDGIFSFVLLDTRDNSFMVARDAIGVTSLYIGWGLDGSVWISSEMKGLNDDCEHFETFPPGHFYSSKLGGFKQWYNPPWFNESVPSTPYEPLAIRRAFENAVIKRLMTDVPFGVLLSGGLDSSLVASITARHLAGTKAAKQWGPQLHSFCVGLEGSPDLKAGKEVAEYLGTVHHEFHFSVQDGIDAIEDVIYHVETYDVTTIRASTPMFLMSRKIKSLGVKMVLSGEGADEIFGGYLYFHKAPNKKEFHQETCRKIKALHKYDCLRANKSTSAFGLEARVPFLDKDFINTAMSLDPESKMVTTKLTSQTQYLPSQVNVEQIFYMGFSRSSQRKEGSRNGF

SEQ ID NO: 374 - protein, 512 aa, Arabidopsis thaliana
MCGILAVLGCSDDSQAKRVRVLELSRRLRHRGPDWSGLYQNGDNYLAHQRLAVIDPASGDQPLFNEDKTIVVTVNGEIYNHEELRKRLKNHKFRTGSDCEVIAHLYEEYGVDFVDMLDGIFSFVLLDTRDNSFMVARDAIGVTSLYIGWGLDGSVWISSEMKGLNDDCEHFETFPPGHFYSSKLGGFKQWYNPPWFNESVPSTPYEPLAIRRAFENAVIKRLMTDVPFGVLLSGGLDSSLVASITARHLAGTKAAKQWGPQLHSFCVGLEGSPDLKAGKEVAEYLGTVHHEFHFSVQDGIDAIEDVIYHVETYDVTTIRASTPMFLMSRKIKSLGVKMVLSGEGADEIFGGYLYFHKAPNKKEFHQETCRKIKALHKYDCLRANKSTSAFGLEARVPFLDKDFINTAMSLDPESKMIKPEEGRIEKWVLRRAFDDEERPYLPKHILYRQKEQFSDGVGYSWIDGLKDHAAQNVNDKMMSNAGHIFPHNTPNTKEAYYYRMIFERFFPQVRVL

SEQ ID NO: 375 - protein, 292 aa, Arabidopsis thaliana
MGVMINHHFLAFIFGILGNVISFLVFLAPVPTFYRIYKRKSTESFQSLPYQVSLFSCMLWLYYALIKKDAFLLITINSFGCVVETLYIAMFFAYATREKRISAMKLFIAMNVAFFSLILMVTHFVVKTPPLQVSVLGWICVAISVSVFAAPLMIVARVIKTKSVEYMPFTLSFFLTISAVMWFAYGLFLNDICIAIPNVVGFVLGLLQMVLYLVYRNSNEKPEKINSSEQQLKSIVVMSPLGVSEVHPVVTESVDPLSEAVHHEDLSKVTKVEEPSIENGKCYVEATRPETV

SEQ ID NO: 376 - protein, 581 aa, Arabidopsis thaliana
MEKVTNSDLKSSVDGGVVDVYGEDSATIEHNITPWSLSVSSGYSLLRDPRYNKGLAFTEKERDTHYLRGLLPPVVLDQKLQEKRLLNNIRQYQFPLQKYMALTELQERNERLFYKLLIDNVEELLPIVYTPTVGEACQKFGSIFRRPQGLFISLKDKGKILDVLKNWPERNIQVIVVTDGERILGLGDLGCQGMGIPVGKLALYSALGGVRPSACLPVTIDVGTNNEKLLNDEFYIGLRQKRATGQEYSELLNEFMSAVKQNYGEKVLIQFEDFANHNAFELLAKYSDTHLVFNDDIQGTASVVLAGLVSAQKLTNSPLAEHTFLFLGAGEAGTGIAELIALYMSKQMNASVEESRKKIWLVDSKGLIVNSRKDSLQDFKKPWAHEHEPVKDLLGAIKAIKPTVLIGSSGVGRSFTKEVIEAMSSINERPLIMALSNPTTQSECTAEEAYTWSKGRAIFASGSPFDPVEYEGKVFVSTQANNAYIFPGFGLGLVISGAIRVHDDMLLAAAEALAGQVSKENYEKGMIYPSFSSIRKISAQIAANVATKAYELGLAGRLPRPKDIVKCAESSMYSPTYRLYR

SEQ ID NO: 377 - protein, 144 aa, Arabidopsis thaliana
MTNVRLPILVSSVLFLVFISSSLLFPTPSFAARVSHSLVQEEVKKVPEYTEPEEPEVPEEPELPSPEEPEIPEEPEIPEEPEVPGEPEVPEEPEEPEEPEGSTFEFPSWFPSFPIPGVNGGLPKTEKTKPTSTVEEVNVSNKKP

SEQ ID NO: 378 - protein, 370 aa, Arabidopsis thaliana
MALMKKSLSAALLSSPLLIICLIALLADPFSVGARRLLEDPKPEIPKLPELPKFEVPKLPEFPKPELPKLPEFPKPELPKIPEIPKPELPKVPEIPKPEETKLPDIPKLELPKFPEIPKPELPKMPEIPKPELPKVPEIQKPELPKMPEIPKPELPKFPEIPKPDLPKFPENSKPEVPKLMETEKPEAPKVPEIPKPELPKLPEVPKLEAPKVPEIQKPELPKMPELPKMPEIQKPELPKLPEVPKLEAPKVPEIQKPELPKMPELPKMPEIQKPELPKMPEIQKPELPKVPEVPKPELPTVPEVPKSEAPKFPEIPKPELPKIPEVPKPELPKVPEITKPAVPEIPKPELPTMPQLPKLPEFPKVPGTP

SEQ ID NO: 379 - protein, 509 aa, Arabidopsis thaliana
MEISERVRARLAVLSGHLSEGKQDSPAIERWCTSADTSVAPLGSLKGTLTIVDERTGKNYKVPVSDDGTVKAVDFKKIVTGKEDKGLKLYDPGYLNTAPVRSSISYIDGDEGILRYRGYPIEEMAENSTFLEVAYLLMYGNLPSESQLSDWEFAVSQHSAVPQGVLDIIQSMPHDAHPMGVLVSAMSALSIFHPDANPALRGQDIYDSKQVRDKQIIRIIGKAPTIAAAAYLRMAGRPPVLPSGNLPYADNFLYMLDSLGNRSYKPNPRLARVLDILFILHAEHEMNCSTAAARHLASSGVDVYTAVAGAVGALYGPLHGGANEAVLKMLSEIGTVENIPEFIEGVKNRKRKMSGFGHRVYKNYDPRAKVIKNLADEVFSIVGKDPLIEVAVALEKAALSDDYFVKRKLYPNVDFYSGLIYRAMGFPPEFFTVLFAIPRMAGYLSHWKESLDDPDTKIMRPQQVYTGVWLRHYTPVRERIVTDDSKESDKLGQVATSNASRRRLAGSSV

SEQ ID NO: 380 - protein, 435 aa, Arabidopsis thaliana
MTPQIKTHLLPKQEPSSSENHGSSTSGIVFNVSTSIIGAGIMSMPAAFKVLGIVPAFLIITIIAWLSTISVGFLMKSTLAGESTTYAGVMKESFGKTGSIAVQIATMVATFGCMIIFSIIIGDVLSGNENGGPEHIGVLQEWFGSYWWNTRIFALLFVYGFVLLPLVLRRRVERLAISSAVSFLLAVLFVVISSVLAISALVNGQTKNPRLFPELSNGGSFWQLFTASPVIVTAFTFHFNVHPIGFELKDPLQVIPATKISVILCAAIYFATGLFGYLLFGDATMSDILVNFDQSSGSSIGSLLNDIVRLSYVLHLMLVFPLLNFSLRANLDELLYPKKPSLEKDTKRFIGLTLALLICCFLSAIAVPDIWYFFQFMGSTITVSIAFIFPAAIVLRNIHGVSTSREKIVAAIMLVLAVATSIIAISTNLYSLAAN

SEQ ID NO: 381 - protein, 242 aa, Arabidopsis thaliana
MRKSFKDSLKALEADIQFANTLASEYPEEYDGGYVQMRLSYSPAAHLFLFLLQWTDCHFAGALGLLRILIYKAYVDGKTTMSLHERKTSIREFYDVLFPSLLQLHGGITDVEERKQKEICDKRYRKKDRTDKGKMSEIDLEREEECGICLEIRNKVVLPTCNHSMCINCYRNWRARSQSCPFCRGSLKRVNSGDLWIYTCSAEIADLPAIYKENLKRLLIYIDKLPLVTSDPNLVPYAPLPR

SEQ ID NO: 382 - protein, 172 aa, Arabidopsis thaliana
MRKSFKDSLKALEADIQFANTLASEYPEEYDGGYVQMRLSYSPAAHLFLFLLQWTDCHFAGALGLLRILIYKAYVDGKTTMSLHERKTSIREFYDVLFPSLLQLHGGITDVEERKQKEICDKRYRKKDRTDKGKMSEIDLEREEECGICLEIRNKVVLPTCNHSMCINCYRN

SEQ ID NO: 383 - protein, 121 aa, Arabidopsis thaliana
MINAFKTIRSLPSNTTVSFCSTPSRLGRKVTGVSFATTSDQQKMDKKPENPNEKTGDVMSHSYGEGYATRSDEEGFGGIYGGNQTLQKENEIHENHPDYDKTQGSESKEKEKARNQTQSHC

SEQ ID NO: 384 - protein, 115 aa, Arabidopsis thaliana
MAFALRFFTCLVLTVCIVASVDAAISCGTVAGSLAPCATYLSKGGLVPPSCCAGVKTLNSMAKTTPDRQQACRCIQSTAKSISGLNPSLASGLPGKCGVSIPYPISMSTNCNNIK

SEQ ID NO: 385 - protein, 258 aa, Arabidopsis thaliana
MTEGGEYSPAMMSAEPFLTMKKMKKSNHNKNNQRRFSDEQIKSLEMMFESETRLEPRKKVQLARELGLQPRQVAIWFQNKRARWKSKQLETEYNILRQNYDNLASQFESLKKEKQALVSELQRLKEATQKKTQEEERQCSGDQAVVALSSTHHESENEENRRRKPEEVRPEMEMKDDKGHHGVMCDHHDYEDDDNGYSNNIKREYFGGFEEEPDHLMNIVEPADSCLTSSDDWRGFKSDTTTLLDQSSNNYPWRDFWS

SEQ ID NO: 386 - protein, 236 aa, Arabidopsis thaliana
MAGEAEALATTAPLAPVTSQRKVRNDLEETLPKPYMARALAAPDTEHPNGTEGHDSKGMSVMQQHVAFFDQNDDGIVYPWETYKGFRDLGFNPISSIFWTLLINLAFSYVTLPSWVPSPLLPVYIDNIHKAKHGSDSSTYDTEGRYVPVNLENIFSKYALTVKDKLSFKEVWNVTEGNRMAIDPFGWLSNKVEWILLYILAKDEDGFLSKEAVRGCFDGSLFEQIAKERANSRKQD

SEQ ID NO: 387 - protein, 263 aa, Triticum aestivum
  misc_feature (84)..(84): Xaa can be any naturally occurring amino acid
MPESDNDSGGPSNTGGEGELSSPREQDRFLPIANVSRIMKKALPANAKISKDAKETVQECVSEFISFITGEASDKCHPRRPPTXRPRVRLWAMTTLGFEDYVDPLKHYLHKFREIEGERAAATSTSTSTTPDMPRNNNNNARRLPRRPGRHDDDGAAHVPARRRRHHKQQQHQHQNCNGEGRSGLSLSRRRRRVVVILGSDRKKWTPFPFSFLFFLEDKGRGFSTFCSFSLGEDPPCSLIIPFSPRGGEYFVLSPRCWKTFFF

SEQ ID NO: 388 - protein, 480 aa, Brucella suis 1330
MQTRYPDVKLFIDGTWRDGSRGETIEIFNPATDEVIGHIARATTADLDDALAAVDRGFEAWSKVSAFDRYKIMRRAADIFRSRGEEVARLLTMEQGKPLAEARIEAAAACDLIDWFAEEARRSYGRIVPPRQAYVMQAEVKEPVGPVAAFTPWNFPINQAVRKISAALAAGCSILLKAAEDTPAAPAELVRAFAEAGLPDGAINLVYGDPAEISAYLIPHPVIRKVSFTGSTQVGKQLAALAGLHMKRVTMELGGHAPVIIAADADVEQAIKVVSGSKFRNAGQVCISPTRFLIENSVYDQVVEGMAAYATSLKVGDGLEAGTTMGPLVNAKRVNAMERLVQDAREHKARVVTGGERIGNRGNFFEPTILADVPRDATIMNEEPFGPVALLNRFDALDEALSEANRLNYGLAAYAFTGSSAKAARISSTVRSGMITINHYGLALPEVPFGGINDSGYGTEGGADALEAYQNTKFVSFLQA

SEQ ID NO: 389 - protein, 503 aa, Mesorhizobium sp. BNC1
MSVLNENIARAVEYLKPFREGGVLNHVGGAQVPAASGETFETVSPVDMSTLAKVARGGAADTDKAVAAASEAFKTWSKTSGAERRKILIKVAEGIEARAEEIAFIECMDTGQALRFMSKAAIRGAENFRFFADQAPGSEDGRALRTPAQMNVTSRRPIGPVGVITPWNTPFMLSTWKIAPALAAGCTVVHKPAEFSPLTANLLVQIAEEAGLPKGVLNVVNGYGEEAGRALTEHKGIKAIAFVGESRTGSMIMKQGADTLKRVHFELGGKNPVIVFDDADLDRAVDAAAFMIYSLNGERCTSSSRLLVQESIYEEFTRRVAEVARGIKIRHPLDPETVIGPLIHPSHEKKVLSYFEKAKEEGAIIATGGEKYGEAGCFVRPTLFTNARNDMAIAQEEIFGPVLTAIPFKDEDEALAIANDVNYGLAAYLWTRDLGRAMRMTDNLEAGMIWVNSENVRHLPTPFGGVKASGIGRDGGDWSFDFYMETVNVSFPRREHKVSKLGG

SEQ ID NO: 390 - protein, 131 aa, Zea mays
  misc_feature (29)..(29): Xaa can be any naturally occurring amino acid
MLLSHFQQIRTFIQMRTNLKVVDNSGAKXVMCIQSLRGKKGARLGDMIIGSVKEAQPRGKVKKEDVVYGVVVRAAMKKGRSDGSEVQFDDNEVVLVNKKGELIGTRVFGPVPHELRKKKHLKILALAEHIV

SEQ ID NO: 391 - protein, 147 aa, Zea mays
LQVKGEDMDAYAPKDLLVVTTGSQGEPRAALNLASYGGSHTLKLSKEDVLLYSAKVIPGNETRVMKMMNRLTDLGPKIIMGKDSGLHTSGHAYREELVLRIVKPQHFLPVHGELLFLKEHESLGRSTGIRHTTVSNLSNLVLWICMP

SEQ ID NO: 392 - protein, 217 aa, Methylococcus capsulatus str. Bath
MATAASRKSVMTLFCSPTCVYSHRTRIVLHEKGISADVEYVDMGDPPEDLVELNPYGTMPTLVDRDLVLYDSRIIMEYLDERFPHPPLHPMDPVSRARARLLVHRVEQDWYGLVEEIENASDGGAQKARKQLRESLLAATPVFAAKPYFLSDEFCLVDCSLAPLLWRLPMLGIELPRQAEPVKAYAARLFERHSFQASLSDEEREFGAAARLTPENA

SEQ ID NO: 393 - protein, 294 aa, Triticum aestivum
  misc_feature (242)..(242): Xaa can be any naturally occurring amino acid
GGAAFADVPGGALWEEVLHWAVSNHGLAPASWTDYLRLTVGGTLSNGGVSGQSFRYGPQVSNVAELEVVTGEGECRVCSPSAHADLFFAVLGGLGQFGVITRARIPLSPAPQTVKWARVVYASFAEYAADAEWLVTRPAESAFDYVEGFAFVRSDDPVNGWPSVPIPAGARFDPSLLPAGEPGPLLYCLEVALYQHQHKQPDDVDARMGEMMRRLKYVRGLEYAADVRYVEFLSRVNRVEEXARRSGSWAAPHPWLNLFVSARDIADFDRAVLKGMLADGVDGPMLIYPMLKSK

SEQ ID NO: 394 - protein, 184 aa, Triticum aestivum
  misc_feature (3)..(3): Xaa can be any naturally occurring amino acid
  misc_feature (23)..(24): Xaa can be any naturally occurring amino acid
  misc_feature (41)..(42): Xaa can be any naturally occurring amino acid
  misc_feature (46)..(46): Xaa can be any naturally occurring amino acid
  misc_feature (52)..(52): Xaa can be any naturally occurring amino acid
  misc_feature (60)..(60): Xaa can be any naturally occurring amino acid
  misc_feature (69)..(69): Xaa can be any naturally occurring amino acid
  misc_feature (83)..(84): Xaa can be any naturally occurring amino acid
  misc_feature (87)..(87): Xaa can be any naturally occurring amino acid
  misc_feature (114)..(114): Xaa can be any naturally occurring amino acid
  misc_feature (116)..(116): Xaa can be any naturally occurring amino acid
  misc_feature (128)..(128): Xaa can be any naturally occurring amino acid
  misc_feature (130)..(130): Xaa can be any naturally occurring amino acid
  misc_feature (135)..(135): Xaa can be any naturally occurring amino acid
  misc_feature (141)..(141): Xaa can be any naturally occurring amino acid
  misc_feature (147)..(147): Xaa can be any naturally occurring amino acid
  misc_feature (156)..(156): Xaa can be any naturally occurring amino acid
ISXFPSGVTVKTEDDKVYRADYXXVSASLGVLQTDLIRFKXXLPSXKIVSIXQFDMAVYXKVFLKFPKXFWPEGECNEFFLYXXGRXGYFPVWQQFEHQYPGSNVLLVTVTDDXSXRIEQQSDNQTMXDXVAVLXKISQGXLLTQRXLCQWWSTGXGLNHRVNATIYSSGGGYSRAQHIKVFTG

SEQ ID NO: 395 - protein, 476 aa, Oryza sativa (japonica cultivar-group)
MAMETTSQDSQVIMGRYKLGRLLGRGTFAKVYKAYKLATGEAVAIKVFDKEAVQRSGTVEQVKREVDVMRRVHHRHVIRLHEVMATRSRIYFVMEYASGGELFTRLSRSPRFPEPVARRYFQQLITAVEFCHSRGVYHRDLKPENLLLDARGDLKVTDFGLSALDGGLRGDGLLHTTCGTPAYVAPEVLLKRGYDGAKADIWSCGVILFVLLAGYLPFNETNLVILYRNITESNYRCPPWFSVEARKLLARLLDPNPKTRITISKIMDRPWFQQATCPLGDMSLVASAPSVLLARKEASQQHDDEEDDGFAREKKKRSNVIMSSPVIDVRPSSMNAFDIISRSRGLDLSKMFDAEERRSEARFSTRETTTAIVSKLEEIAEAGRFSFKLKEKGRVELEGSQDGRKGALAIEAEIFKVAPEVHVVEVRKTGGDSPDFRDFYKQELKPSLGDMVWAWQGGDSPPLVPAAGRRPITKRS

SEQ ID NO: 396 - protein, 483 aa, Agrobacterium tumefaciens str. C58
MKVVPMHTYPDIKLLIDGEWRDAVSGKTIAVSDPATDEIIGAIAHAEKEDLDLALAAAERGFKLWRDTSPYERSKIMRKAADILRERKDKIAYIMTREQGKPLAQSATEIMGAADTIDWFAEEARRTYGQVIPARATGVSQLAIKVPVGPVAAFTPWNFPLNQIVRKLSAALATGCSIIVKAPEETPASPAELIRAFVDAGVPAGVIGLVYGVPSEISEYLIPHPVIRKISFTGSTPIGKHLAALAGKHMKRATMELGGHAPVMIFDDADIEKAIEVTSLAKFRNAGQVCVAPTRFLVQDGVADRFLEGFVEATKAIKVGNGLEEGVIMGPLANERRIPALEGLINDAVSHGAELKTGGRRIGNKGNFFEPTVLANVPVTAKIMNDEPFGPVAIINRFSSFDDAITEANRLPFGLASYAFTGSVKTAHALGQQVEAGMLTINHNGLALPEVPFGGIKDSGYGTEGGSEAVQAYLETKFVSQMS

SEQ ID NO: 397 - protein, 535 aa, Brassica napus
  misc_feature (279)..(279): Xaa can be any naturally occurring amino acid
  misc_feature (361)..(361): Xaa can be any naturally occurring amino acid
  misc_feature (373)..(373): Xaa can be any naturally occurring amino acid
MAFAISTRNAVAFLVTLLLVSVTPSSSTLQQDFIHCLVDNTDMSFPIRASFFSPDQNATLFKEELESTAQNLRYLTPSNPKPVFIFEPLYETHVQAAVVCAKMLKLHMRLRSGGHDYEGLSFVAENVTPFVVVDLSKLRQIDVDLDSNSAWAHAGATVGEVYYRIQEKSQTHGFPAGLCSSLGIGGHLVGGAYGSMMRKFGLGADNVLDARIIDANGKILDRAAMGEDVFWAIRGAGGGSFGVILAWKIKLVPVPATVTVFTVTKTLEQDGTRVLYKWXQVADKLDEDLFIRVIIQPAGKTSKTGNRTVSTAYQGQFLGDSNRLMQVMQTSFPELGLTKKDCIEMSWIKSVMYIAWISQNXCPTQKPLLAGKXSLFKNHFKAKSDFVEEPFPVEGLEGLWKKLLNEDSPLTIWNPYGGMMSRISESETPFPHRKGTLFKIQWLSTWSDGKASEARHIEWMRDMYSYMEQYVSKKPRRAYVNYRDLDLGVNEGESDAREWGAKYFKGNFEKLVKIKGEFDPENFFRHEQSIPTKIG

SEQ ID NO: 398 - protein, 229 aa, Cucumis melo
MSSSKEQSPSPETESSSSSSSDSNKKPKRINSNSSSNSKHAVYRGVRMRNWGKWVSEIREPRKKSRIWLGTFPSPEMAARAHDVAALSIKGNSAILNFPDLVHLLPRPVSLAPRDVQAAAAKAAHMHNLSSNANTNNHNTNSNSSSAFSDELSEIVELPALGTSYDGGVGVGGEFVFVESELESAAWLYQPPWVQSLQEDYDDIDGDGDCGKLGMGFVSNGFKGFLFDY

SEQ ID NO: 399 - protein, 175 aa, Triticum aestivum
  misc_feature (71)..(71): Xaa can be any naturally occurring amino acid
MAPAVMASSATTVAPFQGLKSTAGLPVSRRSSGSLGSVSNGGRIRCMQVWPIEGIKKFETLSYLPPLSTEXALLKQVDYLIRSKWVPCLEFSKVGFVFREHNSSPGYYDGRYWTMWKLPMFGCTDATQVLNEVEEVKKEYPDAYVRVIGFDNLRQVQCVSFIAFRPPGCEESGKA

SEQ ID NO: 400 - protein, 389 aa, Salmonella enterica subsp. enterica serovar Typhi Ty2
MTDTTILQNNTHVIKPKKSVALSGVPAGNTALCTVGKSGNDLHYRGYDILDLAEHCEFEEVAHLLIHGKLPTRDELNAYKSKLKALRGLPANVRTVLEALPAASHPMDVMRTGVSALGCTLPEKEGHTVSGARDIADKLLASLSSILLYWYHYSHNGERIQPETDDDSIGGHFLHLLHGEKPTQSWEKAMHISLVLYAEHEFNASTFTSRVIAGTGSDVYSAIIGAIGALRGPKHGGANEVSLEIQQRYETPDEAEADIRKRVENKEVVIGFGHPVYTIADPRHQVIKRVAKQLSEEGGSLKMYHIADRLETVMWETKKMFPNLDWFSAVSYNMMGVPTEMFTPLFVIARVTGWAAHIIEQRQDNKIIRPSANYTGPEDRVFVPIEKRC

SEQ ID NO: 401 - protein, 220 aa, Triticum aestivum
  misc_feature (112)..(112): Xaa can be any naturally occurring amino acid
DAWATLPPPPPPPPPPKLPTTRSAPEFRARPISRRSHPADAAPLGRTGNLAMAAGSFATSVHDFTVKDSSGKDVDLSVYKGKVLLIVNVASQCGLTNSNYTGLSQLYPKYKXTKGFEILAFPCNQFGGQEPGTNDEIVQFACTRFKAEYPIFDKVDVNGNNVSPLYKFLKSSKGGLFGDSIKWNFSKFLVDKEGHVVDRYAPTTSPLSIEKDIKKLLGSS

SEQ ID NO: 402 - protein, 253 aa, Oryza sativa (indica cultivar-group)
MPERSELGRQLPLRGPLKALEADIHHANTMANAIQRNYGGACVQMRLSCSSLAPFFLYLIQWLDCGCCYALPSYLGLFHILICKVYADGDSSVSTYERRASLREFMRSSYPILQQLEGSLIERDLKGKGRCKDIVSRKRLEDWRKLCNKDVEREDECGICMETCTKMVLPNCSHAMCIKCYRDWYRRSESCPFCRGSLKRIRSRDLWVLTNYNDVVDPVTLERENVRHFYSYIDSLPLILPDNIFFFYYDYLL

SEQ ID NO: 403 - protein, 170 aa, Zea mays
  misc_feature (65)..(65): Xaa can be any naturally occurring amino acid
MAAASSATSVHDFTVKDSSGKDVDLSVYRGKVLLIVNVASQCGLTNSNYTQQAQLYEKYKNQGLXFEILAFPCNQFGGQEPGTNEEIAQFACTRFKADYPIFDKVDVNGNNAAPIYKFLKSSKGGLFGDSIKWNFSKFLVDKEGRVVDRYAPTTSPLSIEKDIKKLLGSS

SEQ ID NO: 404 - protein, 429 aa, Streptomyces coelicolor A3(2)
MSDNSVVLRYGDGEYTYPVIDSTVGDKGFDIGKLRAQTGLVTLDSGYGNTAAYKSAITYLDGEAGILRYRGYPIEQLAERSSFVEVAYLLINGELPTVDELSAFKGEITQHTLLHEDVKNFYKGFPRDAHPMAMLSSVVSALSTFYQDSHNPFDERQRNLSTIRLLAKLPTIAAYAYKKSIGHPFVYPANNLGYVENFLRMTFSVPAQEYELDPTVVAALDKLLILHADHEQNCSTSTVRLVGSSQANMFASISAGINALWGPLHGGANQSVLEMLEGIRDAGGDVDSFIRKVKNKEDGVRLMGFGHRVYKNFDPRAKIIKAAAHDVLSALGKSDELLDIALKLEEHALSDDYFVSRSLYPNVDFYTGLIYRAMGFPTEMFTVLFALGRLPGWIAQWHEMIKEPGSRIGRPRQIYTGVVERDFVPVEER

SEQ ID NO: 405 - protein, 338 aa, Arabidopsis thaliana
  misc_feature (256)..(256): Xaa can be any naturally occurring amino acid
MVFKAAIELGVIDTLYLAARDDVTGSSSFLTPSDIAIRLPTKPSNPEAPALLDRILRLLASYSMVKCQIIDGNRVYKAEPICRYFLKDNVDEELGTLASQLIVTLDTVFLNTWGELKNVVLEGGVAFGRANGGLKLFDYISKDERLSKLFNRTGFSVAVLKKILQVYSGFEGVNVLVDVGGGVGDTLGFVTSKYPNIKGINFDLTCALTQAPSYPNVEHVAGDMFVDVPKGDAILLKRILHDWTDEDCEKILKNCXKALPENGKVIVMEVVTPDEADNRDVISNIAFDMDLLMLTQLSGGKERSRAEYVAMAANSGFPRCNFVCSAYHLWVIELTKQA

SEQ ID NO: 406 - protein, 1274 aa, Aspergillus nidulans FGSC A4
MTEVPFVAMRAPGSYSSQTETIRQYIPSSVVVNSSCPPAKQLQQPDRVQPQQCTTNSWSVHNDGFGPRPQVSNAKSYGVDAGNQGINYMSYDLVKETNGSTPNDSTSTPVLSASSNGKSTTPSSVNLASSSTSVSSTKADDTPGPVFFRPRSSIPTRLPTAVYAQQCVAAAYASRLNPYALHPKEQEALQDHLCHLHVTVYLNIRNGILRLWTRNPMVSVSKEEALGCAKDYRWMNLASFAYEWLIRNGYINFGCLEIPEGLVPSKKGRRKEGPVIVIIGAGMAGLGCARQLEGFFKHFRDNLNSPRVVVLEGRRRIGGRIYSHPLQSRQSSTLPPGLTPKVEMGAQIVVGFDRGNPLDQIIRGQLALSYHLLRDISTIYDIDGTPVDEVRDATAERLYNDVLDRSGDYRYKSVVAPTAEGERDLIDLGRDITTSDGVTVRQYEEARQAGTVGLLFPAKRIRRGVGHKTAELKPATGPVVDTDEAEENPAVVACEAMGWKLNPGISVSQRINLDPIAKASKFQTLGKTMDEGVRQYQRMLPLTPKDLRLLNWHFANLEYANATNINNLSLSGWDQDMGNEFEGEHSQIIGGYQRVPYGLWSYPTKLDVRTNKTVSRITYDASGSNRHRTVVHCEDGESITADMVVYTGSLGTLQHRTVQFSPPLPDWKVGAIDRLGFGVMNKVILAFDQPFWDTERDMFGLLREPTNRDSMAQEDYASNRGRFYLFWNCMKTTGLPVLIALMAGDAAHQAERTPDAEIVAEVMSQLRNVFKQVAVPDPLETIITRWASDKFTRGTYSYVAAEALPGDYDLMAKSVGNLYFAGEATCGTHPATVHGAYISGLRAASEIIDSILGPIPIPTPLVPEKGKNTNSGNTNGMPSNTPHIPLDTDTNTPEVPPQQPQLPTSTSTVTSSFEPLSRAAYDQAMNAAVYTEIGPPIPRPGRPGINPFILYQKDFMAKARADCDAEYQAITKDPNAKAPRDTVRAALGLMWRQAPEEVKRPYLEQAEVNRQTGAEIAAKWKRDNVEWERRKEAAKKRWQQDNPFEWWVATEFGEPPRKKLDSTNKELGAAYSPAAAPTPPFGPSTSSGLAGISTPSAASPYPSGTSAGLAGSSTLFTNGYDANASTPAATPSHPPPSVPPPGLSEATAGNTESCSSSASYSAPAGPSTVPLFGPLPGSAKMSKPNVNGYSANESTPAAAAVASQSLQPPQPPGSPSGLYGGSTQDTNGSTNLNANPNPGQTQNPNVANGPRPGMGWSWFNNNSATAYSFLLNQR

SEQ ID NO: 407 - protein, 107 aa, Nicotiana tabacum
LGVDYDGTKSCDSDCSVGYGLQEYASTVVQAVRFVCDRKNVKNPVICSESGRAIVSHHSVLIFEAVSSTTTRSQELSSVDLQSFVEKLNDDARADYRNLSAAAIRGE

SEQ ID NO: 408 - protein, 488 aa, Acinetobacter sp. ADP1
MVKELYIAGEWRLGRGKVIQSTFPADNSVNAEISTASFEDIEEAIVKADQAWRAPEWRNRLPHERAKILYKVADIIEARVDALAALQTRDNGKPLAETRGLVFSAAATARYVAAACETMNDELTSQRAPDFMTFSVHEPVGVVAAITPWNSPIASEVQKLAPALAGGNAVILKPAEATSLIALELAKIFEEAGLPKGLLSVLVGKGSVVGDAIVKHPLVRKISFTGGTTTGRHLAHIAADKLITTSLELGGKSPTIVLPDADIELAAKGIAYGIFSSAGQACIAGSRLFIHSSIYDQFLARLVEITKSLRVGHPEQKDVHMGSLINAAHLASVDRYVQLAKQEGGEILTGGQAMTEGEFAKGSFYLPTIITGLKNQAQVCQEEIFGPVLVVMKYEHEDDLIEQANDSCFGLAAGIWTESYRKAWRIARVLEVGTVWINTYKKFSISAPFGGFKDSGIGREKGRQGILSYMQQKSIYMGLNEQPNPWAD

SEQ ID NO: 409 - protein, 316 aa, Triticum aestivum
MDPALLDNIIARLLEVKSLKPGKNAQLSESEIKQLCAASKEIFLAQPNLLELEAPIKICGDVHGQYSDLLRLFEYGGYPPQSNYLFLGDYVDRGKQSLETICLLLAYKVKYPENFFLLRGNHECASVNRIYGFYDECKRRFSVKLWKTFTDCFNCLPVSALIDEKILCMHGGLSPELNKLDQILNLNRPTDVPDTGLLCDLLWSDPSNEAQGWAMNDRGVSYTFGPDKVAEFLEKHDLDLICRAHQVVEDGYEFFADRQLVTIFSAPNYCGEFDNAGAMMSVDETLMCSFQILKPARKMLPGSTNNKSGFKSMRGW

SEQ ID NO: 410 - protein, 149 aa, Glycine max
  misc_feature (45)..(45): Xaa can be any naturally occurring amino acid
MSGRVSGKVKWFNDQKGFGFISPDDGSDDLFVHQSQIKSDGFRSXLAEGESVEFAIESESDGRAKAVDVTGPDGASVQGTRRGGDGGRSYGGGRGGGGGGYGGGGGYGGGGGYGGGGGYGGGGRGGGGGSCYSCGESGHFARDCPSSAR

SEQ ID NO: 411 - protein, 169 aa, Triticum aestivum
  misc_feature (164)..(164): Xaa can be any naturally occurring amino acid
MPNSPLEKTHETQRDPSFTQARTQMVVMNKAREMTLIAALFVLSCLLKTTTSPATSAYSGAWRPASSLLHELCHLGVRPLIRDDAEATALASADFGNVSDAQPAAAAVLYPSCPEDIASLLRASCMHPSPFPVSARGCGHSTRGQASAPRGVVVDMLSLGCQVXGSATR

SEQ ID NO: 412 - protein, 444 aa, Glycine max
  misc_feature (137)..(137): Xaa can be any naturally occurring amino acid
MVILNLGRKEEQGVRLGKYELGKTLGEGNFGKVKLARDTHSGKLFAVKILDKSKIIDLNNIDQIKREISTLKLLKHPNVVRLYEVLASKTKIYMVLEYVNGGELFDKIASKGKLKEAEGRKIFQQLIDCVSFCPIKXCLHRDLKLENVLVDNKGNIKITDFGLSALPQHLREDGLLHTTCGSPNYVAPEVLANKGYDGATSDTWSCGVILYVILTGHLPFDDRNLVVLYQKIFKGDVQIPKWLTPGARNMIRRILDPNPETRITMAGIKEDPWFKKGYIPVNPEDEDVYVDQEAFSIHEQPNEAEQRNSGSPSLINAFQLIGMSSCLDLSGFFEKEDVSERKIRFASNLSVKDLIERIEDTATEMEFRVEKKNGKLKVIRENKVHKTLGCLSVVVEVFGISSSLYVVELRKSYGDGSVYKQLCNKLLNDLGIPPKQPLVRSAAN

SEQ ID NO: 413 - protein, 77 aa, Glycine max
MGLWTLLEGFLLLANALAILNEDRFLAPRGWGFQDFSGGRTKSFKGQLIGLIYATQYLRVPLILLNSICIFLKLVSG

SEQ ID NO: 414 - protein, 161 aa, Zea mays
  misc_feature (13)..(13): Xaa can be any naturally occurring amino acid
  misc_feature (16)..(16): Xaa can be any naturally occurring amino acid
  misc_feature (30)..(30): Xaa can be any naturally occurring amino acid
  misc_feature (34)..(34): Xaa can be any naturally occurring amino acid
  misc_feature (36)..(36): Xaa can be any naturally occurring amino acid
  misc_feature (40)..(40): Xaa can be any naturally occurring amino acid
  misc_feature (65)..(65): Xaa can be any naturally occurring amino acid
  misc_feature (80)..(80): Xaa can be any naturally occurring amino acid
  misc_feature (92)..(92): Xaa can be any naturally occurring amino acid
  misc_feature (95)..(95): Xaa can be any naturally occurring amino acid
  misc_feature (104)..(104): Xaa can be any naturally occurring amino acid
  misc_feature (109)..(109): Xaa can be any naturally occurring amino acid
  misc_feature (116)..(116): Xaa can be any naturally occurring amino acid
  misc_feature (128)..(128): Xaa can be any naturally occurring amino acid
QKIYYLTGAKGTXDRXAAGEKAENATTAQXEGHXTXQEGXDAGEEANNQNETKDATTNRARTPTXEKTRKTKARGGKRRXPGEGPQEKTGGXPQXHKAPNKKEXQEETXRKKKAQXPQDGTRANKATXAWGGEAGDPIHDKRCNSGTTDMDPERNMRKRGR

SEQ ID NO: 415 - protein, 456 aa, Oceanobacillus iheyensis HTE831
MLKKSFLIFTALLLLATPVYAATPTPESLELSVNLIWVMLGAFLVFFMHAGFAMVESGFTRSKNTLNILMKNFLTISVASILFFLVGYGIMFGSSAGSIIGSDGFLLSEISEIDFFVFQAMFVATCATIISGAVAERIKLGSYILIVAAMTTIIYPVVGHWVWQGDGWLTSLGFSDFAGSTVVHLTGAVGAFVVVLILGPRIGKYKGKKVNVIQGHNLPLGALGVFILWLGWFGFNGGSTLAADPSLVPYVIGTTLLSTSAALVSSSLYTKLRFKKVDASLSMNGVLGGLVGITAGAAEISLGGSIIVGLISGVVLVEGIRFLDTKLRIDDPVGAIAVHGICGIWGTLAIGLFSVNTGLFYGNGISQLGIQAIGVLAVVAWVAITAGGFTYVINKISQIRVSEEEEISGLDFAEHGSSAYNFKESLLEGTDNNSSSGLAERLNNNIPIGKTSNQSS

SEQ ID NO: 416 - protein, 497 aa, Corynebacterium glutamicum ATCC 13032
MNAATRRASLQLPYTHVDDFYINGSWVKAEGTQRNPVVDPAVGQEWGSVPEATASELDSAVGAARTALKSWSALTGAERTGYLLKIATEIESRSEALALTNTRENGSPISETRGAASNAAGIFRYFATLAPWLDGEDIRPFPAGSAESIVDKDPIGVCALIAPWNFPINLVVIKLAPALLAGCTVIIKPASPTPLSIRFIIEAIEAAGVPAGVVNLLTGSGRFGDALVRHPGVDKVAFTGSTPVGKKIAAACGELLRPVTLELGGKSSAIILPDADMSVLSTRLIRSCMRNTGQTCYISTRIIAPSSRYAEVVQTVASTIAAGRQGDPYDEETVFGPVASASQYSTVMSYIDSAREEGARVVAGGTRSISLSEGLESGEFIQPTVFADVTPDMRISREEIFGPVISILKYDDTNGVSEAIALANNTKFGLGGLVFGADEEQALEVARQVDSGSVGINFFGSNHSAPFGGRHESGMGVEYGIEGLSAYLTYKSIHRTI

SEQ ID NO: 417 - protein, 305 aa, Zea mays
MRFGMNLGGETSKRKQNRTNEPASAHANQEKRWVLSDFEVGKPLGRGKFGHVYLAREKRSSEIVALKVLFKSQLKQSQVEHQLRREVEIQSHLRHPNILRLYGYFYDQTRVYLILEYAAKGELYKELTRCKHFSERRTATYVASLARALIYLHGKHVIHRDIKPENLLVGVQGEIKIADFGWSVHTFNRRRTMCGTLDYLPPEMVEKAEHDYHVDIWSLGVLCYEFLYGVPPFEAKEHSETYRRIVKVDLKFPLKPFVSPAAKDLISQMLVKSSAQRLPLHKVLEHPWIVQNADPSGVYREGRSI

SEQ ID NO: 418 - protein, 112 aa, Bartonella sp. sh8784ga
ANEACLKMLQEIGSVKRIPEFIARAKDKNDPFRLMGFGHRVYKNYDPRAKIMQKTCHEVLKELNIQDDPLLDIAIELEKIALNDEYFAEKKLYPNVDFYSGITLKALGFPTE

SEQ ID NO: 419 - protein, 112 aa, Bartonella sp. pn15646ga
ANEACLKMLQEIGSIKKIPEFIARAKDKNDPFRLMGFGHRVYKNYDPRAKIMQKTCHEVLKELNIQDDPLLDIAIELEKIALSDEYFIEKKLYPNVDFYSGITLKALGFPTE

SEQ ID NO: 420 - protein, 180 aa, Capsicum annuum
MASSVMSTATVATGANAAQASMIASFNGLKSAASFPVTRKQDLDITSIASNGGRVQCMLVWPPINKKKYETLSYLPDLSDEQLLKEIEYLLQKGWVPCLEFETEHGFVYREHHRSPGYYDGRYWTMWKLPMFGCTDATQVLNEVQEAKKAYPQAWIRIIGFDNVRQVQCISFIAYKPEGY

SEQ ID NO: 421 - protein, 438 aa, Magnetospirillum magnetotacticum MS-1
MTNENKTPKESVTLINNSTGKTTEFPLLAGSIGPKVADIRSLYASQDIFTYDPGYMSTGSCKSAITYIDGDAGVLLHRGFAIADLAENCSFLEVAYLILKGELPNAEQKTKFEFDIAHHSMVHEQINFFFRGFRRDSHPMAVLCGVVGAMAAFYHDSIDINDPHHRMVASYRLVAKMPTIVAWAYKYAQGQPFMFPQNKLSYSENFLHMMYATPCEEYKVSPVLARAMDRILILHADHEQNASTSTVRLAGSSGANPFACIAAGIASLWGPAHGGANEAVLQMLHEIGSVERIPEFIKKAKDKDDPFRLMGFGHRVYKNYDPRAKIMQKTCHEVLSELGVHDEPLLKLAMELERIALEDPYFVERKLFPNVDFYSGIIFRAMGIPTQVFTCLFALARTVGWIAQWNEMLTDPDQKIGRPRQLYVGPAQRDFVPLHKRG

SEQ ID NO: 422 - protein, 363 aa, Buchnera aphidicola
MKKKYRIAVLPGDGIGPEVMREAYKILNILKNHFSLPLETREFNIGGSAIDQEGTALPKKTLLGCENSDAILFGSVGGKKWDDLPINQRPERASLLPLRKHFNLFANLRPAKLYSELKYLSPLRSDIIKNGFDILCIRELTGGLYFGKPTGRLKKNNIEYAFDTEIYYNYEITRIAHLAFQLAQTRNFKICSIDKSNVLNSSVLWREIVKKVSKNYPDVHLSHLYIDNATMQIIKDPNQFDILLCSNLFGDIISDECAIITGSIGMLPSASLNEKKFGLYEPAGGSAPDIEGKNIANPIAQILSVSMLVRYGMNLKTIADKIDQSVISVLKKGYRTADISNNNNYLKTNEMGDVIANTLISGE

SEQ ID NO: 423 - protein, 490 aa, Acinetobacter sp. ADP1
MSDVKLHRLYIHGQYTDATSGKTFDSINPATGEVIATIQQASQTDIEAAVKSAAEGQKVWAAKTAVERSRILRRAVDILRERNDELAQLETLDTGKAFSETSTVDIVTGADVLEYYAGLATAIQGEQVPLRESSFFYTRREPLGVVAGIGAWNYPIQIALWKSAPALAAGNAMIFKPSEVTPLTAFKLAEIYSEAGLPAGVFNVVQGAGREIGQWLTEHAVIEKISFTGGVETGKKVMASAAGSTLKEVTMELGGKSPLIICEDANLDRAADIAVMANFFSSGQVCTNGTRVFIPQRLKAAFEQAVVERVKRIRMGDPQHTDTNFGPLVSFPHMEKVLSYIESGKQQGAKVLIGGERATTGLLAQGAYVQPTVFTDCHDDMKIVQEEIFGPVMSILTYDTIEEAIERANNTNFGLAAGVVTQNISQAHQIIHQLEAGICWINTWGESPAEMPVGGYKESGVGRENGISTLNHYTRTKSIQVELGDYQSVF

SEQ ID NO: 424 - protein, 467 aa, Candida tropicalis
MSALRSFQRSSNVAKSTLKNSVRTYATAEPTLKQRLEEILPAKAEEVKQLKKDYGKTVIGEVLLEQAYGGMRGIKGLVWEGSVLDPIEGIRFRGRTIPDIQKELPKAPGGEEPLPEALFWLLLTGEVPTEAQTRALSEEFAARSALPKHVEELIDRSPSHLHPMAQFSIAVTALESESQFAKAYAKGVHKSEYWKYTYEDSIELLAKLPTIAAKIYRNVFHDGKLPAQIDSKLDYGANLASLLGFGENKEFLELMRLYLTIHSDHEGGNVSAHTTHLVGSALSSPFLSLAAGLNGLAGPLHGRANQEVLEWLFKLREELNGDYSKEAIEKYLWDTLNAGRVGPGYGHAVLRKTDPRYTAQREFALKHMPDYELFKLVSNIYEVAPGVFDQHGMTKNPWPNVGSHSGVLLQYYGLTEESFYTVLFGVSRAFGVLPQLILDRGLGMPIERPKSFSTEKYIELVKSIGKN

SEQ ID NO: 425 - protein, 306 aa, Gibberella zeae PH-1
MAPSTFKLNTGQEIPAVGLGTWQSPAGEVEKAVTYALKDGYKLIDCAYCYGNEEEVGAGLKAAFKAGVKREDIFVVTKAWATYNTRVELALDKSLKALGLDYVDLFLVHWPLLLNPDGNDDKFPKKPDGSRDVIRDYNHVDGWKLMEKLPATGKTRAVGVCNYSKKYLEELLPHATIVPAVNQIENHPELPQQEIVDFCKEKGIHIEAYSPLGSTGGPVMSAEPVVKIADKKGVSASTVLLSYHGNTVLAKSVNPERITANKTIVDLDDEDMKALNDYSAELQKNNQVKRYVYPPFGIDFGFPDKS

SEQ ID NO: 426 - protein, 380 aa, Gibberella zeae PH-1
MATDRVKASVLHGEKDLRLEERELPKPSSNEVQVAVQSTGLCGSDLHYYNHFRNGDIIVREPLTLGHESAGTVVAVGSEVTHLKPGDHVALEVGLPCETCELCDEGRYNICRGMKFRSSAKANPHAQGTLQERINHPAKWCHKMPEHVTLDLGALVEPLSVAMHARDRASLPKGSTVLVLGAGAVGLLAAAVAKADQAKTVIIADILKDRLDFATSNGFADASVVVPMERPQTIEDKLAFAQKVAAMVKETQIDGEAIGEVTAVYECTGVETCVQTAIYATKPGGKVMIIGMGTPVLTIPMSAAALREVDIVGVFRYANTYKEIIELLSNPPANMPDVSRLVTQRYSGMDKIEEAFKMAGKVRDEQGNLVIKVVVDFSEK

SEQ ID NO: 427 - protein, 473 aa, Zea mays
SLYQRGESASERKTYPNPLQDNPAYSVVKQYFVNPDDTVTQKIVVHKTSARGTHFRRAGPRQRVYFQSDEVNAAIVTCGGLCPGLNTVIRELVCGLYDMYGVSSVVGIEGGYKGFYSKNTVALTPKSVNDIHKRGGTVLGTSRGGHDTAKIVDCLQDRGINQVYIIGGDGTQKGASVIYEEVRRRGLKCSVVGVPKTIDNDIAVIDKSFGFDTAVEEAQRAINAAHVEAESAENGIGVVKLMGRNSGFIAMYATLASRDVDCCLIPESPFYLEGKGGLLEFVERRLKDNGHMVIVVAEGAGQDLIARSMNFVDTQDASGNKLLLDVGLWLSQKIKDHFKKKPSFPITLKYIDPTYMIRAVRSNASDNVYCTLLAHSALHGAMAGYTGFTVAPVNGRHAYIPFYRITEKQNKVVITDRMWARVLCSTNQPCFLSHEDVENMKHDDDEHHHMHNTQLLEGGSSPVSKCNGSAAAV

SEQ ID NO: 428 - protein, 170 aa, Zea mays
  misc_feature (69)..(69): Xaa can be any naturally occurring amino acid
MDGRMFGLETPLMVALQHLLDVPDGDAGAGGDKASGAAAGGGPTRTYVRDARAMAATPADVKGAPGRVXAFVVDMPGLGTGDIKVQVEDERVLVISGERRREEREDAKYLRMERRMGKFMRKFVLPDNADMDKISAVCRDGVLTVTVEKLPPPEPKKPKTIEVKVRLRWD

SEQ ID NO: 429 - protein, 516 aa, Glycine max
EWEMDQLLWRVLPLLTILVSFGVFFYLQDSYTAQFYALIKLPRDKCSLLPHRHFWISSKRIVTPQGIISGSVEINDGKIISVVEGHAIQGKPKQEEVIDYGDAVIMPGLIDVHVHLNEPGRTEWEGFDTGTRAAAAGGVTTVVDMPLNCYPTTVSKEKLKLKLDAAEDKIYVDVGFWGGLIPENALNTSILDGLLSAGVLGVKSFMCPSGIDDFPMATIDHIKAGLSVLAKYRRPIVVHAEIQQDFENHLELNEDNLDPRAYLTYLNTRPPSWEEAAIKQLVSVTKDTRKGGPLEGAHVHIVHLSDSSASLDLIKEAKSHGDSISVETCPHYLAFTSEEIPNGDTRFKCSPPIRDAYNKDKLWEAVLEGHIDLLSTDHSPTVPELKLMEEGDFLKAWGGISSLQFNLPVTWSYGKKYGLTLEQLSLLWSKKPATLAGLESKGTIAVGNHADIVVWQPELEFDLDDDYPVFIKHSELSAYMGRRLSGKVLETFVRGNLVFKDGKHAPAPCGVQILAK

SEQ ID NO: 430 - protein, 552 aa, Glycine max
MALAPPSVFALYIVIDLKIEIYMTISAMCGILAVLGCVDNSQTKRARIIELSRRLRHRGPDWSGIHCYEDCYLAHQRLAIVDPTSGDQPLYNEDKTVIVTYEEHGEEFVNMLDGMFAFILLDTRDKSFIAARDAIGITPLYLGWGHDGSTWFASEMKALSDDCERFISFPPGHIYSSKQGGLRRWYNPPWFSEDIPSTPYDPTLLRETFERAVVKRMMTDVPFGVLLSGGLDSSLVAAVVNRYLAESESARQWGSQLHTFCIGLKGSPDLKAAKEVADYLGTRHHELYFTVQEGIDALEEVIYHIETYDVTTIRASTAMFLMSRKIKALGVKMVLSGEGSDEIFGVFMALMIWQIKALHLYDCLRANKSTAAWGVEARVPFLDKEFINVAMSIDPEWKMIRPDLGRIEKWVLRNAFDDDKNPYLPKHILYRQKEQFSDGVGYSWIDGLKDHANKQVTDATMMAANFIYPENTPTTKEGYLYRTIFEKFFPKNAAKATVPGGPSVACSTAKAVEWDAAWSKNLDPSGRAALGIHDAAYDAVDTKIDEPKNGTL

SEQ ID NO: 431 - protein, 497 aa, Photorhabdus luminescens subsp. laumondii TTO1
MSDINLLQPVMAFLQHNHGHYINGQPVSGQGSETFSVINPATDEIIATVNQGGKAEVNAAMQAAQAAFHGVWAQTSPMERGHCLNRLADLLLAHREELAQLETLCSGKTIQLSRMLEIDSSAQFLRYFAGWSSKISGETLNVSLPSFKGEQYTAFTRREPIGVVVGIIPWNFSIMIAIWKMAAALTCGCTIVLKPSEYTPLTMLRVAELAKQAGIPDGVINVINGSGSVLGPALIGHPLCAKVTFTGSVPTGIAVGKSAMEQGLTRATLELGGKNGAAFLADMSVEKIVDGILEAGYLNQGQICAAAERFYIPASHMDDVLKLLSERLAAMKIGSPLDDSTEMGPLANKAHYDKILSLFEQARQEGSEIVYGGHALAGPGFFVAPTVIRANSPEDSLMKEETFGPVGTFLSYNDEEELIGLMNSTPFGLAASLWTNDLSKAMRMIPRIEAGTVWVNMHTFLDPALPFGGTKSSGIGREFGSAFIEHYTELKSVMVRY

SEQ ID NO: 432 - protein, 521 aa, Triticum aestivum
  misc_feature (303)..(303): Xaa can be any naturally occurring amino acid
  misc_feature (342)..(342): Xaa can be any naturally occurring amino acid
MAATPPSSRDPSPQPRRPAAAAGRPAASGTGTIGNGKRGGLLLGRYELGRVLGHGTFAKVYHARHADTGETVAIKVLDKEKALRAGLVPHIKREITILRRVRHPNIVRLFEVMATKSKIYFVMEFVRGGELFARVAKGRLKEDTARRYFQQLISAVGFCHARGVFHRDLKPENLLVDERGDLKVSDFGLSAVADQFHPDGLLHTFCGTPSYVAPEMLARRGYDGAKADIWSCGVILFVLMAGYLPFHDQNLMAMYRKIYRGEFRCPRWFSRDLTSLLNRLLDTNPETRITMAEVMQSRWFQKXGFRPVRFYVEDDQLHSLGDSESEELGLVEPTEPPLPPPXFPPPLPPPPQQEDDDSGWESDSSVASCPATLSCEERQRPAGRLTRPASLNAFDIISFSKGFDLSGLFEERGSEVRFISAQPMETIVTKLEEIAKMKSFSIRRKDWRVSIEGTREGEKGPLTIGAEIFELTPSLLVLEVKKKAGDKAEYDDFCNKELKPGMEPLVHHQSGSARNVPSDTE

SEQ ID NO: 433 - protein, 1291 aa, Ustilago maydis 521
MALDGKDASELQFGLTAYNIHGSIRDSRSMIDCGARAHSHSGHTSRFAIDCGVRVHSHSGRTSRSNEFVQAEKLTSYAVMYGFVLGCVRVEVRVSAPESTVQRYPSAKMIDVEQMPFDLYTYTRSAVAAAATATSTAAAAVINDTIDWNHGNPHAGGGNNGSDDNPAIPLPNQRAFEGPWFSQQLSLSIFIGLASFFIFVFVRRRNAALFAPRTKLKGFSPLDDGHDVGYFGWIMPTLKTEEMRILQTVGMDAAILLSFLKMGFWLFFSLSCWSILVLMPVNYWQNGVLDGVSPAEDRDNATDPFSARDTVTGVWTQLIFNSLKNKHEAPEEPLPQLPLPAKPAQAQLYHATHLLSTYLFTILAMRAIWINYQRFVRSRQLYILEIVESIPARTVEIRDLPAHLRDEKALAEYFENMDMPVESTAVVRNTEGLSRLLKLRSNALQQLEKIWVRWLGNPTDADGYDPEKIMLLAAGANHDDLLSSHDSDDLVRISVDDGDRSQARPRDDHEHSHLLGGNASNTVFTGADTIRTHHPRPTMRKQWWNPFSEKVDAIDELTRQFHAVDRAVRRRRKTGRFPGGNVGFVTFQSAASAQIASQTVHYPMPAYCATSMAQEPRDIIWSNIDLSNNDRRVRQVLVSIFMVAVLVFYIPPLVFLASFVSPGAIKKYAPWLDRLLDTDQRLRALVQNNLPSLVVIGFNALLPLVLEYSSYLQGLKARSLVEYSLLKKYYLFLMVSVVFIFLIATTAWGVLQELAENPMRVIDKLAASLPKARFFSLSYVILQGIALQPLQLLQLPTLILRAFYRVFLTRTPREFAELNAPPTLAMGNVYPQALLIFTLCILYSIVSPLIVIFGTVYFGIAYVVNKYKLLYVFYKPYESQGQAWPISASRCIWALVLFHIFQFSLFSVRKELWMSTGLLPLIVFTFWFNGHLETTFGPLTEHVNLSSVVEVLKEREVDPRLAELAQNGPPGVVRAEVGVGQGVVSTDTSAANAVGGNGGRSGTVTPSSSRSKQLLSLDPSHKIDPAFTKLALARYSPDEEDETLFVAQRDTKTDYREPPGAGYYPGVLNTGRRRYGHPAITGILPELWLPIPKQRMEQGGPDVTEADDLESATGVASATTSALGAPRLGLSNDAASATRLIRTRALSKAEPLILSLRKRKSSLMTRATSRTTCSAQRPPTADSRNDGTSIDRDRDRDAPSDDRDPDLGVWSDGVSGPQGSSSSAALGEALSGAYAVAPARQHIRNGIDTHDADDGEDEGVYIHRSATRKGAPPTGTRSGVRSAAHTAAYHD

SEQ ID NO: 434 - protein, 360 aa, Streptomyces peucetius
GSPNSTAEPTVAARPQQIDALRTLIRLGSLHTPMVVRTAATLRLVDHILAGARTVKALAARTDTRPEALLRLIRHLVAIGLLEEDAPGEFVPTEVGELLADDHPAAQRAWHDLTQAVARADISFTRLPDAIRTGRPTYESIYGKPFYEDLAGRPDLRASFDSLLACDQDVAFDAPAAAYDWTNVRHVLDVGGGKGGFAAAIARRAPHVSATVLEMAGTVDTARSYLKDEGLSDRVDVVEGDFFEPLPRKADAIILSFVLLNWPDHDAVRILTRCAEALEPGGRILIHERDDLHENSFNEQFTELDLRMLVFLGGALRTREKWDGLAASAGLVVEEVRQLPSPTIPYDLSLLVLAPAATGA

SEQ ID NO: 435 - protein, 249 aa, Hordeum vulgare subsp. vulgare
MDMGLEVSSSSPSSSSVSSSPEHAARRASPAKRPAGRTKFRETRHPVYRGVRRRGNTERWVCEVRVPGKRGARLWLGTYATAEVAARANDAAMLALGGRSATCLNFADSAWLLAVPSALSDLADVRRAAVEAVADFQRREAADGSLAIAVPKEASSGAPSLSPSSGSDSAGSTGTSEPSANGVFEGPVVMDSEMFRLDLFPEMDLGSYYMSLAEALLMDPPPTATIIHAYEDNGDGGADVRLWSYSVDM

SEQ ID NO: 436 - protein, 246 aa, Pinus banksiana
YTYNLRKKGPEDVIVKVIYCGICHSDLVQMRNEMGMSHYPMVPGHEVVGIVTEIGSEVKKFKVGEHVGVGCIVGSCRSCGNCNQSMEQYCSKRIWTYNDVNHDGTPTQGGFASSMVVDQMFVVRIPENLLLEQAAPLLCAGVTVFSPMKHFGMTEPGKKCGILGLGGVGHMGVKIAKAFGLHVTVISSSDKKKEEAMEVLGADAYLVSKDTEKMMEAAESLDYIMDTIPVAHPLEPYLALLKTNGK

SEQ ID NO: 437 - protein, 251 aa, Zea mays
  misc_feature (233)..(233): Xaa can be any naturally occurring amino acid
MASKSTMRSLVLIMGLLLLSCSGISSAARLLEEVAPKEEYPHPEVPELPKPELPPHPTVPELPKPDELPPHPVVPELPKPEVPVHPAVPELPKPELPPHPTVPELPKPEVPAHPAVPELPKPELPPHPTVPELPKPEVPELPKPEVPEHPAVPELPKPELPPHPTVPELPKPEVPELPKPEVPEHPAVPELPHPDVPEHPASVPELPKPEVPEHPTVPELPKHELPPLPEPEXHCPPKAESHYPEPGMAKP

SEQ ID NO: 438 - protein, 163 aa, Triticum aestivum
  misc_feature (91)..(91): Xaa can be any naturally occurring amino acid
  misc_feature (104)..(104): Xaa can be any naturally occurring amino acid
MSDTDEHHFESKADSGASKTYPQQAGAIRKGGHIVIKARPCKVVEVSTSKTGKHGHAKCHFVAIDIFNGKKLEDIVPSSHNCDVPHVDRQXYQLIDITDDGYVXLLTESGNTKDDLNSTDDFCLGSQDGLLMEGLICRDSAWVKKCACEGIGGGITLSGATHT

SEQ ID NO: 439 - protein, 500 aa, Atriplex triangularis
MAFPMPVRQLFIDGERREPLLKNRIPIINPSTEEIIGDIPAATAEDVEVAVVAARKAFKRNKGRDWAATSGAHRAKHLRAIAAKITERKDHFVKLETLDSGKPFDEAVLDIDDVASCFEYFAGQAEALDAKQKAPVTLPMDRFKSHVLRQPIGVVGLISPWNYPLLMATWKIAPALAAGCTAVLKPSELASVTCLEFGEVCNEVGLPPGVLNILTGLGPDAGAPIVSHPDIDKIAFTGSSATGSKIMASAAQLVKPVTLELGGKSPVIMFEDIDIETAVEWTLFGVFWTNGQICSATSRLLLHESIAAEFVDRMVKWTKNIKISDPFEEGCRLGPVISKGQYDKIMKFISTAKSEGATILCGGSRPEHLKKGYYIEPTIITDITTSMQIWKEEVFGPVICVKTFKTEDEAIELANDTEYGLAGAVFSKDLERCERVTKALEVGAVWVNCSQPCFVHAPWGGVKRSGFGRELGEWGIENYLNIKQVTSDISDEPWGWYKSP

SEQ ID NO: 440 - protein, 245 aa, Pinus armandii
YTYSLRKKGPEDVIVKVIYCGICHSDLVQMRNEMGMSNYPMVPGHEVVGMVTELGSEVKKFKVGDHVGVGCIVGSCRSCGNCNQSMEQYCSKRIWTYNDVNHDGTPTQGGFASSMVVDQMFVVRIPENLPLEQAAPLLCAGVTVFSPMKHFGMTEPGKRCGILGLGGVGHMGVKIAKAFGLHVTVISSSDKKKEEAMEVLGADAYLVSKDAEKMMEAAESLDYIMDTIPVAHPLEPYLALLKTNG

SEQ ID NO: 441 - protein, 246 aa, Pinus armandii
YTYSLRKKGPEDVIVKVIYCGICHSDLVQMRNEMGMSNYPMVPGHEVVGMVTELGSEVKKFKVGDHVGVGCIVGSCRSCGNCNQSMEQYCSKRIWTYNDVNHDGTPTQGGFASSMVVDQMFVVRIPENLPLEQAAPLLCAGVTVFSPMKHFGMTEPGKRCGILGLGGVGHMGVKIAKAFGLHVTVISSSDKKKEEAMEVLGADAYLVSKDAEKMMEAAESLDYIMDTIPVAHPLEPYLALLKTNGK

SEQ ID NO: 442 - protein, 371 aa, Acinetobacter sp. ADP1
MCKVIQFKGFQQSFKRKITMKAARFYDRGDIRIEDIPEPEVTAGTVGIQVAWCGICGTDLHEFMEGPIFIPPCGHPHPISGESAPITMGHEFSGVVYAVGEGVDDIQVGQHVVVEPYIVADDVPTGPGENYHLSKNMNFIGLGGRGGGLSEKIAVQRRWVHPISENIPLDQAALIEPLSVGHHAYVRSGAKAGDVALVGGAGPIGLLLSAILKAKGLTVIITELSSKRKEKAKESGVADYILDPTQVDVIAEVMKITQDKGADIAFECSSVNKVLDTLVASTKPTGVIVIVSIWSHPATVNVHSVVMKELDIRGTIAYVNDHQETIKLVEQGKINLAPFITQRIKLDDLISQGFETLIHNNESAVKIIVHP

SEQ ID NO: 443 - protein, 246 aa, Picea smithiana
YTYTLRNKGPEDVIVRVIYCGICHSDLVQMHNEMGMSNYPMVPGHEVVGVVTEIGSEVKKFKVGEHVGVGCIVGSCRSCSNCNGSMEQYCSKRIWTYNDVNHDGTPTQGGFASSMVVDQMFVVRIPENLPLEQAALLLCAGVTVYSPMKHFGMTEPGKKCGILGLGGVGHMGVKIAKAFGLHVTVISSSDKKKEEALEVLGADAYLVSKDAEKMQEAAESLDYIMDTIPVAHPLEPYLALLKTNGK

SEQ ID NO: 444 - protein, 147 aa, Brassica napus
MATVGRNIAAPLLFLNLIMYLIVLGFASWCLNRYINGQTNHPSFGGNGATPFFLTFSILAAVIGIASKLAGANHIRFWRNDSLAAAGSSSIVAWAVTALAMGLACKQINIGGWRGWRLRIIEAFIIILTFTQLLYVLLIHAGVFSSK

SEQ ID NO: 445 - protein, 480 aa, Triticum aestivum
  misc_feature (137)..(137): Xaa can be any naturally occurring amino acid
  misc_feature (148)..(148): Xaa can be any naturally occurring amino acid
  misc_feature (153)..(153): Xaa can be any naturally occurring amino acid
MDRADPARGRLAVLSSHLLAGVLAVVDSRTGKRYEVKVSEDGTVRATDFKKITTGKDDKGLKTYDPGYLNTAPVRSSICYIDGDEGILRYRGYPIEEVAESSSFVEVAYLLMYGNLPTQSQLAGWESAISQHSAVPXGLLDIIQSMPXDAHPXGVLASAMSTLSVFHPDANPALRGQDLYKSKQVRDKQIVRVLGKAPAIAAAAYLRLAGRPAVLPSNNLSYSENFLYMLDSLGDKEYKPNPRLARVLDILFILHAEHEMNCSTAAVRHLASSGVDVFTALSGAVGALYGPLHGGANEAVLKMLNEIGAVENIPDFIEGVKNRKRKMSGFGHRVYKNYDPRAKVIRKLAEEVFSIVGRDPLIEVAVALEKAALSDDYFIKRKLYPNVDFYSGLIYRAMGFPTEFFPVLFAIPRMAGWLAHWKESLDDPDNKIMRPQQVYTGVWLRHYTPVRERVASNQGEELGQIATSNATRRRRAGSSL

SEQ ID NO: 446 - protein, 168 aa, Cucumis sativus
GSVRAKNTMNIMLTNVLDAAAGGLFYYLFGFAFAFGTPSNPFIGRHFFGLKSIPSTAADYSFFLYQWAFAIAAAGITSGSIAERTQFVAYLIYSSVLTGFVYPVVSHWFWSPDGWASPSRTDGDLLFGTGVIDFAGSGVVHMVGGIAGLWGALIEGPRIGRFDKTGRS

SEQ ID NO: 447 - protein, 455 aa, Bacillus megaterium
TIKEMPQPKTFGELKNLPLLNTDKPVQALMKIADELGEIFKFEAPGRVTRYLSSQRLIKEACDESRFDKNLSQALKFVRDFAGDGLFTSWTHEKNWKKAHNILLPSFSQQAMKGYHAMMVDIAVQLVQKWERLNADEHIEVPEDMTRLTLDTIGLCGFNYRFNSFYRDQPHPFITSMVRALDEAMNKLQRANPDDPAYDENKRQFQEDIKVMNDLVDKIIADRKASGEQSDDLLTHMLNGKDPETGEPLDDENIRYQIITFLIAGHETTSGLLSFALYFLVKNPHVLQKAAEEAARVLVDPVPSYKQVKQLKYVGMVLNEALRLWPTAPAFSLYAKEDTVLGGEYPLEKGDELMVLIPQLHRDKTIWGDDVEEFRPERFENPSAIPQHAFKPAGNGQRACIGQQFALHEATLVLGMMLKHFDFEDHTNYELDIKETLTLKPEGFVVKAKSKKIPL

SEQ ID NO: 448 - protein, 483 aa, Burkholderia cepacia R18194
MNEFLRTGHYIGGEWHESHGASDATYPVLNPATGETIAKVAKGGADDTQRAIDAAAHAFPAWRALTAKERGARVKRWGELMLENRDALAELLTREQGKPLAEARGEVVYAASFLEWFAEEAKRMYGDVIPSPKPNSQIVVTREPVGVVAAITPWNFPLAMITRKAGPALAAGCTMVLKPSEETPLSAFALAVLAERAGVPAGVFNVVSGDAVAIGETLTSSSVVRKLSFTGSTRVGKLLAKQSADTLKKLSLELGGNAPFIVFDDADLDAAVEGAIASKFRNTGQTCVCVNRFLVQDGVYDAFTRKLADAVRKLRVGNALAGEVDQGPLINEAALGKVERHVADATAKGAHALTGGKRHALGGTFYEPTVLTGMTADMLIAEEETFGPVAGCFRFATEEEAVAAANDTPFGLSAYFYTRDLGRAWRVSGALESGMVGVNDGIISTEVAPFGGVKQSGLGREGSKYGLDEYVELKYTLMAGLGR

SEQ ID NO: 449 - protein, 119 aa, Armoracia rusticana
PGSFNKILVTYETGTYNGQWSAVGRTAVTTTLAGCTAALTTLFGKRLLSGHWNVTDVCNGLLGGFAAITGGCSVVEPWAAIICGFVAALVLLGCNKLAEKLRYDDPLEAAQLHGGCGAW

SEQ ID NO: 450 - protein, 455 aa, Bacillus megaterium
TIKEMPQPKTFGELKNLPLLNTDKPVQALMKIADELGEIFKFEAPGRVTRYLSSQRLIKEACDESRFDKNLSQALKFVRDFAGDGLFTSWTHEKNWKKAHNILLPSFSQQAMKGYHAMMVDIAVQLVQKWERLNADEHIEVPEDMTRLTLDTIGLCGFNYRFNSFYRDQPHPFITSMVRALDEAMNKLQRANPDDPAYDENKRQFQEDIKVMNDLVDKIIADRKASGEQSDDLLTHMLNGKDPETGEPLDDENIRYQIITFLIAGHETTSGLLSFALYFLVKNPHVLQKAAEEAARVLVDPVPSYKQVKQLKYVGMVLNEALRLWPTAPAFSLYAKEDTVLGGEYPLEKGDELMVLIPQLHRDKTIWGDDVEEFRPERFENPSAIPQHAFKPWGNGQRACIGQQFALHEATLVLGMMLKHFDFEDHTNYELDIKETLTLKPEGFVVKAKSKKIPL

SEQ ID NO: 451 - protein, 455 aa, Bacillus megaterium
TIKEMPQPKTFGELKNLPLLNTDKPVQALMKIADELGEIFKFEAPGRVTRYLSSQRLIKEACDESRFDKNLSQALKFVRDFAGDGLFTSWTHEKNWKKAHNILLPSFSQQAMKGYHAMMVDIAVQLVQKWERLNADEHIEVPEDMTRLTLDTIGLCGFNYRFNSFYRDQPHPFITSMVRALDEAMNKLQRANPDDPAYDENKRQFQEDIKVMNDLVDKIIADRKASGEQSDDLLTHMLNGKDPETGEPLDDENIRYQIITFLIAGHETTSGLLSFALYFLVKNPHVLQKAAEEAARVLVDPVPSYKQVKQLKYVGMVLNEALRLWPTAPAFSLYAKEDTVLGGEYPLEKGDELMVLIPQLHRDKTIWGDDVEEFRPERFENPSAIPQHAFKPYGNGQRACIGQQFALHEATLVLGMMLKHFDFEDHTNYELDIKETLTLKPEGFVVKAKSKKIPL

SEQ ID NO: 452 - protein, 150 aa, Brassica napus
  misc_feature (42)..(42): Xaa can be any naturally occurring amino acid
MAIRLMDLDSPFFNTLHRIMDLTEDAEKNLNAPTRTYVRDAXAMAATPADVKEYPNSYVFVIDMPGLKSGDIKVQVEDDNVLLISGERKREEEKEKEGGKYLRMERRLGKLMRKFTLPENANTDAISAVCLDGVLTVTVNKLPPPQPKKP

SEQ ID NO: 453 - protein, 431 aa, Glycine max
  misc_feature (22)..(22): Xaa can be any naturally occurring amino acid
MRLGKYYLGRTLGEGNFGKVKXARNTDSGQAFAVKIIDKNTIVDINITNQIIREIATLKLLRHPNVVRLYEVLASKTKIYMVLEYVNGGELFDIIASKGKHIEGEGRKLFQQLIDGVSYCHTKGVFHRDLKLENVLVDNKGNIKITDFGLSALPQHLREDGLLHTTCGSPNYVAPEVLANKGYDGATSDTWSCGVILYVILTGHLPFDDRNLVVLYQKIFKGDVQIPKWLTPGARNMIRRILDPNPETRITMAGIKEDPWFKKGYIPVNPEDEDVYVDQEAFSIHEQPNEAEQRNSGSPSLINAFQLIGMSSCLDLSGFFEKEDVSERKIRFASNLSVKDLIERIEDTATEMEFRVEKKNGKLKVIRENKVHKTLGCLSVVVEVFGISSSLYVVELRKSYGDGSVYKQLCNKLLNDLGIPPKQPLVRSAAN

SEQ ID NO: 454 - protein, 257 aa, Brassica rapa subsp. pekinensis
MNSVSTLSEVLGSQNESPVGGDYCPMLAASCPKKPAGRKKFRETRHPIYRGVRLRKSGKWVCEVREPNKKSRIWLGTFKTAEIAARAHDVAALALRGRGACLNFADSAWRLRIPETTCAKDIQKAAAEAALAFEAEKSDTTTNDRGMNMEETSAVASPAELNDTTADHGLDMEETMVEAVFRDEQREGFYMAEETTVEGVVPEEQMSKGFYMDEEWTFEMPRLLADMAEGMLLPPPSVQWGHNDDFEGDVDMNLWSY

SEQ ID NO: 455 - protein, 249 aa, Zea mays
MFGYQKGLDVEAGTSGAAATGGARQLYPGMQESPELRWALIRKIYVILSLQLLLTAVVAAVVVKVRAIPHFFTTTSAGLGLYIFLIILPFIVLCPLYFYHEKHPVNLILLGLFTVAISFAVGMTCAFTSGKVILESAILTTVVVLSLTAYTFWAVNRGKDFSFLGPFLFAALIVLLVFALIQILFPLGKLSQMIYGGLASLIFSGYIVYDTNNIIRRYTYDQYVWAAVSLYLDVINLFLSLMTLFRAAD

SEQ ID NO: 456 - protein, 488 aa, Photorhabdus luminescens
MTIINHWINGKNVSSKTYFETTNPATGEVLAEVAAGGQEEIDQAVAAAKEAFPKWADLPMKERARLMRRLGELIDENVPEIAAMETKDTGLPIHQTQNVLIPRASHNFNFFAEICQQMNGHTYPVDDKMLNYTLVQPVGVCALISPWNVPFMTATWKVAPCLALGNTAVLKMSELSPLTANRLGELALEAGIPAGVLNVVQGYGATAGDALVKHHDVRAVSFTGGTVTGRQIMKNAGLKKYSMELGGKSPVLIFEDADIERALDASLFTIFSINGERCTAGSRIFIQQSIYPEFIKRFAERANRLRVGDPQDPNTQIGALISKPHWEKVSGYIRLGIEEGATLLAGGPDKPIDLPAHLKEGNFLRPTVLADVDNRMRVAQEEIFGPVACLLPFKDEAEGLRLANDVEYGLASYIWTQDVSKVLRLARNIEAGMVFVNTQNVRDLRQPFGGVKASGTGREGGEYSFEVFAEMKNVCISMGDHHIPRWGI

SEQ ID NO: 457 - protein, 317 aa, Oleomonas sagaranensis
MTLDAQAKAILDQIARSPMPKLHQVPASVARQMFEISCKLTEIKNLPIGRVEDRVIPGPDDTELPIRIYTPVAAPPGPLPVLVFFHGGGFVIGSLDSHDAPCRLIANEARCLVVSVDYRLAPENRFPAAVDDCLAAVTWVARNAAEINADPTRIAVGGDSAGGNLSAVVSQQLRDAGGPKIVFQLLIYPATDALHEGLSRTSNAEGYMLDKDLMSWFFAQYLGDGGGVDLADPRFSPLRHANLGNLGTIHVVVAGFDPLRDEGIAYAEALKAAGNKVTLSEFKGQIHGFCSMAGVIEAGRTALVEGAALLKEAFAQA

SEQ ID NO: 458 - protein, 421 aa, Hydrogenobacter thermophilus
MLKVESVYRWEGSLKVPQEGKFIKLKEDKSIEVPNFPIIPFIEGDGIGAEIMPAMIHIVNTAVEKAYGGSRNIFWVELLAGDKAEEKTGKRMPEETIEFLKEAVVGIKGPLGTPVGKGGKSLNAILRQSMDFYSAIRPVYWLGQPAPIPNPERVNVAVFRENSDDVYMSIEYMPKEERTQKVRKFFIEEMGVSEYALPEDCGITVKPMSEFKTKRHVRKALRWALQNNKKVVAVVGKGNIMKATEGAFMNWAFEVAKEPEFEGKVITEGEPKDGQVLMVKVITDQMLMQLVLKPEAYHVIITQNLNGDYISDLASALVGGPGFVPSGNIGDGYALFESTHGTAYDIAGKGIANPLSLTLSGAMMLEYLGWKEASELIYSAVKRTIAERLGTPDIANGFRKQGLEAKELTTLEFAKAIADRI

SEQ ID NO: 459 - protein, 490 aa, Photorhabdus luminescens
MTNDVNTELLRQQAYINGQWVDADNQATFKVTNPANGQVIAHVSNMGAAETERAIAAAQQALPAWRAMTAKQRSQILQRWFQLMMANQQALAELLSREQGKSQAEAMGEIAYGASFIEWFAEEGKRTYGETIPSPMPGRRIVTIKQPIGVVAAITPWNFPNAMITRKVGPALAAGCTVILKPASETPLSALALAALAEQAGIPAGVFNVVTGVDAKTIGGVLTQSPIVRKLSFTGSTRIGKLLMAQSADTVKKLSLELGGNAPFIVFDDANIDAAVQGALIAKFRNSGQTCVCANRILVQETIYDAFAERLAQAVNKLQVGPASDAKSQQGPLINQAAVDKVEEHINDAVSRGARILAGGKPHALGGLFFEPTVLADVNESMLISQEETFGPVAPLFKFRDEAEAIHLANDTEFGLAAYFYSRDIGRIYRVAEALESGMVGINEGLISNEVAPFGGIKQSGLGREGSRYGIEDYLEVKYLCFGGIEDTGV

SEQ ID NO: 460 - protein, 347 aa, Agrobacterium tumefaciens str. C58
MRGVVIHAAKDLRVEDVAGQPLAADEVRVAVAVGGICGSDLHYYNHGGFGTVRVREPMALGHEFAGTVVEVGSSVSHLVPGMRVAVNPSLPCGTCRYCAQGRQNQCLDMRFMGSAMRSPHVQGGFREVVTVHSTQPVQIADGLSMGEAAMAEPLAVCLHAARQAGSLLGKTVLITGAGPIGMLSLLVARLAGAAHIVVTDVADAPLDLARRIGADEAVNILRDADMLEKYRFEKGVFDVLFEASGNQAALLPALDLLRPGGIIVQLGLGGDFTIPMNLIVAKELQLRGTFRFHEEFAQAVNMMGRGLIDVKPLISATLPFDQAREAFDLAGDRAKSMKVQLAFSGAA

SEQ ID NO: 461 - protein, 539 aa, Glycine max
MDSSSSSPNNNNNHHASTTKTNGFLIHPKLGFEPARSRSRLAMASPANTSEPKIVTGTAGYILEDVPHFTDYIPNLPTYPNPLQDNPAYSVVKQYFVHVDDSVPQKVVVHKDGARGVHFRRAGPRQKVYFEADEVQAAIVTCGGLCPGLNTVIRELVCGLHHMYGVKKVLGINGGYRGFYARNTITLTPKSVNDIHKRGGTVLGTSRGGHDTKKIVDSIQDRGINQVYIIGGDGTQKGASAIFEEVRKRGLKVSVVGIPKTIDNDIPVIDKSFGFDTAVEEAQRAINAAHVEAESVENGIGVVKLMGRNSGFIAMYATLASRDVDCCLIPESPFYLEGPGGLYEYIEKRLKENGHMVIVIAEGAGQELVSESVQSMSKQDASGNKLFQDVGLWISQKIRDHFAAQKTLPITLKYIDPTYMIRAIPSNASDNVYCTLLAQSAVHGAMAGYTGYTSGLVNGRQTYIPFYRITERQNHVVITDRMWARLLSSTNQPSFLDAKGDNEEKEEEEALNQLPDGHCAKDTSLASKEINSSIYPTAC

SEQ ID NO: 462 - protein, 213 aa, Desulfitobacterium hafniense DCB-2
MEFLLDSANPEEIRQAWAMGVIGGITTNPSLVAKEGRDFHQLLQELVQIVNGPISAEVIALDTEGMLGEARELAAMHPNIVVKIPMTEEGLKAVKVLKAEGIKTNVTLVFSAVQALLAARAGATYVSPFLGRLDDIGENGLLLLADICEVFGVHGLETKVIAASIRNPVHVTEAAKIGADYATVPFNVLCQLFKHPLTEAGIKKFLADWQKLK

SEQ ID NO: 463 - protein, 282 aa, Triticum aestivum
MPHKNTMASLVFLMALLLSCSSMTSAARHLEEALPKEYPPHPIVPELPKPQLPPHPAVPELPEPEPPHPLVPELPHPMVPEVPKHELPPHPLVPEVPHPMVPEVPKHELPPHPAVPELPKPKVPHPAVPEVAKEPEVPHPIVPEVPNKHEQPHPMVPEVPKHELPPHPVMPELPKPELPHPVAEVPKEHELPHPIVPEVPKEHELPHPAIPELPKTEMPHHAVPEVPKEPHVPHPEVPEVLKEPELPHPAVPEVPKHEMPPFPKAELPPKPELHFLEPEAKP

SEQ ID NO: 464 - protein, 246 aa, Pseudotsuga menziesii
YTYILRNIGPEGVLLRVIYCGICHSDLVQMRNEMGMSNYPMVPGHEVVGIVTEIGSEVKKFKVGEHVGVGCIVGSCRSCGNCNQSMEQYCSKRIWTYNDVNHDGTTTQGGFASTMVVDQMFVVRIPENLPLEQAAPLLCAGVTVFSPMKHFGMTEPGKKCGILGLGGVGHMGVKIAKAFGLHVTVISSSDKKKEEALEVLHADAYLVSRDAEKMMEAAESLDYILDTIPVSHPLEPYLALLKTNGK

SEQ ID NO: 465 - protein, 246 aa, Pseudotsuga menziesii
YTYILRNIGPEGVLLRVIYCGICHSDLVQMRNEMGMSNYPMVPGHEVVGIVTEIGSEVKKFKVGERVGVGCIVGSCRSCGNCNQSMEQYCSKRIWTYNDVNHDGTTTQGGFASTMVVDQMFVVRIPENLPREQAAPLLCAGVTVFSPMKHFGMTEPGKKCGILGLGGVGHMGVKIAKAFGLHVTVISSSDKKKEEALEALHADAYLVSRDAEKMMEAAESLDYILDTIPVSHPLEPYLALLKTNGK

SEQ ID NO: 466 - protein, 246 aa, Larix gmelinii
YTYTLRNKGPEDVIVRVIYCGICHSDLVQMRNEMGMSHYPMVPGHEVVGIVTEVGSEVKKFKVGEHVGVGCIVGSCRSCGNCNQSMEQYCSKRIWTYNDVNHDGTPTQGGFASTMVVDQMFVVRIPENLPLEQAAPLLCAGATVFSPMKHFGMTEPGKKCGILGLGGVGHMGVKIAKAFGLHVTVISSSDRKKEEALEVLHADAYLVSKDAEKMMEAAESLDYILDTIPVSHPLEPYLALLKTNGK

SEQ ID NO: 467 - protein, 119 aa, Lepidium sativum
PGSFNKILITYETGTYNGQWSAVGRTAVTTTLAGCTAALTTLFGKRLLSGHWNVTDVCNGLLGGFAAITGGCSVVEPWAAIICGFVGALVLLGCNKLAEKLKYDDPLEAAQLHGGCGAW

SEQ ID NO: 468 - protein, 246 aa, Larix gmelinii
YTYTLRNKGPEDVIVRVIYCGICHSDLVQMRNEMGMSHYPMVPGHEVVGIVTEVGSEVKKFKVGEHVGVGCIVGSCRSCGNCNQSMEQYCSKRIWTYNDVNHDGTPTQGGFASTMVVDQLFVVRIPENLPLEQAAPLLCAGVTVFSPMKHFGMTEPGKKCGILGLGGVGHMGVKIAKAFGLHVTVISSSDRKKEEALEVLHADAYLVSKDAEKMMEAAESLDYILDTIPVSHPLEPYLALLKTNGK

SEQ ID NO: 469 - protein, 384 aa, Xanthomonas campestris pv. campestris str. ATCC 33913
MNDTVIPGFKPKKSVALSGTAAGNTALCTVGRSGNDLHYRGYDILDLATSSEFEEIAYLLVHGKLPNSGELRGYKAKLRSLRGVPAAVKTALEQLPPSAHPMDVMRTGVSVLGCLQPEKDDHNHPGARDIADKLMASLGSMLLYWYHYSHNGKRIEVETDDDSIGGHFLHLLHGFAPKESWVRAMHTSLILYAEHEFNASTFASRVIAGTGSDMYSAIAGGIGALRGPKHGGANEVAFEVQKRYDTPDEAEADIKARVERKEVVIGFGHPVYTVSDPRNKVIKDVARELSDEQGSRKMYDIAERLETVMWDIKKMFPNLDWFSAVSYHMMGVPTAMFTPLFVLARTAGWSAHIIEQRVDGKIIRPSANYTGPEDQAFVPLDQRA

SEQ ID NO: 470 - protein, 287 aa, Triticum aestivum
MDGSIMGMGGNKVNYGGLYNIQGWGAPYFTVNMEGNLCVKADGQETKAGQEMDVLHVIQAAKQKRKDIQFPMILRFPNVLKHRLDALHAAFHTAISRARYTNTYQGVFPVKVNQNRAIVHDLVCFGHAYSYGLEAGSKPELLIAMSCLTKEANSRAFLVCNGYKDAEYVRLALSARAIGLNAIMVLDMEEELDIIIHQSSKLGVEPVIGVRAKLLTKIPGHYGSTAGKHGKFGLPADRIYEVAKKLKGLNKLHWLKLLHFHVGSMIPTTELVAKAATEAADIYCTLV

SEQ ID NO: 471 - protein, 119 aa, Capsella bursa-pastoris
PGSFNKILVPYETGTYNGQWSAVGRTAVTTTLAGCTAALTTLFGKRLLSGHWNVTDVCNGLLGGFAAITGGCSVVEPWAAIICGFVAALVLLGCNKLAEKLRYDDPLEAAQLHGGCGAW

SEQ ID NO: 472 - protein, 1341 aa, Gibberella zeae PH-1
MTESSPRAVRFQGSEDDGRPDKVRGHRLETPIESNGDPHATERHDELGNLIGYGATGHTGSLTSLAPGTVINGVSKAQRGPNTGDDGTAYTPNGSWPQRPLGPARTPSNTYNPATSRKPAHPPATPSFTESIRSSSKTRPRNESRFRAQERAYVQKLRQDYSGGYFTSYSNLNGNDSDSEGETPSSEGPYDDRFDQETIMFYGNDTLQPTDEDLKDPENRERLEWHGMLEAVLTGDVVRQEKKRLIGSADQQAGKSAHKTELWLGIRSKVCGRHIPVQRRMLEESRSTLDRTLDEIINFQIKGESEAGKPPYEQVKDMVAKIQMCENLYPSWAALATEHKAADSATFKESHDAIISWYNTNEMINTELNILKKWVGNEELDFTRTKQRSPAVNGINNDETSFLDRLMKEDGLQSLYNDDNGNLEKGMLAPISTVISKAKDTLIRNSEAFRKRHLPPYLEELLTLISFPSRLIEEITRLRLAYARRVKESAQQNPLMQDQMISQFQLLLKFAIRIKIECTSIANPEPGWDLPPCIDESFDQVVLEALKYYFKMLNWKLSGNKNTFKEAELLFQEWDFANEIGSHLQRGHIEVAEQFSSLTFKALHRLSQTFEKELQAKPKETATEMSKRYKACLDSVRVRQRMLQRFTRMLNDNYEHASDYSISFPPETMQKFYDQLVASGHFQVDTRLLEQDNIYVIASPELRERLEDIQAMMAITSKDQFPDELGEQYLLILRPEDPLNWFGETIEVPLRDLNIDLKRGHIRLCASSPQTLHNARRAFIENVDMHVDLVQEARSNIQKVNSRLTEIRRVAYKLSNNFMDSVEIIRKQARGKDCQELIQTCFVFATEFGQRSLLYMDSNRRQMNNLKLTKLALDWVSFICDDCVASDRKTFRWAVLALELAMGMTRGRHILALGEGEYAKLRSKVAGCMSLLISHFDVMGARSNLAAQAEKERIEALVGQFRKLDKNRMMNDEEASRCVTEQRMSELERVDEYRCEKIAERQGVGRVLEGNNEVDRSLAYLSSSATNVTMRWQQGQFVGGGTFGNVYAAMNLDTGHLMAVKEIRLQDPKLIPQVAEQIREEMGVLEVLDHPNVVSYYGIEVHRDRVYIFMEFCSGGSLANLLEHGRIEDEQVIMVYALQLLEGLVYLHESGIAHRDIKPENILLDHNGIIKYVDFGAAKWIARQGRTLAGDVQPSLPNRSMTGTPMYMSPEVIKGENPGKPGAVDIWSLGCVILEMATGRRPWAQLDNEWAIMYNIAQGNPPQLPPSDQLSPQGLDFLKRCFTRDPRNRSSAVELLQHDWITSIRSQVVEPATPSDTSSSAQSTPTVGSISSKLGGSDGFY

SEQ ID NO: 473 - protein, 235 aa, Mesorhizobium sp. BNC1
MTDAKTLKIEAARVALGYVEDGMKLGIGTGSTAEEFVRLLATRVSSGMKIVGVPTSERTAALCRELSVPLSTLDETPELDLTVDGADEVGPDLTLIKGGGGALLREKIVAAASRRMIVIADESKVVDVLGTFPLPIEVNPFGLRATRIAIEAAAARLGLAGEMRTRMAGQEPFVTDGGHFIIDASFGRIQAPRALAEALNAIPGVVEHGLFIGLAGAAIIAGRNGVRTLDAGSRI

SEQ ID NO: 474 - protein, 325 aa, Zea mays
GRAEIPKAQTKSKRKRGQSRKGGGTRHRQPLLTGPHSHTNQPTSSACRFSCCGRSQLQVLEEDIRFHYCACGGSEEPVAEASIFGGRNKFPAWLGGPRRTDGMHRLLPGVLQRFSTAAAVEEPITPSVHVNYTKLLINGNFVDSASGKTFPTLDPRTGEVIAHVAEGDAEDINRAVAAARKAFDEGPWPKMTAYEKSRILLRFADLIEKHNDELAALETWDNGKPYEQAAQIEVPMVARLMRYYAGWADKIHGLIVPADGPHHVQILHEPIGVAGQIIPWNFPLLMFAWKVGPALACGNTLVLKTAEQTPLSALYISKLLHEAGL

SEQ ID NO: 475 - protein, 255 aa, Zea mays
  misc_feature (13)..(13): Xaa can be any naturally occurring amino acid
  misc_feature (15)..(15): Xaa can be any naturally occurring amino acid
  misc_feature (23)..(23): Xaa can be any naturally occurring amino acid
GRARHPVPAARIXRXWKHMWILXKIALAVPVLVFRSFDLVLQDLIDRTFEITLHSGAKTLNSFHLKQLKQCVKRYSSFDFLTEVVSKVPDLGGADSCGDERGLPRRRKSNGSDPENDESRSSKMAIRNANISPRGRGRGRGRGRGRPPTKRKEVGYVQFEDESSMFAEQGEPLPGEETVQEINGNETMPQSTQPPVEAPPTALAQATTSSKAEEANSDHQSDWPMPDAIGSIGVVPSGFGHLTVQVEDEDYDNED

SEQ ID NO: 476 - protein, 127 aa, Neurospora crassa
MIQLKTMLNCIDNSGAALVECAMVVGQKRHASIVVVVQKQRGADSAGMAASSAATKVKRGDIRHAVVVRTKQKVQRRDGSVVRFDDNACVLINKAGDPIGSRINGVVGQELRKKKWSKILSMAPMQA

SEQ ID NO: 477 - protein, 494 aa, Bacillus cereus ATCC 14579
MLKTNIELKPKVEAFLNEEIKMFINGEFVAAIGGKTFETYNPATEDVLAVVCEAQEEDIDAAVKAARSAFESGPWAEMTTAERAHLIYKLADLIEEHREELAQLEALDNGKPYQVALDDDISATVENYRYYAGWATKIIGQTIPISKDYLNYTRHEPVGVVGQIIPWNFPLVMSSWKMGAALATGCTIVLKPAEQTPLSLLYTAKLFKEAGFPNGVVNFVPGFGPEAGAAIVNHHDIDKVAFTGSTVTGKYIMRQSAEMIKHVTLELGGKSPNIILEDADLEEAINGAFQGIMYNHGQNCSAGSRVFVHRKHYETVVDALVKMANNVKLGAGMEKGTEMGPLVSKKQQERVLHYIEQGKKEGATVAAGGERALEKGYFVKPTVFTDVTDDMTIVKEEIFGPVVVVLPFDSTEEVIERANNSSYGLAAGVWTQNIKTGHQVANKLKAGTVWINDYNLENAAAPFGGYKQSGIGRELGSYALDNYTEVKSVWVNIK

SEQ ID NO: 478 - protein, 201 aa, Triticum aestivum
MSIAPESEFVIPNQSTINLGVQLKEKDDLQLVEIPVPKPEKDHVQVQLKCVGICGSDIHLWKYGEIGIFPVTQPQLLGHEGAGIVTAVGENVTSLRVGDRVAIEAGIPCSFCDQCMSGRYHLCPDVIFKSTPPYDGILAKYITHPARWLHKIPASISFEEGALLEPLSVAIAAVDRVRAKFGKSLLITGCGPVGLLILAGA

SEQ ID NO: 479 - protein, 488 aa, Agrobacterium tumefaciens
MKNSVQLITYVDRLSGGGFPELRALLDGRLQGLFGGVHALPFFNPIDGADAGFDPTDHTIVDPRLGSWDDVRTLAGSVEIMADLIVNHVSAQSSWFQDFIAKGPDSEFADMFMTFGKVFPRGASEQDLLNIYRPRPGLPFSKATLGDGSQRMLWTTFTPQQIDIDVHSAHGALYLETILDRFAEANVTAIRLDAAGYAIKKAGTSCFMIDETYAFLAKLAEKARDRGMEVLVEIHSYYRDQIEIARKVDRVYDFALPPLILHSLFTGDATALARWLEISPRNAITVLDTHDGIGVIDVGAHGHGRAGLLEPQAIDHLVEEIHRRSEGQSRLATGAAASNLDLYQVNCTYYDALGRSDNDYLIARAIQFFAPGIPQVYYVGLLGGLNDMELLRKTGVGRDINRRFFEDREIDLALESPLVKRLSDLIRFRNTHPAFNGSFEVATDDTGSLVLSWNFDAEFARLVVSFSQGKATITASGCYDFTFSGDVA

SEQ ID NO: 480 - protein, 300 aa, Zea mays
  misc_feature (138)..(138): Xaa can be any naturally occurring amino acid
SARVSLDDGSLYVDVSGGALWEDVLKRCVSEFRLAPRSWTDYLGLTVGGTLSNAGVSGQAFRYGPQTANVTELEVVSGKGETLVCSESQNSELFFATLGGLGQFGIITRARVPVQQAPDMVRWIRVVYTEFGDFTRDXEWLVTLREGDGFDYVEGFVFVNSDDPCNGWTTVPVGPNQYFDPVRIPSTAGPVLYCLELALHYRNQDHPSAVDMEVDRLLGRLRFVEGLKFSVDVTYMEFLLRVKRVEEDAKANGIWDAPHPWLNMFVSKSNIAEFDREVFKKILKHGVGGPILVYPLLRSK

SEQ ID NO: 481 - protein, 175 aa, Triticum aestivum
MAPAVMASSATTVAPFQGLKSTAGLPVSRRSGSAGLSSVSNGGRIRCMQVWPIEGIKKFETLSYLPPLSTEALLKQVDYLIRSKWVPCLEFSKVGFVFREHNSSPGYYDGRYWTMWKLPMFGCTDATQVLNEVEEVKKEYPDAYVRVIGFDNMRQVQCVSFIAFRPPGCEESGKA

SEQ ID NO: 482 - protein, 158 aa, Staphylococcus epidermidis ATCC 12228
MSIYDIAVENYDGSTYLLKRYKGKVLIIVNTATNCTLNDQFNKLEMLYKKYHKYGLEILSFPCNDFNNQEPELIKDIYRVYKYKFGITFPIHAKINVNGEHEHPLYTLLKCKQPGLFGSQIKWNFTKFVVDQQGNIVKRFLPCDNPNQMEKLIRQLLK

SEQ ID NO: 483 - protein, 395 aa, Corynebacterium efficiens YS-314
MNPMTPSTPGNPLQLNREEIFAAHEGGKLSITSARPLADMHDLSLAYTPGVATVCEAIAADPAVARTHTGRGRTVAIISDGTAVLGLGDIGPEAALPVMEGKAQLFSSFAGLNAIPIVLDVHGVDELVDTIAAMAPSFGAINLEDISAPRCFEVERQLIERLDIPVMHDDQHGTAVVILAALRNALRLLDRQIGEARIVVSGAGAAGVAAVEMLRGAGARDVVVLDSRGIIHAGREDLNPVKQALAATTNPRGVTGGMAEALTGADVYIGVSGGHVAEEALQLMADQPILFSLANPSPEIDPELAGRYGAIVATGRSDLPNQINNVLAFPGIFHGALAARARSITPGMKLAASQAIADIAAETLDVGHVVPSPLDPRVAPAVSAAVQAAAEAEGA

SEQ ID NO: 484 - protein, 363 aa, Hypocrea jecorina
MATQTINKDAISNLSFVLNKPGDVTFEERPKPTITDPNDVLVAVNYTGICGSDVHYWVHGAIGHFVVKDPMVLGHESAGTVVEVGPAVKSLKPGDRVALEPGYPCRRCSFCRAGKYNLCPDMVFAATPPYHGTLTGLWAAPADFCYKLPDGVSLQEGALIEPLAVAVHIVKQARVQPGQSVVVMGAGPVGLLCAAVAKAYGASTIVSVDIVQSKLDFARGFCSTHTYVSQRISAEDNAKAIKELAGLPGGADVVIDASGAEPSIQTSIHVVRMGGTYVQGGMGKSDITFPIMAMCLKEVTVRGSFRYGAGDYELAVELVRTGRVDVKKLITGTVSFKQAEEAFQKVKSGEAIKILIAGPNEKV

SEQ ID NO: 485 - protein, 473 aa, Bacillus megaterium
GAMTIKEMPQPKTFGELKNLPLLNTDKPVQALMKIADELGEIFKFEAPGRVTRYLSSQRLIKEACDESRFDKNLSQALKFVRDFAGDGLFTSWTHEKNWKKAHNILLPSFSQQAMKGYHAMMVDIAVQLVQKWERLNADEHIEVPEDMTRLTLDTIGLCGFNYRFNSFYRDQPHPFITSMVRALDEAMNKLQRANPDDPAYDENKRQFQEDIKVMNDLVDKIIADRKASGEQSDDLLTHMLNGKDPETGEPLDDENIRYQIITFLIAGHETTSGLLSFALYFLVKNPHVLQKAAEEAARVLVDPVPSYKQVKQLKYVGMVLNEALRLWPTAPAFSLYAKEDTVLGGEYPLEKGDELMVLIPQLHRDKTIWGDDVEEFRPERFENPSAIPQHAFKPFGNGQRACIGQQFALHEATLVLGMMLKHFDFEDHTNYELDIKETLTLKPEGFVVKAKSKKIPLGGIPSPSTEQSAKKV

SEQ ID NO: 486 - protein, 304 aa, Shewanella oneidensis MR-1
MSERYLENGIRQLVSEFIAAGCPSVREQSLEERRQGYIASTVLAGEPEAVFEVKSVSLEGIELTLFKPSADNNLPVVIYYHGGCFVSGGIATHNQQLRKIANDSGALVVAVSYRLAPEHVYPAAHDDAFNAANLVQQHCHQWGGDNTNITLMGDSAGGHLALVTCLRLKAKGEWLPKKQVLIYPMLDATAKSQSYIDNGDKYIITRDTLLTGFDMYLDWHPRTDVEASPLRSHDLAGLPETHIITAEFDPLLDEGEQLFRHLLAAGVDAHCRRYLGVIHGFFQLAGVSQSARDAMAQVTHIIRA

SEQ ID NO: 487 - protein, 192 aa, Blumeria graminis
MAEIRRKLVIVGDGACGKTCLLIVFSKGTFPEVYVPTVFENYVADVEVDGKHVELALWDTAGQEDYDRLRPLSYPDSHVILICFAVDSPDSLDNVQEKWISEVLHFCCGLPIILVGCKKDLRHEQKTLEELHKTSQKPVTPEQGEEVRKKIGAYKYLECSAKTNEGVREVFEHATRAALLTKKKKEKRCIIL

SEQ ID NO: 488 - protein, 246 aa, Larix gmelinii
YTYTLRNKGPEDVIVRVIYCGICHSDLVQMRNEMGMSHYPMVPGHEVVGIVTEVGSEVKKFKVGEHVGVGCIVGSCRSCGNCNQSMEQYCSKRIWTYNDVNHDGTPTQGGFASTMVVDQMFVVRIPENLPLEQAAPLLCAGVTVFSPMKHFGMTEPGKKCGILGLGGVGHMGVKIAKAFGLHVTVISSSDRKKEEALEVLHADAYLVSKDAEKMMEAAESLDYILDTIPVSHPLEPYLALLKTNGK

SEQ ID NO: 489 - protein, 207 aa, Triticum aestivum
  misc_feature (22)..(23): Xaa can be any naturally occurring amino acid
LKLFEVMASKSKIYFVLEYAKXXAKLFNKITKGKLSEDAARKYFHQLISAVDYCHSRGVYHRDLKPENLLLDENENLKVSDFGLSALAESTRQDGLLHTTCGTPAYVAPEVLSRRGYDGAKADIWSCGVILFVLVAGFLPFHDTNLIEMYRKISRAEYRCPRPFSVELRDLLYKILDPDPSTRASVSRIKRSAWYRKPGRCKWTGDL

SEQ ID NO: 490 - protein, 321 aa, Bartonella grahamii
TYIDGDKGILLYRGYPIDQLAEKGDFLESCYLLLYGELPTQQEKNEFDRCIMQHTMVHEQFARFFHGFRRDSHPMAVMVACLGAMSAFYHDSIDITDPHQRMIASVRLISKVPTLAAMAYKYSIGQAFVYPRNDLSYAANFLRMCFAVPCEEYKTNPVLARAMDQIFILHADHEQNASTSTVRLAGSSGANPFACIAAGVACLWGPAHGGANEACLKMLQEIGSIERIPEFIARAKDKNDPFRLMGFGHRVYKNYDPRAKIMQKTCHEVLKELNIQDDPLLDIAIELEKIALSDEYFIEKKLYPNVDFYSGITLKALGFPT

SEQ ID NO: 491 - protein, 194 aa, Bartonella sp. Mf49
DGNEGILLYRGYPIDQLAEKGDFLESCYLLLYGELPTKQEKNDFDRCIMQHTMVHEQFARFFHGFRRDSHPMAVMVACLGAMSAFYHDSIDITDPQQRMIASVRLISKVPTLAAMAYKYSIGQAFVYPRNDLSYAANFLRMCFSVPCEEYKNNPVLTRAMDRIFILHADHEQNASTSTVRLAGSSGANPFACIA

SEQ ID NO: 492 - protein, 307 aa, Bartonella sp. 16/40
YIDGDKGILLYRGYPIDQLAKKGDFLESCYLLLYGELPTKQEKNDFDRCIMQHTMVHEQFARFFHGFRRDSHPMAVMVACLGAMSAFYHDSIDITDPQQRMIASVRLISKVPTLAAMAYKYSIGQAFVYPHNDLSYTENFLRMCFCVPCEEYKINPVLARAMDRIFILHADHEQNASTSTVRLAGSSGANPFACIAAGVACLWGPAHGGANEACLKMLQEIGSVEQIPKFIARAKDKNDPFRLMGFGHRVYKNYDPRAKIMQQTCHEVLKELNIQDDPLLDIAIELEKIALNDEYFVEKKLYPNVDF

SEQ ID NO: 493 - protein, 318 aa, Ralstonia eutropha JMP134
MPLDPQARAMLDAMAAMPSPDFTTLRAADYRAAVAAMPAFAPGDSVAAQQDLTIDGAAGPLPARLYRPDDSAGPPLIVYFHGGGFVLCGLDSHDNICRSLARRSGALVLSVDYRLAPEARFPAAADDAVAAVRWAAGHAAELGVDPARLAVAGDSAGGNLAAVVCQQLRGSGIALKHQLLLYPYLDCTDAAADSASYRACAEGYFLSARELDWCRAQYLANPDAAADVRASPLHQRDLQGLPAATIITAEFDPLRDQGEAYGEALRGAGGAATVRRWPGQFHGFMSMQGVLDAASHALDAAAASLRQAFAASGTQEAA

SEQ ID NO: 494 - protein, 449 aa, Xanthomonas axonopodis pv. citri str. 306
MSRTVIVNARLVNEGKEFDADLLIEGGRIAKIDSKIVPAPGDTVVDAAGRWVLPGMIDDQVHFREPGLTHKGDIATESGAAVAGGLTSFMDMPNTNPPTLDAAALQAKYDAAAGRAWANYGFYMGASNDNLAHIQSLDPKTAPGIKVFMGASTGNMLVDNPETLDAIFRDAPTPIITHCEDTPTIDATMAQYKEKYGDALTPEMHPDIRSRQACLKSSQLAVSLARKHNTRLHVLHISTADELSLFEAGPLVDADGKLRKRITAETCIHFLRFDRSDYARLGNLIKCNPAIKDAEDRLALIDALAEDVIDVLATDHAPHTWEEKQKPYAQAPSGLPLVQYALVAALELVHEGKLPITRIVQKFAHAPAQLFDVEERGFLREGYFADLVMIDNTPFTVKREQVLSKCGWSPFEGTTFRSRIAATWVNGQQVWDGEQLVGSAAGQRLTFDR

SEQ ID NO: 495 - protein, 173 aa, Zea mays
PNVDPELALALRLSMEEERARQEAIAKKAAEDTSNTENINASSSNSDSVMAEAELASNAAAGDKQEQPKDDDDLLQQALAMSMEGGASGSAAVTDSAMAEAALQMSVQDANMSSDTDMSKVFEDRTFVSSILNSLPGVDPNDPSVKDLLASLHSQGEQEKKEDKSDKTEDEKN

SEQ ID NO: 496 - protein, 187 aa, Zea mays
  misc_feature (30)..(30): Xaa can be any naturally occurring amino acid
  misc_feature (33)..(34): Xaa can be any naturally occurring amino acid
MIEFSVVLLFGYWEICLVAVVYCRPAVGHXRVXXDFFRMVVESRYQRVAEGRSRLARLILVQALHLVAGGLLLLLSLSKGAAVNKFAVLSMAAGFLAIVVGELGRMRTMSVLLRLYTSLSSIAVAFSVTCIIRSELFLKVMKQNTEAITSYEMLDAVRVALGILLQMVVIATTTRLLQNMSPPKRAS

SEQ ID NO: 497 - protein, 294 aa, Saccharomyces cerevisiae
TTPLVHVASVEKGRSYEDFQKVYNAIALKLREDDEYDNYIGYGPVLVRLAWHTSGTWDKHDNTGGSYGGTYRFKKEFNDPSNAGLQNGFKFLEPIHKEFPWISSGDLFSLGGVTAVQEMQGPKIPWRAGRVDTPEDTTPDNGRLPDADKDADYVRTFFQRLNMNDREVVALMGAHALGKTHLKNSGYEGPWGAANNCFTNEFYLNLLNEDWKLEKNDANNEQWDSKSGYMMLPTDYSLIQDPKYLSIVKEYANDQDKFFKDFSKAFEKLLENGITFPKDAPSPFIFKTLEEQGL

SEQ ID NO: 498 - protein, 496 aa, Oryza sativa (japonica cultivar-group)
MHNIRQYQLPLQKYMAMMDLQEGNERLFYKLLIDNVEELLPVVYTPTVGEACQKYGSIFSRPQGLYISLKEKGKILEVLKNWPERSIQVIVVTDGERILGLGDLGCQGMGIPVGKLALYTALGGVRPSACLPITLDVGTNNEALLNDEFYIGLRQKRATAQEYADFLHEFMTAVKQNYGEKVLIQFEDFANHNAFELLAKYGTTHLVFNDDIQGTASVVLSGLVAALKLVGGSLSEHSYLFLGAGEAGTGIAELIALEISRQTKAPIEECRKKIWLVDSKGLIVSSRKETLQHFKKPWAHEHEPVGNLLDAVKTIKPTVLIGTSGKGQTFTQEVVEAISSFNERPVIFALSNPTSQSECTAEQAYTWSKGRAVFASGSPFDPVEYDGKIYVPGQANNAYIFPGFGLGVVMSGAIRVHDDMLLAASEALAQQVTQENFDKGLTYPPFSNIRKISAHIAANVAAKAYELGLASRRPRPKDLVKYAESCMYSPLYRNYR

SEQ ID NO: 499 - protein, 388 aa, Oryza sativa (japonica cultivar-group)
MGIPVGKLALYTALGGVRPSACLPITLDVGTNNEALLNDEFYIGLRQKRATAQEYADFLHEFMTAVKQNYGEKVLIQFEDFANHNAFELLAKYGTTHLVFNDDIQGTASVVLSGLVAALKLVGGSLSEHSYLFLGAGEAGTGIAELIALEISRQTKAPIEECRKKIWLVDSKGLIVSSRKETLQHFKKPWAHEHEPVGNLLDAVKTIKPTVLIGTSGKGQTFTQEVVEAISSFNERPVIFALSNPTSQSECTAEQAYTWSKGRAVFASGSPFDPVEYDGKIYVPGQANNAYIFPGFGLGVVMSGAIRVHDDMLLAASEALAQQVTQENFDKGLTYPPFSNIRKISAHIAANVAAKAYELGLASRRPRPKDLVKYAESCMYSPLYRNYR

SEQ ID NO: 500 - protein, 424 aa, Leptospira interrogans serovar Copenhageni str. Fiocruz L1-130
MIKKISGRIVTHEKDFLGTVEWDSKTGLILTVLEQKESIPILNSQHQENEIQFNSLETVIFPGFGDIHIHAREDESGKHTYKEDFVSASAAAVNGGVIHVADMPNNPIPPIDENSYSKKRKLADRSNIHITLYAGIGPDTKPLKKSVPYKVFMGPSIGELFFHNNQTLEDTISSYVGENVSFHCEDPEILEKHQNETFHEDRRPAEAETTATDFALYLIEKYNLRGKLCHYSTGEGLNKIKFAKQKGVKVTCEVTPTHLFFDRSMLTPENRHWFQMNPPLRSKEDRERMLEGVKQGWIDYLATDHAPHSIEEKRKGTSGISQLDTYSLFVTWLVLKAGVELKTVARICAKNPGDFVNEYLPEKFGKGFGRIEPGYSANFTVLNLKKPKKFLKEEIKSKSGWSPFENFEFPGSIEAVFFLGKQMK

SEQ ID NO: 501 - protein, 165 aa, Zea mays
MDGRMFGLETPLMVALQHLLDVPDGDAGAGGDKASGAAAGGGPTRTYVRDARAMAATPADVKELPGAYAFVVDMPGLGTGDIRVQVEDERVLVISGERRREEREDAKYLRMERRMGKFMRKFVLPDNADMDKISAVCRDGVLTVTVEKLPPPEPKKPKTIEVKVA

SEQ ID NO: 502 - protein, 185 aa, Thermobifida fusca
MFSLARHRRSTAGTAAAVLLALTATGCGVLIGPSNGEVSDDITVTSPMLREGEKIPDRYTCAGEGMSPPLRWSGLPAETESLALVVDTVYESGGAAVHWVVYGLDPDNPELPEGTVPIPAQQGMNSFDTASYQPLCPEKGNEHEFRFTVYALSERVELGEAAPLDVALGAIATRTLARGRLTSVP

SEQ ID NO: 503 - protein, 123 aa, halophilic eubacterium NRCC 41227
MALTQEDIINAVAEMSVMEVAELVSAMEEKFGVSAAAAVVAGPGGGEAEEAEEQTEFDLVLTSAGEKKVNVIKVVREITGLGLKEAKAAVDGAPATLKEGMSKEDGDEAKTKLEEAGASVELK

SEQ ID NO: 504 - protein, 481 aa, Brucella suis 1330
MPAIGFIIDGKESGGASGKTFERKDPITGKVATVAAAASLADVDTVAEAAAKAFESWSETGPNARRALLNKAADLMDSRTAEFTRLMLEETGATAPWAGFNVHLGANILREAAALTTQITGEIIPSDKPGIMSMAVRQPVGVVLGMAPWNAPVILGVRAVAAALACGNTVILRSSETCPGVHHLIIKILNDAGFPAGVANVISNAPDDAPEIVAALIAHPAIRRINFTGSTQVGRIIARRAAGHLKPVLLELGGKAPFIVLEDADLDQAVDAAAFGAFMNQGQICMSTERFIVHEKVADAFAEKLAAKARSLPAGDPRGNVVLGSLVDLKSAQRMDALIADAVAKGGRVLAGGKRDGAVVEATIIDGVTPQMDIYTQESFGPVKPIIRVKSAEEAIRVANDTEYGLSSAIFSQNVKRALALSRKLETGICHINGPTVADEAQVPFGGVKSSDYGRFGGKAAINEFTELRWITIEGPQHYPF

SEQ ID NO: 505 - protein, 485 aa, Neurospora crassa
MGLRPPKIRDSGLFGIKFIKTNVKMAAEHKNLQFWQQMFRSIGGYTGEVRLVGHRIIFTSEPENMKAILATQFEDYGKGEGFHQEWKDFLGDSIFTTDGDLWHASRQLIRPQFIKNRVSDLQCFENHMQMLFRTIANGGALNGEDQMVDMEAGNGKPVDISDLFFRYTLDAATDFLLGKDIKSLSTPVQPFADAFQEVQRVQIVIARAGPLNRFVPKKTFWEGLKVIDETINFYIDRALRLDEEELASKSKGDEGYTFLHALAGFTKNRQVLHDQLMAVLLAGRDTTACTLSWAIYELARHPEAVAKLRAEILSVVGPDRAPTYDDLKSMKYLQNVMNETLRLVRMALKDTTLPRGGGPDGSQPIVILKDTPVGYSPLAMQRRPDLYPPVSEKFPDVEMFSPDRWFHWQPKPWQYIPFNGGPRICIGQQFALTEMGYVLTRLFQRYDRVVSYMDEIDGGKPRMKTDIVLMPGDGVKVAFFEAKRE

SEQ ID NO: 506 - protein, 190 aa, Triticum aestivum
  misc_feature (72)..(72): Xaa can be any naturally occurring amino acid
MAPTVMASSATSVAPFQGLKSTAGLPVSRRSSSAGLSSVSNGGRIRCMQVWPIEGIKKFETLSYLPPLSTEXLLKQVDYLIRSKWVPCLEFSKVGFVFREHNSSPGYYDGRYWTMWKLPMFGCTDATQVLNEVEEVKKEYPDAYVRVIGFDNLRQVQCVSFIAFRPPGCEESGQGLNYELKQWPMYEGLL

SEQ ID NO: 507 - protein, 433 aa, Thermobifida fusca
MTRTLWHNWADTCRITPTRIATPTSTAEVVAEVRAAAAAGSRIRMVGSGHSFTDIAATDGTLLSPAALASVRSVDLAAGRATVEAGMRLCDLNETLAAHGAALTNMGDIAVQTLAGATQTGTHGTGRASASLAAQIQQLELVLADGSVVTCSRDEDPDLFDAARAGLGAFGVVTAITMAVEPAFLLHARETPMPLGEVLERLEELRTTNDHFEFFWFPHTERTITKRNNRVPGPARPLSAFRAWLDDEFLSNSVFEVVNRMARRLPRLIPAINQISARALTAREYVDVSYRVFTSPRRVKFVEMEYAIPVEHLPDVLHDMRAVFASSRHRISFPVEVRFAPADDVWLSPGYGRESAYVAVHVYQGCPWQEYFADLEAIFTAAAGRPHWGKMHTRTLSYLDKVYPRLRDALEVRERVDPHRRFTNAYLDRVWGE

SEQ ID NO: 508 - protein, 228 aa, Weissella paramesenteroides
MLKATGISRENLFVTTKIQVEFKDYQTAKKSIDESLQRLNLNYLDLLLIHSPEPWVEFHNKENHYFEENIEVWRAMEEAVNNGKVRSIGVSNFKKADLNNILEHSTIKPVVNQLLIHIGNTDFGLLEQAQQNNVLVEAYSPVAHGEILQNPEIKQMADKYQISIPQLAIRYCLELGTLPLPKSQTLSHVANNADVDFEISKQDLEELKKLPQINSYGDSSSFPVFSGK

SEQ ID NO: 509 - protein, 732 aa, Zea mays
MDLASFITSVLTSFLIFVALVLLFTWLSRRPGNAPVYYPNLLLRGLDPWAGRGRGTRSPVGWLRDAISASEPDVVAAGGVDAAVYLVFLSSVLSILVYSGIVLLPVLLPVAATGGALSTIPIPTNKSAQSAQNFSSIERLGMGNVAEKSMRLWAFLLSVYWVSFVTYFVLWKSYKHVSNLRATARSAPDVKPEEFAVLVRDIPRPSPDETIKDSVDSYFRALHPNTFYRSMVVTDHTKADKIYQEIEGHKQKIARAEVVYANSKTESNTEGTRPTHRTGFLGLIGTKVDTIEYCSEQIKELLPKLEAEQKTTLHEKQQRAAIVVFNSRSAAAFASQTLHAQVYDKWTVMEAPEPRQIIWSNLPRKLYDRQIRQCVVYCIVFLIVVFYIVPLTAIAAVTTLENLEAKLPFLKPVVEQPAIKTVLEAYLPQIALIVFLALLPTLLMFLSKQEGIPSQGHAVRAASGKYFYFIVFNVFLCYTLGSTLFKSLTTIINHPAEIVNMLAKSLPGSATFFLTFVALKFLVGYGLELSRLVPLIIFHLKRKYLCKTEEEVRAAWAPVDLGYNTRVPNDMLIATVVLCYSVIAPLIIPFGVAYFALGWLIARNQILRVYVPSYESYGRMWPHMHTRIIAALMVYQTTMIGFISLKKFAYASVLVPLLPASIIFAYVCHMRFYPAFAKTPLEVVVRHDLKETPNMEAIYTAYIPPCLKPDKLEDLDAFEDAQSRATSRVPSI

SEQ ID NO: 510 - protein, 152 aa, Pennisetum glaucum
MSLVSRSSVFDPFSMDLWDPFDSMFRSIVQSAGSPDSDTAAFAAARIDWKETPEAHVFKADLPGVKKEEVKVEVEDGNVLVISGQRSKEKEDKNDRWHRVERSSGQFMRRFRLPGNAKVDQVKAGLENGVLTVTVPKAEEKKPEVKAIEISG

SEQ ID NO: 511 - protein, 279 aa, Saccharomyces cerevisiae
MSIVSLLGIKVLNNPAKFTDPYEFEITFECLESLKHDLEWKLTYVGSSRSLDHDQELDSILVGPVPVGVNKFVFSADPPSAELIPASELVSVTVILLSCSYDGREFVRVGYYVNNEYDEEELRENPPAKVQVDHIVRNILAEKPRVTRFNIVWDNENEGDLYPPEQPGVDDEEEEDDEEEDDDEDDEDDEDDDQEDGEGEAEEAAEEEEEEEEKTEDNETNLEEEEEDIENSDGDEEEGEEEVGSVDKNEDGNDKKRRKIEGGSTDIESTPKDAARSTN

SEQ ID NO: 512 - protein, 285 aa, Xylella fastidiosa Temecula1
MTTNDTWFTEHFQTTGSAIGFRVTGKLDEVQSPFQKIEIYNSTDWGKLMVIDGALMLTSRDNFLYHEMISHPALFTHTAPKCVVIIGGGDCGTLREVLKHPDIEQVTQCDIDEQVTRMAEKHFPELCTSNNDPRATLLFSDGVAYMADCPTNSVDVIIVDSTDPVGPAKGLFNRTFYESCFRALKNDGLLIQQSESPLALLELIKEMRHEMSKAGFKAFKTLPFPQPCYPTGWWSVTLSSKQPNANFAFRQTDAQTKPFDTLYYNAHLHHGVLVPPPFIAHALGE

SEQ ID NO: 513 - protein, 432 aa, Picrophilus torridus DSM 9790
MSFDVSWLNTGNNAWMLTAATLVGLQSIPGLALYYAGMTKRKYMVNAMMMALYAFSAVLVVWVIAGYSFGFGTVPLLKIDGYYIFSMPVPVGSASFIAGQAIVGPERIALSIPNSTVIFFQFVFAAITPVLLMGGILERMNFKAWMVFVPVWSFLVYSPVAYWLFAGGWLNQLGAVDFSGGYVIHLDAGVGALAAALAIGPRIKEDMNLKANNLGLVMLGLGLIWLGWDGFNGGDPYGSGIDAAIAIINTNVATAVSMITWMLMDMKFFKKASLIGASVGAIAGLVGITPAAGYVNIYGAMVIGIATGIIPWIALYKIEPHFKIDDALGVFSSHAVAGIVGGILTGVLADPFITQYIDPGLRGAIYGDFYQLGIQALAAAVVFAYTFAMTIAILKIIGLFIPLREKEENLKLGDLAIHGEIGFEDSYQAVRK

SEQ ID NO: 514 - protein, 246 aa, Tsuga canadensis
YTYNLRNKGPEDVIVRVIYCGICHSDLIQMRNEMGMSHYPMVPGHEVVGIVTELGSEVKKFKVGEHVGVGCIVGSCRKCGNCNESMEQYCSKRIWTYNDVNHDGTPTQGGFASSMVVDQMFVVRIPENLPLEQAAPLLCAGVTVYSPMKHFGMTEAGKRCGILGLGGVGHMGVKIAKAFGLHVTVISSSDKKKEEALEVLHADAYLVSKDAEKMQEAAESLDYILDTIPVAHPLEPYLSLLKTNGK

SEQ ID NO: 515 - protein, 307 aa, Chloroflexus aurantiacus
MASKKQRIGVLTSGGDAPGLNAVIRAVVKSASGLGWEVIGIHDGFEGLLGTKSYRVLTNADVQVLLPRGGTILRTTNKGHFGPRRSDELSEADPYVRAVKAIEEMGLRALITIGGEGTQRIALELHKLGAPVIGVPKTIDNDLAGTDRTFGFDTALQVATDAIDRLHTTAASHNRVMVLEVMGRHTGWIALHAGLAGGADVILIPEIPFSIERVAEKVMARDQQGSSFSIIVVAEGARPRGGSEMYIAEGRLGGIGHWVGEQLEKLTAKEVRVVVLGHLQRGGSPSPYDRLLSTRYGAAQCRGSSGI

SEQ ID NO: 516 - protein, 121 aa, Glycine max
MDCLVMPVSLIRRRSTGSRMGYMALPKEEPVKVVVGKEKRVFLVEPFILQENPFQILMDISMKKDPAGHFTSNHSQSERRVIFVDVDDILFEHMLWLMHNDASSLFQLNLKEIIDFYTHDI

SEQ ID NO: 517 - protein, 445 aa, Saccharomyces cerevisiae
MDDKVSEKESSPKQTEEDSEGKMAHVQPASYVNKKKYVFGKTLGAGTFGVVRVRKNTETGEDVAVKIVIKKALKGNKVQLEALYDELDILQRLHHPNIVAFKDWFESKDKFYIITQLAKGGELFDRILKKGKFTEEDAVRILVEILSAVKYMHSQNIVHRDLKPENLLYIDKSDESPLVVADFGIAKTLKSDEELLYKAGTALGYVAPEVLTQDGHGKPCDIWSIGVITYTLLCGYATIDRKVQDFLDECTTGEYPVKFHRPYWDSVSNQAKQFILKALNLDPSKRPTAAELLEDPWIICTELKTHNLLPGLKEGLDARQKFRNSVERVRLNMKIQKLRDLYLEQTESDSDFDEGSQANGSVPPLKATDTSQLSKKLSEEEQSKLKSELTSKAFAQLVNTVLAEKEKFLNINRVCSSDSDLPGSDIKSLDEAKEKPEGKDTKTEE

SEQ ID NO: 518 - protein, 289 aa, Mesorhizobium loti MAFF303099
MTPGHEFSGIVEAIGKAVSGFAVGDRVTGDPNIACGRCPHCHAGRVNLCRNLNAIGIHRDGGFAEYVVLPQKQAFILPADLPPTHGAFCEPLGCCLHGVDLAQIKPGSSVVVLGGGVIGLLTVQLAKLAGATTIILSTRQASRRVLAEELGATATVDPTAGDVIDAIAGSEGLMPGGADVVFECAGVRDTVEQSMRLARAGGTVVIVGVTPQGMKAEFEPFDLLFRELKVVGSFLNPYTHRRAAELIASGAIEIDRLISRQVPLEEAADVIANPPAPGEVKVLVVPRQG

SEQ ID NO: 519 - protein, 472 aa, Bacillus sp. KSM-K16
MNHALFINNECVATDDMIEVENPATKEVIGTVANGGKQEALAAVDAAAAALPEWRAKTAAERGAYLQKWYELIQREEEEIAKLMTLEQGKPFAEALGEVRYANSFLSWYAEEGKRVYGETVPAAATNKRIFVQKQAIGVIAAITPWNFPAAMLTRKLGPALAAGCTAVMKPSELTPFTAYRIVELAKVAGIPKGVVNMITGDAQQIGETWMADERVRKVSFTGSTRVGKLLMRQAADTVKKLSLELGGHAPFIVTAQADIQKAVDGLIASKYRNGGQTCVCANRIYVHESIKAPFVEAFAAEMKKLKVGNGMEPDSHIGPLINEAAVAKVQKHIEDAQAKGGEVIFGQEADATNGYFQTPALIANATDDMLCMKEETFGPLAPIATYTSTEDVIERANHSPYGLAAYVYSNDLSEAVTIAERLEYGIVGLNDGLPSVAQAPFGGMKESGLGREGGHWGIEEYVEVKYISLQL

SEQ ID NO: 520 - protein, 152 aa, Brassica napus
MGSIRESAPTANSSTTVVMSSIPPFLSKTYDMVDDPSTDEVVSWSSGSNSFVVWNVPEFSKQFLPKYFKHNNFSSFVRQLNTYGFRKVDPDRWEFANEGFLKGQKQLLKSIIRRKPTQVQPPQQPQVQHSSVGACVEVGKFGLEEEVERLQR

SEQ ID NO: 521 - protein, 474 aa, Escherichia coli K12
MQHKLLINGELVSGEGEKQPVYNPATGDVLLEIAEASAEQVDAAVRAADAAFAEWGQTTPKVRAECLLKLADVIEENGQVFAELESRNCGKPLHSAFNDEIPAIVDVFRFFAGAARCLNGLAAGEYLEGHTSMIRRDPLGVVASIAPWNYPLMMAAWKLAPALAAGNCVVLKPSEITPLTALKLAELAKDIFPAGVINILFGRGKTVGDPLTGHPKVRMVSLTGSIATGEHIISHTASSIKRTHMELGGKAPVIVFDDADIEAVVEGVRTFGYYNAGQDCTAACRIYAQKGIYDTLVEKLGAAVATLKSGAPDDESTELGPLSSLAHLERVGKAVEEAKATGHIKVITGGEKRKGNGYYYAPTLLAGALQDDAIVQKEVFGPVVSVTPFDNEEQVVNWANDSQYGLASSVWTKDVGRAHRVSARLQYGCTWVNTHFMLVSEMPHGGQKLSGYGKDMSLYGLEDYTVVRHVMVKH

SEQ ID NO: 522 - protein, 279 aa, Bacillus cereus G9241
MKNLQSTTTLHNGVEMPWFGLGVFKVEDGPELVEAVKSAIKAGYRSIDTAAIYGNEKAVGEGIRAGIKEAGISREDLFITSKVWNSDQGYETTLAAYEESLKKLELDYLDLYLVHWPVEGKYKDTWRALETLYKEKRVRAIGVSNFQIHHLQDVLADAEMKPMINQVEYHPRLTQKELQAFCKEQGIQMEAWSPLMQGQLLDNETLQEIAHKYGKTTAQIILRWDLQNEVVTIPKSTKEHRIIANADVFNFELTKEDMEKIDALNQNHRVGPDPDNFDF

SEQ ID NO: 523 - protein, 417 aa, Nicotiana tabacum
AADGYARARGVGACVVTFTVGGLSVLNAIAGAYSENLPLICIVGGPNSNDYGTNRILHHTIGLQDFSQEPRCFQTVTCYRAVVNNLEDAHELIDTAVSTALKESKPVYISIGCNLPGIPHPTFSREPVPFALSPRLSNMMGLEAAVEAAAEFLNKAVKPVLVGGPKMRVAKASDAFVELSDACGYAVAVMPSAKGLFPEHHSHFIGTYWGAVSTAFCAEIVESADAYLFAGPIFNDYSSVGYSLLLKKEKAIIVQPDRVTIGNGPAFGCVLMRDFLAALAKRLKHNPTAFENYHRIYVPEGHPLKCEPKEALRVNVLFQHIQNMLSGDSVVIAETGDSWFNCQKLKLPKGCGYEFQMQYGSIGWSVGATLGYAQAAPEKRVIACIGDGSFQVTAQDISTMLRCGQRTIIFLINNGGY

SEQ ID NO: 524 - protein, 484 aa, Sphingomonas chungbukensis
MTILNFIDGSYREGSEGKSFSNVNPATGAEIGVVHEASQAEVEDAVEAAKAALTGPWGKMTTARTGQADHRVATEIERRADDFLAAEVADTVKPRHVVSHIDIPRGAANFRMFADVVSTMPGESFNTPTPDGGQAFIYTVSKPKGVDAAVCPRNFPLLLMIWKVGPELACGNTAVVKPSEEIARTAALLGDVIDAGVNHHGVFNVAQRFGPASAGEFLTSNPDVDAITFTGETGTGQAIMQKAATGVRDISFELGGKNPAIVFADADLDKAVEGLSRSVFLNTGQVCLGTERVYVERPIFDAFVARMAAAAQDFKPGVTGDRAYLGPLISAEHREKVLAYYPRAVEDGPTVFTGGGVPEISGAETGGFFVEPTLWIDVAHGDTVMREEIFGPCCDILPFDSEDEVIALANDTVYGLCASVWTENLSRGHRVAAAMEVGVCWVNSWFLRDLRTAFGGSGHSGIGREGGVHSLEFYTEITNICVKL

SEQ ID NO: 525 - protein, 1064 aa, Saccharomyces cerevisiae [sequence omitted]

SEQ ID NO: 526 - protein, 1374 aa, Neurospora crassa
MGSSSRTRPGQTSNSGIAKGQTKDVKEVNLSRSNRSKPSNSARHPPMKRARTPVGGHSADTSSSTSSEDIAPEIVVWTGDMDVMDSEESPFPESPLPTDDSSQLPSLSRAPEGPSVLDGDASSQFSSPLSEPPESSPIISPQDDIAVEQENPIPQSASSLSDQHSNSSSHAPSVTSKATTPVDADRLKEPPTRQELSEPQPSPPVSPSPEPPVEEQQPKPTVEEPPQPDEQPQTELQEEPTAQPERVARLLPLPVIDEPPLAAIESAAPPQGPKSPMNERKIKQESPEEVVLESARQASLPQDAGTLDVLMEEAPGTDAVVQEAPMQDVSMLEAPPQDTPDREAPPLDIVMDEPPAYESLTHEAPAGNPAAQSLSTLDAPAQEKTAQEASIYATPVHEVPAQPTPVQGFLPQNAGTNTVSTDTPRRRYNVRPKVTIPPDLPLPDYAMQCITAAEASRLNPYALHQEEYLMLRDHISHAQVTTYLNIRNGILRLWVRNPQIAVTREEAVGCAKDTRWFDAASLCFDWLVRRGYINFGCVDYRHSKRHTSKDPPATTLKRRTVAVLGAGMAGLGCARQLEGLFAQYAKKFRDMGEEPPRVIVIEGRNRIGGRVYSRPFASKPARTPDNFHGKRFTAEMGGMIITGFERGNPINILLRAQLGIPYRPLRPDTTLYDSNGKPVDLHRDQLVENLYNDCLDRVSEYKFKQPTSKLIEGNRELIDEGKDSSAEAYKTIRQVEESTAAQPHAPPVSEQSIAPQVNLVPISSDRATGRVHTEPGTPGALKAAYKAKLLGWALKQGVSEDADLDLETPAKEPGANLGSVVDNMFAQYRDIVDLTAQDYRLLNWHVANLEYSNAINYNKLSLQGWDIDAGNEWEGSHTMVIGGYQSVPKGLMLLPTPLDVRRRSPVNKITYTTESTAGPAVIECEDGFKVEADFVVNTIPLGVLKHGNIKFEPPLPEWKSSAIERIGFGVLNKVILVYKEAFWDEDRDIFGVLRNPSNRHSLDQKDYASQRGRFFQWFNVTQTSGLPVLLALMAGDAGYDTEQTCNDDLVKEATDVLRRVYGSKVQQPIEAIVTRWASDKFARGSYSSAGPDMKADDYDTMAKPVGNLFFAGEHTCGTHPATVHGAYLSGLRAASEVLETMLGPIEIPTLLITPKESSSLSLKRKAAALSSEFTTTTVTNSYGTMSSTRNPEQARLEAYDISLWDSITSQIGLRPQKPSKPVVSGYIFFSKAHYDDARKRCEAGRRPGKGKASGNEVRMMSAKMWKDASPEEKRPFEELAEESKRAYAVAMKEWTEKAQEWDRKATELKEIYERENPYVPLSALVVKSEEGVAAAASVSSGSNGRNGRRARWAGEKVGSYAEDGGSDVDVAMTG

SEQ ID NO: 527 - protein, 640 aa, Zea mays
  misc_feature (43)..(43): Xaa can be any naturally occurring amino acid
MGNTCVGPSITMNGFFQSVSTALWKTPQEGDALPAAANGPGGXPAGAGSQSALPKPASDVHHVAVQSEAPEPVKIAAYHSEPAPAVRSEAPEPVKIAASHSEPAPMAAKPGGAAANASPSPSPRPRPQVKRVSSAGLLLGSVLRRKTENLKDKYSLGRRLGQGQFGTTHLCVERATGKELACKSILKRKLGSDDDVEDVRREIQIMHHLAGHPSVVGIRGAYEDAVAVHLVMELCGGGELFDRIVRRGHYTERKAAELARVIVGVVEACHSMGVMHRDLKPENFLFADHSEEAALKTIDFGLSIFFRPGQIFTDVVGSPYYVAPEVLKKRYGPEADVWSAGVIIYILLCGVPPFWAENEQGIFEEVLHGRLDFESEPWPSISDGAKDLVRRMLVRDPRKRLTAHEVLRHPWVQVGGVAPDRPLDSAVLSRMKQFSAMNKLKKMALRVIAENLSEDEIAGLREMFKMIDADNSGQITFEELKVGLEKVGANLQESEIYALMQAADVDNNGTIDYGEFIAATLHLNKVEREDHLFAAFQYFDKDGSGYITADELQVACEEFGLGDVQLEDLIGEVDQDNDGRIDYNEFVAMMQKPTVGGSRRRPICRTASASGSASGSGRRSGWPRPLCLWLPCCLRVGVDD

SEQ ID NO: 528 - protein, 115 aa, Arabidopsis thaliana
DVSTMIRCGQKTIIFLINNGGYTIEVEIHDGPYNVIKNWNYTAFVEAIHNGEGKCWTAKVRCEEELVKAINTATNEEKESFCFIEVIVHKDDTSKELLEWGSRVSAANSRPPNPQ

SEQ ID NO: 529 - protein, 445 aa, Bacteroides thetaiotaomicron VPI-5482
MKRILIKNAVIVNEGRKVPGSVVIEGEKIAEILVDGQEAAMPCDETIDASGCYLLPGAIDEHVHFRDPGLTHKADITTESHAAAAGGVTSIMDMPNTNPQTTTLEALNDKLALLAEKSSVNFSCYFGATNNNYPLFSQLDKNRVCGVKLFMGSSTGNMLVDRMASLRNIFGGTDLLIAAHCEDQGIIKENTDKYKKEYGDDVPLALHPVIRSEEACYRSSALAVQLARETNARLHIMHISTAKELSLFSKAPLAEKRITAEACVSHLIFTEEDYQTLGARIKCNPAIKTAEDRKALQEAVNSGLIDAIATDHAPHSLSEKEGGALKVMSGMPTIQFSLVSMLELADKGAFSIEKVVEKMSHAPAQMYEIRNRGFIRKGYQADLVLVRPDSEWTVTTDCILSKCKWSPLEGHTFHWKVEKTFVNGHLLYNNGTIDENYRGQELRFR

SEQ ID NO: 530 - protein, 312 aa, Sulfolobus solfataricus P2
MINREDLLKNPVEDITLSDLKKYNDIVSVFDKIYGFSSEGIVNGSKILKEMIKNADLRFLSFTANLVSTGLRGLFADLIKKGYFNIVVTTGGTIDHDLARSFGGVYYKGSFDIDDTMLKDLEIHRLGNVLVPFESYGKVIEDVVRKFLPEITKDRKEISAYELLWEFGKRITDSNSILRAAYDKNVPIIVPGILDGSFGTNLFIQSQFLNFRINLFEDMRLIKDLIFSSKKSGALIIGGGISKHHTIWWNQFKDGLNYAIYITTAQEYDGSLSGAKPREAISWNKIRPDAKHVTIYGDATIIVPILAASLLS

SEQ ID NO: 531 - protein, 131 aa, Sulfolobus solfataricus P2
MSITYTTVGELKVGSYVVIDGEPCRVVEVTKAKTGKHGSAKANVVAIGVFSGAKKTLMAPVDQQVEVPIIEKHIGQIIADMGNKIQVMDLESYETFEIEKPTEDELASKIKPNAELEYWEIMGRRKIVRVK

SEQ ID NO: 532 - protein, 497 aa, Arabidopsis thaliana
MDKKKNSFPDNLPEGTISELMQKQNNVQPSVIVIGSGISGLAAARNLSEASFKVTVLESRDRIGGRIHTDYSFGCPVDMGASWLHGVSDENPLAPIIRRLGLTLYRTSGDDSILYDHDLESYGLFDMHGNKIPPQLVTKVGDAFKRILEETEKIRDETANDMSVLQGISIVLDRNPELRQEGMAYEVLQWYLCRMEAWFAVDANLISLKCWDQDECLSGGHGLMVQGYEPVIRTIAKDLDIRLNHRVTKVVRTSNNKVIVAVEGGTNFVADAVIITVPIGVLKANLIQFEPELPQWKTSAISGLGVGNENKIALRFDRAFWPNVEFLGMVAPTSYACGYFLNLHKATGHPVLVYMAAGNLAQDLEKLSDEATANFVMLQLKKMFPDAPDPAQYLVTRWGTDPNTLGCYAYDVVGMPEDLYPRLGEPVDNIFFGGEAVNVEHQGSAHGAFLAGVSASQNCQRYIFERLGAWEKLKLVSLMGNSDILETATVPLQISRM

SEQ ID NO: 533 - protein, 204 aa, Glycine max
  misc_feature (173)..(173): Xaa can be any naturally occurring amino acid
  misc_feature (189)..(189): Xaa can be any naturally occurring amino acid
GIPWERLNYSRDKYRETRLKQYKNYQNFSLSPHHLHKECFQVQKGQTFYDFFFNTRLVKSTIVHFQLRNLLWATSKHDVYLMQNYSVMHWSALLQRSKEVLNVAKPIIPTLTHPGFLAQPVSRVQISTMTVKENLMVAGGFQGELICKNLKQPGVLFCGKITTDGNAITNAVXDVYRNPAGSLRVITAXNDSQASGFDAENFAS

SEQ ID NO: 534 - protein, 343 aa, Salmonella typhimurium LT2
MEVKTQSCVVAGKRAVAVTEQNIEWNNKGTLVQITRGGICGSDLHYYQEGKVGNFTVKAPMILGHEVIGKIVHSDSDLLREGQPVAINPSEPCGHCKYCLQHEENHCTEMRFFGSAMYFPHVDGGFTRFKAVDTAQCIPWPEQADEKAMAFAEPLAVAIHAAHEAGDLQGKRIFISGVGPIGCLIVSAVKTLGAAEVVCADISTRSLSLARQMGADTLVNPQHDSLDDWKAEKGYFDISFEVSGHPSSISTCLEVTRAKGVMVQVGMGGAVPNFPMMMVISKEISLKGSFRFTTEFNTAVSWLANRVINPLPLLSAEYPFTDLEAALIFAGDKTQAAKVQLVF

SEQ ID NO: 535 - protein, 136 aa, Methanocaldococcus jannaschii
MVIIMPGTKQVNVGSLKVGQYVMIDGVPCEIVDISVSKPGKHGGAKARVVGIGIFEKVKKEFVAPTSSKVEVPIIDRRKGQVLAIMGDMVQIMDLQTYETLELPIPEGIEGLEPGGEVEYIEAVGQYKITRVIGGK

SEQ ID NO: 536 - protein, 211 aa, Agrobacterium tumefaciens
MIHSFDLGPQSSETHNEKLDRSISRKGADPGAVIWLTGLSGSGKSTVAVSVDRILHERGRSSVVLDGDIIRRGLSKDLGFEHRDRYENVRRIAEVAKLLAEAGFTVLVSCISPLEKDRQSARRIIAPVRFLEVFVETPIEECIRRDPKGLYRKALSGEIKNFTGISSPYEAPLKPDLCIRTADADSETLAALVVRTVCERGDAAFAFHQSG

SEQ ID NO: 537 - protein, 229 aa, Zea mays
  misc_feature (186)..(186): Xaa can be any naturally occurring amino acid
LAIELSKREDELLRQKTEVTKIADTLKLAFTESKRIIDEKRANARLEIESAKASVQKIQSALKEQEIFSQRTGEQDVDELKEEVQEARRVKMLHCPSKAMDIENEIQVLRDQLAEKSSDSLRLLKELELHRSYGENDMPLYELKGLETLGSTLHIVVHDCASVDFWNSSIQWFRIQPEGSKKEIIXGTTKPAYAPEPHDVGRYTQAEVKSGGQTSITKIAGSVDPGMVS

SEQ ID NO: 538 - protein, 101 aa, Zea mays
  misc_feature (23)..(23): Xaa can be any naturally occurring amino acid
MSDGTATCIDIILAIILPPLGVXFRFGCGVGFWICLILSLLGYLPGFLYAARAITKEPAGALACIAPAGGSGGGGLGAPGSGDVVPSLLGRWRLGLAAEVW

SEQ ID NO: 539 - protein, 259 aa, Zea mays
  misc_feature (101)..(101): Xaa can be any naturally occurring amino acid
  misc_feature (113)..(113): Xaa can be any naturally occurring amino acid
  misc_feature (238)..(238): Xaa can be any naturally occurring amino acid
MEIAMVCTRVNLLILILSLCSPYKFIQSPMDFGPLNLLPTTIAASSDFGRILFHSPSAVLKPQSPRDISLLLSFLSASSLGKVTVAARGAGHSIHGQAQAXDGIVVEMRCLPXEIELHRGGEGDVSYADVSGGAMWIELLEQSLKAGLAPRSWTDYLYITIGGTLSNAGISGQTFKHGPQISNVLQLEVVTGRGETVTCSPTKNAELFSAVLGGLGQFGIITRARILLQEAPQKVKWXVRAFYDDFGTFTKDQELLVSM

SEQ ID NO: 540 - protein, 410 aa, Triticum aestivum
  misc_feature (281)..(281): Xaa can be any naturally occurring amino acid
MAAQNYGELYNILGWGEPYFTVNRDGHLCVKTHGHETKPGQEIDVVSVAEAAKEKGVQFPMILRFPDVLKHRLDSLHVAFEKAIKHTGYTAPYQGVYPVKVNQNRAIINDFVSFGHRHSYGLEAGSKPELLIAMSYLTKAKPGAFLVCNGYKDADYVALALSARAMGLNVIIVLEMEEELDIIIEHSSKLGVEPVLGVRAKLLTKIPGHFGSTAGKHGKFGLLADKIYEVAKKLKDLNKLHWLKLLHFHIGSMIPTTDIVSSAAREASGIYCTLVKQYGAXWTTLDCGGGLGVDYDGTRSGSDMSVAYGLEEYASSIVQAVRVKCEDNGVDHPVLCTESGRAMVSHHSMIILEALSAIPEPKDDEETTPEELQAMIDDLSSKKWLKGDDDAAVAKPMSSHAAEIKEHGIE

SEQ ID NO: 541 - protein, 166 aa, Triticum aestivum
  misc_feature (52)..(52): Xaa can be any naturally occurring amino acid
MAQESLRLVCPPVSAHEGRLPRQYTLEGQGAKKDISPPLEWYGVPDGTRSLXAVVVQDVDADERVPWTHWVVVNISPEEKGLPEGFSGAGGNANAGGGDGGVQEGVNDWKQPGWRGPVPDSHGHRIQFRLYALDDVLSLGNKVTVDKVMEAIEGHVLGEAEITAVF

SEQ ID NO: 542 - protein, 131 aa, Triticum aestivum
  misc_feature (66)..(66): Xaa can be any naturally occurring amino acid
MEGVGARLGRSSARYGPAMTFTGPVRKWRKEWVTISAATATATSAAASSTGTGSRGNNLILFKWTXLNGANERDEEQTAPAKTATRRRLYVPVSVVQDQRQESAKSDDENKANDGEPSSTETEQSIGKTNM

SEQ ID NO: 543 - protein, 371 aa, Nicotiana tabacum
MAKRTLPLLRHLLSSPSHGFSHSLTSTRSVTYMPRPGDGTPRAVTLIPGDGIGPLVTGAVEQVMDAMHAPVYFERYDVHGDMKSVPPEVMESIRKNKVCLKGGLKTPVGGGVSSLNVQLRKELDLYASLVHCFNLQGLPTRHENVDIVVIRENTEGEYSGLEHEVVPGVVESLKVMTKFCSERIAKYAFEYAYLNNRKVLTAVHKANIMKLADGLFLESCPEVATKYPGIKYNEIIVDNCCMQLVSRPEQFDVMVTPNLYGNLVANTAAGIAGGTGVMPGGNVGADHAVFEQGASAGNVGNEKILEQKKANPVALFLSSAMMLRHLQFPSFADRLKTSVKRVIAEGKYMTKDLGGNCTTQEITDAVIANLD

SEQ ID NO: 544 - protein, 204 aa, Glycine max
MALELVIKLDWVDLIMMDWLVQIEMSAVNITNVTVLDNPASFLTPFQFEISYECLTALKDDLEWKLIYVGSAEDETYDQLLESVLVGPADPPDPSKIREEDIIGVTVLLLTCSYLGQEFIRVGYYVNNDYDDEQLREEPPPKVLIDRVQRNILSDKPRVTKFPINFHPENNENEEQLPPSEHPSETGEDPLAVVDRDPPDEKDS

SEQ ID NO: 545 - protein, 443 aa, Rubrivivax gelatinosus PM1
MTRGPDTLAERSRRAVWHPCTQMKRHEREPLLAIARAQGPWLFDPDGHRYLDAVSSWWVNLFGHGHPQLRDALAEQLATLDHVMLAGLTHEPVVELSERLAALTGLGHAFYASDGASATEIALKMSAHSWRNRGRPQKCEFVGLAGGYHGETVGALSVTDIALFREAYAPLVRLSAALPSPDTRHAAPGEDAAAHARRCAASLEAYLDQHHERTAALIVEPLVQCAAGFGMHDPEYLRLARALCDRYQVHLICDEIAVGFGRTGTLFAHQQAGIRPDFICLSKGLTGGTLPLSAVLTTDAVYESFYDDLASRGFLHSHSYTGNPLACRAALTVLDLFEQPIDGEPVLAHNRRTAARLTALCEPLNAHPRVRAVRQLGMLWAWDIDDDGVVGFSSAYHLAAREQGLLLRPIGNTLYFMPPYVLDDGALEQLAGGALRALEVALA

SEQ ID NO: 546 - protein, 338 aa, Streptococcus pyogenes MGAS315
MKAVVVNQASTGVEVVEHDLPNVGHGEALVKVEYCGVCHTDLHVAHGDFGQVPGRILGHEGIGIVEEIGEGVTSLKVGDRVSIAWFFEGCGHCEYCTTGRETLCRSVKNAGYSVDGGMSEYAVVTADYAVKVPEGLDPAQASSITCAGVTTYKAIKEAGAAPGQWIVIFGAGGLGNLAVQYAKKVFNAHVVAVDINNDKLELAKEVGADIVVNGKEIEDVPGYIQEKTGGAHGVVVTAVSKVAFNQAIDSVRAGGTVVAVGLPSEYMELSIVKTVLDGIKVVGSLVGTRKDLEEAFAFGAEGLVVPVVEKVPVDTAPEVFDEMERGLIQGRKVLDFIS

SEQ ID NO: 547 - protein, 129 aa, Malus x domestica
MMTCKLKFLELKAKRTYRFIVFKIDEKKNEVIVEKLGEPAESYEDFTANLPDNECRYAVYDFDFVTVENCHKSRIFFVGWSPDTARVRNKMIYASSKDRFKRELDGIQVELQATDPSEIGLDVIKSRAN

SEQ ID NO: 548 - protein, 178 aa, Triticum aestivum
  misc_feature (16)..(16): Xaa can be any naturally occurring amino acid
  misc_feature (39)..(39): Xaa can be any naturally occurring amino acid
MAGVSRSMVAPLLVLXNLVMYIVVIGLASWNLNHFINGXTNYAGVAGNGATFYFLLFAILAGVVGAASKLAGVHHVRTWRGDSLSTSASSALVAWAITALAFGLACKEIHVGGHRGWRLRVLEAFIIILAFTQLLYVMALHAGLFGNQFGDGYGGAEHQYGDHHHHKGMGTAAATARV

SEQ ID NO: 549 - protein, 300 aa, Bartonella sp. sa192up
PIDQLAEKGDFLEICYLLLYGELPTKQEKNDFDNCIMQHTMVHEQLARFFHGFRRDSHPMAVMVACLGAMSAFYHDSIDITDSQQRMIASVRLISKVPTLAAMAYKYSIGQAFVYPRNDLSYAANFLRMCFCVPCEEYKINPVLTRAMDRIFILHADHEQNASTSTVRLAGSSGANPFACIAAGVACLWGPAHGGANEACLKMLQEIGSVERIPEFIARAKDKNDPFRLMGFGHRVYKNYDPRAKIMQKTCHEVLKELNIQDDPLLDIAIELEKIALSDEYFVEKKLYPNVDFYSGITLK

SEQ ID NO: 550 - protein, 486 aa, Azotobacter vinelandii
MRKIENFIAGEYVAAASGRRFDKRSPLDNRVIASIAEAGRAEVDAAVGAARGALAGDWGRLSTEQRVELLYGVANEITRRFDDFVEAEMADTGQPAHVMKQVFIPRGAANFKVFADVVKNVASESFQTATPDGRGALNYALRVPKGVIGVICPWNAPFMLMTWKVGPALACGNAVVVKPSEESPQTAALLGEVMNAVGIPKGVYNVVQGFGPDSAGEFVTQHPGVDAITFTGETRTGAAIMKAASEGMRDVSFELGGKNAGIVFADCDFEAAVEGIFRSAFLNSGQVCLGTERVYVERPIFERFVQALKVKAESVRFGRPDDHDANYGPLISQEHRQKVLSYYRKALEEGATLVTGGGVPEMPGELAEGAWVQPTIWTGLPESAAVVREEIFGPCCHIRPFDAEDEVVQLANATDYGLSTTLWTNDLARAHRLAARVEVGITWINSWFLRDLRTAFGGAKQSGIGREGGVHSLEFYTETRNVCVKL

SEQ ID NO: 551 - protein, 128 aa, Rubrobacter xylanophilus DSM 9941
MALSKEELIEAIENMTVLELSELVKALEERFGVSATAVAAAPAAAGAAGAEAAAAEEEKTEFDVILQDAGAKKIQVIKEVRAATGLGLKEAKALVDEAPNPVKEGLPKEEAEALKAKLEEAGATVELK

SEQ ID NO: 552 - protein, 300 aa, Bartonella sp. af82up
SIDQLAEKGDFLESCYLLLYGELPTKQEKIDFDQRIMQHTMVHEQFARFFHGFRRDSHPMAVMVACLGAMSAFYHDSIDITDSQQRMIASIRLISKVPTLAAMAYKYSIGQPFVYPRNDLSYAANFLHMCFSVPCEEYKINPVLARAMDRIFTLHADHEQNASTSTVRLAGSSGANPFACIAAGVACLWGPAHGGANETCLKMLQEIGAVQKIPEFIARAKNKNDRFRLMGFGHRVYKNYDPRAKIMQQTCHEVLKELNIQDDPLLDIAMELEKIALNDEYFIEKKLYPNVDFYSGITLK

SEQ ID NO: 553 - protein, 300 aa, Bartonella sp. ma106up
PIEQLAEKGDFLESCYLLLYGELPTQQEKNDFDRRIMQHTMVHEQFSRFFQGFRRDSHPMAVMVACLGAMSAFYHDSIDITDPQQRMIASIRLISKVPTLAAMAYKYSIGQAFVYPHNSLSYAANFLRMCFAVPCEEYQVNPVLTRAMDRIFILHADHEQNASTSTVRLAGSSGANPFACIAAGVACLWGPAHGGANEACLKMLKEIGSVKKIPEFIARAKDKNDPFRLMGFGHRVYKNYDPRAKIMQKTCHEVLKELNRQDDPLLDIAIELEHIALNDEYFIEKKLYPNVDFYSGITLK

SEQ ID NO: 554 - protein, 226 aa, Glycine max
VTARQDLHHRNRPSDHYRLLKSNVDALNLIQVGLTLTDAAGNLPDLAGNRSIWEFNFRDFDVARDAYAPDSIDLLRRQGIDFARNTADGVDSTCFAELMMSSGLVCNDAVSWVTFHSAFDFGYLVKILTRRNLPTRLEEFLKTVKVFFGDNVYDVKHMMRFCDTLYGGLDRVARSLNVDRAVGKCHQAGSDSLLTWHAFQKIVDIYFVKDEHRKHAGVLFGLEAFC

SEQ ID NO: 555 - protein, 300 aa, Bartonella sp. af170up
PIDQLAEKGDFLESCYLLLYGELPTKQEKHDFDRCIMQHTMVHEQFARFFHGFRRDSHPMAVMVACLGAMSAFYHDSIDITDPQQRMIASVRLISKVPTLAAMAYKYSIGQAFVYPRNDLSYAANFLRMCFCVPCEEYKVNPVLTRAMDRIFILHADHEQNASTSTVRLAGSSGANPFACIAAGVACLWGPAHGGANEACLKMLQEIGSVERIPEFIARAKDKNDPFRLMGFGHRVYKNYDPRAKIMQKTCHEVLKELNIQDDPLLDIAIELETIALNDEYFVEKKLYPNVDFYSGITLK

SEQ ID NO: 556 - protein, 366 aa, Streptomyces avermitilis MA-4680
MDTSTPLTRPPDLYGRPRSDSFMQKLAALSDHAVTRLARRSTPPRHPQAAETPAIRELVVATKHQEAEDVVSLRLAAPDGGILPPWQPGAHIELHLPSGRKRQYSLCGDPADRHRYRIAVRRIANGQGGSAEVHDALSDGMRVAITGPRNAFPFAAEASILLIAGGIGITPILPMAREAARRGLDWRLVHTGRSRGSMPFAAELAELTAAAPGRVTIRPDDESGAPEAADLLSLSPATGAVYCCGPAPMIDGVRRAFGDSRASALHFERFAPAPITDGRPFELQLGETGRVLPVPYDRSALDVLHDALPDLPFSCRQGFCGTCRVQVAHGHVDHRDRRLTATERAAGAMLPCVSRAPEGERLVLEL

SEQ ID NO: 557 - protein, 392 aa, Aegilops tauschii
MKTFLIFVLLAMAMKIATAARELNPSNKELQSPQQSFSHQQQPFPQQPYPQQPYPSQQPYPSQQPFPTPQQQFPQQSQQPFTQPQQPTPLQPQQPFPQQPQQPQQPFPQPQQPFPWQPQQPFPQTQQSFPLQPQQPFPQQPQQPFPQPQLPFPQQSEQVIPQQPQQPFPLQPQQPFPQQPQQPFPQPQQPIPVQPQQSFPQQSQQSQQPFAQPQQLFPELQQPIPQQPQQPFPLQPQQPFPQQPQQPFPQQPQQSFPQQPQQPYPQQQQSFPQQPQQPFPPTTTKPFPQQPQQPFPLRPQQPFPQQPQQSQQSFLQPQPQQPQQPSILQPQQPLPQQPQQPFQQPQQQLSQQPEQTISQQPQQPFPQQPHQPQQPYPQQQPYGSSLTSIGGQ

SEQ ID NO: 558 - protein, 427 aa, Arabidopsis thaliana
MDRISNLSDDLLLKIVSSLPTKDVVVTMLLSKRWKFLWMMVPKLRFDDEFELEPSYYGRFLKYVDKSMVLNRAQVLETVKFNVGPCCSSEDIATWIRIGMVRNMRELEISHCEGYFREHRSIKLPKSLYTYEKLEVLKLASTVVLNVPIDVCFPSLKSLHLVCVEYKTKKSHRRLLSGCPVLEELVLDKSYNSFHVRSFYVEIPTLQSLSILDTSGELYGDFTFVVNAPALKYFNFVDFYGDLCLRDNMPEVVDVNIKVIYRNPKKLLGPLKSVKRLSLCLSPSTTLHNHMEFYQLVHLELCGDALMWWDLLTWMLQSSPKLQVLKIYECKCEEHDYLDDPIEEHWEEPSSVPQCLLFHLNIFEWKYYNAGDEEKKVVAYILKNARQLKTATFSAASYLYPKEERSRELNELVYMARASSSCQLLLD

SEQ ID NO: 559 - protein, 1415 aa, Nicotiana tabacum
MSLQSHLENSVVCADTDQTLIPDDEQHVKKSPENFLDLPPESFWIPKDSEQDWFDENATIQRMTSMMKLGFFGKANHHSKSFSHRSFTSTLFNHHQKPKSTSLFALPQSKKTSSTEGNLKQKKVPKSLFRSRSEPGRKGIRHVREPGSPKVSCIGRVDYALQKAISQLAPTQQRKVELLIKAFETVVPPQGDNSQVAFPKLFVSRRGKEGRASSEEHLQKTNKENEEEWMLAGDTGIKAEKVISRSKKDRGIRTGFWKKLRNILKIRPRAKSVANVETVKSAGSVDVKRLETSGRSESMGLCTSKPGIDSKCEEKDIQPSIPRQKLDEVCSKYKDDDSASKDEVLVEAKAQKEDKQFNKETSSVVSAKQEDSSNDEKAPKAVRGFSLLLAMQKQKSNDEDSDAASQNKQVRNYISMWHMKSQKKDEDNSHVLSQEDSNVASSVGNELLDGDKTDDEVSNSDSPVARNSPLPASEFYSPSVKPSSSSVNNSTPGEDQCVTTTNNEGKKSPFFPSPAHYFFSKVKPKTPARSPATNPTKRFFGFSFKSKSTAKRPFPPPSPAKHIRAVLARRLGSNSSAIPEGAKAEGGGVGKLDKKGRKGEVGRGHFGHTCWAKFKKGELKNPQVAVKIISKAKMTTAIAIEDVRREVKILKALSGHQNLVRFYDAYEDVNNVYIVMELCEGGVLLDRILSRGGKYTEEDAKSIVVIQILNVVAFCHLQGVVHRDLKPENFLFTRKEEDAPQKVIDFGLSDFIRPDQRLNDIVGSAYYVAPEVLHKSYSVPIEADMWSIGVIAYILLSGSRPFWARTESGIFRADNNLLNNKEDHPKWWPSVSAEARDFVKRLNKDHPRKRMTASQALSHPWLRTSNDAKVPLDILIFKLMRAYLRSSSLRKAALKALSKTLTVDELFYLKEQAKALKKWRMMARKKKAVSHKSTVVSCMHLKEQFALLEESSDTNSSIDETKVKQDIKAGAYEFPSPTATRAQFLEPKSLNNFLTKQMTDAMIDELASELPLSPSLHDHARHHDWLGPSDGKLNFLGFVKFLHGVTSRSIKTHSHHAPTGTRTCNSRQDFTDTKDEPDTSREDHNPKSHNGRNFCRDDAVEAKNSSNSTEESLTNHDMSEDGKMFDQTKPNTIITEEERALPLEAAKNKPEPKPQKSKNWSKLKKLQLLPPTPDLLPEPETVDLRHQMTDERKKAEKWMLDYAMQHIVTTLTPARKNLLKRSIKALEKARKFNPRAPKLIREAVNEILTTPIQDDSSDTDITMDQEFSEMERVAMLVEAFEAVVPLPEIMTAPCCLYEASCPGSPLLRVKPKSMAEFACYEVFGTERPQTSNNRTLEQMLQLMRALGQFGLKLGGYLRERGSKAQVRKLFSKKITSFEKIQSIRPRAKSVANVETVKSAGSVDVKRLETSGRSES

SEQ ID NO: 560 - protein, 80 aa, Brassica napus
MATNRKTIVWFRRDLRIEDNPALAAAAREGSVFPVFIWCPEEEGQFHPGRASRWWMKQSLAHLNQSLKSLGSHLTFIKYT

SEQ ID NO: 561 - protein, 251 aa, Zea mays
  misc_feature (239)..(239): Xaa can be any naturally occurring amino acid
MAAKCYPTVSDEYLAAVAKAKRKLRGFIAEKNCAPLMLRLAWHSAGTFDVATKTGGPFGTMKCPAELAHGANAGLDIAVRLLEPIKEQFPILSYADFYQLAGVVAVEVTGGPEVPFHPGRQDKPEPPPEGRLPDATQGSDHLRQVFSTQMGLSDQDIVALSGGHTLGRCHKERSGFEGAWTANPLIFDNSYFTELLSGEKEGPSSLPSAKALLSDPSFRPLVDKYAADEDAFFADYAEXHLKLSELGFAEA

SEQ ID NO: 562 - protein, 357 aa, Nicotiana tabacum
MARKSFPILKQLIQQSTNRFFTTNASPRAVTLIPGDGVGPLVTDSVEQVMQAMKAPVYFERYEVRGDMKCIPEEVIDSIKKNKVCLKGGLKTPVGGGVSSLNVLMRKELDLSASIVHCFTFPGLPTRHEDVDIVVIRENTEGEYAGLEHEVVPGVVESLKVITKYCSERIAKFAFEYADVNKRKKVTAVHKANIMKLADGLFLKSCREVASKYPEIQYEEIIVDNCCMQLVSRPEQFDVMVTPNLYGNLIANTAAGLAGGTGVLPGGNVGLIKPVFEQGASPGNVGHEKILKLKKANPVALLLSSAMMLRHLEFPSFADRLETAVKRVIAEGKVRTKDLGGDSTTQEVVDAIIAALD

SEQ ID NO: 563 - protein, 604 aa, Glycine max
  misc_feature (76)..(76): Xaa can be any naturally occurring amino acid
LKYKSEEGVRVLLLVWDDKTSHDKVFLKTAGVMGTHDEETRKFFKHSSVMCVLSPRYASSKMSFLKQQEIGFFVSXFSVESNVKCPVFCGLSSKQWVVGTVFTHHQKCVIVDTQAAGNNRKITAFIGGLDLCDGRYDTPEHRLFRNLDDVFDGDFHNPTFPAGTRVPRQPWHDLHCRIDGPAAYDVLINFEQRWRKATKWKEFAILFKKTSQWHDDALIRIERISWILSPSGAATLKDKSDYYTVPEDDPLVWVSSEDDPENWHVQIFRSIDSGSLKGFPKRVDIALSQNLICAKNLVIDKSIQTAYIQAIRSAQHFIYIENQYFIGSSYAWPAYKDAGADNLIPMELALKIASKIRAKERFAVYIILPMWPEGDPKTGAMQEILFWQGQTMQMMYDVVARELKSMQLTDVHPQEYLNFYCLGNREHFNEDSSSTNGAQVSTAYKYRRFMIYVHAKGMIVDDEYVIIGSANINQRSMAGTKDTEIAMGAYQPHYTWSAKKRHPHGQIYGYRMSLWGEHLGMLDETFEEPGRLECVEKVNEIAENNWKLFASEDFSLLQGHLLKYPVQVDSDGKIRSLPDCENFPDAGGKILGAHSTTIPDILTT

SEQ ID NO: 564 - protein, 411 aa, Bacillus sp. KSM-K16
MSTVMLKEESKRLVKATVPILAAHGETITKHFYKRMFHHHPELLNVFNRTNQKIGRQPQALANSIYAAAQHIDNLEAILPVVKRIAHKHRSLNIKPEQYPIVGENLLAAMKEVLGEAASDDVIEAWREAYEIIAGVFIEVEKQMYDQAGKAPGGWSGFRSFVVEKKKQESKAITSFYLKPKDGNEIASYQPGQYMTVKVNIPGDTYTHMRQYSLSDAPGKGYYRISVKREEGNTECPPGVVSNYLHQHIREGDVLEMTAPAGDFTLKQGEERPIVLISGGVGITPLMSMFNTLMQQGTKQKVTFIHAAIDGTYHAMHDHVAQTASQKENVHYAVCYERPTSEDQMNPYMKKEGYIDEQFLRSMIEDHHADFYFCGPIPFMKTVYHILNNWGVPEEQIHYEFFGPAGTLASS

SEQ ID NO: 565 - protein, 344 aa, Oryza sativa (japonica cultivar-group)
MPMLSSSPICAGRDSPAAPPPDPCLPPREEAGRGEEAAVRQMGSFTRCGRSLGHAAASSPPGLTRRDGGVELGAATTPPMLKRLPPPPLDRPAPLRSPPRFLCHCLATFGWWGIDRGEMKSPIKPRPPRPIDAIVFASIETRNRLRGFDRSFCCSAPPETYVFLPRARETIVLRANIIKMSSEQQASAGQPVLCASGCGFYGNPATLDMCSVCYRQHCLLNGATMATGPSSSVAAASAATVATGAVTSDSCSVPSAEVNGAAFSSKNNPEPATVVEKKAPANRCASCKKKVGLLGFACRCGATYCGTHRYPEKHACGFDFKGASRDAIARANPLIKGEKLTNKI

SEQ ID NO: 566 - protein, 151 aa, Brassica napus
FGHRVYKNYDPRAKVIKKLADEVFSIVGRDPLIEVAVALEKAALSDEYFVKRKLYPNVDFYSGLIYRAMGFPPEFFTVLFAVPRMAGYLSHWRESLDDPDTKIMRPQQAYTGVWLRHYEPVRERTLSSDSDKLGQVSISNASRRRLSGSAL

SEQ ID NO: 567 - protein, 354 aa, Burkholderia cepacia R1808
MKAAVWHGRNDIRVEEVPVPGHPPAGWVQIRVHWCGICGSDLHEYVAGPVFIPVDAPHPLTGLKGQCILGHEFSGEIAALGAGVTGFALGERVTADACQHCGTCWYCRHGMYNICENLAFTGLMNNGAFAEYVNVPAELLYKLPDNFPTEAGALIEPLAVGMYAVKKAGNIVGQTVVVVGAGTIGLCTIMCAKAAGAGRVIALEMSAARKQKALEVGATVVIDPKASDAIAEVKALTGGYGADVSFECIGHTATAKLAIDVIRKAGKSVMVGIFEEPTSFNFFDIVSTEKEVIGSLAYNGEFADVIRFIADGRIDVQPLITGRIALGDIVARGFEELVNHKDRNVKIIVQPVAA

SEQ ID NO: 568 - protein, 175 aa, Triticum aestivum
MAPTVMASSDTSVAPFQGLKSTAGLPVRRRSNGSSLGSVSNGGRIRCMQVWPIEGIKKCETLSYLPPISTEALLKQVDYLIRSKWVPCLKFSKVGFIFREHNASPGYYDGRYWTMWKLPMFGCTDATQVINEVEEVKKEYPDAYVRIIGFDNMRQVQCVRFIAFKPPGCEESGKA

SEQ ID NO: 569 - protein, 364 aa, Mentha x piperita
MEASFENGRKRSSSSSSEEESAFSFAMELAAGSVLPMVIKSAIDLNLLELIKRGGEEGASAYELAAQINAENPKAAAEMIDRILQLLAAHSVLTCRVETPPSRRRRYSLAAVCKFLTRDEDGASLAPLSLLVQDRVFMEPWYHLKDVIVEGGVAFERAYGVHAFEYHAKDPKFNKIFNQAMHNQSIIFMKRILEIYKGFEGVKSLVDVGGGTGASSKMIVSKYPLIKAINFDLPHVIQDASPHPEVEHVGGDMFVSVPKADAIFLKWICHDWSDEHCRKLLKNCYDAILGNGKVIIAESTLPEDPNSGPDTIHAIRGDVIMLTVNPGGKERTEKEFRTLALQAGFKRLVKVCAAFHTCIMECHK

SEQ ID NO: 570 - protein, 200 aa, Clostridium acetobutylicum ATCC 824
MNNKKSTNVVWQETKIKRQNREKMLKQKGAVLWFTGLSGSGKSTVASALEKKLYEMGYLTYLLDGDNLRYGLNSDLGFKSEDRTENIRRVSEVAKLFADAGIITITTFISPFIEDRNNARKLLGKDFVEVYIDCPIEVCEKRDPKGIYKKARNGEIKNFTGIDSPYEKPEKPEITVETYKDTEEKCVDNIIEYLKQHKIL

SEQ ID NO: 571 - protein, 360 aa, Populus tomentosa
MGSTGETQMTPTQVSDEEAHLFAMQLASASVLPMILKTAIELDLLEIMAKAGPGAFLSTSEIASHLPTKNPDAPVMLDRILRLLASYSILTCSLKDLPDGKVERLYGLAPVCKFLTKNEDGVSVSPLCLMNQDKVLMESWYYLKDAILEGGIPFNKAYGMTAFEYHGTDPRFNKVFNKGMSDHSTITMKKILETYKGFEGLTSLVDVGGGTGAVVNTIVSKYPSIKGINFDLPHVIEDAPSYPGVEHVGGDMFVSVPKADAVFMKWICHDWSDAHCLKFLKNCYDALPENGKVILVECILPVAPDTSLATKGVVHVDVIMLAHNPGGKERTEKEFEGLANGAGFQGFEVMCCAFNTHVIE

SEQ ID NO: 572 - protein, 636 aa, Zea mays
MLSTRTAAVAASASPASPWKLGGRSEGGASCDGCRTYRNTLRRRAAPAKVRALPPRRVDAVAMVSNAETETEKEQEEAAAASEELPVMPWATSVASGYTLLRDPHHNKGLAFTEEERDGHYLRGLLPPAVLSQELQIKKFMNTLRQYQTPLQRYIAMMNLQETDERLFYKLLIDNVVELLPFVYTPTVGEACQKYGSIFGRPQGLYVSLKDKGKVLEVLRNWPHRNIQVICVTDGERILGLGDLGCQGMGIPVGKLALYTALGGVDPSVCLPITIDVGTNNEKLLNDEFYIGLRQKRATGEEYDELIEEFMSAVKQFYGEKVLIQFEDFANHNAFDLLEKYSKSHLVFNDDIQGTASVVLAGLLAALKMVGGTLAEQTYLFLGAGEAGTGIAELIALEISKQTNAPIEECRKKVWLVDSKGLIVDSRKGSLQPFKKPWAHEHEPLKTLYDAVQSIKPTVLIGTSGVGRTFTKEIIEAMSSFNERPIIFSLSNPTSHSECTAEQAYTWSQGRSIFASGSPFAPVEYEGKTFVPGQSNNAYIFPGLGLGLVISGAVRVHEDMLLAASKALADQATQDNFEKGSIFPPFTSIRKISAHIAAAVAAKAYELGLATRLPPPSDLVKYAENCMYTPVYRNYR

SEQ ID NO: 573 - protein, 468 aa, Novosphingobium aromaticivorans DSM 12444
MIIDGARVSGGGRRTHAVVNPATGETIGELPLAEVADLDRALEVAAKGFRIWRDSTPQQRAAVLQGAARLMLERQEDLARIATMEEGKTLPEARIEVLMNVGLFNFYAGEVFRLYGRTLVRPAGQRSTITHEPVGPVAAFAPWNFPLGNPGRKLGAPIAAGCSVILKAAEETPASALGVLQCLLDAGLPKEVAQAVFGVPDEVSRHLLGSSVIRKLSFTGSTVIGKHLMRLAADNMLRTTMELGGHGPVLVFGDADIDKALDTMAASKYRNAGQVCVSPTRFIVEESVFERFRDGFAERVGRIKVGNGLDQDAQMGPMANARRPEAMDRLIGDAVTRGARLHTGGERVGNAGYFYAPTVLSEVPLDAAIMNEEPFGPVALINPFGGEEAMIAEANRLPYGLAAYAWTDSAARAKRLAREIETGMLGLNSTMIGGADSPFGGVKWSGHGSEDGPEGVMACLVTKAVHEG

SEQ ID NO: 574 - protein, 488 aa, Arabidopsis thaliana
MESGGKTNRQLRKAICVSTDEKMKKKRSPSVIVIGGGMAGISAARTLQDASFQVVVLESRDRIGGRVHTDYSFGFPVDLGASWLHGVCKENPLAAVIGRLGLPLYRTSGDNSVLYDHDLESYALFDKAGNQVSQELVTKVGENFEHILEEICKVRDEQDEDMSIAQAFSIVFKRNPELRLEGLAHNVLQWYLCRMEGWFAADAETISAKCWDQEELLPGGHGLMVRGYRPVINTLSKGLDIRLSHRITKISRRYSGVKVTTEKGDTFVADAAVIALPLGVLKSGMITFEPKLPQWKQEAINDLGVGIENKIILNFDNVFWPNVEFLGVVAETSYGCSYFLNLHKATSHPVLVYMPAGQLARDIEKKSDEAAANFAFSQLQKILPDASSPINYLVSRWGSDINSLGSYSYDIVNKPHDLYERLRVPLDNLFFAGEATSSSYPGSVHGAYSTGVLAAEDCRMRVLERYGELEHEMEEEAPASVPLLISRM

SEQ ID NO: 575 - protein, 124 aa, Bromus inermis
MAARRAHAAATLALLAAVLVLSAAPAPAEGAVSNCGQVVSYLAPCITYATGRAPGPNGGCCSGVRSLNAAASTTADRQATCSCLKQQTSGMGGIKPDLVAGIPSKCGVNIPYAIKPSTDCTKVR

SEQ ID NO: 576 - protein, 169 aa, Brassica napus
SVNNVTASPDGKLVAVLGDSPECLLADAGSGKVIHALEGHLDYSFSSAWHPNGQILATGNQDTTCRLWDVRNLSKSLKVLKGNMGAIRALRFTFDGRFLAMAEPADFVHVFDTEAGYSQCQEIDMFGEVAGISFSPDTEALFVGVADRTYGSLLEFSRKRNHLYLDSIF

SEQ ID NO: 577 - protein, 380 aa, Zea mays
  misc_feature (123)..(123): Xaa can be any naturally occurring amino acid
SESESEAASRRQGEMGKGAQGSDAAAAGGEVEENMAAWLVAKNTLKIMPFKLPPVGPYDVRVRMKAVGICGSDVHYLREMRIAHFVVKEPMVIGHECAGVVEEVGAGVTHLSVGDRVALEPGXSCWRCRHCKGGRYNLCEDMKFFATPPVHGSLANQVVHPADLCFKLPDGVSLEEGAMCEPLSVGVHACRRAGVGPETGVLVVGAGPIGLVSLLAARAFGAPRVVVVDVDDHRLAVARSLGADAAVRVSPRAEDLADEVERIRAAMGSDIDVSLDCAGFSKTMSTALEATRPGGKVCLVGMGHNEMTLPLTAAAAREVDVVGVFRYKDTWPLCIDFLRSGKVDVKPLITHRFGFSQRDVEEAFEVSARGRDAIKVMFNL

SEQ ID NO: 578 - protein, 256 aa, Zea mays
RTRGRTRGRTRGRTRGRTRGRTRGRLPSCAAVSISTPPSSAAPLHYGHRTPLASPFPLSPPCPRILRAAVAVSSLDLRPITGGFALFSMAAASSATSVHDFTVKDASGKDVDLSTYKGKVLLIVNVASQCGLTNSNYTELSQLYEKYKDQGFEILAFPCNQFGGQEPGTNEEIVQFACTRFKAEYPIFDKVDVNGDNTAPIYKFLKSSKGSLFGDNIKWNFSKFLVDNEGRVVERYAPTTSPLSIEKDIKKLLGSS

SEQ ID NO: 579 - protein, 364 aa, Cupriavidus necator
MSRCGRRAELLHAAGTGSGSASFPMSAAPSSSPDAPATPGLPSSPLDPQVAALLELIARAKRPPIHAMEPEDAKIAYEKSAPILDINPPPVYMAEDLLAPARDGHAIPLRLYTPREASWTEPLPLLVYFHGGGFTVGSVDSHDPLCRLLCGQADCMVLSVDYRLGPQWRFPTAANDAFDVLHWVFAEAGRLGADPARIAVGGDSAGGTLAAACAVEARNAGLAPVLQLLIYPGTCARQDTPSHRALADGYLLTADMIRWFFAQYLDQEASRDDWRFAPLDGGGAGAEVRGTCPAWIAVAGYDPLHDEGVAYAEKLRAAGVAATLADYPGMIHDFFKLGRFVPAVAQAHAEAVAALRAAFGTPHN

SEQ ID NO: 580 - protein, 439 aa, Arabidopsis thaliana
MDKNGIVLMRKYELGRLLGQGTFAKVYHARNIKTGESVAIKVIDKQKVAKVGLIDQIKREISVMRLVRHPHVVFLHEVMASKTKIYFAMEYVKGGELFDKVSKGKLKENIARKYFQQLIGAIDYCHSRGVYHRDLKPENLLLDENGDLKISDFGLSALRESKQQDGLLHTTCGTPAYVAPEVIGKKGYDGAKADVWSCGVVLYVLLAGFLPFHEQNLVEMYRKITKGEFKCPNWFPPEVKKLLSRILDPNPNSRIKIEKIMENSWFQKGFKKIETPKSPESHQIDSLISDVHAAFSVKPMSYNAFDLISSLSQGFDLSGLFEKEERSESKFTTKKDAKEIVSKFEEIATSSERFNLTKSDVGVKMEDKREGRKGHLAIDVEIFEVTNSFHMVEFKKSGGDTMEYKQFCDRELRPSLKDIVWKWQGNNNNSNNEKIEVIH

SEQ ID NO: 581 - protein, 202 aa, Zea mays
LSVFALTRAPAFCELSLPLTKEKAAFSPSDPAMQRHVASGRPSGTDGSDFSYRMVVESRYQRVAEGRSRLARLILVQALHLVAGGLLLLLSLSKGAAVNKFAVLSMAAGFLAIVVGELGRMRTMAVLLRLYTSLSSIAVAFSVTCIIRSELFLKVMKQNTEAITSYEMLDAVRVALGILLQMVVIATTTRLLQNMSPPKRAS

SEQ ID NO: 582 - protein, 211 aa, Zea mays
GRVGGRVGGRVGGRVGCAPLMLRLAWHSAGTFDVATKTGGPFGTMKNPAEQAHGANAGLEIAIRLLEPIKEQFPILSYADFYQLAGVVAVEVTGGPDVPFHPGRQDKPEPPPEGRLPDATQGSDHLRQVFSTQMGLSDQDIVALSGGHTLGRCHKDRSGFEGAWTSNPLIFDNSYFKELLSGEKEGLLQLPSDKALLSDPSFRPLVDKSQF

SEQ ID NO: 583 - protein, 79 aa, Triticum aestivum
  misc_feature (35)..(35): Xaa can be any naturally occurring amino acid
  misc_feature (68)..(68): Xaa can be any naturally occurring amino acid
EVKVSEDGTVRATDFKKITTGKDDKGLKTYDPGYXLNTAPVRSSICYIDGDEGILRHRGYPIEEVAEXSSFVEVAYLLM

SEQ ID NO: 584 - protein, 463 aa, Bradyrhizobium japonicum USDA 110
MTPTMLPSSQQARDVAYQLHAYTNARSHQRAGPLIIERGEGPYVFDTAGKRYLDAMAGLWSAGLGFSEKRLIEAAHRQMQILPFYHTFASRSNGPSIALAEKLVKMSPVPMSKVFFTNSGSEANDTVLKLIAYRSNAAGQPQRKKVISRLRGYHGVTIGAASLTGFPDNHRSFDLPLPNIMHTGSPHFYKDSRAGESEETFATRRAEELESLIQREGADTIAAFFGEPVMGAGGVIVPPPTYWDKIQSVLKKHSILLVADEVICGFGRTGKMFGCETYNIAPDVIVVSKQLTSSYFPLSAIIMNDYMFEPIADESNKVGLLAHGFTGGGHPVGAAVALENLKLIEERGLIANVGRIGAYMQERLRTLVDHPLVGEVRGVGLIAAIELVLDKKRKVAATTPGDVGSIASRLLHERGIIVRNVDDALSICPPLIVNKDQIDELIDGITGMLHDLKATVVNCREPH

SEQ ID NO: 585 - protein, 205 aa, Triticum aestivum
ARRRYPGYDDPMQLAAQTAFSVSEVEALFELFKTISGSVIDDGFINKEEFQLALFKSKMDNIFANRIFDLFDVKKRGVIDFADFVQALNVFHPSIPMEEKIDFSFKLYDMDNTGFIERKEVKQMLIALLSESGMRLSDETIESIIDKTFSDADVNQDGKIDRAEWENFVSRNPSLMKIMTLPYLKDITTTFPSFVFNSKVDDIVT

SEQ ID NO: 586 - protein, 397 aa, Bacillus halodurans C-125
MANPNLKEEAIALHQKHSGKLEIVGKMEITDEKDLSLVYTPGVADVCKQIAEQPDKVNSLTSRGNMVAIVTDGTAVLGLGNIGPKAAMPVMEGKALLFKKFANIDGFPVCLNTQDTDEIVQIIKALSPTFAGINLEDIAAPRCFEIEERLKEELDIPVFHDDQHGTAIVVLAALTNALKVVNKLNQPIKMVINGAGAAGTAIANLLLHAGFKDITLVSLEGVVAKGEAWLNPMQAKMAEVTNLAGVKGTLKDAITDADVFIGVSGPGAMKKEHIQAMAKDPIVLALANPIPEIYPEEAIEAGAAVVGTGRSDYPNQVNNLLAFPGIFRGALDAGAKTITMEMKIAAAYAIADVLSDKEVNANMIIPDALDARVAQRVAEAVATTALQRERVAALSAN

SEQ ID NO: 587 - protein, 183 aa, Amaranthus hypochondriacus
MASSMLSNAAMATTAATAGAQASMVAPFNGLKSFATFPITKKSSNDFSSLPSNGGRVQCMQVWPPVGKKKFETLSYLPPLSDAQLLAQVQYLLNKGWIPCIEFELEHPFVYRENHRSPGYQDGRYWTMWKLPMYGCTDPAQVLNEVEEAKKAYPSAFIRIIGFDNKRQVQCVSFIAYKPAGGL

SEQ ID NO: 588 - protein, 244 aa, Brassica napus
MEVITHPTPRTVDEVFTDFRGRRAGLIKALTTDMVKFYQTCDPEKENLCLYGLPNETWEVNLPVEEVPPELPEPALGINFARDGMQEKDWVSLVAVHSDSWLLSVAFYFGARFGFGKNERKKLFQMINELPTIFEIVTGNAKQSKDLSGNNNTSSKSKSNGLKVPKMSSPPPKEEDESEAEDEDDEQGAVCGACGDSDGTDEFWICCDACEKWFHGKCVKITPAKAEHIKPYKCPSCSNKRARP

SEQ ID NO: 589 - protein, 109 aa, Glycine max
MSGVWVFKNGVVRLVENPGGEAVEGSRGGRRKVLVHRASNEVITSYAVLERKLYSLGWERYYDDPDLLQFHKRSTVHLISLPRDFNKFKPMHMYDIVVKNKNAFEVRDM

SEQ ID NO: 590 - protein, 431 aa, Corynebacterium efficiens YS-314
MSNVGTPRTAQEIQQDWDTNPRWNGITRDYTAEQVAELQGSVVEEHTLAKRGAEILWDAVSAEGDDYINALGALTGNQAVQQVRAGLKAVYLSGWQVAGDANLAGHTYPDQSLYPANSVPNVVRRINNALLRADEIARVEGDTSVDNWLVPIVADGEAGFGGALNVYELQKGMITAGAAGTHWEDQLASEKKCGHLGGKVLIPTQQHIRTLNSARLAADVANTPTVVIARTDAEAATLITSDVDERDRPFITGERTAEGYYHVKPGLEPCIARAKSYAPYADMIWMETGTPDLELAKKFAEGVRSEFPDQLLSYNCSPSFNWSAHLEADEIAKFQKELGAMGFKFQFITLAGFHSLNYGMFDLAYGYAREGMPAFVDLQNREFKAAEERGFTAVKHQREVGAGYFDTIATTVDPNSSTTALKGSTEEGQFH

SEQ ID NO: 591 - protein, 122 aa, Hordeum vulgare subsp. vulgare
MARLNSKAVAAAVVLAAVVLMMAGREASAALSCGQVDSKLAPCVAYVTGRASAISKECCSGVQGLNGLARSSPDRQTACRCLKSLATSIKAINMGKVSGVPGKCGVSVPFPISMSTDCNKVH

SEQ ID NO: 592 - protein, 248 aa, Chlamydomonas reinhardtii
MASAFERPRHAAGLDFDVEKGAALNAFAERTVRQGFVRKVFGLLAVQLALTTVIAGTFVTSTAVKTFVAAHPWVLMLGMLAGFGILLTLTLSSSARQSHPTNLILLFVFTAAEGVLVGAASSASRTDVVLLAFGLTAGITAAMTVYALTTKNDLTMSGAALYSCLWGLLLAGLVGMFVRTSAFNILLSAVGAVVFSVYIAYDVQCLLGGEHKYAVSPDEYVLGAIAIYLDIINLFMHILRLLNEANRN

SEQ ID NO: 593 - protein, 215 aa, Triticum aestivum
  misc_feature (19)..(19): Xaa can be any naturally occurring amino acid
  misc_feature (98)..(98): Xaa can be any naturally occurring amino acid
RGRGRGVNACIGSCGGLCXGVNTVMRELECGLAHMYNVNNIFGIQNGYKGFYSSNYVAITPKTVTDIHKRGGTVLGTSRGGHDTKKIADNIQDRGINXVYIIGGDGSQKGAYEIYKEIRKRGLIVAVAGVPKTIDNDIAIIDKSFGFDSAVEEAQRAINSAHVEACSAENGIGLVKLMGRYSGFIAMYATLASRDVDCCLIPESPFYMDGEGGLL

SEQ ID NO: 594 - protein, 486 aa, Xylella fastidiosa Temecula1
MMHHNVHQSEILADPCDLQRAERWRQRDLRVLWHPCTQMREHPDTLPLVPIVRGEGVWLVGHDGRRYLDAVSSWWTNLFGHADPRISAAIAAQARTLEHVMLAGFSHEPAVRLAEALLRLAPRQDGREPLSKVFYADNGSAGVEVALKMAFHYFRNRGEEQRTRFIALHNGYHGETIGALAVGDIPLYRRVYAPLLTEVLFAPSPDAYLAEPGQSAAEYALQAAEALEALFKRYSGQICALILEPLLQCAGGMRMHHPVYLHRVRELCDAHGALLICDEIATGFGRTGTLFACEQACSAISTDTDDKDLGIMPDLLCLSKGLTGGFLPLAAVLTTQQLYEEFLDDSRERAFLHSHSYTGNPLACIAALTTLDIFENDCIIERNQVTAARMTQLAASLSGHPHVADVRQTGMVVAFELTRDGNKRTPFPPQARLGLHVYRAALARGVILRPLGDVVYWMPPYCVDEQQLHLLAETTRVAIDEAIACV

SEQ ID NO: 595 - protein, 449 aa, Arabidopsis thaliana
MDIFDNSDLEYLVDEFHADFDDDEPFGEVDVTSESDSDFMDSDFDFELSESKTNNETSALEARNGKDIQGIPWESLNYTRDRYRENRLLHYKNFESLFRSREELDKECLQVEKGKNFYDFQFNTRLVKSTIAHFQLRNLVWATSKHDVYFMNNYSLMHWSSLLQRGKEVLNVAKPIVPSMKQHGSLSQSVSRVQISTMAVKDDLIVAGGFQGELICKKINEPEVAFCTKLTSADNDITNSVDIYNAPSGSLRVMTANNDCTVRLFDATNFALLNRFAFHWSVNNISTSPDGKLVAVLGDSPECLLADTGSGKVIHGLEGHLDYSFSSAWHPNGQILATGNQDTTCRLWDVRNLSQSLKVLKGNMGAIRALRFTSDGRFLAMAEPADFVHLFDTEAGYSQCQEIDLFGEIAGISFSPDTEALFVGVADRTYGSLLEFNRKRNHSYVDSIF

SEQ ID NO: 596 - protein, 155 aa, Triticum aestivum
MAAFLRSKCSSVGRAMMGSLGNNLYGGATSSIETVARPSRSDAVCQQIRTFIQMRTNLKVVDNSGAKRVMCIQSLRGKKGARLGDMIIGSVKEAQPRGKVKKGDVVYGVVVRAAMKKGRSDGSEVQFDDNAIVIVNNKGELIGTRVFGPVPHELR

SEQ ID NO: 597 - protein, 123 aa, Pyrus communis
LVEACKNSLEKLQLDYLDLYLVHYPMPTRHNAIGKTASLLGEDKVLDIDVTISLQQTWEGMEKTVSLGLVRSIGLSNYDLFLTRDCLAYSKIKPAVSQFETHPYFQRDSLVKFCIKHGVLPTA

SEQ ID NO: 598 - protein, 459 aa, Capsicum chinense
MANITNEFMGHDMLAPFTAGWQSDMEPLVIEKSEGSYVYDINGKKYLDTLSGLWCATLGGSETRLVEAANKQLNTLPFYHSFWNRTTKPSLDLAKELLNMFTANKMAKVFFTNSGSEANDTQVKMVWYYNNALGRPQKKKIIARAKAYHGSTYISAGLSGLPPMHQKFDLPPPFVLHTECPHYWAYHLPGETEEEFSTRLANNLESLILKEGPETVAAFIAEPVLGAAGVILPPATYFDKVQAILRKHDILFIADEVVCGFGRLGTMFGSDKYNIKPDLVSVGKALSSGYMPIAAVLVSQKISSVILSESNKIGAFCHGFTYSGHPVACAVALEALKIYKERNITEVVNKISQKFQEGLKAFADSPIIGEIRGTGLALSTEFVDNKSPNDPFPYEWAVGTYFGAQCAKYGMLVSSTGDHVNMAPPFILSLEELDELIRIYGKALKDTEKRVEELKSQKQ

SEQ ID NO: 599 - protein, 199 aa, Zea mays
  misc_feature (62)..(62): Xaa can be any naturally occurring amino acid
  misc_feature (74)..(74): Xaa can be any naturally occurring amino acid
  misc_feature (80)..(81): Xaa can be any naturally occurring amino acid
MAYSMLSSAAVVTSPAQATMVAPFTGLKSSSAFPVTRKANNDITSIVSNGGRVSCMKVWPPXGKRKFETLSYLXPDLTEXXNWVRKVDYLSPATGGFLGGESRVGATGFGYRGSTGKHPPETTKGRYWEKGETFPLGRKGPHLWLKGVKEAPKGEKGEPPNRLSTGILGFQNTPGEAGGSCFFPPKKTTNFSGGLKLPL

SEQ ID NO: 600 - protein, 357 aa, Streptomyces griseoflavus
MTITASGSLPPSAPVAVQILDLLMGGWRAGVVSTFAELGVADGLAAGGLTPAQLAVRLGLEHDTAERFFRAGASVGLLRRGEHDTLELTELGRALASDDGSMRNFARWTGSTAERATWAHLATAVRTGRSPFAAMHGSGVWEFMESDPDTAAVFNSAMTELSKRVIQPVIEAFDFSRFSSVTDVGGGRGALLAAVLRKHPEMTGVLFDQPDVVSRSLPELSDAAVAHRVTVKSGSFFDGVPSGSDLFMISNVLHDWDDGRSRLILRNIAEAMHEGAHIAVVEAVAGLDDTADKAISLMDMDMLLLCEGKQRTVEEFRLLMAEVGIELVGVSRAGLQSVVEGRKVSGETGTPGSPRSR

SEQ ID NO: 601 - protein, 338 aa, Glycine max
QIIPWNFPLVMFAWKVGPALACGNTIVLKTAEQTPLTALFVAKLFHEAGLPDGVLNVVSGYGPTAGAALASHMDVDKLAFTGSTDTGKVVLELAARSNLKPVTLELGGKSPFIICEDADVDKAVELAHFALFFNQGQCCCAGSRTFVHERVYDEFLEKSKKRALRRVVGDPFKKGVEQGPQIDVEQFEKVLRYIRSGIESHATLECGGDRLGSKGFFVQPTVFSNVQDDMLIAQDEIFGPVQSILKFKDIDEVIRRANKTRYGLAAGVFTKNVSTANTLMRALRAGTVWINCFDVFDAAIPFGGYKMSGIGREKGIYSLHNYLQVKAVVSPVKNPAWL

SEQ ID NO: 602 - protein, 498 aa, Streptomyces griseoflavus
MTASVPPFTVGREDPRYIELSHSDNHRFVVEPEEFFLPATPDDVVASLQKAVTEGRGVACRSGGHCGQDFVGTPRRDLVLDLHNLHAIGPAADGAGVRVGSGATVDQVQKALFRRWNAALPLGACSAVGMGGLVAGGGYGPLSRQLGLVVDHLHAVEVAVVDESRTVRLVTARADDTGDLGELFWAHTGGGGGNFGVVTAYEFRSPEHLATEPVGLPRAAGRLHVQKVVFPWAMIDETSFVTVMRRFFEWHERHSEPGSPESSLFATFFVNHVSSGVLQLMVQQDADVDPEGEILARFVASLTEGTGVVGIPRGGVMSWLTGTRYMSQADCGDVMGARSASKSAYHRAAPTDEQLSVLHRHLHADHPGQASYVMFNSYGGEINRRGPSDAAVPQRDSVVKSSWFSAWQDAELDELHLGWLRGLYEEFFAGTGGVPVTGGRTDGCYINYPDADLLDPARNRSGEPWHHLYYKDNYARLRSAKRAWDPLNTFHHSMSIGL

SEQ ID NO: 603 - protein, 448 aa, Bacillus sp. KSM-K16
MLDLCITGGRVVLPSGVEETDVGIQAGKIARIGPINKKEARCIMNANGQYVFPGAVDTHVHFSEPGRTEWEGFFTGSRSLAAGGTTTYVEMPLNALPATTNRANLQRKLEAAKGQNYVDYSFYGGLVPTNLHELADLSASGVVAFKCFLSPCGSDIPGDFRNVDLNGLRAGMRLLAEKGQLLCVHAEDPSMISQLEAKLLSPVGADAYVASRPVEAEVKAVCDTLAAARETGCRIHFVHISSAAAIEAIERAKEEGVDVTVESCPHYFLLSAEELAELGPLAKCQPPLRPKQEQAKLWACLLDGQIDWLASDHSPCTPDLKDGDFLTAWGGISGCQNNIDIMFDAAVKRRGMPPEQLARLIATNPAKRMNLREKGEIAIGKDADFAFVDDRQSYTLTKEQLYYKNKHSPYVGRTIGCKVRRVLLRGQTIYTEEKGIIGKPSGELLHIH

SEQ ID NO: 604 - protein, 473 aa, Thermobifida fusca
MSQRPFWLAGSATTGDNELTVTNPYTGQTVATVAVPSPEQVDQAVAAAHGALDATAALPAHVRATALAHVARRLQERSEEIAQLITAESGKPILWARAEVGRAVSVFTWAAEEVRRDSGRVQRLDTDSAGEGRIALIRRVPKGAVLAISPFNFPLNLVAHKVAPAIAVGAPIVVKPAPATPLSALVLGEILAETDLPAGAFSVLPMPNELAQPLITDERLPVISFTGGQFGWELRKMAPNKHVTLELGGNAAAVVLADADLDWAARRIALFGNNQAGQVCIGVQRVIVEDAVYDEFAAKLVQRVEELVTGDPADEATQVGPLINEAAAARVEQWVNEAVAGGATVLTGGTRDGVTMAPTVLADVPDDAKVVCEEVFGPVMVLRRVSGVDEAFAEVNNSKYGLQAGVFTRDLATAFRAHRELKVGGVIIGDVPTYRADQMPYGGVKKSGVGKEGVRSAMDDLTDERVMVLTGVL

SEQ ID NO: 605 - protein, 116 aa, Avena fatua
SQVYQKYKDQGLEILAFPCNQFGGQEPGTNEEIVEFACTRFKAEYPIFDKVDVNGKEVSPLYKFLKSSKGGLFGDSIKWNFSKFLVDKEGRVVDRYAPTTSPLSIEKDIKKLLGTS

SEQ ID NO: 606 - protein, 286 aa, Lactobacillus plantarum WCFS1
MTALTKLTDTYTLNNGTKIPIVGFGTWQTPDGQVAYDSVLAALKAGYRHIDTAAAYGNEESVGKAIADSGVAREDLFVTTKLWNADHGYDAAKKALDTSLAKLGLDYVDLYLIHWPNPAAMRDNWEQLNADTWRAMEEAYTARKARAIGVSNFRPKHLDALLKTAKVVPAVNQIFLNPSDMEDEVVAYNRKHDILSEAYSPLGTGKIFSIPELKTLADKYDKSVAQVVLRWSLQHGFLPLPKSVHADRIEQNTELFDFELSDDDMKVIDGFHGVAGLANDPDQVNF

SEQ ID NO: 607 - protein, 233 aa, Porphyra purpurea
MSTNVVWHEGLITREARAKLLGQKGATVWLSGLSGSGKSTVSVELEQQLFAKKVLSYRLDGDNIRQGLNKNLSFSPADRKENIRRISEVAKLMCDIGVVVTTAFISPYTEDRDMAREIHKAASIPFIEVFVDCPLEVAESRDPKGLYKKARSGEIKNFTGIDAPYEKPPSPEITLDTSKQTIAECAAVILTYLTEKGLISSEPKEEAKPAKELEVAPAAPAAEAEAEKVPAAV

SEQ ID NO: 608 - protein, 266 aa, Triticum aestivum
MQLEVMANRGKILMERYELGRLLGKGTFGKVHYARSLESNRSVAIKMLDKEKVLKVGLSEQIRREVTTMRLVAHKNIVQLHEVMATRNKIYFVMEYVKGGELFDKVAKSGKLTEGAAHKYFQQLISAVDYCHSQGVYHRDLKLENLLLDENENLKVSDFGLSALSESKRQDGLLHTTCGTPAYVAPEVISKTGYDGAKSDIWSCGVILFVLVAGYLPFHGSNLMDMYRKIEQGDFRCPNWFSHKLQKLLFKILDPNPSTRASIQKI

SEQ ID NO: 609 - protein, 214 aa, Glycine max
MEQEEHEVYGADIPDEEIDMDADAEQQDEQLAPNHTNKELEDMKKRLKEIEEEASALREMQAKVEKEMGAVQDSSGTSATQAEKEEVDARSIYVGNVDYACTPEEVQQHFQSCGTVNRVTILTDKFGQPKGFAYVEFVEIDAVQNALLLNESELHGRQLKVSAKRTNVPGMKQYFGRRPAGFRSRRPFMPAPFFPPYGYGRVPRYRRPTRYRPY

SEQ ID NO: 610 - protein, 496 aa, Enterococcus faecalis V583
MSKKEINQVVASSYQLYINGEWTTGSGNKMIASYNPSNGEKLAEFVDATNADVDRAVEAAQEAFQTWKDVDVVTRSNLLLKIADLIEENQEHLAMVETLDNGKPLRETQSIDVPASADHFRYFASVIRGEEGSVKEFDKDTLSIVVKEPIGVVGQIIPWNFPLLMGAWKLAPALAAGNTVVIHPSSSTSLSLLELFKIFDQVLPKGVVNLITGRGSDSGNYMLAHPGFDKLAFTGSTEVGYTVAKAAADRLIPATLELGGKSANIIFEDANWERALEGVQLGILFNQGQVCCAGSRVFVQSGIYDQFVEALKEKFEQVNVGFPWEKDVEMGAQINEHQLEEILKYVEIGVKEGATLITGGQRLTENGLDKGAFLAPTLLANGTNAMCVAQEEIFGPVATVIKFETEEEVIRLANDSEYGLGGAVFSQDINVALRVARGVRTGRMWVNTYNQLPAGAPFGGYKKSGIGRETHKSMLDAYTQMKNIYIVTKEEADGLY

SEQ ID NO: 611 - protein, 99 aa, Brassica napus
MAAAAKLSFKDSLKALEADIQHANTLALDYPREKDGARVQMRLSYSPAAQFFLFLVQWTDCHLAGSLGLLRVLIYMTYADGKTTMSVYERKASIREFYA

SEQ ID NO: 612 - protein, 246 aa, Glycine max
MTSASELFHSRRHRLGRSALDLGLDTELNAADSLRRHYHLRRLRHHPERASDRIDGRYRRSFASESVDSEENVRSSLRGSDSERLPVGVVLARARLLQRLRGEPLSTNSATQYDRDSFGEDPESESSNEDPSGASLVTELTSQMARSQFLQELSTKPPGLTQEALDCLHQEVFSSNASEIGLDSRVLQDCSICLESFTDGDELIRLPCGHKFHSVCLDPWIRCCGDCPYCRRCIVVNTHSSLNEDE

SEQ ID NO: 613 - protein, 512 aa, Oryza sativa (japonica cultivar-group)
MEKLKSELWMTAVATCMSLLLYLTILRRRHASGGRSLALPPGPTPLPLIGNLLCLGGIFHQTLAKLARVHGPVMTLKLGLTTAVVVSSAEAAREAYTKHDQRLAARPVPDAFRANGFSERSIVFSPSSDPQWKNLRGIHATHIFSPRALAALRGIRERKVRDIVGYIRTVAGEEMCVREVVHNGVLNLISTSFFSMDMADVRSESARGLRGLIEDIIATVAGPNVSDFFPFLRQLDLQGLRRQTGSHLGIVFGLLDDIIDRRMAETRDHPDKQRHGDFLDALISLASAGKIPRYHITYLLFDVFAAGADTMTTTVEWAMAELLRNPRVMAKVRAEVTDALGGRESFDEGDAASLTYLQCVFKEAMRLHPVGSILVPHLAVQDGVEIGGYAVPKGTTVIFNAWAIMRDPAAWESPDQFLPERFLHKEESSSPPLELRGKDYEYIPFGSGRRLCPGLPLAERAVPFILASLLHAFEWRLPDGMSPDDMDMTEKFATANVLATPLKAVPVASHTS

SEQ ID NO: 614 - protein, 143 aa, Pichia angusta
MSRSGVAVSDEALKAFNDLKLGKKFKSIIYKLNDAKTEIVVDSTSTEDAYDAFVEDLPENDCRYAVYDFEYEVGQGDGKRNKIVFYQWSPDTASVRAKMVYASSKDALRRALNGIGTEIQGTDFSEVAYESVLEKISRTTGLH

SEQ ID NO: 615 - protein, 441 aa, Zea mays
MSQPKIKRRVGKYEVGRTIGEGTFAKVKFARNSETGEPVALKILDKEKVLKHKMAEQIRREVATMKLIKHPNVVRLYEVMGSKTKIYIVLEFVTGGELFDKIVNHGRMSENEARRYFQQLINAVDYCHSRGVYHRDLKPENLLLDTYGNLKVSDFGLSALSQQVRDDGLLHTTCGTPNYVAPEVLNDRGYDGATADLWSCGVILFVLVAGYLPFDDPNLMNLYKKISAAEFTCPPWLSFTARKLITRILDPDPTTRITIPEILDDEWFKKEYKPPIFEENGEINLDDVEAVFKDSEEHHVTEKKEEQPTAMNAFELISMSKGLNLENLFDTEQGFKRETRFTSKSPADEIINKIEEAAKPLGFDVQKKNYKMRLANVKAGRKGNLNVATEIFQVAPSLHMVEVRKAKGDTLEFHKFYKKLSTSLDDVVWKTEDDMQMRETK

SEQ ID NO: 616 - protein, 128 aa, Glycine max
  misc_feature (51)..(51): Xaa can be any naturally occurring amino acid
VCSMISSPAVTTVNRAGACMVAPFTALKSMVGFPWRKTTIDITFVAINGGXVQCMLVSPPIANKKFETLSYSPYLNDAQLLYEVKYHLKTGWIPCSQFDTDHGLGYHDHNRAPGYYYGLYWTMWKLPM

SEQ ID NO: 617 - protein, 95 aa, Glycine max
  misc_feature (54)..(54): Xaa can be any naturally occurring amino acid
ASSKISFPVVTTDNRAGAGMVAPFTGLIFMAGFPTIKTNIDITSIASNGGRVQXFQVWPPAGNKKFETLTFLTDLDNAQLSNEVKYLLKKGWIPC

SEQ ID NO: 618 - protein, 399 aa, Candida tropicalis
MMNIDQHHQQLQQQSQAQAQAQAQAQAQAQAQAQAQAQAQAAAAAVAASSQRQVSFNVSDHYQILEIVGEGAYGIVCSAIHKPSNQKVAIKKIEPFERSMLCLRTLRELKLLKHFNHENIISILAIQRPLNFESFNEIYLIQELMETDLHRVIRTQNLTDDHIQYFIYQTLRALKAMHSANVLHRDLKPSNLLLNSNCDLKVCDFGLARSIASQEDNYGFMTEYVATRWYRAPEIMLTFQEYTTAIDVWSVGCILAEMLSGRPLFPGRDYHNQLWLIMEVLGTPNMEDYYNIKSKRAREYIRSLPFCKKIPFQELFSNKPGINPLALDLLEKLLIFNPAKRITVEDALKHPYLQLYHDPNDEPISDKIPEDFFDFDKKKDSLTIEDLKKMLYEEIMKPL

SEQ ID NO: 619 - protein, 147 aa, Pyrus communis
VVGAGPIGLVTLLAARAFGAPRIVIADVNDERLSIAKSLGADEVVRVSTNIEDVAEEVAKIQKVLENGVDISFDCAGFNKTITTALSATRPGGTVCLVGMGQREMTLPLATREVDIIGIFRYQNTWPLCLEFLRSGKIDVKPLITHR

SEQ ID NO: 620 - protein, 397 aa, Saccharomyces cerevisiae
MSTEEQNGGGQKSLDDRQGEESQKGETSERETTATESGNESKSVEKEGGETQEKPKQPHVTYYNEEQYKQFIAQARVTVGSIVYKNFQILRTLGTGSFGRVHLIRSRHNGRYYAMKVLKKEIVVRLKQVEHTNDERLMLSIVTHPFIIRMWGTFQDAQQIFMIMDYIEGGELFSLLRKSQRFPNPVAKFYAAEVCLALEYLHSKDIIYRDLKPENILLDKNGHIKITDFGFAKYVPDVTYTLCGTPDYIAPEVVSTKPYNKSIDWWSFGILIYEMLAGYTPFYDSNTMKTYEKILNAELRFPPFFNEDVKDLLSRLITRDLSQRLGNLQNGTEDVKNHPWFKEVVWEKLLSRNIETPYEPPIQQGQGDTSQFDKYPEEDINYGVQGEDPYADLFRDF

SEQ ID NO: 621 - protein, 160 aa, Bartonella quintana
SIDQLAEKGDFLESCYLLLYGELPTKQEKIDFDRCIMQHMMVHEQFTRFFHGFRRDSHPMAVMVACLGAMSAFYHDSIDIKDAQQRMIAAIRLISKVPTLAAMAYKYSIGQAFVYPRNDLSYAANFLHMCFSVPCEEYKINPVLSRAMDRIFTLHADHEQ

SEQ ID NO: 622 - protein, 484 aa, Comamonas testosteroni
MKDIQNFINGAYVSTGRSFDKHSPLTGKVIAKVHEAGRNEVDAAVTAARTALNGPWGRMSVAERVEKLYAVADGINRRFEEFLAAECADTGKPRSVASHIDIPRGAANFKIFADVVKNVPTEFFEMATPDGRGAINYGHRGPVGVVGVICPWNLPLLLMTWKVGPALACGNTVVVKPSEESPQTAALLGEVMNEAGIPPGVYNVVHGFGPDSAGEFVTSHPGVDAITFTGETRTGEAIMKAAAKGARPVSLEMGGKNAAIVFADCDFDAAIDGTLRSAFVNSGQVCLGTERVYVERPIYERFVAALKQQIEGWKIGVPEDDDTKLGPLISKEHQAKVLSYYQLAVQEGATVVTGGGMPDLGAQYADGAWVQPTIWTGLPETARVIKEEIFGPCCHIAPFDTEEEVLTKANDNVYGLASAIWTQDLARAHRVAQRMHVGISWVNSWFLRDLRTPFGGAKQSGIGREGGVHSLEFYTELKNVCIKL

SEQ ID NO: 623 - protein, 118 aa, Glycine max
MATLDSDVTMVPAGEPSTSAGPSSSTKKPKRFEIKKWNAVSLWAWDIVVDNCAICRNHIMDLCIECQANQASATSEECTVAWGVCNHAFHFHCISRWLKTRQVCPLDNSEWEFQKYGH

SEQ ID NO: 624 - protein, 214 aa, Arabidopsis thaliana; identical to SEQ ID NO: 210

SEQ ID NO: 625 - protein, 191 aa, Zea mays
MSLCTIARRLCLSKPSSVNRLSVIWAHLYSTEAAKDTGAKKYKYPDVYDPYGPMSLPSEKVVDLADRIAALPPEEIKQIAPALLFRLNQEPPQAISGQGFSFVAQGGAGVGAGKAEKKAEKTVFDVRLEKFDAAAKIKIIKEIRTFTDLGLKEAKELVEKAPVVLKQSLTKEEAEAIIAKIKAAGGVAVME

SEQ ID NO: 626 - protein, 92 aa, Triticum aestivum
  misc_feature (14)..(14): Xaa can be any naturally occurring amino acid
  misc_feature (73)..(73): Xaa can be any naturally occurring amino acid
MAFSMLSFGTMAAXSAAQATMVAHFNGLMSSAVFPATATANNDTTCMTSNGGRGNCMQVWPTIVKKKIETLSXLSDPTDSAWAYEVDYLIRN

SEQ ID NO: 627 - protein, 206 aa, Oryza sativa
VYHPVKLVRESTKPVPNGSPPTLGGLLKTKVQEGVRVIVFLWDDKTSHDKFLLKTDGLMHTHDEEARKFFRHSGVHCVWAPRYASNKLSIFKQQVVGTLFTHHQKCVIVDTQVIGNNRKITAFIGGLDLCDGRYDTPEHRLFKDLDTVFKDDFHNPTFQVNKSGPRQPWHDLHCKIEGPAAYDILTNFEQRWRKSAKWKVSVRRAV

SEQ ID NO: 628 - protein, 332 aa, Oryza sativa
SVKGFPKLVQEAESQNLVCAKNLQIDKSIHNAYVKAIRSAQHYIYIENQYFIGSSYYWSSNRSAGAENLIPIELAIKIARKIKARERFAAYIVIPMWPEGNPTTAAMQEILFWQGQTMSMMYKIVAEALQKEGLDDTHPQDYLNFYCLGKREVSNDVSTTSQSNENSPQRLVQKFKRFMIYVHSKGMIVDDEYVLIGSANINQRSMDGSRDTEIAMGAYQPHYSWAGRKKAPRGQVYGYRMSLWAEHLGTVEECFRWPHSVECVRQVNEMAEENWARYVSPEMVNMRGHLMRYPINVERDGRVGPVHGYECFPDVGGKVLGTHSSLPNALTT

SEQ ID NO: 629 - protein, 320 aa, Botryotinia fuckeliana
MPAYSDKVMLTFNNTVKQTTGFESGATKLKNMLRDSNELIVCPGVYDGISARVALQVGFPALYMTGAGTTASRLGMADLGIAQLSDMKDHAEMIANLDPYGPPLIADMDTGYGGPLIIDKAVKSYIRAGVAGFHIEDQIQNKRCGHLQGKKVVPAEEYYMRIRAAKAAKEAMNSDIVLIARTDALQQLGYDECIKRLKVAREMGADVGLLEGYTSKEMAAKTVKEFAPWPILLNMVENGSTPIITTKEAQEMGFRIMIFSFAALAPAYLAIQETFLRLKRDGVVGTPKNLTPKALFDVCGLKDSIVVDTTAGGGAFADGV

SEQ ID NO: 630 - protein, 479 aa, Mesorhizobium loti MAFF303099
MAQFRKNLIDGEWVGDAGSHNINPSDTGDVVGEYASAGVEQAKQAIAAAKAAFPSWSRSGPLARHAVLKKASDEIMARKDEIGRNLAREEGKTLAEGIGETIRAAQIFDFFAGETLRLTGEMVPSVRPGVGVEITREAVGVVGIITPWNFPIAIPAWKIAPALAHGNTIVFKPAELVPESAWSIVDILHRAGLPKGVLNLVMGKGSVVGQAMLDSPDINAITFTGSVGTGKRVAAASVEHMRKFQLEMGGKNPLVVLDDADLAVAVDCALNGAFFSTGQRCTASSRLIVTEDIHDRFVEALKERMGKLVIGDALDAQTQIGPVVDATQLKQDEDYIAIGVREGATLAFGGERLDRKTPGFYLSPALLTEATNAMRSSREEIFGPVASVIRVKNYDEALSVANDTPFGLTSGICTTSLKHATHFKRNSEAGMVMVNLPTAGVDFHVPFGGRKGSSYGPREQGRYATEFYTTVKTAYTFAG

SEQ ID NO: 631 - protein, 511 aa, Streptomyces coelicolor A3(2)
MHNPGNATPDRFPAQDRFADGAQYIAGRLTKGTSGRTHTVVDPATGEDVLTYDLAGPDDVDAAVAAARAAFPGWAGATPGERSDALHRFAAVLAERAEDFARAESLQCGKPLKLTREFDVPGTVDNAAFFAGAARHLQGQSAGEYSGDHTSYVRREPIGVVGSIAPWNYPLQMAAWKILPAIAAGNTIVLKPAEITPLTSLMFAQAATEAGIPDGVINVVSGTGREAGEHLVAHPDVAMTSFTGSTAVGKRVAEVATATVKRLHLELGGKAPFLVFDDADLDAAVHGAVAGSLINTGQDCTAATRAYVQRPLYEAFVEKTAALMDTVRVGDPFAPGTDLGPLVSHVQRDRVAAFVDRARSYARVVTGGEVPQGDLKDGAYYRPTLVADAAQDSEVVQSEIFGPVLVVLPFDTDDEGIRLANDTPYGLAASAWSRDVYRANRATREIKAGCVWINDHIPIISEMPHGGYKASGFGKDMSAYSFEEYTQVKHVMFDNTAVAAKDWHRTVFGDR

SEQ ID NO: 632 - protein, 208 aa, Zea mays
MDEEEHEVYGQEIPVDGDMEAADVDMTAAGDDAAKELDEMKRRLKEMEEEAAALRDMQAKVAKEMQGGDANASTAEAKEQVDARSVYVGNVDYACTPEEVQQHFQACGTVNRVTILTDKFGQPKGFAYVEFLEQEAVQEALNLNESELHGRQIKVSPKRTNVPGMKQRPPRGFNPYHAYPYRSYGAPYFPLYGYGRVPRFRRPTRYRP

SEQ ID NO: 633 - protein, 305 aa, Helianthus annuus
MPSQSDLDRQIEHLMDCKPLPEEVRTLCDQARTILVEEWNVQPVKCPVTVCGDIHGQFHDLLELFRIGGSAPDTNYLFMGDYVDRGYYSVETVTLLVALKVRYRDRITILRGNHESRQITQVYGFFDECLRKYGNANVWKHFTDLFDYLPLTALIESQIFCLHGGLSPSLDTLDNIRALDRIQEVPHEGPMCDLLWSDPDDRCGWGISPRGAGYTFGQDIAAQFNHTNGLSLISRAHQLVMEGYNWSQENNVVTIFSAPNYCYRCGNMAAILEVGENMDQNFLQFDPAPRQVEPDVARRTPDYFL

SEQ ID NO: 634 - protein, 501 aa, Photorhabdus luminescens subsp. laumondii TTO1
MSSEFCFVKYGFDKNLNKLINEFQFDELSTGTILFRSTTKVSKFKSERYTAFLIGNIYNISTIRSILGKIEGRSSVLSDVEILLLSRDKFGNSIISIAEGDYCLFIEDKKGNIEVITESRGLNLVNLVQTDLIWITNSLKIVGKVEGDKAFDFKPESEVIKNSLKPDNFSPIRNVSRLKPGTINKLTFDEQRYLHLEVEYVISPVEENSFDIKESVLLEIIDSDLRNSISRLSKNNETIGVPLSGGLDSSLVTALASKYFDKVKTWSIGTELSNEFEFSKIVSDYLGTEHEVKILSEDEVISGVVKAIYYNEIFDGLSSEIQSGLFNVYELAKGKVNSLITGYGSDLLFGGILDPEKSYIEPNKILSEQVYRTKWTGEFSTHGAGNYGLNVYHPFWTNNLISLCHNLDPYFKIRDNEVKNILREYANSINILPKEIVWRKKIGIHEGSSVNKSFATMIGTEVNNYQDKTRFSYSIYKEFLTGRLSIEEANSTKLCEIIRRN

SEQ ID NO: 635 - protein, 300 aa, Sulfolobus tokodaii str. 7
MYEWHWHIEWQTPYEFHGHAITKVIAEEKTPYQRALLVELARFGKALILDGKIQSTITDEFIYHEALVHPLLLSINNPEKILILGGGEGATLREVLKHKTIKNVTMVDIDPVVIDFAKKYLQEWHQGAFDNPKSKLVIEDGYKFIKETKEKFDAVVIDLTDPIKDSPSQMLYTKEFYEEVKRISKWGIVTQATSPSFSLETFSIIYNTIKHVFKKVSAGITYVPAFDGLWGFVYASDEVNPAEFSKEEINNRIKERIDGSLRFYDGETHITMFSIPKHIREVLEKENKISTRENPVAVPA

SEQ ID NO: 636 - protein, 276 aa, Schizosaccharomyces pombe
MKPFSPSQTNFEKEQLCFGVYQLKDCYQQVIEALSLGIRVIDSAITYRNEKECEQAIQDFCHQNVNIKREDITLITKIPDSLQGFERTWKAVEQSLRRTGRPKLDVVLIHSPKWPVRRIESWRALLQHQKEGRINKIGVSNYNIHHLEEIISLGLPLPAINQVEFSAFNNRPTFLSYCFNHGILVQAFSPLTRGYRLSDIRLLDLSLKYNKTPANILLRYCLQKGVSPIFKASSFVHIHENVKAEQFMLDPSDMDVMDTWDEEFVSKPTWNPIILP

SEQ ID NO: 637 - protein, 491 aa, Ralstonia eutropha JMP134
MSLTLANAALLRSQNFINQQWRDAGLGRRLAVANPATGEVFAHVPDSDDDDAGRAADAAAEAFPAWSARPARERAQLIKRWHALILANQEDLARIISTEQGKPLKEARGEVLYGASYVEWFAEEATRICGDIVAEAVPGRKLLVLKEPVGVVAAITPWNFPLAMIARKIAPALAAGCTVVAKPAEDTPLTALALVWLAEQAGLPAGVLNIVTASRESTPNVVDAWLADSRVRKITFTGSTPVGKHLARESAGTLKKLSLELGGNAPFIVFEDADLDAAVDGLMASKFRNGGQTCVCPNRVYVHESVHDDFVERLARRVGALHVAPATDENAQIGPMINARAVDKIARHVEDAVAKGARVVTGGRRVRTADGPHYYAPTVLIDATPAMELACEETFGPVAPVFRFRDESEVIRDANDTPFGLAAYFYSNDVRRIWRVAQALETGMVGINEGAIAAEAAPFGGVKESGYGREGSRHGLDDYMHTKYLCQGQLG

SEQ ID NO: 638 - protein, 486 aa, Pasteurella multocida subsp. multocida str. Pm70
MIKHWINGKEVASEETFDNFNPATGEVICQVASGGEKEINAAVQAAKDAFPKWSKTPAKERARLMRKLGELIDQNVAKLAELETLDTGLPIHQTKNVLIPRASHNFDFFAEVCTRMNGHSYPVDDKMLNYTLYQPVGVCGLVSPWNVPFMTATWKTAPCLALGNTAVLKMSELSPLTANELGRLALEAGIPEGVFNVVQGLGSTAGHALVTHDDVRAISFTGGTATGKHILKHAGLKKYSMELGGKSPVLIFDDADLDRALDAALFTIFSLNGERCTAGSRIFIQETVYDEFVKQFAARAKRLIVGDPQDFNTQVGSMITRQHYDKVTGYIRIGLEEGATLLAGGLERPQNLPAHLQKGHFIQPTVFADVDNRMRIAQEEIFGPVVCLMKFKDEAEALRLANDVEYGLASYIWTKDIAKALRLSNGIEAGMVFVNSQNVRDLRQPFGGIKASGIGREGGEYSFEVFAELKNVCISMHDHPIPRWGL

SEQ ID NO: 639 - protein, 232 aa, Salmonella typhimurium LT2
MSFQPSFAGPQPDSRIDRTTFIRRAYLHLAVAIVGFIVLSAAWSFIGVGEYALDVLLAGGRYSWLVVLGAFMLVGMLATRLADNAGNNQTQLIGLGIYVLAESLIFAPLLTVAAYINPSSIGAAAITTLLLVGGLTFTAFSIKKDFSFLRSFLTMAGFIAFGAIIASVICGFSLGVWFSALMVLLCAGFILYDTSNIIHHYPTDRPAGAALHLFASIATMFWYILRIFMSRN

SEQ ID NO: 640 - protein, 108 aa, Triticum aestivum
MEHGSLDDSSSSTFSIMEEDHTLANSVRFVLNQDPRVAFCGYSIPHPAENKVNIRVQTTGDPAKDVLKDALQDLMVMCQHIRGTLDTAVADFRGNKTAEAMDIDLNKK

SEQ ID NO: 641 - protein, 106 aa, Brassica napus
  misc_feature (105)..(105): Xaa can be any naturally occurring amino acid
MGGCVSTPKSCVGSKLKSSKPRKSRKRRRKRAAAAAASSSSRLSDGSFDNLDHPRNNLPTPTFRASGEEAWFESNAAFETDCDDDFHSVNEGGGERVSVSSTMTXS

SEQ ID NO: 642 - protein, 132 aa, Triticum aestivum
  misc_feature (68)..(68): Xaa can be any naturally occurring amino acid
ISPDNFEGLILIYPLLRDKWGTNTSVVLPDSGSTEQVMYVVGILRSANPDEGCSHHCLQELLRRHRHXADTAGVRIGAKQYLAHHPTPAGWHQHFGPRWERFAERKNRFDPLSILGPGQGIFPKGSTGVYAS

SEQ ID NO: 643 - protein, 375 aa, Oryza sativa (japonica cultivar-group)
MMPRTPPPTSPPLDDDDANETRRRVAIAGAASSPPPPRPAMPMFPGDVGPVMLAPPPPLPFFPIAAVQSGLGFMHMSAPPEIVTARSKLNSDAPSFSPRSPAASAAADEVEVRDVWAANLEEELRSIGALLPTYPVVSMDTEFPGTVHDVATPRHLRTPRESYAVVKRNVDELHLLQLGLALSGPAGRCPVAWQFNFAGFDARRDPHSGSSVAMLAAHGVDFTALRRHGIDHGDFARAFGRSKLACGRLTWAAFSGSYDFAYLVKVLTGGRPLPSTLEGFMAKVSKIFGPAVLDVKHLAKFCGGGGGIRGGLEHVAAALGVHRAAGRAHNAGSDSLLTSDVLHAMVDRFFPNSGVLNHAGAIDGLVKCSNLYYKY

SEQ ID NO: 644 - protein, 129 aa, Triticum aestivum
  misc_feature (26)..(26): Xaa can be any naturally occurring amino acid
  misc_feature (46)..(46): Xaa can be any naturally occurring amino acid
  misc_feature (53)..(53): Xaa can be any naturally occurring amino acid
  misc_feature (58)..(59): Xaa can be any naturally occurring amino acid
  misc_feature (61)..(61): Xaa can be any naturally occurring amino acid
  misc_feature (63)..(63): Xaa can be any naturally occurring amino acid
  misc_feature (65)..(67): Xaa can be any naturally occurring amino acid
  misc_feature (69)..(69): Xaa can be any naturally occurring amino acid
  misc_feature (71)..(71): Xaa can be any naturally occurring amino acid
  misc_feature (79)..(79): Xaa can be any naturally occurring amino acid
  misc_feature (81)..(81): Xaa can be any naturally occurring amino acid
  misc_feature (88)..(88): Xaa can be any naturally occurring amino acid
  misc_feature (90)..(91): Xaa can be any naturally occurring amino acid
  misc_feature (94)..(94): Xaa can be any naturally occurring amino acid
  misc_feature (100)..(100): Xaa can be any naturally occurring amino acid
  misc_feature (104)..(107): Xaa can be any naturally occurring amino acid
  misc_feature (109)..(110): Xaa can be any naturally occurring amino acid
  misc_feature (114)..(114): Xaa can be any naturally occurring amino acid
  misc_feature (116)..(116): Xaa can be any naturally occurring amino acid
  misc_feature (119)..(120): Xaa can be any naturally occurring amino acid
  misc_feature (122)..(124): Xaa can be any naturally occurring amino acid
MSDTDEHHFESKGDSGASKTYPQQAXAIRKGGHIVIKGRPCKGVEXSTSKTGXKHGHXXCXFXAXXXFXGXKLEEIVPXSXNWDGPPXVXXQNXKLIEIXDDGXXXXSXXKGGXLXEDXXSXXXEEFAT

SEQ ID NO: 645 - protein, 187 aa, Arabidopsis thaliana
RDRDSGGGQNGNNQNGQSSLSPREQDRFLPIANVSRIMKKALPANAKISKDAKETMQECVSEFISFVTGEASDKCQKEKRKTINGDDLLWAMTTLGFEDYVEPLKVYLQRFREIEGERTGLGRPQTGGEVGEHQRDAVGDGGGFYGGGGGMQYHQHHQFLHQQNHMYGATGGGSDSGGGAASGRTRT

SEQ ID NO: 646 - protein, 371 aa, Pseudomonas syringae pv. syringae B728a
MSTVTERTAEQLSPVIPKTMQAVVCHGPEDYRLETVDVPTPGPDEILTKVELCGICMGDIKTYRGAPSFWGDAEQPRYVKPPMIPGHEFVCRVVALGPGAEKRGVQIGDRVISEQIVPCWGCRFCNHGQYWMCQKHDLYGFQNNVQGAMAQYMIFTREGIIHKVPDSIAPDEAILIEPLACSLHAAERADVDFDDIVVVAGAGTLGLGIIGAVRMRNPKKLIVLDMKPERAALALRMGADEVWNPAEVDVLAKIREITDGYGCDIYIEATGHHKAVNQGLAMLRKLGRFVEFSVFNDEATVDWSIIGDRKELDVLGSHLGPYMYPRAIDFIGNRKIDMRDVVTHKFPLAQFKEAFAVMERGDKSLKVVLEP

SEQ ID NO: 647 - protein, 175 aa, Hordeum vulgare subsp. vulgare
  misc_feature (88)..(88): Xaa can be any naturally occurring amino acid
MAAAGDAGEKKMITLKSSDGEEFEVEEAVAMESQTIRHMIEDDCADNGIPLPNVNSKILSKVIEYCNKHVQAKPADAGASSDTASAAXGAPAAPAEDLKNWDAEFVKVDQATLFDLILAANYLNIKGLLDLTCQTVADMIKGKTPEEIRKTFNIKNDFTPEEEEEIRRENQWAFE

SEQ ID NO: 648 - protein, 160 aa, Zea mays
MSTKKIVLKSSDGESFEVDEAVALESQTIAHMVEDDCVDNGVPLPNVTSKILAKVIEYCKKHVDAAASKSEAVDGGGSSDDDLKAWDAEFMKIDQATLFELILAANYLNIKNLLDLTCQTVADMIKGKTPEEIRTTFNIKNDFSPEEEEEVRRENQWAFE

SEQ ID NO: 649 - protein, 502 aa, Aspergillus nidulans FGSC A4
MKPPYYMETGCKRNPGSDSTLKVRWTLYTRLLQSANQGLGIDPGSGQVFASCPTNTVADVDAYVSSAHRSFLSYRETNPRARAKMLLNWHNLIAQSKNDIAKLVVYETGKPMAEAVGEVDYALGFAWWFAGEAERVRGSIAQPSISERRTFVIKQPIGVCIALVPWNFPVAMIIRKAAAALAAGCTVVIKPSPETPLSVLALADLALQAGFGPGVINVLTTDNLNTPDVSEALCKHPLVRKVTFTGSTAVGQLIARHCSEGLKKVTLELGGNCPFIIFDDGDLEQALAALMILKWRTAGQACTHANRVYVQSGVYDTFLRMIVNATKQLKVGHGASPGTTMGPLTTSRGIEKLERHVADALAKGARLELGGHRLQLEGNYFQPTIISGMSAYMLTTQEEIFGPLLGLYRFETEEEAVRMANDTSMGLASYFFTRDVSRTWRLLENLEAGMIGMNTGNSSAAESPFGGIKASGYGKEAGKDVAIEEYLIAKTGTLTVGAVSKL

SEQ ID NO: 650 - protein, 469 aa, Lactobacillus plantarum WCFS1
MAMLYGKHNHEAEEYLEPVFGAPSEQHDLPKYRLPKHSLSPREADRLVRDELLDEGNSRLNLATFCQTYMEPEAVELMKDTLAKNAIDKSEYPRTAEIENRCVNIIANLWHAPDDEHFTGTSTIGSSEACMLGGLAMKFAWRKRAQAAGLDLNAHRPNLVISAGYQVCWEKFCVYWDVDMHVVPMDEQHMALDVNHVLDYVDEYTIGIVGIMGITYTGQYDDLAALDKVVTHYNHQHPKLPVYIHVDAASGGFYTPFIEPQLIWDFRLANVVSINASGHKYGLVYPGVGWVVWRDRQFLPPELVFKVSYLGGELPTMAINFSHSAAQLIGQYYNFIRFGMDGYREIQTKTHDVARYLAAALDKVGEFKMINNGHQLPLICYQLASREDREWTLYDLSDRLLMNGWQVPTYPLPANLEQQVIQRIVVRADFGMNMAHDFMDDLTKAVHDLNHAHIVYHHDAAPKKYGFTH

SEQ ID NO: 651 - protein, 474 aa, Bacillus cereus ATCC 14579
MKKHLYINGSWKSVNTYKPLYAPYSEETLAEIAQGTEEDVKEAVTAAKNAMTKMNKLSAYDRATILEKVAQKMDERREEFAEIIAKEAAKPIRAARGEVDRTVQTYKFAAEEAKRIYGETLPLDAAPGADGRIAYTIRKPIGVIGAITPFNFPLNLVAHKVGPAIAAGNTVVLKPADQTPLSSYALVELFEEAGLPNGALNIISGPGPTVGEAIVKNDYVASITFTGSPKVGIGIKQKAGLKRVTLELGSNAAVIIDEDVELTDEIIERVKWGAFVNNGQVCISVQRVFVHETKIHEFLSKLKKAMESVVVGDPSLEETDVSALISKKDVERIDMWVQEAIKEGATVLCGGKKQDARIFEPTVLTNVPDHVSVQCQEVFGPLMTVNTFKEFDEAIEQVNNSRYGLQAGVFTNNLFKAMRAIDELEVGGVMINDIPTFRVDHMPYGGVKESGTGREGIKYAIEEMTEMKLVCIKK

SEQ ID NO: 652 - protein, 384 aa, Pisum sativum
MAIHHHHHHHQQLHHNSLLDALYCDEEKLEEEQEDVSSQQSDVTTNNDNNILDSTSLFPLLLLEQNLFSQDEELTTLFSKEKTQQETYYEDLKNVVDFVSLSQPRREAVQWMLKVNAHYAFSPLTATLAVTYFDRFLLTFHFQKDKPWMIQLVAVTCISLAAKVEETQVPLLLDLQVQDTKYVFEAKTIQRMELLILSTLKWKMHPVTPHSFLDHIITRLGLKTNLHWEFLRRCENLLLSVLLDSRFVGCVPSVLATATMLHVIDQIEESDDNGVDYKNQLLSILKINKEKVDECYNAIVEVTNENNYGHKRKYEQIPGSPSGVIDAVFSSDGSNDSWKVGSSSYSTSEPVFKKTKTQGQNRNLSPLNRVIVGILATASATTSP

SEQ ID NO: 653 - protein, 436 aa, Bacillus cereus ATCC 14579
MRDYLIKPLVGQPYPMISHGKGVYLYDQNGNKYFDGSSGAITAGIGHGVKEIADVIKKQAEEIAFVYRSQFTSEPAEKLAKKLSDLSVGDLNWSFFVNSGTEANETAMKIAIQHFQERGIQGKHKILSRWMSYHGIPMGALSMSGHPLRRQRFVSILEDYPTIPAPYCFRCPVQKVYPTCQLACATELERSIERIGAEHIAAFIAEPIIGAAGGAVVPPKDYYKVIKEICDHYDILFIADEVMTGLGRTGAWFAMEHWGVEPDIMTLGKGLGAGYTPMAATVVSDRVMEPILRGSRSVMSGHTLSANPLSAATALAVIEYMEKHNLPEKTAEKGEYLIKGLQKVQQQSTIIADVRGKGLLIGVELQPFTKASELISVAAKNGLLLYQAVSGQAGKEDSALLVAPPMTTTYSELDELLSIFSKSVEEMMQKGGHSIA

SEQ ID NO: 654 - protein, 499 aa, Acremonium strictum
MVRIQELTAALSLASVVQASWIQKRNSINACLAAADVEFHEEDSEGWDMDGTAFNLRVDYDPAAIAIPRSTEDIAAAVQCGLDAGVQISAKGGGHSYGSYGFGGEDGHLMLELDRMYRVSVDDNNVATIQGGARLGYTALELLDQGNRALSHGTCPAVGVGGHVLGGGYGFATHTHGLTLDWLIGATVVLADASIVHVSETENADLFWALRGGGGGFAIVSEFEFNTFEAPEIITTYQVTTTWNRKQHVAGLKALQDWAQNTMPRELSMRLEINANALNWEGNFFGNAKDLKKILQPIMKKAGGKSTISKLVETDWYGQINTYLYGADLNITYNYDVHEYFYANSLTAPRLSDEAIQAFVDYKFDNSSVRPGRGWWIQWDFHGGKNSALAAVSNDETAYAHRDQLWLWQFYDSIYDYENNTSPYPESGFEFMQGFVATIEDTLPEDRKGKYFNYADTTLTKEEAQKLYWRGNLEKLQAIKAKYDPEDVFGNVVSVEPIA

SEQ ID NO: 655 - protein, 277 aa, Arabidopsis thaliana
MAETLKEDSIMIREVWDYNLVEEFALIREIVDKFSYIAMDTEFPGVVLKPVATFKYNNDLNYRTLKENVDLLKLIQVGLTFSDENGNLPTCGTDKFCIWQFNFREFNIGEDIYASESIELLRQCGIDFKKNIEKGIDVVRFGELMMSSGIVLNDAISWVTFHGGYDFGYLVKLLTCKELPLKQADFFKLLYVYFPTVYDIKHLMTFCNGLFGGLNRLAELMGVERVGICHQAGSDSLLTLGSFRKPKERYFPGSTEKYTGVLYGLGVEDGTTTTVAN

SEQ ID NO: 656 - protein, 113 aa, Lilium longiflorum
MARSSAVCFLLLLAFLIGTASAITCGQVDSDLTSCLGYARKGGVIPPGCCAGVRTLNNLAKTTPDRQTACNCLKSLVNPSLGLNAAIVAGIPGKCGVNIPYPIRMQTDCNKVR

SEQ ID NO: 657 - protein, 446 aa, Triticum aestivum
  misc_feature (201)..(201): Xaa can be any naturally occurring amino acid
  misc_feature (277)..(277): Xaa can be any naturally occurring amino acid
  misc_feature (284)..(284): Xaa can be any naturally occurring amino acid
MDEFELEDNLEFILQSIQELIEDQGENNPFGEVNQNELLANLVNYDQDNLMPDVSVEDVVNGKDVQGIPWEKMLFPRDQYREMKMKGYKNYQNLSYAREDALQDCKQVERDGPYYDFQYNTRRARPSIVHFQLRNLVWATTKHDVYTVHNQSMTHWSSLNQISTELINGDDCIIPKQRGHGSQSVSMVQFTTMAVDNDFLXVVGGFHGELICKRLEDDGIVFSTRVTDDENAITNSLEIYQDPNGSRRLVVANNDCSVRIFDTKYFDLLNHYVFPWXSVNSVSXNPDATLFAVLGDHEDGLVVDPKCGKPIGKVRGHLDYSFSSAWHPDGNILATGSQDTTCRLWDIRNLSQSLAVLGGRLGSIRCIKFSSDGRFLATAEPIDFVHIYDCFADYGKSHEIDFFGEIAGLSFSPDTEAFYIGVADQTYGGLMEFKRRHQHHYLNCLW

SEQ ID NO: 658 - protein, 493 aa, Agrobacterium tumefaciens str. C58
MTIATPLKAQPKASHFIDGDYVEDNTGTPFESIFPATGEMIAKLHAATPAIVERAIASAKRAQKEWAAMSPMARGRILKRAADIMRERNDALSTLETLDTGKPIQETIVADPTSGADAFEFFGGIAPSALNGDYIPLGGDFAYTKRVPLGVCVGIGAWNYPQQIACWKAAPALVAGNAMVFKPSENTPLGALKIAEILIEAGLPKGLFNVIQGDRDTGPLLVNHPDVAKVSLTGSVPTGRKVAAAAAGHLKHVTMELGGKSPMIVFDDADIESAVGGAMLGNFYSSGQVCSNGTRVFVQKKAKARFLENLKRRTEAMILGDPLDYATHLGPLVSKAQQEKVLSYIEKGKAEGATLITGGGIPNNVAGEGAYVQPTVFADVTDDMTIAREEIFGPVMCVLDFDDEDEVLARANATEFGLAGGVFTADLARAHRVVDGLEAGTLWINTYNLCPVEIPFGGSKQSGFGRENSAAALEHYSELKTVYVSTGKVDAPY

SEQ ID NO: 659 - protein, 486 aa, Pasteurella multocida subsp. multocida str. Pm70
MGGISMQQFSLLKTKAYINGEYVQAKEHKTFAVTNPANQQIICELPDLSAEETEYAIACAAQAQKKWQKVTPKERANLLRRWYNLVIENQEELAQLLSLEQGKPINESRGEILYGASFIEWFAEEAKRIYGDVLPQDKENHRLLVIKQGIGVVAAITPWNFPNAMITRKAAPAFAAGCAMVLKPAQETPLSALALAELAHQAGLPAGLFNVITSTRSVEIGKVLTEHPTVRKVTFTGSTRVGKILMAQSASTVKKLSLELGGNAPSIVFDDADLENAIEGIIASKFRNSGQTCVCTNRIYVQAGIYDRFVELFSAKVAAFKVGSANEAGVNIGPLISQSAVNKIQEHIDDATAKGANLVIGGKLHTRGGTFFEPTVLRDVTQAMLVAKDETFAPLAPVFKFDTEAQVIEMANDTEFGLASYVYTQDISRIWRVSEALEYGIVGINEGLISNEMAPFGGVKESGLGREGSRYGIDEFLEIKYLCLKV

SEQ ID NO: 660 - protein, 252 aa, Triticum aestivum
  misc_feature (142)..(142): Xaa can be any naturally occurring amino acid
  misc_feature (181)..(181): Xaa can be any naturally occurring amino acid
ITPRTRSTHVRPQPCCARTPSLVFLVALLLSCSSMSSAARHLEEAVPKKENPPHPIVTELPKPQLPLHPAMPELPKPEPPHPLVPEVPHPVVPETPKEPEVPHPVVPEMPKHELPPHPAMPELPKPELPHPAVPEVPKETQXPHPIVPEVPKELDLPRPVMPEVSHPVVSEVPKEPELPHXAMPELPKPEVPHHGVPEVPSEPHVPHPEVPKEPELPHPAVPEVPKHEMPLPPKAELPPKPEFHFPEPKTKP

SEQ ID NO: 661 - protein, 342 aa, Methanosarcina barkeri str. fusaro
MSKTAAVIKGDGVGPELVDAMLKVTEAAGTDVEFVMCEAGAGWWEKHGGNSLIPNETWDVLDSSDACFKGPTTTPGGIGSPRSVAVSIRSKYNLYANVRPIKTFPNSSAPLGDVEMICVREGTEGLYIGEEIQLTDDVSIAIRKITRTASHKIASYAFEEAKRRGYDAVVPIHKSNILKLTCGSFLEEVEKVGQNYPDIEIWPYHIDNIAQQLIKNPQIFNKKVLLSTNLFMDVISEECSALVGSIGLIYSANIGDSFAMFEPAHGSAPKYAGQDKVNPVATVLAGAWMLDYLDEKEKSEAIFKATKRVISEGKYVTYDLGGNAKLSQMAGEIAKYTAEILK

SEQ ID NO: 662 - protein, 397 aa, Synechococcus elongatus PCC 6301
MAANLLEQLRGMTVVVADTGGIQSIATFTPRDATTNPSLITAAAQMPQYQSIIDDTLRQVRTELGAEAPVEAIVAEAIDELFVAFGLRILEIVPGRVSTEVDARLSYDTEATIAKARKLIGLYERAGIRRDRVLIKIASTWEGIRAAEVLEKEGIHCNLTLLFGFHQAVACAEAGVTLISPFVGRILDWYKKESGRDAFPGAEDPGVQSVTQIYNYYKKFGYATEVMGASFRNISEIIELAGCDLLTISPGLLEELRQTEALLERKLDPAIAESLELEQIHLDRDRFAELHQADRMANEKLDEGIRGFCKAIDTLEGLLKQRLAVLEGKAVFHHAAHEVFSVCDLDGDGFITREEWLGSDAVFDALDLNKDGKLNEEDLLAGLGATLQMAGRAVATV

SEQ ID NO: 663 - protein, 434 aa, Escherichia coli
MKTRTQQIEELQKEWTQPRWEGITRPYSAEDVVKLRGSVNPECTLAQLGAAKMWRLLHGESKKGYINSLGALTGGQALQQAKAGIEAVYLSGWQVAADANLAASMYPDQSLYPANSVPAVVERINNTFRRADQIQWSAGIEPGDPRYVDYFLPIVADAEAGFGGVLNAFELMKAMIEAGAAAVHFEDQLASVKKCGHMGGKVLVPTQEAIQKLVAARLCADVTGVPTLLVARTDADAADLITSDCDPYDSEFITGERTSEGFFRTHAGIEQAISRGLAYAPYADLVWCETSTPDLELARRFAQAIHAKYPGKLLAYNCSPSFNWQKNLDDKTIASFQQQLSDMGYKFQFITLAGIHSMWFNMFDLANAYAQGEGMKHYVEKVQQPEFAAAKDGYTFVSHQQEVGTGYFDKVTTIIQGGTSSVTALTGSTEESQF

SEQ ID NO: 664 - protein, 316 aa, Arabidopsis thaliana
MDRIIGLPDEVLVKILSFVPTKVAVSTSILSKRWEFLWMWLTKLKFGSKRYSESEFKRLQCFLDRNLPLHRAPVIESFRLVLSDSHFKPEDIRMWVVVAVSRYIRELKIYSSHYGEKQNILPSSLYTCKSLVILKLDGGVLLDVPRMVCLPSLKTLELKGVRYFKQGSLQRLLCNCPVLEDLFVLLLRCDDIGMFIVIVPSLQRLSLYLSPRCNLEGFVIVLDTPLEYFKLVDRNYDRHPYMIENMPKLTSAYVEVISADLKSLVESITSVKYLTIFSENYDDFVFPWNQPSTVPKCFCPVYKSSPVYKSSPGQNT

SEQ ID NO: 665 - protein, 478 aa, Ralstonia solanacearum
MHAQHFIANRLMAADSGLRIKVFDPSDGQPFAEIARGNATDISVAVHAARRAFDGIWGRLAPAERGRLLMRVALRLADHEEELARLEARDTGKPMRQARADARAIARYFEFYAGAADKLHGQTIPYQPDTTVLTVREPHGVTAHIIPWNYPMQIFGRSVGAALAVGNACVVKPAEDACLSILRVAELAAEAGLPDGALNVVTGYGHEAGAALAAHPGINHVSFTGSPETGKLIVRAAAENHVPVTLELGGKSPQILFADADLDAAIPAVVSGIVQNAGQTCSAGSRVLIERGLYETVLDRLASVFEAIKVGPSTLDLDCGPLINPRQQQRVWDFVSDAQHANIPVMAQGLVVPEAPETGYYQAPMLLRDVPPTHRLAQQEVFGPLLAAMPFDGEAEALALANGTPYGLVAAVWTRDGARQLRLARALKAGQVFINNYGAGGGVELPFGGTGQSGHGREKGFEALYGFTTVKTIAIRHG

SEQ ID NO: 666 - protein, 204 aa, Glycine max
  misc_feature (120)..(120): Xaa can be any naturally occurring amino acid
  misc_feature (130)..(130): Xaa can be any naturally occurring amino acid
  misc_feature (134)..(134): Xaa can be any naturally occurring amino acid
  misc_feature (136)..(136): Xaa can be any naturally occurring amino acid
  misc_feature (141)..(141): Xaa can be any naturally occurring amino acid
  misc_feature (148)..(149): Xaa can be any naturally occurring amino acid
  misc_feature (152)..(152): Xaa can be any naturally occurring amino acid
  misc_feature (155)..(155): Xaa can be any naturally occurring amino acid
  misc_feature (160)..(160): Xaa can be any naturally occurring amino acid
  misc_feature (163)..(165): Xaa can be any naturally occurring amino acid
  misc_feature (169)..(169): Xaa can be any naturally occurring amino acid
ERERERERERETERERERERERERKTKREAAAKKAAEDAANLEKGDEHQASSQHATVTERAAAATSEADNKTSDFMDDDSALLQQALAMPMDDSAISHDVKDTHMSEASAIDPDLALALXLSITDSAKDXSSQXDXEQIVXPDQSFGXXILXSLXGVDPXDLXXXDFLXSCDSLATISFSFLSPFPFFSFFYGLAMCGFLRCFA

SEQ ID NO: 667 - protein, 363 aa, Aspergillus nidulans FGSC A4
MPYLANPSLQVTADHQIKLVEAPVHEPGKGEVLVHIKATGVCGSDIHFWKTGRIGELIFHGDCIIGHEAAGVVLKCGEGVTDLQPGDRVAIEPGVPCENCFLCDEGRYNLCEDVAFAGVYPYAGTIQRYKVHPAKWLHKLPPSLSYLDGALLEPLSVVMRGIQVAQLELGRGVVICGAGPIGLIAAAAARASGAHPVVITDIDPSRLSFARRFLPTIQTYQNNPTLDAQGNAKAIRALFGDNEYNAPDRVLECTGVESSICTAAYTARRGGLVVVVGVGKEIINNVPFMHLSLAEIDLKFINRYRDTWPRAISCMAAGIITDLKPLISHTFPLERADEALELCADMGRPSIKVTIVDEGDATV

SEQ ID NO: 668 - protein, 189 aa, Triticum aestivum
  misc_feature (26)..(26): Xaa can be any naturally occurring amino acid
  misc_feature (53)..(53): Xaa can be any naturally occurring amino acid
WASSAPSVSPFPGVKSTAGLPSSRRXNGASLGSVSNGGRIRCMQVWPIEGIKXFESLSYLPPLSTEALLNQVDYLIRSKWVPCLEFSKVGFIFREHNASPGYYDGRYWTMWKLPMFGCTDSTQVINEVEEVKKEYPDAYVRIIGFDNMRQVQCVSFIAFEPPGCEESPPPPPAHLRQAIYEVPLQVCQV

SEQ ID NO: 669 - protein, 409 aa, Cannabis sativa
NNSHIQATILCSKKVGLQIRTRSGGHDAEGMSYISQVPFVVVDLRNMHSIKIDVHSQTAWVEAGATLGEVYYWINEKNENLSFPGGYCPTVGVGGHFSGGGYGALMRNYGLAADNIIDAHLVNVDGKVLDRKSMGEDLFWAIRGGGGENFGIIAAWKIKLVAVPSKSTIFSVKKNMEIHGLVKLFNKWQNIAYKYDKDLVLMTHFITKNITDNHGKNKTTVHGYFSSIFHGGVDSLVDLMNKSFPELGIKKTDCKEFSWIDTTIFYSGVVNFNTANFKKEILLDRSAGKKTAFSIKLDYVKKPIPETAMVKILEKLYEEDVGAGMYVLYPYGGIMEEISESAIPFPHRAGIMYELWYTASWEKQEDNEKHINWVRSVYNFTTPYVSQNPRLAYLNYRDLDLGKTNHASP

SEQ ID NO: 670 - protein, 393 aa, Burkholderia fungorum LB400
MLSAEHRAIVKATVPLLESGGEALTTHFYRILIGEHPEVRPMFNLANQASGAQPRALANSVLMYARHIDQLEQLGGLVSQIINKHVALNILPEHYPIVGQCLLRAIREVLGAEIATDAVIAAWAAAYRQLADLLIGLEEKIYAEREAAPGGWRGTRLFRVARKVRESDEITSFYLRPDDNGELLAFHPGQYIGVRLYIDGEEVRRNYSLSAMSNGCEYRISVKREANGKVSSHLHTHLNENDTIELFAPAGDFTLEPGDKPLVLISGGVGITPTLAMLQAALHTNRVVHFIHSARHGGVHAFRDTIEQLAARHPQLKRFYCYEQRRADDADADGIGYLDETRLDAWLPETRDVDVYFLGPIAFMKAVKKHLKAIGVPESQSRYEFFGPAAALE

SEQ ID NO: 671 - protein, 389 aa, Escherichia coli
TLQNGKLNVPENPIIPYIEGDGIGVDVTPAMLKVVDAAVEKAYKGERKISWMEIYTGEKSTQVYGQDVWLPAETLDLIREYRVAIKGPLTTPVGGGIRSLNVALRQELDLYICLRPVRYYQGTPSPVKHPELTDMVIFRENSEDIYAGIEWKADSADAEKVIKFLREEMGVKKIRFPEHCGIGIKPCSEEGTKRLVRAAIEYAIANDRDSVTLVHKGNIMKFTEGAFKDWGYQLAREEFGGELIDGGPWLKVKNPNTGKEIVIKDVIADAFLQQILLRPAEYDVIACMNLNGDYISDALAAQVGGIGIAPGANIGDECALFEATHGTAPKYAGQDKVNPGSIILSAEMMLRHMGWIEAADLIVKGMEGAINAKTVTYDFERLMEGAKLL

SEQ ID NO: 672 - protein, 1266 aa, Bacillus cereus ATCC 10987
MLDWMKKLFNKEEEQTAMNKEVQKQVESQPKIPRVNHYTEAREAQMASRNAGKCRFPLVPDNGFDEEDVIETGRFEEQPVQAVTYENQPIQRGIKVERSRRQHVEKVVSTYEEPEIQYEPEREPVVKKASTPAQESNRRPFRPTEMISPIYGYNRPSVEKKEEKQEEVKEREDLEISVEGKSVVDAWLEKKGYTLSHFSEGQAPTSSSHERVDEQDQQSKKEEKSVVDQWLEKNGYEIERQEPIVEEKEVAQEMSAPQEVPAAELLHETIAERMEDAKQEKDVVVENVLQTESLASKVEHEDTILSEEMKRNTEIEQPTIEVEKQAPEESVIVKAEEKLEETIIVEIPEEFEEVDVITETEESEEVEVIAEAEESEEVEVIAETEESEEMEVIAETEESEEVEVIAETEESEEVEVIAEAEESEEVEVIAEAEESEEVEVIAETEESEEVEVIAEAEESEEVEVIAETEESEEVEVIAETEESEEVEVIAETKAPEEAEPVVLEETQQEMVLNEAIEQKNEFIHVAEADEQTKKDVQSFADVLIAEEAAIEEEQSVAEETPVAEEPPVVQKEEPKREKKRHVPFNVVMLKQDRARLVERHAARTNAMQPSMKERVENKPVHQVEEQPMQQVAVEPQVEEQPMQQVAVEPQVEEQPMQQVVVEPQVEEQPMQQVAVEPQVEEQPMQQVAVEPQVEEQPMQQVVVEPQVEEKLVQQVVEPQAEEKPMQQVVEPQAEEKPMQQVVVEPQVEERPVQQVVVESQQVQKPISSTEVEEKAYVVNQRENDVRNVLQTPPTYTIPSLTLLSIPQQAALDNTEWLEEQKELLDTTFNNFHVGAHVINVSQGPAVTRFEVQPDPGVKVNKITNLSDDIKLSLAAKDIRIEAPIPGKSAIGIEVPNKESKPVFLREILRSPVFTKSESPLTVALGLDISGDPIVTDIRKMPHGLIAGATGSGKSVCINAILTSILYKAKPHEVKLMLIDPKMVELAPYNSVPHLVAPVITDVKAATAALKWAVEEMERRYELFAHAGARDLTRYNTIVSEREIPGETLPYIVIVIDELADLMMVAPGDVEEAICRIAQKARACGIHLLVATQRPSVDVITGLIKSNIPTRIAFTVSSQVDSRTIIDIGGAEKLLGRGDMLFLGNGTSKPVRVQGVYVSDDEIEKTVDHVKKQMKPNYLFKQEDLLAKTEQAESEDELFLDACQFVVEQGGASTSSVQRKFRIGYNRAARLIEEMESQGIISEGRGTKPRDVLISEDEFAAMQETNV

SEQ ID NO: 673 - protein, 385 aa, Escherichia coli
  misc_feature (191)..(195): Xaa can be any naturally occurring amino acid
  misc_feature (215)..(215): Xaa can be any naturally occurring amino acid
TLQNGKLNVPENPIIPYIEGDGIGVDVTPAMLKVVDAAVEKAYKGERKISWMEIYTGEKSTQVYGQDVWLPAETLDLIREYRVAIKGPLTTPVGGGIRSLNVALRQELDLYICLRPVRYYQGTPSPVKHPELTDMVIFRENSEDIYAGIEWKADSADAEKVIKFLREEMGVKKIRFPEHCGIGINPCSEEXXXXXVRAAIEYAIATDRDSVTLVXKGNIMKFTEGAFKDWGYQLAREEFGGELIDGGPWLKVKNPNTGKEIVIKDVIADAFLQQILLRPAEYDVIACMNLNGDYISDALAAQVGGIGIAPGANIGDECALFEATHGTAPKYAGQDKVNPGSIILSAEMMLRHMGWTEAADLIVKGMEGAINAKTVTYDFERLMEG

SEQ ID NO: 674 - protein, 319 aa, Zea mays
  misc_feature (263)..(263): Xaa can be any naturally occurring amino acid
  misc_feature (279)..(279): Xaa can be any naturally occurring amino acid
  misc_feature (281)..(281): Xaa can be any naturally occurring amino acid
  misc_feature (300)..(300): Xaa can be any naturally occurring amino acid
  misc_feature (314)..(314): Xaa can be any naturally occurring amino acid
METVTVVVAPAPVAVNQQPPQHKLAELKPSSFAGVAKSSPATKAKPAKTKKLAGGCGGYVLEDVPHLTDYLPELKSYPNPLQDHPAYSVVKQYFVNPDDTVAKKIVVHKSGARGTHFRRAGPRQRVYFQPDEVTAAIVTCGGLCPGLNTVIRELVCGLHDMYGVATVYGIEGGYKGFYARNTVELTPRSVNDIHKRGGTVLGTSRGGQDTAKIVDSIQDRGVNQVYIIGGDGTQKGAASIHEEVQRRGLKCAVVGVPKTIDNXDIAVIDKSFGFTPPWXEXAQRAINAAHVEAESAENGXGFVKLMGRNSGFIXMYATL

SEQ ID NO: 675 - protein, 257 aa, Glycine max
MTMHRESWAFVFGVMGNIISFGVFLAPLPTFYQIYKKKSTEGFQSLPYVVALFSAMLWIYYAFVKREAALLLITINTFGIVVESIYLAIFLLYAPRKPRLTTIKLLLLLNVFGFGAMLLSTLYLSKGAKRLAIIGWICLVFNISVFAAPLFIIRRVIKTRSVEYMPFTLSMFLTINAVMWFFYGLLLRDYYVALPNTLGFVFGIIQMGMYLMYRNATPVALEEPVKAQELNGHIIDVGKMGTMEPNHAATAGAVGKV

SEQ ID NO: 676 - protein, 451 aa, Zea mays
MAEHKGNVLLHKYEMGKLLGQGTFAKVYHARNTATSESVAIKVIDKEKVMKVGLIDQIQREISVMKLVRHPNIVQLYEVMATKTKIYFVLEHVKGGELFNKIQRGRLKEDAARKYFQQLICAVDFCHSRGVYHRDLKPENLLLDENSNLKVSDFGLSALAECHRQDGLLHTTCGTPAYVAPEVINRKGYDGAKADIWSCGVILFVLLAGYLPFHDKNLMDMYKKIEKADFKCPSWFSTDVRRLLQRILDPNPSRRISVEKIMENPWFRKGLGAKLLRYDLQNKNAPHVDKKADFDSLSTNVTTESKQHEEKKPTNMNAFDIISLSTGLDLSGLFEESNKKRESKFTSTNTSSTIISKIEDIAKNLRLNLTKKDGGLLKMEASKPGRKGVMGIDAEVFEVSPNFHLVEIKKTNGDTLEYQKVLNQEMRPALKEIVWAWQGEQSKQKQEQQSC

SEQ ID NO: 677 - protein, 322 aa, Chloroflexus aurantiacus
MLGVRNGFQGLIDGDIHEMDWMSVSGWATMGGAELGTNRKVPQGSELYQIARNIERFGIDGILMIGGWTGYQAIYKLYSERHIFPAFNIPMICLPATIDNNLPGSELSLGADTALNSIVSAIDRIKQSAVASRRCFIVEVMGRDCGYLALMSGLATGAERVYLPEEGISLRKLQADLDEMMRWFRAGKRLSLIIRNEKANPIYTTSFICSLFEEEGGKLFEVRQAILGHLQQGGDPSPFDRIQATRLAVRCIEFLVEHADRREPIGAFIGYRGGKVQIHQLDDMPRLMDPVHARPREQWWMSLRQMTDLLTTPPSPTVESGK

SEQ ID NO: 678 - protein, 388 aa, Escherichia coli
  misc_feature (206)..(206): Xaa can be any naturally occurring amino acid
  misc_feature (233)..(233): Xaa can be any naturally occurring amino acid
TLQNGKLNVPENPIIPYIEGDGIGVDVTPAMLKVVDAAVEKAYKGERKISWMEIYTGEKSTQVYGQDVWLPAETLDLIREYRVAIKGPLTTPVGGGIRSLNVALRQELDLYICLRPVRYYQGTPSPVKHPELTDMVIFRENSEDIYAGIEWKADSADAEKVIKFLREEMGVKKIRFPEHCGIGIKPCSEEGTKRLVRAAIEYAIAXDRDSVTLVHKGNIMKFTEGAFKDWGYXLAREEFGGELIDGGPWLKVKNPNTGKEIVIKDVIADAFLQQILLRPAEYDVIACMNLNGDYISDALAAQVGGIGIAPGANIGDECALFEATHGTAPKYAGQDKVNPGSIILSAEMMLRHMGWTEAADLIVKGMEGAINAKTVTYDFERLMEGAKL

SEQ ID NO: 679 - protein, 125 aa, Porphyromonas gingivalis W83
MADIKAIAEQLVNLTVKEVSELATILKEEYGIEPAAAAVAVAAAPGAAGAAAEEEKTSFDVVLKSAGAAKLQVVKAVKEQCGLGLKEAKDLVDAAPSTVKEGVDKATAEALKKALEEAGAEVELK

SEQ ID NO: 680 - protein, 418 aa, Burkholderia cepacia R18194
MPYQHIKVPEGGDKITVNKDFSLNVSDQPIIPYIEGDGTGFDITPVMIKVVDAAVAHAYKGKRKIHWMEIFAGEKATKVYGPDVWLPDETLQVLKEYVVSIKGPLTTPVGGGIRSLNVALRQELDLYVCLRPVQYFKGVPSPVREPQKIDMVIFRENSEDIYAGIEWAAGSEQAKKVIKFLQDEMGVKKIRFPETSGIGVKPVSTEGTERLVRKAIQYAIDNDRKSVTLVHKGNIMKFTEGLFRDAGYALAQKEFGGELIDGGPWMRVKNPKTGNEIVIKDSIADAFLQQILLRPAEYDVIATLNLNGDYISDALAAQVGGIGIAPGANLSDSVAMFEATHGTAPKYAGKDYVNPGSEILSAEMMLRHLGWTEAADTIIAAMEKSILQKRVTYDFARLMEGATQVSCSGFGEVLIENM

SEQ ID NO: 681 - protein, 497 aa, Ustilago maydis 521
MFKSFGKIMGGSSRKGKSKLQDGDDSVDASNGLPGSDSSNLLRAKSKDSLAVTENGSGNFANNGSSAPAKIEKRGGVSRHESPLPSPSPSARNVLEGQEESSEVGSSAVARSAPASDVGGPRPANDAASQSTSVPTANTILSNPLAQSGSTGFPSSVGKNAQAAAGGDQVRTFDIDDMISRLLEAGYSGKIPKPALKNAEITAVCQAAREIFLSQPTLIELSPPVKIVGDTHGQYHDLLRLFEMCGFPPSANYLFLGDYVDRGKQSLETILLLLCYKIKYPENFFLLRGNHECANVTRVYGFYDECKRRVNIKIWKTFIDVFNTLPIAAVVASKIFCVHGGLSPSLSNMDDIRRIERPTDVPDYGLLNDLLWSDPSDTALDWEDNERGVSYCFGKAVIQQFLAQYDFDLICRAHMVVEDGYEFWNERTLVTIFSAPNYCGEFDNFGAVMSVSEDLLCAFELLKPLDGAALKKEMAKNKRRSLLQHQSPPARGSQQSY

SEQ ID NO: 682 - protein, 494 aa, Pseudomonas putida
MSASSKFNVDPAGFRNRNLIGGQWKGSISGETITVENPATEEIIAHIPQGRHEDIDEAVRVARATFESPAWRKIRPIDRGRILENVARKIEEHADELAYLESLDTGKALTFAKAIDLPSTIDVFRYMGGWCSKLGGTTPPISFDGREYHTYTRREPIGVVGAITPWNYPLALGSWKIASALAAGCTMVLKPTELTPLSTLRLAELCLEAGLPEGALNIVNGHGHEAGEALARHPGVDKITFTGSTVVGKKIVEYALGNMKRVTLELGGKSPSIVFADADLDQVGLGAALAVFFNSGQICFAASRLFVQDSVYDQVVEAVAAAAAQFKVGNGLDPDTLLGPLVSRKQQERVMGYVQSGIEQGARLVCGGKSVGEKGYFLQPTVFADAAPSMRIAQEEIFGPVVSVIRFKDEAEAIRMANDTAYGLAANIWTRDIKKAHRVAHRLQAGSVWINCHGVIDPAAPFGGFKQSGWGREVSEEGLSAYTETKTVCALLDD

SEQ ID NO: 683 - protein, 498 aa, Glycine max
MDYLLLLPLITIVWISIHVLISSFKPLKSSKNPPGPHPFPIIGNILELGNQPHQALAKLSQIYGPIMSLKLGKTTTIVISSPQVAKEVLQKNDQILANRMVPDSVRALDHHILSVAWMPPLPQWRALRRACATKVFSSQQLNFTQVLRQRKMQDLMDYVKERCERGEAMDIGEASFTTVLNSISNTFFSMDLAYYTSDKSQEFKDIIWGIMEEAGRPNVVDFFPIFRLLDPQGARRRMSGYFRKLIAFFDGLVEERLRLRALENGSRECNDVLDSLLELMLEDNSQVTRPHVLHLFLDLFVAGIDTTSSTIEWVMAELLRNPEKLEKVRQELQQVLAKGEQLEESHISNLPYLQAVVKETFRLHPPTPMLLPHKSEVDIELCGFMVPKSAQILVNLWATGRDSSIWTNPDEFTPERFLESDIDFKGHDFELIPFGAGRRICPGLPLASRTLHVVLASLLYNYDWKLTDGQKPEDMDVSEKYGITLHKAQPLLVIPIQA

SEQ ID NO: 684 - protein, 323 aa, Rhodospirillum rubrum
MAPGANEVRIAIKSVGICGSDVHYFKHGRIGDFIVTEPMILGHEASGVVEEIGSAVTHLRVGDRVCMEPGVPDFSSIETLRGMYNLDPSVRFWATPPYHGCLTAEVVHPASLTYRLPDSVSFAEGAMVEPLAIGVYAAAKAQIRPGDIAVVTGAGTIGMMVVFAALAAGCAEVIVSDVAAEKLALLASHPEVTTVDLTRESLADAVAARTDGRGVDVFFEASGSTRPYETMIDLIGRGGRIVLVGMPQEKPQLDVVALQVKEISLTGTFRYANVWDRTLKLLGSGKIDLKPLISATFPFSDSVRAFDRAAQHLPSDVKIQISL

SEQ ID NO: 685 - protein, 163 aa, Glycine max
  misc_feature (87)..(87): Xaa can be any naturally occurring amino acid
  misc_feature (149)..(149): Xaa can be any naturally occurring amino acid
HAGAGMGAPFTGLKSMVGFLTRKTNNDITFIDSNGGRMQCMQVWTRVGMKKLDTLSYLPDLDDAQWAKEVQYLLRKGWIPCLECKLXHGFVYREHNRSPGYYDGRYWIMWKLPMIGCTDASQVTKELQDAKTAYTNGLIPIFGFDNVRXVQSIIFVVYKPPSF

SEQ ID NO: 686 - protein, 91 aa, Brassica napus
  misc_feature (6)..(6): Xaa can be any naturally occurring amino acid
  misc_feature (10)..(10): Xaa can be any naturally occurring amino acid
  misc_feature (15)..(15): Xaa can be any naturally occurring amino acid
  misc_feature (17)..(17): Xaa can be any naturally occurring amino acid
  misc_feature (34)..(34): Xaa can be any naturally occurring amino acid
  misc_feature (43)..(43): Xaa can be any naturally occurring amino acid
  misc_feature (49)..(49): Xaa can be any naturally occurring amino acid
  misc_feature (53)..(53): Xaa can be any naturally occurring amino acid
  misc_feature (55)..(55): Xaa can be any naturally occurring amino acid
  misc_feature (57)..(57): Xaa can be any naturally occurring amino acid
  misc_feature (61)..(61): Xaa can be any naturally occurring amino acid
  misc_feature (68)..(68): Xaa can be any naturally occurring amino acid
  misc_feature (73)..(73): Xaa can be any naturally occurring amino acid
  misc_feature (75)..(75): Xaa can be any naturally occurring amino acid
  misc_feature (77)..(77): Xaa can be any naturally occurring amino acid
  misc_feature (84)..(85): Xaa can be any naturally occurring amino acid
VDQEVXILMXKLNFXPXSVFPTDLQYVDFLDRVXKAELKLRSXNLWEVXHPWXNXFXPKSXISDFDKXVFKGXLXNXTSGPILXXPMNKDK

SEQ ID NO: 687 - protein, 480 aa, Arabidopsis thaliana
MVRRQEEEKKAEKGMRLGKYELGRTLGEGNFGKVKFAKDTVSGHSFAVKIIDKSRIADLNFSLQIKREIRTLKMLKHPHIVRLHEVLASKTKINMVMELVTGGELFDRIVSNGKLTETDGRKMFQQLIDGISYCHSKGVFHRDLKLENVLLDAKGHIKITDFGLSALPQHFRDDGLLHTTCGSPNYVAPEVLANRGYDGAASDIWSCGVILYVILTGCLPFDDRNLAVLYQKICKGDPPIPRWLSPGARTMIKRMLDPNPVTRITVVGIKASEWFKLEYIPSIPDDDDEEEVDTDDDAFSIQELGSEEGKGSDSPTIINAFQLIGMSSFLDLSGFFEQENVSERRIRFTSNSSAKDLLEKIETAVTEMGFSVQKKHAKLRVKQEERNQKGQVGLSVTAEVFEIKPSLNVVELRKSYGDSCLYRQVCHYCHFLIRLKKHISKIKMFMFDIGVGAVVRETIKRRGHILAGARDSNLGVGVFG

SEQ ID NO: 688 - protein, 282 aa, Lactobacillus plantarum WCFS1
MTVLTTMYQLANGVNIPKVAFGTWQIPGGEATYQAVRAALAAGYRHIDTALAYQNEASVGQAIRDSGIPREQIFVTTKLPAETKSYQGALNDFDRSLKNLGLDYVDLYLVHAPWPWGQVGRVYDEANLDVWQAMEAIYQSGRAKAIGVSNFAVRDLKNILNQATIPPMVNQIQYYLGFTEPKITKFSEEHAMLVEAYSPLATGGVLDNPQVQAYADKYGVSVAQLALRFVLQNGVLPLPKAVNPAHIEANTQLDFAISVADMQALNDLPDAAGSYMHNPTQG

SEQ ID NO: 689 - protein, 235 aa, Glycine max
MALFAAFSICKVAKDAAGVAGNVFAFGLFVSPIPTFRRIIRNGSTEMFSGLPYIYSLLNCLICMWYGTPLISADNLLVTTVNSIGAVFQFVYIIIFLMYAEKAKKVRMIGLSLAVLGIFAIILVGSLQIDDIIMRRFFVGFLSCASLISMFASPLFIIKLVIQTKSVEFMPFYLSLSTFLMSTSFLLYGLFNDDAFIYVPNGIGTILGMIQLILYFYFESKSRESSREPLIVSYA

SEQ ID NO: 690 - protein, 208 aa, Phanerochaete chrysosporium
GAGGETTAGTLTFVVYFLTQHPNVLQRLRQEILDVVGPSNLPTYDDIKQMKYLRAVLNETLRLYPPVPWNMRYAVKDGILPNSEPDGKPWFIPAGASVSYSVHCMHRRKDYWGPDAEEFDPDRFLDERLHKYLTPNPFIFLPFNAGPRICLGQQFAYNEMSFFLVKLLQTFEDISFERDAFEPNALPPAEWAKFPGRKGKEKFWPRHI

SEQ ID NO: 691 - protein, 318 aa, Triticum aestivum
  misc_feature (178)..(178): Xaa can be any naturally occurring amino acid
VRKATSGRSNPSGRRRGEGGTSRLACGRVRLSARHAETARAPMPPPRRAGAGDTSAFFAATLVLWAVSVGFEIGARGRRELAAVAAGFAFFQAANTAVRAAVSRDPLFVNTAVSLLHSSLTSASVIFVLLCQWRTKGLENMFQHEELVGSSWIGAYSALCFSCGYFAYEQLDMLRYRXLYSGWIPGILMHHLILLICFTLALYRNVTINYLILTLLCEMHSIFLHVRKLRRMAGFRDFNRKLVKLEWVLNWTTFVTARVICHILITYRLITDAHKFDKGIELPLALSGMAGMNVLNVSLGLDLFKAFARERNQQTHQD

SEQ ID NO: 692 - protein, 364 aa, Psychrobacter sp. 273-4
MSMMKSLIFIEPGKIEVAEKKIPDVGPNDALIKITTTTICGTDIHIFKGEYPVAKGLTIGHEPVGIIEKLGSAVMGYQEGQRVIAGAICPSFTSYASQDGFPSQDGGYIQPDGTCACHGYKATGGWRFGNIIDGTQAEYVLVPDAQANLAPVPDGLTDEQVLMCPDIMSTGFKGAENANIKIGDIVAIFAQGPIGLCATAGAKLRGASTIIAIDGNNERLAMSKKLGADITLNFKEVDVVDEIMKITGGRGVDSSIEALGLQSTFEQGIKVLKPGGTLSSLGVYSADLKIPMAYFASGLGDHTIRTALCPGGKERMRRLLNVVESGRVDFSEMVTHTYALDDIVEAYDLFMHQRDGVLKIAIKP

SEQ ID NO: 693 - protein, 243 aa, Zea mays
MFGYRKADPDLEAGGSSLLYPGMTESPELRWAFVRKIYAILTVQLAMTAAVSAFVVKVPAVSNFFVSSNAGIALYIFLIVLPFIVLCPLHYYHQKHPVNLLLLGLFTVAISFAVGMTCAFTSGKIILEAAILTAVVVNSLTAYTFWAAKRGHDFNFLGPFLIAAIMVLMVFSLIQIFFPLGKISVMIYGGLASLIFCGYIIYDTDNIIKRHTYDQYIWAAVSLYLDVINLFLSLLQLLRAADS

SEQ ID NO: 694 - protein, 117 aa, Bartonella sp. Cg2sk
WGPAHGGANEACLKMLQEIGSIERIPEFIARAKDKNDPFRLMGFGHRVYKNYDPRAKIMQKTCHEVLKELNIQDDPLLDIAIELEKIALSDEYFIEKKLYPNVDFYSGITLKALGFP

SEQ ID NO: 695 - protein, 502 aa, Agrobacterium tumefaciens
MKENQLVLVRRHILEIEMQNKVQFITYVDRLTRGGFRQLKELVDGKFAGLFGGVHVLPFFNPIDGADAGFDPTDHTIVDPRLGDWEDVRALSGSVEIMADLIVNHVSSQSGAFTDFIAKGSASEFADMFMTFEKVFPDGATEEDLLRIYRPRPGLPFSKVTLADGTQRMLWTTFTPEQIDIDVHSAKGTTYLETILDRFSEANVTAIRLDAAGYAIKKAGSSCFMIDDTYAFLEEVAGKARNRGMEVLVEIHSYHRDQIEIAKKVDRVYDFALPPLILHALFTGDATPLAKWLAISPRNAITVLDTHDGIGVIDVGARSDGRAGLLEPQAIDNLVEEIHRRSDGQSRQATGAAASNLDLYQVNCTYYDALGRNDNDYLIARAIQFFAPGIPQVYYVGLLGGVNDMDLLAKTGVGRDINRHYYGNDEIGTALETPLFHRLSNLIRFRNTHPAFGGALKATIADAGALVLSWQHGDAFAELKISFADRKASIAASGQSEMQIVE

SEQ ID NO: 696 - protein, 315 aa, Burkholderia fungorum LB400
MKYKDYYEILGLERSASQDDIKRSYRKLARKYHPDVSKHADAEERFKELGEAYEVLKDPEKRAAYDRMGSDWRNGQDFQPPPNWDEGFEFSGAGSGPGEQADFHDIFEKMFGGARGAHPHARQRSFDARGEDHHAKVLIDLEDAYRGAQRAISLQMPVVDAQGHVSLETRTLNVTIPKGIRAGQHLRLSGQGAAGATPETAGDLYLEIAFRDHPRFQVDGRDVSLELPVAPWEAALGAKVTVPTPDGSVEMTVPAGSASGRRLRLKGKGIPANPPGDLYVILNIVLPPADTESAKAAYDAMRQAFNFDPRAHFYR

SEQ ID NO: 697 - protein, 113 aa, Bartonella sp. Cg3sk
AHGGANEACLKMLQEIGSVKRIPEFIARAKDKNDPFRLMGFGHRVYKNYDPRAKIMQKTCHEVLKELNIQDDPLLDIAIELEKIALNDEYFVEKKLYPNVDFYSGITLKALGF

SEQ ID NO: 698 - protein, 250 aa, Physcomitrella patens
MAKSYPNVSEKYAALIEKARRKIRGMVAEKNCAPIILRLAWHGSGTYDQESKTGGPLGTIRFGQELAHGANAGLDIAVNLLQPIKEQFPELSYADFYTLAGVVAVEVTGGPTIPFHPGRKDHETCPVEGRLPDATKGLDHLRCVFTKQMGLTDKDIVVLSGAHTLGRCHKDRSGFEGAWTPNPLRFDNSYFQVLLEGEKDGLIMLPSDKALLDEPKTRELVELYAKDEDKFFEDYAESHMKLSELGFAEA

SEQ ID NO: 699 - protein, 120 aa, Bartonella sp. Sf2sk
HGGANEACLKMLQEIGSVKRIPEFIARAKDKNDPFRLMGFGHRVYKNYDPRAKIMQQTCHEVLKELNIQDDPLLDIAIELENIALNDEYFVEKRLYPNVDFYSGITLKALGFPTEMFTVP

SEQ ID NO: 700 - protein, 389 aa, Escherichia coli
TLQNGKLNVPENPIIPYIEGDGIGVDVTPAMLKVVDAAVEKAYKGERKISWMEIYTGEKSTQVYGQDVWLPAETLDLIREYRVAIKGPLTTPVGGGIRSLNVALRQELDLYICLRPVRYYQGTPSPVKHPELTDMVIFRENSEDIYAGIEWKADSADAEKVIKFLREEMGVKKIRFPEHCGIGIKPCSEEGTKRLVRAAIEYAIANDRDSVTLVHKGNIMKFTEGAFKDWGYQLAREEFGGELIDGGPWLKVKNPNTGKEIVIKDVIADAFLPQILLRPAEYDVIACMNLNGDYIYDALAAQVGGIGIGPGANIGEECSLFEATHGAAPKYAGQDKVNPGSIILSAEMMMRHMGWTEAADLIVKGMEGAINAKTVTYDFERLMEGAKLL

SEQ ID NO: 701 - protein, 226 aa, Aspergillus nidulans FGSC A4
MNREEMIWEWFSADPERLRLSSSFMEADRGSRPSWVEWCSLPGQLAKVFDGGVEDDFMVDVAGGRGHDLKSFTDKFPDVKGQFILEDLGHVLEQSVDGLRAKKIAFDLFKEQPFKGAYVYYLKFILHDWSDGQCHRILTHIREAMRPESKLIIEEFILPEKDCPMLSAMWDWEMMVFCNSFERSESHWRKVLSKAGFQAKFYYPPGDGQVRFLQSKGTFSVLTILE

SEQ ID NO: 702 - protein, 500 aa, Euphorbia lagascae
MEQKNLSFPSILISFLLVLILVVVMRLWKKQNPPPGPWKFPIIGNLPHLLLTSDLGHERFRALAQIYGPVMSLQIGQVSAVVISSAEAAKEVMKTQADAFAQRPIVLDAQIVFYNRKDVLFASYGDHWRQMKKIWILEFLSAKKVQSSRLIREEEMEDAITFLRSKAGSPVNITKIIYGIIISIMIRTSVGNCKQKERLLSVADAVNEAATSFGTADAFPTWKLLHYIIGAESKPRRLHQEIDDILEEILNEHKANKPFEADNLMDVLLNLQKNGNVPVPVTNESIKASVLQMFTAGSETTSKATEWVMAELMKNPTELRKAQEEVRQVFGEMGKVDESRFHDLKFFKLVVKETLRLHPPVVLIPRECRETTRIDGYEIHPNTRIVVNAWAIGRDPNTWSEPGKFNPERFKDCAIDYKGTTFELVPFGAGKRICPGITSAITNLEYVIINLLYHFNWELADGITPQTLDMTEAIGGALRKKIDLKLIPIPYQVSLGSNIS

SEQ ID NO: 703 - protein, 180 aa, Rubrivivax gelatinosus PM1
MRRLAIAALLCIVGSGAQAACPPLLDRSFPRLQDEKPQNLCQYAGKVVVVVNTASYCGFTSQYKGLEALHARYQSRGLVVLGFPSNDFGSQEPGSNQDIAAFCENTFGVRFPMFAKSSVKGSARNPLYADLAQRTGKTPAWNFHKYLIGRDGQVVLSFSSQTDPQDPVFVQEIEKLVDSQ

SEQ ID NO: 704 - protein, 493 aa, Pneumocystis carinii
  misc_feature (398)..(398): Xaa can be any naturally occurring amino acid
CTTKHTGTSASTPIAAGIIALILSKRSDLTWRDVQALIVYTAVPFNLNYHEWDQLPSGRYYNNFFGFGKLDAYAMVQQAKTFQKLNPQTIFSTQLIQVNKKFSENNGHITSTFYIHRDYPTHYKFKNLEYICVSFCYKHQYRGHLEFSITSPANVTSQLAHRRPRDKHSGIVYWTFMSVKHWGEKIVGNWTIDVEDKKDQNLDGEVFDWQLHFFGESSESEGVPPPSYPFLSRYPTTTPPPDPDATSPPDPDANLPPDSNADPQPPSEPAPPSEPESQPSSEPGSQPPSKPGPQPPSDPQPPSDLKPPSKPDARPRPPSDPSSQQDPDTSLSSNPTSTSSSEPPPPSPPPPPPPPPAPAPAPAPPRPELEPEPEPGPEPVPQPPQPQPPQPQPEPPAXPPKPQPPPPSPPEQKPTSITSSTSTTSSSKTKISTTRKASSTKASSTTKTSTRPSPTEGTFTGSSASHLSFFEKRHLLLQMILLLFFFLFLGYSF

SEQ ID NO: 705 - protein, 388 aa, Escherichia coli
TLQNGKLNVPENPIIPYIEGDGIGVDVTPAMLKVVDAAVEKAYKGERKISWMEIYTGEKSTQVYGQDVWLPAETLDLIREYRVAIKGPLTTPVGGGIRSLNVALRQELDLYICLRPVRYYQGTPSPVKHPELTDMVIFRENSEDIYAGIEWKADSADAEKVIKFLREEMGVKKIRFPEHCGIGIKPCSEEGTKRLVRAAIEYAIANDRDSVTLVHKGNIMKFTEGAFKDWGYQLAREEFGGELIDGGPWLKVKNPNTGKEIVIKDVIADAFLQQILLRPAEYDVIACMNLNGDYISDALAAQVGGIGIAPGANIGDECALFEATHGTAPKYAGQDKVNPGSIILSAEMMLRHMGWTEAADLIVKGMEGAINAKTVTYDFERLMEGAKL

SEQ ID NO: 706 - protein, 412 aa, Arabidopsis thaliana
MGLFGTKKIGKYEIGRTIGEGNFAKVKLGYDTTNGTYVAVKIIDKALVIQKGLESQVKREIRTMKLLNHPNIVQIHEVIGTKTKICIVMEYVSGGQLSDRLGRQKMKESDARKLFQQLIDAVDYCHNRGVYHRDLKPQNLLLDSKGNLKVSDFGLSAVPKSGDMLSTACGSPCYIAPELIMNKGYSGAAVDVWSCGVILFELLAGYPPFDDHTLPVLYKKILRADYTFPPGFTGEQKRLIFNILDPNPLSRITLAEIIIKDSWFKIGYTPVYHQLSDSIKDNVAEINAATASSNFINAFQIIAMSSDLDLSGLFEENDDKRYKTRIGSKNTAQETIKKIEAAATYVSLSVERIKHFKPKEIRSRSSYDLLSAEVIEVTPTNCVIEISKSAGELRLYMEFCQSLSSLLTAEVS

SEQ ID NO: 707 - protein, 356 aa, Lycopersicon esculentum
MDGKENNGVNGSNKVGIPKCCLKARVFDPELEANCHSTVVSGWFSQPPTSFDGKEKVLYFNNPMWPGEAHSLKVEKVLFKGKSEFQEVLVFESASYGKVLVLDGIVQLTEKDECAYQEMIAHLPLCSIKSPKKVLVVGGGDGGVLREISRHSSVELIDICEIDKMVIDVSKKYFPDLAIGFEDPRVNLHVGDAVEFLKNTPEGKYDAIIVDSSDPVGPAIELVEGPFFAKIARALRPGGVLCNMAESMWLHTHLIQDMISICRETFSSVHYAWASVPTYPSGVIGFLLCSTEGPFVDFKHPVNPIEKLEGALQHQRELKFYNSEMHEAAFALPCFLRREVSGLRDSPRSAGSGVKI

SEQ ID NO: 708 - protein, 221 aa, Glycine max
  misc_feature (157)..(157): Xaa can be any naturally occurring amino acid
  misc_feature (170)..(170): Xaa can be any naturally occurring amino acid
MLSISATRIFFLRSTTIRLSSSSSSLQFFSNPNRTLFRPFLHTSFKPLPSSFSFRTDHTMATSNAKSVHDFTVKDAKGNDINLGDYKGKVLIIVNVASQCGLTNSNYTELSQLYEKYKQKGLEILAFPCKQFGAQAPGSNEQIQEFVCTRFKAEFPXFDKVDVNGDKAAXLYKYLKSSKGGLFGEGIKWNFSKFLVDKEGNVVDRYAPTTSPLSIEVRQLV

SEQ ID NO: 709 - protein, 341 aa, Chloroflexus aurantiacus
MRGTALYGPYDVRSEYVPDPTIIEPTDAIIRLSATCICGSDLWPYRGVDPITRPVPMGHEYVGIVEEVGSAVKIIKPGQFVVGSFFASDNTCPICQAGYQTSCVNRQPGAPTGAQAEYARIPLADGTLVPTPDLPPADLIPDLLAASDVLGTGWFAAVAAEVGPGKTVAVVGDGAVGLLAVLSARQMGAERIILIGSRHPQRQALAQEFGATDVIEARGDEAIEMLKELTDGLGVHSTIEAVGTQESMMQAIRATRPGGHVGVVGVLHDVAIPGREFFFSHVHLHGGPAPVRRFLPELINLIWQRVIKPGKVFDLTLPLEQVAEGYRAMDERRAIKVLLKP

SEQ ID NO: 710 - protein, 589 aa, Zea mays
  misc_feature (173)..(173): Xaa can be any naturally occurring amino acid
  misc_feature (559)..(559): Xaa can be any naturally occurring amino acid
  misc_feature (572)..(572): Xaa can be any naturally occurring amino acid
MCGILAVLGCSDWSQAKRARILACSRRLKHRGPDWSGLYQHEGNFLAQQRLAVVSPLSGDQPLFNEDRTVVVVANGEIYNHKNVRKQFTGTHNFSTGSGCEVIMPLYEKYGENFVDMLDGVFAFVLYDTRDRTYVAARDAIGVNPLYIGWGSDGSVWIASEMKALNEDCVRFXSSPPGHLYSSAGGGFRRWYTPHWFQEQVPRTPYQPLVLREAFEKAVIKRLMTDVPFGVLLSGGLDSSLVASVTKRHLVETEAAEKFGTELHSFVVGLEGSPDLKAAREVADYLGTIHHEFHFTVQDGIDAIEEVIYHDETYDVTTIRASTPMFLMARKIKSLGVKMVLSGEGSDELLGGYLYFHFAPNKEEFHRETCRKVKALHQYDCLRANKATSAWGLEVRVPFLDKEFINVAMGMDPEWKMYDKNLGRIEKWVMRKAFDDDEHPYLPKHILYRQKEQFSDGVGYNWIDGLKSFTEQQVTDEMMNNAAQMFPYNTPVNKEAYYYRMIFERLFPQDSARETVPWGPSIACSTPAAIEWVEQWKASNDPSGRFISSHDSAATDHTXAVSRRWPTAAATXAANGTVNGKDVAVAIAV

SEQ ID NO: 711 - protein, 426 aa, Caulobacter crescentus CB15
MTDKATLTIGDKSYELPILKGSTGPDVIDVRKIYGESDHFTFDPGFTSTASCESKITYIDGDAGILLHRGYPIDQLAEKSSFLEVCYLLLNGELPKADEFAKFEHNITYHTMLHAQFDRFFEGFRRDAHPMAVMTGAVGALSAFYSDSINVDDAREREISAHRLIAKMPTIAARAYKYTVGQPFVSPRNDLSYSENFLRMCFAVPAEDWKPNPVLTRAMDRIFILHADHEQNASTSTVRLAGSSGAHPFACIAAGIACLWGPSHGGANQEALEMLETIGSVDNIKDYVQGVKDRKYKLMGFGHRVYKNFDPRAKVMQKTAHEVLAELGHNNDPLLQVAQELEKVALNDPYFVDRKLYPNIDFYSGITLRAMGFPTNMFTVLFALARTVGWISQWKEMFEDPTRKIGRPRQLYTGATHRDYVTLDKR

SEQ ID NO: 712 - protein, 286 aa, Buchnera aphidicola str. APS (Acyrthosiphon pisum)
MDHKKTWHEKLYCHLGQYFLIEKMLYKKKTPHHQVMIFKNSVFGKIMVIDDIVQTTERDEFIYHEMLTHVPIIAHGSIKSVLIIGGGDGGILREVCRYKMIENITMVEIDVNIIDLCKKYFPNHSNQAYQDSRLNLIIDDGLNFIKRTKEKFDLIISDSTDPIGCGKNLFRSEFYFNCKNHLEENGIFVAQNGVFFLQKNETILTYKNLKKYFYDTRFYQANVPTYYGGVMVFAWGTNNIEYRKNSLEKIQIRIKNTKLDFNYYNAKIHISSFYLPQYILNELNES

SEQ ID NO: 713 - protein, 187 aa, Agrobacterium tumefaciens str. C58
MSQESSRRASARRESPSSPRTWAGWIPVTGTGMRECVVALCLLLTLIFAAASPALAFNPDEVLKDPVLEQRARNLTSQLRCMVCQNQSIDDSNAELARDLRVLVRERLVQGDSDKAVIDYVVSRYGEFVLLKPRLSLRTLLLWGAPIGLTLAGIFAVFVFSRRRATQERPQKLSADEEERIRNLIEK

SEQ ID NO: 714 - protein, 342 aa, Coxiella burnetii RSA 493
MKVLSKLKPAPGLWLHKAPTPKPGRDEVLIKIKKTAICGTDLHIYKWDEWAQKTIPVPMHVGHEFVGEIVEVGEAASALAVGDRVSGEGHITCGDCRNCRAGKRHLCRYTVGVGVNRPGAFAEYLVIPAKNAYKIPAKISDDIAAILDPFGNAAHSALEFDLVGEDVLITGAGPVGLMSAAIARHVGARHVVITDVNDYRLALAEKVGVTAAVNSTKTPLTETMKNLGMTEGFDVGLEMSGNAEAFRSMLTVMNNGGKIAFLGIPPEPFAIDWNQVVFKSLLIKGIYGRRMFETWYKMTNLLLSGLDISPIITHEFPMKDFQQAFDVMLSGKTGKVILNWEQ

SEQ ID NO: 715 - protein, 346 aa, Escherichia coli K12
MKSVVNDTDGIVRVAESVIPEIKHQDEVRVKIASSGLCGSDLPRIFKNGAHYYPITLGHEFSGYIDAVGSGVDDLHPGDAVACVPLLPCFTCPECLKGFYSQCAKYDFIGSRRDGGFAEYIVVKRKNVFALPTDMPIEDGAFIEPITVGLHAFHLAQGCENKNVIIIGAGTIGLLAIQCAVALGAKSVTAIDISSEKLALAKSFGAMQTFNSSEMSAPQMQSVLRELRFNQLILETAGVPQTVELAVEIAGPHAQLALVGTLHQDLHLTSATFGKILRKELTVIGSWMNYSSPWPGQEWETASRLLTERKLSLEPLIAHRGSFESFAQAVRDIARNAMPGKVLLIP

SEQ ID NO: 716 - protein, 209 aa, Triticum aestivum
  misc_feature (92)..(92): Xaa can be any naturally occurring amino acid
  misc_feature (108)..(108): Xaa can be any naturally occurring amino acid
  misc_feature (116)..(116): Xaa can be any naturally occurring amino acid
  misc_feature (156)..(156): Xaa can be any naturally occurring amino acid
MAPTVMASSATSVAPFQGLKSTAGLPVSRRSNGASLGSVSNGGRIRCMQVWPIEGIKKFETLSYLPPLSTEALLKQVDYLIRSKWVPCLEFXSKVGFIFREHNASPGXYYDGRYWXTMWKLPMFGCTDATQVINEVEEVKKEYLTRIPHIGFDNMXQVQCVSSSPNGLQGSGRLNSNHTGILSAMRLEPMLWFPPLPLVSRKVHVSHMK

SEQ ID NO: 717 - protein, 254 aa, Triticum aestivum
  misc_feature (100)..(100): Xaa can be any naturally occurring amino acid
  misc_feature (139)..(139): Xaa can be any naturally occurring amino acid
  misc_feature (148)..(148): Xaa can be any naturally occurring amino acid
  misc_feature (169)..(169): Xaa can be any naturally occurring amino acid
MAKTYPVVSAEYQEAVEKARQKLRALIAEKNCSPLMLRLAWHSAGTFDVSSKTGGPFGTMKKPAEQAHAANAGLDIAVRMLEPIKEEIPTISYADLYQLXAGVVAVEVSGGPVIPFHPGREDKPQPPPEGRLPDATRGXLDHLRAVFXASRWGLSDQDIVALSGGHTLXGRCHKERSGFEGPWTRNPLKFDNSYFTELLSGDKEGLLQLPSDKTLLTDPVFRPLVEKYAADEKAFFEDYKEAHLRLSELGYAEA

SEQ ID NO: 718 - protein, 351 aa, Staphylococcus aureus subsp. aureus COL
MKALVKTREGHGNLELLDKEVATPLDDKVKIKVHYAGICGTDIHTYEGHYKVNFPVTLGHEFSGEIVEVGADVKDFKVGDRVTSETTFYVCNECEYCKSKDYNLCNHRKGIGTQVDGAFTNYVIAREESLHHIPDEVSYQSAAMTEPLACAHHGVSKIQVNSGDVAVVMGPGPIGLLVAQVLKSKGATVVVTGLDNDKVRLDKAEALHMDYVVNLQQTDLKTYINGITDGYGADVVVECSGAVPAARQGLDILRKKGFYSQIGIFKDAEIPFDMEKVIQKEITVVGSRSQKPADWEPSLQLMADGLVNAEALVTKIYDISKWDEAYQHLKSGEGIKVLLKPLDLDENEGEN

SEQ ID NO: 719 - protein, 355 aa, Arabidopsis halleri subsp. halleri
ISYLTYDRADMAFAHYGPFWRQMRKVCVMKVFSRKRAESWASVRDEVDKMVRSVSCNVGKPINVGEQIFALTRNITYRAAFGSACEKGQDEFIRILQEFSKLFGAFNVADFIPYFGWIDPQGINKRLVKARNDLDGFIDDIIDEHMKKKENQNAVDDGDVVDTDMVDDLLGFYSEEAKLVSEAADLQNSIKLTRDNIKAIIMDVMFGGTETVASAIEWALTELLRSPEDLKRVQQELAEVVGLDRRVEESDIEKLTYLKCTLKETLRMHPPIPLLLHETAEDTSIDGFFIPKKSRVMINAFAIGRDPTSWADPDTFRPSRFLEPGVPDFKGSNFEFIPFGSGRRSCPGMQLGLYA

SEQ ID NO: 720 - protein, 430 aa, Mycobacterium leprae TN
MSVLLRGVRLYGEGEQVDVLVEGEQIANIGAGIDIPDTADVIDAIDQVLLPGLVDLHTHLREPGREYAEDIETGSAAAALGGYTAVFAMPNTTPVADSPVVTDHVWRRGQQVGLVDVHPVGAVTVGLAGAELTEMGMMAAGAAQVRIFSDDGNCVHNPLVMRRALEYATGLGVLIAQHAEEPRLTVGAVAHEGPTAARLGLSGWPRAAEESIVARDALLARDAGARVHICHASTAGTVEILKWAKEQGISITAEVTPHHLLLDDSRLASYDGVNRVNPPLRETADAVALRQALADGIIDCVTTDHAPHADHEKCVEFSAARPGMLGLQTALSVVVHTMVVPGLLSWRDVAQVMSENPARIAGLPDHGRPLEVGEPANLTVVDPDVTWTVTGDGLASRSANTPYEAMTLPATVTATLLRGKVTARGQKSPV

SEQ ID NO: 721 - protein, 127 aa, Brassica napus
  misc_feature (10)..(10): Xaa can be any naturally occurring amino acid
  misc_feature (15)..(16): Xaa can be any naturally occurring amino acid
  misc_feature (25)..(25): Xaa can be any naturally occurring amino acid
  misc_feature (48)..(48): Xaa can be any naturally occurring amino acid
  misc_feature (65)..(65): Xaa can be any naturally occurring amino acid
  misc_feature (91)..(91): Xaa can be any naturally occurring amino acid
  misc_feature (100)..(100): Xaa can be any naturally occurring amino acid
  misc_feature (110)..(110): Xaa can be any naturally occurring amino acid
  misc_feature (122)..(122): Xaa can be any naturally occurring amino acid
LKIADFGWSXHTFNXXRTMCGTLDXLPPEMVESVEHDASVDIWSLGIXCYEFLYGVPPFEAMEHXDTYRRIVQVDLKFPPKPIVSASAKDXISQMLVKEXAQRLPLHKLXEHPWIVQNADPXGIYRG

SEQ ID NO: 722 - protein, 373 aa, Picrophilus torridus DSM 9790
MSISLGLEDVFIKYTSLTSIDGEKGELRYRGYDIKDLVEHCSFEEVAYLMFYGELPKRDELEHFKSNVMKNYKIPENVKNIIKNMPRDGDALAIMEAAFAALSTEEYTWEKERDREKAAEIMGRALGIVSAVFRYRDGREIKDPENKGYAEAFLNACFDSGIDEDKIKAMNAALILYIDHEVPASTTAALVASSTLSDMYSCVTAAIAALKGPLHGGAAEAAYKQFLAIKSPENVDSWFNENILNNKKRLMGFGHRVYKTYDPRMLIFKELARKNAKTDEQKKILELAERLEALGVKNFGQKKIFPNTDYYSGIVFNEIGFPLYMFTTLFALSRVVGWVAHISEYVESEERLIRPRAIYIGPEKRDVVPIDKR

SEQ ID NO: 723 - protein, 314 aa, Pueraria montana var. lobata
MAAIEIPTIVFPNSFAQHRVPVVEMGSAPDFTCKKDTKEAIIEAVKQGYRHFDTAAAYGSEQALGEALKEAVDLGLVSRQDLFVTSKLWVTDNHPHLVVSALRKSLKTLQLEYLDLYLIHWPLSSQPGKFSFPIEVEDLLPFDVKGVWEAMQECQKLGLTKAIGVSNFSVKKLQNLLSVATIRPVVNQVEMNLAWQQKKLREFCKENGIVITAFSPLRKGASRGPNEVMENDVLKEIADAHGKSIAQVSLRWLYEQGVTFVPKSYDKERMNQNLQIFDWALTQEDHHKISQISQSRLISGPTKPQLSDLWDDEI

SEQ ID NO: 724 - protein, 113 aa, Bartonella sp. Sf3sk
HGGANEACLKMLQEIGSVKRIPEFIARAKDKNDPFRLMGFGHRVYKNYDPRAKIMQQTCHEVLKELNIQDDPLLDIAIELENIALNDEYFVEKRLYPNVDFYSGITLKALGFP

SEQ ID NO: 725 - protein, 275 aa, Oceanobacillus iheyensis HTE831
MIKGLQDTFTLNNGVEMPGFGLGVYKVEDGSVAEESVRIALENGYRSIDTASFYDNEKGVGEGIKNSGVPREDIFLTSKVWNDEQGYTSTKQAFQRSLDKLGTDYLDLYLIHWPVKDTFVETWRAMEELYRDGKVKAIGVSNFHVQHLEKLFVNAEVIPAVNQVEFHPHLTQEGLRAFCRQHNIQLEAWSPLKRGQLLEEDIIQTIAKKYGKSAAQVILRWDVQHEVITIPKSITKERIIANADIFDFSLTEEEMNQIDAMNQNDRSGSNPDSFD

SEQ ID NO: 726 - protein, 497 aa, Zea mays
  misc_feature (268)..(268): Xaa can be any naturally occurring amino acid
  misc_feature (293)..(293): Xaa can be any naturally occurring amino acid
  misc_feature (317)..(317): Xaa can be any naturally occurring amino acid
  misc_feature (330)..(330): Xaa can be any naturally occurring amino acid
  misc_feature (366)..(366): Xaa can be any naturally occurring amino acid
CAETWREAAAQLGWPCCCSCSRPSQCSSHPPWPTTCSPWTSTPRRARSWTASCAPPCRPPSGGRSRSPRASSASSSTTASRRAATRPCSSRATPRSRPWGPTPRCSRGRCSSSTTSAPRCTPPAGPPCPAPTSRRSPPAPPSSRRGDPPTPCPWASATASPRRPRTTSTRSRRPPPPASRSSWRRSGAGASATWPQPLVSRLATTEFIPLPPPSPPIGRTHRASSGADRVSSTAVKAYPTVNEDYLKAVDKAKRKLRGLIAEKNCAPXSWLRLAWHSAGTFDVATKTGGPFGXTMKNPAEQAHGANAGLQIAIRRPXKEQFPILSSAECXHLPGFAAVAATRWTGRSWPVEVTRRAPDVPFHPGQXRTKPEPPPEGRLPDATQGSDHLRQVFSTQMGLSDQDIVALSGGHTLGRCHKDRSGFEGAWTSNPLIFDNSYFKELLSGEKEGLLQLPSDKALLSDPSFRPLVDKYAADEDAFFADYAEAHLKLSELGFAEA

SEQ ID NO: 727 - protein, 415 aa, Zea mays
MVSDGARGLLGAYELGRTLGEGNFGKVKQARHRGSGGQFAVKIMERARVLSQRADEQICREIATLKLLAHPNVVRLHEVAASKTKIYMVLELVNGGELLDRIQAASEGKLPEQEARRLFQQLVDGVSYCHEKGVCHRDLKLENVLVDRKGNIKISDFGLSALPQHLGNDGLLHTTCGSPNYIAPEVLQNRGYDGSLSDIWSCGVILYVMLVGHLPFDDRNIVVLYQKIFKGDAQIPEWLSPGARNLLRRILEPYPAERIAMAEIKAHPWFQEHYVPVLPPYDDDDDSVKQIGAGSKTTHHINAFQLIGMASSLDLSGFFEEEDVSQRKIRFTSAQPPEDLFAEIERSATDMGFHVHRGHSKLRLTRNCDRSKNQKNPMSSSSSSFLVCTEVFELSPSLYVVELNKSHGDPALYRQ

SEQ ID NO: 728 - protein, 112 aa, Bartonella sp. Cg1sk
AHGGANEACLKMLQEIGSVKRIPEFIARAKDKNDPFRLMGFGHRVYKNYDPRAKIMQKTCHEVLKELNIQDDPLLDIAIELEKIALNDEYFVEKKLYPNVDFYSGITLKALG

SEQ ID NO: 729 - protein, 132 aa, Glycine max
  misc_feature (18)..(18): Xaa can be any naturally occurring amino acid
EEVFSIVGRDPLIEVAVXALEKVALSDEYFIKRKLYPNVDFYSGLIYRAMGFPPEYFTVLFAIPRMAGYLAHWRESLDDPDTKILRPQQVYVGEWLRHYTQVNVRTTSSDADKLGEVAISNASKRRLAGSGV

SEQ ID NO: 730 - protein, 225 aa, Glycine max
MIISKLLLLLHQTFCKMSIAEEESPSVMPKVITFLCSLLERVAESNDHNQHLQQHQKISVFHGLTRPNISIQCYLERIFKYANCSPSCFVVAYVYLDRFTQRQPSLPINTFNVHRLLITSVMVAAKFMDDMYYNNAYYAKVGGITKVEMNFLELDFLFGLGFHLNVTPGTFQAYCVHLQREMLLIQPLNFSDSTLNLGQSLKAHLCFNEDECSHQKQKQQQQLAV

SEQ ID NO: 731 - protein, 146 aa, Arabidopsis thaliana
MDPMDIVGKSKEDASLPKDVRVARDAQDLLIECCVEFINLVSSESNDVCNKEDKRTIAPEHVLKALQVLGFGEYIEEVYAAYEQHKYETMQDTQRSVKWNPGAQMTEEEAAAEQQRMFAEARARMNGGVSVPQPEHPETDQRSPQS

SEQ ID NO: 732 - protein, 364 aa, Populus balsamifera subsp. trichocarpa x Populus deltoides
MGSTGETQMTPTQVSDEEAHLFAMQLASASVLPMILKTAIELDLLEIMAKAGPGAFLSTSEIASHLPTKNPDAPVMLDRILRLLASYSILICSLKDHPDGKVERLYGLAPVCKFLTKNEDGVSVSPLCLMNQDKVLMESWYYLKDAILDGGIPFNKAYGMTAFEYHGTDPRFNKVFNKGMSDHSTITMKKILETYKGFEGLTSLVDVGGGTGAVVNTIVSKYPSIKGINFDLPHVIEDAPSYPGVEHVGGDMFVSVPKADAVFMKWICHDWSDAHCLKFLKNCYDALPENGKVILVECILPVAPDTSLATKGVVHIDVIMLAHNPGGKERTEKEFEGLAKGAGFQGFEVMCCAFNTHVIELRKN

SEQ ID NO: 733 - protein, 314 aa, Helianthus annuus
MALGFSDRNTEMSPYSQQSNTSAVPMDSSKKRKTRSRKEAPEKVAATLAKWIEYNKANEDGKAKTRKAPAKGSKKGCMKGKGGPENSRTNFRGVRQRTWGKWVAEIREPNRGRRLWLGTFGSAVEAALAYDEAARAMYGTSARLNLPNCRSKNDILPLLVTNPASSCDSTTTCSYSEVDATHDSKPGPAVFPSVKHEESVQVKHEPEIVAKEEHCVDNNDLGFDIGDEMFDLEELLGAVEDSNPEAGSGDGYDGRFVNGADANENMQMYMQPDPCVSGQDYSFDFLQPGRPEDCSFTLEELGLGLDAELDLYSN

SEQ ID NO: 734 - protein, 512 aa, Salmonella enterica subsp. enterica serovar Typhi Ty2
MTNNPPSTRIQPSEYGYPLKLKARYDNFIGGDWVAPADGEYYQNLTPVTGQPLCEVASSGKKDIDLALDAAHKAKDKWAHTSVQDRAAILFKIADRMEQNLELLATAETWDNGKPIRETSAADIPLAIDHFRYFASCIRAQEGGISEVDSETVAYHFHEPLGVVGQIIPWNFPLLMASWKMAPALAAGNCVVLKPARLTPLSVLLLMEVIGDLLPPGVVNVVNGAGGEIGEYLATSKRIAKVAFTGSTEVGQQIMQYATQNIIPVTLELGGKSPNIFFADVMDEEDAFFDKALEGFALFAFNQGEVCTCPSRALVQESIYERFMERAIRRVESIRSGNPLDSGTQMGAQVSHGQLETILNYIDIGKKEGADILTGGRRKELDGELKEGYYLEPTILFGKNNMRVFQEEIFGPVLAVTTFKTMEKALEIANDTQYGLGAGVWSRNGNLAYKMGRGIQAGRVWTNCYHAYPAHAAFGGYKQSGIGRETHKMMLEHYQQTKCLLVSYSDKPLGLF

SEQ ID NO: 735 - protein, 150 aa, Glycine max
  misc_feature (114)..(114): Xaa can be any naturally occurring amino acid
  misc_feature (120)..(120): Xaa can be any naturally occurring amino acid
KSKASFPTRRHNNDIHSIASNVERVQSMQAWPPDGRQKCETLSYLPDIDHAQLATEVEYLFRKGCIPCMEFELEHGFVHREHDRSAGSFDGGSWTTCKMPTFGCTEASQVFKEXLYRVRXACPYGFIRIIGIVNVRRVQGIGFFADKPTG

SEQ ID NO: 736 - protein, 200 aa, Glycine max
  misc_feature (145)..(145): Xaa can be any naturally occurring amino acid
  misc_feature (158)..(158): Xaa can be any naturally occurring amino acid
MSKTTTSSSEQTARNRLATLAAHLLPSDAASATAILRPHRLSAPAGSSPPVNLKGTVTVVDERTGKKYQIEVTPDGTVRASDFKKISTGKNDKGLKLYDPGYLNTAPVISRISYIDGDAGILRYRGYPIEDLAEKSSFMEVSYLXDMIQSMPHDAHPXGMLVNAMSALSVYHPEANPALKGLDIYNSKQVRNKQVARGIG

SEQ ID NO: 737 - protein, 416 aa, Zea mays
  misc_feature (35)..(35): Xaa can be any naturally occurring amino acid
VCLRLKILDRQRILAMKIHERIKREIATQGLGQYXDLALLVQVSASKTKIYMVLEYVNGGELFDKIALKGKLTEKEGRKLFQQLIDAVGYCHEKGVYHRDLKPENVLVDAKGNIKVSDFGLSALPQNQQKDGLLHTTCGSPNYIAPEVLLNKGYDGSISDVWSCGVILYVMLTGNLPFDDQNVVVLYQKILKGNAHIPKWLSQGAQDILRKILDPNPVTRIDVDGIRAHDWFKQGYAPAMPFSDDEEDISMDEDSLNITEHNDIQDKIAINQINAFQLIGMSSCLDLSGFFEKEDVSERKIRFASNYSPAYLFEKIESIVRKMGFQVHKSNGKLKVIQDCKGLANSRGQESLLISAEVFEINESLYVVELKKSSGDCSLYRKLCETLSEDLGTCKSQQFLKQDSIRQDIGRYNSSF

SEQ ID NO: 738 - protein, 461 aa, Mesorhizobium loti MAFF303099
MSKTQTADQITEARRESHLFYLSSLRRPLIDRAEGIYMWTQDGRRFIDGSSGPMVANIGHSNRNVLDAMKRQMDRATFAYRLHFENEPAEELARELAKKLPEGMDRIFFVSGGSEATESCIKLARQWAVATGQASRWKVITRFPSYHGGTLGSLSITGDDALAETFEPMMRVMPTVPAPTAWRDRDNLSMEQRGVRYADMLEEKILAEGPESVVAFIMEPIGGAATAALVAPDSYYARTREICDHYGILLIHDEVMCGAGRTGKFLGGDHWNCKPDIVALSKGLGSGYAPLGALAAPMRLVQPLLASGGFQHGHTYAGNPLACAAGLAVLGEMDRLDLIANAAAMGDVLMDGLKGLAKRFPFIADVRGKGLLTGAEMVADPETLRPIEQGKKATQRLLDLAYERGLIIYGRRVKGGVDGDNFMVAPPMIVTSEQVGEIISIIGDSLEVLASELDLPVEGRG

SEQ ID NO: 739 - protein, 670 aa, Zea mays
MDGRRTILMGRYEIGKQLGQGTFAKVFYARNLTTGLAVAIKMINKDKVMKVGLMEQIKREISIMRLVKHPNILQLYEVMASKSKIYFVLEYAKGGELFNKIAKGGKLSEDAARKYFQQLVSAVDFCHSRGVYHRDLKPENLLLDENENLKVSDFGLSALAESKRQDGLLHTTCGTPAYVAPEVLSRKGYDGAKSDELAKRLKLRVKKKENGTLKLAAPKEGKKGALSPLPLVAGVEAELHPVSVGHKSMDAEMKQPLEGSMSLNIDSEGEPHIGNGSIVVENPASDLVKSESDRIKTFYQTVLSAIMVFVTAALSSYKDMKPLYSTTSHGKAHLSNLLVDEGLFIFMTFLCAMVLMMSEFVVHQHGRRGHVWCWVRTILVAVTGVMLIVADTILLIVTNRSNMLLSVLLVPEVLLFGVAVSVGAWMQESLPSSELGSRYDSAMKGTFDIATVGTIVSFTLQGGIVFGYLKTPDSNQVKHDPPLDLAACYATSTLSLTGMTMCAMPLAYLPNGMLEVLVRVVERLRSAVLAALAMMALVVSVEFLDGFVVVSFFPDAVTIALYYVVKLFSACQPREEISQLDFTFRIVAAAGFTLMTGLYAAFTGTDHYGFNLKTAMFILLLAVVSSLSRLAIPLHMPEAGVGGVIEFGIVSIALSFPLLALLAAIPLVFK

SEQ ID NO: 740 - protein, 347 aa, Staphylococcus aureus subsp. aureus COL
MKALKLYGVEDLRYEDNEKPVIESANDVIIKVRATGICGSDTSRYKKMGPYIKGMPFGHEFSGVVDAIGSDVTHVNVGDKVTGCPAIPCYQCEYCLKGEYARCEKLFVIGSYEPGSFAEYVKLPAQNVLKVPDNVDYIEAAMVEPSAVVAHGFYKSNIQPGMTVAVMGCGSIGLLAIQWARIFGAAHIIAIDIDAHKLDIATSLGAHQTINSKEENLEKFIENHYANQIDLAIESSGAKVTIGQILTLPKKGGEVVLLGIPYDDIEIDRVHFEKILRNELTVCGSWNCLSSNFPGKEWTATLHYMKTKDINVKPIISHFLPLEKGPETFDKLVNKKERFDKVMFTIY

SEQ ID NO: 741 - protein, 355 aa, Arabidopsis lyrata subsp. petraea
ISYLTYDRADMAFAHYGPFWRQMRKVCVMKVFSRKRAESWASVRDEVDKMVRSVSCNVGKPINVGEHIFALTRNITYRAAFGSACEKGQDEFIRILQEFSKLFGAFNVADFIPYFGWIDPQGINKRLVKARNDLDGFIDDIIDEHIKKKENQNAVDDGDVVDTDMVDDLLAFYSEEAKLVSEAADLQNSIKLTRDNIKAIIMDVMFGGTETVASAIEWALTELLRSPDDLKRVQQELAEVVGLDRRVEEADIEKLTYLKCTLKETLRMHPPIPLLLHETAEDTSIDGFFIPKKSRVMINAFAIGRDPTSWADPDTFRPSRFLEPGVPDFKGSNFEFIPFGSGRRSCPGMQLGLYA

SEQ ID NO: 742 - protein, 489 aa, Arabidopsis thaliana
MAEKITRETSLPKERSSPQALILGRYEMGKLLGHGTFAKVYLARNVKTNESVAIKVIDKEKVLKGGLIAHIKREISILRRVRHPNIVQLFEVMATKAKIYFVMEYVRGGELFNKVAKGRLKEEVARKYFQQLISAVTFCHARGVYHRDLKPENLLLDENGNLKVSDFGLSAVSDQIRQDGLFHTFCGTPAYVAPEVLARKGYDAAKVDIWSCGVILFVLMAGYLPFHDRNVMAMYKKIYRGEFRCPRWFSTELTRLLSKLLETNPEKRFTFPEIMENSWFKKGFKHIKFYVEDDKLCNVVDDDELESDSVESDRDSAASESEIEYLEPRRRVGGLPRPASLNAFDIISFSQGFDLSGLFDDDGEGSRFVSGAPVSKIISKLEEIAKVVSFTVRKKDCRVSLEGSRQGVKGPLTIAAEIFELTPSLVVVEVKKKGGDKTEYEDFCNNELKPKLQNLTADDVVAEPVAVSAVDETAIPNSPTISFLPSDTE

SEQ ID NO: 743 - protein, 166 aa, Brassica napus
MDPMDIVGKSKEDASLPKATMTKIIKEMLPADVRVARDAQDLLIECCVEFINLISSESNEVCNKEDKRTIAPEHVLKALQVLGFGEYVEEVYAAYEQHRYETMQDSQRSVKMNSGAEMTEEEAAAEQQRMFAEARARMNGGGGGVSVPQPDPEQQVDTQQQSNLQS

SEQ ID NO: 744 - protein, 355 aa, Arabidopsis lyrata subsp. petraea
ISYLTYDRADMAFAHYGPFWRQMRKVCVMKVFSRKRAESWASVRDEVDKMVRSVSCNIGKPINVGEHIFALTRNITYRAAFGSACEKGQDEFIRILQEFSKLFGAFNVADFIPYFGWIDPQGINKRLVKARNDLDGFIDDIIDEHMKKKENQNAVDDGDVVDTDMVDDLLAFYSEEAKLVSEAADLQNSIKLTRDNIKAIIMDVMFGGTETVASAIEWALTELLRSPEDLKRVQQELAEVVGLDRRVEEADIEKLTYLKCTLKETLRMHPPIPLLLHETAEDTSIDGFFIPKKSRVMINAFAIGRDPTSWADPDTFRPSRFLEPGVPDFKGSNFEFIPFGSGRRSCPGMQLGLYA

SEQ ID NO: 745 - protein, 355 aa, Arabidopsis lyrata subsp. petraea
ISYLTYDRADMAFAHYGPFWRQMRKVCVMKVFSRKRAESWASVRDEVDQMVRSVSCNVGKPINVGEHIFALTRNITYRAAFGSACEKGQDEFIRILQEFSKLFGAFNVADFIPYFGWIDPQGINKRLVKARNDLDGFIDDIIDEHMKKKENQNAVDDGDVVDTDMVDDLLAFYSEEAKLVSEAADLQNSIKLTRDNIKAIIMDVMFGGTETVASAIEWALTELLRSPEDLKRVQQELAEVVGLDRRVEEADIEKLTYLKCTLKETLRMHPPIPLLLHETAEDTSIDGFFIPKKSRVMINAFAIGRDPTSWADPDTFRPSRFLEPGVPDFKGSNFEFIPFGSGRRSCPGMQLGLYA

SEQ ID NO: 746 - protein, 219 aa, Zea mays
GSRVCRWKRDDGGHGDLLQGTTTKCTACDKTVYLVDKLTADNRIYHKACFRCHHCKGTLKLANYNSFEGVLYCRPHFDQLFKRTGSLDKSFEGTPKVVKPERNVGNENATKVSSAFAGTREKCVGCSKTVYPTERVTVNNTMYHKSCFKCCHGGCTISPSNYIAHEGKLYCKHHHGITDHRGSALLQASLRPALQEDRELGQELPRNPKGWQARKKRWE

SEQ ID NO: 747 - protein, 209 aa, Brassica napus
MGDSDRDSGGGQTGNNQNGQSSLSPREQERFLPIANVSRIMKKALPANAKISKDAKETMQECVSEFISFVTGEASDKCQKEKRKTINGDDLLWAMTTLGFEDYVEPLKVYLQRFREIEGERTGLGRPQTGGEAGEHQRDGGVGDGGGGYYGGGMGMQYQQHHQFLHQQNHMYGSTGGWWRRPQWRKELKRFGEVDLLYIEIHIYSSKVF

SEQ ID NO: 748 - protein, 324 aa, Ralstonia eutropha JMP134
MIGVAAHFRTPAKVPMSQSPSHRPPAAPPATGNEQARVAEFSVASGEREISVCVCYPPGYPAPATESGALLPWLVYLHAGGFVDGGLERAKEVVQMLAASVPAVVVTPAYSLAPDHPFPAAPEDAYNTVEWVLRYARRLKVDKARFALVGEEAGGNLAIALSQMLRDRCAPQPSGQWLIRPVTDPCLQHASCTGAGRGAVPLETLQRLACNYRDYLPTPAASVHPYAAPALASRLAGLPPTLVQVAEVDALRAEGEAFAGRLAKAGVPAEAMIMPGACGDGVEDTHDDCQSWVDEGARFLRRCLAGADDTSSRRESRSGMKPAG

SEQ ID NO: 749 - protein, 422 aa, Pseudomonas fluorescens PfO-1
MEFSMGYKKIQVPAVGDKITVNADHSLNVPDNPIIPFIEGDGIGVDVSPVMIKVVDAAVEKAYGGKRKISWMEVYAGEKATQVYDQDTWLPQETLDAVKDYVVSIKGPLTTPVGGGIRSLNVALRQQLDLYVCLRPVVWFEGVPSPVKKPGDVDMVIFRENSEDIYAGIEWKAGSPEATKVIKFLKEEMGVTKIRFDQDCGIGIKPVSKEGTKRLVRKALQYVVDNDRKSLTIVHKGNIMKFTEGAFKDWGYEVAKEEFGAELLDGGPWMKFKNPKTGREVVVKDAIADAMLQQILLRPAEYDVIATLNLNGDYLSDALAAEVGGIGIAPGANLSDTVAMFEATHGTAPKYAGKDQVNPGSVILSAEMMLRHLGWTEAADLIIKGTNGAIKAKTVTYDFERLMEGATLVSSSGFGEALIKHM

SEQ ID NO: 750 - protein, 138 aa, Mycobacterium avium
MVLMRTDPFRDLDRWTQQVLGTRRPAVMPMDAWRDGDQFVVEFDLPGVNADSLDLDVERNVLTVRAERPDLDQNREMVSAERPRGVFSRQLFLGDNLDTDKIEANYHDGVLRLTIPVAEKAKPRRIEINHNHRTAINA

SEQ ID NO: 751 - protein, 57 aa, Glycine max
MAGDGAATCIDILLAIILPPLGVFLKYGCQVEFWICLVLTLFGYIPGIIYAVYSITK

SEQ ID NO: 752 - protein, 499 aa, Nostoc punctiforme PCC 73102
MSETPLLDQIIKNVRVVRPHEDVIELLDLGIKDGKFAQIASNISPDTGKQVFDGKNLLGFPGVVDAHMHVGIYRPLDKDALTESKAAATGGVTTSLNYIRTGQYYLNKGGSYRDFLPEVLALSAGNFFVDYAYHIAPIASQHIDEIPLLFEEHGISSFKIFMFYGGYGLHGLSDQQNLFLMINKEERYDFAHFEFIMRGLTRLMEKHPEARDSISLSLHCEVAEILNAYTKIVENDSSLSGLHAYSAARPPHSEGLAICIASYLANETNCANINLLHLSSRKAMEAALTMQTAFPHINFRREVTVGHLLLDVDTPNGIWAKVNPPIRPRADVEYLWQAVLNNQVDWIVSDHACCSAEQKRSAKDPNNIWLAKSGFGGTEYLLSGVFSEGSKRGMSYNQMAKLLSWNPSRRFGLLKKGDIAIGYDADLVLVDPNETFVVCAAKSESQQGYTPFEGVELSGRVKNTFLRGNLIYNNGQVLGSPIGRYLKRHSSNPHGNLTA

SEQ ID NO: 753 - protein, 118 aa, Sorghum bicolor
MARLAVAIAVVAAVVVVLAATTSEAAISCGQVSSAIALCLSYARGQGFAPSAGCCSGVRSLNSAARTTADRRAACNCLKNAARGISGLNAGNAASIPSKCGVSVPYTISTSTDCSRVS

SEQ ID NO: 754 - protein, 389 aa, Escherichia coli
TLQNGKLNVPENPIIPYIEGDGIGVDVTPAMLKVVDAAVEKAYKGERKISWMEIYTGEKSTQVYGQDVWLPAETLDLIREYRVAIKGPLTTPVGGGIRSLNVALRQELDLYICLRPVRYYQGTPSPVKHPELTDMVIFRENSEDIYAGIEWKADSADAEKVIKFLREEMGVKKIRFPEHCGIGIKPCSEEGTKRLVRAAIEYAIANDRDSVTLVHKGNIMKFTEGAFKDWGYHLAREEFGGELIDGGPWLKVKNPNTGKEIVIKDVIADAFLQQILLRPAEYDVIACMNLNGDYISDALAAQVGGIGIAPGANIGDECALFEATHGTAPKYAGQDKVNPGSIILSAEMMLRHMGWTEAADLIVKGMEGAINAKTVTYDFERLMEGAKLL

SEQ ID NO: 755 - protein, 122 aa, Sorghum bicolor
MARSMKLAVAIAVVAAAAAVVLAATTSEAAVTCGQVSSAIGPCLSYARGQGSGPSAGCCSGVRSLNSAARTTADRRAACNCLKNAARGIRGLNVGKAASIPSKCGVSIPYTISTSTDCSRVS

SEQ ID NO: 756 - protein, 389 aa, Escherichia coli
TLQNGKLNVPENPIIPYIEGDGIGVDVTPAMLKVVDAAVEKAYKGERKISWMEIYTGEKSTQVYGQDVWLPAETLDLIREYRVAIKGPLTTPVGGGIRSLNVALRQELDLYICLRPVRYYQGTPSPVKHPELTDMVIFRENSEDIYAGIEWKADSADAEKVIKFLREEMGVKKIRFPEHCGIGIKPCSEEGTKRLVRAAIEYAIANDRDSVTLVHKGNIMKFTEGAFKDWGYQLAREEFGGELIDGGPWMKVKNPNTGKEIVIKDVIADAFLQQILLRPAEYDVIACMNLNGDYISDALAAQVGGIGIAPGANIGDECALFEATHGTAPKYAGQDKVNPGSIILSAEMMLRHMGWTEAADLIVKGMEGAINAKTVTYDFERLMDGAKLL

SEQ ID NO: 757 - protein, 283 aa, Tropheryma whipplei str. Twist
MVVFVLTYVPSVLLGDGVSIPQFGLGTYELPPNEASSVVQSAIELGYRHIDTASLYANEREVGRAIASSGIKREEFFVTTKLWNSDQPKPREAFERSLDLLSLDYVDLYLIHWPCPPSELYINVWEVLLELKESGRAKSVGVSNFLSEHIDKIKEAGFPLPSVNQIELHPWLQQRELVLSCRNDGIQIESWGPFARFSKDLDAFPELTRPAKQYGKTPAQVILRWHIQKGYVVFPKTVHAERLRQNIDIFDFDLTPDEISGIDSLDAGFRTGPDPSSFRAGLD

SEQ ID NO: 758 - protein, 364 aa, Ustilago maydis 521
MASSNPQTVPCAYKTGRTLGQGTYAVVKEAVHIKTGQYYACKVISKKLMEGREHMVRNEIQALKRVSQGHRSIVTLVDYFETMNNLYLVTDLCVGGELFDRICERGNYYEKDAAHIVRTIVDAVVYLHDQGIVHRDLKPENLLFRDKTEESDLLIADFGLSRVVDDEKITVLSTTCGTPGYMAPEIFKKTGHGKPVDMWAIGVITYFLLCGYTPFDRDTTMEEMQAIINADYRFEPTQYWEDVSEDAKDFINKLLTIDPAKRLSAKEALQHRWLQEAAPTEGGAQPVASAEQKDLLPDIKSAFNAKRTFRKAVNGIRLINRLRTNEQQPNKEEIEKLRQTIREAEDESSNLDQVLLAQETRAAN

SEQ ID NO: 759 - protein, 389 aa, Escherichia coli
TLQNGKLNVPENPIIPYIEGDGIGVDVTPAMLKVVDAAVEKAYKGERKISWMEIYTGEKSTQVYGQDVWLPAETLDLIREYRVAIKGPLTTPVGGGIRSLNVALRQELDLYICLRPVRYYQGTPSPVKHPELTDMVIFRENSEDIYAGIEWKADSADAEKVIKFLREEMGVKKIRFPEHCGIGIKPCSEEGTKRLVRAAIEYAIANDRDSVTLVHKGNIMKFTEGAFKDWGYQLAREEFGGELIDGGPWMKVKNPNTGKEIVIKDVIADAFLQQILLRPAEYDVIACMNLNGDYISDALAAQVGGIGIAPGANIGDECALFEATHGTAPKYAGQDKVNPGSIILSAEMMLRHMGWTEAADLIVKGMEGAINAKTVTYDFERLMEGAKLL

SEQ ID NO: 760 - protein, 437 aa, Oryza sativa (japonica cultivar-group)
MGDHQMMHAAPAAMYNGGGGTTSSHGVWWSNAVGVPAAATCSTTTELAGYTAWSSALAAGYDGMVADNGGKQAKSTTTASSESPGNNSSVTFQEPASIPDPAAVAAVPQPGLAGFTDWTQPFMNNGAGLHEFLQDGHHDMSASSLMNHSSNNLALQQAGHHHELLSSFGSDLLLSPTSPYGGFQSSLLRSLMEPTAKQQQQQPALAGLQQYHQYQQQMGHAPAAAAKFAQAVGARDSLQFTNDAPFWNPSAGFGMPAAVAVAAAAAQDQASVRSAKRSSPAPPRAAATLALKTAMEGVGDSSSVITKKETAFKKPRLETPSPLPTFKVRKEKLGDRITALQQLVSPFGKTDTASVLHETIEYIKFLHDQVGALSAPYLKNGAHQVPHLKNSSPDKSKHGEISLKGRGLCLVPISSTFAVASEVPVELWTPFGANFIR

SEQ ID NO: 761 - protein, 389 aa, Escherichia coli
TLQNGKLNVPENPIIPYFEGDGIGVDVTPAMLKVVDAAVEKAYKGERKISWMEIYTGEKSTQVYGQDVWLPAETLDLIREYRVAIKGPLTTPVGGGIRSLNVALRQELDLYICLRPVRYYQGTPSPVKHPELTDMVIFRENSEDIYAGIEWKADSADAEKVIKFLREEMGVKKIRFPEHCGIGIKPCSEEGTKRLVRAAIEYAIANDRDSVTLVHKGNIMKFTEGAFKDWGYQLAREEFGGELIDGGPWLKVKNPNTGKEIVIKDVIADAFLQQILLRPAEYDVIACMNLNGDYISDALAAQVGGIGIAPGANIGDECALFEATHGTAPKYAGQDKVNPGSIILSAEMMLRHMGWTEAADLIVKGMEGTINAKTVTYDFERLMEGAKVL

SEQ ID NO: 762 - protein, 324 aa, Neurospora crassa
MSNSLEQLKATGTVVVCDSGDFATMAKYKPQDATTNPSLILAASKKPEYGALLDAAIADAKKGPGSPEEKVDAALDYLLVQFGKKILEIVPGKVSTEVDAALSFDTKASVDKALHIIKLYEAEGISKDRILIKIASTWEGIKAAEILQRDHGINCNLTLMFSLTQAIAAAEAGAFLISPFVGRILDWFKAHTGKNYSKEEDPGVASVKTIFNYYKKFGYKTIVMGASFRNIGEITELAGCDYLTISPNLLEELLNSDAPVPQKLNAADAASLSIEKKTYINSEPTFRFDFNEDQMAVEKLREGISKFAADAVTLKEIIKQKLAE

SEQ ID NO: 763 - protein, 105 aa, Oryza sativa (japonica cultivar-group); identical to SEQ ID NO: 364

SEQ ID NO: 764 - protein, 452 aa, Triticum aestivum
  misc_feature (439)..(439): Xaa can be any naturally occurring amino acid
MQLEVMANRGKILMERYELGRLLGKGTFGKVHYARSLESNRSVAIKMLDKEKVLKVGLSEQIRREVTTMRLVAHKNIVQLHEVMATRNKIYFVMEYVKGGELFDMVAKSGKLTEGAAHKYFQQLISAVDYCHSRGVYHRDLKLENLLLDENENLKVSDFGLSALSESKRQDGLLHTTCGSPAYVAPEVISKGGYDGAKSDIWSCGVILFVLVAGYLPFQGQNLIEMYRKIEKGDFKCPGWVSQKLQKLLYKIMDPDPNKRISIQKIKESTWFRKGPGENLTAKERLPSENATTDAVPTLGVRRRKNSHEDGKPLAVTNLNAFEIISFSTGFDLSGLFVEKESKKEARFTSEQPASAIVSKLEAVAKTLNLRVRKKDNGVVKMQVRKEGRNGVLQFDSEIFEISPSYHLIEMKQTSGDSLEYQKLLEESIRPALKDICLXAWHGADGQQEPQG

SEQ ID NO: 765 - protein, 597 aa, Zea mays
  misc_feature (36)..(36): Xaa can be any naturally occurring amino acid
  misc_feature (193)..(193): Xaa can be any naturally occurring amino acid
  misc_feature (199)..(199): Xaa can be any naturally occurring amino acid
  misc_feature (207)..(207): Xaa can be any naturally occurring amino acid
  misc_feature (213)..(213): Xaa can be any naturally occurring amino acid
  misc_feature (233)..(233): Xaa can be any naturally occurring amino acid
  misc_feature (239)..(239): Xaa can be any naturally occurring amino acid
  misc_feature (567)..(567): Xaa can be any naturally occurring amino acid
  misc_feature (582)..(582): Xaa can be any naturally occurring amino acid
MCGILAVLGCSDWSQAKRARILACSRRLKHRGPDWXSGLYQHEGNFLAQQRLAVVSPLSGDQPLFNEDRTVVVVANGEIYNHKNVRKQFTGTHNFSTGSDCEVIIPLYEKYGENFVDMLDGVFAFVLYDTRDRTYVAARDAIGVNPLYIGLGAVDGSVWIASEMKALNEDCVRFEIFPAGATSTPAAGGGFRXRWYTPXWFQEQVPXTPYQAXLVLREAFEKAVIKRLMTDVXPFGVLXLSGGLDSSLVASVTKRHLVETEAAEKFGTELHSFVVGLEGSPDLKAAREVADYLGTIHHEFHFTVQDGIDAIEEVIYHDETYDVTTIRASTPMFLMARKIKSLGVKMVLSGEGSDELLGGYLYFHFAPNKEEFHRETCRKVKALHQYDCLRANKATSAWGLEVRVPFLDKEFINVAMGMDPEWKMYDKNLGRIEKWVMRKAFDDDEHPYLPKHILYRQKEQFSDGVGYNWIDGLKSFTEQQVTDEMMNNAAQMFPYNTPVNKEAYYYRMIFERLFPQDSARADGCRGRPSIACSTPAAIEWVEQWKASNDPSGRFISSHDSAATDHTXRVSRRWPTAAATAPXNGTVNGKDVAVAIAV

SEQ ID NO: 766 - protein, 158 aa, Staphylococcus epidermidis ATCC 12228
MESIYDFVVQKNNGESYKLEQYKGDVMLIVNTASECGFTPQFEGLQKLYDEYKDQRFIILGFPCNQFGGQEPGSGEEAAQNCKINYGVTFPIHEKVDVKGDNQHPLFHFLTNAAKGMINEKIKWNFTKFLIDREGNVIKRFSPQKKPEQIKTEIEKLL

SEQ ID NO: 767 - protein, 373 aa, Bacillus cereus ATCC 14579
MMKAEEKFSPGLDGIVAAETKISFLDTVKGEIVIQGYDLIELSKTKEYLDIVHLLLEEHLPNEDEKVTLEKKLKEEYAVPEGVFNVLKALPKETHPMDGLRTGVSALAGYDNDIENRSLEVNKSRGYKLLSKVPNIVANSYHILNNEEPIEPLKELSYSANFFYMLTGKKPTELEEKIFDRSLVLYSEHEMPNSTFTARVIASTQSDLYGALTGAVASLKGSLHGGANEAVMYMLLEAGNVEKFEELLQKKLYNKEKIMGFGHRVYMKKMDPRALMMKEALKQLCDVKGDYTLYEMCEAGEKIMEKEKGIYPNLDYYAAPVYWMLGIPIQLYTPIFFSSRTVGLCAHVIEQHANNRLFRPRVNYIGERHVLSK

SEQ ID NO: 768 - protein, 452 aa, Staphylococcus aureus subsp. aureus MSSA476
MNYTQQLKQKDSEYVWHPFTQMGVYSKEETIIIEKGKGSYLYDTNGNKYLDGYASLWVNVHGHNNKYLNKVIKKQLNKIAHSTLLGSSNIPSIELAEKLIEITPSNLRKVFYSDTGSASVEIAIKMAYQYWKNIDREKYAKKNKFITLNHGYHGDTIGAVSVGGIKTFHKIFKDLIFENIQVESPSFYRSNYDTENEMMTAILTNIEQILIERNDEIAGFILEPLIQGATGLFVHPKGFLKEVEKLCKKYDVLLICDEVAVGFGRTGKMFACNHEDVQPDIMCLGKAITGGYLPLAATLTSQKIYNAFLSDSHGVNTFFHGHTYTGNQIVCTVALENIRLYEKRKLLSHIETTSSTLEKQLHALKRHRNVGDVRGRGLMFGVELVTDKDSKTPLEIEKVERIVRKCKENGLMIRNLENVITFVPVLSMSNKEVKTMVRIFKKAVHNILDRKC

SEQ ID NO: 769 - protein, 114 aa, Zea mays
  misc_feature (112)..(112): Xaa can be any naturally occurring amino acid
MPALAVDAATPVAHAFASCDAARFPAPPVVGPAAAAEAAPWSADLSAALYNVDGWGAPYFFVNDDGDVAVRPHGAATLPGQEIDLAKVVAKAAGPRAGGGLGLPLPLLVRFXDV

SEQ ID NO: 770 - protein, 355 aa, Arabidopsis lyrata subsp. petraea
ISYLTYDRADMAFAHYGPFWRQMRKVCVMKVFSRKRAESWASVRDEVDKMVRSVSCNVGKPINVGEHIFALTRNITYRAAFGSACEKGQDEFIRILQEFSKLFGAFNVADFIPYFGWIDPQGINKRLVKARNDLDGFIDDIIDEHMKKKENQNAVDDGDVVDTDMVDDLLAFYSEEAKLVSEAADLQNSIKLTRDNIKAIIMDVMFGGTETVASAIEWALTELLRSPEDLKRVQQELAEVVGLDRRVEEADIEKLTYLKCTLKETLRMHPPIPLLLHETAEDTSIDGFFIPKKSRVMINAFAIGRDPTSWADPDTFRPSRFLEPGVPDFKGSNFEFIPFGSGRRSCPGMQLGLYA

SEQ ID NO: 771 - protein, 351 aa, Arabidopsis lyrata subsp. petraea
ISYLTYDRADMAFAHYGPFWRQMRKVCVMKVFSRKRAESWASVRDEVDKMVRSVSCNVGKPINVGEHIFALTRNITYRAAFGSACEKGQDEFIRILQEFSKLFGAFNVADLIPYFGWIDPQGINKRLVKARNDLDGFIDDIIDEHMKKKENQNAVDDGDVVDTDMVDDLLAFYSEEAKLVSEAADLQNSIKLTRDNIKAIIMDVMFGGTETVASAIEWALTELLRSPEDLKRVQQELAEVVGLDRRVEEADIEKLTYLKCTLKETLRMHPPIPLLLHETAEDTSIDGFFIPKKSRVMINAFAIGRDPTSWADPDTFRPSRFLEPGVPDFKGSNFEFIPFGSGRRSCPGMQL

SEQ ID NO: 772 - protein, 351 aa, Arabidopsis lyrata subsp. petraea
ISYLTYDRADMAFAHYGPFWRQMRKVCVMKVFSRKRAESWASVRDEVDKMVRSVSCNVGKPINVGEHIFALTRNITYRAAFGSACEKGQDEFIRILQEFSKLFGAFNVADFIPYFGWIDPQGINKRLVKARNDLDGFIDDIIDEHMKKKENQNAVDDGDVVDTDMVDDLLAFYSEEAKLVSEAADLQNSIKLTRDNIKAIIMDVMFGGTETVASAIEWALTELLRSPEDLKRVQQELAEVVGLDRRVEEADIEKLTYLKCTLKETLRMHPPIPLLLHETAEDTSIDGFFIPKKSRVMINAFAIGRDPTSWADPDTFRPSRFLEPGVPDFKGSNFEFIPFGSGRRSCPGMQL

SEQ ID NO: 773 - protein, 329 aa, Saccharomyces cerevisiae
MRSIKCVIIGDGAVGKTSLLISYTTNSFPTDYVPTVFDNYSTTIAIPNGTASSPLELDNGNDKRGSLSSASSSPSTDRKLYKINLWDTAGQEDYDRLRPLCYPQTDIFLICFSVSEHASFANVTEKWLPELKQTSNIEGTSLYTKLGKYPILLVGTKSDLRDDPATQKKLQEANSDYVSQEEIDELVQRCGFMGYTECSAATQAGVREVFEQAVRYAIYEPESPNQKSANHTLTDELTTATTNTNGDKNIREQKQQPHHNNSTDSTLPKGSLQQEKEALNIKPTKKGQKDKIHEQSKSKGSKIASNNIITTSKLNQRRETTRRKRSQSV

SEQ ID NO: 774 - protein, 142 aa, Brassica napus
RGGPRRPEKEEKLLLVNFFFSSAVVVTARVKATMGVPLTAWKSSFAFPVTRRATTAIPSIVGTGGGVNCLQVWPPIGKKKFGTFFYFPDLTEVEWGKEVDYFFRTRWIPGVEFKLEHGFVARGHGSTPGYYDGRYWPMWKLP

SEQ ID NO: 775 - protein, 275 aa, Agrobacterium tumefaciens str. C58
MYDVSANGANIPALGFGTFRIPEDDVRRILPEALKLGFRHVDTAQIYKNEGAVGEVIAQSGISRHDIFLTTKVWVDRYRHDDFLASVDESLAKLKTDYFDLLLLHWPKSDVPLAERMGALNAVRKAGKARNIGISNFNVALTEEAVKLSDTPLATNQIEYHPYLDQTKVISAARKHGMSVTAYYLMADGKVPNDPVLKDIGAKHGKTAAQVTLRWAVQQPDIVALSKTATESRLKENFDIFDFALSEEEMQAIHALAKPNGRIVSPGHLAPDWDD

SEQ ID NO: 776 - protein, 476 aa, Comamonas testosteroni
MSTVLYRCPELLIGGEWRPGRHEQRLVVRNPATGEPLDELRLASADDLQLALQTTQQAFEHWRQVPAHERCARLERGVARLRENTERIAHLLTLEQGKTLAEARMECAMAADLIKWYAEEARRVYGRVIPARLPNSRMEVFKFPVGPVAAFSPWNFPLVLSARKLGGAIAAGCSIVLKAAEETPASVAAMVDCLNQELPPGVVQLLYGVPAEVSQALIASPVVRKVTFTGSVPVGRHLAELSARHLKRITLELGGHAPVIVCGDADIARTVNLMVQHKFRNAGQACLAPTRFFVDRRIYGDFVDAFGATQALRVGAGMAAETQMGPVASARRQAAVQDLIARSVAAGARPVASAVPEAGYFVAPTLLADVPLDAPVMSEEPFGPVACAVPFDSLDQAIAQANHNPYGLAGYLFTDSAKAILAVSERLEVGSLAVNGMGVSVPEAPFGGVKDSGYGSESGTEGMEAFLDTKFMHYVA

SEQ ID NO: 777 - protein, 192 aa, Rubrobacter xylanophilus DSM 9941
MRFNQRERGFTLWFTGLSGAGKTTIAEIVEKELRERGRRVEVLDGDIVRTNLSKGLGFSREDRITNVLRIGFVANLLTRNGVAVIVSAISPYKEARDQVRRRIIDFIEVYVDAPLEVCAERDVKGLYKKAFEGEIQNFTGVSDPYEPPVAPELHIRTDQETPQESARRVIERLEYLGYLWDPEEAEDYHWSR

SEQ ID NO: 778 - protein, 392 aa, Pseudomonas fluorescens PfO-1
MGAEKLWNLVTQGAKPSFRPEKDFVNCMGALTGGQAVQQVKAGIQAIYLSGWQVAADNNSAESMYPDQSLYPVDSVPTVVKRINNSFRRADQIQWKAGKNPGDEGYIDYFAPIVADAEAGFGGVLNAYELMKSMIEAGAAGVHFEDQLASVKKCGHMGGKVLVPTQEAVQKLTAARLAADVAGVPTIILARTDANAADLLTSDCDPYDQPFVTGTRTQEGFYKVRAGLDQAIARGLAYAPYADLIWCETAKPDLDEARRFAEAIKKEYPDQILSYNCSPSFNWKKNLDDATIAKFQRELSAMGYKHQFITLAGIHNMWHSMFNLAHDYARNDMTAYVKLQEQEFADAAKGYTFVAHQQEVGTGYFDDMTTVIQGGTSSVTALTGSTEEEQFH

SEQ ID NO: 779 - protein, 351 aa, Arabidopsis lyrata subsp. petraea
ISYLTYDRADMAFAHYGPFWRQMRKVCVMKVFSRKRAESWASVRDEVDKMVRSVSCNVGKPINVGEHIFALTRNITYRAAFGSACEKGQDEFIRILQEFSKLFGAFNVADFIPYFGWIDPQGINKRLVKARNDLDGFIDDIIDEHMKKKENQNAVDDGDVVDTDMVDDLLAFYSEEAKLVSEAADLQNSIKLTRDNIKAIIMDVMFGGTETVASAIEWALTELLRSPDDLKRVQQELAEVVGLDRRVEEADIEKLTYLKCTLKETLRMHPPIPLLLHETAEDTSIDGFFIPKKSRVMINAFAIGRDPTSWADPDTFRPSRFLEPGVPDFKGSNFEFIPFGSGRRSCPGMQL

SEQ ID NO: 780 - protein, 455 aa, Zea mays
  misc_feature (88)..(88): Xaa can be any naturally occurring amino acid
  misc_feature (110)..(110): Xaa can be any naturally occurring amino acid
MTVEAPHSLSLIHIHPRVLAHSNSGGEMRRQIPPVSCLVPIAVAFALLAAASAASPAPVNVTGVLSAFPDLNDFTRLLASSPVLAELXAGRSSLTLLAVPNGNLPQSPSXAFAAASGADLADVLRYHVLLEYLSHADLRRLPASGKLVTTLFQTTGRATADLGAVNVTTAGASRLTVIRSPAPFPGSNATVLGAITAVPYNLSVLAVSGLIAPSGFDLAASESQPPAAVNITRVLADARAFNVAASMLEASGVAAEFEDDERGAGITVFAPTDDAFAGLPAGDRLQSLPADRKAVVLRFHVLHSYYPLGSLESIVNPVQPTLATEFSNAGRFTLNITRANGSVAIDTGVVQATITRTVFDQNPVAVFAVSKVLLPKEMFTRTAAASIVATTASASSPPPAATAPEASESARTPPTKLSSPPALRGGGQDYATAPAPARGIEWWCIALVYLLPHLV

SEQ ID NO: 781 - protein, 496 aa, Nicotiana tabacum
MVLSKTASESDVSVHSTFASRYVRTSLPRFKMPENSIPKEAAYQIINDELMLDGNPRLNLASFVTTWMEPECNTLMMDSINKNYVDMDEYPVTTELQNRCVNMIAHLFNAPLGDGETAVGVGTVGSSEAIMLAGLAFKRKWQNKMKAQGKPFDKPNIVTGANVQVCWEKFARYFEVELKEVKLSDGYYVMDPEKAVEMVDENTICVAAILGSTLNGEFEDVKRLNDLLIEKNKETGWDTPIHVDAASGGFIAPFLYPELEWDFRLPLEKSINVSGHKYGLVYAGIGWAIWRNKEDLPDELIFHINYLGADQPTFTLNFSKGSSQVIAQYYQLIRLGFEGYKNVMENCQENARVLREGIEKSGRFNIISKEIGVPLVAFSLKDNSQHNEFEISETLRRFGWIVLAYTMPPNAQHVTVLRVVIREDFSRTLAERLVIDIEKVFHGVDTLPARVNAKLAVAEANGSGVHKKTDREVQLEITTAWLKFVADKKKKTNGVC

SEQ ID NO: 782 - protein, 496 aa, Nicotiana tabacum
MVLSKTASESDVSIHSTFASRYVRTSLPRFKMPENSIPKEAAYQIINDELMLDGNPRLNLASFVTTWMEPECNKLMMDSINKNYVDMDEYPVTTELQNRCVNMIAHLFNAPLGDGETAVGVGTVGSSEAIMLAGLAFKRKWQNKMKAQGKPCDKPNIVTGANVQVCWEKFARYFEVELKEVKLSDGYYVMDPEKAVEMVDENTICVAAILGSTLNGEFEDVKRLNDLLIEKNKETGWDTPIHVDAASGGFIAPFLYPELEWDFRLPLVKSINVSGHKYGLVYAGIGWAIWRNKEDLPDELIFHINYLGADQPTFTLNFSKGSSQVIAQYYQLIRLGFEGYKNVMENCQENARVLREGLEKSGRFNIISKEIGVPLVAFSLKDNSQHNEFEISETLRRFGWIIPAYTMPPNAQHVTVLRVVIREDFSRTLAERLVIDIEKVLHELDTLPARVNAKLAVAEANGSGVHKKTDREVQLEITTAWKKFVADKKKKTNGVC

SEQ ID NO: 783 - protein, 247 aa, Zea mays
  misc_feature (77)..(77): Xaa can be any naturally occurring amino acid
MPPRPVPLFSRLRFRLPSCAAVSISTPPSSAAPLHYGHRTPLASPFPLSPPCPRILRAAVAVSSLDLRPITGGFAAXSAWLLASSATSVHDFTVKDASGKDVDLSTYKGKVLLIVNVASQCGLTNSNYTELSQLYEKYKDQGFEILAFPCNQFGGQEPGTNEEIVQFACTRFKAEYPIFDKVDVNGDNTAPIYKFLKSSKGSLFGDNIKWNFSKFLVDKEGHVVERYAPTTSPLSIEKDIKKLLGSS

SEQ ID NO: 784 - protein, 481 aa, Haloarcula marismortui ATCC 43049
MTQTYENYIDGEWTGSGETQEVTNPADETDVVSTVPVASAADADEAVAAAAAATDEWGEMPGPERGAILRETGEILKSRKDELAETLTREEGKPLGEAEGEVQRAIDIFYYYAEKARDFGGTVKQPSGGRAGLQTKKEPMGVAALITPWNYPIAIPAWKIAPALAVGNTVVIKPAMQAPTVGAMIVEALDEAGIPDGAINLVCGPGSEVGEQLTTHDDVDVVSFTGSASVGEHVYEQATSNGKRAQAEMGGKNPTVVMPSADVDKAADIVGAGAFGGTGQACTATSRAIVHEDVYDEFLDAIVDYAESLEIGDGLDRAGMGPHVSEDELAGSLEYIDVAQSEGATLETGGEELTSGEYDGGNFISPAVFSDVEPDMRIAQEEVFGPVLAVMSVSDFDEGVEVANDIDYGLSASIVTDRIKEENEFIERSESGVVKVNEKTTGLELHVPFGGLKRSSTNTYREQGDAGLEFFSYIKTVYRNS

SEQ ID NO: 785 - protein, 470 aa, Streptomyces avermitilis MA-4680
MPLHKGPVKSDERPMSFNPFFGEANPVSGMTEAPPKHRLADGPLPPSTAYQLVHDELMLDGNARLNLATFVTTWMEPQAGVLMAECQDKNMIDKDEYPRTAELEKRCVAMLADLWNAPDAGAAVGCSTTGSSEACMLAGLALKRRWARRNADRYPARDVRPNLVMGINVQVCWEKFCNFWEVEMRQVPLEGERYHLDPGAAAELCDENTIGVVGILGSTFDGSYEPIAELCAALDALQERTGLDIPVHVDGASGAMIAPFLDEDLVWDFRLPRVASINTSGHKYGLVSPGVGWALWRDSEALPEELVFRVNYLGGNMPTFALNFSRPGAQVVAQYYTFLRLGREGFRAVQQTTRNVARSLAERVAALGDFHLLTRGDELPVFAFTTAPEVASYDVFDVSRRMREHGWLVPAYTFPPNREDLSVLRVVCRNGFSTDLAELFVEDLSRLLPDLRRQARPQTHDKDAATGFHH

SEQ ID NO: 786 - protein, 389 aa, Escherichia coli
  misc_feature (193)..(195): Xaa can be any naturally occurring amino acid
TLQNGKLNVPENPIIPYIEGDGIGVDVTPAMLKVVDAAVEKAYKGERKISWMEIYTGEKSTQVYGQDVWLPAETLDLIREYRVAIKGPLTTPVGGGIRSLNVALRQELDLYICLRPVRYYQGAPSPVKHPELTDMVIFRENSEDIYAGIEWKADSADAEKVIKFLREEMGVKKIRFQEHCGIGIKPCSEEGTXXXVREAIEYAIATDGDSVTLVPKGNIMKFTEGAFKDWGYQLAREEFGGELIDGGPWLKVKNPNTGKEIVIKDVIADAFLQQILLRPAEYDVIACMNLNGDYISDALAAQVGGIGIAPGANIGDECALFEATHGTAPKYAGQDKVNPGSIILSAEMMLRHMGWTESADLIVKGMEGAINAKTVTYDFERLMEGAKLL

SEQ ID NO: 787 - protein, 91 aa, Brassica napus
  misc_feature (74)..(74): Xaa can be any naturally occurring amino acid
MSAGEEAIVASGNDNEGDQTNGNHTGKTDEYDPSTGSALSNFLWHGGSVWDAWFSCASNQVAQVLLTLPYSFSXLGMLSGIILQIFYGLLG

SEQ ID NO: 788 - protein, 286 aa, Oryza sativa (japonica cultivar-group)
MSVIDILTRVDAICQKYGRYDAEKLHGSGVAGEDPFARLYASVDADLNECLEKAEAAKQEKNRATVVALNAEIRGTKAKLLEEDLPKLQRLALKKVIDASLVLSPLLLCIASRYVDMQGGWCEELVPACTVLQRYLEWKLIYVGSAEDENYDQLLESVLVGPVNVGTYRFVLQADPPDPSKIRKEDIIGVIVLLLTCSYMGQEFIRVGYYVNNDNDDEQLREEPPAKLLIDRVQRNILADKPSVTKFPINFHPETSAGAGQEQQQQQQSGSPENHPNQGSKPNPDQ

SEQ ID NO: 789 - protein, 478 aa, Pyrobaculum aerophilum str. IM2
MIIVKNYINGEFIEVEERRPKHSPIDGSVIAETPVSKREDAKAAIDAAYDALKAWSQLPAIKRAEYLYKLYEIIKSREEELINILMVEGGGIYKKAWGEVVFTERLVRNAAELARHYGGKTLQSDAEGVVSMVFKRPKGVVGVITPWNYPLSISMKKIAHALATGNTIVYKPASETPVTGFKIAEMIHQAGFPKGVFNLVVGPGSTVGDEIVVNKKVSHVTFTGESATGREIASKAGGALKTVTLELGGSDPLIILDDADLNLAVRIAVFGAFFHQGQICTSSKRIIVHERVYDVFVKKFVERVSQLKVGDPRDRTVEQGPLISPRQADEMERFYQDAVSRGGRALTGGKRAGAYFWPTVFVDVDRNFRIMREEVFGPIRPVVPVKNDDEAVEVANDTEYGLSAAVVTTNINRAFKIAEAIESGMVHINDVTMLEESHVPFGGIKASGFGREGGEWSFHETTYDRWLTITLRERKYPI

SEQ ID NO: 790 - protein, 287 aa, Pediococcus pentosaceus ATCC 25745
MAIIQWYPGHMAKAIRQVEEKLKLVDIVFELVDARIPVSSRNPMIEDVIKSKPHLLILTKADLADPKETKKWLDYYKSRNEYAIALNSKEPSTENIILKKTQEILADKLANKADRGIKNAEIRSMCIGIPNVGKSTLLNHLVNKKVAITGDRPGVTKKQQWLRSRRGLYLLDTPGILWPKFEDQNVGNKLAFTGAIKDNLFANDDVVIYGLNIFINHYREGLMGRYHLTEDDLEMELPELLLLITQKLGMRDDYDRASQRILLDARKGKLGRFTLDFVEEFEDLGDD

SEQ ID NO: 791 - protein, 174 aa, Ammopiptanthus mongolicus
MISSPAVTTVKASMGAPFTGLKSMASFPVPRKVNSDITTIANNGGRVQCMLVWPPLGRKKFETLSYLPPLSIESLTKEVEYLLRKGWVPCLEFELEHGFVYRENNRSPGYYDGRYWTMWKLPMFGCSDASQVMKELEECKKEYPTAFVRIIGFDNKRQVQCISFIAYKPPGFEN

SEQ ID NO: 792 - protein, 389 aa, Escherichia coli
  misc_feature (191)..(196): Xaa can be any naturally occurring amino acid
TLQNGKLNVPENPIIPYIEGDGIGVDVTPAMLKVVDAAVEKAYKGERKISWMEIYTGEKSTQVYGQDVWLPAETLDLIREYRVAIKGPLTTPVGGGIRSLNVALRQELDLYICLRPVRYYQGTPSPVKHPELTDMVIFRENSEDIYAGIEWKADSADAEKVIKFLREEMGVKKIRFPEHAGFGIKPCSEKXXXXXXRAAIEYAIATDRDSVTLVHKGNIMKFTEGAFKDWGYQLAREEFGGELIDGGPWLKVKNPNTGKEIVIKDVIADAFLQQILLRPAEYDVIACMNLNGDYISDALAAQVGGIGIAPGANIGDECALFEATHGTAPKYAGQDKVNPGSIILSAEMMLRHMGWTEAADLIVKGMEGAINAKTVTYDFERLMEGAKLL

SEQ ID NO: 793 - protein, 389 aa, Escherichia coli
  misc_feature (180)..(180): Xaa can be any naturally occurring amino acid
  misc_feature (193)..(195): Xaa can be any naturally occurring amino acid
TLQNGKLNVPENPIIPYIEGDGIGVDVTPAMLKVVDAAVEKAYKGERKISWMEIYTGEKSTQVYGQDVWLPAETLDLIREYRVAIKGPLTTPVGGGIRSLNVALRQELDLYICLRPVRYYQGTPSPVKHPELTDMVIFRENSEDIYAGIEWKADSADAEKVIKFLREEMGVKKIRFPEHXGIGIKPCSEKGTXXXVRAAIEYAIATDRDSVTLVHKGNIMKFTEGAFKDWGYQLAREEFGGELIDGGPWLKVKNPNTGKEIVIKDVIADAFLQQILLRPAEYDVIACMNLNGDYISDALAAQVGGIGIAPGANIGDECALFEATHGTAPKYAGQDKVNPGSIILSAEMMLRHMGWTEAADLIVKGMEGAINAKTVTYDFERLMEGAKLL

SEQ ID NO: 794 - protein, 1329 aa, Escherichia coli K12
MSQEYIEDKEVTLTKLSSGRRLLEALLILIVLFAVWLMAALLSFNPSDPSWSQTAWHEPIHNLGGMPGAWLADTLFFIFGVMAYTIPVIIVGGCWFAWRHQSSDEYIDYFAVSLRIIGVLALILTSCGLAAINADDIWYFASGGVIGSLLSTTLQPLLHSSGGTIALLCVWAAGLTLFTGWSWVTIAEKLGGWILNILTFASNRTRRDDTWVDEDEYEDDEEYEDENHGKQHESRRARILRGALARRKRLAEKFINPMGRQTDAALFSGKRMDDDEEITYTARGVAADPDDVLFSGNRATQPEYDEYDPLLNGAPITEPVAVAAAATTATQSWAAPVEPVTQTPPVASVDVPPAQPTVAWQPVPGPQTGEPVIAPAPEGYPQQSQYAQPAVQYNEPLQQPVQPQQPYYAPAAEQPAQQPYYAPAPEQPVAGNAWQAEEQQSTFAPQSTYQTEQTYQQPAAQEPLYQQPQPVEQQPVVEPEPVVEETKPARPPLYYFEEVEEKRAREREQLAAWYQPIPEPVKEPEPIKSSLKAPSVAAVPPVEAAAAVSPLASGVKKATLATGAAATVAAPVFSLANSGGPRPQVKEGIGPQLPRPKRIRVPTRRELASYGIKLPSQRAAEEKAREAQRNQYDSGDQYNDDEIDAMQQDELARQFAQTQQQRYGEQYQHDVPVNAEDADAAAEAELARQFAQTQQQRYSGEQPAGANPFSLDDFEFSPMKALLDDGPHEPLFTPIVEPVQQPQQPVAPQQQYQQPQQPVPPQPQYQQPQQPVAPQPQYQQPQQPVAPQQQYQQPQQPVAPQQQYQQPQQPVAPQPQDTLLHPLLMRNGDSRPLHKPTTPLPSLDLLTPPPSEVEPVDTFALEQMARLVEARLADFRIKADVVNYSPGPVITRFELNLAPGVKAARISNLSRDLARSLSTVAVRVVEVIPGKPYVGLELPNKKRQTVYLREVLDNAKFRDNPSPLTVVLGKDIAGEPVVADLAKMPHLLVAGTTGSGKSVGVNAMILSMLYKAQPEDVRFIMIDPKMLELSVYEGIPHLLTEVVTDMKDAANALRWCVNEMERRYKLMSALGVRNLAGYNEKIAEADRMMRPIPDPYWKPGDSMDAQHPVLKKEPYIVVLVDEFADLMMTVGKKVEELIARLAQKARAAGIHLVLATQRPSVDVITGLIKANIPTRIAFTVSSKIDSRTILDQAGAESLLGMGDMLYSGPNSTLPVRVHGAFVRDQEVHAVVQDWKARGRPQYVDGITSDSESEGGAGGFDGAEELDPLFDQAVQFVTEKRKASISGVQRQFRIGYNRAARIIEQMEAQGIVSEQGHNGNREVLAPPPFD

SEQ ID NO: 795 - protein, 134 aa, Euphorbia lagascae
MKLKTHIHQSHITRNIIYNMAGIKVAVLVVALMVVASGMYANAITCGQVSSSLAPCVNFLKSGGAPSPQCCNGLGGMVNQAKSTADKQAACNCLKTAAKNMPGLNPANAESLPSKCKVNIPYKISFSTNCNSIK

SEQ ID NO: 796 - protein, 515 aa, Glycine max
  misc_feature (40)..(40): Xaa can be any naturally occurring amino acid
  misc_feature (78)..(78): Xaa can be any naturally occurring amino acid
  misc_feature (159)..(159): Xaa can be any naturally occurring amino acid
  misc_feature (170)..(170): Xaa can be any naturally occurring amino acid
  misc_feature (177)..(177): Xaa can be any naturally occurring amino acid
  misc_feature (192)..(192): Xaa can be any naturally occurring amino acid
  misc_feature (202)..(202): Xaa can be any naturally occurring amino acid
  misc_feature (231)..(231): Xaa can be any naturally occurring amino acid
  misc_feature (238)..(238): Xaa can be any naturally occurring amino acid
  misc_feature (332)..(332): Xaa can be any naturally occurring amino acid
  misc_feature (377)..(377): Xaa can be any naturally occurring amino acid
  misc_feature (446)..(446): Xaa can be any naturally occurring amino acid
RQDVHPNSPSCLLFIDGDWKVPVLKNRIPIINPSTQHIIXGDIPAATKEDVDLAVAAAKAALSRNKGADWASASGSVXRARYLRAIAAKITEKKPELAKLEAIDCGKPLDEAAWDIDDVAGCFEFYADLAEKLDAQQKAHVSLPMDTFKSYVLKEPIGXVVALITPWNYXLLMATWXKVAPALAAGCACNIXKPSELASVTXLELAEICKEVGLPPGVLNILTGLGPEAGXAPLAAHXNVDKISFTGSSATGSRIMTAAAQLTKPVSLELGGKSPIIVFEDVDLDKTAEWTIFGCFFTNGQICSATSRLIVHESIATEFVNRLVQWAKNIKXISDPFEEGCRLGPIVSEGQYKKVLNCISTAKSEGATILIGGSRPXEHLKKGYFVEPTIITDVTTSMQIWREEVFGPVLCVKTFSTEEEAIELANDTHYGLGSAVMSKDLERCEXRISKAIQAGIVWINCAQPSFIQAPWGGVKRSGFGRELGEWGLENYLSVKQVTKYISDEPWGWYQSPSKL

SEQ ID NO: 797 - protein, 490 aa, Escherichia coli
MDIQKRVSDMEPKTKKQRSLYIPYAGPVLLEFPLLNKGSAFSMEERRNFNLLGLLPEVVETIEEQAERAWIQYQGFKTEIDKHIYLRNIQDTNETLFYRLVNNHLDEMMPVIYTPTVGAACERFSEIYRRSRGVFISYQNRHNMDDILQNVPNHNIKVIVVTDGERILGLGDQGIGGMGIPIGKLSLYTACGGISPAYTLPVVLDVGTNNQQLLNDPLYMGWRNPRITDDEYYEFVDEFIQAVKQRWPDVLLQFEDFAQKNAMPLLNRYRNEICSFNDDIQGTAAVTVGTLIAASRAAGGQLSEKKIVFLGAGSAGCGIAEMIISQTQREGLSEEAARQKVFMVDRFGLLTDKMPNLLPFQTKLVQKRENLSDWDTDSDVLSLLDVVRNVKPDILIGVSGQTGLFTEEIIREMHKHCPRPIVMPLSNPTSRVEATPQDIIAENKPPFSVFRDKFITMPGGLDYSRAIVVASVKEAPIGIEVIPAHVTEYL

SEQ ID NO: 798 - protein, 645 aa, Zea mays
  misc_feature (217)..(217): Xaa can be any naturally occurring amino acid
  misc_feature (251)..(251): Xaa can be any naturally occurring amino acid
MLNFPPYIIGNSAGLRHRSSAMNAVEPSAAAIAEDPITPAASAAPYPGRLREALTALSEACESGNFNASETASFTISDILDTAAGVSGELDDGSDDSQDASRSGASEVLLREVLEFLSRPSSISNQMALDALSLVLPKPVAKLGARMGRCRDVAAAILKFFVTNCNPRDMLSILCEALDAPMELPNGLSSFVLLLDALAKVFTLIQRRHIEQVKVAXPVVLKVMHATVSECVEEHGSAAVDLFNAAHGVGXAIQEMCISMFNKNKDLCAILGLYSLQNIALVSRSRQQDILSACGSVVFQSFRFLKTSGFTYRGLLTGSDVTAATVELSKEEDADFMEHFSFAMDGAALSVVWTLMHDDKDMSKYAGEELELAVKEVQGNHMEKWEAINMLKYVLSSIHYPWIIKSHSLNLMLILSGEDHVEEINNHVDFTCFAHRIFETLKAIESVMIAAPMALVRKKAFAALKKVISMVPSSQRFDILHGLVNNSTSPALTAILLDLVRQEVSRESRQADNDCIEDEGFRGNGLPRWASHALELVELILRPPEGGPPCLPDHSEQVISALNLLRFILIIDSRGQRSAKLFRKETLHKVHSEWLTPLRPIAEQIQLENEKDADEITKQIVCMLNLVQLVLYRCIELVEEKMKGC

SEQ ID NO: 799 - protein, 494 aa, Mycobacterium tuberculosis H37Rv
MLEACQAIGVTAALGEPGEHSLPASTPITGDVLFSIAPTTPEQADHAIAAAAATFTAWRSTPAPVRGALVARLGELLTAHQQDLATLVTVEVGKITAEARGEVQEMIDVCQFSVGLSRQLYGRTIASERAGHRLLETWHPLGVVGVITAFNFPVAVWAWNTAVALVCGDTVVWKPSELTPLTALACQALLSRAAADVGAPAAVGGLLLGGAERGAQLVDDPRVALLSATGSVRMGQQVGPRVARRFGRVLLELGGNNAAIVAPSADLELAVRGIVFAAAGTAGQRCTSLRRLIVHRSVADDVVARVVGAYRQLAIGDPSAPDTLVGPLIHEAAYRDMVAALERARTDGGEVIGGDRREVGSPGAYYVAPAVVRMPSQTAIVATETFAPILYVLTYDDLDEAIALNNAVPQGLSSSIFTTDLREAEHFLDQSDCGIANVNIGTSGAEIGGAFGGEKQTGGGRESGSDAWKAYMRRATNTVNYSSELPLAQGVKFG

SEQ ID NO: 800 - protein, 504 aa, Arabidopsis thaliana
MVVINSLRRLARTTQVHLHSKYATCMSGNSTSRRIFTTEAAPEKKNTVGSKGHDMLAPFTAGWQSADLDPLVIAKSEGSYVYDDTGKKYLDSLAGLWCTALGGNEPRLVSAAVEQLNTLPFYHSFWNRTTKPSLDLAKVLLEMFTANKMAKAFFTSGGSDANDTQVKLVWYYNNALGRPEKKKFIARKKSYHGSTLISASLSGLPPLHQNFDLPAPFVLHTDCPHYWRFHLPGETEEEFSTRLAKNLEDLIIKEGPETIGAFIAEPVMGAGGVIPPPATYFEKVQAVVKKYDILFIADEVICAFGRLGTMFGCDKYNIKPDLVTLAKALSSAYMPIGAILMSQEVADVINSHSSKLGVFSHGFTYSGHPVSCAVAIEALKIYKERNIPEYVAKVAPRFQDGVKAFASGSPIIGETRGTGLILGTEFVDNKSPNEPFPPEWGVGAFFGAECQKHGMLVRVAGDGILMSPPLIISPEEIDELISIYGKALKATEEKVKELKAQHKK

SEQ ID NO: 801 - protein, 508 aa, Zea mays
  misc_feature (180)..(180): Xaa can be any naturally occurring amino acid
  misc_feature (286)..(286): Xaa can be any naturally occurring amino acid
MKTSVVVAALAAVLFAAQSYASLAGASGPRVIIVGAGMSGISAGKTLWEAGVRDLLILEATGRVGGRMHKHNFGGINVEIGANWVEGLGGDQLNPIWPLVNSTLKLRNFYSDFDSVVGNVYKENGGGLYDEEYVQKRMDRAYEVEELGANLTKKMHPSGRDDISVLAMQRLFNHQPNGPXTTPVDMALDYFIYDYEFAEPPRVTSLQNTQATPTNADFGEDNYFVADQRGYESIIHSIGSSYLSTDGNGKLKDRRILLNKVVRQITYNKQGVVVKTEDGSSYRADXYVVVSTSLGVLQTDLIQFKPQLPFWKIAAIYSFDMGVYTKIFLKFPERFWPVGEGKQFFMYASSRRGYYALWQSFEREYPGANVLLATVTDDESRRIERQSDDQTKAEVAEVLRDMFPAADVPGPDQIDVYVPRWWSDRFFKGSYSNWPVGVSRYEYDQLRAPVGRVYFTGEHTSERYNGYVHGAYLAGIDSANILINYIFKNEEYKVRGKYDVDDLIAQAR

SEQ ID NO: 802 - protein, 209 aa, Oceanobacillus iheyensis HTE831
MNKQEIIQRILIVFTTTLAVACIGIYMGQYIPKQWMLPLMIIEIIMLIAAALLRRRSRVGYIFLFSFVVISGITMFPAIYFYVSEIGAVVVLFVFLLTLMIFTILGMVGWVLQKDLSFMGSTLFIILIVLIAFSIFTWFIPQSDTVLVIVACVSAGLFSVYIVYDFNQIKHRALTAKDVPSAVLSLYLDVVNLFLHLLRIISYVFKNRG

SEQ ID NO: 803 - protein, 189 aa, Rubrobacter xylanophilus DSM 9941
MTDSRYGRGFTLWFTGLSGAGKTTIAEIVEKELRERRGAVEVLDGDIVRTNLSKGLGFSREDRDTNVLRIGFVANLLTRNGVAVIVSAISPYREARDKVRQMIGEDFIEVYVDAPLEVCAERDVKGLYKKALAGEIPQFTGVSDPYEPPVAPELHIRTNEERPHQSARRVIEKLEELGYLQPVREYNRA

SEQ ID NO: 804 - protein, 175 aa, Sinorhizobium meliloti 1021
MAEPATKLPIKSEEKGVERRAESWLPFESLRSEIDRLFDDFAPSLWHRPLASALMRRVPRLSELDVAPAVDLAETEKTYEITCELPGMEEKDIEVAISNGTLTIRGEKQEEKKENKKEYVLSERRYGSFQRTFRMPDGVDTEKIAAKFSKSVLSITLPKTPEAQQNERKIQIKVT

SEQ ID NO: 805 - protein, 476 aa, Zea mays
  misc_feature (318)..(318): Xaa can be any naturally occurring amino acid
MAAAAVTSNGGAVAANGPAPGRLASVYSEVQTSRLLHTLPLPSVLRSNFSVVDGPASSAAGNPDEIAKLFPNLFGQPSASLVPSAEPAATRPLKVGVVLSGGQAPGGHNVICGIFDYLQERAKGSTLLGFKGGPAGIMKCKYVELTSDFVYPYRNQGGFDMICSGRDKIETPEQFKQAEDTANKLDLDGLVVIGGDDSNTNACLLGEYFRSRNLKTRVIGCPKTIDGDLKCKEVPTSFGFDTACKIYSEMIGNVMTDARSTGKYYHFVRLMGRAASHITLECALQTHPNAALIGEEVAAKKETLKNVTNYITDIICKXADLGYNYGVILIPEGLIDFIPEVQKLIAELNEILAHDVVDEAGAWKSKLQAESRELFEFLPKTIQEQLMLERDPHGNVQVAKIETEKMLISMVETELEKRKAEGRYSAHFRGQAHFFGYEGRCGLPTNFDSNYCYALGYGAGALLQSWEDRRRFQRGL

SEQ ID NO: 806 - protein, 326 aa, Pirellula sp. 1
MSIQWFPGHMHKARLEIQAALPKVDVVMEIIDARIPYSSENPMLADIRGDKACLKVLTKSDLADPHRTEEWLDALNSSSSTRARSVTTDDVPTIRRLKSALIGMCPHRKGRSINAMVMGIPNVGKSTIINFLAGRKVAKTGNTPAVTQHQQRVDIGDGVILWDTPGMLWPKVHNVSSGYRLALIGSIKDTAMDYTDVGFFAARYFMEQYPDRLASRFDLESVADTEMAVIEDIGRRRGCLGRNNRVDLERASRILIQEYRTGGLGRLTLETPATMQRERILTQKAMVEAEEAARLKDEKRKKRFKNKQKAQRKSREMDASRRDRRQ

SEQ ID NO: 807 - protein, 389 aa, Escherichia coli
  misc_feature (180)..(180): Xaa can be any naturally occurring amino acid
  misc_feature (192)..(195): Xaa can be any naturally occurring amino acid
TLQNGKLNVPENPIIPYIEGDGIGVDVTPAMLKVVDAAVEKAYKGERKISWMEIYTGEKSTQVYGQDVWLPAETLDLIREYRVAIKGPLTTPVGGGIRSLNVALRQELDLYICLRPVRYYQGTPSPVKHPELTDMVIFRENSEDIYAGIEWKADSADAEKVIKFLREEMGVKKIRFPEHXGIGIKPCSEEGXXXXVRAAIEYAIANDRDSVTLVHKGNIMKFTEGAFKDWGYQLAREEFGGELIDGGPWLKVKNPNTGKEIVIKDVIADAFLQQILLRPAEYDVIACMNLNGDYISDALAAQVGGIGIAPGANIGDECALFEATHGTAPKYAGQDKVNPGSIILSAEMMLRHMGWTEAADLIVKGMEGAINAKTVTYDFERLMEGAKLL

SEQ ID NO: 808 - protein, 389 aa, Escherichia coli
  misc_feature (192)..(196): Xaa can be any naturally occurring amino acid
TLQNGKLNVPENPIIPYIEGDGIGVDVTPAMLKVVDAAVEKAYKGERKISWMEIYTGEKSTQVYGQDVWLPAETLDLIREYRVAIKGPLTTPVGGGIRSLNVALRQELDLYICLRPVRYYQGTPSPVKHPELTDMVIFRENSEDIYAGIEWKADSADAEKVIKFLREEMGVKKIRFPEHCGIGIKPCSEEGXXXXXRQAIEYAIANDRDSVTLVHKGNIMKFTEGAFKDWGYELARKEFGGELIDGGPWLKVKNPNTGKEIVIKDVIADAFLQQILLRPAEYDVIACMNLNGDYISDALAAQVGGIGIAPGANIGDECALFEATHGTAPKYAGQDKVNPGSIILSAEMMLRHMGWTEAADLIVKGMEGAINAKTVTYDFERLMEGAKLL

SEQ ID NO: 809 - protein, 497 aa, Erwinia carotovora subsp. atroseptica SCRI1043
MTTHVVTHHAVTHVVWLRNDLRITDNLALYAACQDPSATVLAVFIATPAQWEKHDMAPRQAAFLLENLTLVQHVLAEKGIPLHYHECADFAASVDWLMQFCAEQQATDLFYNHQYEINERLRDKQVKDRLADSVVCHGYHDSLLLPPGSVLTGNGEMYKVFTPFRQAFIKRLLEADTTCVPAPDARGEPINNTAELVPFSYPQCEVDSEDFPCGERAALQQLRRFCREQVQDYDQQRDFPALPGTSKLSPYLALGIVSPRQCFNRLRAECPDMLERREGGAFTWFNELVWREFYRHLIVSWPQLCKHRPFTAWTQWVKWRESPEDLTAWQQGKTGYPIVDAAMHQLNETGWMHNRLRMICASFLVKDLLIDWREGERYFMSQLLDGDLAANNGGWQWAASTGTDAAPYFRIFNPTTQGERFDPDGRFIRHWLPELAAVPDKDIHQPHRWADKQHVKLNYPLPIVDHKTARLDTLAAFEAAKNIGMANNDREEKSKYA

SEQ ID NO: 810 - protein, 188 aa, Triticum aestivum
MSGCLSPFAESVGREQGEMAAFLRSKCSSVGRAMMGSLGNNLYGGATSSIETVARPSRSDAVCQQIRTFIQMRTNLKVVDNSGAKRVMCIQSLRGKKGARLGDMIIGSVKEAQPRGKVKKGDVVYGVVVRAAMKKGRSDGSEVQFDDNAIVIVNNKGELIGTRVFGPVPHELRKKKHLKILALAEHIV

SEQ ID NO: 811 - protein, 157 aa, Azoarcus sp. EbN1
MSLTLSSTAFAHGGAVPATYTCDGRDVSPPLGWSGIPENTRSLALIVDDPDAPDPAAPQRTWVHWVLYNIPPTTAALPEAVAMADLPLGTREGTNDWKRTGYGGPCPPIGRHRYFHKLYALDVVLAPLGAPTKAELEHAMQGHILAEAELVGTYQRP

SEQ ID NO: 812 - protein, 389 aa, Escherichia coli
  misc_feature (180)..(180): Xaa can be any naturally occurring amino acid
  misc_feature (185)..(195): Xaa can be any naturally occurring amino acid
TLQNGKLNVPENPIIPYIEGDGIGVDVTPAMLKVVDAAVEKAYKGERKISWMEIYTGEKSTQVYGQDVWLPAETLDLIREYRVAIKGPLTTPVGGGIRSLNVALRQELDLYICLRPVRYYQGTPSPVKHPELTDMVIFRENSEDIYAGIEWKADSADAEKVIKFLREEMGVKKIRFPEHXGIGIXXXXXXXXXXXVRAAIEYAIATDRDSVTLVHKGNIMKFTEGAFKDWGYQLAREEFGGELIDGGPWLKVKNPNTGKEIVIKDVIADAFLQQILLRPAEYDVIACMNLNGDYISDALAAQVGGIGIAPGANIGDECALFEATHGTAPKYAGQDKVNPGSIILSAEMMLRHMGWTEAADLIVKGMEGAINAKTVTYDFERLMEGAKLL

SEQ ID NO: 813 - protein, 426 aa, Glycine max
MSEKEKGNNSEGQSTLLHGKYELGRVLGHGTFAKVYHARNLNTGQHVAMKVVGKEKVIKVGMMEQVKREISVMKMVKHQNIVELHEVMASKSKIYIAMELVRGGELFNKVSKGRLKEDVARLYFQQLISAVDFCHSRGVYHRDLKPENLLLDEHGNLKVSDFGLTAFSDHLKEDGLLHTTCGTPAYVSPEVIAKKGYDGAKADIWSCGVILYVLLAGFLPFQDDNLVAMYKKIHRGDFKCPPWFSLDARKLVTKLLDPNPNTRISISKVMESSWFKKQVPRKVEEVVEKVDLEEKIENQETMNAFHIISFGSRFNLSPLFEEKRKEEMRFATAGTPSSVISRLEEVAKAGKFDVKSSETKVRLQGQERGRKGKLAIAADIYAVTPSFMVVEVKKDNGDTLEYNQFCSKQLRPALKDIFWNSAPASA

SEQ ID NO: 814 - protein, 109 aa, Synechocystis sp. PCC 9413
MADLLEDSGIPNKTLTIEEAIADLKGEDKGSRYYAAWWLGRFRVREPEAISALMTALADESDRTPDGGYPLRRNAARALGKLGDLQAVPKLIECLQCDDFYVRETAAEA

SEQ ID NO: 815 - protein, 389 aa, Escherichia coli
  misc_feature (192)..(199): Xaa can be any naturally occurring amino acid
  misc_feature (215)..(215): Xaa can be any naturally occurring amino acid
TLQNGKLNVPENPIIPYIEGDGIGVDVTPAMLKVVDAAVEKAYKGERKISWMEIYTGEKSTQVYGQDVWLPAETLDLIREYRVAIKGPLTTPVGGGIRSLNVALRQELDLYICLRPVRYYQGTPSPVKHPELTDMVIFRENSEDIYAGIEWKADSADAEKVIKFLREEMGVKKIRFPEHCGIGIKPCSEEAXXXXXXXXIEYAIANDRDSVTLVXKGNIMKFTEGAFKDWGYQLAREEFGGELIDGGPWLKVKNPNTGKEIVIKDVIADAFLQQILLRPAEYDVIACMNLNGDYISDALAAQVGGIGIAPGANIGDECALFEATHGTAPKYAGQDKVNPGSIILSAEMMLRHMGWTEAADLIVKGMEGAINAKTVTYDFERLMEGAKLL

SEQ ID NO: 816 - protein, 81 aa, Triticum aestivum
  misc_feature (45)..(45): Xaa can be any naturally occurring amino acid
MSDGTATCIDIILAIILPPLGVFFKFGCGVEFWICLILTFFGYLXPGIIYAVWAITKVAGRCVSMQCARKVISWRGTRVCP

SEQ ID NO: 817 - protein, 386 aa, Escherichia coli
  misc_feature (192)..(198): Xaa can be any naturally occurring amino acid
  misc_feature (371)..(371): Xaa can be any naturally occurring amino acid
TLHNGKLNVPENPIIPYIEGDGIGVDVTPAMLKVVDAAVEKAYKGERKISWMEIYTGEKSTQVYGQDVWLPAETLDLMREYRVAIKGPLTTPVGGGIRSLNVALRQELDLYICLRPVRYYQGTPSPVKHPELTDMVIFRENSEDIYAGIEWKADSADAEKVIKFLREEMGVKKIRFPEHCGIGIKPCSEEAXXXXXXXAIEYAIANARDSVTLVHKGNIIKFPEGAFKDWGYQLAREEFGGELIDGGPWLKVKNPNTGKEIVIKDVIADAFLQQILLRPAEYDVIACMNLNGDYISDALAAQVGGIGIAPGANIGDECALFEATHGTAPKYAGQDKVNPGSIILSAEMMLRHMGWTEAADLIVKGMEGAIXAKTVTYNFERLIKGD

SEQ ID NO: 818 - protein, 422 aa, Bacillus halodurans C-125
MANGEKIKVSAGVLEVPNNPIIPFIEGDGTGPDIWAAAHRVIDAAVEKAYNGEKKIVWKEILAGEKAFNQTGQWLPDETLETIREYTIAIKGPLTTPVGGGIRSLNVALRQELDLYVCLRPVRYFNGVPSPVKRPEDTNMVIFRENSEDIYAGIEYQAGTDEVKKVINFLREEMGVKKIRFPETSGIGIKPVSQEGTDRLVRAAIQYAITEGRKSVTLVHKGNIMKFTEGAFKNWGYEVAEREFGDKVFTWAQYDKIVEEQGKEAADKAQAEAEAAGKIIVKDSIADIFLQQILTRPKEFDVVATMNLNGDYISDALAAQVGGIGIAPGANINYDTGHAIFEATHGTAPKYAGLDKVNPSSVLLSGELMLRHLGWNEAADLIMASMDKTIESKVVTYDFARLMDGATEVKCSEFANELIKNL

SEQ ID NO: 819 - protein, 372 aa, Bacillus halodurans C-125
MSVTRGLEGVVATTSSVSSIIESVLTYQGYDIDELAEHASFEEVIYLLWNGKLPNKVELKELADELANNAEIPQEVIEQMKAYPLDRVHPMGALRTAISSLGLYDEEADLMDEAANKRKALKLQAQVSTVVTAFSRIREGKEPVAPRTDLSFAANFLYMLTGEEPDEIAVDAFNKALVLHADHELNASTFTARVCVATLSDVYSGITAAIGALKGPLHGGANEQVMAMLTEIGDVENVEPYIRKALDNKQKIMGFGHRVYKNGDPRAKHLREMSKKLTSITGESKWYEMSVKIEEIVTNEKGLLPNVDFYSASVYHSLGIKHDLFTPIFAVSRMSGWLAHILEQYSNNRLIRPRAEYVGPNKRQYVRLEERN

SEQ ID NO: 820 - protein, 132 aa, Pyrobaculum aerophilum str. IM2
MSTKYVEAGELKEGSYVVIDGEPCRVVEIEKSKTGKHGSAKARIVAVGVFDGGKRTLSLPVDAQVEVPIIEKFTAQILSVSGDVIQLMDMRDYKTIEVPMKYVEEEAKGRLAPGAEVEVWQILDRYKIIRVK

SEQ ID NO: 821 - protein, 505 aa, Oryza sativa
MVLSHASSGRDDAVRCTFATRYACETLPRFRMPEQSIPREAAYQIINDELMLDGNPRLNLASFVTTWMEPECDKLIMDSVNKNYVDMDEYPVTTELQNRCVNMIAHLFNAPIKEDETAIGVGTVGSSEAIMLAGLAFKRKWQNKRKEQGKPCDKPNIVTGANVQVCWEKFARYFEVELKEVKLSEGYYVMDPVKAVEMVDENTICVAAILGSTLTGEFEDVKLLNNLLTEKNKETGWDVPIHVDAASGGFIAPFLYPELEWDFRLPLVKSINVSGHKYGLVYPGVGWVIWRSKEDLPEELIFHINYLGTDQPTFTLNFSKGIQEHHAELHGEHSNTKGRHRGDWSIRNPLQGGRCALGGVLAQGQRQVHRVRHLRAPEEVRLDRAGVHHAGQRRARRRPPRRHQGGLQPEPRRAARLGHRQDPARAGRPFGPGAEDLQRHREAAIGRRWRGHQEERPGDREGDLRVLEGPGEEEADRNLLVWLCEKCLNNVACSICAWDGRIGWD

SEQ ID NO: 822 - protein, 436 aa, Zea mays
MHPKLFPENHVSRPDGNGSASFHPLPLPPASVSPKQTNASHQLVPKAEMPSVAGQWQKGKLLGSGTFGCVYEATNRHTGALCAMKEVNIIPDDAKSVESLKQLEQEIKFLSQFKHENIVQYYGSETIEDRFYIYLEYVHPGSIHKYVHQHCGSLTEAVIRNFTRHILKGLAFLHSQKIMHRDIKGANLLVDINGVVKLADFGMAKHLSTAAPNLSLKGTPYWMAPEVVRATLDKSAGYDLAVDIWSLGCTIIEMFTGKPPWSGLEGPAAMFKVLRTDPPIPDNLSPEGKDFLRCCFKRNPTERPTANKLLEHPFIQTLNHYSPHSVVHSFSGIKSPDTVHSSARDKVPWKSDSYMRGKHANGETSSARSSESLAYRLMTPLPNLGTNSLSPPPLSSASSSGSAAHTPNSMHFSVPYHQPSPLPKPNGKEAINLVSH

SEQ ID NO: 823 - protein, 364 aa, Neurospora crassa
MASLLNQLRGLTTVDCDTLDAHGEQHNTAISAENKAIVLAEITKLDANGKLIYQTLIDEIIPIAHWMFGNQTDATVEELASELLAVGLALRFIPHLNGFIHIQTNPKWCYSTEKTVKNAERIVAHLKHLAPDFDTSRICIKIPATWEGLQACRELERRHSIATLATIVFSMEQVALAVDAGCRYVAPYVNELRVHFDATYTDANKDRAALFCGAAQRYCDEVASSASAAEAAHGSLNLQMQTQVMAASLTSVEEVMRLAGAVKHITVSPPLLMELEATPAAGWPGASTVGAAAAITGSRVNGDAVRLRELVRDQSQWRLAFTRAEAGESERKLGQAIGIFCDMQDQLERLVRRWDLTGKKYARG

SEQ ID NO: 824 - protein, 214 aa, Geobacter sulfurreducens PCA
MKFFIDTADVKEIRQAHDLGLVDGVTTNPSLIAKSGRKFEDVIKEITEIVDGPISAEVVSLEAAGMIREAGELAKIHKNIVIKLPMTPEGLKACAALTREGIKTNVTLIFTPMQALLAAKAGATYVSPFVGRLDDISQDGMGIIDDIKTIFDNYGYQSEIIVASVRNPVHVLNAALIGADIATIPYSVMLQLAKHPLTDSGIERFLKDWESVPK

SEQ ID NO: 825 - protein, 496 aa, Neurospora crassa
MSTSVNINGVEFQPRLLINGEFVEASDKGTFNVVNPATGEMSCKVPEATEDDTNRAVAAAKAAQPGWAALDPAKRGAYLKKLAALIREHKSTLHHLEAISMGVPVNHFFHADFGADELDYFAEAWPHIQGQSSVNTPGYVTMTFRQPFGVAACIIPWNAPLYFFATKAAAALITGNTVVLKSSEKAPLAVAYAAELVAKAGFPPGVFNILSGHGLPSGRCLARHMDVRAISFTGSSRTGKLIQEEAAKTNLKSVTLELGGKSPAIIFDDANIEQALTDTMSSIVLNAGQVCIANSRVYVQKSVAPKFIEAFTKRMATIRGGNPLDPQTQMGPQADEIQYKNILSYIEEGKKSGKLAVGGKGQLDERKGYFVEPTVFLDTPEDAKIMKEEIFGPVLNINTFETEEEVVAKANDTEYGLWAAVFTNDLSRAMRMAKALESGYVSINCSSPSIGRDLPFGGYKGSGQGREGRLHSMNHFLEIKSVIIKLDEKASLQWNM

SEQ ID NO: 826 - protein, 152 aa, Magnaporthe grisea 70-15
MSQSGATVSQECVTTYNELKLGKNIKYIIFKLSDNNKEIVVEEASGDSDWENFRNKLVNATVKSPSGAVGKAPRYAVYDFQYTLASGEGERNKITFIAWSPDDAGVKPKMIYAASKDALKRALNGIAHELQANDADDIEYDSVLKTVSKGLA

SEQ ID NO: 827 - protein, 161 aa, Triticum aestivum
  misc_feature (43)..(43): Xaa can be any naturally occurring amino acid
MSDSEEHHFESKADAGASKTYPQQAGTVRKNGFLVIKGRPCKXVVEVSTSKTGKHGHAKCHFVAIDIFNGKKLEDIVPSSHNCDIPHVNRTEYQLIDISEDGFVSLLTSDGNTKDDLRLPTDETLVAQIKEGFESGKDLVVTVQSAMGEEQICALKDIGPK

SEQ ID NO: 828 - protein, 319 aa, Bacillus halodurans C-125
MKRIGVLTSGGDSPGMNAAIRAVVRKAIYHGVEVYGIYQGYAGLISGDIRKMELGSVGDIIHRGGTILYTARCEEFKTLEGQKKGIEQLKKFGIEGLVVIGGDGSFAGAQKLTEHGFPTVGVPGTIDNDIPGTDFTIGFDTALNTVIDAIDKIRDTATSHDRTYVIEVMGRNAGDLALWSGLADGAETIVIPEADHDIDQIISRLQRGQERGKKHSIIVVAEGVGSGMDFGREISERTGAETRVTVLGHIQRGGSPTGFDRVLASRLGAKAVDLLLEGQAGVTVGIENNKLVHHDITEVLQRKHSIDLDMYRLSQELSI

SEQ ID NO: 829 - protein, 148 aa, Glycine max
  misc_feature (62)..(62): Xaa can be any naturally occurring amino acid
  misc_feature (76)..(76): Xaa can be any naturally occurring amino acid
MACSMISYAAVTTVNRACAGMVAPFTGLKTMAGWLPRMRAFDITSIASNGGRAQCVQVWPPXWIKKFETLIYLPDXLEDAQLRKEVEYLLRKGWMPSLQFELDHGFVYREHNRSPGYYNGRYWTMVKLPMFGCTEATQVVNELQEAKT

SEQ ID NO: 830 - protein, 496 aa, Staphylococcus aureus subsp. aureus MRSA252
MELLKHLSQRQYIDGEWVESANKNTRDIINPYNQEVIFTVSEGTKEDAERAILAARRAFESGEWSQETAETRGKKVRAIADKIKEHREALARLETLDTGKTLEESYADMDDIHNVFMYFAGLADKDGGEMIDSPIPDTESKIVKEPVGVVTQITPWNYPLLQASWKIAPALATGCSLVMKPSEITPLTTIRVFELMEEVGFPKGTINLILGAGSEVGDVMSGHKEIDLVSFTGGIETGKHIMKNAANNVTNIALELGGKNPNIIFDDADFELAVDQALNGGYFHAGQVCSAGSRILVQNSIKDKFEQALIDRVKKIKLGNGFDADTEMGPVISTEHRNKIESYMDVAKAEGATIAVGGKRPDRDDLKDGLFFEPTVITNCDTSMRIVQEEVFGPVVTVEGFETEQEAIQLANDSIYGLAGAVFSKDIGKAQRVANKLKLGTVWINDFHPYFAQAPWGGYKQSGIGRELGKEGLEEYLVSKHILTNTNPQLVNWFSK

SEQ ID NO: 831 - protein, 357 aa, Phanerochaete chrysosporium
AVCPDGTRVSHAACCAFIPLAQDLQETIFQNECGEDAHEVIRLTFHDAIAISRSQGPKAGGGADGSMLLFPTVEPNFSANNGIDDSVNNLIPFMQKHNTISAADLVQFAGAVALSNCPGAPRLEFLAGRPNKTIAAVDGLIPEPQDSVTKILQRFEDAGGFTPFEVVSLLASHSVARANKVDQTIDAAPFDSTPFTFDTQVFLEVLLKGVGFPGSANNTGEVASPLPLGSGSDTGEMRLQSDFALAHDPRTACIWQGFVNEQAFMAASFRAAMSKLAVLGHNRNSLIDCSDVVPVPKPATGQPAMFPASTGPQDLELSCPSERFPTLTTQPGASQSLIAHCPDGSMSCPGVQFNGPA

SEQ ID NO: 832 - protein, 434 aa, Rickettsia rickettsii
MTNENNNDSEFAELKIRGKIFKLPILKASIGEDVIDISRVSAEADCFTYDPGFMSTASCQSTITYIDGDKGILRHRGYDIKDLAEKSDFLEVAYLLIYGELPSGEQYNNFTKQVAHHSLVNERLHYLFQTFCSSSHPMAIMLAAVGSLAAFYPDLLNFKEADYELTAIRMIAKIPTIAAMSYKYSIGQPFIYPDNSLDFTENFLHMMFATPCTKYTVNPIIKNALNKIFILHADHEQNASTSTVRIAGSSGANPFACISTGIASLWGPAHGGANEAVINMLKEIGSSEYIPKYIAKAKDKNDPFRLMGFGHRVYKNYDPRAVVLKETCKEVLKELGQLDNNLLQIAIELEAIALKDEYFIERKLYPNVDFYSGIIYKAMGIPSQMFTVLFAIARTVGWMAQWKEMHEDPEQKISRPRQLYTGYVHREYKGIRER

SEQ ID NO: 833 - protein, 160 aa, Gloeobacter violaceus PCC 7421
MATVSDITVQTVDGQARSLGRYKGQVLLIVNVASYCGYTPQYAGLEKLYRRYKDAGLRVLAFPCNDFGGQEPGSNAEIAEFCSRYDVSFELFDKVGARGYYKHPLYVRLSEAAEPAGEVSWNFEKFLIAKSGEIVGRYRSGIGPEDPQLVADIERELAKS

SEQ ID NO: 834 - protein, 483 aa, Thermobifida fusca
MSLTERPQLFIGGRWVDSKGGRKVDVHNPATGAYVGSTVLASTADIDAAVASARASFNSGVWANTPPEERAAVLHRAADLLEERAPELAKLITSELGCPIWFSERAHVPNPIRHLRYYGTLAKDFAYDERRSDGTNTSLVTQVPVGVVAAITPWNGPLSTPSLKVAPALAAGCSVILKPPPETPLTAYNLADALSQAGLPDGVLNIVPADREEGAYLVSHPDVDKVAFTGSSAAGKKIMAACAERIARVTLELGGKSAAIILDDADVDTVVPALLPMAFMVNGQACIAQTRLLVPRSRKDEFIDAFAQAVAAQRVGDPIDPATQIGPMVSRRQQERVEGYIATGRQEGARVVVGGERPSLPSELAGGWFVAPTLLAEVHNSMRVAQEEIFGPVLAVIEYDGDDEAVAIANDSVYGLSGSVWSSDEERALAIARRMRTGMVSINGRPQAANSPFGGFKQSGIGREMGPEGFHAYLETMSIAVGS

SEQ ID NO: 835 - protein, 357 aa, Phanerochaete chrysosporium
AVCPDGTRVSHAACCAFIPLAQDLQETIFQNECGQDAHEVIRLTFHDAIAISRSQGPKAGGGADGSMLLFPTVEPNFSANNGIDDSVNNLIPFMQKHNTISAADLVQFAGAVALSNCPGAPRLEFLAGRPNKTIAAVDGLIPEPQDSVTKILQRFEDAGGFTPFEVVSLLASHSVARANKVDQTIDAAPFDSTPFTFDTQVFLEVLLKGVGFPGSANNTGEVASPLPLGSGSDTGEMRLQSDFALAHDPRTACIWQGFVNEQAFMAASFRAAMSKLAVLGHNRNSLIDCSDVVPVPKPATGQPAMFPASTGPQDLELSCPSERFPTLTTQPGASQSLIAHCPDGSMSCPGVQFNGPA

SEQ ID NO: 836 - protein, 115 aa, Malus x domestica
MACSAVIKLALVVALCMAVSVAHAITCGQVTSSLAPCIGYVRSGGAVPPACCNGIRTINGLARTTADRQTACNCLKNLAGSISGVNPNNAAGLPGKCGVNVPYKISTSTNCATVK

SEQ ID NO: 837 - protein, 199 aa, Fusobacterium nucleatum subsp. nucleatum ATCC 25586
MGNLKNHLMKYERRPIMKIYDFKVKNRKGEDISLENYKGKVLLIVNTATRCGFTPQYDELEALYSKYNKDGFEVLDFPCNQFGNQAPESNEEIHTFCQLNYKVKFDQFAKVEVNGENAIPLFKYLKEEKGFAGFDSKHKLTSVLTEMLSKNDPDFAKKSDIKWNFTKFLVDKSGNVVARFEPTTSAEVIEQEIKKLLEV

SEQ ID NO: 838 - protein, 649 aa, Glycine max
  misc_feature (213)..(213): Xaa can be any naturally occurring amino acid
  misc_feature (404)..(404): Xaa can be any naturally occurring amino acid
MSSAEKPSSKGQAWFCTTGLPSDIVVEVDDMTFHLHKFPLMSKSRKLHLLITQQEAASNSTVPQQQQQQQETEDEDEIVEEQCHVTFTGFPGGSEAFEMAAKFCYGVKIDLTPSNVAALRCAGEFLEMTEDYSEDNLVSKTEGFLSQHVLKNLKDSVKTLKSCDSLMPMAENLGAAQRCVDSVVSRASSADPALFGWPVSDATSVSKQVLWGXSTATADPALAPGPVSLGFEDLALLRLPLFKRLILAMRSAGLSPEIIETCLMYYAKKYIPGVSRSNRKPLPSSSSSSSSVATEAEQKELLETLVSNLPLEKTSKAATATRFLFGLLRTTNILNASEACRDALEKKIGLQLEEATLDDLLVPSYSYLNETLYDVDCVERILSHFLEGFEARNVAQSTADVLRXSPALMLVGKLIDGYLSEIASDANLKPEKFYNFAISLPDEARLFDDGLYRAVDVYLKAHPWVLEEEREKICGLLDCQKLTLEACTHAAQNERLPLRAVVQVLFFEQLQLRQAIAGTLMAAEAAAEPGRQSAALEREAEDGRGEGLGLEHVQERNGTWRVAVRENQVLRLDMDSMRTRVHQLERECSSMKRVISKFDKFAASGGGWRASLGRKFGCKFKTQVCDSHESTAVDTRKGRHHQQHHPHHD

SEQ ID NO: 839 - protein, 423 aa, Azotobacter vinelandii
MRTRILGARLIDPTSGLDRVADLYLADGRIAAVDQAPAAFEADETLDARGLIAAPGLVDLSAALREPGYGRKGSIASETRAAAAGGVTSLCCPPLTRPVLDTPAVAELILDRAREAGHAKVFPIGALTRELAGEQLAELVALRDTGCVAFGNGLASFASNRHLRRALEYAATFDLTVVFHSQDAALAEDGLAHEGPMAGFLGLAGIPETAETVALARDLLLVEQTGVRAHFSQLSSARGARMIAEAQARGLPVSADVALYQLILTDEALADFSSLYHVQPPLRSRADRDGLRDAVRQGTIQAIASHHQPHEADAKLAPFGATEPGISSVELLLPLALSLVQENVLDLPTLLARLTSGPARALRLPVGRLAAGAPADLVLFDPEAATLAGERWLSKGRNCPFIGHVLPGAVRYTLLDGRISYQA

SEQ ID NO: 840 - protein, 509 aa, Zea mays
MIANGLRKSSAASSQVSKLVKYIASAGSLQGGHSLSEPSARHYSSEPSLQATEENGFKGHSMLAPFTAGWQSTDVHPLVIERSEGSYVYDSNGKKYIDALAGLWCTALGGNEPRLVKAATEQLNKLPFYHSFWNRTTKPSLDLANDILSMFTAREMGKVFFTNSGSEANDSQVKLVWYYNNALGRPDKKKFIARSKSYHGSTLIAASLSGLPALHQKFDLPAPFVLHTDCPHYWRFRLPDETEEEFSTRLANNLENLVLKEGPETIAAFIAEPVMGAGGVILPPKTYFEKIQAVLKKYDILLIADEVITAFGRLGTMFGCDMYNIKPDLVSIAKALSSAYMPIGAILVSPEITDVIYSQSNKLGSFAHGFTYSGHPVSCAVAVETLKIYKERNIVEHVNKIAPRFQEGIKAFSGSPIVGEIRGLGLILGTEFVDNKSPNDPFPAEWGVGSIFGAECEKRGMLIRVAGDSIMLSPPLIMTPNEVEEIISKFGDALKATEERIGELKSRKN

SEQ ID NO: 841 - protein, 189 aa, Glycine max
  misc_feature (129)..(129): Xaa can be any naturally occurring amino acid
  misc_feature (133)..(133): Xaa can be any naturally occurring amino acid
  misc_feature (139)..(139): Xaa can be any naturally occurring amino acid
  misc_feature (145)..(145): Xaa can be any naturally occurring amino acid
  misc_feature (151)..(153): Xaa can be any naturally occurring amino acid
  misc_feature (155)..(155): Xaa can be any naturally occurring amino acid
MDIRLMDLDSPLFNTLHRIMDLTEDAEKNLNAPTRTYVRDAKAMAATPADVKEYPNYYVFVIDMPGLKSGDIKVQVEDDNVLLISGERKREEDKEKEGAKYLRMERRVGKFMRKFTLPENANTDAISAXCQDXVLTCTXNKLPPXSPKAQXXXVXSINFFLPVSFFPFGGQGFFRFLGIFLKKKKPGPF

SEQ ID NO: 842 - protein, 110 aa, Glycine max
  misc_feature (50)..(50): Xaa can be any naturally occurring amino acid
MSGVWVFKNGVVRLVENPGGEAVEGSRGGRRKVLVHRASNEVITSYAGLXVFKNGVVRLVENHGSEPKVLVHTARTEIIIPYARDFNKFKPMHMYDIVVKNKNAFEVRDM

SEQ ID NO: 843 - protein, 428 aa, Erwinia carotovora subsp. atroseptica SCRI1043
MADKKATLTLEGKDPIELNVLSGTLGYDEIDIRPLGSKGYFTFDPGFTSTASCESKITYIDGDEGILLHRGFPIAQLAEKSNYLEVCYILLFGEPPTAEQYETFKTTVTRHTMIHEQITRLFHGFRRDSHPMAVLCGVTGALAAFYHDSLDISIERHREIAAYRLLSKMPTVAAMCYKYSLGQPFVYPKNNLSYAGNFLHMMFSTPCEEYVVNPVLERAMDRILILHADHEQNASTSTVRTAGSSGANPFACIAAGIASLWGPAHGGANEACLRMLEEISSVEHIPAFIERAKDKNDSFRLMGFGHRVYKNHDPRATVMRETCHEVLKELGRKDDLLEVAMELEHIALNDPYFIEKKLYPNVDFYSGIILKAMGIPSSMFTVIFAMARTVGWIAHWSEMHADGIKIARPRQLYTGYDKRDFASNLKHD

SEQ ID NO: 844 - protein, 299 aa, Neurospora crassa
MAPLSKTHKLNTGDEIPAVGLGTWQSKPGQVEKAVEAALRAGYTHIDTAYAYGNEKEVGQGIKASGVPREKIWLTTKLDNDWHKHVAEAIDTSLKNLDTPYVDLYLMHWPASLVKGNTKEVYNDWDFVDTWREMQKLVDTGKVKNIGVSNFGVKNLEKLLSAESTKIVPAVNQIELHPGNPSPHLVEYLRSKGIHASAYSPLGSSDSPLYKLNSLTKLAESKGKTVQQVLLRWGVQKGWSVLPKSVTEERIKANIDLEGWSLTDEEIAQIDEVHKENSFKVCGDDWLPVKIFFGAGDSD

SEQ ID NO: 845 - protein, 389 aa, Escherichia coli
  misc_feature (192)..(195): Xaa can be any naturally occurring amino acid
TLQNGKLNVPENPIIPYIEGDGIGVDVTPAMLKVVDAAVEKAYKGERKISWMEIYTGEKSTQVYGQDVWLPAETLDLIREYRVAIKGPLTTPVGGGIRSLNVALRQELDLYICLRPVRYYQGTPSPVKHPELTDMVIFRENSEDIYAGIEWKADSADAEKVIKFLREEMGVKKIRFPEHCGIGIKPCSEKGXXXXVGAAIEYAIANDRDSVTLVHKGNIMKFTEGAFKDWGYQLAREEFGGELIDGGPWLKVKNPNTGKEIVIKDVIADAFLQQILLRPAEYDVIACMNLNGDYISDALAAQVGGIGIAPGANIGDECALFEATHGTAPKYAGQDKVNPGSIILSAEMMLRHMGWTEAADLIVKGMEGAINAKTVTYDFERLMEGDKLL

SEQ ID NO: 846 - protein, 490 aa, Yersinia pestis biovar Medievalis str. 91001
MSRYGLQKLYINGAYTDSTSGDTFDAVNPANGECIAQLQAANAQDVDKAVAAAKQGQPVWAAMTAMERSRILRRAVDILRDRNDELAAIETADTGKPLSETRSVDIVTGADVLEYYAGLIPALEGQQIPLRGSAFVYTRREPLGVVAGIGAWNYPLQIALWKSAPALAAGNAMIFKPSEVTSLTALKLAGIYTEAGLPAGVFNVLTGSGDQVGQMLTEHPGIAKVSFTGGIASGKKVMANAAGSTLKDVTMELGGKSPLIIFADADLDKAADIAMMANFYSSGQVCTNGTRVFVPQALQAAFEQKIVERVKRIHIGDPSDERTNFGPLVSFQHRDSVMRYIDSGKREGATLLIGGYSLTEGALAHGAYVAPTVFTHCRDDMQIVREEIFGPVMSILSYQSEEEVIRRANDTEYGLAAGVVTQDLNRAHRVIHQLQAGICWINTWGESAPEMPVGGYKHSGVGRENGISTLEHYTQIKSIQVELGSFNSVF

SEQ ID NO: 847 - protein, 499 aa, Aspergillus nidulans FGSC A4
MAQQYKLPFELDNPDLLHFDSYVGNAWVTAKSGARFEVVDPGTDLPWASCPTNSAEDVDSAVQIAHDAFEKFKKVNPRQRAQWLLKWDSLIREARSDLAKILTHETGKPIAESYGEIDYATGFTWWFAGEAERIQGSIAVPAAPNRRVFTVKQPIGVAAALVPWNFPIAMVLRKAGAALAAGCTMIVKPSPETPLTALVLAHLAEKAGFPAGVFNVLTTDLENTPPLSEALCKHPLVKKVTFTGSTRVGKLIASHCAHGLKKVTLELGGNCPFLVFDDADLDQALDQLMALKWRHAGQACITANRIYVQAGIYDKFAQLLKERTAKLVIGHGAKEGTTLGPLTTPRSIDKAISQVEDARRLGADVILGGSRVQGTQGYFFEPTILKNMTKDMLVSREESFAPIAALYRFETEEEAVKLANDTSMGLASYAFSKNIDRMWRLLENLEAGMIGMNTGNSSAAESPFGGIKESGYGKESGKEVAVNEYLITKTGTLTIDGQY

SEQ ID NO: 848 - protein, 389 aa, Escherichia coli
  misc_feature (192)..(196): Xaa can be any naturally occurring amino acid
TLQNGKLNVPENPIIPYIEGDGIGVDVTPAMLKVVDAAVEKAYKGERKISWMEIYTGEKSTQVYGQDVWLPAETLDLIREYRVAIKGPLTTPVGGGIRSLNVALRQELDLYICLRPVRYYQGTPSPVKHPELTDMVIFRENSEDIYAGIEWKADSADAEKVIKFLREEMGVKKIRFPEHCGIGIKPCSEKAXXXXXRAAIEYAIANDRDSVTLVHKGNIMKFTEGAFKDWGYQLAREEFGGELIDGGPWLKVKNPNTGKEIVIKDVIADAFLQQILLRPAEYDVIACMNLNGDYISDALAAQVGGIGIAPGANIGDECALFEATHGTAPKYAGQDKVNPGSIILSAEMMLRHMGWTEAADLIVKGMEGAINAKTVTYDFERLMEGAKLL

SEQ ID NO: 849 - protein, 389 aa, Escherichia coli
  misc_feature (185)..(195): Xaa can be any naturally occurring amino acid
  misc_feature (213)..(213): Xaa can be any naturally occurring amino acid
TLQNGKLNVPENPIIPYIEGDGIGVDVTPAMLKVVDAAVEKAYKGERKISWMEIYTGEKSTQVYGQDVWLPAETLDLIREYRVAIKGPLTTPVGGGIRSLNVALRQELDLYICLRPVRYYQGTPSPVKHPELTDMVIFRENSEDIYAGIEWKADSADAEKVIKFLREEMGVKKIRFPEHCGIGIXXXXXXXXXXXVRAAIEYAFANDRDSVIXVHKGNIMKFTEGAFKDWGYQLAREEFGGELIDGGPWLKVKNPNTGKEIVIKDVIADAFLQQILLRPAEYDVIACMNLNGDYISDALAAQVGGIGIAPGANIGDECALFEATHGTAPKYAGQDKVNPGSIILSAEMMLRHMGWTEAADLIVKGMEGAINAKTVTYDFERLMEGAKLL

SEQ ID NO: 850 - protein, 389 aa, Escherichia coli
  misc_feature (180)..(180): Xaa can be any naturally occurring amino acid
  misc_feature (185)..(198): Xaa can be any naturally occurring amino acid
TLQNGKLNVPENPIIPYIEGDGIGVDVTPAMLKVVDAAVEKAYKGERKISWMEIYTGEKSTQVYGQDVWLPAETLDLIREYRVAIKGPLTTPVGGGIRSLNVALRQELDLYICLRPVRYYQGTPSPVKHPELTDMVIFRENSEDIYAGIEWKADSADAEKVIKFLREEMGVKKIRFPEHXGIGIXXXXXXXXXXXXXXAIEYAIANDRDSVTLVHKGNIMKFTEGAFKDWGYQLAREEFGGELIDGGPWLKVKNPNTGKEIVIKDVIADAFLQQILLRPAEYDVIACMNLNGDYISDALAAQVGGIGIAPGANIGDECALFEATHGTAPKYAGQDKVNPGSIILSAEMMLRHMGWTEAADLIVKGMEGAINAKTVTYDFERLMEGAKLL

SEQ ID NO: 851 - protein, 429 aa, Sinorhizobium fredii
MSGTNATISIDGKTADLPVRSGSIGPDVVDIWSLYKQTKMFTYDPGFTSTASCESKITYIDGDEGVLLHRGYPIEQLADHGDFLEVCYLLLYGELPTKAQKDDFDYRVTHHTMIHEQMSRFFTGFRRDAHPMAVMCGCVGALSAFYHDSTDITDPHQRMVASLRMIAKMPTIAAMAYKYHIGQPFIYPKNDLDYASNFLRMCFAVPCEDYVVNPVLSRAMDRIFILHADHEQNASTSTVRLAGSSGANPFACIAAGIACLWGPAHGGANEAALNMLAEIGSVDRIPEFITRAKDKNDPFRLMGFGHRVYKNYDPRAKIMQKTTHEVLAELGHKDDPLLEVAMELERIALTDEYFIEKKLYPNIDFYSGITLKALGFPTTMFTVLFALARTVGWIAQWNEMIEDPEQRIGRPRQLYVGAPLRDYVPLSKR

SEQ ID NO: 852 - protein, 410 aa, Bacillus halodurans C-125
MATTREEALHIHRENQGKLESKSKVPVRNARDLSLAYSPGVAEPCKEIFEDVETVYEYTMKGNMVAVVSNGTAVLGLGNIGPEASLPVMEGKAVLFKSFAGVDAFPICLRTTDVDQIVETVKLLEPTFGGVNLEDIAAPSCFEIEERLKKETNIPVFHDDQHGTAIVTLAGLINALKLTGKRMSEIKVVANGAGAAGIAIIKLMQRMGVRDIIMCDSKGAIYDGRPYGMNDMKAEVAKWTNRDKIDGGLGDVLKGADVFIGVSVAGALTKEMIENMNDDPIIFAMANPVPEIMPEEAKAAGAKVIGTGRSDFPNQVNNVLAFPGIFRGALDARATHINEEMKVAAVHAIADLVAEEDLDPDYVIPAPFDPRVAPAVAAAVAKTAMETGVARRKVDPAEVEAKTKKLAIIE

SEQ ID NO: 853 - protein, 389 aa, Escherichia coli
  misc_feature (185)..(195): Xaa can be any naturally occurring amino acid
TLQNGKLNVPENPIIPYIEGDGIGVDVTPAMLKVVDAAVEKAYKGERKISWMEIYTGEKSTQVYGQDVWLPAETLDLIREYRVAIKGPLTTPVGGGIRSLNVALRQELDLYICLRPVRYYQGTPSPVKHPELTDMVIFRENSEDIYAGIEWKADSADAEKVIKFLREEMGVKKIRFPEHCGIGIXXXXXXXXXXXVRAAIEYAIANDRDSVTLVHKGNIMKFTEGAFKDWGYQLAREEFGGELIDGGPWLKVKNPNTGKEIVIKDVIADAFLQQILLRPAEYDVIACMNLNGDYISDALAAQVGGIGIAPGANIGDECALFEATHGTAPKYAGQDKVNPGSIILSAEMMLRHMGWTEAADLIVKGMEGAINAKTVTYDFERLMEGAKLL

SEQ ID NO: 854 - protein, 387 aa, Ceriporiopsis subvermispora
MAFTSLLALVALAAITRAAPTTICPDGTRVSNHVCCDFIPLAQALQSTLYMGDCGEDAHETIRLTFHDAIAISQSQGPSAGGGADGSMFIFPTVEPFFHANAGIDDSVNNLIPFLSKFPTITAGDLIQFAGTVALSNCPGAPQLEFLAGRPNATAPAVDGLIPEPQDNVTHILERFADAGGFTPFEVVSLLASHTVARADKVDLTIDAAPFDSTPFTFDTQIFLEVLLKGVGFPGTDNNTGEVESPLPLGNNKQGGNDTGEMRLQSDFALARDDRTACFWQGFVNEQEYMMSSFKAAMSKLAILGHNRNDLIDCSEVVPTPKPPVGKPATFPATTGPQDLQLTCKSERFPSLTIDHGARETLIPHCSNGGQDCPTVQFTGPAGEDDS

SEQ ID NO: 855 - protein, 319 aa, Mesorhizobium loti MAFF303099
MTADRHHGKYETRLDPALWAYIDRVDAWYPPEVIGLPIDKQRAVYDRMCRAFHQGRPPGVKASDGLVAAPGHGIPIRHYRPAGKAARAMVLYFHGGGFILGNLDSHDDICAEICAGTGFDVLSVDYRLAPEHVHPAAFDDAMAAFAWAAETSRLPLVLCGESAGGNLAAAVAQATRKHARTAVGQVLIYPGLGGDEGAGSYVEHAEAPLLSVGDIAFYRDVRSAKRQSPDDPTFSPLRDRHFSGLPPTVIITAECDPLSSDGETYRDRIAAAGGKAWWHEEKRLVHSFLRARTTVPAAAEAFSRIIAAIAALGRGEWPY

SEQ ID NO: 856 - protein, 155 aa, Archaeoglobus fulgidus DSM 4304
MSFVIWITGPSGAGKTTLANALYKKLESMGYRVELLDGDGVRRKLYPNLGFSEEERWMHNRVVVEMARRLSRNGIITIVSVVSPYRAWREYARKEIEKFVEVYPRCPLEVRMKRDPKGLYSKALRGEIKGLTGLDGEYEEPENPEVVVDTDKNDR

SEQ ID NO: 857 - protein, 165 aa, Staphylococcus aureus subsp. aureus MRSA252
MNNRNVYDIEVSDYKGLTYKLEAFRGKVILVVNTATECIYSEQLKKLETLFQKYKDRGFVVLSFPNNNFDNRQPGSNEEILKISREKFGVTFPVLAKISVNGNDEHPLFTHLKNEQPGIFGSPIKWNFTKFIIDRQGNVVNRFLPMEDPLDISANIEILLQESSS

SEQ ID NO: 858 - protein, 282 aa, Glycine max
  misc_feature (198)..(198): Xaa can be any naturally occurring amino acid
MGRGKIVIRRIDNSTSRQVTFSKRRNGLLKKAKELAILCDAEVGVMIFSSTGKLYDFASSSMKSVMDRYSKSKEEPCQLGSSASEIKFWQREAAMLRQQLHNLQESHRRKMMGEELSGLTVKELQNLENQLEISLHGVRMKKDQLLMGEIQELNRKGNLIHQENVELYKKVYGTQDDNETNRDSVLTNGLGIGEDLQXACESPAKPATATTLQGTFRNYKIGIAIALIHLQDVCFTIAIKKNGLRFKPQCLRINVAYRPQTNWLKDFNLKLLEKVKATLACM

SEQ ID NO: 859 - protein, 166 aa, Chloroflexus aurantiacus
MTIYQFSAQRIDGSTQSLADFRGQVLLIVNVASMCGLAPQYAGLEQLYRRYRDQGFTVLGFPSNQFMQEPRNNEAIAEFCERTYQVTFPLFAKIDVNGPNEHPLFTYLKTQLPGLFGSTAIKWNFTKFLVDRNGKPYRRYAPTDLPSQIEDDIVLLLRQQPKSLSA

SEQ ID NO: 860 - protein, 127 aa, Triticum aestivum
MGERVKGTVKWFNVTKGFGFISPEDGSEDLFVHQSAIKSDGYRSLNENDTVEFEVITGDDGRTKASDVTAPGGGALSGGSRPGDGGGDRGGRGGYGGGGYGGGGGGGGCFSCGESGHFSRECPNKAH

SEQ ID NO: 861 - protein, 483 aa, Burkholderia sp. RP007
MDTQLIIDNADVPATAAATFERRSPTTGELVTRAAAASVADAIAAADSAAAAYRSWSTTGPTERRRILLKAADLLEARTPEFSRVMALEVGASDLWAGVNVMLAANLFREAAALTTQIQGETIPTDKAGVLSMTVRQPVGVILSIAPWNGPVVLAARAIAYPLVCGNTVVFRASELSPKTHMLIVDVLRDAGLPPGVLNAVTNAPQDAPEVVDALIAHPAVRRINFTGSTRVGRVIAEKAARHLKRCLLELGGKAPLVVLDDADIDEAVKAAVFGAFLYQGQICMSTERIVVDEKIADTFVARFAARARELPVGDPATCGGCVVGPMIVRESGDRINAMINDAVNQGANVVAGGFADGAVMPATIVDRVTPAMRIYDEETFGPITTVVRAKDADDAVRIANDTAYGLSSAVFGRDVTRALSVAMRIEAGSCHINGSTVQNEAQAPYGGTKASGYGRFDGRAVIDEFTELKWITIEPTPQSYPF

SEQ ID NO: 862 - protein, 249 aa, Zea mays
MAAAARQRGTVKWFNDTKGFGFISPEDGSEDLFVHQSSIKSEGFRSLAEGEEVEFSVSEGDDGRTKAVDVTGPDGSFVRGGGGGGGGGGGYGSRGGGGSGGGGRSYGGSWGGGRRSGGGGGPGACYKCGEPGHMARDCPSADGGGGYGGGGYGGGGYGGGGGGGGCFKCGEPGHMARDCSSGGGGYGGGGGGGGGGGGCYNCGQAGHMARDCPSGGGGGGGRFGGGGGGGDRSCYNCGEAGHIARDCPT

SEQ ID NO: 863 - protein, 501 aa, Candida albicans
MDQQEAPIYYGRSVNKVYNQEFIIDSRFKIVKELGHGAYGIVCSAKYDNGSKKVPDSNNGNASSSANASFVAIKKITNIFSKNILCKRALRELKLLQFFRGHKNITCLYDLDIIPNPMTGEFNEIYLYEELMECDMHQIIRSGQPLSDQHYQSFIYQVLCGLNFIHSADVLHRDLKPGNLLVNADCELKICDFGLARGFSENPDENAGFMTEYVATRWYRAPEIMLSFTNYTKAIDIWSVGCILAELLGGKPLFRGKDYVDQLNQILMILGTPPESTLQRIGSHRAQNYVRSLPITRKASYEELFPDANPLALDLLERMLTLDPRERITVRDALNHKYLELWHDPKEEIECQVKFDFKSFETVDGLDEMKQLIMDEVQKFREFVRKPIEEQQRIQMQLHMQKREEQRQEEEEKELLEQQRQFPAQESMDISQTPYNNLETNIGTPQVEDDYPRPQELDEFTFSNLESSSSMNLFQDMAKPSGEEYIKLEEELGFGLDWCYV

SEQ ID NO: 864 - protein, 359 aa, Magnetococcus sp. MC-1
MAKKVLVLPGDGIGQEITAEAVKVLNWAIQNGADITLEEGLIGGTAYDATGTPLPAETITQAKAAQAVLLGAVGGTKWEPLDISVRPEKGLLGIRKALDLYCNLRPAAVYPQLADASTLKKEVVAGIDIMVVRELSSGIYFGQPRGVEDLGDGRKKGFNTLVYTTDEIERIARKAFEAARKRSNRVCSVDKANVLESTELWREVVSDLHKREYADVELSHMYVDNAAMQLIRNPRQFDVIVTTNMFGDILSDAASMLTGSIGMLPSASLGDQFALYEPIHGSAPDIAGKGIANPLATILSVAMMLRYSLELPQLADGVEAAVVTVLDQGLRTADIMQPGMTQVGTAQMGDAVLAALNNA

SEQ ID NO: 865 - protein, 193 aa, Methanococcus maripaludis S2
MAMNAKFRVPFRRRREGKTDFRQRLGLLLSGKPRLVARKSLNNVTAQLMAYDEKGDVVLVSAHSKELVKMGYKGHCGNLPAAYLTGLLLGAKAVKEDVKEAVLDKGLHRATKGAAIFAVLKGALDAGMDIPHGDKIIADEERLNGTHVKNYAESLKEDADAYKKQFSKYLEKGLNPEDLPEHVEELKEKILNL

SEQ ID NO: 866 - protein, 75 aa, Zea mays
FKLFLQNLVCRKNLVIDKSIHTAYVRAIRSAQHFIYIENQYFLGSSYAWPSYVNSGADNLIPIELALKIASEFLY

SEQ ID NO: 867 - protein, 357 aa, Sinorhizobium meliloti 1021
MPKMKAAIFVAPGRIVLDEKQIPDVGPLDALMRITTTTICGTDVHILRGEYPVARGLTIGHEPVGVIEKLGSAVRGYSEGQRVIAGAICTSGHSNAALCGCHAQDGPGTKHGWKGMGGWKFGNTIDGSQAEYVLVPDAMANLAPVPDGLADEQVLMCPDIMSTGFSGAESGAVRVGDAVAVFAQGPIGLCATAGARLIGATTIIAVESVPARMEMARRMGADDVVDFTVSDPTAEIMRLTDGRGVDVAIEALGRQETFEGALRVLRPGGTLSSLGVYSGDLRIPLDGFLAGLGDHTIRTTLCPGGKERMRRLMEVIASGRVDTRPLVTHRFKLDQIEEAYDLFANQRDGVLKVAINP

SEQ ID NO: 868 - protein, 115 aa, Zea mays
MAMAYKMATEGMDVKEECQRWFMEMKWKKVHRFVVYRIDDCRYAVFDFDFVSVDNCQKSKIFFIAWSPAASRIRAKILYATSKQGLRRLLDGVHYEVQATDPSEMGFDVIRGRAQ

SEQ ID NO: 869 - protein, 237 aa, Triticum aestivum
MKGGGDIEAGTAAPKGTTESPELRWALIRKIYVVLCLQLLLTAAVAVVFVKVSSIPRFFVSSYAGLGLYVFILVFPFVVLCPLHIYRQKHPINLLLLGVFTVAISFSVGLTCAFTSGKVILQAGILTIVVVLSLTAYTFWAARRGKDFSFLGPFLFASLMILLVFAFIQIFFPLGKLSHMIYGTLAALIFSGYIVYDTGSIIKRYKYDEYVWAAVTLYLDIINLFLGLLTLFRACDN

SEQ ID NO: 870 - protein, 461 aa, Treponema pallidum subsp. pallidum str. Nichols
MAHLPKEYDFSIESLGESKIPSPIYLSHTLGDFIPNYVSDNEYISHELSARLGETVGPFTHKNLMERAGPRQKIFFNPHHVHAGIVTCGGLCPGLNDVIRAIVRCLWGRYGVKRISGIRFGYKGLLPDYNFDILPLTPEVIDNCHKTGGSLLGTSRGGGNRVVDIVDGIERLNLHILFIIGGDGSQKGAKEIADEIKHRNLKISIIGIPKTVDNDISFVQKSFGFDTAIVKATEAVAAAHMEARSQINGIGLVKLMGRESGFIATYTAIASHETNFVLIPEVSFDLDGPNGLLAHLEKRIALRKHAVLVVAEGAGQDLMVNADGVPSGDSQGGSLRVSSGTDASGNKRLADIGLFLKEKIGVYFKEKRIHINLKYIDPSYLIRSAVAAPIDSIYCERLGNNAVHAAMCGKTKMIIGLVHNKFVHLPIDVVVCQRKHVNPEGSLWRDALDATGQPIVMKNII

SEQ ID NO: 871 - protein, 317 aa, Pasteurella multocida subsp. multocida str. Pm70
MTTQLDSLRNMTVVVADTGDIEAIKKYQPEDATTNPSLILSASALPQYASLIDEAIAYAKSKSNCSKQQLIDAEDKLAVNIGLEILKIVPGRISTEVDARLSYDTQATIEKAKKLIALYNEAGISNDRILIKIASTWQGIRAAEELEKQGINCNLTLLFSEAQARACAEAGVYLISPFVGRILDWYKANSDKKDYAPAEDPGVISVTKIYNYYKQHGYNTIVMGASFRNVGEITELAGCDRLTIAPALLKELQENNAPLERKLSYTGEVKAKPQPLTEAEFYWQHNSDAMAVEKLADGIRKFAADQEKLEAMLLTKF

SEQ ID NO: 872 - protein, 407 aa, Pseudomonas aeruginosa UCBPP-PA14
MIGFEIFLAIGMFTAIVLGLVAIILVARAKLVSSGDVTIQINGEHSLTVPAGGKLLQTLATNNVFLSSACGGGGTCAQCKCVVVEGGGEMLPTEESHFTRRQAKEGWRLSCQTPVKQDMQIRVPEEVFGVKKWECTVESNPNVATFIKELTLRLPDGESVDFRAGGYVQLECPPHVVEYKDFDIQPEYRGDWDKFNMWRYVSKVDETVIRAYSMANYPEEQGVVKFNIRIASPPPGSDLPPGQMSSWVFNLKPGDKVTVYGPFGEFFAKDTEAEMVFIGGGAGMAPMRSHIFDQLRRLKSNRKISFWYGARSLREAFYTEEYDQLQAENPNFQWHLALSDPQPEDNWTGLTGFIHNVLFENYLKDHPAPEDCEFYMCGPPMMNAAVIKMLTDLGVERENILLDDFGG

SEQ ID NO: 873 - protein, 162 aa, Azoarcus sp. EbN1
MSVPANVFDFETRRLNGAPMPLAEFRGKVLLLVNTASECGFTPQYEALQELHDRFAPRGFSVIGFPCNQFGGQEPGGAEEIAAFCAKNYGVSFPLSEKIDVNGDNAHPLYRHLTSVAPGILGTEAIKWNFTKFLVDRDGQVVARFAPATKPESIARDIEALL

SEQ ID NO: 874 - protein, 333 aa, Kineococcus radiotolerans SRS30216
MTWIDAPAHRPRTPAPVPRHLAGISVARARARALVERPGPFDDDAVLVRDTTVRGAAGPLPARTYRPRAGGRGVVLFLHGGGWALGDLDTDDAVCRRIAADAGTAVLGLGYRLAPEHPHPAALEDASAVLRALADRGAGGVGGPGEPLAVAGAEAGAQLAAVLALRSRAGSVPPLAHQVLLCPVLDSDLTRPSHREHGHGPELTVEDLAWFWRMHVPDRAARRRPDVSPLRVPDPTGLAPATLVVAGADPLRDEGLAHAGRLTAAGVDAHRVLAGDARHGFATRPGSPDADAALRAVTDRLRPALAPAARTAAGARVIDLRAPVRVAGARSAP

SEQ ID NO: 875 - protein, 192 aa, Triticum aestivum
MSLSSIARRLCCSRQSSTSRLSVVLARLHSTEAAKDTGAKRYKYPEVYDPYGPMPPASEKVVGLADRIAALPPEEIKQIAPALLLRLNQPAPQAISGQGFSMGSQGGAGAGAAKSEEKKAEKLVFDVKLEKFEAAAKIKIIKEIRTFTDLGLKDAKELVEKAPVILKQSLTKEEAEAIIAKIKAAGGVAVME

SEQ ID NO: 876 - protein, 344 aa, Ralstonia solanacearum
MRTWFNGYSDDSQIRTIVQLRPMPSLDPHVAQLLDLVARAKRPPLHHLAPADAKIAYEKSSPIVDIPPIPLDHVHDLTVPARDGYAIPVRTYAAREASWADPLPLLVYFHGGGFTVGSIRTHDALCRSLAAKSGAMVLSVDYRLGPDWKFPTAADDAFDVLQWVFDEAATIGADPARIAFGGDSAGGTLAAITAIEARNRGLAPVLQLLIYPGTTARETTPSHHAFAEGYLLTQAMIAWFFAQYLRSDADRDDWRFAPLDGGGQGADVRGVCPAWISVAGFDPIRDAGIGYADKLRAAGVPVTLKMYEGMIHDFFKLGRFVPAVEDAHYEAADALRRAFGTQAG

SEQ ID NO: 877 - protein, 181 aa, Triticum aestivum
  misc_feature (90)..(90): Xaa can be any naturally occurring amino acid
LDGVFAFVLYDTRDRTYVAARDAIGVNPLYIGWGSDGSVWMSSEMKALNEDCVRFEIFPPGHLYSSAAGGFRRWYTPHWVPRSRCPGTPXYQAAPSLREASEKAGYQRGHDRLPFRGLLSRRLDPPFVASVNKAPLRPRPTPPESGQTPSFVVRSRGPLTEGRTRVPDTRDTTRFLTKTDH

SEQ ID NO: 878 - protein, 347 aa, Haemophilus somnus 2336
MKAIVLESNRNMAICDIPKPLVEDPDDVLVKVHYSGLCGSDIPRIFHHGTHFYPIVLGHEFSATVEEVGSDVTELDKGDLVSCAPLQPCFKCDECNRGFYSLCKNYNFIGSRRFGANSEYLCVKKSNLVKLPQGSDTLQASFIEPITVGLHAIHLAGGCKGKNVVIVGAGTIGLLAAQSTKALGANSVSVIDINQEKLVLAKTLGADYVFNSMDLKADEILACLDGNRFDQLILETAGVPKTVELSIQIAGPRAQVVLVGTLHHDLNLDQKEFGLILRKELIIFGSWMNYSKPWPGVEWREAVNLIAENKICFEPLISSINTIEDYVEEVKSLDGKPMNGKLVLKFD

SEQ ID NO: 879 - protein, 177 aa, Glycine max
MASSMISSPAVTTVNRAGAGMVAPFTGLKSMAGFPTRKTNNDITSIASNGGRVQCMQVWPPVGKKKFETLSYLPDLDDAQLAKEVEYLLRKGWIPCLEFELEHGFVYREHNRSPGYYDGRYWTMWKLPMFGCTDASQVLKELQEAKTAYPNGFIRIIGFDNVRQVQCISFIAYKPPG

SEQ ID NO: 880 - protein, 474 aa, Glycine max
  misc_feature (95)..(95): Xaa can be any naturally occurring amino acid
WSPGWSNADKALTAFVNGALIEYWKNRRKADGGTTSFLSPHLHFGEVSVKKVFHLVRIKQVFWANEGNKAGEESVNLFLKSIGLREYSIDTSSPXDHEKPLLGHLTLYPWVENEGDFNAWRHGRTGYLLVDAGMRELWATGWLHDRIRVVVSSFFVKVLQLPWRWGMKYFWDTLLDADLESDALGWQYISGSLPDGREIDRIDNPQFEGYKFDPNGEYVRRWLPELSRLPTEWIHHPWNAPESVLQAAGIELGSNYPLPIVGIDAAKNRLLEALSKMWQQEAASRAAMENGTEEGLGDSSESVPAAFPQDTRMEETHEPVRNNPLPIARRYQDQMVPSITSSLLRVEEEETSSDLRNSAEESSRAEVPVTANAQQNAGVALNERMLQTTNRNTQTQYNTTMDLRNVADDSAVESSSGTRRERDGGLVPVWSPPASSYSEQFVGDENGITSSSSYLQRHPQSHQMLNWKQLPQTG

SEQ ID NO: 881 - protein, 111 aa, Glycine max
  misc_feature (33)..(33): Xaa can be any naturally occurring amino acid
MASSMISSPTVTTANRPGAGLVVQLIGLNSLVXFPTLKTHHDITFIASNGGRVQCMPVWPPVGKKKFETLSYLPDLDDAQLAKEVEYLLMKGWIPCLEFELEHSFLYREHN

SEQ ID NO: 882 - protein, 131 aa, Arabidopsis thaliana
MAYEERRSSILDSFSLSPLPYPVLLILAVASVFLLSSWYFSLEEAAESAEEQINFALLLIPLFLIVLVRWLSSMENPDALLGMFSSSRRTTYVSPGAGGDGGSSPWGVAALIVLLLVLLQYQSSFLEMWSG

SEQ ID NO: 883 - protein, 347 aa, Vibrio vulnificus CMCP6
MFFEWQGNEPATLQCVDKFFETDDTVSIRLADLTESLLFQFKPGQFVNLGVEIDGKMEFRAYSISSLAGEEYLQFTIKRVEGGKVSNFIIDSLLIGDTVQALAPAGEFNCVDHPPRELDGQGKALLISAGCGVTPVFAMAKHWLNNEMNVDIEFLHIARSAQETIYFDHLSTCQSAYAHFHLKLLLKDAQGTTHPQGRFNAQWLQDLVPDFATRTIYLCGPNQFMQDTQDYLQALGFDMNHFYHESFTPEKVEAMEASDEEVCISVPDFAQTINAKKGQLLADVLENAGLPLIVACRSGICGSCKCKVANGQVRSISQETLTTEEIAQGYVLACSSHIESDLEVCLH

SEQ ID NO: 884 - protein, 506 aa, Aspergillus nidulans FGSC A4
MNGEIPSIAVFTSSRAVIGGRLTSATIVVSRTTGKVTAVFDSVIPASDFPDGTPYTDFSPYVLLPGLVDAHVHLNEPGRTEWEGFYTGTQAAAFGGVTTVIDMPLNAIPPTTTVENFKLKLKAAEGKCWVDVGFYGGIIPGNAGELKALVREGVRGFKGFLIDSGVDEFPAVSSEDVRKAMAELADEPTTLMFHAEMVPPKTPSELPEVMPEGAPEAYSTFLASRPSEYELCAVEEILSLSHLAPKLPLHIVHLSAMEAIPLLRKARAEGVPITAETCYHYLSLAAEEIRDGDTRHKCCPPIRSKSNQDALWAELDRHAEDGVIKTIVSDHSPCTPDLKLLPSHIPGNCSHGSSKHANTTPVVNEGSFLSAWGGISSVGLGLPILWTELSRRKGLTSSPDDTTTKQALQDIVHLCCANTAAQVGLHKSKGDLVPGYDADFCVFDDTAEWEVEPSTMLFRNKCSPYQGRTMRGMVRETWLRGEKIFNRDDGFTVKAPSGSLLLEKRV

SEQ ID NO: 885 - protein, 127 aa, Oryza sativa (japonica cultivar-group)
MRGVILLRYEEDAMAGHRSTAAATGGRLYGQVGVKRRVVEETAAAVEVGGGGGGYLGVEAAVLLGVVTATLLVLPLLLPPLPPPPPMLLLVPVAIFAVLLLLVLLPSDAKSIAAAGRPSSSSSSSYL

SEQ ID NO: 886 - protein, 297 aa, Bacillus anthracis str. A2012
MVESCSNKVVAYKKCNDERETTVHIPTTTLHNGVKMPMIGLGVYKAKEGDEVKQAVKTALEVGYRSIDTATVYENESGVGEAVRESGIPREDIFITTKVWNDDQGYEETLEAFEKSLKKLQMDYVDLYLIHWPIRGKYVDTYRALEKLYEEGKVRAIGVSNFHKHHLELLLPNCKIKPMVNQVELHPMLTQFELRNFCQGEQIQMEAWSPLMRGGEVFQHPIIQAIATKYEKTPAQVILRWDIQSGIVTIPKSVTPSRIQENFSIFDFSLTEEEMTEINTLNRNLHVGTNPDKYDTL

SEQ ID NO: 887 - protein, 305 aa, Thermobifida fusca
MTTPVDPAIAAVAAAAAAAPPLTSLTPEQARARVAAGNSSCANGPDLRSVRDIRLPVADGQIGARVYTPHAAPRATFVYLHGGGWVTGDLDYSDELCRFLADRLAWTVVSVDYRLAPEHPFPTPVNDAYAAVQHVAATIAANGPLGVGGDSAGGNLAAACTLRARDEHGPRLDFQVLLYPVTDHDFTRASYQTHATAFPIGVAEMRWFWDHYLPDPERRDLPLASPLRAELAGLPPAHIVVAGHDPLRDEGVAYAERLRAAGVKASLAEYPSLTHGFFRLTGVVPAARAAVDDLIDALQLLTEDH

SEQ ID NO: 888 - protein, 181 aa, Mesorhizobium loti MAFF303099
MKRDEGGDAADLTEIAGAIKWFDVAKGYGFILPDDGVSGDILLHVTCLRRDGFQTALEGARVVCLVKQGDRGLQAFRVLSMDVTTAVHPAEMQEQRTHVAVTPESGLERALVKWFNRTKGFGFLTRGEGTEDIFVHMETLRRYGITELRPGQVVLVRFGRGDKGLMAAEIHPDMGTLPVSH

SEQ ID NO: 889 - protein, 181 aa, Glycine max
MATVGRNVAAPLLFLNLIMYFIVLGFASWCLNRFINGQTYHPSFGGNGATMFFLTFSILAAVLGIVSKLLGGNHMRTWRSDSLASAGATSMVAWAVTALAFGLACKQIHLGGHRGWRLRVVEAFIIILTFTQLLYLILIHAGLYSSRYGPGYHDTDYGHGHGVGGTTGDPMHKPATAGTRV

SEQ ID NO: 890 - protein, 442 aa, Rhodobacter sphaeroides 2.4.1
MPGHIFGRSTRGSLPVAAEGEGCYILDTEGRRYLDGSGGAAVSCLGHSNAAVRAALHDQLDRLAFAHTGFFTSEPAERLADRLAAAAPEGIERVYLVSGGSEAVEAALKLARQYFMEVGQPGRHRVIARRQSYHGNTLGALAAGGNEWRRAQFAPLLVETSHVSPCYEYRGRAEDESLEAYGLRVADELEAEIQRLGPETVMAFVAEPVVGATAGAVPAVPGYLKRVREICDRHGVLLILDEVMCGMGRTGHLFACAEDGVAPDMITIAKGLGAGYQPIGALLVQGRIYDAIAAGSGFFQHGHTYMGHAMAAAAANAVLDEIEGRDLLQAVRRQGARLEALLQERLGQHPHVGDIRGRGLFRGIELVADRETKEPFDPARKLHARIKAEAFAGGLICYPMGGTLDGVRGDHILLAPPFIISDAELDELVDKLSGALDRALAA

SEQ ID NO: 891 - protein, 283 aa, Clostridium perfringens
MELWYTEEHTDKVRFSIKVDEQLYSGKSDFQRIDVFKSQEFGTFFTLDGLMMVTEKDEFIYHDMIVHVPMATNPNIKNVLVIGAGDGGTVRELTRYETIEKIDMVEIDKLVVDVCREYLPQTANKLDDPRVSLFFEDGLKFVRSVENKYDLIIVDSTDPFGPGEGLFTREFYGNCFKALKEDGILVNQHESPYYEEYARGMKRAHKRIKECFPVCRVYQAHIPTYPSGHWLFGFASKKYDPLNADIEKWNDLGLKTKYYNTDLHKGCFALPNYVKEMLENVDE

SEQ ID NO: 892 - protein, 78 aa, Triticum aestivum
  misc_feature (27)..(27): Xaa can be any naturally occurring amino acid
MGLWSFLEGVLLIANALAILNEDRFLXPRGWSFADARGVQGANTFKGQMIGLIYAAQYMRFPLILLNGITILVKFVSF

SEQ ID NO: 893 - protein, 292 aa, Leuconostoc mesenteroides subsp. mesenteroides ATCC 8293
MEYKTLASDIKMPVLGFGVFQVQEKGAAKQAVIDAIKTGYRLIDTAASYGNEREVGEGIAEAIETGLVTREELFVTSKMWVQDVSADKAAAAIQASLDRLKLDYLDLYLLHQPYNDVFGAWRAMEAAYKAGQLKAIGVSNFDIAQLTNLAEFSEIKPMLNQIEANPFQQNKKDAAYFAEYGVQVEAWAPFAEGKNGLFSNELLQGIADKYNKSIAQVVLRWLTQRDIIVVAKSVKPERMAQNLDVLDFKLTDEEMQEIATLDTNISQFFDHADPDMIKWMAGREISYDVTAD

SEQ ID NO: 894 - protein, 367 aa, Liquidambar styraciflua
MGSTSETKMSPSEAAAAEEEAFVFAMQLTSASVLPMVLKSAIELDVLEIMAKAGPGAHISTSDIASKLPTKNPDAAVMLDRMLRLLASYSVLTCSLRTLPDGKIERLYGLAPVCKFLTRNDDGVSIAALSLMNQDKVLMESWYHLTEAVLEGGIPFNKAYGMTAFEYHGTDPRFNTVFNNGMSNHSTITMKKILETYKGFEGLGSVVDVGGGTGAHLNMIIAKYPMIKGINFDLPHVIEEAPSYPGVEHVGGDMFVSVPKGDAIFMKWICHDWSDEHCLKFLKKCYEALPTNGKVILAECILPVAPDASLPTKAVVHIDVIMLAHNPGGKERTEKEFEALAKGAGFEGFRVALCAYNTWIIEFLKKI

SEQ ID NO: 895 - protein, 288 aa, Leuconostoc mesenteroides subsp. mesenteroides ATCC 8293
MNFKTLNNGAQMPQLGFGVFQIPAEETKQAVVDAINAGYRSIDTARVYGNEAETGQGVNEAIANAVVAREELFLTTKLWLSEFSYEAAKGAIDDSLKKLGTDYADLILLHQPYGDVYGAYKALAEAQADGKVKSIGISNFYPAKFVEFIKVIKTMNLPVPQIDQIEFHPYYQEKVARQLHDKYGVQIEAWGPLGRTANKYDTFHQPELVEIAAKHDKSVGQVVLRWIMQSNIITVAKSVNPSRMAENIDIFNFELDDDDMKKIETLDKNEPIFNHLDISTVERMYGWV

SEQ ID NO: 896 - protein, 275 aa, Fremyella diplosiphon
MENAANIQDDNQLTVEQAIANLQGEDLGLRVYAAWWLGRFRVDAPEANDLLIQALEDEDDRTIVGGYPLRRNAARALGKLGEKRAVPALIKALECSDFYVREAAAQSLEMLGDSSSIPRLIELLNDQVPGTLPAPEPPQLTQPFDAIIEALGTLGASDAIPIIQEFLEHTVPRIQYAAARAMYQLTQNHCRLQSVWRSLVQALAQDDLQLRRAVLSDLGAIGYLPAAEAIADTLAENSLKLISLKGLLEKQFQPTKPEDLSPGAIKVMQLMDALL

SEQ ID NO: 897 - protein, 568 aa, Glycine max
MAPSFAINGGFPGARVTPPSVTGRFAAVYSEVQNSRIDHELPLPSVLKNPFIIVDGPQSSAAGNPEEIAKLFPKLFGQPSAALVPSDSHAPHANRKLKIGVVLSGGQAPGGHNVISGIFDYLQDLAEGSTLYGFRGGPAGIMKCKYVELTSDYIYPYRNQGGFDMIRSGRDKIETPEQFKQAEETVQKLNLDGLVVIGGDDSNTNACLLAEHFRSKNMKTRVIGCPKTIDGDLKCKEVPTSFGFDTACKIYAEMIGNVMIDARSTGKYYHFVRLMGRAASHITLECALQTHPNITIIGEEVAAKKMTLKDVTDYIVNIISKRAEDNYNYGVILIPEGLIDFIPEVQHLIAELNEILANDAVDEGGLWKKKLTDQSLKLFEFLPKAIQEQLMLERDPHGNVQVAKIETEKMLIQMVETELEKRKQQGTYKGGFRGQSHFFGYEGRCGLPTNFDSTYCYALGYGAAALLQSGKTGLISSVGNLCAPVEEWTVGGTALTSLMDVERRHGKFKPVIKKAMVELEGAPFKKFASLRDEWALKNCYISPGPIQFTGPGSDAINHTLLLELGAQA

SEQ ID NO: 898 - protein, 488 aa, Geobacillus stearothermophilus
MKVQTEIKTYFNYINGNWVSSVSNNVEPSINPANRHDIVGYVQRSTLEDVNEAVTAANEAQTSWWKRSGVERGEYLYKAAHILEQCLQDIAETMTREMGKTLAEAKAETMRGVHILRYYAGEGARKIGDVIPSSDSEGLLFTTRVPLGVVGVISPWNFPVAIPIWKMAPALVYGNTVVLKPASETAVTAAKVIECFHEAGFPKGVVNMVCGSGSVVGQGIANHPDIDGVTFTGSNTVGKQVGRAAFERGAKYQLEMGGKNPVIVAKDADLDLAVEGTISGGLRSTGQKCTATSRVFIEREVYEPFKAKLLERVKQLKIGNGLDAETWMGPCASESQFHTVLSYIEKGKSEGAKLIYGGNRCLEGELANGFFVEPTIFEDVDLQMTIAREEIFGPVLALIQVDSIEEAIKLANDTEYGLSASIYTKNIGNALEFIKDIEAGLIKVNAETAGVEFQAPFGGMKQSSSHSREQGQAAIEFFTSIKTVFVKA

SEQ ID NO: 899 - protein, 287 aa, Listeria monocytogenes EGD-e
MTIQWFPGHMAKARREVTEKLKLVDVIFELVDARIPLSSSNPMLEEIIHQKRRVIILNKADTADEKTTKEWIDYFAEKGLPAVAVNAQEGKGLFKIEQAAEKLMAEKFDRLRSKGMKPRAIRAMILGIPNVGKSTLINRLAKKNIARTGNKPGVTKAQQWIKVGKTLELLDTPGILWPKFEDQEIGYKLALTGAIKDDLLQMEEIAGYGLRFLENHYPDRLQTWLKVETVSEDPIETLAFIAEKRGLLDRYNDPDYSRAAETVVREIRQQKLGRMSFDFPNWEDEVE

SEQ ID NO: 900 - protein, 72 aa, Glycine max
  misc_feature (8)..(8): Xaa can be any naturally occurring amino acid
  misc_feature (10)..(14): Xaa can be any naturally occurring amino acid
  misc_feature (17)..(17): Xaa can be any naturally occurring amino acid
  misc_feature (24)..(25): Xaa can be any naturally occurring amino acid
  misc_feature (45)..(45): Xaa can be any naturally occurring amino acid
PWYETTVXGXXXXXPFXGLKSMAXXPTRKTNNDITSIASNGGKSXNAWQVWPPVGQEEIEILSYLPDLMMHG

SEQ ID NO: 901 - protein, 101 aa, Rickettsia slovaca
GSSEYIPKYIAKAKDKNDPFRLMGFGHRVYKNYDPRAAVLKETCKEVLKELGQLDNNPLLQIAIELEAIALKDEYFIERKLYPNVDFYSGIIYKAMGIPSQ

SEQ ID NO: 902 - protein, 156 aa, Triticum aestivum
  misc_feature (75)..(75): Xaa can be any naturally occurring amino acid
  misc_feature (137)..(137): Xaa can be any naturally occurring amino acid
MKTLLILTIIAVALTTTTANIQVDPSGQVQWPQQQQPFPQPQQPFSQQPQQIFPQPQQTFPHQPQQAFPQPQQTXFPHQPQQQFPQPQQPQQPFPQQPQQQFPQPQQPQQPCAQQPQQQFPQPQQPQQHVPRPQQPXLPFAKHQHHHFPQPQHPKH

SEQ ID NO: 903 - protein, 355 aa, Glomerella cingulata
MSRANPPNASGSRKISFNVSEQYDIQDVVGEGAYGVVCSAIHKPSGQKVAIKKITPFDHSMFCLRTLREMKLLRYFNHENIISILDIQKPRSYETFNEVYLIQELMETDMHRVIRTQDLSDDHCQYFIYQTLRALKAMHSANVLHRDLKPSNLLLNANCDLKVCDFGLARSAASQEDNSGFMTEYVATRWYRAPEIMLTFKEYTKAIDVWSVGCILAEMLSGKPLFPGKDYHHQLTLILDVLGTPTMEDYYGIKSRRAREYIRSLPFKKKVPFRTLFPKTSDLALDLLEKLLAFNPVKRITVEDALKHPYLEPYHDPDDEPTAPPIPEEFFDFDKHKDNLSKEQLKQLIYQEIMR

SEQ ID NO: 904 - protein, 507 aa, Petunia x hybrida
MDAKIGSIDTCKPTTNNVATLPTNNTVTISTHTPSTTIIPCNSTTDSTLGRHLARRLVQVGITDVFGVPGDFNLTLLDHLISEPNLEFIGCCNELNAGYAADGYARPRGVGACVVTFTVGGLSVLNAIAGAYSENLPLICIVGGPNSNDYGTSGVLHHTIGLPDFSQELRCFQTVTCYQAVVNNLEDAHEMIDTAISTALKESKPVYISISCNLPAIPHPTFSREPVPFSLSPRLSNQMGLEAAVEAAAEFLNKAVKPVVVGGPKLRVAKASDAFVELMDASGYAVAVMPSAKGMVPEHHPHFIGTYWGAVSTAFCAEIVESADAYLFAGPIFNDYSSVGYSLLLKKDKAIIVQPDRVTIGNGPAFGCVLMKDFLAALAKRLKHNPTAHENYRRIYVPEGHPLKCEPNEALRVNVLFEHIQRMVSADTAVIAETGDSWFNCQKLKLPEGCGYEFQMQYGSIGWSVGATLGYAQAARDKRVLAFIGDGSFQVTAQDISTMLRCGQRTI

SEQ ID NO: 905 - protein, 115 aa, Oryza sativa (indica cultivar-group)
MARAQLLLVALVAALLLAAQAMAAISCGQVNSAVSPCLSYARGGSGPSAACCSGVRNLNSAATTTADRRTACNCLKNVAGSISGLNAGNAASIPSKCGVSIPYTISPSVYCSSVN

SEQ ID NO: 906 - protein, 143 aa, Triticum aestivum
LDVPDGESGGAGATGGEKQGPTRAYVRDARAMAATPADVKELPGAYAFVVDVPGLGSGDIKVQVEDERVLVISGERRREEKEDARYLRMERRMGKLMRKFVLPENADTEKISAVCRDGVLTVSVQKLPPPEPKKPKTIQVQVA

SEQ ID NO: 907 - protein, 118 aa, Oryza sativa (indica cultivar-group)
MARAQLVLVALVAAALLLAGPHTTMAAISCGQVNSAVSPCLSYPRGGSGPSAACCSGVRNLNSAASTTADRRTACNCLKNVAGSISGLNAGNAASIPSKCGVSIPYTISPSIDCSSVN

SEQ ID NO: 908 - protein, 148 aa, Oryza sativa (japonica cultivar-group)
MEQGSERQDERPPLPCANGCGFFGSADTRGLCSKCYRQTVMSQASAPSAAAQSAEHDQVVLPAPEGVPVDEGAMPPPPPRHGAKTKSRCAACGRSVGLMGFECRCGAVFCGAHRYSDRHDCGYDYRGAGRDAIARANPVVRPDKVEKL

SEQ ID NO: 909 - protein, 348 aa, Listeria monocytogenes str. 1/2a F6854
MKALKLYGKRDLRYEEADMPTIEEPDDVILKVKTVGICGSDISRYSKLGPYVPGMVWGHEFSGEVIEVGSEVTDIEIGDRAAGCPALYCGECEYCKKGEFARCRKLTVIGARHPGAYAEYIKLPAENVVKIPDELDYEAAALVEPSAVVVHGFYHTKLQAGDDVVVVGSGNIGLLAIQWAKVFGARRVIAIDVDDKKLALAKEVGADVVINSLKEDPLEVVAAHTDGLNADLVVEAAGSPITSAQVFAYAKKGGGVVFLGIPYADVTIERFYFEKIVRSELTVWGSWNAISAPFPGKEWQTTIHFLANKQINIEPMITHRLSLAEGPEVFERIYERNEFFGKVLFFPE

SEQ ID NO: 910 - protein, 159 aa, Streptococcus mutans
YNETGNWLPNETLEIIKTHLLAIKGPLETPVGGGIRSLNVALRQELDLFACVRPVRYFKGVPSPLKHPEKTAITIFRENTEDIYAGIEWNAGTAEVQKVINFLQDDMQVKKIRFPKSSSIGIKPISIEGSQRLIRAAIEYALANNLTKVTLVHKGNIQK

SEQ ID NO: 911 - protein, 347 aa, Salmonella enterica subsp. enterica serovar Typhi Ty2
MKSVVIHAEGDVRVEERPLPQLQAEDDVLVKVVSSGLCGSDIPRIFAQGAHYYPITLGHEFSGYVESYGTGVTDMQPGDAVACVPLLPCFHCPQCERGYFSLCKQYQFVGSRSEGGNAEYVVVKRANLFRLPSDMPIEDGAFIEPITVGLHAFHLAQGCEGKNVIIVGAGTIGLLALQCARELGARSVTAIDINPQKLELAKALGATHTCNSREMTADDIQTALSDIQFDQLVLETAGTPQTVSLAIDITGPRAQLALVGTLHHDLTLTTRTFGLILRKELTLLGSWMNYSAPWPGEEWETAARLLAEKRLQLTPLIAHRGDAESFAEAVKALNGAPMQGKILLQLS

SEQ ID NO: 912 - protein, 116 aa, Oryza sativa (indica cultivar-group)
MARAQLVLVAVVAALLLAAPHAAVAITCGQVNSAVGPCLTYARGGAGPSAACCSGVRSLKAAASNTADRRTACNCLKNAARGIKGLNAGNAASIPSKCGVSVPYTISASIHCSRVS

SEQ ID NO: 913 - protein, 407 aa, Glycine max
MALNYPFLTYFILLLVTITRLIFTVGKTEQWKAPILPELDIDNISHKLHDDPETIQMASRDYGHLTHEFPLAVFRPSSIDDIVTLIKSSYNSFAPFDIAARGQGHSTHGQAMARDGIVVDMASLRKQRNGVAISVSKDPLMGHYADVGGEQLWIDVLHATLEYGLAPVSWTDYLYLTVGGTLSNAGISGQSFRYGPQISNVHEMDVITGKGEFVTCSSQKNLELFHAVLGGLGQFGVIARARIALEPAPKRVKWVRLLYSDFSAFTKDQERLISINGRKQKNALDFLEGMLLMNQGPINNWRSSFFPLSDHPRIASLITEHSILYCLEVAKYYDEQTELNVDKEIQVLLQGLAYIPGFYYEKNVSYVEFLNRVRSGELKLQSQGLWDVPHPWLNLFIPKSQILDFNS

SEQ ID NO: 914 - protein, 386 aa, Synechococcus elongatus PCC 7942
MTAVSEFRPGLEGVPATLSSISFVDGQRGVLEYRGISIEQLAQQSSFLETAYLLIWGHLPTQQELTEFEHEIRYHRRIKFRIRDMMKCFPDSGHPMDALQASAAALGLFYSRRALDDPEYIRAAVVRLLAKIPTMVAAFQLIRKGNDPIQPRDELDYAANFLYMLTEREPDPVAARIFDICLTLHAEHTINASTFSAMVTASTLTDPYAVVASAVGTLAGPLHGGANEEVLDMLEAIGSVENVEPYLDHCIATKTRIMGFGHRVYKVKDPRAVILQNLAEQLFDIFGHDPYYEIAVAVEKAAAERLSHKGIYPNVDFYSGLVYRKLGIPSDLFTPVFAIARVAGWLAHWKEQLNENRIFRPTQIYTGSHNLDYTPIADRDLAIESD

SEQ ID NO: 915 - protein, 364 aa, Lycopersicon esculentum
MAIENNDQSFFLDVLYCEEEEEKWGDLLEDEEGVIINPLLLSSEGTTKTNSLLLLPLLLLEQDLFWEDEELLSLFVKEKETRCCFESFGSDPFLCSARVDVVEWILKVNAHYDFSALTAILAINYLDRFLSSLQFQKDKPWMTQLAAVTCLSLAAKVEETQVPLLLDFQVEDAKYVFEAKTIQRMELLVLSSLKWRMNPVTPLSFLDHIIRRLGLKNNVHWEFLRRCESLLLSVMIDCRFVRYMPSVLATAIMLHVIHQIEPCNAIDYQNQLLGVLKISKENVNNCYELISEVSSKPITSHKRKYDENPSSPSGVIDPIYTSESSNDSWDLDLPSFKKSKVQEQQMKMSSSLSRVFVEAVGSPH

SEQ ID NO: 916 - protein, 201 aa, Arabidopsis thaliana
MSGGGDVNMSGGDRRKGTVKWFDTQKGFGFITPSDGGDDLFVHQSSIRSEGFRSLAAEESVEFDVEVDNSGRPKAIEVSGPDGAPVQGNSGGGGSSGGRGGFGGGGGRGGGRGGGSYGGGYGGRGSGGRGGGGGDNSCFKCGEPGHMARECSQGGGGYSGGGGGGRYGSGGGGGGGGGGLSCYSCGESGHFARDCTSGGAR

SEQ ID NO: 917 - protein, 249 aa, Triticum aestivum
GHYRKSFNKKTLVPVRNSREIFDPTFRVWGQTGLKGLETPRNLQGSASSPPKLPTTRSAPEFRARSISADAAPSTRTGNLAMAAASSATSVHDFTVKDASGKDVDLSVYKGKVLLIVNVASQCGLTNSNYTELSQLYPKYKDQGFEILAFPCNQFGGQEPGTNDEIVQFACTRFKAEYPIFDKVDVNGNNVSPLYKFLKSSKGGLFGDSIKWNFSKFLVDKEGRVVDRYAPTTSPLSIEKDIKKLLGSS

SEQ ID NO: 918 - protein, 327 aa, Gibberella zeae PH-1
MAQFIPRQAFALPNSIPKTYYLGHHATAQSDMIKRLNTIHLILECRDLRLPLTTNNPILEHSLAGRERIVVFTKCDLTINKPEYVNALRKLYGDRFVLWNKESPDTTKALLRKVKEVARAIDPIAGMRAMIVGMPNVGKSSLLNTLRRSGLPQKLAKAAKTGGQPGITRKIGTSVRILETEGKDSRRGVGEGVFVLDTPGVFVPYVDNAETMIKIALVQGIKIGLVPAEVLVDYLLYRLNKLNPAFYKQYSKPTNSVEELLTSVAVKTAASVFLKDWRTGKLGKFMLEDLTDEAIEEHQQRMLNPPLSMNQAKKQQKEARAQERAGA

SEQ ID NO: 919 - protein, 228 aa, Nanoarchaeum equitans Kin4-M
MFDDCDIILEVMDARIPFPNKKIEKLNKIIIKVLNKADLVEAEELLSLYGDVYVSSRTRKGLRVLRNKIKEVAKNINKDKIIVCVAGFPNTGKSSLINALRGRHVAGTAPIPGKTKGIQLIKLSNKIYLKDTPGIFTLKDKELLTLIGSYSPEKLDNPIRVALKLIKLIFEDLQERFNIEAKDENEFLEKLSKKWRMPLRDTAVRLLSLWVNGKIKVKYPISITSSHH

SEQ ID NO: 920 - protein, 289 aa, Escherichia coli O157:H7
MEFSVLSNNLKMPMMGFGVFQVTDKNVCKQSVLNAIRTGYRLIDTAAVYGNEDAVGEAVREAISEGLCTREELFITSKLWVQDMLNQDTAAAGIEASLKKSGLEYFDLYLLHQAMRDYFSAWRALEDAYEEGKLKAIGVSNFYPHVLANFCETVRVKPMVNQVELHPYFAQPEALATMKYYNVQPEAWAPLGGGRHKPFENNLLQSIADAHQKSISQVILRWNIQRGVVVIPKSTHQQRIEENFAIWDFSLTEKEMAQISSLDLGYVGESVKHFNPEFVRGCLAVKIHD

SEQ ID NO: 921 - protein, 249 aa, Zea mays
RTPADPVGSPLSDNESGAAAAGGGGGCGSSVGYCGGGGGESPAKEQDRFLPIANVSRIMKRSLPANAKISKEAKETVQECVSEFISFVTGEASDKCQREKRKTINGDDLLWAMTTLGFEAYVAPLKSYLNRYREAEGEKAAVLGGGARHGEGGGAADDAGPLAAGGGAGDGVDRAGHDDDAHVGLMMGASSVGFGSGGGAAPSYYAAASRKAYGAGEGSKVMEFEGEEENVCVQSGRGSASLLHGAVQW

SEQ ID NO: 922 - protein, 426 aa, Nostoc sp. PCC 7120
MQHREFTGCIHTSCRLPISFIFMFNLNRRQFLLRSTLAIAATVSYDHVQAQKPKSPGTLPKGLPRRKVIVVGAGISGLVAAYELTAVGHDVTLLEASKRIGGRVLTLRGAFQGEDLLELGAARIPSNHHLTFGYIKHFGLKLSQFAPADGKYLTIKDGKRLLIPAKVLFQNQPQIRPQEIQKLTDGFDLLPKAFAQALTKEIKLDEPVARIVQTSNGVEVSCLSGQRYLGDYVLCTVPLTVLNQITFSPELSEEKKQAAAGGYNYRAATRGFVKFPNRFWERENLNGWGFFDDEELWHTTWDRPEKTGILHAYLKGEKGLEIDGFEGKTQQQKLLQHWEKILPGVSNYSVRSYFHSWTKDIWSKGGWAYPTDEQEKKLFPELGKSEGKIYFAGEHTSKTRGWLQGALESGLKAAQEIHFAGSTAPR

SEQ ID NO: 923 - protein, 331 aa, Methanosarcina acetivorans C2A
MKLAVIEGDGIGREVIPAAVEVLDAFGLELEKVSLELGYARWERTGSAISEEDIATIKGCDAVLFGAVTTVPDPSYKSVLLTIRKELDLYANVRPVKPLPGITGVTGRNDFDFIIVRENTEGLYSGIEEIGPDLSWTKRVVTRKGSERVAEYACKLAKQRKNKLTIVHKSNVLKSDKLFLDVCRQVASSHGVEYGDMLVDSMAYSLMMRPDKYDVVVTTNIFGDILSDMCAALVGSLGLVPSANIGEKYAFFEPVHGSAPDIAGKGIANPLAAILCVKMLLEWSGRGKEAALIDRAISYILEKKLITPDLGGVSTTAEVGQTVAKYVMQNL

SEQ ID NO: 924 - protein, 508 aa, Triticum aestivum
  misc_feature (129)..(129): Xaa can be any naturally occurring amino acid
  misc_feature (184)..(184): Xaa can be any naturally occurring amino acid
  misc_feature (195)..(195): Xaa can be any naturally occurring amino acid
  misc_feature (209)..(209): Xaa can be any naturally occurring amino acid
  misc_feature (229)..(229): Xaa can be any naturally occurring amino acid
  misc_feature (242)..(242): Xaa can be any naturally occurring amino acid
  misc_feature (253)..(253): Xaa can be any naturally occurring amino acid
  misc_feature (264)..(264): Xaa can be any naturally occurring amino acid
MQSEIWLLWATLAAALLFYLTSAARRGGTGARQPRGPTPLPVLGNVLDLGGNLHHTLARLARVHGPVMKLKLGLVTIVVVSSRDAAREAYTRYDRHLAARAVPDAANAVGNSGRSMIWLPSSDPLWKTXLRGIVASHIFSPRGLAAARGVRERKVRDMVGYFRCHAGEELDVGQAVYGGVLNLXVSSAFFSVDVXVDVGSESASGLREXVEDIIAALTNPTLRIFPFLXRPLDLQGWRRWAXARYQKVFGIFXGIVDRRLANPXTSKGEHAHGDFLDSLLELVSAGKIGRDKVTVILFDVFAAGTDTMAITVEWAMAELLRHPHAMAKVRAEMADILGGKGTDTLEEPDAANLPYLQAVVKEVMRLHPVAPLMLPHQAAEDGVEIGGYAVPRGATVIFNVWAIMRDPAAWERPDEFVPERFLLDKAVDRAVEFRGKDYEFIPFGSGRRLCPGLPMAERVVPFVLASLLHAFEWRLPDGVSADEMDVTEKFTTVNTLAVPIRAVPVVVT

SEQ ID NO: 925 - protein, 513 aa, Zea mays
  misc_feature (404)..(404): Xaa can be any naturally occurring amino acid
  misc_feature (422)..(422): Xaa can be any naturally occurring amino acid
MATCATDLAPLLGPAAANATGYLCSQFADTASAVDATYLLFSAYLVFAMQLGFAMLCAGSVRAKNTMNIMLTNVLDAAAGALFYYLFGFAFAFGTPSNGFIGRHFFGLQRLPRTGFDYDFFLYQWAFAIAAAGITSGSIAERTQFVAYLIYSAFLTGFVYPVVSHWFWSADGWAGASRTSGPLLFGSGVIDFAGSGVVHMVGGIAGFWGALVEGPRIGRFDHAGRSVALRGHSASLVVLGTFLLWFGWYGFNPGSFTTILKSYGPAGTVHGQWSAVGRTAVTTTLAGSVAALTTLFGKRLQAGHWNVVDVCNGLLGGFAAITAGCSVVEPWAAVVCGFVSAWVLIGANALAARLRFDDPLEAAQLHGGCGAWGVLFTGLFARQEYVEEIYGAGRPYGLLMGGGXGKLLAAQIVQIVVIAGWXVSCTMGPLFYALKRLDLLRISADDEMSGMDLTRHGGFAYEDPGDNAGVGEFTLKSAQNRVEPPAEQQPGVKFRNEFKNRDEVTCLPKKKKK

SEQ ID NO: 926 - protein, 120 aa, Lactobacillus johnsonii NCC 533
MALDTEKIIEDLKGASILELNDLVKAIEDEFGVSAAAPVAAAGAAGAGAEKTEFDVELTDVGQEKVKVIKVVRDITGLGLKDSKDLVDGAPKNVKEGVSEDEANDIKAKLEEVGATVTVK

SEQ ID NO: 927 - protein, 417 aa, Candida albicans
MMNIDQHHQLQQQHQQQMLQQQAQAQAQAQAQAQQQQQAAAAAAAANAAATTSSSSPRQVSFNVSDHYQILEIVGEGAYGIVCSAIHKPSQQKVAIKKIEPFERSMLCLRTLRELKLLKHFNHENIISILAIQRPINYESFNEIYLIQELMETDLHRVIRTQNLSDDHIQYFIYQTLRALKAMHSANVLHRDLKPSNLLLNSNCDLKICDFGLARSIASQEDNYGFMTEYVATRWYRAPEIMLTFQEYTTAIDVWSVGCILAEMLSGRPLFPGRDYHNQLWLIMEVLGTPNMEDYYNIKSKRAREYIRSLPFCKKIPFSELFANTNNNTSTSNTGGRTNINPLALDLLEKLLIFNPAKRITVEDALKHPYLQLYHDPNDEPISDKIPEDFFDFDKMKDQLTIEDLKKLLYEEIMKPL

SEQ ID NO: 928 - protein, 429 aa, Vibrio vulnificus YJ016
MDFIMDLAFDRQHIWHPYTSTLTPLTCYPVNSASGVYIKLEDGTTLIDGMSSWWSTIHGYNHPHLNQAAHRQIDQVSHVMFGGITHQPAINLCKKLLSLAPNNLEHVFLADSGSVAVEVSLKMALQYWHAKGDRRPKFLTLQHGYHGDTFAAMSVTDPDNSMHSLYKGFLPEHIFAKSPTGGFWDEWKPEDLTDFAQKIEQHHQELAAVILEPIVQGAGGMRIYHPEFLKGVRALCDQYGLLLIADEIATGFGRTGKLFACEHANIQPDILCVGKALTGGYMTLSATLTSKHVADTVCGGEAGCFMHGPTFMGNPLACAVATASLELIEQGQWQQQTKQIESLFSELLPKLDKYDLVKNTRWLGAIGVVETHRPVNMETIQALFVEQGVWIRPFGKLIYMMPPFIGEPAHIEQLVNAIETALQRAECFV

SEQ ID NO: 929 - protein, 482 aa, Pseudomonas fluorescens PfO-1
MNFPTTLDGLYINGQWSAGREHLRVINPATEALLTTVNGGDESAVHQAVTAATEAFKAWSKTTGAERASILRNIANGVRNGREHLMNLQSSNNGKPQFEAGIDVDDVIATFEYYAELAEGLDAKLDSNVPLPSDDFSARLRREPCGVVGLIVPWNFPMVTTAWKLAPALAAGCCVVLKPSEVTPLPELELATIIAESGLPKGVFNLVCGTGLAVGAPLSADPRIAKVSFTGSNAVGVQVMQRAAETVKGVSLELGGKSSLLILEDADLDLAVELACGGGFFNAGQMCSATSRVLVADELADEFLIRLKAHAEKIRVADPFDPEVEMGALVNQAQYQRVLGHIDRGLSAGAKLICGGNRPADLPRGYFLQPTIFTEVPLDSALWCEEIFGPVICVRSFATEAEAIALANDSQFGLVASVVTRNAETADRVANALQAGLVWLNAPQVIFPQTAWGGYKQSSIGRELGPWGLAAFQEIKHVIRAL

SEQ ID NO: 930 - protein, 454 aa, Oryza sativa (japonica cultivar-group)
MGNCFGSDDGEVEAVKVMARHALPQAAMARPVMVAIAQPNARVAMSPGRPPTGKLPSQATATSTGGGRSVAGGGGRTNAGGDASAEGRILEAPNLRIFTFAELRAATRNFKADTVLGEGGFGRVHKGWVDERTMSPARSGSGMAVAVKKLDPESLQGVQEWQSEVNFLGRLSHPNLVRLLGYCWEDKELLLVYEYMAQGSLENHLFRKGGSASPQQPLSWSLRLRIAIGAARGLAFLHSSEKHVIYRDFKASNILLDTQFHAKLSDFGLAKDGPAGGSSHVTTRVMGTYGYAAPEYVATGHLYVKSDVYGFGVVLLELLTGLRALDAGRPSGQHHLVDWAKPFLSDRRKLARLMDPRLEGQYSSRGAQRAAQLTLRCLAADHKNRPSMREVVAVLEEIESMSRGGSGGGAPGSASPRPAARGGGGGGAHGYGQSPRPGSDWAGPAAGHPSPRVR

SEQ ID NO: 931 - protein, 175 aa, Oryza sativa (indica cultivar-group)
MGPTVMASSATSVAPFQGLKSTAGLPVSRRSTNSGFGNVSNGGRIKCMQVWPIEGIKKFETLSYLPPLTVEDLLKQIEYLLRSKWVPCLEFSKVGFVYRENHRSPGYYDGRYWTMWKLPMFGCTDATQVLKELEDAKKAYPDAFVRIIGFDNVRQVQLISLIANKPPGRAEFGGN

SEQ ID NO: 932 - protein, 322 aa, Mycoplasma penetrans HF-2
MKKIAILTSGGDASTMNKCLSTFITYASKYNCEVVFVKNGYKGIYDNEFVKPDYTETKSWWSLPGTKIYSSRFPEILDEQVRKQMVDNLHKNSIDTLVVIGGDGSYKGARLLSKSGIKVIGLPGTIDNDIASTSYSIGFDTSLNAIVNSIKEIKSCMDSHANVAMIEIMGRHCIDLTVFAGIATEADIIITPESFYTPQQLLAKINEKRKTNSRGIIILYVELLLGTENIPTVEEYIKYIQANSKESVKKNILGYLQRGGNPTAMDMIRASLMTEHALKMISENQYNKIIGVDEFKVVSYDLETAINMKNPSRKDLIDKFFN

SEQ ID NO: 933 - protein, 122 aa, Triticum aestivum
HVDYACTPEEVQQHFNSCGTVNRVTILTDKFGQPKGFAYVEFVEAEAIQEAVKLSESELHGRQIKVAPKRTNVPGLKQPRGGRGFNPYGGHPYMRPYPPPFYNPYGGYGRAPRFRRPRRPFY

SEQ ID NO: 934 - protein, 334 aa, Bordetella pertussis Tohama I
MTTAALPYPLDPQIQRFVERMQADSAAHPRRDLVPVEQAHAISEAVRRPWAEGGPQMARTREIHVPTPHGPVRLRVYTPRAARPGPALLYVHGGGWVLFSLDTHDRLMREYAERAGLTVIGVDYTRAPEARYPRAIEEIVGVIDWLDAHGAELEVDRARLCIGGDSAGANLSVAACLTLRERGAAPLAGMVLNYGVYDANLFRDSTVKYGGGEYLLSTQQMVWFYWNYLRAGDDPRDPRISPVHADLRGLPPAFMAITELDLLHDTNQDMAARLREAGVDVQAKVYPGTVHSFLEAVSLAQVSVAAFDDTAAWLRAVLRPDAAAAAIHTGEHQP

SEQ ID NO: 935 - protein, 168 aa, Triticum aestivum
  misc_feature (113)..(113): Xaa can be any naturally occurring amino acid
  misc_feature (118)..(118): Xaa can be any naturally occurring amino acid
  misc_feature (151)..(151): Xaa can be any naturally occurring amino acid
DATAPVAGAEAVVAGAGEQAGISAVIPGWFSEISPMWPGEAHSLKVEKVLFQGKSDYQNVMVFQSSTYGKVLVLRRIIQVTERDDCAYQEMITTCPFAPSKDPKEVWLLGGGXGVLLXVQRHTPWDQIDICEMINGGNSQTIFPQPTVGLXPRVSLHIGDGFLKNLRR

SEQ ID NO: 936 - protein, 386 aa, Acidithiobacillus ferrooxidans
MAEPNFAPGLEGVAATQSSISNIDGAAGLLSYRGFAIADLAAHSSFEEVALLLLDGVLPGAADLERFDHGLRAHRQVKYNVREIMKFMPVTGHPMDMLHCAVASLGMFYPQQELSDAERGNTLHLDAMAMRIIARMPTIVAMWEQMRFGNDPISPRPDLSHAANFLYMLSGREPDPAHTKILDSCLILHAEHTINASTFSVLVTGSTLTNPYHVIGGAIGTLAGPLHGGANQKVVEMLEEISSVQQVGAYLDRKMANKEKIWGFGHRIYKTRDPRAVILKGMMEDMASHGNLRHSSLFEIAIEVERQATERLGAQGIHANVDFYSGVLYHEMGIKADLFTPIFAMARSAGWLAHWREQLADNRIFRPTQVYTGEQDRRYVPVAQRT

SEQ ID NO: 937 - protein, 288 aa, Gibberella zeae PH-1
MASQPSLLAATAKLNNGLIIPRIQLGLYMMSTREATDSVRQGLLTGYRAFDCAQMYHNERQAGKAINDFLAGSENTSGLKREDIWYTSKLASCDTSYDIVRRSVKKSVEASGLGYIDLFLLHSPYGGKEARLTSWKALEDAVDAGEIRAAGVSNYGSAHIEELMASNPRIAPVINQIEVHPFNTQEDIRATCAKHNIAIEAYAPLARAERMDHPAILDMAKKYSVTPAQIFVKWGLQHDFITLPKSTKQKRMIENASVDGFEISESDMKTLDGLDEHLVTDWDPTDAP

SEQ ID NO: 938 - protein, 291 aa, Triticum aestivum
  misc_feature (199)..(199): Xaa can be any naturally occurring amino acid
MGGLSMEHPWAFAFGLLGNVISFSSLLAPIPTFYRIFKSKSTEGFQSVPYVVALFSAMLWIFYALVKTGEGLLISINAAGCVIETVYIVMYLVYADRKAKIFTAKIVVLLNIAGFGLIFLLTLFAFHGETRVVSLGWICVGFSVCVFVAPLSIIGRVIKTKSVEYMPFTLSLTLTLSAIVWFLYGLLIKDKYVALPNIXGFTFGVIQMVLYVFYMNKTPVASQVKEGKEAWKAPAEDHVVRDQRPARPTRARAPEVRPVTEMAAAVDVPRRCAAEAAATPGVDFARSVDVV

SEQ ID NO: 939 - protein, 125 aa, Methylococcus capsulatus str. Bath
MAVSKEDILETISNMTVMEIVDLISAMEEKFGVSAAAAVAVAPVAAGAAAPAVEEKTEFDVVMTSFGANKVNVIKAIREITGLGLKEAKDLVEGVPSTVKEGISKAEADDIKKKLEEAGAAVDVK

SEQ ID NO: 940 - protein, 162 aa, Triticum aestivum
  misc_feature (53)..(53): Xaa can be any naturally occurring amino acid
  misc_feature (100)..(100): Xaa can be any naturally occurring amino acid
  misc_feature (128)..(128): Xaa can be any naturally occurring amino acid
MSDSEEHHFESKADAGASKTYPQQAGTVRKNGFIVIKNRPCKVVEVSTSKTGXKHGHAKCHFVAIDIFNGKKLEDIVPSSHNCDIPHVNRTEYQLIDISXEDGFVSLLTSDGNTKDDLRLPTDETLWXQIKEGFESGKDLVVTVQSAMGEEQICALKDVGPK

SEQ ID NO: 941 - protein, 422 aa, Xenorhabdus nematophila
MRPSDIEFDLRHIWHPYTSMIRPFPAYPVVSATGVELVLSDGRKLIDGMSSWWAAIHGYNHPVLNEAAKSQIDKMSHVMFGGITHPPAVELCKQLVALTPDSLECVFLADSGSVAVEVALKMALQYWQARGEKRQRFLTLRHGYHGDTFGAMSVCDPDNSMHSLYNGYLPNHLFADAPTCQFDDEWQPEDIDSFKRLLRQYHAEITAVVLEPIVQGAGGMRIYHPEYLRQVRQLCDEHQILLIADEIATGFGRTGKLFACEHAQIEPDILCLGKALTGGYMTLSATLTTRHVAEIISQGEAGCFMHGPTFMGNPLACAVASASLKLLSESSWQQHIQSIETQLKTELLPLKIHHSVKDVRVLGAIGVVEMKQPVDVASLQRHFVQQGVWIRPFGRLIYLMPPYIIQSEQLSQLTTAIVDAIN

SEQ ID NO: 942 - protein, 215 aa, Desulfovibrio vulgaris subsp. vulgaris str. Hildenborough
MQFFIDTANLDEIREAARLGLVDGVTTNPTLMSREGHDWRDVAAAICREVDGPVSLEAVGNTADELVAMGLELVRFGPNVVVKVPMTTEGLKAVRILSGQGVDCNVTLVFSPMQALLAAKAGAAFVSPFVGRLDALSEDGMQLVAETLTIFRNYAMPTRVIVASIRHPMHVSRAALLGAHIATIPFGVLGQLAAHPLTDAGLAAFDRDWARLNGK

SEQ ID NO: 943 - protein, 437 aa, Thermosynechococcus elongatus BP-1
MAIAIQNAVICTPEGELRQQQVRLEGDRIAEVAETVTVNPSDTVIDATGLTLLPGVIDPQVHFREPGLEHKEDLFTASCACAKGGVTSFLEMPNTRPLTIDQASLENKLARAAAKCVVNYGFFIGATKDNLAVLNTVHPVCGIKIFMGSMHGPLLVDEEPILDRIFSEGKRLIAVHAEDQGRIRARREQFAGITDVAIHSQIQDEIAALNATQLAVTLSRKYERRLHILHLSTGIEVDFLREHKRPWITVEVTPQHLLLTTEAYAKIGSLAQMNPPLRTAVDNKKLWQGLLDGVIDFIATDHAPHTLEEKAQPYPQSPSGMPGVETSLPLMLTQAMAGRCTVPQVVRWMSTAVAAAYEIPNKGKIAPGYDADLVLVDLHTYRPVRREELLTKCGWSPFEGWSLTGWPVYTFVNGEVVFSQGRVNTSVRGRALKFGLG

SEQ ID NO: 944 - protein, 248 aa, Zea mays
  misc_feature (92)..(92): Xaa can be any naturally occurring amino acid
  misc_feature (109)..(109): Xaa can be any naturally occurring amino acid
  misc_feature (147)..(147): Xaa can be any naturally occurring amino acid
  misc_feature (168)..(168): Xaa can be any naturally occurring amino acid
  misc_feature (191)..(191): Xaa can be any naturally occurring amino acid
  misc_feature (216)..(216): Xaa can be any naturally occurring amino acid
  misc_feature (237)..(237): Xaa can be any naturally occurring amino acid
MARSRREGDAGGEERKLVLGKYELGRLLGQGTFAKVYYARDLSAAAGTGSTSVAIKVIDKARLRRMEGMMEQLRREISIMRMVRHPNVVGIXEVLASRSRVFVVMEYAXGGELFAKVARGRLTEDHARRYFQQLVAAVGFCHRRGVXAHRDLKPENLLLDEDGRLKVXDFGLAALPEQLRHDGLLHTQCGXPPAYVAPEVLRKRGYDGARADLWSXAAVVLYVLLCGFLPFQHDNCXKMYPEIFKAEY

SEQ ID NO: 945 - protein, 364 aa, Candidatus Blochmannia floridanus
MNNNTYHIAILPGDGIGPEIMQQAYKILNTVKNKFKINIITTEYKVGGNALDLEGSPLPKDTIKNCEKSNAILFGAVGGPKWNNINETSRPEFGALLTLRKHFNLFINLRPIYLPIELINLSPLKPEIISQGLDMICIRELIGGIYFGKPQGKSGIRSQEHAFDTAIYHRFEIERIAHFAFKLAQKRRKHVTSIDKANVLHTSMLWRKVVSEVASNYPNVHLQHLYVDNASMQLIRNPSAFDVILCPNLFGDILSDECAEINGSIGILPSASLNEHNFGLYEPAGGSAPDIAGKNIANPIAQILSTALLFRYSLKLNHVAITIEKAVYKALTLGYRTQDIAYNKQKSVNTDDMGDIIASLIYKL

SEQ ID NO: 946 - protein, 402 aa, Pseudomonas aeruginosa UCBPP-PA14
MDNLNSAVQVLIHGSNTLFILLGAVMVLAMHAGFAFLEVGTVRLKNQVNALSKILSDFAISALAYFFVGYWIAYGVTFFHPAAALTVDSGYALVKFFFLLTFAAAIPAIISGGIAERARFGPQLCATALIVAFVYPFFEGLVWNGNFGLQEWLKLEFGAPFHDFAGSVVVHALGGWLALAAVLLLGSRNGRYRDGKLVAMAPSSIPFLALGSWILIIGWFGFNVMSAQTLAGVSGLVAVNSLLAMVGGTMASLLIGRNDPGFLHNGPLAGLVAVCAGSDLMHPIGALATGLVAGALFVWAFTATQVRWKIDDVLGVWPLHGLCGVWGGIACGIFGQQALGGLGGVSLASQALGSLLGVTVAFAGGLLVYGLMKALLGIRLSQEEEYYGADLSIHKIGAISHE

SEQ ID NO: 947 - protein, 377 aa, Thermus thermophilus
MEVARGLEGVLFTESRMCYIDGQQGKLYYYGIPIQELAEKSSFEETTFLLLHGRLPRRQELEEFSAALARRRAMPAHLLESFKRYPVSAHPMSFLRTAVSEFGMLDPTEGDISREALYEKGLDLIAKFATIVAANKRLKEGKEPIPPREDLSHAANFLYMANGVEPSPEQARLMDAALILHAEHGFNASTFTAIAAFSTETDLYSAITAAVASLKGPRHGGANEAVMRMIQEIGTPERAREWVREKLAKKERIMGMGHRVYKAFDPRAGVLEKLARLVAEKHGHSKEYQILKIVEEEAGKVLNPRGIYPNVDFYSGVVYSDLGFSLEFFTPIFAVARISGWVGHILEYQELDNRLLRPGAKYVGELDVPYVPLEARE

SEQ ID NO: 948 - protein, 501 aa, Lotus corniculatus var. japonicus
MALPECSAANLAQLIGPNATDAAAVAGFICDQFTAVGQRFSDTAFAVDSTYLLFSAYLVFSMQLGFAMLCAGSVRAKNTMNIMLTNVLDAAAGGLFYYLFGFAFAFGAPSNGFIGRHFFGLKDVPTVAFDYSYFLYQWAFAIAAAGITSGSIAERTQFVAYLIYSSFLTGFVYPVVSHWFWSGDGWASATNTGNLLFGTGVIDFAGSGVVHMVGGVAGLWGALIEGPRIGRFDHAGRAVSLRGHSASLVVLGTFMLWFGWYGFNPGSFTKILSAYDSGNYYGQWSAIGRTAVTTTLAGCTAALTTLFGKRIISGHWNVTDVCNGLLGGFAAITAGCSVVEPWAAIVCGFVAAVVLIACNMLAEKVRYDDPLEAAQLHGGCGAWGIIFTALFAKEEYVNQVYPGKPGRPYGLFMGGGGKLLGAHVIQILVIIGWVSATMGPLFFILNKMKLLRISTEDELAGMDLTRHGGFAYAYEDDESHKPGIQLRKIEPNSSSTPSAES

SEQ ID NO: 949 - protein, 159 aa, Arabidopsis thaliana
MEKTDEERKKAQMLDARARNISHNVRCTECGSQSIEDSQADIAILLRQLIRNEIGAGKTDKEIYSKLEDEFGETVLYAPKFDLQTAALWLTPVIIAGGTAAGIVYQKHRLRKNVDIMALNLIRGVPLTPKERVTILDVLIPPSPPPQGVVSRLRRWLNR

SEQ ID NO: 950 - protein, 142 aa, Brassica napus
  misc_feature (133)..(133): Xaa can be any naturally occurring amino acid
  misc_feature (141)..(141): Xaa can be any naturally occurring amino acid
MTTASVIIIGAGISGITAAKELAEKGVEDVLILEATDRIGGRIQKQSFGDVSVELGAGWIAGVGGKESNPVWELASRLNLRTCFSHYTNARYNIYDRSGEIFPTGFAADSYKKAVDSAIQKLKSLEAECDGKXAEEAPSSXK

SEQ ID NO: 951 - protein, 354 aa, Zea mays
HASAHASAHASAHASDSGRLGEDEARIYFHQLINAVDYCHSRGVYHRDLKPENLLLDSHGTLKVSDFGLSAFAPQTKEDGLLHTACGTPNYVAPEVLADKGYNGMAADVWSCGIILFVLMAGYLPFDDANLMRLYKLICHATFSCPPWFSSGARKFIKRILDPNPDTRIKIAEILEDEWFKKGYKPPHFEQGEDVNLDDVDAAFNDSEDRLVAEKREKPESMNAFALISRSQGFNLGNLFEKEMMGVVKRETSFTSQCTAQEIMSKIEDACGPLGFNVRKQNYKMKLKGDKSGRKGHLSVATEVFEVAPSLHMVELRKTGGDTLEFHNFYKNFSSELKDIVWKAESDASMKQTK

SEQ ID NO: 952 - protein, 360 aa, Synechococcus elongatus PCC 7942
MAVRKLGVLTSGGDCPGLNAVIRAIARHAVGNYGWELWGIAYATQGLLKRQAIALSPHHFDRQSLDPLLCSGGTILGSINRGDTLAHQAEILAGYQELGLDALIGIGGDGSLAILRQLAEAGRWQFIGIPKTIDNDVALTERAIGFDTAIHTVAEALLSLGSTAASHDRIMIAEVMGRQSGHLALQGGIAGGADVILLPEIPYRLLELCHYLQQLRDRWQRRYAVIAIAEGTHHPPEVTQGPGSLGEQLVQAITAQDPTLDARVTVLGHVQRGGNPVASDRLLATQMGYAAVERLAAGASGEMMAWQGGRVVSVPLEAVCLQSPTLVDPHSPLVDTAAGLGIFLGDRSLTPWRGSACPTH

SEQ ID NO: 953 - protein, 155 aa, Glycine max
VGRSLFGGLSNSSPGLFTTLHEMTCKNMFSQQQRTFIQMRTVLKVVDNSGAKKVMCIQALKGKKGARLGDTIIASVKEAHPNGKVKKGKVVYGVVVRAAMQKGRCDGSEVKFDDNAVVLVDKQGQPIGTRVFGPVPHELRQKKHVKILTLAGHNA

SEQ ID NO: 954 - protein, 449 aa, Bradyrhizobium japonicum USDA 110
MSTRTSRVLHRSLRETPPKAIGGEGIYLFAEDGRRVIDASGGAAVSCLGHQHPRVIAAMAKQASTLAYAHTAFFSSEPAEALAETLVGHEPGGLAYAYFVSGGSEAIEASIKLARQYFIERGEPQRQHFIARRQSYHGNTLGALAAGGNAWRRAPYAPLLSAAFSHVTPAFAYHEKHDGESDAQFVARLAAELEAEFQRLGPNSVAAFLAEPVVGATAGAVTAPDGYFRAVREICDRHGALLILDEVMCGMGRTGTTHAWEQEGVAPDIQAIAKGLGGGYQPIGAMLASGRIIDTIRSGSGAFQHGHTYLAHPLACAAALAVQDVIREDGLLDRVKERGKQLEQRLTERFGNHRHVGDIRGRGLFWAIELVADRASRTSFDPALKLNQKIKAEAFANGLGCYPGGGTVDGVRGDHVLLAPPYIASVAEIDLIVDKLGTAVDNVLRSVNH

SEQ ID NO: 955 - protein, 131 aa, Triticum aestivum
  misc_feature (55)..(55): Xaa can be any naturally occurring amino acid
  misc_feature (92)..(92): Xaa can be any naturally occurring amino acid
  misc_feature (107)..(107): Xaa can be any naturally occurring amino acid
  misc_feature (128)..(128): Xaa can be any naturally occurring amino acid
MVLEAVMVVVDNSESSRNGDYTPTRFEAQSDAVSMIFTVITEANPESSVGLMSMXGKGPEVLVTLTTDYGKILEGLHRTKSKIRGEGHLATXIQVAGLTLKHRQNNXQRQLSSFYCNSIPEDEKTLQXGKK

SEQ ID NO: 956 - protein, 311 aa, Saccharomyces kudriavzevii IFO 1802
MLRTTVRTLRQRAFFHRSFVHVNLPELHSAIQDAQTTCYCQSINARLPSTTDPLDPQIKLPHRTPNYNKHVLLVSPGDKLAQPWKIAWNHNLDTNLNRPYNAIGKLRSYLRNSPGILINAVHLQNEFVPRPKEGDKWLFFFVIPDMKLYKIRETDLEEFASFLDEGVVQAPRLSFQDYLIGKAKVPQETQQVHHKNLTKFQGDIFLRDWSLVCGHYKRDAKCGEMGPDIIAAFQDEKLLTDNNLGLISHVGGHVFAGNVIFYKLFKAENALNKLDSLWFGKVYPHNLKLLCENLENGKIIDEMYRGGISMN

SEQ ID NO: 957 - protein, 128 aa, Brassica napus
  misc_feature (10)..(11): Xaa can be any naturally occurring amino acid
MAIATETQHXXREKEASSAAAQKRWNLSDFDIGKALGRGKFGHVYLAREKRSNHIVALKVLFKTQLQESQVEHQLRREVEIQSHLRHPNILRLYGYFYDQKRVYLILEYAARGELYKELQKCKYFSER

SEQ ID NO: 958 - protein, 117 aa, Nicotiana glauca
MAKVALLVVVCMAAVSVMLTPHADAAISCGQVVSSLTPCISYVTKGGAIPAPCCNGIESLNNQATSTPDRQTACNCIKSAAASIKGINFSLAGSLPGKCGVNLPYKISPSIDCSTVQ

SEQ ID NO: 959 - protein, 506 aa, Azotobacter vinelandii
MRYAHPGSEGAIVSYKVRYGNYIAGQFVPPVKGQYFTNSSPVTGEEFTEFPRSTAEDIEKALDAAHAAAGAWGRTSVQERAAVLLKIADRIEQNLEVLAVTETWDNGKPVRETLNADVPLSADHFRYYAGCIRAQEGSAGEINENTVAYHFHEPLGVVGQIIPWNFPLLMAAWKLAPALAAGNCIVLKPAEQTPLSITVLVELIGDLLPPGVLNIVQGFGREAGEALATSKRIAKIAFTGSTPVGAHILKCAAENIIPSTVELGGKSPNIFFEDIMQAEPAFIEKAAEGLVLAFFNQGEVCTCPSRALIQESIYDDFMKVVMKKVGQIKRGHPLDTDTMVGAQASSQQFEKILSYLEIARGEGAEVLTGGAAERLEGSLASGYYIQPTLLKGHNKMRVFQEEIFGPVVGVTTFKDEAEALAIANDTEFGLGAGLWTRDINRAYRMGRGIQAGRVWTNCYHLYPAHAAFGGYKKSGVGRETHKMMLDHYQQTKNLLVSYDINPLGFF

SEQ ID NO: 960 - protein, 117 aa, Nicotiana glauca
MAKVALLVVVCMVAVAVMLTPHADAAISCGQVVTSLTPCINYVRQGGAIPAACCSGIKTLNSQATSTPDRQTACNCIKSAARSISGINFGLASSLPGKCGVNLPYKISPSIDCSTVQ

SEQ ID NO: 961 - protein, 79 aa, Glycine max
NFLYMLDSFGNRSYKPNPRLTRVLDIIFILHAEHEMNCSTSAVRHLASSGVDVYTAIAGAVGALYGPLHGGANEVAISS

SEQ ID NO: 962 - protein, 236 aa, Zea mays
  misc_feature (81)..(81): Xaa can be any naturally occurring amino acid
  misc_feature (170)..(170): Xaa can be any naturally occurring amino acid
SDSDHCHSARYYLKDAVLDGGIPFNKAYGMTAFEYHGTDPRFNRVFNEGMKNHSVIITKKLLDFYTGFEGVSTLVDVGGGXVGATLHAITSRHPHISGVNFDLPHVISEAPPFPGVRHVGGDMFASVPAGDAILMKWILHDWSDAHCATLLKNCYDALPEKGGKVIVVEXCVLPVSTEAVPKAQGVFHVDMIMLAHNPGGRERYEREFRDLAKAAGFSGFKATYIYANAWAIEFIK

SEQ ID NO: 963 - protein, 117 aa, Nicotiana glauca
MAKVALFVVVCMAAVAVMLTPHADAAIFCGRVVSSLIPCINYVIKGGAIPAPCCNGIKSLNNQATSTPDRQTACNCIKSAAASIKGINFSHAGSLPGKCGVNLPYKISPSIDCSTVQ

SEQ ID NO: 964 - protein, 102 aa, Glycine max
  misc_feature (65)..(65): Xaa can be any naturally occurring amino acid
EFGTRQLHSIFLHVRKVRRMAGVRDAKSILVRLEWFLNWVTFFVARSAPHILITAKLVKDAHKFXKGMELPLALCGQGGDDFAYTGLGIGLLKTLRERENPR

SEQ ID NO: 965 - protein, 112 aa, Nicotiana glauca
MAKVALLVVVCMVAVAVMLTPHADAAISCGQVVTSLTPCINYVRQGGDIPTACCSGIKTLNSQATSTPDRQTACNCIKSAAGSISGINFGLASSLPGKCGVNLPYKISPSID

SEQ ID NO: 966 - protein, 363 aa, Geobacter sulfurreducens PCA
MARKVGILTGGGDCPGLNAVIRGVVKSSIIRRGWEVVGIRDGFDGLLYNNRIVPLGLNEVRGILPRGGTILGTSNRGNPFSYPVEADGKTVLTDVSDEVVANIKKQGIDALVAVGGDGSLKIALELMNKGIPVVGVPKTIDNDLMETDVTFGYNTALETATDALDKLHSTAESHHRVMIMEVMGRYAGWIALESGISGGADVILIPEIPYDISAVCRAVDERRRRGSSFSIIVVAEGAFPRGGNRVVQKRADETNTIERLGGIGQYVARQLGDCLDMDVRVMVLGHLQRGGSPSTFDRCLGSRFGVAAIDLIEQEQYGRMVCLRGRDIKSVSIERAVRKLKLVNPGGQMVTAAEELGIVVGRR

SEQ ID NO: 967 - protein, 190 aa, Microbulbifer degradans 2-40
MKKSFIRAFANTAITAVAFSVSCAVYAGSLVLTSSDIGDGKHMAKTQEYTGFGCAGGNLSPQLSWRGAPEGTKAFALLVHDPDAPTGSGWWHWQVVNIPAGTTSLPAGAGAVNSKLLPKGASQNTNDYGEKAFGGACPPVGHGVHRYRFTLHALSKPLELPENASAALTGYMVKAHTIEEATIEALYKRD

SEQ ID NO: 968 - protein, 490 aa, Bacillus subtilis subsp. subtilis str. 168
MSQTLFIDGEWISAEKEQIRSIINPFNQEEIATVSEGGREDAIKAIAAARRAFDKGEWSSLSGLERGKIVLKIAELIRRDLEELAELESLDTGKTLEESKADMDDIANVFQYYAGLADKDGGEIISSPIPDSESKIIREPIGVCGQITPWNYPLLQASWKIAPALAAGNTIVMKPSEITPLTTIKVFKLMEEAGVPKGVANLVLGPGATVGDELAVNKDVDLISFTGGIETGKKIMRAASGNVKKIALELGGKNPNIVFKDADLEVAVDQALNAVFFHAGQVCSAGSRLLVEDAIHDQFLAELVKRAKRIKLGNGFHAETESGPLISAEHRAKVEKYVEIGIEEGAKLETGGKRPEDPELQNGFFYEPTIFSNCNSDMRIVQEEVFGPVLTVETFSSEEEVIELANDTIYGLAGAVWSKDIEKCERVAARLRMGTVWINDFHPYFAQAPWGGYKQSGFGRELGKIGLEEYTEVKHVYRNTKPAAVNWFNS

SEQ ID NO: 969 - protein, 157 aa, Griffithsia japonica
MSATKLSDLQGLKDIEGGAIDPSRFAGKVVFAMNVASACGYTKPGYELLKRLTDKFAPADFVAVAIPCNSFLWQESGSAEDVKTFALARADKLLVTEKAAVNGNHPHPIVALAKQAFPGRVMWNFDGRFVFDRNGVPVARFGNSAKPEEIEAAIANA

SEQ ID NO: 970 - protein, 323 aa, Mesoplasma florum L1
MKRIGVLTSGGDAPGMNNAIAGVVKAAEAQGIEVYGVRDGYKGLINGWFEKLDSKFALEIISKGGTVLGSARLPEFKEESVRQKAVDQLKAHDIEALVVIGGDGSYMGAQRLTEMGINCIGLPGTIDNDIVSSDYTIGFDTALNTVIESVEKVRDTMQSHNRAAVIEVMGNGCGDLVTYAAIATQAEIFSPSESKLTVEQICEQAKKFAEANHRSLIILISEKQLDANELAKKVEEASGYVTRATILGHVQRGGRPSGMDRYLAFTAAIYAVEKLIEGKGGLYIGLSENKLVARDIESTLNMPKPDKTEFIEKIRLLNAKISK

SEQ ID NO: 971 - protein, 278 aa, Glycine max
  misc_feature (224)..(224): Xaa can be any naturally occurring amino acid
  misc_feature (238)..(238): Xaa can be any naturally occurring amino acid
  misc_feature (274)..(274): Xaa can be any naturally occurring amino acid
MVSSKPSGFYEQRSFPSIKILILILLNSILHKANSGCSNSVSNSLVPFLSHEILSSLQTLPLDGHFSLRDNEDAAKDFGNIHHFPPLAVLYPKTVSDISLTIKHVFEMGFAAQLKIAARGHGHSLQGQAQVHGGLVINMESLQGPEMKVHNGELPYVDVSGGELWINILHETLKLGLAPKSWTDYLHLTVGGTLSNAGISGQAFKHGPQINNIFQLEVITGKGXVVTCSGNRNADLFXGVLGGLGQFGIITRARISLEPAPKMVKWIRVLYFRXLYIT

SEQ ID NO: 972 - protein, 508 aa, Bifidobacterium longum NCC2705
MKNKVQLITYADRLGDGTLSSMTDILRTRFDGVYDGVHILPFFTPFDGADAGFDPIDHTKVDERLGSWDDVAELSKTHNIMVDAIVNHMSWESKQFQDVLEKGEESEYYPMFLTMSSVFPNGATEEDLAGIYRPRPGLPFTHYKFAGKTRLVWVSFTPQQVDIDTDSDEGWEYLMSIFDQMAASHVSYIRLDAVGYGAKEASTSCFMTPKTFKLISRLREEGVKRGLEILIEVHSYYKKQVEIASKVDRVYDFALPPLLLHSLFTGHVEPVAHWTEIRPNNAVTVLDTHDGIGVIDIGSDQLDRSLKGLVPDEDVDNLVNTIHANTHGESQAATGAAASNLDLYQVNSTYYSALGCNDQHYLAARAVQFFLPGVPQVYYVGALAGRNDMELLRRTNNGRDINRHYYSTAEIDENLERPVVKALNALAKFRNELSAFDGEFSYEVDGDTSITFRWTAADGASTAALTFEPGRGLGTDNATPVASLAWSDAAGDHETHDLLANPPIADID

SEQ ID NO: 973 - protein, 217 aa, Aquifex aeolicus VF5
MKFFLDTANVEEIKKAMEWGILDGVTTNPTLISKTGRPFKEVVKEILELVDGPVSLETVSLDAEGMIREGRMLAELGENVVVKIPMTPEGLKAVIALESEGIPTNVTLVFSPTQALLAAKAGASYVSPFVGRLDDISGEGMKLIEEIKTIFSNYEFDTEIIVASVRHPMHVLESALIGADICTMPFKVMEQLFKHPLTDIGLERFLKDWEKVPEKPF

SEQ ID NO: 974 - protein, 307 aa, Nanoarchaeum equitans Kin4-M
MKPVRDLNVNKNTTIEELIKQFSSIGGFQAQELYRGYEILKEMFDNAEYKILSFPADIIATGIRGIIKELIKRKMFDLVITTCGTLDHDLARLEKDYYLGYFEADDIELREKNIFRLGNIFIPEENYGLAIENILKKALPYIYNKKKELSTYEFVWLLGEYLENHPKKEESIIYWAYKNRIPIIIPGITDGAVGTQILLFRQEHRDFNVNVWLDEEFLLNQFFGDKNIGALMLGGGISKHHTIWWAQFSNGLKYAVYVTSAVELDGSLSGARTREAISWGKIDKKAKHVTIWGDVTIILPLLVGPFL

SEQ ID NO: 975 - protein, 142 aa, Triticum aestivum
  misc_feature (87)..(87): Xaa can be any naturally occurring amino acid
  misc_feature (92)..(92): Xaa can be any naturally occurring amino acid
  misc_feature (102)..(102): Xaa can be any naturally occurring amino acid
  misc_feature (104)..(104): Xaa can be any naturally occurring amino acid
  misc_feature (112)..(112): Xaa can be any naturally occurring amino acid
  misc_feature (119)..(119): Xaa can be any naturally occurring amino acid
  misc_feature (122)..(122): Xaa can be any naturally occurring amino acid
  misc_feature (125)..(125): Xaa can be any naturally occurring amino acid
  misc_feature (134)..(134): Xaa can be any naturally occurring amino acid
  misc_feature (141)..(141): Xaa can be any naturally occurring amino acid
MAPAVMASSATTVAPFQGLKSTAGLPVGRRSSGSLSSVSNGGRIRCMQVWPIEGIKNSETLSYLPPLSTGGLPGNRSDYLDSAQKWXPCLRXNKFGFLFPLXNXPPGYYDGXRYWDMLXLPXFRXTGPTQVLNXVEESKKXT

SEQ ID NO: 976 - protein, 484 aa, Escherichia coli
MSDMEPKTKKQRSLYIPYAGPVLLEFPLLNKGSAFSMEERRNFNLLGLLPEVVETIEEQAERAWIQYQGFKTEIDKHIYLRNIQDTNETLFYRLVNNHLDEMMPVIYTPTVGAACERFSEIYRRSRGVFISYQNRHNMDDILQNVPNHNIKVIVVTDGERILGLGDQGIGGMGIPIGKLSLYTACGGISPAYTLPVVLDVGTNNQQLLNDPLYMGWRNPRITDDEYYEFVDEFIQAVKQRWPDVLLQFEDFAQKNAMPLLNRYRNEICSFNDDIQGTAAVTVGTLIAASRAAGGQLSEKKIVFLGAGSAGCGIAEMIISQTQREGLSEEAARQKVFMVDRFGLLTDKMPNLLPFQTKLVQKRENLSDWDTDSDVLSLLDVVRNVKPDILIGVSGQTGLFTEEIIREMHKHCPRPIVMPLSNPTSRVEATPQDIIAENKPPFSVFRDKFITMPGGLDYSRAIVVASVKEAPIGIEVIPAHVTEYL

SEQ ID NO: 977 - protein, 481 aa, Escherichia coli
MEPKTKKQRSLYIPYAGPVLLEFPLLNKGSAFSMEERRNFNLLGLLPEVVETIEEQAERAWIQYQGFKTEIDKHIYLRNIQDTNETLFYRLVNNHLDEMMPVIYTPTVGAACERFSEIYRRSRGVFISYQNRHNMDDILQNVPNHNIKVIVVTDGERILGLGDQGIGGMGIPIGKLSLYTACGGISPAYTLPVVLDVGTNNQQLLNDPLYMGWRNPRITDDEYYEFVDEFIQAVKQRWPDVLLQFEDFAQKNAMPLLNRYRNEICSFNDDIQGTAAVTVGTLIAASRAAGGQLSEKKIVFLGAGSAGCGIAEMIISQTQREGLSEEAARQKVFMVDRFGLLTDKMPNLLPFQTKLVQKRENLSDWDTDSDVLSLLDVVRNVKPDILIGVSGQTGLFTEEIIREMHKHCPRPIVMPLSNPTSRVEATPQDIIAENKPPFSVFRDKFITMPGGLDYSRAIVVASVKEAPIGIEVIPAHVTEYL

SEQ ID NO: 978 - protein, 324 aa, Triticum aestivum
  misc_feature (208)..(208): Xaa can be any naturally occurring amino acid
  misc_feature (238)..(238): Xaa can be any naturally occurring amino acid
  misc_feature (282)..(282): Xaa can be any naturally occurring amino acid
  misc_feature (287)..(287): Xaa can be any naturally occurring amino acid
  misc_feature (291)..(291): Xaa can be any naturally occurring amino acid
  misc_feature (297)..(297): Xaa can be any naturally occurring amino acid
  misc_feature (309)..(309): Xaa can be any naturally occurring amino acid
  misc_feature (315)..(315): Xaa can be any naturally occurring amino acid
  misc_feature (317)..(317): Xaa can be any naturally occurring amino acid
  misc_feature (319)..(319): Xaa can be any naturally occurring amino acid
  misc_feature (322)..(323): Xaa can be any naturally occurring amino acid
MKTLFILTILAMATTIATGNMQVDPSGQVQWPQQQPFRQPQQPFYQQPQQPFLQPQQAFPQQPQQPFPQTQQPQQPFPQQPQQPFPQTQQPQQPFPQQPQQPFPQQPQQPFPQTQQPQQPFPQQPQQPFPQTQQPQQPFPQFQQPHQPFPQPQQQFPQPQQPQQSFPQQQRPFIQPSLQQRLNPCKNILLQQCKPASLVSSLWSIIWXPQSDCQVMQQQCCQELAQIPQQLQCAAIHXVVAFYHRASSKQQQQQQQQQQQQQRDCISCCQLSQQQQLGQGTXVQGQXIIQXPQQLSXQLGGIRSMGGCXLLPTMXNXVXPTXXS

SEQ ID NO: 979 - protein, 448 aa, Escherichia coli
MEERRNFNLLGLLPEVVETIEEQAERAWIQYQGFKTEIDKHIYLRNIQDTNETLFYRLVNNHLDEMMPVIYTPTVGAACERFSEIYRRSRGVFISYQNRHNMDDILQNVPNHNIKVIVVTDGERILGLGDQGIGGMGIPIGKLSLYTACGGISPAYTLPVVLDVGTNNQQLLNDPLYMGWRNPRITDDEYYEFVDEFIQAVKQRWPDVLLQFEDFAQKNAMPLLNRYRNEICSFNDDIQGTAAVTVGTLIAASRAAGGQLSEKKIVFLGAGSAGCGIAEMIISQTQREGLSEEAARQKVFMVDRFGLLTDKMPNLLPFQTKLVQKRENLSDWDTDSDVLSLLDVVRNVKPDILIGVSGQTGLFTEEIIREMHKHCPRPIVMPLSNPTSRVEATPQDIIAENKPPFSVFRDKFITMPGGLDYSRAIVVASVKEAPIGIEVIPAHVTEYL

SEQ ID NO: 980 - protein, 243 aa, Zea mays
MDWDAPALTSFVADLSFRHLCCYGAGIAGNAFAFVLFVSPLPTFKRIVRNGSTEQFSCTPYIYSLLNCLICMWYGLPFVSYGVVLVATVNSIGAVFQLAYTAVFIAFADAKQRLKVSALLAAVFLVFGLIVFVSLALLDHKARQVFVGYLSVASLVCMFASPMSIVNLVIRTKSVEYMPFYLSLSMFLMSASFVIYGVLLGDGFIYIPNGIGTILGIVQLLLYAYIRKGSSEEAKLPLLITHT

SEQ ID NO: 981 - protein, 213 aa, Glycine max
MALEVAVKAAVGAPNVLGDCPFSQRVLLTLEEKKIPYKLHLIDLSNKPEWFLGVNPEGKVPVVLFDGKWVADSDVIVGILEEKYPEPSLITPPEFASVGSKIFGSFVSFLKSKDTNDGTEQALVAELSALDEHLKTHGPYIAGEKVTAVDLSLAPKLYHLVVALGHFKNWNIPESLVHVHNYTKLLFSRESFEKTKPPKEEYVIAGWAPKVNA

SEQ ID NO: 982 - protein, 122 aa, Huperzia lucidula
MIQPQTYLNVADNSGAKKPMCIRILKASNRKYANTGNVIVAVVKEAVPNMPLRKSEIVRAVVVRTCKELKRNNGMIIQFDDNAAVIINQEGNPRGTRVFGPVARESREFNFTKIVSLAPEVL

SEQ ID NO: 983 - protein, 125 aa, Thermus thermophilus HB27
MALDIERIKEELSQATVLELKQLIDALKEAWGVTAAAPVAVAAAPAAGAAAAPAEEKTEFDVILKEAGAKKLEVIKELRAITGLGLKEAKDLAEKGGPVKEGVSKQEAEEIKKKLEAVGAVVELK

SEQ ID NO: 984 - protein, 175 aa, Glycine max
MEAVGSRLSRASSRYGAPTVFSGPVRKWKKKWVHVTPSSLPNNSSHSHTNNSTTTSSASSRLLLRRWTPATVDDAAGAVSDEPPRRKFRYTPVVVLEEQKKMNVVKAEHEPTIETDQLAARKTNVTHEMQGKLNMNEMLEETKDSNIGNLDLGSDFQSNTGGNSQNSDAQLENSM

SEQ ID NO: 985 - protein, 148 aa, Brassica napus
MAGGTALTPTSVGSKSLLPLRNHEAAERVNNNNNNNSLKALPKAVQPVSSIDGGMVKRPRGRPAGSKNKPKPPIIVTHDSPNSLRAHAVEISSGNDICEALSDYARRKQRGLCILSANGCVTNVTLRQPASSGAIVTLHGRFEILSLL

SEQ ID NO: 986 - protein, 247 aa, Zea mays
  misc_feature (25)..(25): Xaa can be any naturally occurring amino acid
  misc_feature (135)..(136): Xaa can be any naturally occurring amino acid
  misc_feature (163)..(163): Xaa can be any naturally occurring amino acid
  misc_feature (174)..(174): Xaa can be any naturally occurring amino acid
MYRAKRAALSPKVKRRVGKYELGRXIGEGTFAKVRFAKNTENGEPVAIKILDKEKVKRHRLVEQIKREICIMKLVRHPNVVRLFEVMGSKARIFIVLEYVTGGELFEIIATNGRLKEDEARKYFQQLINAVDYCXXRGVYHRDLKLENLLLDAAGNLKVSDFXGLSALTEQVKXDGLLHTTCGTPNYVAPEVIEDGGYDGATADIWSCGVILFVLLAGYLPFEDDNIIALYKKISEAQFSCPSWFSR

SEQ ID NO: 987 - protein, 506 aa, Crocus sativus
MVSTGCSGNGAKGTNGGIVVPEIKFTKLFINGEFVDSVSGSTFETRDPRNGDVIANIAEGDKEDVDLAVKAAREAFDHGKWPRMSGYERGRIMMKFADLIEAFIEELAALDTLDAGKLLSMGKAVDIPAAVHIIRYYAGAADKIHGYTLKLSSELQGYTLKEPIGVVGVIIPWNFPTTMFFLKVSPALAAGCTMVVKPAEQTPLSALYYAHLAKLAGVPDGVINVVPGFGPTAGAALSSHMDVDSVAFTGSAEIGRAIMESAAKSNLKNVSPELGGKSPMIVFDDADVDMAVSLNSLAVFFNKGEVCVAGSRVYVQEGIYDEFVKRAVEAARSWKVGDPFDQSRNMGPQVDKDQFESVLKYIEHGKSEGATLLTGGKPAADKGYYIEPTIFVDVTEDMKIAQEEIFGPVMSLMKFKTVEEGIDCANNTKYGLAAGILSQDLDLINTVSRSIKAGIIWVNCYFGFDLDCPYGGYKMSGNCRESGMDALDNYLQTKSVVMPLHNSPWL

SEQ ID NO: 988 - protein, 576 aa, Triticum aestivum
LLPGGPAAGGGVEDKYGEDRATEELPVTPWAFSVASGYTLLRDPHHNKGLAFTERERDAHYLRGLLPPGVVSQDLQVKKIMHNLRQYKVPLQRYVAMMDLQERNERLFYKLLIDNVEELLPVVYTPTVGEACQKYGSIFRRPQGLYVSLRDKGKVIDVLRNWPERNIQVIVVTDGERILGLGDLGCQGMGIPVGKLSLYTALGGVRPSACLPITIDVGTNNEQLLNDEFYIGLRQRRATGEEYHELMEEFMDAVKQIYGEKVLIQFEDFANHNAFDLLAKYSKSHLVFNDDIQGTASVVLAGLLSSLKVVGGTLAEHTYLFLGAGEAGTGIAELIALEISKQTNAPIEECRKKVFLVDSKGLIVSSRKNSLQPFKTSWAHEREPVTTLLDAIKSIRPTVLIGTSGVGRAFTKEVIEAMASFNERPVIFSLSNPTSHSECTAEEAYKWTQGRAVFASGSPFDPVEYDGKIRVPGQANNAYIFPGFGLGVVISGAIRVHEDMLLAASETLAAQATQENFDKGSIFPPFTNIRKISALIAASVAAKAYELGLATRLPRPRDLEKYAESCMYTPVYRSYR

SEQ ID NO: 989 - protein, 391 aa, Bordetella pertussis Tohama I
MTVRTVRIAGGRLIDPASGADARADLYLADGRIAAIGQAPAGFQAQQHIDARGLAVLPGLVDLSARVHGAGLAPLACEMQAALAGGVTRLVVPPDTDPPLDEPGRVEMLRHRAHQAGQAQLHPLGALTEGLRGERLSEMAALAEAGCVAFSQAGLPVADTRVLWRAMQYARTFGLALWLRPLDPWMGRDGVAAAGAYASRLGLAEVPVQAETLALHTIFELQRATGARVHLMRLSSAAGVALVRAARREGLPLTCDVAAHQIHLTDVDIGFFDSRFRLDPPLRGQRDRDAIVAGLADDTIDAICSDHRPVGDTGKLLPFAEAEAGASGLELLLSLTLKWAQRERVPLARALALVTSAPAAILRAATAAPPPCGELAAGAPADLCLVDLDAD

SEQ ID NO: 990 - protein, 1320 aa, Candida albicans SC5314
MKSQSTDTLQPRISSDSLVYSSSSSSSNVYSQPKLPFARSYSSIPEQVHDPGSRQSSKNSNTNFSFSEHDDSIQEFLISPIQSDIFPYSKKPVISPVLESPEAGGDSTIVETSSPSPTKSGTVSLNSNAIGSIIGSYDYSKSSLELEKPKPVEEPVFQKDHARDHARQGSDASTISNGSEQVSKDKRFVRYAMNTQSPLVNASNKWQISNVIKWLDKNQFNNSWKETFRRNEISGNRFLELENFDKESMIWKQFSKFLQLDDDLNSVDRFIELLRKESSHELQTRKSLGGGEISPINVKHENRKSTPIYTKHMSTSSVSSSNSSSSISRPLSYVDSKPKEQLSSPSHHSFFRKHSRSTSNESKDAKKRYSSFDDNRVKSVPKNDKKSNGILSTLRKYGGDKIAKNTKQRSSTYFPSLDLPPPLESDPPAYNERKISVDSELSPKSIKSFSDDLSIDPKYLPTQHQELDLRKFHDCEPITILASKDNISFVPIVITELSNAKSHIIKALGLIDIGSITLHLTDFFHKEGEAIPDFLIPKVLKLDGLLKFYVRQELKSPEGTTTTFSTTSSDSKSYIADGNKTYPETPQYLLQAQHDSRVDYWNFKDLTSISEDPSKSLAGAKQNIDSKRNDTKQKPKEFPLKFPFANAPKKGNTVPQLQIDTSGVNNISKPPTSTGSTFQVLRKKGHEIDFDKRRKSPYESKTPKIIANIYSSSVANTKKSPISASTVMALKDDVVVQRPETISRSNSIIAKRTAPPPPGDRRVQIQRQNSILRRKPGLKSTNNVTSGSSEGSKKNISDSTDDNDSEDAFFVKPLKKKENELGNNSDNNSENDEDNDSDDDFFVKPIKKEVADVSAGKVELDDSEEDFFVKPIHKKPSHMNVRPPVEEVYNNLEKYFPYTNLDKPIIDDSPASPSPQRRPTISRTFSSANKSPVAPTSADSKNTNDEQPSLRVRRMKTIRGVANEARRKVLQMKQASPPNTFANITRENSAKLTRSNTKMWGQRVVEVTSQEIEKGFVSKLRNKNGLYQEYAWIKGELIGRGSFGDVYLGLNVTTGEMLAVKQVVCGRNNKEGIEALHKEVETMKDLNHMNIVQYLGYDQQKNIYSLFLEYVAGGSIALCLKSYGKFDETLIRFITKQILLGLEYLHSNNIIHRDLKADNLLLEVDGTCKISDFGISKRSNDIYANNANMSMQGTIFWMAPEVIDSMVEGYSAKIDIWSLGCVVLEMFAGKRPWSNEAAISVIYKTGKEKLAPPIPDDIAHLVSPVAESFINRCFTIDPKDRPTAGELLNDPFVNTLDHDFNFANTKLAEMIRYNSKRLFT

SEQ ID NO: 991 - protein, 380 aa, Desulfovibrio vulgaris subsp. vulgaris str. Hildenborough
MRKTVYWIEGDGIGPEVWKAARPVIDAAVEKSYGDSRSIEWKELLAGEKAHRETGEYLPQSTLDTLATAELAIKGPLGTPVGKGFRSLNVTMRQTLDLYACIRPIRYFDGIMSPVKRPDLVDMVVFRENTEDVYAGIEYRAGTPEAKRLIAFLRDELGAKVDIEAAVGIKPMTEKGSKRLVRRALRFAIDQKRPNLTLVHKGNIMKFTEGGFREWGYEVARDEFADLTTTETEGTAGRLVVKDRIADAMFQEVLIRPQQYSVIATSNLNGDYISDALAAQVGGLGLAPGVNMSDSLAFFEATHGTAPTIAGQDKANPGSLILCGALMLEHMGWNEAAERIYKAVNEAIASRRVTVDLATQMENATTVGTVAFGDIVTAGL

SEQ ID NO: 992 - protein, 483 aa, Ralstonia sp. U2
MKTKLFINNTWSASSDKKSFDRKHPVSGEVVTQCANATVDDAVNAARAAQEAFKSWKAVGPSERRRLLLKVADVMESKTPEFIEVMAKEVGASALWAGFNVHLSANVFREAASLATQIQGETIPTDKPDTLSMTLRHAVGPILSIVPWNGTAVLAARAIAYPLVCGNTVVFKGSEFSPGTHALITKCLQEADLPAGVLNYLNSSPDRSPDIADALISSKEIRRINFTGSTRVGRIIAQKSAQHLKRCLLELGGKSPLIVLDDADIDAAVKAAVFGSFLFQGQICMSTERLVVDEKIADEFVAKFVEKTKQLSAGDPCVTGDCIIGPMVSPNSGDRINGLFKDAISKGAKVVCGGIAEGAVMPATILDHVTADMQIYDEETFGPITVVIRCKSEADAIRIANDSAYGLSSGVFGRDVNRALRVGMAIEYGSVHINGSTVQNEAQAPYGGTKATGYGRFDGRAVIDEFTELKWLTIEPFEQQYPF

SEQ ID NO: 993 - protein, 477 aa, Gibberella zeae PH-1
MEFIAAGTAWALNRAPSPQKILSRLGLASLVVTNTWSELSSKLSPNASIVFPDDPEFSGLVSRWRDWHAPQVGAVVTAFTENDVQEAVIYANRNGIPFLARSGGHGATEALQLAKDALVVDIRGMNDIKVAPDGNYATISGGASVKKVVNELWTSKKQTVTGICECVGISAPVLGGGHGWLQGQYGLASDQVISARVVLPNGEAVTASEESNPDLFWALRGAGHNFGIVTEWEYRIYDVKNPNWSYEIFIFLGDKLEEVLELTNKMMKTQPPEIIHWIPVNEAREYAKPLHEMGPLNVNAGAVPMPELAHITLMSEDTVGCTKGFTGLRYPIGLKKYDPPAVRQVYDSIAEISHRIPELAGSFFLLEGYSTHGVKAVDASESAFPHRDDEILVTSYVLYKPNATLDSLAQEHGEKLRGLLQEASDEPERLRAYVNYAHGVESLESMYGYEPWRINKLKALKKKWDPENRMRFYAPIV

SEQ ID NO: 994 - protein, 301 aa, Triticum aestivum
  misc_feature (63)..(63): Xaa can be any naturally occurring amino acid
  misc_feature (200)..(200): Xaa can be any naturally occurring amino acid
MDSLSLYEISCFAAGFAGNLFAFALFLSPVPTFKRILKAKSTEQFDGLPYLLSLLNCFICLWXYGLPWVSDGRLLVATVNGTGAAFQLAYISLFFIYADSRKTRLRMVGLLVLLVCAFALVAHASIAFFDQPTRQQFVGAVSMASLISMFASPLAVMGVVIRTECVEFMPFYLSLSTLLMSASFAVYGLLLRDLFIYLPXGLELSWEQRSWHSTLTTAGNGDARIHLRRCLPDQTSSDQFSVLAWLERAGVGFCRRELYAPALFSPVDAESVCTDLLAYASVYMLLKYHSFPEECRGGYFV

SEQ ID NO: 995 - protein, 76 aa, Glycine max
MVGIGVPICVQCGNTSNPCRCKVVGPTLGFLAFAAAAVVEWPVGALVYCFRHTKGRKIMGHPATVIYPSVTNAIPI

SEQ ID NO: 996 - protein, 326 aa, Triticum aestivum
  misc_feature (116)..(116): Xaa can be any naturally occurring amino acid
MKLQTEAAAAAGGEGKLMIRQVWANNVESEFQAIRQVAERFPYVSMDTEFPGVIHCPSKHHATLTPSERYAALKANVDALHLIQVGLAFAASPDAAPAVAFEINLREFDPRVHRHXPASVALLAGHGLDFAKQRRGGRGRARVPRRCSCRRGWCRSGASAPTCVTFHSAYDFGYLVKLLMGRKLPRTLTEFLGLVRVFFGDEVYDARHVMDSCAGLYGGLDALAAQLGVKRAAGMSHQAGSDAALTWDVFRRIREVYFAGNSRQGQGQGVGNFAGVLYGLDLELHLAAPADNGNGNGNRNNNKNKCGSGNGAGGRGNNRRAVAALR

SEQ ID NO: 997 - protein, 459 aa, Mesorhizobium sp. BNC1
MSDFDVVVTGRVVTTDRVYEDGYVAIRGGLVERVGSGTPPAAREKYDFDGDYILPGAIDAQVHSRSQLDQEDFLWSTRSAAAGGVTTIVDMPYDEGFLVCTGERLQRKAEEAAQQSRVDFALYGTVRAQDGAREIAGMVEAGAIGFKFSTFETDPERFPRIGPAILHECFSEIGRYGLIAGIHNENDEMVRHALAQVAASGITDYRAHAMSRPAAAETLAMAEAYELGAQAGCSTHVVHCSVGRGYELCAGYRAQGFDTTVEACIHYLTLDEEDHVRRFGGMAKINPPIRPRREVEALWRHLAAGNVTVVSTDHVSWSIDHKRNPEMLKNKSGVPGLEVLYALLMKGLAERGLPMTWAARLLAANPARLFRIGHRKGALEPGRDADIVVMRHDPRRYDPAASGNNFVDWSPYEGMELPFRPVATFLRGRVVFDGSAVVAPSGTGTFIRPRGANAIQIGA

SEQ ID NO: 998 - protein, 1082 aa, Magnaporthe grisea 70-15
MIQKYGGHAVKFSFSNSPLDNIFGLRFAWEFYRHGRRDEYLKFTHRSFAQSGAGRANPYTYEVNLGGVRTIWTADPENIKAMLGSQFEDYGRGKAFQSRWHDLLGTGIFNADGREWHDSRHRLRPLFNRQRVSNLDSFERQIQIMINRHLGGGRTVDLKDVISRFALDAIGDYAMGFQVNALADRKNDFLDALERIKTIQNIKECAGPLSWLVPTPGFKRDLKVLDDFMEPLIEHAASLPQSVLDEMEKTDHGWTYVKACASVSRDRHFLKYELMSVILAGRDTVSGTLVWTFLELVKRPDLMADLRREIENTVGIGRDAPRPTHDDLRSMRLVKNTLNETLRLYPTVSLNLRTALRDTSLPRGNDHDGNKPVGLAEGTPVIFSSHILQLSPETYEQSPPGTSPPHVFDPYRWEEWKPKPWTYIPFGGGPRICIGQEFALAEMAFLLVRLLQNYSRLEMRCEMRGNSDEGWERPNGSASIVEQFMMEKGRVRISGDVTLSPRDKDSQLVKIISTKPTMIVTIPVLLATYILYWTVRLVKNILRANATGLPVRWTPVAPTNPFWIVLGKPTSRVLRAILPSFLSNWTYFSTFDWHWLDRLYLDFEVHEKNGDTFLHATPSGLMLHTRDPQVAQQILHTCPKPDDVAKSLELCGPNLVSSSEVDWPRHRKVTVSTLSDRNNRLVWSETVRQTLNVLQSYQPGHGEIIDPEGDIRRIYLNMFSAVCFGRPLDAEKEPGETTDGKLPGGHKRSYRYCLETSLRDIFILHTVPSWIKYLPPALVPHKISEFFAASREMMQYLDEMIRRCQDEAQEGGEESKSGDNLLRITVRSGLQSNTKEPQGRSYLSKEEVRGNLLIYSLAGHESNAHTLTYALYLLAACPDVQDWLAEELAAITLLDGQLSAEETYFGIMAKLPRTLAVMYETLRLYPSIIFLPKTTASRSVSIDLGHVEGQSKAIIPPNTNIWVNMCGMQVLPEVWGDDARTFRPSRWINSSGQLAAPSLVAGSAYVAWGGGKRVCPGQRFSQAAFAASVVALLTGGKRVHVVPREGEEEGMARRRVLEVLDDSFVGTTIHMRRAGDVKLVVA

SEQ ID NO: 999 - protein, 433 aa, Escherichia coli
MVETIEEQAERAWIQYQGFKTEIDKHIYLRNIQDTNETLFYRLVNNHLDEMMPVIYTPTVGAACERFSEIYRRSRGVFISYQNRHNMDDILQNVPNHNIKVIVVTDGERILGLGDQGIGGMGIPIGKLSLYTACGGISPAYTLPVVLDVGTNNQQLLNDPLYMGWRNPRITDDEYYEFVDEFIQAVKQRWPDVLLQFEDFAQKNAMPLLNRYRNEICSFNDDIQGTAAVTVGTLIAASRAAGGQLSEKKIVFLGAGSAGCGIAEMIISQTQREGLSEEAARQKVFMVDRFGLLTDKMPNLLPFQTKLVQKRENLSDWDTDSDVLSLLDVVRNVKPDILIGVSGQTGLFTEEIIREMHKHCPRPIVMPLSNPTSRVEATPQDIIAENKPPFSVFRDKFITMPGGLDYSRAIVVASVKEAPIGIEVIPAHVTEYL

SEQ ID NO: 1000 - protein, 81 aa, Zea mays
  misc_feature (25)..(25): Xaa can be any naturally occurring amino acid
  misc_feature (55)..(55): Xaa can be any naturally occurring amino acid
YRRLKHTGPDWTDLYHHEDNFLAHXRLADGSPLYVDQPVFNKDSTDVVVANGEIXNHRNGLRQLTGPHIIKTGSHCEVIIP

SEQ ID NO: 1001 - protein, 144 aa, Brassica napus
  misc_feature (132)..(132): Xaa can be any naturally occurring amino acid
MDDYRDRISRLPDDFLLQILSRLPTKDVVAMSLLSKRWRFLWTLVPKLNFDLRLHDNTCPKFTKFVDRSLLLHKAPTLESLRVKIGSICHNADVDVGVWVRIAVDRGVRELDISYCPAEEPIRLPKCLFPCXTLVVLKLENMEP

SEQ ID NO: 1002 - protein, 480 aa, Azoarcus sp. EbN1
MKEYKLFIDGEWVGSSTETILDDLNPATSEVWGRVHQASAADLERAIAAAYRARESWGNTLANEREAILLRAADALQKRIPDVAAVLIDEAGSTYGKAMFEASFVVNLLRSAAGECRRITGETMPSDSPGVFSMSVRRPLGVIAGIAPFNFPFLLATKKVALALAAGNTFILKPASYTPVTGLKIAEIFEAAGLPKGVLNVVPVQGSVLGNTFVADPRVRMITFTGSTEVGRELSAEAGRHFKRITLELGGKSPMIVLKDADVDYAVNAAAFGIFLHQGQVCMANSRLIVEAPIFDVFCDKLATKIAGFKVGDPRDPQTVIGPLIDRKQCAVLDRHVADAVAKGAKLLHGGKSDGAFYQPTILAGVTPDMVVFREESFGPAVSVIRAADSEDALRLANDSCYGLSSGLITNDLQKAFDLSLRLEAGMVHINDSSIMDEPHVPFGGVKDSGFGREGGHHSMDEMTELKWITVQMGQRQFPF

SEQ ID NO: 1003 - protein, 79 aa, Glycine max
  misc_feature (30)..(30): Xaa can be any naturally occurring amino acid
  misc_feature (57)..(57): Xaa can be any naturally occurring amino acid
LKSMAGFCTMQNMNDIISIASNGGRVQCLXVWPPVGKKKFETLSYLLDLDDAQFANXVEYLLRNGWILVRYHWSTFVYV

SEQ ID NO: 1004 - protein, 273 aa, Zea mays
  misc_feature (62)..(62): Xaa can be any naturally occurring amino acid
MAAPPMAAAPARHEDICGAVLGAARASATCHLHPTPSTRRDSSIGDSRAIKGVDRNHVLRHXMAEQIKLQISTMKLIKHPNVAQLHDVMASRTKIYMLLEFVDGGELFDKIVNSGRLGEDEARIYFHQLINAVDYCHSRGVYHRDLKPENLLLDSNGALKVSDFGLSAFAPQTNEDGLLHTTCGTPNYVAPEVLADKGYDGMAADVWSCGIILFVLMAGYLPFDDASLSYPSLVSTPICSAVCGQAEPGETIETICAGEQSLPNSSQHGCTGR

SEQ ID NO: 1005 - protein, 167 aa, Glycine max
  misc_feature (131)..(131): Xaa can be any naturally occurring amino acid
ATIQVQYPSDIMAKKLWKILEAKARGEGGGCSITYGALDPVQITQMAKHLETVYVSGWQCSSTASSSLEPGPDLADYPANTVPNKVAQLFTAQLVHDRKQRWTRSQALAKGEDLPPPIDYLRPLIADADTXGHGGLTAAMRLTKMMIQALAAVIHIEDQAPATKKCG

SEQ ID NO: 1006 - protein, 210 aa, Candidatus Blochmannia floridanus
MLFHYYMIKHINKYNDKNVMWHFYRINREDRERLHQHRSMILWFTGLSGSGKSTLASILEEKLYCRGVSTYSLDGDNIRHGLCKDLSFNSNDRSENIRRVGEVARLMVDAGLVVLVALISPYRIDRQIIRDMCIKDSFLEIFVDTPMLICKQRDPKGLYHQVDCKKIKNFTGIDSIYERPKQPDIYLDGRKTISELMNQLLDLVLVKIFK

SEQ ID NO: 1007 - protein, 253 aa, Fusarium solani
ILMNQSSDTLKKLSLELGGNAPFIVFDDADLDLAVAGAIASKFKCSGQTCVCSNRIFVQKGIYNEFVQKLKAVVSKFQVGHGFDSKTTHGPLVTAAAAERVDGLVKEAVKAGAKVEVGGKRRTDLGPNFFEPTILTNVTTDMRLVRDEIFGPLAPIFSFDNEDEVVDIANKCDVGLASYIFTQDVNRVARVTELLHFGMVAVNTGIMSDAAAPFGGVKHSGMGREGSKYGIEDYLHVKTIVTGNVNVVHRALL

SEQ ID NO: 1008 - protein, 361 aa, Escherichia coli
DLWHAPAPKNGQAVGTNTIGSSEACMLGGMAMKWRWRKRMEAAGKPTDKPNLVCGPVQICWHKFARYWDVELREIPMRPGQLFMDPKRMIEACDENTIGVVPTFGVTYTGNYEFPQPLHDALDKFQADTGIDIDMHIDAASGGFLAPFVAPDIVWDFRLPRVKSISASGHKFGLAPLGCGWVIWRDEEALPQELVFNVDYLGGQIGTFAINFSRPAGQVIAQYYEFLRLGREGYTKVQNASYQVAAYLADEIAKLGPYEFICTGRPDEGIPAVCFKLKDGEDPGYTLYDLSERLRLRGWQVPAFTLGGEATDIVVMRIMCRRGFEMDFAELLLEDYKASLKYLSDHPKLQGIAQQNSFKHT

SEQ ID NO: 1009 - protein, 487 aa, Lesquerella fendleri
MANVKLLYHYLITHFFKLCLLPLIALVASKASSLDQEDLQNLWFHLQHNILTLTILFAVLTFVSAIYFLTRPRPVYLVDYSCHLPPPHQKITVKKIVENVNKNRELDASHNSKIPESSLDFVLRLLERSGLGEETYIPDSLLNVPPIQTMAAAREETEQVIFNAIDNLLANTKVNTRDIGIIIVNSSMFNPTPSLSAMVVNKYKLRSTIKSFNIGGMGCSAGIIAIDLAKDLLQVHKNTYALVISTENLTRNMYVGNNRSMLVANCLFRLGGAAILLSNKSGERRRSKYKLLHTVRTHTGADDKSFRCVQQEDDDMGKTGVSLTKDITSVASRTITKNIATLGPLVLPISEKILFFITYIHKKFVNDKVKHYIPDFKRAIDHFCIHAGGRALIDELEKNLGLLPIDVEPSRSTLHRFGNTSSSSIWYELAYTEAKGRMKKGNKAWQIALGSGFKCNSAVWVALCDVKPSVNSPWEHCLDKYPVKLDL

SEQ ID NO: 1010 - protein, 449 aa, Zea mays
MYRAKRAALSPKVKRRVGKYELGRTIGEGTFAKVRFAKNTENGEPVAIKILDKEKVKRHRLVEQIKREICIMKLVRHPNVVRLFEVMGSKARIFIVLEYVTGGELFEIIATNGRLKEDEARKYFQQLINAVDYCHSRGVYHRDLKLENLLLDAAGNLKVSDFGLSALTEQVKADGLLHTTCGTPNYVAPEVIEDGGYDGATADIWSCGVILFVLLAGYLPFEDDNIIALYKKISEAQFSCPSWFSAGAKNMITRILDPNPTTRITISQILEHPWFKKGYKPPVFDEKYQTSLDDVDAAFGDSEDRHVKEETEDQPTSMNAFELISLNQALNLENLFEAKEEYKRETRFTSQCPPKEIITKIEEAAKPLGFDVQKKKYKMRMENPKAGRKGNLNVATEVFQIAPSLHVVELKKAKGDTLEFQKFYRSLSTQLKDVVWKCDGEVDGNSAAA

SEQ ID NO: 1011 - protein, 259 aa, Aquifex aeolicus VF5
MADKKWKTAISTHVNHEPYVRGYRLLDLVGNLTFSEAIYLLLKGELPSEAEAKMMDAIFVSVIEHSIAPPSVIATRAVISGGNSLNVGVGAGVLAFGSAHGGALEDAMKFMQEGVKSNRPVEEIVKEYLSQKKPIPGYGHRYYKEFDPRTKRLFELAEKYGFCKEHCEFAKKVEEEIYKQKGKRIVLNVDGAIAAITSDMGFDWRLGKGFFIIGRVPGLVAHAYEELTQEKPFSKRLSEEEYEYTGVEPRELPPERKKV

SEQ ID NO: 1012 - protein, 580 aa, Glycine max
MATPNPTRFSLAMERTGQWVFSPEIPTDVIVAVGQTNFSLHKFILAAKSNYVRKVIMESEESDLTRIEISDIPGGSEAFEKAAKFCYGVNFEITVHNVAALHCAAVFLQMTDEYCDGNLAGRTEDFLSQVGLSTLHSAVAVLKSCQKILPFAAEVNVVDRCVEVISCKACNEANFPSQSPPNWWTEELAVLDVDSFAKVITAMKQRGAKYLTVAGALITYTERALRELVRDQTGGGKGIRSPESGDSDSESKRSEQRELLQAIVPLFPTEKAAFPVNFLCCLLRCAIYLRASSVCKRELEKRVTEILEHVTVDDLLVLTFSYDGERLLDLDSVRRIISGFVEREKGTTVFNAGVNFNEDFSAAMQRVVKTVDTYLAEIAAYGELSISKFNGIAILIPKGSRKSDDDLYRAVDIYLKVHPNLDEIEKEKVCSVLDPLKLSYEARVHASKNKRLPLQIVLHALYYDQLHIRSGTAADKQAVVAAAEKKQLQADVSLVRENEELRSELMKMKMFISDLQKNVHGTSSSGRENIGPTKKPTFFSSMSKKLSKLNPFKNGSKDTSHIDDAPVDLTKPRKRRFSIS

SEQ ID NO: 1013 - protein, 160 aa, Bacillus thuringiensis serovar konkukian str. 97-27
MTVYDFSAKTIIGEEKSLKDYEGKVLLIVNVASKCGFTPQYKGLQEVYDKYKEQGLEILGFPCNQFGGQEPGTEVDITSFCELNYGVNFPMFAKIDVKGDKAHPLYTYMTEQAPGLLGMKAVKWNFTKFLIGKDGKVVGRFAPQTKPVDLEVEIEKVLGE

SEQ ID NO: 1014 - protein, 324 aa, Gibberella zeae PH-1
MVNVPNIKLNSGFDMPQIGFGLWKVDDNCAEVVYNAIKAGYRLLDGACDYGNEKACGEGVARAIKEGIVKREDLFIVSKLWQTYHDKKNVEPITRRQLADWQIDYFDLFLIHFPVALEYVDPEVRYPPGWHYDDAGTEIRWSKATNQETWEGMEDLVEKGLAKSIGISNFQAQGIYDMLKYAKIRPATLQVELHPYHQQSELVSLAKAEGIALTAYSSFGPTGFIELDMDIAKSASPLMQHEVFTTLASKYNKTSAQVLLRWATQQGLAVIPKSTTPQYMAQNFDCFEWSIDEEDMKRISKMNLNLKFNKPTNYFPTEKLWIFG

SEQ ID NO: 1015 - protein, 280 aa, Arabidopsis thaliana
MAIIKPNRDLKPDGVTVVTREVWAENLESEFELISEIIDDYPFISMDTEFPGVIFKSDLRFTNPDDLYTLLKANVDALSLIQVGLTLSDVNGNLPDLGDDLHRGFIWEFNFRDFDVARDAHAPDSIELLRRQGIDFERNCRDGVESERFAELMMSSGLVCNEEVSWVTFHSAYDFGYLMKILTRRELPGALGEFKRVMRVLFGERVYDVKHMMKFCERRLFGGLDRVARTLEVNRAVGKCHQAGSDSLLTWHAFQRMRDLYFVQDGPEKHAGVLYGLEVF

SEQ ID NO: 1016 - protein, 479 aa, Gloeobacter violaceus PCC 7421
MSSIAIVWHRRDLRVHDNPALWQASRTGGQVLAVFIVDPTIVERDDTAPARIYFLRESVLELQKAYRTIGGRLAVRVGEPVQQLVALAQAVGAGAVYFNDDIEPYARERDARAAEALRAAGITVHACAEILLHPAGEVLTAAGGKPYTVYTPFWRQWSAKPKPKPFPTPERLEAPTVEEQSFPELAQLGRPFAGELLVSPGEQSGLEQLEAFAREGLYRYGERRDLPGCDGTSRLSAHLKFGTVGIRAVWARTMDAWKQAEHDRDRAGLAVWQQELGWREFYKYELFHLPQLAGRPFRREFENFQWDEDQERFERWCQGETGYPIVDAAMRQLNTVSWMHNRLRMIVASFLTKDLLLPYGWGERYFMQKLVDGDLSANNGGWQWAASVGTDPKPLRIFNPSTQAGRYDPKAVFIRRWLPELEGVDTALLVTSERLPPLMRAQHRYAQPIVEHKRQQQVFKERYRAVRAQQADPGARDSE

SEQ ID NO: 1017 - protein, 52 aa, Zea mays
PVGRVYFPGGAPSGPFNGFVPGAFFSGFGSPEIFFNCAPKKMCQFPVPGKFF

SEQ ID NO: 1018 - protein, 222 aa, Desulfitobacterium hafniense DCB-2
MCGLAGLLRPRNDLDQEHLQALAASMGEALHHRGPDDDGVWADPQAGIALAHRRLSILDLSPLGHQPMASADGRFVVAYNGEVYNFAELREQLRGLGHGFRGHSDTEVLLAAVSQWGVEAAIARCNGMFAIALWDRERGELWLARDRVGKKPLYYGWAGDTLVFGSELKALWRHPQFDNGVDRDALALLLRYDYVPSPYCIHTDTWKLAPGAIARFTPRRDP

SEQ ID NO: 1019 - protein, 78 aa, Triticum aestivum
  misc_feature (68)..(68): Xaa can be any naturally occurring amino acid
MGLCSCCCRCLEIMCAILLPPLGVCLRHGCCSMEFWISVLLTILGYLPGVLYAAYVICSVDPDRVRRXRTDDDYIYVA

SEQ ID NO: 1020 - protein, 351 aa, Zea mays
SVAFVPLPVVYVLFVPSVAGTGEVVTCSPTQSPELFFAVLGGLGQFGIITRARIPLQVAPPKVRWVRAFYDSFETFTKDQELLVSMPELVDYVEGFMVLNEQSLRSSSVAFPAQVNFRPDFGSDDGTNKKVCYYYCIEFAVHDFQRQDSAADHVVDLVSGKLSYLRPHAYSVEVAYWDFLNRVRMEEESLRRRGLWDVPHPWLNLFVPRHGVARFMDLLMATIAQGDFEGPVLVYPLLTHRWDGNMSAVVPAAPDGVMYVFSVLRSTDPARCGRACMERILEQHRRVADEACRRLGAKQYLARQPSLAHWRDHFGASWDRFVARKARFDPMNVLGPGQGIFPWTDSSSSPM

SEQ ID NO: 1021 - protein, 319 aa, Aspergillus niger
MASPTVKLNSGYDMPLVGFGLWKVNNDTCADQIYHAIKEGYRLFDGACDYGNEVEAGQGIARAIKDGLVKREELFIVSKLWNSFHDGDRVEPICRKQLADWGIDYFDLYIVHFPISLKYVDPAVRYPPGWKSEKDELEFGNATIQETWTAMESLVDKKLARSIGISNFSAQLVMDLLRYARIRPATLQIEHHPYLTQTRLVEYAQKEGLTVTAYSSFGPLSFLELSVQNAVDSPPLFEHQLVKSIAEKHGRTPAQVLLRWATQRGIAVIPKSNNPQRLKQNLDVTGWNLEEEEIKAISGLDRGLRFNDPLGYGLYAPIF

SEQ ID NO: 1022 - protein, 416 aa, Ralstonia eutropha JMP134
MYQHIKVPAGEKITVNQDFSLNVPDTPIIPYIEGDGTGLDITPVMIKVVDAAVEKAYAGKRKISWMEIYAGEKSTKVYGPDVWLPDETLDVLKEYVVSIKGPLTTPVGGGIRSLNVALRQQLDLYVCLRPVRYFKGVPSPVREPEKTDMVIFRENSEDIYAGIEWEAESPQAQKLIAFLQNEMGVKKIRFPETSGIGVKPVSKQGTQRLVRKAIQYAIDNDKPSVTLVHKGNIMKFTEGGFRDWGYELAQKEFGAELVDGGPWCKFKNSKTGRDIVIKDAIADAFLQQILLRPAEYSVIATLNLNGDYISDALAAQVGGIGIAPGANLSDSVAMFEATHGTAPKYAGKDYVNPGSEILSAEMMLRHMGWTEAADLIIASMEKSILSKKVTYDFARLLEGATQVSCSGFGQVMIENM

SEQ ID NO: 1023 - protein, 485 aa, Pseudomonas syringae pv. tomato str. DC3000
MLKNQLKDPSLLVDRAYVDGQWISADDGATLAISDPATGEVIAQVPALQGAETRRAIEAADRAWPAWRARPAAERAALLERWHQAMLDNVEDLALIMTLEQGKPLNESRGEIRYGASFVKWFAEEARRSYGETIPTPSADRRLMTLKQPVGVCAAITPWNFPNAMITRKCAPALAAGCTIIVKPSDLTPLSALALAVLAERAGIPVGVFSVVTGMPTAIGEELTGNPVVRKISFTGSTPIGRLLMRQSAEHIKRLSLELGGNAPFIVFDDADLEQAVAGIMLSKFRNAGQTCVCANRILVQSGIYDRFAARLVEEVAKLKVGNGLEEGVTIGPLINPAAVSKIARHIDDALSQGAKLLYGGLPNGDGQFVQPTVLGDTHAGMLLANEETFGPVAPLMRFTDEAEALALANATPYGLAAYYFTQDLRRSWRFGEALEFGMVGLNTGIISMEIAPFGGIKQSGLGREGSSYGLDEYLEVKAFHVGGL

SEQ ID NO: 1024 - protein, 348 aa, Listeria monocytogenes str. 4b F2365
MKALKLYGKRDLRYEEADMPTIEQPDDVILKVKTVGICGSDISRYSKLGPYVPGMVWGHEFSGEVIEVGSEVTDIEIGDRAAGCPALYCGECEYCKKGEFARCRKLTVIGARHPGAYAEYIKLPAENVVKIPDELDYEAAALVEPSAVVVHGFYHTKLQAGDDVVVVGSGNIGLLAIQWAKVFGAKRVIAIDVDDKKLALAKEVGADVVINSLKEDPLEVVAAHTDGLNADLVVEAAGSPITSAQVFAYAKKGGGVVFLGIPYADVTIERFYFEKIVRSELTVWGSWNAISAPFPGKEWQTTIHFLANKQINIEPMITHRLSLAEGPEVFERIYERNEFFGKVLFFPE

SEQ ID NO: 1025 - protein, 500 aa, Zea mays
MSSSPSFGLLAVAALLLALSLAQHGSLAATVGPRVIVVGAGMSGISAAKRLSEAGITDLLILEATDHIGGRMHKTNFAGINVELGANWVEGVNGGKMNPIWPIVNSTLKLRNFRSDFDYLAQNVYKEDGGVYDEDYVQKRIELADSVEEMGEKLSATLHASGRDDMSILAMQRLNEHQPNGPATPVDMVVDYYKFDYEFAEPPRVTSLQNTVPLATFSDFGDDVYFVADQRGYEAVVYYLAGQYLKTDDRSGKIVDPRLQLNKVVREIKYSPGGVTVKTEDNSVYSADYVMVSASLGVLQSDLIQFKPKLPTWKVRAIYQFDMAVYTKIFLKFPRKFWPEGKGREFFLYASSRRGYYGVWQEFEKQYPDANVLLVTVTDEESRRIEQQSDEQTKAEIMQVLRKMFPGKDVPDATDILVPRWWSDRFYKGTFSNWPVGVNRYEYDQLRAPVGRVYFTGEHTSEHYNGYVHGAYLSGIDSAEILINCAQKKMCKYHVQGKYD

SEQ ID NO: 1026 - protein, 157 aa, Glycine max
MASTKKITLKSSDGEAFEVEEAVAVAVESQTIKHMIEDNCADSGIPLPNVTSKILAKVIEYCKKHVEANCADEKPSEDELKAWDADFVKVDQATLFDLILAANYLNIKSLLDLTCQTVADMIKGKTPEEIRKTFNIKNDFTPEEEEEVRRENQWAFE

SEQ ID NO: 1027 - protein, 251 aa, Glycine max
  misc_feature (70)..(70): Xaa can be any naturally occurring amino acid
MCMMEGDENIQASTKGKNVESFTSLEAPRKKSKKIENKRRFSDEQIRSLECIFESESKLEPRKKMQLARXLGLQPRQVAIWFQNRRARWKSKRIEQEYRKLKDEYDNLASRFESLKKEKDSLQLELQKLSDLVVTSQDGGREDKDGKENSIEDGGSGSGYSSWKPEAKKPRFSNDEGLEERIGVYSDDQNENSIIRGVEKSEDKGHQLLRMDDHDHADMPLASLEKWYSGVDPSGILDQSCSSSQWLDFWT

SEQ ID NO: 1028 - protein, 1349 aa, Candida albicans SC5314
MPHSRQPSISSSIMSQSNHNHPQKIGPWKLGKTLGRGATGRVLLATHQTTGQKAAVKVVSKSELQDEETEKNGDGLPYGIEREIIIMKLLTHPNVLRLYDVWETSKALYLVLEYVEGGELFDLLVERGPLPEVEAIKYFRQIILGTAYCHALGICHRDLKPENLLLDSQLNVKLADFGMAALESNGKLLETSCGSPHYAAPEIVSGLKYHGAASDVWSCGVILFALLTGRLPFDDENIRNLLLKVQAGNFEMPVDEVSREARDLIARMLEVDPMRRISTEKILRHPLLTKYPMSNEDLISEKSLPHPQTGYKSLGSVRNIDKQILSNLTILWNDRPEEEIVDCLLKDGSNPEKTFYALLMRYKHNQEDNTNNNSPKKSTSFNNKVVRSGSKYSLNGTPRRKRASHISVSRPTSFQYKSNPGAGATANRNSVARHSVASSANNSPRKSPYKSPYRSPYRSPYKSPSKRYSYNQSPTKSPYGRRSNSQRQFENEPLKAKPRNIYNEIVDAQSNFSLPPSLPPSLPSKDSRYMIDEPNQPQLQQPALSQVPENPIVDESPDLMQSAKISSGKRNSIIGKNNNNSNSNKRMSKRKSIRASMTTGLKRNSITMKLLSTYAKLSGDDDWEYMDKQTKRTSATFAALCDKIFNQEDYDEEDEQLVDPEEKEAKEYERLMELERKKHEAELKARRELEKKKRRQKRRSILSSKKLSIIVKNDADPNNSEQELVDEGIKQPKRQSKNLTALRALSEGNHASEELTLEDVENLKRRSASQPVPKRRQTPVLTRRPVSRLDPLWQAHENEQLDRAKDALEQEWRDSQKRSSTVSRKKVNRESMISVMDDIVEEDQGRVNRRSTRNTYYERERDYELPEPTVEDSNLTDDYMTEIRKSRLLNSQLNVRDPLNEKRKSEPKTLISNVQIPSVTRKSRNFTTSNKRLSVLSMYSTKESYRDLNSIINSPDENPEQHQNMNKPALRTSIADRLDKAGLAEPEYETETDGEDKVSVIDLDDHLADRRTSYYDGSGKRASRASTTKRYNVHSSSGQRPKSKVPDLPKNDYDDTFVSNSDEVHKRQYKSMVSDESSASDDVFDKIKLPDGKSTKSSIDELANGTSTSGHRKPKIRHSQPGPEMLIPHLNGGIESSQPMSKVRGNNSSGHDDSVPPPPPAHKVNKKPLDDKTNFPPPEVDPKRKGSFFRKLSWGSKKTIENNTNAATNTTTQQQLPSPAESKEEKPKSSFFRWFSSSNTPSAAEIRKFNTILPKHEMSTALFALLNSWSNFGLKDLRNDQVGYYITGAISKHNSFNLKSCKFRIKINQRDFNQKSEIVCVRVKGSKVTTDTLFSEIEKVLLKEGVLDK

SEQ ID NO: 1029 - protein, 457 aa, Oryza sativa (japonica cultivar-group)
MMELEKNGNILLRRYEIGKLLGQGTFAKVYHGRNIVTSQSVAIKVIDKDKIFKVGLMDQIKREISVMKLVRHPNIVQLYEVMATKSKIYFVLEYVKGGELFNKVAKGRLKEDAARKYFQQLVSAVDFCHSRGVYHRDLKPENLLVDENGNLKITDFGLSALAESRRQDGLLHTTCGTPAYVAPEVISRKGYDGVKVDTWSCGVILFVLMAGYLPFQDSNLMEMYRKIGKAEFKCPAWFSSDVRKLVSRILDPNPRSRMPITKIMETYWFKKGLDSKLILKNVETNEPVTALADVNVVFSSMGSSSSKKTEEKQDAGKLTNLNAFDIISLSEGFDLSGLFEETDKKKEARFTSSQSASAIISKLEDVASCSKLTVKKKEGGVLKMEGASEGRKGVLAIDAEIFEVTPSFHLVEIKKNNGDTLEYQHLWKEDMKPALKDIVWAWQGERQDQQPEDHGQP

SEQ ID NO: 1030 - protein, 77 aa, Glycine max
ISSPAVATVNRAGACMVAPFTGLKSMDGFPTINTNDDVASIAIYGVTVQCIQVWTPVGRRKFDTLSYLPDLDDAAIG

SEQ ID NO: 1031 - protein, 216 aa, Zea mays
  misc_feature (50)..(50): Xaa can be any naturally occurring amino acid
EMMYTIIADELKSMDNKDMRPEDYLSFFCLGNREEPPSNGSPESEKSTDXSAVGLATKYRRFMIYVHAKGMIVDDEYVILGSANINQRSLAGSRDTEIAMGAYQPHYAWSTKNGHPDGQVYGYRTSLWAEHLGTIDDRFKDPSSLECVRFVNQIAVENWRRYTAEEMSTLQGHLLKYPVKVEADGKISPLPDQECFPDVGGKILGASTSLPDSLTM

SEQ ID NO: 1032 - protein, 329 aa, Glycine max
  misc_feature (237)..(237): Xaa can be any naturally occurring amino acid
MESTLLTNLLVFNNTLQPELMRSVHVYRRGDGEKREVEREFVFSESGSYGEMQATPIPGLVKSRVSEVCEGHRNGVWLCVFAFHADHTPQFCRIPPVLLVTRNPKLKMIPNLLDDLHVIYKLDRKEEDSDIAQDYTGEERQGNSNNCQPSWKVFPVLDQDLNCLPYEDDESESLDNETDVESSPGFAGFLVKKKRAPSDLVAKISLSDLVKYFGMPIVEASRNLNVGLTVLKRKRRXSGIPRWPHRKIKSLDSLIHDLQEEVKSQELEDREAALAVAKRQRMLESEKENIEKKPFMDIQSETKRFRQDVFKRRHRARAVGKHNSTVSST

SEQ ID NO: 1033 - protein, 79 aa, Brassica napus
  misc_feature (76)..(76): Xaa can be any naturally occurring amino acid
MSSKKVEGSSAPANRRDPYEVLCVARDASDQEIKSAYRKLALKYHPDKNANNPEASDLFKEVAFSYSILSDPEKRXQYD

SEQ ID NO: 1034 - protein, 418 aa, Listeria monocytogenes str. 4b H7858
MNKYFKNLATVLFTVSLLTTSITALPAMASAYEETHNASTIYISPLDAPHVGDTKITGKTTALSSFAIAIYTPEGRLTGTFFGTTNAAGTYAVDLSDFTYYDPLGYEASGNVILEKGAMVRSMTETNSDLIKTVTINYNYIQTAINELFLNNDPTGTILAATDQNAINAVQEQINTVTSSEKETFQEQLNNAQQQLDARIAQEQAAIQAVNQLFLEDNPANSIKAETTQDLIDQAQTLVDVLPASELKDTLQANIVKAQTELDERSKPVTPPKNDPETDNPEEPVTPVDPATPTPDEPSTPTDPATPTPDEPSTPTDPATPEKPEITTPENPESTVVESDSSENEPEKSADSKIVNNPIQITSQATKTATKQATKQAKSSVTKTTTLPIPKTGDTETTSSILFGTLMLASLALFRRKK

SEQ ID NO: 1035 - protein, 366 aa, Candida albicans SC5314
MATFAPHISKITKSSTKFNYGRIAKTFLGVAGSAAIATYFYNNGNPFNNNNNNNNNNGGSKNAAKALFGASAGANVKIAKVPEGKSASDYQKVYNDIATKISENLEFDENAGYYGQLLRLAWHTSGTYDKSDNSGGSYGGTMIFAPEEFDPENAGLQVGREFLMEFLVKYPWISRGDLWTLGGVAAVQESGGPKIEWRPGRVDDNTASKVPPNGRLPDASKDGKYVKDLFARMGFNERETVALLGAHVLGRCHKHNSGYDGPWGPSFNQFTNVFYTTLLGDWHVKKWDGKKQYEDDETGEFMMLPTDMALKEESYFLKYVKMYADDQDLFFKDFAKAFSKLISNGIKYPADSKPILFKTLDEQDEE

SEQ ID NO: 1036 - protein, 267 aa, Zea mays
MDTAGLVQHATSSSSTSTSASSSSSEQQSRKAAWPPSTASSPQQPPKKRPAGRTKFRETRHPVFRGVRRRGAAGRWVCEVRVPGRRGARLWLGTYLAAEAAARAHDAAILALQGRGAGRLNFPDSARLLAVPPPSALPGLDDARRAALEAVAEFQRRSGSGSGAADEATSGASPPSSSPSLPDVSAAGSPAAALEHVPVKADEAVALDLDGDVFGPDWFGDMGLELDAYYASLAEGLLVEPPPPPAAWDHGDCCDSGAADVALWSYY

SEQ ID NO: 1037 - protein, 106 aa, Brassica napus
  misc_feature (99)..(99): Xaa can be any naturally occurring amino acid
MDPSYTCIKEEFPTGINDSPSPPSSSTSSYLHSTSMAPNDPATLNSPQPIEGFHESGPPPFLTKTYDLVEDSRTNDVVSWSQDKNSFIVWDPQAFSMTXLPRSFKH

SEQ ID NO: 1038 - protein, 495 aa, Bacillus subtilis subsp. subtilis str. 168
MSSLTMQVTKRLETFLQGTKKLYIDGKFVPSASGATFDTPNPATGETLMTLYEAQAADVDKAVKAARKAFDQGEWRTMSPASRSRLMYKLADLMEEHKTELAQLETLDNGKPINETTNGDIPLAIEHMRYYAGWCTKITGQTIPVSGAYFNYTRHEPVGVVGQIIPWNFPLLMAMWKMGAALATGCTIVLKPAEQTPLSALYLAELIDQAGFPAGVINIIPGFGEDAGEALTNHEAVDKIAFTGSTEIGKKIMSTAAKSIKRVTLELGGKSPNILLPDANLKKAIPGALNGVMFNQGQVCCAGSRVFIHKDQYDEVVDEMASYAESLRQGAGLHKDTQIGPLVSKEQHERVLSYIQKGKDEGAKAVTGGSCPFEAGYFVAPTVFANVEDEMTIAKEEIFGPVLTAIPYETVDEVIERANHSEYGLAAGLWTENVKQAHYIADRLQAGTVWVNCYNVFDAASPFGGYKQSGLGREMGSYALDNYTEVKSVWVNLED

SEQ ID NO: 1039 - protein, 197 aa, Bacillus thuringiensis serovar konkukian str. 97-27
MDTNITWHTASVSKDERRVKNGHHSFVIWFTGLSASGKSTVANAVARKLFEKNIGNYVLDGDNIRHGLNKDLGFSESDRMENIRRIGEVAKLFVDQGAVVLTAFISPFRVDRKQVRDLLAVDEFIEVFVKCPIEECEKRDPKGLYKKARKGDIKDFTGIDSPYEEPEKAELIVETNKYSIEECAEQIVKYLQERSFI

SEQ ID NO: 1040 - protein, 466 aa, Brucella melitensis 16M
MPASTPKGNISERAPTASEKEALDFHAQGRPGKLEINPTKPMTTQRDLSLAYSPGVAVPVKAIAEDAARAYDYTAKGNLVAVISNGTAILGLGNLGALASKPVMEGKAVLFKRFADVDSIDLEIDTTDIDAFINAVRYLGPSFGGINLEDIKAPDCFIIESRLRELMDIPVFHDDQHGTAIIAAAGLINALHLTGRDMKTTKLVCNGAGSAGIACIELIKAMGFAPENVILCDTKGVVYQGREEGMNQWKSAHAVKTDRRSLANAMKDADVFFGVSAKGALTQDMVRSMAPNPIIFAMANPDPEITPEEVERIRDDAIVATGRSDYPNQVNNVLGFPYIFRGALDVRATTINDAMKIAAVNALAELAREDVPDDVVAAIRAAARALGRTISFRCRSIRACLPPFPPPSPRLRWKPAWPGAPLPILKATSANCWRAATRSPRRCAAFTSVCAASQSASYLPKARKNR

SEQ ID NO: 1041 - protein, 274 aa, Triticum aestivum
  misc_feature (11)..(11): Xaa can be any naturally occurring amino acid
  misc_feature (59)..(59): Xaa can be any naturally occurring amino acid
AGLKLAGGTLXADHTFLFFGAGEAGTGIAELVALEISMQSKTSQEEAHKNIWLVDSKGXLIVSSRKDSIQPFKKLYAHEHEPVKDLLSAIKDIKPTALIGSAGVGQSFTKEVIEAMSSINKRPIILALSNPTSKSECTAEQAYSWSQGRAIFGSGSPFDPVKYNEKLFVPAQANNAYIFPGFGLGVVISGAIRVKDDMVLAAAEALAEQVMAEHFDKGLIYPPFSSIRKISTNIAARVAAKAYDLGLASHLPRPKDLVKYAESCMYSPIYRSYR

SEQ ID NO: 1042 - protein, 163 aa, Thermoplasma acidophilum
MISMVFKRKEAGITDYSKRLKLLKSREKRFIVRITGKGVIAQVAEYSDIGDRILFTVTDKTLAKYGVDLRGNNIQVCYLVGYIAGIESEKNGVESAVLDTGRRKFRKGGRIAACLKGFTDAGIEVPHGEDVFPDKKRIDGKHLKSPVKISEIVKNFKKMEEKA

SEQ ID NO: 1043 - protein, 606 aa, Zea mays
MDTHIGSVNGAASNQTVGCPASAPGCPMASTPAQPAATLSAGEASLGRHLARRLVQVGVNDVFAVPGDFNLTLLDHLIAEPGLRLVGCCNELNAGYAADGYARARGVGACAVTFTVGGLSVLNAIAGAYSENLPVICIAGGPNSNDYGTNRILHHTIGLPDFSQELRCFQTVTCHQAVVNNLDDAHEQIDTAIATALRESKPVYLSISCNLPGLPHPTFSRDPVPFFLTPRTSNKMGLEAAVEATVEFLNKAVKPVLVAGPKLRVAKAGKAFVDMVDASGYAYAVMPSAKGLVPETHPHFIGTYWGAVSTAFCAEIVESADAYLFTGPIFNDYSSVGYSFLLKKEKAIIVQPERVIVGNGPAFGCVMMKEFLSELAKRVNKNTTAYENYKRIFVPEGQPLESEPNEPLRVNVLFKHVQKMLTGDSAVIAETGDSWFNCQKLKLPEGCGYEFQMQYGSIGWSVGALLGYAQGANHKRVIAFIGDGSFQVTAQDVSTMLRCEQNSIIFLINNGGYTIEVEIHDGPYNVIKNWNYTGFVDAIHNGEGKCWTSKVKSEEELTAAIETALGEKKDCLCFIEVIAHKDDTSKELLEWGSRVSAANSRPPNPQ

SEQ ID NO: 1044 - protein, 158 aa, Glycine max
MSSTSLKEMRNGGEDYSNGHGGGVRDLYGEDCATEDQLITPWTFSVASGCSLLRDPRYNKGLAFTEGERDAHYLRGLLPPAVFNQELQEKRLMHNLRQYEVPLHRYMAMMDLQERNERLFYKLLIDNVEELLPVCYTPTVGEACQKYGSIFRRPQGLY

SEQ ID NO: 1045 - protein, 176 aa, Zea mays
MEAGGAGSGLNGAVQAKGTGADDGSAKRLPPCCVKARAAAPESEARCHATVVSGWFTEPRSRCGKASKVQYYNNPMWPGEANSLKVEKILYQGKSLYQEVLVFESSTYGKVLVLDGIVQLTDKDECAYQEMITHLPLCSIPSPKKVLVIGGGDGGVLREVSRHSSVESIDICEIDQ

SEQ ID NO: 1046 - protein, 315 aa, Pseudomonas resinovorans
MHAQPVLAYRTNRPAHPAHSPPDPGGGCQQPLPGFTPGAHIEIQIAGSKPQWRAYSLVNLPGHAHYEIAVQLEEQSSGGSRWIHQLQVGQPLQVRAPKNHFPLVTQASDYLLIAGGIGITPMLGMARALAAGQQPFTLHYAGREAQGMAYLEEVRALGSAHCWISGGDPARRLPLASLLATPHNGRQLYVCGPKALIASVLHSARELGWDDSHVHSELFTGSLDAAGDASFEVELRSSGITLQVPAGKSVLEAMLDADLDPLFDCRRGDCGVCVAQVLEGSAEHRDICLSARERSDGRFCTCVSRASSARLVLDL

SEQ ID NO: 1047 - protein, 477 aa, Enterococcus faecalis V583
MKRVIWFRRDLRLQDNKALAHALQNSAADELILLFQMNPQQFIQESANHNAFFASLASFKERIDQEAHLQIMVGEPLDLFSRLKRKLPDWQAIYFNEDTCGFGAKRDQQAMRFFEENNIQSFSFQDAYLHGSEEIKKNDGSKYQVFTPYYNKWKEAPKETPIPVSYTAEKIFSACLFPEEEAAYREQIARIPLTHYSVGEETARRRLNTFIDQKLQSYENKRDFPYQDQTSHLSTFLRTGELSIRTIWQELASVPSSLSKETFKKELAWRDFYNMIYSAFPQQKEEAIQEKFRYIQWTNDPEMFVKWQKGETGYPIIDAAMRQLNQTGWMHNRLRMITASFLVKNLHIDWRWGEKYFQKMLIDYDAANNIGGWQWAASTGTDAVPYFRIFNPIIQSKKFDNDGQFIKKYVPELKQVPQKYIHQPNLMNEALQTQYHVHLGENYPKPIVDYASSKKQTLFLYEASKEIHQEMNNPRFQ

SEQ ID NO: 1048 - protein, 177 aa, Glycine max
RALKRAVGDPFKGGIEQGPQIDSEQFQKILKYIRSGVESGATLETGGDRFGNSGFYIQPTVFSNVKDDMLIAKEEIFGPVQSILKFKDLDDVIQRANNTHYGLAAGVFTKNINTANTLTRALRAGTVWVNCFDTFDAAIPFGGYKMSGQGREKGEYSLKNYLQVKAVVTSLKNPAWL

SEQ ID NO: 1049 - protein, 110 aa, Bartonella bacilliformis
EACLKMLQEIGSVKKIPQFIARAKDKNDPFRLMGFGHRVYKNYDPRAKIMQKTCHEVLKELNIQDNPLFDIAMELEHIALNDEYFINKKLYPNVDFYSGITLKALGFPTE

SEQ ID NO: 1050 - protein, 162 aa, Triticum aestivum
MAGMVFGLENPMMTALQHLLDIPDGEAGGAGAPRGEKQGPTRAYVRDARAVAAAPADVKELPGAYAFVVDMPGLGSGDIKVQVEDERVLVISGERTREEEEDPKYLRMEPRMGKLMRKFVLPENADMEKISPACRDGVLPVPVEKLPPPEPKKPKPIQVQVA

SEQ ID NO: 1051 - protein, 109 aa, Bartonella bacilliformis
TCLKMLQEIGSVKKIPQFIARAKDKNDPFRLMGFGHRVYKNYDPRAKIMQKTCHEVLKELNIQDNPLFDIAMELEHIALNDEYFINKKLYPNVDFYSGITLKALGFPTE

SEQ ID NO: 1052 - protein, 479 aa, Streptomyces avermitilis MA-4680
MSSTFRNYIDGAFADASDGRTLDVVDPTTGDVYATSPLSGAADVDAAMAAAAAAFPVWRDATPSVRQRTLLKIADAMEARADELVAAESRDTGKPLHLTRSEELAPAIDQVRFFAGAARMLEGRSAGEYMEGMTSIIRREPVGVCAQVAPWNYPLLMAVWKFAPALAAGNAVVLKPSDTTPASTVLIAEIIGGVLEELGLPRGIFNVVCGDRETGRLMVEHPTPAMASITGSVRAGIQVAQSAAKDVKRVHLELGGKAPAVVFEDADLAKAVEDLVVGGFFNAGQDCTAATRVLVHESVHDEFVAALAKAAADTKTGQPDDEDVLYGPLNNAGQLAQVSGFIERLPEHATIEAGGHRVGEKGYFYAPTVVSGLRQDDEIVQNEVFGPVMTVQSFTDEAQAVQYANGVDYALASSVWTKDHARAMRMSKNLDFGCVWINTHMALVAEMPHGGFKKSGYGKDLSAYGFEDYTRIKHVMTSL

SEQ ID NO: 1053 - protein, 250 aa, Zea mays
MVKAYPTVNEDYLKAVDKAKRKLRGLIAEKNCAPLMLRLAWHSVGTFDVVTKTGGPFGTMKNPVEQAHGANAGLEIAIRLLEPIKEQFPILSYADFYQLAGVVAVEVTGGPDVPFHPGRQDKPEPPPEGRLPDATQGSDHLRQVFSTQMGLSDQDIVALSGGHTLGRCHKDRSGFEGAWTSNPLIFDNSYFKELLSGEKEGLLQLPSDKALLSDPSFRPLVDKYAADEDAFFADYAEAHLKLSELGFAEA

SEQ ID NO: 1054 - protein, 339 aa, Vibrio vulnificus YJ016
MLSQLFRQIRYVFRQTKKQKGQFIQMVNNSIQWFPGHMHKAQKEIAEAIPQIDVIIEVLDARIPFSSENPLISKIRGEKPVVKVLNKRDLADPELTELWIEHLEKEQNVKAMAITTSQTQEVHKILELCRKLAPHREEVGKNIRTMIMGIPNVGKSTIINTLAGRAIAQTGNQPAVTRRQQRINLQNGIVLSDTPGILWPKVENPHSGFRLAATGAVKDTAMEYDEVAFYTVEYLAKHYPEKLKERYQIEELPETDVELMEEIGQRRGALRSGGRVDLHKASEILLHELRSGTLGQITLERPEMITEELVEVELEAARRAEEKAKNKEERRKRYLRNKR

SEQ ID NO: 1055 - protein, 115 aa, Hordeum vulgare subsp. vulgare
MARAAASQLVLVALVAAMLLVAADAAISCGQVSSALSPCISYARGNGAKPPAACCSGVKRLAGAAQSTADKQAACKCIKSAAGGLNAGKAAGIPSMCGVSVPYAISASVDCSKIR

SEQ ID NO: 1056 - protein, 109 aa, Bartonella bacilliformis
TCLKLLQEIGSVKKIPQFIARAKDKNDPFRLMGFGHRVYKNYDPRAKIMQKTCHEVLKELNIQDNPLFDIAMELEHIALNDEYFINKKLYPNVDFYSGITLKALGFPTE

SEQ ID NO: 1057 - protein, 113 aa, Oenococcus oeni
DIKLLVVSDAEGILGIGDWGVQGVDIAVGKLMVYTVAAGIDPSTVLAVVIDAGTNNEKLLKDPMYLGNKFNRVRGDKYYDFIDKFVNHAESLFPNLYLHWEDFGRSNASNILN

SEQ ID NO: 1058 - protein, 159 aa, Zea mays
  misc_feature (41)..(41): Xaa can be any naturally occurring amino acid
  misc_feature (101)..(101): Xaa can be any naturally occurring amino acid
  misc_feature (109)..(109): Xaa can be any naturally occurring amino acid
MGGILAVVGCSECSQAKRARILACSIRLKHRVPDWPGLYQXTRPTSLRQQRFYSSSPLSGEQPLLNEDRIGEVETHVQIYNHIKVRKQLTGTHKFSTSSDXEVIMPLYXKHCHNFVHMLDRLLTFELYDTRDRTYVTTRDTIEGNPLYIGCGNDGSDCI

SEQ ID NO: 1059 - protein, 440 aa, Shewanella oneidensis MR-1
MTKATQTSRQAQIDAIKKDWAENPRWKNVRRPYTAEEVVALRGSIVPENTIAKRGAAKLWDLVNGGSKKGYVNSLGALTGGQAVQQAKAGIEAIYLSGWQVAADANLAGTMYPDQSLYPANSVPAVVSRINNSFRRADQIQWSNGVNPEDENFVDYFLPIIADAEAGFGGVLNAFELMKSMIDAGAAGVHFEDQLASVKKCGHMGGKVLVPTQEAVQKLVAARLAADVSGVETLVIARTDANAADLLTSDCDPYDRDFVTGERTNEGFYRVNAGLDQAISRGLAYAPYADLIWCETAKPDLEEARRFAEAIHAQYPDQLLAYNCSPSFNWKKNLDDATIARFQQALSDMGYKYQFITLAGIHNMWYNMFDLAYDYARGEGMKHYVEKVQEVEFAAAKKGYTFVAHQQEVGTGYFDQVTTVIQGGHSSVTALTGSTEEEQF

SEQ ID NO: 1060 - protein, 380 aa, Phanerochaete chrysosporium
MSKRTFKIVILPGDGIGPEVVAEATRVLEVVSASSSDVEIKLETHDFGGCSIDKHGEPLTAATLEACKLADAILLGAIGGPKWGVNSKVRPEQALLALRKALGLYANIRPANFASDSLLAYSPLKPSVARGVDIIVIRELIGGAYFGERKELGARAQEDAAWDTMIYSVPEVQRITRSRRQVASPDPPLPVHSIDKANVLASSRLWRKVATETIQNEFPQLKLDHHLVDSASMLIVANPKKLNGVILTENLFGDILSDESSVIPGSLGLLPSASLAARPLWPNTAHRRSSPRRVYEPIHGSAPDIAGQGIANPIGTILSAAMLCGTRSVWRSPAKAIEAAVEGARRQGDRREGLRTADLGGSSKTKDIGHKVVEILKATL

SEQ ID NO: 1061 - protein, 453 aa, Aquifex aeolicus VF5
MWELDPKTLEKWDKEYFWHPFTQMKVYREEENLIFERGEGVYLWDIYGRKYIDAISSLWCNVHGHNHPKLNNAVMKQLCKVAHTTTLGSSNVPAILLAKKLVEISPEGLNKVFYSEDGAEAVEIAIKMAYHYWKNKGVKGKNVFITLSEAYHGDTVGAVSVGGIELFHGTYKDLLFKTIKLPSPYLYCKEKYGELCPECTADLLKQLEDILKSREDIVAVIMEAGIQAAAGMLPFPPGFLKGVRELTKKYDTLMIVDEVATGFGRTGTMFYCEQEGVSPDFMCLGKGITGGYLPLAATLTTDEVFNAFLGEFGEAKHFYHGHTYTGNNLACSVALANLEVFEEERTLEKLQPKIKLLKERLQEFWELKHVGDVRQLGFMAGIELVKDKEKGEPFPYGERTGFKVAYKCREKGVFLRPLGDVMVLMMPLVIEEDEMNYVIDTLKWAIKELEKEV

SEQ ID NO: 1062 - protein, 719 aa, Zea mays
ASLRAGKSFPVGRVSCRVRSVQARRVRFGGKLGRCWCSLGAAFGLIGAAVWRCAVCRLAVCASLVADVFRKQGQEWYCTSGLPSDISVVVGEQSFHLHKFPLLSKSGLLEKRIREKIDNRDDSCAIDLSDIPGGAKAFELAAKFCYGVKFEMTASNVVHLRCAADYLEMTEEISEGNLIAETESFLTQTVLRSWKDSVKALQTCDNVLDVAERLQIVKRCVDSIATKSCSDPDLFGWPVARYGGPMQSPGGSLLWNGISTGARPRNSSPDWWYDDVSCLSLPLYKKLISAMEYRGISQGVIVGSLNHYAKRRLPGLNRRKSIGDASNCLSMTSLTSIPSEDDQKYLLEEIDRLLPFQRGVTSCKLLFGLLRTAIFLKASPSCVSNLERRIGMQLDKASLEDLLIPNVSDSVETLYDVECVQRIVDHFLSMDQETGGASPGIGEDGQMLASPSLMPITMVAKLIDGYLAEVAPDMNLKLPKFRSLAAAIPDYARPIDDGLYRAIDIYLKAHPYLPESDKEELCRVMDCQKLSLEACTHAAQNERLPLRVILQVLFFEQLQLRSSIAECLMISEPLDGGGGFSRQLGGLPVSGEHLRGAGWPLAARENQTLREGMDSMKQRVSELEKECFAMKEDIERLGRSRSAGKSRFPFALAAKPHVCGTKDKEAAPESSKSETSKSKAAAATRSDDKLAVVKGGAAAAGDGGPQLKHRKHKTSLSAC

SEQ ID NO: 1063 - protein, 282 aa, Solanum bulbocastanum
MDRMYSGGGDMGYGYENGVVMTRDPKPRLRWTADLHDRFVDAVTKLGGPDKATPKSVLRLMGLKGLTLYHLKSHLQKYRLGQQTKKQNAAEQNRENIGESFRQFSLHSSGPSITSSSMDGMQGEAPISEALRCQIEVQKRLHEQLEVQQKLQMRIEAQGKYLQAILDKAQKSLSTDMNSPSAVDETRAQLTDFNIALSNLMDYMHGHNGDETSAGERTQDDTNKDLQRSTYLTEGEQKKIMNIKLEETSVSFDLNSRSSYDFIGMSSAALEAKHFSNGRLEI

SEQ ID NO: 1064 - protein, 113 aa, Oenococcus oeni
DIKLLVVSDGEGILGIGDWGVQGVDIAVGKLMVYTVAAGIDPSTVLAVVIDAGTNNEKLLKDPMYLGNKFNRVRGDKYYDFIDKFVNHAESLFPNLYLHWEDFGRSNASNILN

SEQ ID NO: 1065 - protein, 462 aa, Bacillus thuringiensis serovar konkukian str. 97-27
MTFSKSTTDKPSYTYEELSEKNKAYVWHPFTQMKDYLEEDPVIIERGEGRKLYDVNGNEYWDGVSSIWLNVHGHQVPELDEAIREQLNKIAHSTMLGLANVPSILLAEKIIEVVPEGLKKVFYSDSGSSAVEIAIKMAFQYWQHKGKPKKQRFVTLKEAYHGDTIGAVSVGAIDLFHQVYSSLLFEAIKMPYPYTYRSPYGNDKAEIVKKHLEEMEELLKDKHEEIAAIIVEPLMQGAGGMITMPKGYLRGLRNLCTKYNVLFITDEVATGFGRTGKMFACEHENVTPDILTAGKGLTGGYLPVAITVTTDEIYNAFLGSYEEQKTFFHGHSYTGNPLGCAVAIANLELYEKTNLIEEVARKTEYVATQLEELFACKHVGDIRQCGLMVGIELVKNKETKEAFEWTERVGVQVCKRSRELGMILRPLGNTIVFMPPLASTIDEIDEMLRILYKAISDITEGE

SEQ ID NO: 1066 - protein, 236 aa, Rickettsia rickettsii
MIDYTKTLTAASKNKTFDEGLRQYMLKVYNYMALALLLTGVAAVTTISVEPIYNLMFQTGFGTIIMFAPLGIALYFFMGFGQMNLQTAQILFWVYAGLTGMSLAYLALIYTGASIARTFFICSSVFGAMSLYGYSTSRDLTSMGSFFAMGLIGLIIASLVNLFLKSSALSFATSLIGIVIFMGLIAWDTQKIKSMYYMAGNDEVGQKLSIMAAFTLYLDFINLFLYLMRFLGNRRD

SEQ ID NO: 1067 - protein, 167 aa, Blumeria graminis
MGPTTTLYDFMPKDKNGEPVPLEKYKGQVVLIVNTASKCGFTPQFEGLEKLYKSVSSTHPGKFTILGFPCNQFGGHDPGSNDEIQNFCRINYGVTFPMLGKVNVNGDTADPLFEWLKVEKPGIMGMKRVKWNFEKWLVSKDGKPIKRYSSTAGPEGFQSLIIEEIEK

SEQ ID NO: 1068 - protein, 78 aa, Glycine max
MGLWMLLEGFLLLANSLAILNEDRFLGPRGWSMSEVSGNGQTKSLKGQIVGLIYATQFLRMPLIALNVLIIVVKMVSG

SEQ ID NO: 1069 - protein, 486 aa, Bordetella pertussis Tohama I
MEDLRNHEFKNYIGGQWVACAAGKTYPNVNPADTDDIVGRFQASQAEDAAAAVAAAQAAFDGWRNLAVSKRAALMQRAADYLEAHAEQFGRELTREEGKALNLAKDEVLRSAQTIRFYAAEGQSFSGETFVNDDPDMVVYSQREPLGVVTVISPWNFPVSIPARKIAPALITGNTVVFKPSSDAPLSGLRLVEAFEQAGLPPGVLNLVTGSASAIGAAITQASQVRAVSFTGSTAAGEQIHRSVDMTTRTQMELGGKNPLIVMADADLDRAVDLVVKGGFSLSGQACTGTSRVLVDAPVKAAFTEKLLAKVKALKVGNSLEGSFDLGPLATARQLESVMRYIEVGKQEARLLCGGERLEGPGYERGYYLTPAVFADVTQQMRIAREEIFGPVIALIEVNGYEDAIAKANDTEYGLAAAIATTNAQYAHRFARDIQAGTVKINRTTTGNLINAPFGGLKRSSTSTFRESGRIGLEFYTQIKTVYRAG

SEQ ID NO: 1070 - protein, 158 aa, Xanthomonas campestris pv. campestris str. ATCC 33913
MNIVRYPQWPTHALQNEIKQVFDRFFEQSGDTDESAVVTAQWVPRVDIKEEANQFVLYADLPGIDPSQIEVQMDKGILSIKGERKSESSSETERFSRIERRYGSFHRRFALPDSADADGITADGRNGVLEIRIPKRPAATPRRIQVGGGQDGGGTTVQ

SEQ ID NO: 1071 - protein, 415 aa, Glycine max
  misc_feature (279)..(279): Xaa can be any naturally occurring amino acid
MGNCWGPPPHNPTPTTTGNLSSSTGTTGTSQAISSISYTTTTTTTTTSSGSGSSSINSKFSVSSGGQPYPNGQILPTSNLRIFTFAELKAATRNFKADTVLGEGGFGKVFKGWLEEKATSKTGSGTVIAVKKLNSESLQGLEEWQSEVNFLGRLSHPNLVKLLGYCLEESELLLVYEFMQKGSLENHLFGRGSAVQPLPWDIRLKIAIGAARGLAFLHTSEKVIYRDFKASNILLDGSYNAKISDFGLAKLGPSASQSHVTTRVMGTYGYAAPEYVATXGHLYVKSDVYGFGVVLVEILTGQRALDTNRPSGLHSLTEWVKPYLHDRRKLKGIMDPRLEGKFPSKAAFRIAQLSLKCLASEPKQRPSMKEVLENLERIQAANEKPVEPKFRSTHAASRQGHQAVHHRSPRQDGSY

SEQ ID NO: 1072 - protein, 331 aa, Oryza sativa (japonica cultivar-group)
MREEEEPSWFARWEEQLPAPDELMPLSQSLITPDLAVAFDIPTHGGGGGGGVGGGVVGGDGVGGGGGGGGGGGGGVGAGEMNGGASSAAGSSGGGGGGGGGDEPARTLKRPRLVWTPQLHKRFVDAVAHLGIKNAVPKTIMQLMSVDGLTRENVASHLQKYRLYLKRMQGVGNGGGGGGGGGAGAGGSHSSGSGTDAATEHLFATGPVPFLPPGRAPAGGDPYPPFAPMGGHHHHPPQIGHFHHHPAARPLGHYGSGPGAGFDHGFLSRAVAGGGPPVGPPGMHHRMVGPAAGMAMMAPSPFAEELELGSRGGGGGGGRRELTLFPTTGDH

SEQ ID NO: 1073 - protein, 474 aa, Aspergillus niger
MAFARLAARRLPVARRLVPSIDSLPQQRFFSMSQHVKSQNKASVPNPDPAADSVSVAFVNDQSPYMLPTYVRPAPVMVKGQGCYLWDMENRKYLDLTAGIAVNSLGHCDPEVAQIIAEQAEVLVHASNLYYNAWTGALSKLLIDVTQKSGAMRDASQVFICNSGTEANEAAIKFARKVGRSLDPSGAKHEVVSFHNSFHGRTMGALSATPNPKYQTPFSPMLPGFKYGNYNDVAQLESLVTEKTCGVIVEPIQGEGGINVATPEFLVALRKRCDEVGAVLIFDEIQCGLSRTGSFWAHAHPSLAPASGEAAHPDILTSAKALGNGIPIGATIVSEKTVAKHIKPGDHGTTYGGNPLVCRVAHHIVNRLADPELQKSVEIKGDLLVSGFKDLQKKFPNVISEIRGRGLIRGLQLSPEFVSKAGDLVGAARERGMLIITAGEGCIRFVPPLTITEEQIKSGLKILEQALEAVVAQA

SEQ ID NO: 1074 - protein, 336 aa, Lactobacillus reuteri
MEALVLTGKKQLEIEDIKEPEIKPDEVLIHTAYAGICGTDKALYAGLPGSASAVPPIVLGHENSGVVTKVGSEVTNVKPGDRVTVDPNIYCGQCKYCRTQRPELCEHLDAVGVTRNGGFEEYFTAPAKVVYPIPDDVSLKAAAVVEPISCAMHGVDLLETHPYQKALVLGDGFEGQLFAQILKARGIHEVTLAGRSDEKLENNRKHFGVKTIDTTKEEIPADAYDIVVEAVGLPATQEQALAAAARGAQVLMFGVGNPDDKFSVNTYDVFQKQLTIQGAFVNPYTFEDSIALLSSGVVDPLPLFSHELDLDGVEDFVSGKLGKVSKAVVKVGGEEA

SEQ ID NO: 1075 - protein, 435 aa, Nostoc sp. PCC 7120
MTTELLQQVRVIDPVSGIDNITDVLIADGVIQAIAPNIPNTRPDTQIRDCRGLVLGPGLVDLYSHSGEPGFEERETLASFLQAAAAGGFTKVSILPDTSPAIDNPALVAQLQKRGQGAGGRGQGEKSPIPNPQYLAPLLYIWGAMTLDVAGKQMTELADLAAAGVVGFTDGLPLDNLSLVRRLLEYVQPLGKPVAFCPCDRQLSANGVMREGADALRFGLPPIPPSAETSAIAALLELVAASGNTQVHIMRVSTARSVELIAAAKAQGLPITASTTWLHLLLDTKAVKSYNTSLHLDPPLGNASDVKALREGVRTGVIDAIAIDHAPYTYEEKVQAFAEAPPGAIGFELALPLLWQNLVETGEFTALELWQALSTRPAQCIQQKVSAFAPHHQAELTLFDPQKIWKVEKKNLYTLSSNTSWLGQELQGRVIQTWV

SEQ ID NO: 1076 - protein, 158 aa, Listeria innocua Clip11262
MNVHDFSEKAMNGKEIALSDYKGKVLLIVNTASKCGLTPQLEGLEKMYKKLGGDNFEILGFPCNQFLRQDPGSDEEILEFCQMNYGVTFQMFSKIKVKGKDAAPLYKYLTEQTGGKKVEWNFAKFLIDENGEVVERFPSKMKPEDFEDKVEALVAAVK

SEQ ID NO: 1077 - protein, 512 aa, Bradyrhizobium japonicum USDA 110
MDKPTPKADVFQANRDRVAPLLKTLRADGIGHMIDGKIVPSISGETFETKSPVDGAVLASVARGNAEDIDRAATAAALAFKSWREMGPAMRKKLLHRVADAIEDNADDIAVLECIDTGQAYRFMAKAAIRAAENFRFFADKCAEARDGQNTPSDEHWNVSTRVPIGPVGVITPWNTPFMLSTWKIAPALAAGCTVVHKPAEWSPATAAILARLVKEAGVPDGVLNTVHGFGEEAGKALTEHPAIKAIGFVGESATGSAIMVQGAPTLKRVHFELGGKNPVIVFDDADLDRALDAVVFMIYSLNGERCTSSSRLLIQQSIAEKFVEKLTARVKALKVGHPLDPSTEIGPLIHERHLAKVCSYFDVARKDGATIAVGGKAYDGPGGGHYVEPTLVTGAHGKMRVAQEEVFGPFLTVLPFKDEADAIEVANDIRYGLTGYVWTNDVGRALRVADALEAGMIWLNSENVRHLPTPFGGMKASGIGRDGGDYSFDFYMETKHVSLARGTHKIQKLGI

SEQ ID NO: 1078 - protein, 297 aa, Glycine max
  misc_feature (128)..(128): Xaa can be any naturally occurring amino acid
SYVGPPPRYADVSWPGEAHTYKIEKILFHGKSEFQELLVFESSRQGKVAILDGHIQLTENDEFAYQEMLTHLALCSIPDPKKVLLIGGGDGGILREISRHSSVEHIDICELDQMVIDVYSEFFPDIAXGYEDPRVHVHISDGVAFINSVPEGTYDVIISDAFPAMGHSADVLADECFLESVAKALRPGGVFSAPADSLWHKNFVVADTIANCKKIFKGSVNYAWTTVPTYARHFLSNYIGVIGFMLCSTEGPPVNFKHPINKLNPEKNGVAKGPTKFYNPEIHAAAFCLPSFVDKVD

SEQ ID NO: 1079 - protein, 120 aa, Zea mays
MNAPDRYERFVVPEGTKKVSYERDTKIVNAASFTVEREDHTVGNILRMQLHRDPNVLFAGYKLPHPLQYKIIVRIHTTSQSSPTQAYTQAINDLDKELEYLKQAFEDEKNRYEDRMKQGF

SEQ ID NO: 1080 - protein, 343 aa, Corynebacterium glutamicum ATCC 13032
MRIATLTSGGDCPGLNAVIRGIVRTASNEFGSTVVGYQDGWEGLLGDRRVQLYDDEDIDRILLRGGTILGTGRLHPDKFKAGIDQIKANLEDAGIDALIPIGGEGTLKGAKWLSDNGIPVVGVPKTIDNDVNGTDFTFGFDTAVAVATDAVDRLHTTAESHNRVMIVEVMGRHVGWIALHAGMAGGAHYTVIPEVPFDIAEICKAMERRFQMGEKYGIIVVAEGALPREGTMELREGHIDQFGHKTFTGIGQQIADEIHVRLGHDVRTTVLGHIQRGGTPTAFDRVLATRYGVRAARACHEGSFDKVVALKGESIEMITFEEAVGTLKEVPFERWVTAQAMFG

SEQ ID NO: 1081 - protein, 488 aa, Lycopersicon esculentum
MACSVDTLAPFLGPNTTNAVAAASYICNQFSGVSDRFVDTGYAIDSTYLLFSAYLVFSMQLGFAMLLAGSVRNTMNIMLTNVLDAAAGGLFYYLFGFAFALGGPSNGFIGRHFFGLKEIPSNSFDYMNFLYQWAFAIAAAGITSGSIAERTQFVAYLIYSSFLTGFVYPVVSHWFWTPDGWASPTNSNLLFGSGVIDFAGSGVVHMVGGIAGFYGALIEGPRIGRYDHTGRSVALRGHSASLVVLGTFLLWFGWYGFNPGSFNKILVTYGASGGYYGQWSAVGRTAVTTTLAGCTAALTTLFGKRILSGHWNVTDVCNGLLGGFAAITAGCSVVEPWAAIICGFVAALVLIGFNMLAEKFKYDDPLEAAQLHGGCGAWGIIFTGLFAKGEFVDQVYPGKPGRPHGLFMGGGGKLLGAHIIQILVIIGWVSATMGPLFYILHKFKLLRISSEDEMAGMDLTRHGGFAYYHEEDPKLGMQMRRIEPTTST

SEQ ID NO: 1082 - protein, 457 aa, Vibrio vulnificus YJ016
MEYIAHSILIISAHQKKDRPMTNLTRRQQIEALEKDWATNPRWKNVKRTYTAEEVVALRGSMVPANTIAQRGADKLWSLVNGSSKKGYVNCLGALTGGQAVQQAKAGIEAIYLSGWQVAADNNTASTMYPDQSLYPVDSVPSVVKRINNSFRRADQIQWSNGKSPEEGGIDYFLPIVADAEAGFGGVLNAYELMKSMIEAGAAGVHFEDQLASVKKCGHMGGKVLVPTQEAVQKLVAARLAADVAGTTTLVIARTDANAADLLTSDCDPYDADFIVGERTQEGFYRVRAGIDQAISRGLAYAPYADLIWCETATPCLEEARKFAEAIHAEYPDQLLAYNCSPSFNWEKNLDAETIAKFQQELADMGYKYQFITLAGIHNMWFNMFELAHAYAQGEGMRHYVEKVQRPEFEAAEKGYTFVAHQQEVGTGYFDKMTNTIQGGNSSVTALTGSTEEDQFH

SEQ ID NO: 1083 - protein, 197 aa, Glycine max
MSASRFIKCVTVGDGAVGKTCMLISYTSNTFPTDYVPTVFDNFSANVVVDGSTVNLGLWDTAGQEDYNRLRPLSYRGADVFLLAFSLISRASYENVAKKWIPELRHYAPGVPIILVGTKLDLRDDKQFFQDHPGAVPITTAQGEELRKLIGAPIYIECSSKTQQNVKAVFDAAIKVVLQPPKQKKKKRKGQKACSIL

SEQ ID NO: 1084 - protein, 253 aa, Brassica napus
  misc_feature (50)..(50): Xaa can be any naturally occurring amino acid
  misc_feature (58)..(58): Xaa can be any naturally occurring amino acid
NHREYQDLQRLYSEIGHPPSDAFLFLRSYPNRRKQNPPTRFLRLTHKLRXTSTDFILXGNHHHSTIIRIFGYYDECKRRFNVRLWKIFTDCFNCLPVAALIDDKILCMHGGLSPELDNLNQIREIQRPTEIPDSGLLCDLLWSDPDQKIEGWADSDRGISCTFGADKVAEFLDKNDLDLICRGHQVVEDGYEFFAKRRLVTIFSAPNYGGEFDNAGALLSVDESLVCSFEIMKPALASSSGHPLKKVPKMGKS

SEQ ID NO: 1085 - protein, 371 aa, Vibrio vulnificus YJ016
MPLNHSCPPLWGHLSSFYPNKECSMFFEWQGNEPATLQCVDKFFETDDTVSIRLADLTESLLFQFKPGQFVNLGVEIDGKMEFRAYSISSLAGEEYLQFTIKRVEGGKVSNFIIDSLLIGDTVQALAPAGEFNCVDHPPRELDGQGKALLISAGCGVTPVFAMAKHWLSNEMNVDIEFLHIARSAQETIYFDHLSTCQSAYAHFHLKLLLKDAQGTTHPQGRFNAQWLQDLVPDFATRTIYLCGPNQFMQDTQDYLQALGFDMNHFYHESFTPEKVEAMEASDEEVCISVPDFAQTINAKKGQLLADVLENAGLPLIVACRSGICGSCKCKVANGQVRSISQETLTADEIAQGYVLACSSHIESDLDVSLH

SEQ ID NO: 1086 - protein, 353 aa, Xylella fastidiosa 9a5c
MRGYVLEAKGTAKWKDVPMPVLGPNDALVRPTAVATCTTDVHMIATAALPKTVGKVIGHEAVGVVEKVGENVKAFRPGDRVVLPCGNSDWRHPRAQRGEAKYYQTNSPYYSDDPSIGGVFSEYVRTLDADLNLARIPDKVSDLQAVMLPDMAATGFTGVERLGIQFGETVLVMGLGPVGLMAVAGAALRGAGRIIGVDSRPNTVELARAYGVTDIVDFTGGQTLEKVMALTAGQPVDSVLIASGGTASEVFTTALKAVKFGGRVACVSGFLHDESVTIPLEVWNYGFMEKFLTGVHVQDGRDWIERLLAMLECGRFDTRPLVSHVLHGWDSLEQGIELMRSRDPAVIKPVIVI

SEQ ID NO: 1087 - protein, 215 aa, Solanum bulbocastanum
MLTCITCKQKIEDDGGEEGPRGRAPTPHTKDSIKSLTAQIKDIALKVSGAYKCKSSTPAGTYRKGHRPYPDFDTISEGVPYPFQPASSSSTPAWDFTSAGNLRTPRPDSRFARGFSGGGGGAESISQSGDVVVEDDGQKDWTAHVEPGVQITFVSLPNGGNDLKRIRFSRDMFNKWQAQRWWGENYDRIMELYNVQRFNKQALNTPGRSEDGAWI

SEQ ID NO: 1088 - protein, 121 aa, Brucella melitensis biovar Abortus
MADKSVFDTCSTASTPRKNWASSLKVSGHIKWFDVAKGYGFIVPDQPGLTDILLHVTSLRRDGFQTALEGARIVCEVRHGDRGLQCFRVLSMDASTAIHPAQMPPQCTHVTVTPSSGLERV

SEQ ID NO: 1089 - protein, 359 aa, Capsicum chinense
MGSINQSLTQTEDEAFVFAMQLASASVLPMVLKATVELDLLEIMAKSGPGAFISPSELAAQLPTKNPEAPVMLDRMFRLLATYSVLNCTLRTLPDGRVERLYSLAPVCKFLTKNGDGVSIAPILLMNQDKVLMESWYHLTDAVLDGGVPFNKAYGMTTFEYHGTDPRFNKVFNCGMSDHTTLSMKKILEDYTGFEGLNSIVDVGGGTGATVNMIVSKYPSIKGINFDLPHVIRDAPSYPGVEQVGGDMFVSVPKADAIFMKWICHDWSDDHCIKLLKNCYEALPANGKVIIVECILPEAPDTSAATKSKVHGDIIMLAHNPGGKERTEKDFEALANWGWFSRFRKVCCAYHTWVMEFNK

SEQ ID NO: 1090 - protein, 476 aa, Aquifex aeolicus VF5
MIEKKMLIGGEWVDKEEKIEVIYPYTRKPIGRVPKGDEKDVEKAIERAKEGFKEIFSLTAYERYEILMRAAQLLKERAEEFAKTLVLEVGKTIREARTEVQRAIQTLIFSAEEAKRVNGETFPIDAHPNGKGKLGFYIRVPVGIVSAITPFNFPLNLSMHKVAPALAAGNAVILKPSERTPLTPLMLGEILLEAGVPPKALSVIPGYGDVGKAMTTHPDVRVVSFTGSRKVGDIIARQVGIKKLVLELGSNSAIILHKDGNLEKAVEKTVQGGYAIAGQVCISVQRVFVHEDLYDEFIKRLKERVSKLKVGDPMNEDTDLGPMIAPSELERIQEWISEAVQKGAKIEAGGLRCAEDETIFSPTIVSLVPEDSKLFKEEAFAPVVAVNPYKDIEEAIRWVNSSDYGLQVGVFTNDVKLAWKCIKEIEAGGVLINEGPTFRADHMPYGGVKYSGIGREGPKFAIEDYTEIKTVIFDLT

SEQ ID NO: 1091 - protein, 258 aa, Zea mays
  misc_feature (17)..(17): Xaa can be any naturally occurring amino acid
  misc_feature (51)..(51): Xaa can be any naturally occurring amino acid
  misc_feature (110)..(110): Xaa can be any naturally occurring amino acid
  misc_feature (131)..(131): Xaa can be any naturally occurring amino acid
  misc_feature (169)..(169): Xaa can be any naturally occurring amino acid
  misc_feature (178)..(178): Xaa can be any naturally occurring amino acid
  misc_feature (190)..(190): Xaa can be any naturally occurring amino acid
  misc_feature (197)..(197): Xaa can be any naturally occurring amino acid
  misc_feature (205)..(205): Xaa can be any naturally occurring amino acid
  misc_feature (224)..(224): Xaa can be any naturally occurring amino acid
MAKNYPTVSAEYSEAVXEKARRKLRALIAEKSCAPLMLRLAWHSAGTFDVXRRGTGGPFGTMKHQSELAHGANAGLDIAVRLLEPIKEEFPILSYADFYQLAGVVAVEVXGGPEIPFHPGRRDKPQPPPEXGRLPDATKGSDHLRQVFGKQMGLSDQDIVALSGGHTLXGRCHKERSXGFEGAWTTNPLXFDNSYFXELLSGDKXRALLQLPSDKALLSDPVFXRPLVEKYAADEKAFFDDYKEAHLKLSRTGGLLML

SEQ ID NO: 1092 - protein, 251 aa, Triticum aestivum
  misc_feature (125)..(125): Xaa can be any naturally occurring amino acid
  misc_feature (199)..(200): Xaa can be any naturally occurring amino acid
  misc_feature (204)..(205): Xaa can be any naturally occurring amino acid
  misc_feature (222)..(222): Xaa can be any naturally occurring amino acid
  misc_feature (224)..(224): Xaa can be any naturally occurring amino acid
  misc_feature (236)..(236): Xaa can be any naturally occurring amino acid
  misc_feature (243)..(243): Xaa can be any naturally occurring amino acid
MKTFLIFVLLAMAMNIATAARQLNPSNKELQSPQQSFSHQQQPFPQQPYPQQPYPSQQPYPSQQPFPTPQPQFPQQSQQPFPQPQQPIPLQPQQPFPQQPQQPQQPFPQPQQPFPWQPQQPFPQXTQQSFPLQPQQPFPQQPQQPFSQPQLQFPHQPEQISPQQPQQPFLLESQQPFPQQPQQPFSQPQQLIPMQPQQXXSPRXXQQSQQTFSRGPNNYFLXLXQPIPQATNKQTXSPLQTGXQPFPPSWQ

SEQ ID NO: 1093 - protein, 158 aa, Streptococcus intermedius
MTKIYDFSIFDQNNRSISLEIYKGNVLLIVNTATGCGLTPQYKGLQHLYTRYQNQGFEILDFPCNQFMGQAPGTAEEINRFCSLHYQTTFPRFAKVKVNGKEADPLYIWLKEQQAGPLGKRIEWNFTKFLINREGQVVKRFSSKAEPKEIEESLQKLL

SEQ ID NO: 1094 - protein, 227 aa, Thermus thermophilus HB27
MERPLESYKKEAAHAAIAYVQDGMVVGLGTGSTARYAVLELARRLREGELKGVVGVPTSRATEELAKREGIPLVDLPPEGVDLAIDGADEIAPGLALIKGMGGALLREKIVERAAKEFIVIADHTKKVPVLGRGPVPVEIVPFGYRATLKAIADLGGEPELRMDGDEFYFTDGGHLIADCRFGPIGDPLGLHRALLEIPGVVETGLFVGMATRALVAGPFGVEELLP

SEQ ID NO: 1095 - protein, 429 aa, Rhodococcus equi
MSTTGTPRTAEEIQKDWDTNPRWKGVTRNYTAEQVVKLQGTVVEEATLARRGSEILWDLVNNEDYINSLGALTGNQAVQQVRAGLKAIYLSGWQVAGDANLSGHTYPDQSLYPANSVPQVVRRINNALLRADEIAKVEGDTSVDNWLAPIVADGEAGFGGALNVYELQKAMIAAGVAGSHWEDQLASEKKCGHLGGKVLIPTQQHIRTLTSARLAADVADVPTVVIARTDAEAATLLTSDVDERDREFLDGTRTAEGFYGVKNGIEPCIARAKAYAPYSDLIWMETGVPDLEVAKKFAEAVRSEFPDQLLAYNCSPSFNWKAHLDDATIAKFQKELGAMGFKFQFITLAGFHSLNYGMFDLAHGYAREGMTAFVDLQEREFKAAEERGFTAIKHQREVGAGYFDSIATTVDPNTSTAALKGSTEEGQFH

SEQ ID NO: 1096 - protein, 456 aa, Arabidopsis thaliana
MENKPSVLTERYEVGRLLGQGTFAKVYFGRSNHTNESVAIKMIDKDKVMRVGLSQQIKREISVMRIAKHPNVVELYEVMATKSRIYFVIEYCKGGELFNKVAKGKLKEDVAWKYFYQLISAVDFCHSRGVYHRDIKPENLLLDDNDNLKVSDFGLSALADCKRQDGLLHTTCGTPAYVAPEVINRKGYEGTKADIWSCGVVLFVLLAGYLPFHDTNLMEMYRKIGKADFKCPSWFAPEVKRLLCKMLDPNHETRITIAKIKESSWFRKGLHLKQKKMEKMEKQQVREATNPMEAGGSGQNENGENHEPPRLATLNAFDIIALSTGFGLAGLFGDVYDKRESRFASQKPASEIISKLVEVAKCLKLKIRKQGAGLFKLERVKEGKNGILTMDAEIFQVTPTFHLVEVKKCNGDTMEYQKLVEEDLRPALADIVWVWQGEKEKEEQLLQDEQGEQEPS

SEQ ID NO: 1097 - protein, 546 aa, Glycine max
MGNCCSQGNVADGPADDSAAANDKGEANQQGSNNHANDNNDNSTNPTTAPTTTSKPPPTVTPPTSKPSKPAAMGPVLGRPMEDVRATYTIGKELGRGQFGVTHLCTNKATGQQFACKTIAKRKLVNKEDIEDVRREVQIMHHLSGQPNIVELKGAYEDKQSVHLVMELCAGGELFDRIIAKGHYTERAAASLLRTIMQIIHTFHSMGVIHRDLKPENFLMLNKDENSPVKATDFGLSVFFKEGETFKDIVGSAYYIAPEVLKRKYGPEVDIWSVGVMLYILLSGVPPFWAESEHGIFNAILRGHIDFTSDPWPSISNAAKDLVRKMLTTDPKQRLTSQEVLNHPWIKEDGEAPDKPLDNAVLNRLKQFRAMNQFKKVALRVIAGCLSEEEIMGLKEMFKGMDTDNSGTITIEELKQGLAKQGTKLTEQEVKQLMEAADADGNGTIDYDEFITATMHMNRMNREEHLYTAFQYFDKDNSGFITTEELEQALREYNMHDGRDIKEILQEVDGDNDGRINYDEFAAMMRKGNPEVMTKKRRDSLPLPLP

SEQ ID NO: 1098 - protein, 351 aa, Clostridium beijerinckii
MKGFAMLGINKLGWIEKERPVAGSYDAIVRPLAVSPCTSDIHTVFEGALGDRKNMILGHEAVGEVVEVGSEVKDFKPGDRVIVPCTTPDWRSLEVQAGFQQHSNGMLAGWKFSNFKDGVFGEYFHVNDADMNLAILPKDMPLENAVMITDMMTSGFHGAELADIQMGSSVVVIGIGAVGLMGIAGAKLRGAGRIIGVGSRPICVEAAKFYGATDILNYKNGHIVDQVMKLTNGEGVDRVIMAGGGSETLSQAVSMVKPGGIISNINYHGSGDALLIPRVEWGCGMAHKTIKGGLCPGGRLRAEMLRDMVVYNRVDLSKLVTHVYHGFDHIEEALLLMKDKPKDLIKAVVIL

SEQ ID NO: 1099 - protein, 188 aa, Oryza sativa (japonica cultivar-group)
MSAVNITNVAVLDNPTAFLNPFQFEISYECLIPLDDDLEWKLIYVGSAEDENYDQQLESVLVGPVNVGTYRFVLQADPPDPSKIREEDIIGVTVLLLTCSYMGQEFMRVGYYVNNDYDDEQLREEPPAKLLIDRVQRNILADKPRVTKFPINFHPEPSTSAGQQQQEPQTASPENHTGGEGSKPAADQ

SEQ ID NO: 1100 - protein, 317 aa, Yersinia pestis CO92
MTDKLTSLRQITTVVADTGDIAAMKLYQPQDATTNPSIILNAAQIPEYRKLIDEAIAWAREQSSDHAQQIVDATDKLAVNIGLEILKLIPGRISTEVDARLSYDTVASVAKAKRLIKLYNEAGISNDRILIKLASTWQGIRAAEQLEKEGINCNLTLLFSFAQARACAEAGVFLISPFVGRILDWYKANGDQKEFAPSEDPGVVSVTEIYQYYKKHGYKTVVMGASFRNLGEIIELAGCDRLTIAPSLLKELAESEGPVERKLAYTGEIQAKPAPLTEAEFYWQHNQDPMAVDKLADGIRKFAIDQGKLEKMISDLL

SEQ ID NO: 1101 - protein, 536 aa, Glycine max
MDSNSSSPSPNNHASTTKINGFFHPKLGSQPATSSRSRLAMASPVNSDPKVVTGTAGYILEDVPHFTDYIPNLPTYPNPLQDNPAYSVVKQYFVHVDDSVPQKVVVHKDGARGVHFRRAGPRQKVYFEADEVQAAIVTCGGLCPGLNTVIRELVCGLHHMYGVKRVLGINGGYRGFYARNTITLTPKSVNDIHKRGGTVLGTSRGGHDTKKIVDSIQDRGINQVYIIGGDGTQKGASAIFEEVRRRGLKVSVVGIPKTIDNDIPVIDKSFGFDTAVEEAQRAINAAHVEAESVENGIGVVKLMGRNSGFIAMYATLASRDVDCCLIPESPFYLEGPGGLYEYIEKRLKENGHMVIVIAEGAGQELVSESVQSMSKQDASGNKLFQDVGLWISQKIRDHFAAQKTLPITLKYIDPTYMIRAIPSNASDNVYCTLLAQSAVHGAMAGYTGYTSGLVNGRQTYIPFYRITERQNHVVITDRMWARPLSSTNQPSFLDSKGDNEEKKEEEAALNQLPDGHCSKDTSLANKEINSIYPTTC

SEQ ID NO: 1102 - protein, 158 aa, Pseudomonas putida KT2440
MSVSSSSFTDGGVIALQQVGQDPACGAGEERTPQLSWDNLPAGTRSLALIMFDPDGGKGVGVVHWVAYNIDPEHDGLKEGMAGVSGPYVTVGRNSRGTQSYRGPCPPAGDNPHHYALTLIATDLPLGTLPEGLDRSGLLQLLQGHALGAQSLVGRYGH

SEQ ID NO: 1103 - protein, 413 aa, Zea mays
  misc_feature (299)..(299): Xaa can be any naturally occurring amino acid
MGNCASAIDAFVQRGNRASPAATAGMSASRRTSSSATTGKLSTLSSASTFMPSTVSGGDDDDDDPVGQILESPNLKIYTFAELKSATRNFRPETVLGEGGFGKVYKGWVDEKTMNPSKASTGVMVAVKKLNPESVQGMEQWQSEVNFLGRISHPNLVRLLGYSMDDNELLLVYEFMAKGSVENHLFRRGAVYEPLPWSLRLKILIGAARGLAFLHSSERQIIYRDFKASNILLDSHFNAKLSDFGLAKHGPDGGESHVTTRVMGTYGYAAPEYVSTGHLYVKSDVYGFGVVLLEMISGXRALDPSREREKVNLVNWARPLLSDRRKLSQLMDGGLEGQYNPKAALLAAQLTLRCLNGDPKRRPSMKEVVEALEKIESSAKGRMAREPRNSSRRGLVQSPRGDSARNNSSSRGR

SEQ ID NO: 1104 - protein, 487 aa, Ralstonia sp. SJ98
MQTQLFIDGRFVAALSGETLATLNPHDNSEIAQVSMAGREDVDRAVQAAKKAFPAWSAMAAADRGRLLLKLADAIEANADELARLESMDTGHPIRDTRNLDVPRTAATFRYFGGMADKFEGSVIPVEASFLNYLTREPVGIVGQVVPWNFPLMFTSWKMAPALAAGNCVVMKPAELTPLSSLAIAQLMAEVGFPAGVVNVLPGFGHVAGQYIAEHPEIGKVAFTGSTAVGRKIVQASSGNLKKVQLELGGKGANVVFGDANLDAVVQGSAFGIFHNQGQACIAASRLIVHESIADDLLERFTSLARSIRIGDPLDPSTEMGPLTSQMHRDRVLSYVDVAREQGGRVLAGGKSPDAAGLAKGCYVEPTIVQAKPTDRVAQEEVFGPFVTVSTFKSDEEGLAIANGTEYGLGAGLWTRDLQRAHLFARQLKSGMVWINCYKRVNPGSPFGGVGASGYGREMGFEVMREYTQAKSVWVNVDANIPPYYPR

SEQ ID NO: 1105 - protein, 364 aa, Nicotiana tabacum
MAFQIARRLLRSRASSSIRYLDRSFSSESNSNLIRATLFPGDGIGPEIADSVRQIFKTAEVPIEWEEHYVGKEIDPRTNSFLTWESLESVRRNKVGLKGPMATPIGKGHRSLNLTLRKELNLYANVRPCYSLPGYKTRYDDVNLITIRENTEGEYSGVEHQVVRGVVESLKIITRQASLRVAEYAFHYAKAHGRERVSAIHKANIMQKTDGLFLKCCREVAEKYPEIKYEEVVIDNCCMMLVKNPALFDILVMPNLYGDIISDLCAGVIGGLGLTPSCNIGEGGIALAEAVHGSAPDIAGKNLANPTALLLSAVTMLRHLELHDKADRIQGAVLNTIAEGKYRTGDLGGTSSTTDFTNAICDHL

SEQ ID NO: 1106 - protein, 139 aa, Aquifex aeolicus VF5
MLSEETIRVIKSTVPLLKEHGTEITARMYELLFSKYPKTKELFAGASEEQPKKLANAIIAYATYIDRLEELDNAISTIARSHVRRNVKPEHYPLVKECLLQAIEEVLNPGEEVLKAWEEAYDFLAKTLITLEKKLYSQP

SEQ ID NO: 1107 - protein, 442 aa, Pseudomonas aeruginosa UCBPP-PA14
MNNEPQSSSLDNFWMPFTANRQFKARPRLLESAEGIHYIAQGGRRILDGTAGLWCCNAGHGRREISEAVARQIATLDYAPPFQMGHPLPFELAARLAEIAPPGLNKVFFTNSGSESADTALKIALAYQRAIGQGTRTRLIGRELGYHGVGFGGLSVGGMVNNRKAFSANLLPGVDHLPHTLDVARNAFTVGLPEHGAEKAEELERLVTLHGAENIAAVIVEPMSGSAGVVLPPKGYLQRLREITRKHGILLIFDEVITGFGRVGEAFAAQRWGVVPDLLTCAKGLTNGSIPMGAVFVDEKIHAAFMQGPQGAIEFFHGYTYSGHPVACAAALATLDIYRRDDLFQRAVELEGYWQDALFSLRDLPNVVDIRAVGLVGGVQLAPHADGPGKRGYDVFERCFWEHDLMVRVTGDIIAMSPPLIIDKPHIDQIVERLAQAIRASV

SEQ ID NO: 1108 - protein, 321 aa, Bartonella bacilliformis
YIDGDEGILLYHGYSIDQLAENGDFLETCYLLLYGELPNKQQKIDFDRCIMRHTMVHEQFARFFHGFRRDSHPMAVMVACLGAMSAFYHDSINITDPQQRMIASIRLISKVPTLAAMAYKYSIGQPFVYPRNDLNYATNFLHMCFSVPCEEHKISPVIARAMDRIFTLHADHEQNASTSTVRLAGSSGANPYACIAAGVACLWGPAHGGANEACLKMLQEIGSVKKIPEFIARAKDKNDPFRLMGFGHRVYKNYDPRAKIMQKTCHEVLQELNIQDDPLLDIAMELEHIALNDEYFINKKLYPNVDFYSGITLKALGFPTE

SEQ ID NO: 1109 - protein, 378 aa, Taxodium distichum
FSIKGNGIGNGNGHCNGYSNGHGHCINGYSNGISASVSSNGVSHLPYSNGNTVHHSNGNSHTSPSFGDGRRRCFWYEEEIEDDLRWCFALNRIIHTGVSEYQDIALIDTRPFGKALVIDGKMQSTEVDEFIYHESLVHPALVYHSHPKSAFIMGGGEGSTAREILRHKCVKKVVMCDIDKEVVDFCKKYLVVNREAFSNSRLELVINDARTELQSRQERFDVIIGDLADPVEGGPCYQLYTKSFYELVIKPKLNHQGIFVTQAGPAGVLTHTQVFSSIYNTLRQVFKHVMPYSAHVPSFADTWGWVMASDHPLTLKAEEIDDRIKQRIKGELQFLDGQTFLVAATLNKSVRKSLSKETHVYTEETARFIHGHGKASYQ

SEQ ID NO: 1110 - protein, 193 aa, Triticum aestivum
MKTFLIFVLLAMAMKIATAARELNPSNKELQSPQQSFSHQQQPFPQQPYPQQPYPSQQPYPSQQPFPTPQQQFPQQSQQPFTQPQQPTPLQPQQPFPLRPQQPFPQQPQQSQQSFPQPQPQQPQQPSILQPQQPLPQQPQQPFQQPQQQLSQQPEQTISQQPQQPFPQQPHQPQQPYPQQQPYGSSLTSIGGQ

SEQ ID NO: 1111 - protein, 318 aa, Silene latifolia
NFLFKSPKEDSPLKATDFGLSDFIKPSRKFTDIVGSAYYVAPEVLKRKSGPESDVWSIGVITYILLCGRRPFWDKTEDGIFKEVLRNKPDFRRKPWPSISNSAKDFVRKLLVKDPFVRPTAAQALSHQWVREGGSALDIPIDISVLHNMRQFVKYSRMKQFALRALASTLNDDELANLRDQFDAIDVDKSGTISLEEMRQALAKDLPWKLKDSRVMEIVEAIDSNTDGFVDFTEFVAATLHVHQLHELDNEKWQELSQRAFEKFDVDKDGYITPDELRMQTGLKGSMEPLLEEADIDKDGRISLAEFRRLLRSASMSS

SEQ ID NO: 1112 - protein, 153 aa, Bdellovibrio bacteriovorus HD100
MANLPNPWRERSLANPFREFGRHQERIDRLLNELMELRSGTLGEDMSLMPSSELVEEEKNYLLKVDLPGIKKEDVKVEVEGDRLTIRAERRSEKEEKSKKRYFSEISYGSCMRSFALPQSIDEKKVDAKFENGVLSVTIPKTTESKSKQISVH

SEQ ID NO: 1113 - protein, 318 aa, Silene latifolia
NFLFKSPKEDSPLKATDFGLSDFINRSRKFTDIVGSAYYVAPEVLKRKSGPESDVWSIGVIMYILLCGRRPFWDKTEDGIFKEVLRNKPDFRRKPWPSISNSAKDFVRKLLVKDPLVRLTAAQALSHQWVREGGNALDIPIDISVLHNMRQFVKYSRMKQFALRALASTLNDDELANLRDQFDAIDVDKSGTISLEEMRQALAKDLPWKLKDSRVMEIVEAIDSNTDGFVDFTEFVAATLHVHQLHELDNEKWQELSQRAFEKFDVDKDGYITPDELRMHTGLKGSMEPLLEEADIDKDGRISLAEFRRLLRSASMSS

SEQ ID NO: 1114 - protein, 381 aa, Staphylococcus aureus subsp. aureus Mu50
MLTEQEKDIIKQTVPLLKEKGTEITSIFYPKMFKAHPELLNMFNQTNQKRGMQSSALAQAVMAAAVNIDNLSVIKPVIMPVAYKHCALQVYAEHYPIVGENLLKAIQDVTGLEEHDPVIQAWAKAYGVIADVFIQIEKEIYDQMMWIGFKPFKITNIKQESEDIKSFTVETEEYDFSEFTPGQYITVDVSSDKLPYRAKRHYSIVSGEKNHLTFGVKRDVTTEHEGEVSTILHDEIKEGDMINLAAPVGGFVLENTTEPQLFLGSGIGVTPLVAMYEAASAKGLDTQMVQVAENEQHLPFKDNFNSIASHYDNAKLYTHLKDKQGYIGTEELQAFLANKPEIYICGGTKFLQSMIEALKSLNYDMDRVHYETFIPRLSVAV

SEQ ID NO: 1115 - protein, 221 aa, Arabidopsis thaliana
MDSLATDPAFIDSDVYLRLGLIIEGKRLKKPPTVLSRLSSSLERSLLLNHDDKILLGSPDSVTVFDGRSPPEISIAHYLDRIFKYSCCSPSCFVIAHIYIDHFLHKTRALLKPLNVHRLIITTVMLAAKVFDDRYFNNAYYARVGGVTTRELNRLEMELLFTLDFKLQVDPQTFHTHCCQLEKQNRDGFQIEWPIKEACRANKETWQKRTPDSLCSQTTAR

SEQ ID NO: 1116 - protein, 468 aa, Brucella suis 1330
MKQYTLLIGGEHVATPNHAEVRNPSTGEVVGLMPLASEADLDRAVAAAANAFQTWSRTGDAERAAACRAIANKLSEDAEELARLLTLEQGKTFNGLGSRFELGGAMAWTRHTAELGLPVEVVQDDNEGRVEIHRKPIGVTGSITPWNWPVMIACWHIIPAVRTGNTVVIKPSPLTPLSTIRLVEIINEVLPAGVVNVVTGENSIGAALSAHPGIAKMTFTGSTETGRKIMASAAATLKRLTLELGGNDAGIVLPDADPARIAEGLFWGAFINSGQTCAALKRLYVHDHIYDDVCRHLTEYAANIIIGDGLDEKSVLGPVQNAMQFNKVRELVDDARAKGARIPIGGEAAEGPGYFYPITLVADIDNGTRLVDEEQFGPVLPIIRYSDIDEVIRRANDNPSGLGGSVWSSDVEKARAVALQLECGSVWINKHGAIQPNAPFGGVKQSGIGVEFGTDGLKEFTTIQTVLS

SEQ ID NO: 1117 - protein, 484 aa, Gibberella zeae PH-1
MSTNSTKTLNLKDNYVQIINGKSAPTQKTHQGINPATLEKKPEVPVASQDDLNNAVDAARKAFKSWSKVPWEERRQKLFAWADAVEAQKKEFAQLLTSEQGKPVAQANGEADAAVAWIKGQASLDLTEEVVEDSDTRKVVTRYTPLGIVAAIVPWNFPLMLAASKIAPALLTGNVIIVKPSPFTPYCGLKLVELAQQFFPPGVVQSLSGDDNLGPWITSHPGIDKISFTGSTHTGKLVMQSAAKTLKRVTLELGGNDAAVVFPDVDIDSVAEKVSTLAFMNSGQICLNVKRIYVHESIYEKFRDAVVNHVKNYKLGDGSEEVTSHGPVQNQMQYNRVKTFFEDIEKQGWKVATGGKFDPEPKNGYYITPTVIDNPPEDSRIVVEEPFGPILPLLSWKNEEEVIERANDTRLGLGASVWSADLETAERVAKQLDAGTVWVNTHFDITPMAPFGGHKESGIGAEWGINGLKGMCNVQSLFLSKVAA

SEQ ID NO: 1118 - protein, 180 aa, Arabidopsis thaliana
MASSMLSSATMVASPAQATMVAPFNGLKSSAAFPATRKANNDITSITSNGGRVNCMQVWPPIGKKKFETLSYLPDLTDSELAKEVDYLIRNKWIPCVEFELEHGFVYREHGNSPGYYDGRYWTMWKLPLFGCTDSAQVLKEVEECKKEYPNAFIRIIGFDNTRQVQCISFIAYKPPSFTG

SEQ ID NO: 1119 - protein, 178 aa, Zea mays
  misc_feature (169)..(169): Xaa can be any naturally occurring amino acid
EWKMVRPDLGRIEKWVLRKAFDDEEQPFLPKHILYRQKEQFSDGVGYSWIDGLKAHATSNVTDKMLSNVKFIFPHNTPTTKEAYYYRMIFERFFPQKSAILTVPGGPSVACSTTKAIEWDAQWSGNLDPSGRAALGVHLAGYEHQHDPEHVPAAIAAGSGKKPRTIRVXASPGVAIEG

SEQ ID NO: 1120 - protein, 464 aa, Listeria monocytogenes
MLYSKENKESYLEPVFGSSAEDRDIPKYTLGKEPLEPRIAYRLVKDELLDEGSARQNLATFCQTYMEDEATKLMSETLEKNAIDKSEYPRTAELENRCVNIIADLWHAPKDQKFMGTSTIGSSEACMLGGMAMKFAWRKRAEKLGLDIYAKKPNLVISSGYQVCWEKFCVYWDIDMRVVPMDKEHMQLNTDQVLDYVDEYTIGVVGILGITYTGRYDDIYALNEKLEEYNSKTDYKVYIHVDAASGGFFTPFVEPDIIWDLRLKNVISINTSGHKYGLVYPGIGWVLWKDESYLPEELIFKVSYLGGEMPTMQINFSRSASHIIGQYYNFLRYGFEGYRTIHQKTSDVAQYLAHAVEQTGYFDIFNDGSHLPIVRYKLKDDANVNWTLYDLADRLQMRGWQVPAYPLPKSLENIIIQRYVCRADLGFNMAEEFIQDFQASIQELNNAHILFHDTQQSGVHGFTH

SEQ ID NO: 1121 - protein, 265 aa, Triticum aestivum
  misc_feature (111)..(111): Xaa can be any naturally occurring amino acid
  misc_feature (174)..(174): Xaa can be any naturally occurring amino acid
HWSALSGVDTEIMNVEGHIAPSEKHPGSLLEGFSQTQVSTLAVKDNLLVAGGFQGELICKNLDQEGISFCCRTTYDDNAITNAVEIFNTSSGAVHFIASINDSGVREYDMXERYQLCKHFRFDWPVNHTSLSPDGKLVLVVGDDPDALLIDANSGKTIHSMKGHLDFSFASAWXPDGRTFATGNQDRTCRVWDARNLSQSLHVLRGNLGAIRSTRYTSDGQFLTMAEPADFVHIFDVKSDYNKRTYGSLLQYGRLYNYSYLDSLF

SEQ ID NO: 1122 - protein, 311 aa, Candidatus Tremblaya princeps
MVSSALQFLSQHSELSMDSARFLEALRFRPTHATTNPSLILSACQNNEYNSLVNETIRLHRNEGYRNIADHIRLRFCTELLDRIPGMVSVEIDACCAFNVDASIAHARRIVQLCRPTDARDRILVKIPATWQGVQAAAALRAEGVQCNMTLVFSMLQALVCARNGAYLISPFVGRLSDRMPAMQGSSATQDQGVALALRIYSRLRQEGHATRVMAASFRGEQQVIMASACGMVTVGEHIMRRLAAMRASAMPKPCQQFSEAMQHCPTPRDLHAFERALAQNRTAWLELKHGIEAFACNETQLELLIARRLP

SEQ ID NO: 1123 - protein, 519 aa, Brassica napus
MSGAITCSAADLATLLGPNATAAADYICGQLGTVNNKFTDAAFAIDNTYLLFSAYLVFAMQLGFAMLCAGSVRAKNTMNIMLTNVLDAAAGGFFYYLFGYAFAFGGSSEGFIGRHNFALRDFPTPTADYSFFLYQWAFAIAAAGITSGSIAERTQFVAYLIYSSFLTGFVYPVVSHWFWSPDGWASPFRSADDRLFSTGAIDFAGSGVVHMVGGIAGLWGALIEGPRRGRFEKGGRAIALRGHSASLVVLGTFLLWFGWYGFNPGSFTKILVPYNSGSNYGQWSGIGRTAVNTTLSGCTAALTTLFGKRLLSGHWNVTDVCNGLLGGFAAITAGCSVVEPWAAIVCGFMTSLVLIGCNKLAELVQYGDPLEAAQLHGGCGAWGLIFVGLFAKEKYLNEVYGATPGRPYGLFMGGGGKLLGAQLVQILVIVGWVSATMGTLFFILKRLNLLRISEQHEMQGMDMTRHGGFAYIYHDNDDESHRVDPGSPFPRSALPLAFNFQLFGNLLPFKYCLGFGFEI

SEQ ID NO: 1124 - protein, 72 aa, Zea mays
FCKSALFNFNSFLTVVLLVICTCSYIKMQFPAILNDRTGFRGFFWKAARIGERLSPWVSVGCLAMGISTIFF

SEQ ID NO: 1125 - protein, 454 aa, Oryza sativa (japonica cultivar-group)
MVKGGREALLGGYEMGRTLGEGNFGKVKYARHLATGGHFAVKILDRGRVVSLRAGDQIRREIATLKLLRHPHVVRLHEVAASKTKIYMVLEFVNGGELFERIAVKGKLSEKEGRRLFQQLIDGVSYCHDRGVYHRDLKPENVLVDQKGNIKISDFGLSALPQHLGNDGLLHTTCGSPNYIAPEVLQNKGYDGSLSDIWSCGVILYVMLIGYLPFDDRNIVVLYQKIFKGDTQIPKWLSHSAQNLLRRILEPNPMKRIDMAGIKSHEWFQKDYIPVLPYDDDDEDVQFGARLPAKEQINDEPGDKNSHQINAFQLIGMASSLDLSGFFEDEEVSQRRIRFTSTHPPKDAFDKIESSATELGFQVQRGHSKLKLMRNCKGSKNPESFMVSAEVFELGPSVNVVELRKSNGDPALYRQLCERISSDMGARNTEQIFATASLEDDLQNSNAGTPLFAL

SEQ ID NO: 1126 - protein, 439 aa, Oryza sativa (japonica cultivar-group)
MESKGKILMERYELGKLLGKGTFGKVHYAGNLESNQSVAIKMMDKQQVLKFGLSEQIRREITTMRLVAHKNIVQLHEVMATRNKIYFVMEYVKGGELFEKVAKRGKLTEVVAISTSSNSLSAVDYCHSRGVYHRDLKPENLLLDENENLKVSDFGLSALSESKRQDGLLHTTCGTPAYVAPEVISKIGYDGAKSDIWSCGVILFVLVGGYLPFQGPNLMEMYRKIQHGEFRCPGWFSRKLQNLLYKIMDPNPSTRISIQKIKESTWFRKGPEENRILKERTLNENPPKNVALVLGVRPKKNAHEDVKPMSVTNLNAFEIISFSKGFDLSGMFIVKEWRNEARFTSNKSASTIISKLEDVAKALNLRVRKKDNGVVKMQGRKEGRNGVLQFDIKIFEVTTSYHIIEMKQTSGDSLEYRQLLEEGIRPALKDIVLAWHGDE

SEQ ID NO: 1127 - protein, 497 aa, Camellia sinensis
MASLTCSADQLAQLFGSNTTNAAAATYICDHFTAVSQKFSDAASAIDSTYLLFSAYLVFSMQLGFAMLCAGSVRAKNTLNIMLTNVLDAAAGAIFYYLFGFAFAFGSPSNGFIGSHFFALKSIPTSSFDYSFFLFQWAFAIAAAGITSGSIAERTQFAAYLIYSAFLTGFVYPVVSHWFWSGDGWASASNTNHLLFGSGVIDFAGSGVVHMVGGIAGLYGAFIEGPRIGRFANPGQSVTIKGHSASLVVLGTFLLWFGWYGFNPGSFTKIANPYTSGSYYGQWSAVGRTAVTTTLAGSTAALTTLFLNRVVSGHWNVTDVCNGLLGGFAAITAGCSVVEPWAAVICGLVAALVLIGCNKVAERVKFDDPLEAAQLHGGCGAWGVIFTALFASEKYVNEVYPGKSDRPYGLLMGGGGRLLAAHVIQIVVIVGWVSVTMGPLFFVLHKLKLLRISAEDEIAGMDMTRHGGFAYVYQYHDEDESNKLGMQMRKIDPEDKS

SEQ ID NO: 1128 - protein, 139 aa, Azoarcus sp. EbN1
MSNLIRRDPFDDLLRGFFVRPVDMTAGIQGEAPQMRVDVKEDESAYQVHAELPGIKKEDIHVHIDGPVVSISAERKQEKEVKEGERVLRTERYFGKVSRSFQLGQEIDEGKSSAKFNDGVLELSLPKKAPEQAKRLTID

SEQ ID NO: 1129 - protein, 162 aa, Chlamydomonas reinhardtii
MANPEFYGLSTTTLSGQPFPFKDLEGKAVLIVNVASKCGFTPQYKGLEELYQQYKDRGLVILGFPCNQFGGQEPGDASAIGEFCQRNFGVTFPIMEKSDVNGNDANPVFKYLKSQKKQFMMEMIKWNFEKFLVDKSGQVVARFSSMATPASLAPEIEKVLNA

SEQ ID NO: 1130 - protein, 318 aa, Silene dioica
NFLFKSPKEDSPLKATDFGLSDFIKPSRKFTDIVGSAYYVAPEVLKRKSGPESDVWSIGVITYILLCGRRPFWDKTEDGIFKEVLRNKPDFRRKPWPSISNSAKDFVRKLLVKDPFVRPTAAQALSHQWVREGGSALDIPIDISVLHNMRQFVKYSRMKQFALRALASTLNDDELANLRDQFDAIDVDKSGTISLEEMRQALAKDLPWKLKDSRVMEIVEAIDSNTDGFVDFTEFVAATLHVHQLHELDNEKWQELSQRAFEKFDVDKDGYITPDELRMHTGLKGSMEPLLEEADIDKDGRISLAEFRRLLRSASMSS

SEQ ID NO: 1131 - protein, 318 aa, Silene dioica
NFLFKSPKEESPLKATDFGLSDFINRSRKFTDIVGSAYYVAPEVLKRKSGPESDVWSIGVIMYILVCGRRPFWDKTEDGIFKEVLRNKPDFRRKPWPSISNTAKDFVRKLLVKDPLVRLTAAQALSHQWVREGGNALDIPIDISVLHNMRQFVKYSRMKQFALRALASTLNDDELANLRDQFDAIDVDKSGTISLEEMRQALAKDLPWKLKDSRVMEIVEAIDSNTDGFVDFTEFVAATLHVHQLHELDNEKWQELSQRAFEKFDVDKDGYITPDELRMHTGLKGSMEPLLEEADIDKDGRISLAEFRRLLRSASMSS

SEQ ID NO: 1132 - protein, 318 aa, Silene diclinis
NFLFKSPKEDSPLKATDFGLSDFIKPSRKFTDIVGSAYYVAPEVLKRKSGPESDVWSIGVITYILLCGRRPFWDKTEDGIFKEVLRNKPDFRRKPWPSISNSAKDFVRKLLVKDPFVRPTAAQALSHQWVREGGSALDIPIDISVLHNMRQFVKYSRMKQFALRALASTLNDDELANLRDQFDAIDVDKSGTISLDEMRQALAKDLPWKLKDSRVMEIVEAIDSNTDGFVDFNEFVAATLHVHQLHELDNEKWQELSQRAFEKFDVDKDGYITPDELRMHTGLKGSMEPLLEEADIDKDGRISLAEFRRLLRSASMSS

SEQ ID NO: 1133 - protein, 368 aa, Glycine max
MLTCIARPKKLVGDSAASEDPSSRGVKSLTGQLKEMALKASGAYKQCGGPCATAPPSRVSRGGGTELDSESSSSSSSRRRWGKELEARLKGISSGEGTPSSSGRRVVLLLEDDEEPKEWVAQVEPGVLITFVSLPRGGNHLKRIRFSREIFNKWQAQRWWAENYDKVMELYNVQRLNRQAFPLPTPPRSEDESSKRESIEDFPVTPPLSRERPPCNLFRAGGGGMGMGYSSSDSCVHHSMLSSRHYYDPNGVNSTPIASSTCSAAAQPDISSSMDVHASIRSSSSTEADRSGGLSLSNASHLGSEWVEQDEPRVYISIRALPGGKKELRRVRFSPEKLGDMQNVNFVSTPFSLNNLPILYLRYNHIVG

SEQ ID NO: 1134 - protein, 318 aa, Silene diclinis
NFLFKSSKEDSPLKATDFGLSDFINPGRKFHDIVGSAYYVAPEVLKRRSGPESDVWSIGVITYILLCGRRPFWDKTEDGIFKEVLRGKPDFGRKPWPTISNSAKDFVRKLLVKDPLVRLTAAQALSHQWVREGGNALDIPIDISVLHNMRQFVKYSRMKQFALRALASTLNDDELANLRDQFDAIDVDKSGTISLEEMRQALAKDLPWKLKDSRVMEIVEAIDSNTDGFVDFTEFVAATLHVHQLHELDNEKWQELSQRAFEKFDVDKDGYITPDELRMHTGLKGSMEPLLEEADIDKDGKISLAEFRRLLRSASMSS

SEQ ID NO: 1135 - protein, 504 aa, Brucella suis 1330
MSKLDDNVAKAKTYLARFEKGVLNRIGGEDVAAADGATFETISPVDLKPLATVALGKAADIDRAARAAKAAFPEWAAMSGDARKKLLHKIADAIVARAEEIAFVECMDTGQSLKFMAKAALRGAENFRFFADRAPEARDGKTLRGPGQVNMTTRVPIGPVGVITPWNTPFMLSTWKIAPALAAGCTVVHKPAEFSPLTARLLVEIAEEAGLPKGVWNLVNGFGEDAGKALTEHPDIKAIGFVGESRTGSLIMKQGADTLKRVHFELGGKNPVVVFADADLERAVDAAVFMIYSLNGERCTSSSRLLVEASIYEKFTALVAEKAKRIKVGHPLDPETVVGPLIHPVHEKKVLEYIEIGRSEGATVAAGGAKFAGPGGGCYVSPTLFTAAHNGMRIAQEEIFGPVLTAIPFKDEAEALALANDVKYGLTGYLWTNDVTRAFRFTDALEAGMIWVNSENVRHLPTPFGGVKNSGIGRDGGDWSFDFYMETKNIAFANAAHAIAKLGG

SEQ ID NO: 1136 - protein, 328 aa, Triticum aestivum
RHWFYCINNKERSCLETGEVLIRVAASGICGTDLHICKGETPQATKNVVVGHEFCGYVEEIHPETMAVVKVGDLVAIDPNMPCNQCTFCRNKKYHLCLNLFCIGVTVDGGMSQYVAVPARAAITVPAHVPPEVACLSEPLSCVVHAVDKGHVKSGDSVLVIGAGPIGLMTTALVNASGGKVTVIEPNEFRRKEALEIFGAAAAYGPGELGPVNGALGEGYDVVFECVGRPNTADDAVKFAKAGGTVVWVGVAKVEDRVSISPYDVYRRELTITSTFTNPYGIDRAVKILAEGRVNWRALVSHSFKLSEFDKAWEVFTAGTGLKVVVKP

SEQ ID NO: 1137 - protein, 351 aa, Staphylococcus aureus subsp. aureus Mu50
MKALVKTREGHGNLELLDKEVATPLDDKVKIKVHYAGICGTDIHTYEGHYKVNFPVTLGHEFSGEIVEVGADVKDFKVGDRVTSETTFYVCNECEYCKSKDYNLCNHRKGIGTQVDGVFTNYVIAREESLHHIPDEVSYQSAAMTEPLACAHHGVSKIQVNSGDVAVVMGPGPIGLLVAQVLKSKGATVVVTGLDNDKVRLDKAEALHMDYVVNLQQTDLKTYINGITDGYGADVVVECSGAVPAARQGLDIIRKKGFYSQIGIFKDAEIPFDMEKVIQKEITVVGSRSQKPADWEPSLQLMADGLVNAEALVTKIYDISKWDEAYQHLKSGEGIKALLKPLDLDENEGEN

SEQ ID NO: 1138 - protein, 400 aa, Aspergillus fumigatus
MTTTTTTTALVLHGAKDLRLESRPISPPTGSEVQVAIRATGLCGSDLHYYNHGRNGDFVVREPMCLGHESSGTVTAVGPDVTTLQVGDRVALEVGLPCRTCTLCRTGRYNICPDMKFRSSAKLFPHLDGTLMELTNHPADLCHKLPESVSYAGGALVEPLAVCLHAIRRSHPPTPAEVDLATEQGDQTAALIFGAGAIGLLLAAALATSQPFTSIVIADIDPARLEIAKSLNLGLKTHLLPKGGNAANPPPAPDASAAEHAAYAMQNAQRTAAALKEANGVASGFVRVYECTGVPACVQAGIYAASPGAVLVQIGMGNPIQTLPVSAAALREVDIIGTFRYDGHAYPAAIELMASGKLDHVEKQVVTHRVRLEDGSRAFALAGKGVDETGRPVVKVVIES

SEQ ID NO: 1139 - protein, 318 aa, Silene vulgaris
NFLFKSSKEDSPLKATDFGLSDFINPSRKFTDIVGSAYYVAPEVLKRKSGPESDVWSIGVITYILLCGRRPFWDKTEDGIFKEVLRNKPDFRRKPWPSISNSAKDFVRKLLVKDPLVRLTAAQALSHQWVREGGSALDIPIDISVLHNMRQFVKYSRMKQFALRALASTLNDDELANLRDQFDAIDVDKSGTISLDEMRQALAKDLPWKLKDSRVMEIVEAIDSNTDGFVDFTEFVAATLHVHQLHELDNEKWQELSQRAFEKFDVDKDGYITPEELRMHTGLKGSMEPLLEEADIDKDGRISLAEFRRLLRSASVSS

SEQ ID NO: 1140 - protein, 245 aa, Metasequoia glyptostroboides
YTYNLRNKGPEDVIVRVIYCGICHSDLIQMRNEMGMSHYPMVPGHEVVGIVTELGSEVKKFKVGEHVGVGCIVGSCRKCGNCNESMEQYCSKRIWTYNDVNHGGTPTQGGFASSMVVDQMFVVRIPENLPLEQAAPLLCAGVTVYSPMKHFGMTEAGKRCGILGLGGVGHMGVKIAKAFGLHVTVISSSDKKKEEALEVLHADAYLVSKDAEKMQEAAESLDYILDTIPVAHPLEPYLSLLKTNG

SEQ ID NO: 1141 - protein, 170 aa, Zea mays
MAGIGRNMVAPLLVLNLIMYIIVIGFASWNLNHFINGQTNYPGVAGNGATFYFLVFAILAGVVGAASKLAGVHHVRAWRHDSLATNAASSLIAWAITALAFGLACKEIHIGGHRGWRLRVLEAFVIILAFTQLLYVLMLHTGLFGGSGGYRDHDYGVGGAAGEPKGVTRV

SEQ ID NO: 1142 - protein, 198 aa, Glycine max
  misc_feature (91)..(91): Xaa can be any naturally occurring amino acid
MTISNTSSTSKTIFRRNGKDIQGIPWERLNYSRDKYRETRLKQYKNYQNFSLSPHHLHKECFQVQKGQTFYDFFFNTRLVKSTIVHFQLLXRWNMSSLAGPYIMLRNLLWATSKHDVYLMQDYSVMHWSALLQRSKEVLNVAKPIIPTLTHPGFLAQPVSRVQISTMTVKENLMVAGGFQGELICKVGLIIISYFHSI

SEQ ID NO: 1143 - protein, 335 aa, Glycine max
MADESVVESPVKRQRDDGEENGVSVSMDAEGGKDPLSNGLSSVIPGWFSEISAMWPGEAHSLKVEKILFQGKSEYQNVMVFQSSTYGKVLVLDGVIQLTERDECAYQEMITHLPLCSIPNPKKVLVIGGGDGGVIREVARHSSVEKIDICEIDKMVVDVSKQYFPDVAVGYDDPRVTLHIGDGVAFLKEVPEGTYDAVIVDSSDPIGPAQELFEKPFFASVAKALCPGGVVCTQAESIWLHMDIIEDIVANCRQIFKGSVNYAWTTVPTYPSGMIGFMLCSTEGPPVDFKHPVNPIDENESQKSVRPLKFYNSEIHTAAFCLPSFAKRKISSKAN

SEQ ID NO: 1144 - protein, 452 aa, Brucella suis 1330
MRDSNFLIENNARHLWHPMAHPAEMQANPPRIVNGGEGVEVIDIHGKKVLDAVGGLWNVNLGYSCEPVKKAIRDQLDSLPYYSTFRGTTNSPLIELSYELAEFFKEDGLTRAFFTSGGSDSVETALRLARQFHKINGQPERTKFVSLKKGYHGTHFGGASVNGNANFRRNYEPLLPGVFHLAAPYPYRNPFNMDDPAAIAAAIARQFEDEIAFQGADTIAAFIMEPVLGAGGVIVPHESFMLLMREICDRHGILLIADEVITAFGRTGAWTGSRGWGVKPDMMTTAKAITNGYFPFGAVMISDKVASVFEANKNSLGAIGHGYTYSGHPVGAAAALATLKETARANTAANAGARGVELMAGLNQLKEKHELVGDVRGKGLMAALELVSDREKKSAAAKTVVQKVYDVAYEEGVMVRTSGANVIISPPLVITSADVNRIVSALDAGLSAAKGQ

SEQ ID NO: 1145 - protein, 298 aa, Glycine max
MVYVKAQKSKAYFKRYQVKFKRRREGKTDYRARIRLINQDKNKYNTPKYRFVVHFSNKDIVAQIISASIAGDIVLAAAYAHELPRYGLEVGLTNYAAAYCTGLLLARRVLKTLDMDEEYEGNVEATGEDYSVEPAESRRPFRALLDVGLVRTTTGNRVFGALKGALDGGLDIPHSDKRFAGFDKEKKELDAEVHRKYVFGGHVAAYMKILAEDEPEKYQSHFSEYIKRGIEADGIEALYKKVHAAIRADPTLKKSDKQPPKEHKRYNMKKLTYEERKAKLVARVAAINSAADNDEDDE

SEQ ID NO: 1146 - protein, 163 aa, Glycine max
VATQNCCCFQVVSIGLGSRPFSLHLLLNLLNFLFPFLPSKFSLDSSSMLSSAAVVTSPAQATMVAPFTGLKSSSAFPVTRKANNDITSIVSNGGKVSCMKVWPPVGKKKFETLSYLPDLTEVELGKEVDYLLRNKWIPCVEFLLPRGSACPGPAATPGCSGGR

SEQ ID NO: 1147 - protein, 170 aa, Triticum aestivum
MAGVGRNMVAPLLVLNLIMYIIVIGFASWNLNHFINGLTNRPGVGGNGATFYFLVFAILAGVVGTWRGDSLATSASSALVAWAITALAFGLACKEIHIGGYRGWRLRVLEAFVIILMFTQLLYVLALHSGLFGNQFGNHAGAGGYGAEHGAYGAGDPHNKGMGTGGVARV

SEQ ID NO: 1148 - protein, 215 aa, Saccharomyces cerevisiae
MSRSGKSLTKYKIVFLGEQGVGKTSLITRFMYDTFDDHYQATIGIDFLSKTMYLDDKTIRLQLWDTAGQERFRSLIPSYIRDSRVAIIVYDITKRKSFEYIDKWIEDVKNERGDENVILCIVGNKSDLSDERQISTEEGEKKAKLLGAKIFMETSTKAGYNVKALFKKIAKSLPEFQNSESTPLDSENANSANQNKPGVIDISTAEEQEQSACQC

SEQ ID NO: 1149 - protein, 458 aa, Mesorhizobium loti MAFF303099
MRHQILSNRSGEDLRASDLAHHLHPFTDHTVLAAEGGPRVIKDGDGIYVWETEGRRLLDGMAGLWCVNVGYGRKELGEVARQQMDRLAFYNTFFKTSHEPVINLAERLAAVTPEGIDNFFFGNSGSEANDTAIRLVRSYWAAVERPERQVVISREYAYHGSTLAGASLCGLPGMHGVAGLPIPGIAHAAAPYAWAAGKDQDDPAYGRASADALEAKILEIGPKNVAAFIGEPVMGAGGVITPPPRYWARVQEICRKYDILLVCDEVICGFGRTGEWFGAQSFGIAPDIMCMAKGLSSGYIPISAVGVGTRVAEILRTRPGVLSHGFTSSGHPVAAAVALKNIELIEAEGLVNHVRDVAGPALARRLGALAMHPLVGQVRGIGAMWALELTSDKATRAPFAPLGSVATRVRNLCFERGLATRAVREGLVFAPPLIITEAQVDEMADILTSCLDTAVAEL

SEQ ID NO: 1150 - protein, 440 aa, Mesorhizobium loti MAFF303099
MSHVFHRSALSVPPMAVAADGHYIIDINGRRYLDASGGAAVSCIGHGDPRVVAAVAEQIARLDYAHSGAFTSPSAEELAAHICAEAGQGMARVYFVGSGSEAVEAAIKMARQCQIERRQPSRHVVISRRLSYHGNTLGALGRSGSETRRAPYAPMLQKRTQIAPCFPYHYAEPGETPEAYGLRAAEALEAEILRLGSENVAAFLAETVVGATSGAVVPATGYFRHIREICDRYGVLLICDEVMCGAHRTGPFLACSDEGVSPDIVTLAKGLGGGYLPIGAVVCRADVHDSFAQGSGAFTHGHTYMAHPVACAAALEVQRVIVDDRLAERVVRQGALLDAALRDRLSQHTYVGDIRGRGLLYAVELVADRETRVSFDPEMRLAARIGAQAKGRGLLVYPGSGTIDGLRGDHVLLAPAYSIDAQRVGEIADILTEAIDAALG

SEQ ID NO: 1151 - protein, 494 aa, Bacillus cereus ATCC 14579
MSQLAVNLHEKVEKFLQGTKKLYVNGSFIESASGKTFKTPNPATGETLAVVSEAGREDIHKAVVAARMAFDEGPWSRMSTAERSRLMYKLADLMEEHKEELAQLETLDNGKPIRETMAADIPLAIEHMRYYAGWATKIVGQTIPVSGDYFNYTRHEAVGVVGQIIPWNFPLLMAMWKMGAALATGCTIVLKPAEQTPLSALYLAELIEEAGFPKGVINIVPGFGESAGQALVNHPLVDKIAFTGSTPVGKQIMRQASETLKRVTLELGGKSPNIILPDADLSRAIPGALSGVMFNQGQVCSAGSRLFVPKKMYDNVMADLVLYSKKLNQGVGLNPETTIGPLVSEEQQKRVMGYIEKGIEEGAEVLCGGSNPFDQGYFVSPTVFADVNDEMTIAKEEIFGPVISAIPFNDIDEVIERANKSQFGLAAGVWTENVKTAHYVASKVRAGTVWVNCYNVFDAASPFGGFKQSGLGREMGSYALNNYTEVKSVWLNLN

SEQ ID NO: 1152 - protein, 479 aa, Nostoc sp. PCC 7120
MSDLVLFWHRRDLRIADNIGLAAARQQSSKVVGVFCLDPNILERDDVAPARVTYMIGSLQELQQRYVQAGSQLLILHGDPVQAIPHLAEALNAKAVFWNWDVEPYSQTRDRAILDILKDKGIQFLTHKWDQILHSPDEIRSGSNTPYTVYTPFWKNWSSKPKAKPVETLQNAEGLTESEQELAQKAGVKTLPTAKDLGFFWDADLIIAPGEAAAQAKLEEFTAKAITEYQEQRNFPAVDGTSQLSAALKFGVIGIRTVWQATLEALENSRSEEASAAIRTWQQELAWREFYQHAMYNFPELADGAYRETFKNFPWETNEEHFQAWREGKTGYPIVDAAMRQMNESGWMHNRCRMIVASFLTKDLLINPQLGEKYFMQKLIDGDLSANNGGWQWSASSGMDPKPLRIFNPASQSQKFDPDAEYIRRWVPELRSMDTEYLVTGKITPLERHAVGYVKPIVDHQKQQQLFKQRYQQQKATSL

SEQ ID NO: 1153 - protein, 199 aa, Penicillium marneffei
MASGPATQSLKCVVTGDGAVGKTCLLISYTTNAFPGEYIPTVFDNYSASVMVDGRPISLGLWDTAGQEDYDRLRPLSYPQTDVFLICFSIVSPPSFDNVKAKWFPEIEHHAPGVPIILVGTKLDLREDRATAEALRAKKMEPVSYEQALAVAKEIRAHKYLECSALTQRNLKSVFDEAIRAVLNPRPQPKNKAKRCTIL

SEQ ID NO: 1154 - protein, 310 aa, Vitis vinifera
MSFIGEASAYFKVLSDGSIKRVEWESAPASNDSSSNGYKSKDVIINSTKPISARIFLPDVPGSSGRLPVLVYFHGGGFCLGSTTWFGYHTFLGDFAVASQSIVLSVDYRHAPENRLPIAYDDCYSSLEWLSCQVSSEPWLERADLSRVFLSGDSAGGNIVHNVALRTIQEQSCDQVKIKGLLLIHPFFGSEERIEKERAGGEAENLALTDWMWKLSLPEGSNRDHYWCNYEMAELSRAEWCRFPPAVVYVAGLDFLKERGVMYAAFLEKNGVEVKLVEAEGEKHVYHMLHPESEATRLLQKQMSEFIHNF

SEQ ID NO: 1155 - protein, 105 aa, Rickettsia sp. RAv1
GQPFIYPNNSLDFTENFLHMMFATPCTKYTVNPIIKNALNKIFILHADHEQNASTSTVRIAGSTGANPFACISTGIASLWGPAHGGANEAVINMLKEIGSSEYIP

SEQ ID NO: 1156 - protein, 160 aa, Zea mays
  misc_feature (43)..(43): Xaa can be any naturally occurring amino acid
MSDSEEHHFESKADAGASKTYPQQAGTVRKNGFIVIKNRPCKXVEVSTSKTGKHGHAKCHFVAIDIFNGKKLEDIVPSSHNCDIPHVNRTEYQLIDISEDGFVSLLTSDGNTKDDLRLPTDETLVAQIKEGFESGKDLVVTVQSAMGEEQICALKDVGPK

SEQ ID NO: 1157 - protein, 105 aa, Rickettsia sp. RAv3
GQPFIYPNNSLDFTENFLHMMFATPCTKYTVNPIIKNALNKIFILHADHEQNASTSTVRIAGSSGANPFACISTGIASLWGPAHGGANEAVINMLKEIGSSEYIP

SEQ ID NO: 1158 - protein, 57 aa, Triticum aestivum
MADEGTANCIDIILAIILPPLGVFFKFACGIEFWICLLLTFFGYLPGIIYAVWVITK

SEQ ID NO: 1159 - protein, 196 aa, Cichorium intybus x Cichorium endivia
GHNNLNAKFVLLGDMGAGKSSLVLRFVKGQFLEFQVSTIGAAFFSQTLAVNDATVKFEIWDTAGQERYHSLAPMYYRGAAAAIIVYDITSADSFTRAKKWVQELQKQGNPNMVMALAGNKADLEDKRKVTAEEARVYAEENGLFFMETSAKTAANVNDVFHEIAKRLPRAQPTQNPAGMVLVDRPAEGARAASCCS

SEQ ID NO: 1160 - protein, 511 aa, Cylindrotheca fusiformis
MAEFDNTFILDFCSGGNESSSDVQALCQVAGLANGTSASAAGLVEGINTFFLLFAGALVFLMQAGFAMLCAGSVRQKNVKNIMLKNMLDACGGAIGFWTIGYAFAYADNSSGDKTFIGGKNFFVNQLDESGGAWIGFFFQFAFAATAATIVAGTVAERCKMSAYLCYSVFLTGFVYPVVVHSIWSADGWLTAFRDDPWKGVGVIDFAGSGVVHMTGGATALVAAIVLGPRKGRFYDEDGNALETPASFPAHSVALQVLGTFLLWFGWYGFNPGSALVIDNAASASTSALCAVTTTLAAASGCVCAMFTDTIIEMMATGEASYDLTMAMNGALGGLVAITAGCSVVTPWASIIIGIIAGWVYIAFSKLLVKLKIDDAVDAVPVHFANGMWGVLAVGFFAEPDAMVTAGYNDVPGVFYKGDGKLLLCQFVAIIWICAWIFFLMTPFFVVLNILGMFRVDPLEEEVGLDISHHRGAAYDMTSAKKEDVEELMEHRSSKHGKVEVPKEVQKEDTA

SEQ ID NO: 1161 - protein, 411 aa, Anaplasma phagocytophilum
MVEKAVLECGDRRISLPVLRGTDGTPVVDITTLYRENNVLTYDPGFMSTAACRSEITFIDGNKGTLRYRGIDIENLIGTPNSFSSIVYLLLKGTLPSETEHEEFVRILGAEYDVPEQVMNVIRSFPRDSHPMAILIASFSALAANYHASRIDPLTGAIIAIAKVPGIVASIYRHTANLDFIQADANLEYTHHFIRMMFGDMDDAHRDIMHKALDAIFIMHADHEQNASTSTVRMTGSSGAGLFACLCAGVATLWGPAHGGANEAVIKMLAEIGSPENVSSFIDKVKNNKGKSRLMGFGHRVYKSYDPRARVLRTICKDVLDSLGRDENLLAVAEELESQALQDEYFIERKLYPNVDFYSGIVLRAMGVPVDMYTAFFALARTSGWASQWYEMIQSDEGKRISRPRQLYTGK

SEQ ID NO: 1162 - protein, 105 aa, Rickettsia sp. RAv9
GQPFIYPNNSLDFTENFLHMMFATPCTKYTVNPIIKNALNKIFILHADHEQNASTSTVRIAGSSGANPFASISTGIASLWGPAHGGANEAVINMLKEIGSSEYIP

SEQ ID NO: 1163 - protein, 482 aa, Corynebacterium glutamicum ATCC 13032
MNANARVFILNSLAMNDPQRSPTLLWFRDDLRLSDNAALKWAADHGPVIGLFIDETINRSIGAAARWWREQSLNALAQDLSFYGVPLLRRTGNPLEILPKIVSEMEVKAVTWNRRYHQPLCEVDATLKKNLRDKGIEVHSHPGFLLTEPWEVSTATGTPYKVFTPFSKAAWEVARVHAYETVKNNVPVPSHLTGPEDVELPILEMEQPFWSTTLVKECAPGEKNASEKLFDFLEHLQDYPQARDSLARSATSKLSAHLRFGEISIHRVWAETAAIDSEGTELFLKELLWRDFAWHRLYALPHMDTQNVRMQFNRFGWSWDPSEKDKLNTPSTPLIPTKADQFHEDLAAWRAGKTGIPLVDAGMRELWATGSMHNRVRMVVASFLTKNLQIHWRHGEEWFWETLVDADPASNAFNWQWAAGSGDDASPYFRIFNPVTQAKKFDPDETYIRRWVPEYGTPSYPDPIVDLKESRQIALDAYSAIK

SEQ ID NO: 1164 - protein, 511 aa, Cylindrotheca fusiformis
MAEFDNTFILEFCSGGNESSSDVQVLCQVASLANGTSASAGGLTEGINTFFLLFAGALVFIMQAGFAMLCAGSVRQKNVKNIMLKNMLDACGGAIGFWTIGYAFAYADNSSGNKTFIGGKNFFVNQLDESGGAWIGFFFQFAFAATAATIVAGTVAERCKMSAYLCYSIFLTGFVYPVVVHSIWSADGWLTAFRDDPWQGVGVIDFAGSGVVHMCGGATALVAAIVLGPRKGRFYDEDGNALETPASFPAHSVALQVLGTFLLWFGWYGFNPGSALVIDNAASASTSALCAVTTTLAAASGCVTAMFTDTLIEMMATGEASYDLTMAMNGALAGLVAITAGCSVVTPWASLIIGIIGGWVYLGLSKLLIKLKIDDAVDAVPVHFGNGMWGVLAVGFFAEPDAMVTAGYNDVPGVFYKGDGSLLLCQFVAIVWVCAWVFFLMTPFFVVLNILGMFRVDPLEEEVGLDISHHRGSAYDMTTAKKEDVEELMEHRSSKHGKVEIPKEVQKEDTA

SEQ ID NO: 1165 - protein, 411 aa, Anaplasma phagocytophilum
MVEKAVLECGDRRISLPVLRGTDGTPVVDITTLYRENNVLTYDPGFMSTAACRSEITFIDGNKGTLRYRGIDIENLIGTPNSFSSIVYLLLNGTLPSETEHEEFARILGAEYDVPEQVMNVIRSFPRDSHPMAILIASFSALAANYHASRIDPLTGAIIAIAKVPGIVASIYRHTANLDFIQADANLEYTHHFIRMMFGDMDDAHRDIMHKALDAIFIMHADHEQNASTSTVRMTGSSGAGLFACLCAGVATLWGPAHGGANEAVIKMLAEIGSPENVSSFIDKVKNNKGKSRLMGFGHRVYKSYDPRARVLRTICKDVLDSLGRDENLLAVAEELESQALQDEYFIERKLYPNVDFYSGIVLRAMGVPVDMYTAFFALARTSGWASQWYEMIQSDEGKRISRPRQLYTGK

SEQ ID NO: 1166 - protein, 435 aa, Rickettsia sibirica 246
MTNENNNDSEFAELKIRGKIFKLPILKASIGEDVIDISRVSAEADCFTYDPGFMSTASCQSTITYIDGDKGILRHRGYDIKDLAEKSDFLEVAYLLIYGELPSGEQYNNFTKQVAHHSLVNERLHYLFQTFCSSSHPMAIMLAAVGSLSAFYPDLLNFKEADYELTAIRMIAKIPTIAAMSYKYSIGQPFIYPDNSLDFTENFLHMMFATPCTKYTVNPIIKNALNKIFILHADHEQNASTSTVRIAGSSGANPFACISTGIASLWGPAHGGANEAVINMLKEIGSSEYIPKYIAKAKDKNDPFRLMGFGHRVYKNYDPRAAVLKETCKEVLKELGQLDNNPLLQIAIELEAIALKDEYFIERKLYPNVDFYSGIIYKAMGIPSQMFTVLFAIARTVGWMAQWKEMHEDPEQKISRPRQLYTGYVHREYKGIRER

SEQ ID NO: 1167 - protein, 380 aa, Ehrlichia sp. ERm58
VDITCLYKDTGILTYDPGFMSTAACESRITFIDGNKGILRYRGYNIADLVNSNKSFIEIVYLLFYGVLPDANDLQNFVLQVSQEYMPIKIVNDIIKSFPRNSHPMAILISCFSGLASYYNNQRHNEDELKYARLAVSQIAGIVAMIYRHITDQDFIQANTELSYSENFIHMMFDISSYEFTKVVSKALDVIFILHADHEQNASTATVRLTGSTGANLFACLAAGAATLWGPAHGGANEAVINMLMEIEKPSNVKQFVQKVKDKNNGIRLMGFGHRVYKNYDPRAKIICEICKEVLNDLKTSHPLLEVALELESIALQDSYFIERSLYPNVDFYSGIVLKAIGIPVSMFTTLFALARTSGWSAQWYEMIKGRDYKICRPRQ

SEQ ID NO: 1168 - protein, 445 aa, Arabidopsis thaliana
MVVRKVGKYELGRTIGEGTFAKVKFAQNTETGESVAMKIVDRSTIIKRKMVDQIKREISIMKLVRHPCVVRLYEVLASRTKIYIILEYITGGELFDKIVRNGRLSESEARKYFHQLIDGVDYCHSKGVYHRDLKPENLLLDSQGNLKISDFGLSALPEQGVTILKTTCGTPNYVAPEVLSHKGYNGAVADIWSCGVILYVLMAGYLPFDEMDLPTLYSKIDKAEFSCPSYFALGAKSLINRILDPNPETRITIAEIRKDEWFLKDYTPVQLIDYEHVNLDDVYAAFDDPEEQTYAQDGTRDTGPLTLNAFDLIILSQGLNLATLFDRGKDSMKHQTRFISHKPANVVLSSMEVVSQSMGFKTHIRNYKMRVEGLSANKTSHFSVILEVFKVAPSILMVDIQNAAGDAEEYLKFYKTFCSKLDDIIWKPPDASMRNRVTKAKSKRR

SEQ ID NO: 1169 - protein, 341 aa, Yersinia pestis KIM
MKALSKLKAEEGIWMTDVPQPELGHNDIMIKIRKTAICGTDVHIYNWDEWSQKTIPVPMVVGHEYVGEVVAIGQEVKGFNIGDRVSGEGHITCGHCRNCRGGRTHLCRNTVGVGVNRPGSFAEYLVIPAFNAFKIPDNISDELAAIFDPFGNAVHTALSFDLVGEDVLVSGAGPIGIMAAAVCKHVGARHVVIADVNEYRLDLARKMGVTRAVNVSKENLNDVMTELGMTEGFDVGLEMSGAPPAFRSLLNSMNHGGRIAMLGIPPSDMSIDWNQVIFKGLFIKGIYGREMFETWYKMAALIQSGLDLTPIITHRFPIDEFQQGFDAMRSGKSGKVVLSWD

SEQ ID NO: 1170 - protein, 411 aa, Anaplasma phagocytophilum
MVEKAVLECGDRRISLPVLRGTDGTPVVDITTLYRENNVLTYDPGFMSTAACRSEITFIDGNKGTLRYRGIDIENLIGTPNSFSSIVYLLLKGTLPSETEHEEFARILGAEYDVPEQVMNVIRSFPRDSHPMAILIASFSALAANYHASRIDPLTGAIIAIAKVPGIVASIYRHTANLDFIQADANLEYTHHFIRMMFGDMDDAHRDIMHKALDAIFIMHADHEQNASTSTVRMSGSSGAGLFACLCAGVATLWGPAHGGANEAVIKMLAEIGSPENVSSFIDKVKNNKGKNRLMGFGHRVYKSYDPRARVLRTICKDVLDSLGRDENLLAVAEELESQALRDEYFIERKLYPNVDFYSGIVLRAMGVPVDMYTAFFALARTSGWASQWYEMIQSDEGKRISRPRQLYTGK

SEQ ID NO: 1171 - protein, 396 aa, Ehrlichia sp. EHt224
KVKLPVLCDTNGNKVVDITSLYKSTGILTYDPGFMSTAACESKITFIDGSKGILCYRGYNIADLVNSNKSFIEIVYLLFYGSFPSVDDFKDFMLQISQEYMPPKMICDVIKSFSQDAHPMTILMACFSGLASYYNNQQHCENELKYARLAVSQIAGIIAMIYRHITDQDFIQANTELSYSENFIHMMFDISSYEFTKIVSKALDIIFILHADHEQNASTATVRLTGSTGANLFACLAAGAATLWGPAHGGANEAVINMLMEIEQPSNVKQFVQKVKDKNNGIRLMGFGHRVYKNYDPRAKIICEICKEVLKDLKVSHPLLEIALELENIALQDSYFIERNLYPNVDFYSGIVLKAIGIPVSMFTTLFALARTSGWSAQWYEMIKDKNYKICRPRQL

SEQ ID NO: 1172 - protein, 368 aa, Candida albicans SC5314
MTFVPRKTFPNYNIPLNNFKGHHQKALSKFGHLAPQLDMILEVRDSRAPISTTNVLFDKVLPSKKKLILYSKKDLSILKPRLLEKWHKSKNEQYMFVDCRSKRDGKKIINEIKKLYDSMETPPPLGLRTMIIGMPNVGKSSLVNTLRYVGLSDGENAVSTKIRKVARTGGQPGVTRSTSEIIRLSRDPEIMVYDTPGVFLPTTKNAETMLSLALVGCINESFIDPVILADYLLYVLNLQDPTGKLYTDYIDHPTNNVYELLESIDQKRNVLQIDKRFDECGLANHWISKWKQGKSSKYRGLFDVAAIHEINAKDFGNLTNAERERIGLSNVQQRLQERFGDDGTSTSKHRKRTAKDREFDMKNRLFKL

SEQ ID NO: 1173 - protein, 178 aa, Glycine soja
MASSMISSPAVTTVNRAGAGMVAPFTGLKSMAGFPTRKTNNDITSIASNGGRVQCMQVWPPVGKKKFETLSYLPDLDDAQLAKEVEYLLRKGWIPCLEFELEHGFVYREHNRSPGYYDGRCWTMWKLPMFGCTDASQVLKELQEAKTAYPNGFIRIIGFDNVRQVQCISFIAYKPPSF

SEQ ID NO: 1174 - protein, 492 aa, Brucella suis 1330
MQDKIDRLRQQAVPPQSLFINGRWQPAADGNVMAVISPIDGTQLTTIAAATAIDVDRAAAAARHSFEKGTWAKAAPAERRKVLLKIAELIERNALELAVLGVRDNGTEISMALKAEPGSAANSFRYYAEAIDKVYGEIAPTAENILGLVHRAPVGVVGAIVPWNFPMMIGAWKIAPALAAGNSIVLKPAEGASLSLLRLAELCAEAGLPEGVLNVVTGAGPVTGEALGLHPDIDVLAFTGSGFVGRKLLEYSARSNLKRVHLELGGKSPNIVFADAPDLAQAAKVSAYGIFRNSGQVCVAGSRLLVERSIAGEVAEKVSTIAAAIKGGDPLGLTTEAGAISSEAQLRKNLDFAEQALSEGAGLRTGGKRILEETGGFYMQPTVFNVEPGMTLAREEVFGPILSIIPFDNEEDALKIANDSDYGFASAVWTSNLSRAHRMVRGIRAGVVHVNTYGGADNTVPLGGVKQSGNGHDKSLHALDKYIDLKTAWIQL

SEQ ID NO: 1175 - protein, 154 aa, Crocosphaera watsonii WH 8501
MPLPTSLVTLEGTALPLSELENKVILFVNVASKCGLTPQYSGLVQLDKKYGERGFKVVAVPCNQFGEQEPGTPAEIKEFTSTKYDVEFTLLEKQDVNGSNRSPLYQFLVKDGEDIAWNFGKFLVGRDGEVVARFEPATAPDDAQLEAAIDKALG

SEQ ID NO: 1176 - protein, 156 aa, Saccharomyces cerevisiae
MWGKKFIRSQENVKFLCSVAVADESLTAFNDLKLGKKYKFILFGLNDAKTEIVVKETSTDPSYDAFLEKLPENDCLYAIYDFEYEINGNEGKRSKIVFFTWSPDTAPVRSKMVYASSKDALRRALNGVSTDVQGTDFSEVSYDSVLERVSRGAGSH

SEQ ID NO: 1177 - protein, 93 aa, Zea mays
  misc_feature (23)..(23): Xaa can be any naturally occurring amino acid
  misc_feature (38)..(38): Xaa can be any naturally occurring amino acid
  misc_feature (85)..(85): Xaa can be any naturally occurring amino acid
MKDQFQLAGLQGLGCHQDPQVLXRCIDCLPRQTLRSSXINSRMRDGSIRYEKFSKGDMLISLARRHSMPSSCLSQCLRACGDSRXCRRAIAKE

SEQ ID NO: 1178 - protein, 416 aa, Alternaria brassicicola
MGDLANRKVFKVFNQEFIVDERYNVTKELGQGAYGIVCAATNNQTGEGVAIKKVTNVFSKKILAKRALREIKLLQHFRGHRNITCLYDMDIPRPDNFNECYLYEELMECDLAAIIRSGQPLTDAHFQSFIYQILCGLKYIHSANVLHRDLKPGNLLVNADCELKICDFGLARGFSMDPEENAGYMTEYVATRWYRAPEIMLSFQSYTKAIDVWSVGCILAELLGGKPFFKGRDYVDQLNQILHYLGTPNEETLSRIGSPRAQDYVRNLPYMQKISFQSLFKNANPDALDLLDRMLAFDPSSRISVEEALEHRYLQIWHDASDEPSCPTTFDFQFEVVEEIPEMKKMILDEVSRFRQMVRVQPGAGAGANQAPQVPIPNNYDRAGYEDPRPQEAFNQGGWNGSDLERDLQGLDGRMR

SEQ ID NO: 1179 - protein, 152 aa, Glycine max
MQHRKLTSGRPSGTDGSDYSYRMVVDSRYQLVAKGKKYLSLHFITEAVLLLIGATLAYLPGIEADAPNTVAYSSVIVSVVSLIIGNIGRRRSRSGLLRFYAVVSSIVMLLLIASLATQHLLLKAIQDSKLWRKGSMMSMIYRIFKLVCCYTW

SEQ ID NO: 1180 - protein, 485 aa, Oceanobacillus iheyensis HTE831
MNTREPTQLRYPEDYLQIIDNGIEEKSNPKRMIIIGAGLAGLVAGHLLKAAGHDVVILEANKRIGGRVYTIRKPLTEGNYLDVGAMRIPNYHRLVHAYIKKFNLRIHPFINKTPEDIIFVNNVRTTREAYEANPDILNFPLPEHEKGKTAEQLLQEAIDPFVELYTNSDEQEQRLLEEKYKGYSIGEFLQKNPLGPSLSPYAIRLIGIISGLEGFPQGSFVDVITDILEPLTVENVYFDAINNGNDRLPYSISKQLEENIKIEQRVISIRQSSSHITVQTDKKQTYKGDYVINTSPFSVFQFIDVIPYESISFQKWQIIRQLLHIPSVKIGIEFKERFWEDLKMGNAISDLPSRFSYIPSYGKGTKGPAVLLASYSWGEDALLWTSTTPTLMVQMILKDLAKIYGNIVYKQFSRSIYFNWSLNPFSAGCFTLLSPLLGAAVTEDFIRQPEGRIHFAGEHTSDFNGWMEGAIQSGIRAAMEVNQRE

SEQ ID NO: 1181 - protein, 196 aa, Cichorium intybus x Cichorium endivia
GHNNLNAKFVLLGDMGAGKSSLVLRFVKGQFLEFQESTIGAAFFSQTLAVNDATVKFEIWDTAGQERYHSLAPMYYRGAAAAIIVYDITSADSFTRAKKWVQELQKQGNPNMVMALAGNKADLEDKREVTAEEARVYAEENGLFFMETSAKTAANVNDVFHEIAKRLPRAQPTQNPAGMVLVDRPAEGARAASCCS

SEQ ID NO: 1182 - protein, 200 aa, Cichorium intybus x Cichorium endivia
MATIGHNNLNAKFVLLGDMGAGKSSLVLRFVKGQFLEFQESTIGAAFFSQTLAVNDATVKFEIWDTAGQERYHSLAPMYYRGAAAAIIVYDITSADSFTRAKKWVQELQKQGNPNMVMALAGNKADLEDKRKVTAEEARVYAEENGLFFMETSAKTAANVNDVFHEIAKRLPRAQPTQNPAGMVLVDRPAEGARAASCCS

SEQ ID NO: 1183 - protein, 200 aa, Cichorium intybus x Cichorium endivia
MATIGHNNLNAKLVLLGDMGAGKSSLVLRFVKGQFLEFQESTIGAAFFSQTLAVNDATVKFEIWDTAGQERYHSLAPMYYRGAAAAIIVYDITSADSFTRAKKWVQELQKQGNPNMVMALAGNKADLEDKRKVTAEEARVYAEENGLFFMETSAKTAANVNDVFHEIAKRLPRAQPTQNPAGMVLVDRPAEGARAASCCS

SEQ ID NO: 1184 - protein, 446 aa, Mycobacterium tuberculosis CDC1551
MRALPAGRHFFRGSDGYEAARRGTVWHRRVPDRYPEVIVQAVSADDIVSAIRYATVNGHKVSVVSGGHSFAASHLRDGAVLLDVSRIDHASIDADKGRAVVGPGKGGSVLMAELEAQGLFFPGGHCRGVCLGGYLLQGGYGWNSRIYGPACESVIGLDVITADGAQIHCDADNHADLYWAARGAGPGFFGVVTSFYLKLYPRPATCGTSVYVYPFDLADEVFTWARAVSAEVDPRVELQALASRGEPSMGIDVPVISLASPAFADSPEEAEQALALFGTCPVVEQALVKVPYMPTDLPAWYDVAMTHYLSDHHYAVDNMWTSASAEDLLPGIRSILDTLPPHPAHFVWLNWGPCPPRQDMAYSIEADIYLALYGSWKDPADEAKYADWARSHMAAMSHLAVGIQLADENLGARPARFASDAAMAKLDRVRAEYDPDGLFNSWMGRI

SEQ ID NO: 1185 - protein, 197 aa, Triticum aestivum
MSAVNLTNVAVLNNPTSFVNPFQFEISYECLVALEDDLEWKLIYVGSAEDENYDQQLESVLVGPVNVGTYRFVLEADPPDPSKIREEDIIGVTVLLLTCSYMGQEFIRVGYYVNNDYDDEQLREEPPAKLLIDRVQRNILTDKPRVTKFPINFHPETSGGQQQDQPQSAVPENHTSKGSKAKRRSLTGSGNLGMPKF

SEQ ID NO: 1186 - protein, 79 aa, Zea mays
  misc_feature (27)..(27): Xaa can be any naturally occurring amino acid
LGSVTSRACRDVMTHSFGEGYSTRSYXEGFGGVYGGNYPVEHPGAQIHPSHSEYDTWQGSEVKEKEKARHLKDEKHATA

SEQ ID NO: 1187 - protein, 417 aa, Anaplasma centrale
MVEKAILECGDCKVSLPVMRGNDGTLAIDVTGLYKDAKILTYDPGFLSTAACRSEITFIDGDKGILRTRGYDIADLVTTGGGFCSVAHLLLHGALPQGRELDDFASAVGNECHVPAQVVNVIKSLPSSAHPMAILIASFVTLAACYHAENSIDPLKSAIVAISKVPGIVAAIYRHTSGMPAVEADPNLGYVQNFVKMMFGDLGSTRQSVICRALESIFIMHADHEQNASTATVRVTGSAGANLFACLSAGAATLWGPAHGGANEAVVRMLEEIGSPERVGMFIQRVKDKKDGVRLMGFGHRVYKNYDPRALIIRDICKETLHELGTSDPLLDVAFELERVALQDEYFVKRFLYPNVDFYSGIVLKAIGVPVNMFTAFFALARTTGWSAQWYEMVTEHGDSNRICRPRQLYVGNMNAK

SEQ ID NO: 1188 - protein, 599 aa, Zea mays
  misc_feature (18)..(18): Xaa can be any naturally occurring amino acid
  misc_feature (328)..(328): Xaa can be any naturally occurring amino acid
GLDAHAGKEVIYFVGWSXFHTIHLVRDGTQAPSLGDLLKMKSQEGVRVLLLVWDDPTSRSILGYKMDGFMGTRDEETRRFFKHSPVQVLLCPRSAGKRHSWVKQQETGTIFTHHQKTVIVDADAGNYRRKIVAFVGGLDLCGGRYDTPWHPLFRTLQNEHKEDYYNPNFNTVDARGPREPWHDLHSKIDGPAAYDVLQNFQERWLKAAKRHGIKKLAKSYDDALLTIERIPEIININDAIYFSDNDPETWHVQVFRSIDSNSAKGFPKDPRAATMKNLVCGKNVLIDMSIHTAYVHAIRSAQHYIYIENQYFIGSSFNWDSNKDLGKXLVANNLIPIEIALKIANKIKANERFSAYIVVPMWPEGNPTGAATQRILYWQNKTMQMMYETIYRTLKEEGLDDMYEPQDYLNFFCLGNREVADSTSTSNASNTANNPQEQARKNRRFMVYVHSKGMIVDDEYVIIGSANINQRSMEGIRDTEIAMGAYQPQYTWANKLSAPRGQIYGYRMSLWAEHIGSIEEDFNYPESLECMRRVRHLGEENWKQFVADEVTEMRGHLMKYPVSVDRKGKVKPLPGCTTFPDMGGNICGSFVAIQENLTI

SEQ ID NO: 1189 - protein, 417 aa, Triticum aestivum
  misc_feature (40)..(40): Xaa can be any naturally occurring amino acid
  misc_feature (308)..(308): Xaa can be any naturally occurring amino acid
NPTPTTAKKIHRSIDLGARRTATRSDHIQRRKIKPPPPPXMKLQTEAAAAGGEGRLMIRQVWANNVESEFQAIRQVAERFPYVSMDTEFPGVIHCPSKHHATLTPSERYAALKANVDALHLIQVGLAFAASPDAAPAVAFEINLREFDPRVHRHNPSSVALLAGHGLDFAKQRREGVDARVFAALLMSSGLVCSGASAPTWVTFHSAYDFGYLVKLLMGRKLPRTLPEFLGLVRVFFGDQVYDARHVMDSCAGLYGGLDALAAQLGVERAAGMSHQAGSDAALTWDVFRRIREVYFAGHSRQGRASAXAGVLYGLDLELDLAGPRARETGTEREQEHRTLGRGTGRGRGKNRRAGGLNYRPTHPPPINCLAVNLVTSETPPADSLAPCFSMSVVVHRVSGLIRDVLMGINIMFLFVG

SEQ ID NO: 1190 - protein, 433 aa, Ehrlichia chaffeensis
MLYKQDMCGVIINLGRIMVKEAVLELDGQRIKLPVLYDTHGNKAVDITSLYKNTGILTYDPGFMSTAACESRITFIDGNKGILCYRGHDIVNLVNNNKSFIEIVYLLFYGVLPGLEDLQNFISQISQEYNPPKIVHDVIKSFPRDSHPMSILMACFSALASCYHNQDNSADQLKCAKLAVAKVASIIALIYRYITNQDFVESDTKLSYSENFVHMMFDISSYKFTQVVAKALDIIFVLHADHEQNASTATVRLSGSSGADLFACLVAGTATLWGPAHGGANEAVINMLMAIEKPSNVKQFIQKVKDGNKSTRLMGFGHRVYKNYDPRAKIMYKICREVLNNLNVNDPLLEIALELENIALQDSYFIDRNLYPNVDFYSGIVLKAIGIPVRMFTTLFALARTSGWSAQWYEMVAEENYKICRPRQLYTGNIAEC

SEQ ID NO: 1191 - protein, 267 aa, Salmonella enterica subsp. enterica serovar Typhi Ty2
MTIPAFGLGTFRLKDDVVIASVKTALELGYRAVDTAQIYDNEAAVGQAIAESGVPRNELYITTKIWIENLSKDKLIPSLKESLKKLRTDYVDLTLIHWPSPGDAVSVEEFMQALLEAKKQGLTREIGISNFTIPLMEKAIAAVGADHIATNQIELSPYLQNRKVVDWAKAHGIHITSYMTLAYGKALKDEVIARIAVKHNATPVQVILAWAMGEGYSVIPSSTRRENLASNLLAQDLHLDAEDKNAIAALDCNDRLVSPEGLAPAWD

SEQ ID NO: 1192 - protein, 497 aa, Oryza sativa
MATCLDSLGPLLGGAANSTDAANYICNRFTDTSSAVDATYLLFSAYLVFAMQLGFAMLCAGSVRAKNSMNIMLTNVFDAAAGALFYYLFGFASRRTPSKGFIGKQFFGLKHMPQTGYDYDFFLFQWAFAIAAAGITSGSIAERTRFSAYLIYSAFLTGFVYPVVSHWFWSTDGWASAGRLTGPLLFKSGVIDFAGSGVVHLVGGIAGLWGAFIEGPRIGRFDAAGRTVAMKGHSASLVVLGTFLLWFGWFGFNPGSFTTISKIYGESGTIDGQWSAVGRTAVTTSLAGSVAALNHAVRQEMADGALERDRRLQRSPRRVRAITAGCSVVDPWASVICGFVSAWVLIGCNKLALMLKFDDPLEATQLHGGCGAWGIIFTALFARKEYVELIYGVPGRPYGLFMGGGGRLLAAHIVQILVIVGWVSATMGTLFYVLHRFGLLRVSTSTEMEGMDPSCHGGFGYVDEDEGQRRVRAKSAAETARVEPRKSPEQAAAGQLV

SEQ ID NO: 1193 - protein, 335 aa, Triticum aestivum
  misc_feature (221)..(221): Xaa can be any naturally occurring amino acid
  misc_feature (243)..(243): Xaa can be any naturally occurring amino acid
  misc_feature (251)..(251): Xaa can be any naturally occurring amino acid
  misc_feature (282)..(282): Xaa can be any naturally occurring amino acid
  misc_feature (294)..(294): Xaa can be any naturally occurring amino acid
MGSIAAGADEDACMYALQLVSSSILPMTLKNAIELGLLETLMSAGGKFLTPAEVAAKLPSAANPEAPDMVDRMLRLLASYNVVSCRTEEGKDGRLSRRYGAAPVCKYLTPNEDGVSMSALALMNQDKVLMESWYYLKDAVLDGGIPFNKAYGMSAFEYHGTDLRFNRVFNEGMKNHSIIITKKLLELYKGFEGLNTLVDVGGGVGATVAAITAHYPAIKGXINFDLPHVISEAPPFPGVTHVXGGDMFQKXVPSGDAILMKWILHDWSDEHCAKLLKNCYDXLPAHGKVVLVDXILPVNPKARLKRRSVPVDLSSPPTRVQGRSKGLSLARARSP

SEQ ID NO: 1194 - protein, 416 aa, Ehrlichia muris
MIKEAVLELDDQRIKLPVLYDTNGNKAVDITSLYKDTGVLTYDPGFMSTAACESKITFIDGNKGILCYRGHNIVDLVNGNKSFVEIIYLLFYGVFPSSEDLQNFTLQISQEYTPPQVVYDVIKAFSQDSHPMAILMACFSALAAYYHDREADKDELKCAKLAVAKIASIVALIYRYITNQDFITADTKLSYSENFVHMMFDISSYKFTQVVAKALDIIFVLHADHEQNASTATVRLAGSAGADLFACLVAGTATLWGPAHGGANEAVINMLMTIEKPSNVKQFIQKVKDGSKTTRLMGFGHRVYKNYDPRAKMMCEICREVLNDLGIDDPLLEVAVELENIALQDSYFIERNLYPNVDFYSGIVLKAIGIPVKMFTTLFALARTSGWSAQWYEMVANKNYKICRPRQLYTGHITKI

SEQ ID NO: 1195 - protein, 495 aa, Oryza sativa
MATCADTLGPLLGTAAANATDYLCNQFADTTSAVDSTYLLFSAYLVFAMQLGFAMLCAGSVRAKNTMNIMLTNVLDAAAGALFYYLFGFAFAFGAPSNGFIGKHFFGLKQVPQVGFDYSFFLFQWAFAIAAAGITSGSIAERTQFVAYLIYSAFLTGFVYPVVSHWIWSADGWASASRTSGSLLFGSGVIDFAGSGVVHMVAACRTLGRPHRGPPHWRFDHAGRSVALRGHSASLVVLGSFLLWFGWYGFNPGSFLTILKSYGPPGSIHGQWSAVGRTAVTTTLAGSTAALTTLFGKRLQTGHWNVIDVCNGLLGGFAAITAGCSVVDPWAAIICGFVSAWVLIGLNALAARLKFDDPLEAAQLHGGCGAWGVIFTALFARKEYVDQIFGQPGRPYGLFMGGGGRLLGAHIVVILVIAAWVSFTMAPLFLVLNKLGLLRISAEDEMAGMDQTRHGGFAYAYHDDDASGKPDRSFGGFMLKSAHGTQVAAEMGGHV

SEQ ID NO: 1196 - protein, 409 aa, Ehrlichia sp. Yamaguchi
MIKEATLELDGQKIKLPVLYDTNGDKAVDITSLYKNTGILTYDPGFMSTAACESKITFIDGNKGILCYRGHNIVDLVNKNKSFVEIIYLLFYGVFPSAEDLQNFTLQISQEYMPPQVVYDVIKSFSQDSHPMSILMACFSALASYYHDQEADKDELKYAKLAVAKIASMVALIYRYITNQDFITADTKLSYSKNFVHMMFDISSYKFTQVVAKALDIIFILHADHEQNASTATVRLAGSSGADLFACLVAGTATLWGPAHGGANEAVINMLMTIEKPSNVKQFIQKVKDGSKTTRLMGFGHRVYKNYDPRAKIMCKICREVLNDLGIDDPLLEVAQELENIALQDSYFIERNLYPNVDFYSGIILKAIGIPVRMFTTLFALARTTGWSAQWYEMVANKNYKICRPRQLY

SEQ ID NO: 1197 - protein, 347 aa, Pseudomonas fluorescens
MARSPETNSAMPQQIRQLLYSQLISQSIQTFCELRLPDVLQAAGQPTSIERLAEQTHTHISALSRLLKALKPFGLVKETDEGFSLTDLGASLTHDAFASAQPSALLINGEMGQAWRGMAQTIRTGESSFKMYYGISLFEYFEQHPERRAIFDRSQDMGLDLEIPEILENINLNDGENIVDVGGGSGHLLMHMLDKWPESTGILFDLPVAAKIAQQHLHKSGKAGCFEIVAGDFFKSLPDSGSVYLLSHVLHDWGDEDCKAILATCRRSMPDNALLVVVDLVIDQSESAQPNPTGAMMDLYMLSLFGIAGGKERNEDEFRTLIENSGFNVKQVKRLPSGNGIIFAYPK

SEQ ID NO: 1198 - protein, 137 aa, Glycine max
LALHYRNADHPSRVDTDVDGLLGRLRFIQGLKFQVDVTYMEFLLRVKRVEEHAKGNGTWDAPHPWLNLFVSKSHIVDFDREVFKKILKDGVDGPILVYPLLRNNYIVRKISSQVKLICKGFGLSPSLIMIDGRIPSK

SEQ ID NO: 1199 - protein, 501 aa, Saccharomyces cerevisiae
MTKLHFDTAEPVKITLPNGLTYEQPTGLFINNKFMKAQDGKTYPVEDPSTENTVCEVSSATTEDVEYAIECADRAFHDTEWATQDPRERGRLLSKLADELESQIDLVSSIEALDNGKTLAFKARGDVTIAINCLRDAAAYADKVNGRTINTGDGYMNFTTLEPIGVCGQIIPWNFPIMMLAWKIAPALAMGNVCILKPAAVTPLNALYFASLCKKVGIPAGVVNIVPGPGRTVGAALTNDPRIRKLAFTGSTEVGKSVAVDSSESNLKKITLELGGKSAHLVFDDANIKKTLPNLVNGIFKNAGQICSSGSRIYVQEGIYDELLAAFKAYLETEIKVGNPFDKANFQGAITNRQQFDTIMNYIDIGKKEGAKILTGGEKVGDKGYFIRPTVFYDVNEDMRIVKEEIFGPVVTVAKFKTLEEGVEMANSSEFGLGSGIETESLSTGLKVAKMLKAGTVWINTYNDFDSRVPFGGVKQSGYGREMGEEVYHAYTEVKAVRIKL

SEQ ID NO: 1200 - protein, 379 aa, Hordeum vulgare subsp. vulgare
IPWERLQITRKDYRKARLEQYKNYENFPQSGELMDKLCKQVESSSKYYEFQYNTRIVKPSILHFQLRNLLWATSKHDVYFMSNSTVGHWSSLSHKMTDVLDFSGHVAPAKKHPGCALEGFTGVQVSTLAVNEGLLVAGGFQGELVCKSLGERDVKFCTRTTLSDNAITNAMDIHRSTSGSLRITVSNNDSGVREFDMERFQLLNHFRFNWPVNHTSVSPDKKLLAVVGDDRDALLVDSRNGKVTSTLVGHLDYSFASAWHLDGVTFATGNQDKTCRVWDIRNPSTSLAVLRGNIGAIRCIRYSSDGRFLLFSEPADFVHVYSTAECYRKRQEIDFFGEISGISLSPDDESLFVGVCDRVYASLLNYRLVHANGYLDSYM

SEQ ID NO: 1201 - protein, 130 aa, Bacillus cereus ATCC 10987
MSLTSLKDYTTLHNGVKMPWFGLGVFKVEDGSEVIESVKAAIKNGYRSIDTAAIYQNEEGVGQAIRESGVSREELFITSKVWNSDQGYETTLQAFETTLEKLGLEYLDLYLVHWPVKGKYTESWKALEKL

SEQ ID NO: 1202 - protein, 381 aa, Xylella fastidiosa Dixon
MPLLAEHGTTIIEAMYHRLFEDPQIEALFNQANQKNGTQIHALAGAILAYARNIDNPGVLASAIERISQKHVGYAIHPEHYPHVATALLGAIKQVLGDVATSEVLEAWGEAYWFIANLLKDREAVIREGIMTKNGGWIHWRRFVISKRIPESETITSFMLHPEDGGPVVPHQAGQYLTFRFDAAGMPGMKRNYSISCGPNSDYYRITVKREHGTGASAFLHDQAKVGTIIECTPPVGDFFLPSVIERPIVLLSGGVGLTPMVSMMEQIAEAHPDAQVWYVHGTQNRETHAMDAHIRALVSRHKHMKATTFYTQRSEADDAEAGFITIDWLRANTPFQKADFYLCGPRPFLRTFVRDLIGAGVPAAQVHYEFFGPMDEEMAA

SEQ ID NO: 1203 - protein, 229 aa, Glycine max
SLTRGRTRGHAVKQNYGEKVLIQFEDFANHNAFDLLEKYSSSHLGFNDDIQGTASVVLAGLLASLKLVGGTLVDHTFLFLGAGEAGTGIAELIALEISKQTKAPVEETRKKIWLVDSKVKMPGWFYSYFTFYSFFFPNLHNKLVLFQGLIVSSRLESLQQFKKPWAHEHEPVKSLLDAVKAIKPTVLIGSSGAGKTFTKEVVETMASLNEKPLILALSNPTSQSECTAE

SEQ ID NO: 1204 - protein, 346 aa, Bordetella bronchiseptica RB50
MSASLTADRTPPLTTAALPYPLDPQIQRFVERMQADSAAHPRRDLVPVEQARAISEAVRRPWAEGGPQMARTREIHAPTPHGPVRLRVYTPRAARPGPALLYVHGGGWVLFSLDTHDRLMREYAERAGLTVIGVDYTRAPEARYPRAIEEIVGVIDWLDANGAELEVDRARLCIGGDSAGANLSVAACLTLRERGAAPLAGMVLNYGVYDANLFRDSTVKYGGGEYLLSTQQMVWFYWNYLRAGDDPRDPRISPVHADLRGLPPAFMAITELDLLHDANQDMAARLREAGVDVQAKVYPGTVHSFLEAVSLAQVSVAAFDDTAAWLRAVLRPAAAAAAIHTGEHQP

SEQ ID NO: 1205 - protein, 487 aa, Triticum aestivum
  misc_feature (95)..(95): Xaa can be any naturally occurring amino acid
MGDRPKLPARYEQVKLLGEGNFAKVYLARHMDTKEEVAIKVMDKEKLIKLGAVQQIKREIAVMRRLRHPNIVQLHKVMACKSRIFVVMEYVRGGXLYRHIPANSGLKEDETRRIFQQLVSALTFCHAQGVYHRDIKPDNLLVDEHGNLKVADFGLSAHADTARREALLHTVCGTPLYVPPEVFARRGYDGAKADAWSCGIVLFVLAAGRKPFRDDDFITLYRTICRGDYRCPRTFSPELVRIVRRLLQPNPAHRITLLQIKETDWFKKGFKEISFYIDNKDCLRSLDGSEEPDLCDSDSEDETAMSSSSSGSSSPVAHGDGGGMHTSVSAPSLVNLEKMHIAAARAPEPRIRRIKSMNAFDIIASSPSFDLSGLFEERGEQLRFVSSAPVNTIIKKLEEIAGQVSFTARTKDCQVSFEATRNGHKGALAISTKIFQLTPELVMVQVCKKAGDTAEYRQFCGSELKPGLRGLVDGLPEDGLPPTLNVA

SEQ ID NO: 1206 - protein, 437 aa, Rubrivivax gelatinosus PM1
MTPSDVKATLSFSDGSPSMDLPIYKGSVGPDVIDIRKLYAQTGKFTYDPGFLSTASCQSAITYIDGDKGELLYRGYPIEQLAENCDFLETCYLLLNGELPNVTEKAKFVKTVNGHTMVNEQMQFFLRGFRRDAHPMAVLTGLVGGLSAFYHDSTDVQNPEHRAIAAIRLIAKMPTLVAMAYKYSIGQPYIYPRNDLSYTSNFMRMMFGTPCEEYVPNDVLVRAMDRIFILHADHEQNASTSTVRLCGSSGTNPFAAIAAGVACLWGPAHGGANEACLNMLEDIQKMGGVAKVGKFIEQVKDKNSGVRLMGFGHRVYKNYDPRAKLMRETCHEVLAEMGLQNDPLFKLAMELEKIALEDDYFVSRKLYPNVDFYSGIVQRAIGIPVSLFTAIFALARTVGWIAQLNEMIGDPEYKIGRPRQLFVGATARDVTPIAERA

SEQ ID NO: 1207 - protein, 112 aa, Bartonella sp. CL1281co
NEACLKMLQEIGSVKRIPEFIARAKDKNDPFRLMGFGHRVYKNYDPRAKIMQQTCHEVLKELNIQDDPLLDIAIELENIALNDEYFVEKRLYPNVDFYSGITLKALGFPTEM

SEQ ID NO: 1208 - protein, 316 aa, Glycine max
MGGGGAMRSAAKIAGIGVSKAALRPSALPTEQTVRNASRPTAVSGVSSQSAKSAEVAPLHTAAAWDDWDFAEDGELVVPRMVFGSVPTLDEAKEATAELKDAIDQVYLCPETSQYSSPGGQVSALSPTLYGPVNRSCVIDAISDPTAPKHAIQAFHLLSTSREAQAVVASLACDPNVWNAVMENSAVSSFFQSQQSVAGFGAAENTEEVDKLSSCASETVESPEKLEVSAESHPGNMIFDFMDLLQNVKLTVIELVSRLSGFLQNIFPTPDAMKEKMSGDADGNTKASFMDSKISMGGTFIGLAVLVIMVIVTKRA

SEQ ID NO: 1209 - protein, 254 aa, Neurospora crassa
MMSGPETTRAVRWALGAGYRGFDSAQWYYNEREAGQAILSFLSSPENTAGLTRKDVHFTSKLRDNSTNYDAVRASISKSVKASGLGYIDLFLLHSPLGGREARLTSWKAVEDAVLAGEVKMAGVSNYGVKHLDEVMSAPFKIKPLVNQIECHPFNTQPEIRAACEKYGIVIEAYAPLARGMRMKHPVLTAVAKKYGVTPAQVLVRWSVQHGFVTLPKSTKKERLVENADVGRFELAEEDMEKLDGLDEKLVTDW

SEQ ID NO: 1210 - protein, 377 aa, Thermus thermophilus HB27
MEVARGLEGVLFTESRMCYIDGQQGKLYYYGIPIQELAEKSSFEETTFLLLHGRLPRRQELEEFSAALARRRALPAHLLESFKRYPVSAHPMSFLRTAVSELGMLDPTEGDISREALYEKGLDLIAKFATIVAANKRLKEGKEPIPPREDLSHAANFLYMANGVEPSPEQARLMDAALILHAEHGFNASTFTAIAAFSTETDLYSAITAAVASLKGPRHGGANEAVMRMIQEIGTPERAREWVREKLAKKERIMGMGHRVYKAFDPRAGVLEKLARLVAEKHGHSKEYQILKIVEEEAGKVLNPRGIYPNVDFYSGVVYSDLGFSLEFFTPIFAVARISGWVGHILEYQELDNRLLRPGAKYIGELDVPYVPLEARE

SEQ ID NO: 1211 - protein, 233 aa, Crocosphaera watsonii WH 8501
MSDPVVMMKQEVGKAAAARVKSDSIVGLGTGSTTAYAIQYIGERLQSGDLKNIIGVTTSFQAEVLARKYNIPLSTLDVVDRIDIAIDGADEVDPQKNLIKGGGAAHTQEKIVDSLAEQFIVVVDGGKLVDKLGSTFLLPVEVIPKAVVPVMRKLEQLGGKPDLRMGVKKAGPVVTDQGNLVVDVKFDSIDDPATLEKTINNIPGVLENGLFVGVTDVVLVGEIIDNKPVVREI

SEQ ID NO: 1212 - protein, 118 aa, Brassica napus
MAESQTKSPGDHVSGGDQSPRSSSHVREQDRFLPIANISRIMKRGLPANGKIAKDAKEILQECVSEFISFVTSEASDKCQREKRKTINGDDLLWAMATLGFEEYIEPLKLYLTRYREM

SEQ ID NO: 1213 - protein, 371 aa, Agrobacterium tumefaciens str. C58
MDGTPISPTARAKASSSDCNRGILLKTHRIALIPGDGIGQSVTDAAWQVLNAVAKTSGFVLEGTEFPWSCAFYKETGAMMPKDGIETLRGFDAIMLGAVGWPAEVPDSVSLHGLLLPIRKAFVQYANIRPHRLLSGVQGPLKADGFDILCIRENTEGEYSGAGGRVHQGTEDEVAVETSIFTRKGVERILRFGFEQAQKRRGKLASITKSNAQKYSMVFWDEVTHKLAAEYPDVEVSSYHIDAMAARMVMAPESLDVVVASNLFGDILTDLGAAIQGGLGFAASANINPDRSAPSMFEPVHGSAPDIAHLGIANPIAAIWSGAMMFEHLGEKDAAAKIMAALETATGRGIGTVPGKDKTDTITAAVLAALA

SEQ ID NO: 1214 - protein, 99 aa, Glycine max
  misc_feature (43)..(43): Xaa can be any naturally occurring amino acid
MAPSTISNPGAGFVDRAVPSMIATITGLRIMAGFPTRKTNKDXTFIDCNGGRVHCMHVWPPVGKKKCENLSYLTDLEDAQWAKEAEYLVREGMDINARN

SEQ ID NO: 1215 - protein, 484 aa, Agrobacterium tumefaciens str. C58
MIKLKNAALLRDACLVNGRWLKAADGKTIAVENPANSMIIGHVPSLSADEVKAAVESAGKAFSEWSRRSAKDRAAILRRWFDLMVANADDLGALMTAEQGKPFAEAKGEALYAASFVEWFAEEAKRVYGDTIPSPTTDKRITILKQPIGVCAAITPWNFPAAMITRKAAPALAAGCAMIVKPAEQTPLTALALGVLAEEAGVPAGVFQVVTGAARDIGKVFTESDTVRKISFTGSTEVGRLLMAQSAPTIKKLSLELGGNAPFIVFDDADLDAAVEGAIVSKYRNAGQTCVCSNRIYVQDGVYDAFAEKLVKRVESLSVGEGTEPGVLIGPLIDQEAVAKVEDHVADALGKGAKIVIGGKRHALGGTFYEPTVLTGATQAMKVAREETFGPVAPLFRFGTEDEAVAMANDTEFGLAAYFYTENVRRTWRVAEALEYGMVGHNTGLISNEVAPFGGVKQSGLGREGSHYGIDEYLEIKYLCSAIG

SEQ ID NO: 1216 - protein, 197 aa, Zea mays
  misc_feature (169)..(169): Xaa can be any naturally occurring amino acid
MATSFQGTTTKCTACDKTVYLVDKLTADNRVYHKACFRCHHCKGTLKLANYNSFDGVLYCRPHFDQLFKRTGSLDKSFQGTPKVVKPERNVGNENATKVSSAFAGTREKCVGCSKTVYPIERVTVNNTMYHKCCFKCCHGGCTISPSNYIAHEGKLYCKHHHVQLIKEXGTSASSRMTTRRHRRLGRWRTTKKKSIN

SEQ ID NO: 1217 - protein, 96 aa, Glycine max
VLEATMICIDNSEWMRYRDYSPSRFQAQTDAANLICGAKTHSNPYYTAGVLTMAGTGTRVTATHPSDLGRILSGLHGLEMGAKLNLSDRMQEAQLG

SEQ ID NO: 1218 - protein, 398 aa, Neorickettsia risticii
MNSEKVKVNVEEFLKSTAGPSGVSASLEPRGFFYDPGYAKTAPCKSSITFIDGENGILLHRGYPIEELAQTSDFLQVGYLLINGKLPDSIATREFEEKIKHVPQLPECVLKNIRSFPTSAHPMAVLISALASLASVYGEMDFHEKKLLLVAYTPWLVAYIYRHINSQEFIEPDIRLPYTENFLYMMFGEKKPKDAEILDKIFILHADHGQTASTSVARMVVSSGASPIVACSAATASLWGPLHGGANERVLEMLRGIIESGENVENFIERVKRKEERLMGFGHRVYKNYDPRAAILKQKAHDVLKADSPILKTAGKLETIATREEYFLSRKLYPNVDFYSGIVLDALGIPSCMFTPIFALARTVGWVAQIAEFLSDSEQKLCRPRQIYVGEPRRSVHG

SEQ ID NO: 1219 - protein, 483 aa, Hordeum vulgare subsp. vulgare
  misc_feature (396)..(396): Xaa can be any naturally occurring amino acid
MERYNIITEVGDGTFGSVWRAINKESGEVVAIKKMKKKYFSWEECINLREVKSLRRMNHPNIVKLKEVIRENDMLFFVFEYMECNLYQLMKSKGKPFSETEIRNWCFQVFQALSHMHQRGYFHRDLKPENLLVTKELIKVADFGLAREIISEPPYTEYVSTRWYRAPEVLLQSSVYSSAVDMWAMGAIIAELFSHRPLFPGSSEADEIYKICNILGTPNQHTWAGGLQLAASIHFQFPQSGSINLSEVVPTASEDALNLISWLCSWDPRKRPTAVEVLQHPFFQPCFYVPPSLRYRSTGYATPPPSVGAKGAMDQKNARRYPVGTLSNGRPAVNNSYLSTNAPARAAGVQRKLELDHQVKPEGNHKLTTKENAMNQPWSRLPPAPVRNNMNYLAAXEQIPRGGAPDIAEKLSQLSMSSTTNRAPIMPSDRFVDLKATTRAHGEPVRRPVPLGPRDTWHARNDPFRRTYEMPGERALLQRKLVS

SEQ ID NO: 1220 - protein, 398 aa, Neorickettsia sennetsu
MNSEKVKVNVEEFLKSTAGPFGVSASLEPKGFFYDPGYAKTAPCKSSITFIDGENGILLHRGYPIEELAQTSDFLQVGYLLIDGKLPDSAATREFEERIKHVPQLPECVLKNIRSFPTSAHPMAVLISALASLASVYGEMDFNQKKLLLVAYTPWLIAHIYRHINSLEFVEPDIRLPYTENFLYMMFGEKKPKDAEILDKIFILHADHGQTASTSVARMVVSSGASPIAACSAATASLWGPLHGGANERVLEMLRGIVESGEKVENFIERVKRKEERLMGFGHRVYKNYDPRAAILKQKAHDVLKADSPILKTAGELETITAREEYFLSRKLYPNVDFYSGIVLDALGISSCMFTPIFALARTVGWVAQITEFLSDSEQKLCRPRQIYVGEPRRNVHG

SEQ ID NO: 1221 - protein, 473 aa, Salmonella typhimurium LT2
MPTHLVWFRRDLRLQDNLALAAACRDASARVLALYISTPAQWQAHDMAPRQAAFISAQLNALQTALAEKGIPLLFHEVADFNASIETVKNVCRQHDVSHLFYNYQYEFNERQRDAAVEKTLPSVICEGFDDSVILAPGAVMTGNHEMYKVFTPFKNAWLKRLKEDIPPCVPAPKIRVSGALSTPLTPVSLNYPQQAFDAALFPVEENAVIAQLRQFCAQGADEYALRRDFPAVDGTSRLSASLATGGLSPRQCLHRLLAEQPQALDGGPGSVWLNELIWREFYRHLMTWYPALCKHQPFIRWTKRVAWQENPHYFQAWQKGETGYPIVDAAMRQLNATGWMHNRLRMITASFLVKDLLIDWRLGERYFMSQLIDGDLAANNGGWQWAASTGTDAAPYFRIFNPTTQGERFDRDGEFIRQWLPALRDIPGKAIHEPWRWAEKAGVVLDYPRPIVEHKQARIATLSAYEAARKGA

SEQ ID NO: 1222 - protein, 159 aa, Chromobacterium violaceum ATCC 12472
MTTLYDFSAQRADGAEQALSAYEGRVALLVNTASECGYTRQYAGLQELQDYFAGQAFVVLGFPCNQFGGQEPGGEDEIVDFCRSRFGVSFPLFAKLQVNGDGAHPLWRWLTQADSDRPHPIKWNFTKFLVDGRGRVVKRYEPAVEPHELVDDIKALLAR

SEQ ID NO: 1223 - protein, 403 aa, Neorickettsia helminthoeca
MDTDEVTIKIQATVKSSGGPNGILISSEPRSFIYDPGYVSTASCKSEITFVDGEEGVLLYRGYPVDELATQCDFLRVVYLLLYGELPDPVRAKEFRTFIQNFPQLPDCVLENICSFPRDAHPMVILISAFAALASAHHDSDFETHKEVLIANVPRLVAYIYRYITSQDFIPPDACLSYVGNFFYMMFGEKKPDYESILDKILILHADHEQNASTSTARMVVSSGASPIAAVSAATATLWGPLHGGANEKVLHMLGEIEKQGGSVEEFIERVKRKEERLMGFGHRVYKNYDPRAVILKSTAQDILKGSSSILSIASKLESIASNDEYFISRKLYPNVDFYSGIILNALGIPTYMFTPIFALARTSGWVAQIKEFLSDKEQKIARPRQIYIGKPFRKVASQSEKL

SEQ ID NO: 1224 - protein, 250 aa, Glycine max
MGKSYPTVSADYQKAVEKAKKKLRGFIAEKRCAPLMLRLAWHSAGTYDVSSKTGGPFGTIKHPSELAHGANNGLDIAVRLLEPLKAEFPILTYADFYQLAGVVAVEVTGGPEVPFHPGREDKPEPPPEGRLPDATKGSDHLRDVFGKAMGLSDRDIVALSGGHTIGAAHKERSGFEGPWTSNPLIFDNSYFKELLSGEKEGLLQLPSDKALLSDPVFRPLVEKYASDEDAFFADYAEAHQKLSELGFAEA

SEQ ID NO: 1225 - protein, 177 aa, Glycine max
PPHPPAEPEKPFPNFLERPKQTTTPYKETRKKIWLVHPKGLIVGSRKASLQHFKQPWAHEHEPVGSLLEAVKVIKPTVLIGSSGVGKTFTKEVIEAVTSINEKPLVLALSNPTSQSECTAEEAYQWSEGRAIFASGSPFDPVEYKGKVYYSGQANNAYIFPGFGLGLVISGAIRVHD

SEQ ID NO: 1226 - protein, 502 aa, Mentha x piperita
MYSIAFMLVLRKMDEIISHTLAFQALVSLILLISITKWLSNSPKNKNSSPPSPRKLPILGNLLQLGSLPHHNLRSMARKHGPIMLLHLGSVRPVSSRRRPRGNHENSRSRLRRPRGSRSAALQLQGRVGGYGEYWRQLKTICVVQLLSNKRVQSFRSVREEETELLMKKIGDSSGNVNLSHMFTQLTNDVVCRSAIGRKYGAGDENGEKFLEILREFLELLGAISIGDFVPSLWWINRINGFDRRVDRIAKEMDEFLEKVIHERLENPAAKAEENFVDILLEIYRNNSAGVSIDRDSIKAIILDVFAAGTDTTAVVLEWAMTELLRHPEIMKKLQSEVRQVVKDKHNITDDDIEKMHYLKAVMKETMRFHTPIPLLVPRVARNDVEVMGYDVPVGTMVMINAWAIGRDPTSWDEPEKFRPERFLNSSVDFKGLDFELIPFGAGRRGCPGTTFPMATLEFTLANLMQKFDWELPHECRELDMSERPGVAIRRVIPLLAIGTKM

SEQ ID NO: 1227 - protein, 244 aa, Triticum aestivum
MFGYRKAPDLDLEAGGSAPLYPGMTEDVELRWAFIRKIYVILSVQLAMTAAVAGFVVKVPAVSDFFVSSNAGLGLYIFLLVLPLIVLCPLRYYHQKHPVNLILLGVFTVSISFAVGMTCAFTSGKIILEAAILTAVVVISLTAYTFWAAKRGHDFNFLGPFLFGALMVLLVFSLIQIFFPLGKISTMIYGAVASIIFCGYIIFDTDNIIKRHTYDEYIWAAVSLYLDIINLFLNLMQILRAADS

SEQ ID NO: 1228 - protein, 485 aa, Oryza sativa (japonica cultivar-group)
MATTTGRHRHDRLSALPDGILVRVLSHLGSVDAASTAALSHRWRHIHAAVPVVDLVDPESDQISSAIVAKNSAAPIRTLRLVDLWPPHDALHQAVATATAAGLQEFDVKLRHGDCSNRKLCPFRRHPDASADFDDSMRGSFTATPPHIFRCDTLRRLRLTNFQLDVPEGGVSMPSLEILSLKRIMATTDEAVQQLVSGCPNLADLTLEQCPSVADLVVASPRLESFAMICCHNAAHVVLHTQRLRTLRYKDGLPAGENFLMIADCTNVLAMTIDICESLVGKSAPAVVPITKLITRCASLTFLHLHLRPAMAYHSGAFTRALRHHPHLRQLALKGLLKDDQTIRSVSTLLRNTPELDVLSLFPLRTQPAKPYYLGVDSDDDYDSEEEEEEDGGASDDNQGVRVPLSLWESNIECLHKLRKIKLHNYKGKPNERLLAKYLLSKATSLEQFFVTLPAKTTADRQLKLTNELKYWRANKRAIVSCTLL

SEQ ID NO: 1229 - protein, 491 aa, Pseudomonas putida
MSQRLAAYENMSLQLIAGEWRVGKAGRDLDVLDPFTQEKLLQIPLANREDLDEAYRSARQAQVAWAACGPSERAQVMLNAVRIFDERRDEIIDWIIRESGSTRIKAQIEWGAARAITQESASLPSRVHGRILASDVPGKESRVYREPLGVIGIISPWNFPLHLTARSLAPALALGNACVIKPASDTPVTGGLLLAHIFEEAGLPKGVLSVVVGSGSEIGDAFVEHEVPGFISFTGSTQVGRNIGRIAAGGEHLKHVALELGGNSPFVVLADADLDQAVNAAVVGKFLHQGQICMAINRIIVEDSVYDEFVNRYAERVKSLPYGDPSKPETVVGPVINAKQLAGLQDKIATAKSEGARVMVEGEAQGNVLPPHVFADVTADMEIAREEIFGPLVGIQRARDEAHALELANSSEYGLSSAVFTSSLERGVKFARGIRAGMTHINDIPVNDEPNAPFGGEKNSGLGRFNGDWAIEEFTTDHWITVQHAPRRYPF

SEQ ID NO: 1230 - protein, 206 aa, Triticum aestivum
  misc_feature (171)..(171): Xaa can be any naturally occurring amino acid
MATSFQGTTTKCNACDKTVYLVDKLTADNRVYHKACFRCHHCKGTLKLANYNSFEGVLYCRPHFDQLFKRTGSLDKSFEGTPKVVKPERNVGNENATKVSSAFAGTREKCFGCSKTVYPIERVTVNNTMYHKSCFKCCHGGCTISPSNYIAHEGKLFCKHHHTQLIKEKGXSASSRTTTTRHHRVPGQWMMKTRSISQSLRISRDE

SEQ ID NO: 1231 - protein, 244 aa, Triticum aestivum
MFGYRKAPDLDLEAGGSAALYPGMTEDVELRWAFIRKIYVILSVQLAMTAAVAGFVVKVPAVSEFFVSSNAGLGLYIFLLVLPLIVLCPLRYYHQKHPVNLILLGVFTVSISFAVGMTCAFTSGKIILEAAILTAVVVISLTAYTFWAAKRGHDFNFLGPFLFGALMVLLVFSLIQIFFPLGKISTMIYGAVASIIFCGYIIFDTDNIIKRHTYDEYIWAAVSLYLDIINLFLNLMQILRAADS

SEQ ID NO: 1232 - protein, 226 aa, Triticum aestivum
MATMAPSPALLPLLLLLPLLLLSVACTAGAAPAATATVPTIPSQPGKPNSNNKQKQGGAPLGPAVRALVQSTCNATTYYDLCVAALVADPASSTADLRGLCAIAVSAAAANASATASALANTTWAASGAPETGSDGRAQQVPALLMRTCAGKYGEAREALLEARESVGEEAYDYAFVHVGAAAEYPAVCRTLFRRKRVPYPVELARREQALEHLCTVVIDIITLLA

SEQ ID NO: 1233 - protein, 62 aa, Triticum aestivum
  misc_feature (17)..(17): Xaa can be any naturally occurring amino acid
AAKAWARTPRSWVAVKXKEAEEDLVFRMHRLVGNRWELIAGRIPGRTAEEVEMFWAKRHQDQ

SEQ ID NO: 1234 - protein, 50 aa, Lactobacillus crispatus
  misc_feature (2)..(2): Xaa can be any naturally occurring amino acid
  misc_feature (46)..(46): Xaa can be any naturally occurring amino acid
GXGFITPDDGSKDVFVHFSAINGYKSLDEGQKVSFTIESGAKGPAXANVT

SEQ ID NO: 1235 - protein, 215 aa, Clostridium acetobutylicum ATCC 824
MKLFIDTANVEEIKEVNDMGVICGVTTNPSLVAKEGRDFNEVIREITSIVDGPISGEVIALDAEGMIKEGREIAKIHKNMVVKIPMTEEGLKAVKVLSSEGIKTNVTLIFSAGQALLAARAGATFVSPFLGRLDDIGADSIGLIESIVNIFDIHDIRTEIIAASIRSPKHVIDSAEAGAHIGTVPYKVLKQLIKHPLTDIGIERFMKDWKEAFNK

SEQ ID NO: 1236 - protein, 312 aa, Bradyrhizobium japonicum USDA 110
MTTSDSLRDTRIPTHESVTIPAVGFGTLIPDPLVTRQAIRAALEAGFRHLDCAERYRNEAAVGDAMQDAFKAGKLRREELFVTTKLWNTNHRPERVKPAFDASRRRLQLDEIDCYIIHTPFAFQPGDEQDPRDASGRVIYDSGVTLVETWHALERLVDEGHCKSIGLSDITLEKLREIVAVARIRPAMVQVESHPYLPEWDLLDFCREHGIVLQAFAALGHAMEPRVLEDPVITAIARRVQKTPAQVCLAWAVQRGTAFLTTSTNPARIRENFDISALPEDAMREIRDGITTNVRFNAVVETGVPGFIPRAR

SEQ ID NO: 1237 - protein, 383 aa, Corynebacterium glutamicum ATCC 13032
MSSATTTDVRKGLYGVIADYTAVSKVMPETNSLTYRGYAVEDLVENCSFEEVFYLLWHGELPTAQQLAEFNERGRSYRSLDAGLISLIHSLPKEAHPMDVMRTAVSYMGTKDSEYFTTDSEHIRKVGHTLLAQLPMVLAMDIRRRKGLDIIAPDSSKSVAENLLSMVFGTGPESPASNPADVRDFEKSLILYAEHSFNASTFTARVITSTKSDVYSAITGAIGALKGPLHGGANEFVMHTMLAIDDPNKAAAWINNALDNKNVVMGFGHRVYKRGDSRVPSMEKSFRELAARHDGEKWVAMYENMRDAMDARTGIKPNLDFPAGPAYHLLGFPVDFFTPLFVIARVAGWTAHIVEQYENNSLIRPLSEYNGEEQREVAPIEKR

SEQ ID NO: 1238 - protein, 370 aa, Desulfitobacterium hafniense DCB-2
SGDRVLTFDYLGALAVSLVFPLVLAPRLGLSRTGFLFGMLNVAVALFTLRIFRDEVSRTTLRTLRAGMVLAVLTVGFAGSNYLTHWAERGLFGDEIIHSETTPYQRLVITRWKDDLRLYINGNLQFSSRDEHRYHEALVHPVLQALPWARRVLVIGGGDGLALREILKYRNIEHVTLVDLDPAMTTLFSRSEPLRALNHGSLTDQRVTVVNADAAQWLEQNQDSFDAIIVDLPDPSNFGLGKLYSVPMYRLMSRHLAEKGYAVVQSTSPYYAPRSFWDIDATLREAGLHTWPYHTYVPSFGEWGYILVGKRNDYTPPTRYDVPMKFLDGDTTALMFRFPADMAPRQGEPNRLNEQTLVHDFERDWRNVIR

SEQ ID NO: 1239 - protein, 124 aa, Triticum aestivum
LFCSLLCVCCQMLEWFADIRLINGEAIHASPRKTGAIILGGGLPKHHICNANMFRNGADYAVYINTAQEFDGSDSGAHPDEAVSWGKIKGSAKPVKVHCDATIAFPLLVAATFARRSHGANSTN

SEQ ID NO: 1240 - protein, 365 aa, Medicago sativa
MGSTGETQITPTHISDEEANLFAMQLASASVLPMILKSALELDLLEIIAKAGPGAQISPIEIASQLPTTNPDAPVMLDRMLRLLACYIILTCSVRTQQDGKVQRLYGLATVAKYLVKNEDGVSISALNLMNQDKVLMESWYHLKDAVLDGGIPFNKAYGMTAFEYHGTDPRFNKVFNKGMSDHSTITMKKILETYTGFEGLKSLVDVGGGTGAVINTIVSKYPTIKGINFDLPHVIEDAPSYPGVEHVGGDMFVSIPKADAVFMKWICHDWSDEHCLKFLKNCYEALPDNGKVIVAECILPVAPDSSLATKGVVHIDVIMLAHNPGGKERTQKEFEDLAKGAGFQGFKVHCNAFNTYIMEFLKKV

SEQ ID NO: 1241 - protein, 505 aa, Oryza sativa (japonica cultivar-group)
MAAPSAIPRRGLFIGGGWREPSLGRRLPVVNPATEATIGDIPAATAEDVELAVSAARDAFGRDGGRHWSRAPGAVRAKYLKAIAAKIKDKKSYLALLETLDSGKPLDEAAGDMEDVAACFEYYADLAEALDGKQRAPISLPMENFESYVLKEPIGVVGLITPWNYPLLMATWKVAPALAAGCTAVLKPSELASLTCLELGGICAEIGLPPGVLNIITGLGTEAGAPLASHPHVDKIAFTGSTETGKRIMITASQMVKPVSLELGGKSPLIVFDDVDIDKAVEWAMFGCFANAGQVCSATSRLLLHEKIAKRFLDRLVAWAKSIKISDPLEEGCRLGSVVSEGQYQKIMKFISTARCEGATILYGGARPQHLKRGFFIEPTIITNVSTSMQIWREEVFGPVICVKEFRTEREAVELANDTHYGLAGAVISNDLERCERISKAIQSGIVWINCSQPCFVQAPWGGNKRSGFGRELGQWGLDNYLSVKQVTKYCSDEPYGWYRPPSKL

SEQ ID NO: 1242 - protein, 325 aa, Aspergillus oryzae
MSNGKTFTLSNGVKIPGVGFGTFASEGSKGETYQAVTKALETGYRHLDCAWFYLNEDEVGDGIHDFLKKNPSVKREDIFVCTKVWNHLHRPEDVQWSVDNSLKRLRLDYVDLFLVHWPIASEKEDQEKPKIGPDGKYVILKELTENPEPTWRAMEKIYRDGKAKAIGVSNWTIPGLEKLFKFAEIKPHVNQIEIHPFLPNNELVQFCFKNDILPEAYSPLGSQNQVPTTGERVSENKTLNEIAQKGGNTLAQVLIAWGLRRGYVVLPKSSNPARIESNFKSIELTDEDFEAVNKVAEGRHFRFVNMKDTFGYDVWPEETAKNLSA

SEQ ID NO: 1243 - protein, 469 aa, Neurospora crassa
MVLIKLNPTVGATDAVASSKHSAVLHRHLDTTFLNMTRSEGNFLILEDDRKIFDASGGAAVGCLGWGDQRVAQAVTNQVLAAPYCATIFYTTRVQEELCRDLVQSTNGAMARAYIVNSGSEAMEAAVKLARQYFLEIDQPQRTRFISRKQSYHGITLGALSVGGHEVRRAKFEPLLIKNVSRVSPCNAFRGKAPGESDEEYAERLAKELDDEFQQVGPENVCAFVAEPIVGAALGCVPAVKGYFKAVRDVCDKYGALLILDEVMCGMGRSGTLHAWEQEGIVPDIQTIGKALGGGYQPVAGLLAGHRVVNALEKGSSVFVHGHTYQGHPAACAAALEVQRIVREENLLSNVRAMGDLLSSRLREILASHPNVGDIRGRGLFWGIEFVADKENMAPFPSEDHVCMEICQLGLTDKYGINVYPGGGSVDGITGDHIIISPAFNISREDVEWIAATVGRLVSDYFAAKAGTQ

SEQ ID NO: 1244 - protein, 368 aa, Nicotiana tabacum
MGIQHNEHNQDQTQSFLLDALYCEEERWEETIEDEILEKEATLPLPLPLLEQDLFWEDEELLSLFTKEKETISNFETIKTDPLLCLSRKEAVKWILKVNAHYGFSTFTAILAINYFDRFLSSLHFQKDKPWMIQLVAVTCLSLAAKVEETQVPLLLDFQVEDAKYVFEAKTIQRMELLVLSSLKWRMNPVTPLSFVDHIIRRLGLKSHIHWEFLKQCERILLLVIADCRFLSYMPSVLATATMLHVIHQVEPCNAADYQNQLLEVLNISKEKVNDCYELITEVSYNSISHKRKYESPINSPSAVIDTFYSSENSNESWDLQTSSSIPSTYSPRDQFLPLFKKSRVQEQQMRLTSLSRVFVDYAVGSPR

SEQ ID NO: 1245 - protein, 277 aa, Yersinia pestis KIM
MTMQPLIKLYDGRLMPQLGLGVWQASIQETELAVSKALEVGYRSIDTAAIYKNEEGVGKALKAAAVARDELFITTKLWNDDQHNPQQALETSLQKLQLDYVDLYLIHWPDPKQDHYVSAWRELVTLKEQGLIRSIGVCNFHIPHLQRLIDETGIAPTVNQIELHPLLQQRQLHAWNATHHIATESWSPLAQGGKGVFDQEIIRKLAQQYNKTPAQIVIRWHLDSGLIVIPKSVTPARIRENFEVFDFKLQKEELLAITKLDCGKRLGPDPEVFGSDR

SEQ ID NO: 1246 - protein, 299 aa, Glycine max
MVLRKVGKYEIGRTVGEGTFAKVKFAQNTESGESVAMKVLDRSAIIKHKMVDQIKREISIMKLVRHPYVVRLHEVLASRTKIYIILEFITGGELFDKIIHHGRLSENDSRRYFQQLIDGVDYCHSKGVYHRDLKPENLLLDSLGNIKISDFGLSAFPEQGVSILRTTCGTPNYVAPEVLSHKGYNGAVADVWSCGVILYVLLAGYLPFDELDLTTLYSKIERAEFSCPPWFPVGAKMLIHRILDPNPETRITIEQIRNDEWFQRSYVPVSLLEYEDVNLDDVNAAFDDAEEPRADQQCD

SEQ ID NO: 1247 - protein, 207 aa, Triticum aestivum
  misc_feature (106)..(106): Xaa can be any naturally occurring amino acid
  misc_feature (117)..(117): Xaa can be any naturally occurring amino acid
  misc_feature (129)..(129): Xaa can be any naturally occurring amino acid
  misc_feature (138)..(138): Xaa can be any naturally occurring amino acid
MSDTDEHHFESKADSGASKTYPQQAGAIRKGGHIVIKARPCKVVEVSTSKTGKHGHAKCHFVAIDIFNGKKLEDIVPSSHNCDVPHVDRQDYQLIDITDDGMSASXLESGNTKDDLXLPTDDVLLGQIXDGFADGKDXILSVMSAMGEDNMPVKESVGAITLSVVATCKLDQCSGVENHHRIRYRWVNSCQIGVLPARRALNSTPPP

SEQ ID NO: 1248 - protein, 54 aa, Brassica napus
  misc_feature (23)..(23): Xaa can be any naturally occurring amino acid
MGSETFVEILLAILLPPVGVFLXYGIGVEFWICLLLTILGYIPGIIYAVNVLVA

SEQ ID NO: 1249 - protein, 259 aa, Helianthus annuus
MAAASSPREENVYLAKLAEQAERYEEMVEFMEKVVAAADGGEELTIEERNLLSVAYKNVIGARRASWRIISSIEQKEESRGNEGHVSTIRDYRSKIESELSSICDGILKVLDSKLIGSASGGDSKVFYLKMKGDYYRYLAEFKTGDERKLAAENTLSAYKAAQDIANAELAPTHPIRLGLALNFSVFYYEILNSPDRACNLAKQAFDEAIAELDTLGEDSYKDSTLIMQLLRDNLTLWTSDMQDDTAEEVKEAPKPDDQ

SEQ ID NO: 1250 - protein, 197 aa, Zea mays
ISSALCTWLLPLPLTKEKAAFSPSDPAMQRHVASGRPSGTDGSDFSYRMVVESRYQRVAEGRSRLARLILVQALHLVAGGLLLLLSLSKGAAVNKFAVLSMAAGFLAIVVGELGRMRTMSVLLRLYTSLSSIAVAFSVTCIIRSELFLKVMKQNTEAITSYEMLDAVRVALGILLQMVVIATTTRLLQNMSPPKRAS

SEQ ID NO: 1251 - protein, 297 aa, Helianthus annuus
MGFVKVVKNKQYFKRYQVKFKRRREGKTDYFARKRLIAQDKNKYNTPKYRLVVRFSNRDITCQVAYSRIEGDKILCAAYAHELPQYGVKVGLTNYAAAYCTGLLLARKLLSQLGLDKLYIGSTEVTGEEFNVKPVEDGPGAFRCYLDVGLMRTTTGARVFGAMKGAVDGGLNILHSTKRFPGFDSESKEFNADVHRQHIFGQHVAEYMRQLAEEDDEAYKRQFSQYIKLGLNADAIEGLYKKAHEAIRANPARKTVAKKAHPKKRWTEKKLTREQRQGKVAAAKAEWLKKIEAGEVE

SEQ ID NO: 1252 - protein, 78 aa, Triticum aestivum
MGLWSFLEGVLLIANALAILNEDRFLSPRGWSFADARGVQGANTFKGQMIGLIYAAQYMRFPLILLNGITILVKFVSF

SEQ ID NO: 1253 - protein, 93 aa, Glycine max
PGGALGPDSLGLPTRPLVGEDDRRGFLGNLFPTPGAIREKMSIDAGGNTKASFMDSKISMGGTFIGLAALVIMVIVTKRAYTLTSKTTICRLF

SEQ ID NO: 1254 - protein, 490 aa, Crocosphaera watsonii WH 8501
MVTATRPENKVKIGPTQLLINNKWVESASGKRFETINPSTGEVICDVAEADAADVDKAVIAARNAFNQGDWPKLSATQRGQLLYKLADLIEANIEELARLETLDNGKPYQDSLNADLQLVIACYRYYAGWADKIQGKTIPINGPYFCYTRHEPVGVVGQIIPWNFPLLMQAWKLAPALAAGNTVVMKTAEQTPLSALRLGELILEAGFPPGVVNLLSGYGPTAGQAIARHHDIDKVAFTGSTEVGHLIMEAAAQTNLKRVTLELGGKSPNIVFADANLEQAIEGAHFGLFFNQGQCCCAGSRLFVEEKCYDEFVAKSVERAKQRIVGDPFDDNTAQGSQVDRTQFDKVMEYIESGQREGAKLLCGGGRVGDRGYFIEPTVFAEVKDNMKIAQEEIFGPVMSIIKFKDMDEVIQRTNDTVYGLAAAVWTQDISKGHAIANALRAGTVWVNCYDVFDAAAPFGGFKQSGMGRELGEYGLQQYTEIKTVTVKL

SEQ ID NO: 1255 - protein, 113 aa, Glycine max
  misc_feature (28)..(28): Xaa can be any naturally occurring amino acid
MASSMIWSAAVTTVNRAGAGMVAPFTGXLKSLLGFPTGRPTIAFTSMVGTVGGVHCLQVWPPIARKKFGTLSYLPDLDDAQLAKEVEYLLRKGWIPRLEFELEHGFVYREHNR

SEQ ID NO: 1256 - protein, 316 aa, Glycine max
  misc_feature (180)..(180): Xaa can be any naturally occurring amino acid
MALSHQFSYLLFLLLILLSSLPNISQATSRAPNRMLALVQKQPLVLKYHKGPLLKGNITLHLLWYGTFTPTQRSIVIDFLESLTSTSSPESPSVSTWWKTTESYRGGPCTLVVGNQILDENYSLGKSLKNDNLVALASNPKLNSAPGDRVVHVILTAADVAVEDFCMKVCGTHGRGKKRXSEKIAYAWVGNSVTQCPGPGAWPFHQPLYGPQTPPLVAPNGDVGVDGMVINLATVLAGAVTNPFEDGYYQGPASAPLEAVSACTGIFGKGAYPGYAGDVLAENATGVSYNAVGMRGRKFLLPAMWDPLTSTCKTLV

SEQ ID NO: 1257 - protein, 74 aa, Brassica napus
MAFVPVCVQCGTRSNPCRCKVVGPTLGFVAFVVAGVIEWPLGAAVYLFRHRKGRRIMAHPATVVYPRVTRAIPI

SEQ ID NO: 1258 - protein, 305 aa, Corynebacterium efficiens YS-314
MSIVGTGNFFGSPEEERDRLVQALQGGKRQTTKPAEIPTVRLNDGNKIPQLGFGVFKVDPAETERVVSEALEAGYRHIDTAAFYNNEEGVGRAIAASGIPREELFVTTKLWPTRFDDAEAGFNESLEKLGMEYVDLFLLHWPAPRNNNFVQAWKVLEQLGERARSIGVCNFLPEHLRQLIDETTIVPAVNQFELHPALQQRDIQEASKAAGIAIESWGPLGQGKYDLSKEAPIAAAARSHGKTLAQVVIRWHLQHGFIVFPKTVNPERMRENLDVLDFELTAEEMVAIDNLERGARGGSHPNDIN

SEQ ID NO: 1259 - protein, 435 aa, Photorhabdus luminescens subsp. laumondii TTO1
MTISRTQQIAQLEQEWKSDRWNGIIRPYSAEDVVKLRGSVNPEHTLAQLGAKKLWELLHGMAKKGYVNSLGALTGGQALQQAKAGIEAVYLSGWQVAADANTASSMYPDQSLYPVDSVPAVVKRINNSFRRADQIQWANGIGTDHQEYIDYFLPIVADAEAGFGGVLNAFELMKAMIEAGAAAVHFEDQLAAVKKCGHMGGKVLVPTQEAIQKLVAARLAADVSGVPTLLIARTDADAADLLTSDSDAYDSEFITGERTFEGFFRTRAGIDQAISRGLAYAPYADLIWCETSTPDIEMARRFAEAIHAKYPGKLLAYNCSPSFNWKKNLDDKTIARFQDELSAMGYKFQFITLAGIHSMWFNMFDLAHAYAQGEGMKHYVEKVQEREFESINRGYTFSSHQQEVGTGYFDKVTTIIQGGTSSVTALTGSTEEQQF

SEQ ID NO: 1260 - protein, 192 aa, Glycine max
MRFMPLSRLIFRLPRHYTHGPLQSRALQTDSVLKDPQAKPIKYKIPQFYDPYGPRPPPSEKIVQLAEQIEALSEEERGQIMPTLSERLKLPKLQPISTDGMDMGTEGGGAAGLKVEEKKAEKTAFDVKLEKFDAAAKIKVIKEVRAFTNLGLKEAKDLVEKVPVVLKQGVTKEEANEIIEKIKAAGGVAVME

SEQ ID NO: 1261 - protein, 377 aa, Ferroplasma acidarmanus
MLVSMVNLMYIEFTDSGMVVPDILTIGYIDGDGIGPEITGAMIGVVNSAIELAYQGSRSIEWHKILIGTEAYEKFGTYVPEDSIKEIQKMYIAMKSTLNFMPDKRDLNTILRKRLGLYSNIRILKYIEGMDIPVNTFNRLNLTIIRDSTPNSHIFYHSSESTDDLIRFISDNYGLNITPDSGIYMMPQSKFRTRKIAKQAVRYSRRNGKKKITILESQQNHEFANWCIEEASAQEDVGYEVLKTREFMKRLISSPEDFEVILVDNVLSQTLVDYLAGTINIEYGSSIGDECAVFEAVQSSLPSEAGYDAADPLSFILSGCEMLMHIGWVEAAQIIENAISAAFRDNKIPKDINTRPDISPIKCSEFSSEIIKRMNGV

SEQ ID NO: 1262 - protein, 135 aa, Methanocaldococcus jannaschii
MIIMPGTKQVNVGSLKVGQYVMIDGVPCEIVDISVSKPGKHGGAKARVVGIGIFEKVKKEFVAPTSSKVEVPIIDRRKGQVLAIMGDMVQIMDLQTYETLELPIPEGIEGLEPGGEVEYIEAVGQYKITRVIGGK

SEQ ID NO: 1263 - protein, 447 aa, Clostridium acetobutylicum ATCC 824
MKDIERDDLKYIWHPCTQMKDYEKMPPIVIDKGEGCYLYDVNGNSYLDCISSWWTNIFGHSNKRINKAIEKQLNEIEHVIFAHFSNKPAVEFSKSLIQIAPEGLDKIFFSDNGSSAVEIALKMSFQYYQQTGKVKKTKFAALTNAYHGETIGALSVGDLDLYSKIYKPLLIDTLRIQGPDCYRCKYNKERHSCEAECFEEMEKSLKKHNSELCAIIIEPMIQGAAGMKMYSPKYLKKLRYACDYYDISVIFDEIAVGFGRTGKMFACENADISPDIMCLSKGISAGYMPMSVVLTTSKIYNAFYDDYVNLKAFIHSHTYAGNALACAAAIESLKIFKEESIIEKNIGKSKLIEKLTKNRARNNKFIGDIRSLGMVTAIELVKDKDTKESFDWKSRVGYEIYKIALKKGLLLRPIGDVLYFMPPYSIGEKDIEFMVEKCFESIEQYLE

SEQ ID NO: 1264 - protein, 182 aa, Triticum aestivum
MAGVGRNMVAPLLVLNLIMYIVVIGFASWNLNHFINGLTNRPGVGGNGATFYFLVFAILAGVVGAASKLAGVHHVRTWRGDSLATSASSALVAWAITALAFGLACKEIHIGGYRGWRLRVLEAFVIILMFTQLLYVLALHSGLFGNQFGNHAGAGGYGAEHGAYGAGDPHNKGMGTGGVARV

SEQ ID NO: 1265 - protein, 452 aa, Triticum aestivum
  misc_feature (254)..(254): Xaa can be any naturally occurring amino acid
MGEQKGNILMGKYEMGKMLGQGTFAKVYHARNIETSQSVAIKVTDKEKVLKGGLTDQIKREISVMKLVKHPNIVQMYEVMATKTKIYFVLEHVKGGELFNKVQRGRLKEDAARKYFQQLICAVDFCHSRGVYHRDLKPENLLLDENSNLKVSDFGLSTISECRRLDGLLHTSCGTPAYVAPEVINRKGYDGAKADIWSCGVILFVLLAGYLPFQDKNLMNMYKKIGKAEFKCPSWFSSDIRRLLLRILDPNPAXRISIERIMEHPWFRKGLDAKLLRYNLQAKDAVPAADMTATSDPLSCSNSATEGKEQEAKKLSNLNAFDIISLSTGLDLSGMFEDNDKKRESKFTSTNSASTIVSKIEDIAKCMRLKLVKKDGGMMRMESFKPGRKGVMSIDAEIFEVTPDFHLVELKKTNGDTIEYQKVLNQEMRPALKDIVWAWQGEQQPQPQQQPC

SEQ ID NO: 1266 - protein, 211 aa, Carica papaya
MSYDYLFKYIIIGDTGVGKSCLLLQFTDKRFQPVHDLTIGVEFGARMVAIDGRPIKLQIRDTAGQESFRSITRSYYRGAAGALLVYDITRRETFNHLASWLEDARQHANPNMSIMLIGNKSDLSHRRAVSKEEGEQFAKEHGLLFLEASARTAQNVEEAFIRTAAKILQNIQEGVIDVSNESSGIKFGYGRPQGTAGARDGAVAQRSGCCG

SEQ ID NO: 1267 - protein, 447 aa, Arabidopsis thaliana; identical to SEQ ID NO: 370

SEQ ID NO: 1268 - protein, 427 aa, Salmonella typhimurium LT2
MADTKAKITLTGDTTIELDVLKGTLGQDVIDIRSLGSKGVFTFDPGFTSTASCESKITFIDGDEGILLHRGFPIDQLATDSNYLEVCYILLYGEKPTQEEYDEFRTTVTRHTMIHEQITRLFHAFRRDSHPMAVMCGITGALAAFYHDSLDVNNPRHREIAAFRLLSKMPTMAAMCYKYSIGQPFVYPRNDLSYAGNFLNMMFSTPCETYEVNPVLERAMDRILILHADHEQNASTSTVRTAGSSGANPFACIAAGIASLWGPAHGGANEAALKMLEEISSVKHIPEFVRRAKDKNDSFRLMGFGHRVYKNYDPRATVMRETCHEVLKELGTKDDLLEVAMELEHIALNDPYFIEKKLYPNVDFYSGIILKAMGIPSSMFTVIFAMARTVGWIAHWNEMHTDGMKIARPRQLYTGYDKRDFKSALKR

SEQ ID NO: 1269 - protein, 123 aa, Saccharum hybrid cultivar SP-80-3280
MIQPQTLLNVADNSGARKLMCIRVIGAAGNQRYARIGDVIIAVIKDAVPQMPLERSEVIRAVIVRTRKEFKGDDGIIIRYDDNAAVIIDQKGNPKGTRVFGAVAEELRELNYTKIVSLAPEVL

SEQ ID NO: 1270 - protein, 185 aa, Zea mays
LARVFSPLLEHARARGCSRGGDERGNITNVAVLDNPTAFINPFQFEISYECLVPLDDDLEWKLIYVGSAEDENYDQQLESVLVGPVNVGTYRFVLQEFMRVGYYVNNDYGDEQLREEPPAKVLIDRVQRNILADKPRVTKFPINFHPEPSTGTGRQQQQQEPQTASPEKHAGSGEGNGSKPEADQ

SEQ ID NO: 1271 - protein, 197 aa, Brassica napus
MSASRFVKCVTVGDGAVGKTCLLISYTSNTFPTDYVPTVFDNFSANVVVNGATVNLGLWDTAGQEDYNRLRPLSYRGADVFILAFSLISKASYENVSKKWIPELKHYAPGVPIILVGSKLDLRDDKQFFVDHPGAVPITTAQGEELRKLIDAPTYIECSSKSQENVKAVFDAAIRVVLQPPKQKKKKSKAQKACSIQ

SEQ ID NO: 1272 - protein, 345 aa, Desulfitobacterium hafniense DCB-2
MTNTVRKIAVLTSGGDAPGMNAAIRAVVRKGIYHGLEVFGIRKGYEGLIHGEFITMHLGAVADIIHRGGTMLMTARSQEMLTPEGQKNAAAQLRYRGIDALIVIGGDGSFRGAQTLSAQGIAIVGIPGTIDNDITGTDLTIGFDTAVNNVVQAVSKIRDTATSHDRTFLVEVMGRDCGNIALQSGVACGAESILVPEIEPDLDDIVAKLERGHQRGKHHSIIMVAEGAMSAWNLGEELRQRTGFETRVTILGHIQRGGNPSALDVVLASQMGGKAVEILCAGETDRMTACVNQEIQSCLWRWLMVSANPSTKFSMIWPINWLSEQKKSAVYRGNQEAQVEFLPLR

SEQ ID NO: 1273 - protein, 358 aa, Streptomyces coelicolor A3(2)
MSAGERVPEEFVPGCVIHGAGDLRVTDVPVRPPGPGEALVAVRYGGVCGSDLHYWRHGGVGDFHLREPMLLGHEVVGTVVAYGSPDTPGPAAGTSVAVHPATPCGVCPECVDRRRNVCRDTRYLGSAARFPHVQGGFAARIVVPAGQLRPLPAGLDPRRAALAEPLSVALHAVRRAGDPAGRHVLVTGAGPIGCLVVAAAKAAGAAHVTVTDLLPAALEYARAAGADTLVRADDPDDAGWPVEVDTAVEASGVAAGLDTCLRLVRRGGVVVQLGMLPPGQSPFAGNLLVSREIELRGAFRFDGEFDDALRLLAAEPAFDALVSAVVPVRDAASAFELAADRSRSCKVLLDFGAAPAAV

SEQ ID NO: 1274 - protein, 219 aa, Oryza sativa (indica cultivar-group)
MPDSDNDSGGPSNYAGGELSSPREQDRFLPIANVSRIMKKALPANAKISKDAKETVQECVSEFISFITGEASDKCQREKRKTINGDDLLWAMTTLGFEDYVDPLKHYLHKFREIEGERAAASTTGAGTSAASTTPPQQQHTANAAGGYAGYAAPGAGPGGMMMMMGQPMYGSPPPPPQQQQQQHHHMAMGGRGGFGHHPGGGGGGSSSSSGHGRQDRGA

SEQ ID NO: 1275 - protein, 450 aa, Pyrococcus horikoshii OT3
MARGDEGGENMIKIYTLGGYEEVGKNMTAVEYEGEVVIIDMGIRLDRVLIHEDVEFQKMSSKDLRKLGAIPDDRPIRDKKVVAIALSHGHLDHIGAVGKLAPHYPDVPIYGTPYTIRLAKSEIKGEEYFEVTNPLYETNYGEIVQVSENLAIEFVQVTHSIPHSSIVVIHTPEGAVVYACDYKFDNNHPYGEKPDYKRLKELGKEGVKVLIAESTRVAEETKTPSEAVAKMLLEDFFLYEGMEADGLIATTFASHIARLQELIEIANKMGRQAIFIGRSLAKYTGIAKQLGLIKMKGSRVLRSPNAVSKVLKEVSQARENYLLIVTGHQGEPGAILTRMANGELYDIGPRDTVVFSAGVIPNPLNIAQRYALETKLKMRGVRMIKDLHVSGHASKEDHRYLIRMLNPEYIVPAHGEFRMLTHYAELAEEEGYRIGKDVFISRNGHIVEII

SEQ ID NO: 1276 - protein, 506 aa, Brassica juncea
MTSINVKLLYHYVITNLFNLCFFPLTAIVAGKAYRLTIDDLHHLYYSYLQHNLITIAPLFAFTVFGSVLYIATRPKPVYLVEYSCYLPPTHCRSSISKVMDIFYQVRKADPSRNGTCDDSSWLDFLRKIQERSGLGDETHGPEGLLQVPPRKTFAAAREETEQVIIGALENLFKNTNVNPKDIGILVVNSSMFNPTPSLSAMVVNTFKLRSNVRSFNLGGMGCSAGVIAIDLAKDLLHVHKNTYALVVSTENITYNIYAGDNRSMMVSNCLFRVGGAAILLSNKPGDRRRSKYELVHTVRTHTGADDKSFRCVQQGDDENGKTGVSLSKDITDVAGRTVKKNIATLGPLILPLSEKLLFFVTFMGKKLFKDKIKHYYVPDFKLAIDHFCIHAGGRAVIDVLEKNLALAPIDVEASRSTLHRFGNTSSSSIWYELAYIEAKGRMKKGNKVWQIALGSGFKCNSAVWVALNNVKASTNSPWEHCIDRYPVKIDSDSGKSETRVQNGRS

SEQ ID NO: 1277 - protein, 246 aa, Zea mays
MDMGRHQLQLQHAASSSSTSASSSSEQDKPLCCSGPKKRPAGRTKFRETRHPVFRGVRRRGAAGRWVCEVRVPGRRGARLWLGTYLGAEAAARAHDAAMLALGRGAACLNFPDSAWLLAVPPPPALSGGLDGARRAALEAVAEFQRRRFGAAAADEATSGTSPPSSSSSATKPAPAIERVPVEASETVALDGAVFEPDWFGDMDLDLYYASLAEGLLVEPPPPPPPAAWDHGDCCDSGADVALWSY

SEQ ID NO: 1278 - protein, 506 aa, Brassica juncea
MTSINVKLLYHYVITNFFNLCFFPLTAIVAGKASRLTIDDLHHLYYSYLQHNLITIAPLFAFTVFGSVLYIATRPKPVYLVEYSCYLPPTHCRSSISKVMDIFYQVRKADPSRNGTCDDSSWLDFLRKIQERSGLGDETYGPEGLLQVPPRKTFAAAREETEQVIIGALKNLFENTKVNPKDIGILVVNSSMFNPTPSLSAMVVNTFKLRSNVRSFNLGGMGCSAGVIAIDLAKDLLHVHKNTYALVVSTENITYNIYAGDNRSMMVSNCLFRVGGAAILLSNKPRDRRRSKYELVHTVRTHTGADDKSFRCVQQGDDENGKTGVSLSKDITDVAGRTVKKNIATLGPLILPLSEKLLFFVTFMAKKLFKDKVKHYYVPDFKLAVDHFCIHAGGRAVIDVLEKNLGLAPIDVEASRSTLHRFGNTSSSSIWYELAYIEAKGRMKKGNKVWQIALGSGFKCNSAVWVALSNVKASTNSPWEHCIDRYPVKIDSDSAKSEVRVQNGRS

SEQ ID NO: 1279 - protein, 364 aa, Thalictrum tuberosum
MGSTENNHNLTPAEEEEEEAYLHAMQLASASVLPMVLKAAIELDVLEIIAKAGKGAYVAPSEIASQLSTSNSQAPTVLDRMLRLLASYKVLTCNLRNLEDGGVERLYGLAPVCKFLVKNEDGVSMAPLVLMNQDKVLMESWYHLKDAVLDGGIPFNKAYGMTAFEYHGTDPRFNKVFNRGMADHSTITMKKLLELYKGFEGLKSVVDVGGGTGATVNMIVTKHPTIKGINFDLPHVIDDAPAYPGVEHIGGDMFVSVPKGDAIFMKWILHDWSDEHSVKFLKNCYESIPADGKVIIVESVLPVFPETNLAAHTCFQLDNIMLAHNPGGKERTEKDFKALSVKAGFTGFKVVCGAFGSWVMEFCK

SEQ ID NO: 1280 - protein, 211 aa, Neurospora crassa
MATNITWHPSLSRHERNQLRGQRGFTIWFTGLSASGKSTVATALEQHLLHIGLAAYRLDGDNVRFGLNKDLGFSEKDRNENIRRIAEVAKLFADSATIALTSFISPYRADRQIARDLHANATQAGDDVLPFIEVFVDVPLAEAEKRDPKGLYKKARAGEIKDFTGISAPYEAPESPEITIRTDLLSVEECVKKIVDYLAEAGLISGTKETR

SEQ ID NO: 1281 - protein, 375 aa, Corynebacterium diphtheriae NCTC 13129
MARDYYAILGVERDATDNEIKKAYRKLARKYHPDVNDTEEAAEKFSKISIAQEVLLDAEKRRIVDMGGDPMAQGGGDAGYGAGGGLGDIFEAFFGGGGGSRGPRSRVQPGSDALLRTTLTLEEAYLGTKKPITIDTAILCDRCEGTGSKSKSKPNVCSTCNGSGEIQQMQRSFLGNVMTSSPCPTCRGTGEVIPDPCDKCGGDGRVRTQRDLIVNVPAGIADGMRIRMAGQGEVGPGGGPAGDLYIEVMMQQHPVFQREGNDLHMSVHVPMVDAALGATTSVESLSGDAIDFEIPAGVQPAETIVIEGKGMPQLRGEGFGNMIAHVDVSIPTQLDEKSKELLNKLRDHRSDESSVRTADDSDDSLFGRLRNRFRR

SEQ ID NO: 1282 - protein, 364 aa, Escherichia coli CFT073
MMSKNYHIAVLPGDGIGPEVMTQALKVLDAVRNRFAMRITTSHYDVGGAAIDNHGQPLPPATVEGCEQADAVLFGSVGGPKWEHLPPDQQPERGALLPLRKHFKLFSNLRPAKLYQGLEAFCPLRADIAANGFDILCVRELTGGIYFGQPKGREGSGQYEKAFDTEVYHRFEIERIARIAFESARKRRHKVTSIDKANVLQSSILWREIVNEIATEYPDVELTHMYIDNATMQLIKDPSQFDVLLCSNLFGDILSDECAMITGSMGMLPSASLNEQGFGLYEPAGGSAPDIAGKNIANPIAQILSLALLLRYSLDADDAASAIERAINRALEEGIRTGDLARGAAAVSTDEMGDIIARYVAEGV

SEQ ID NO: 1283 - protein, 446 aa, Burkholderia cepacia R18194
MSYNEAKFWHPMVHPNEMKQRKPIRIVRGDGCYVFDEEGRKLVDGVAGLWNVNVGHNRQEVKDAIVRQLDELEYFQLFDGISHPRAEELSKKVIDMLEPEGMRRVLYSSGGSDSIETALKIARQYWKVRGQADRTKFISLKQGYHGTHFGGASVNGNTVFRRNYEPNLPGCFHVETPWLYRNPFTQDPEELGRICAEMLEREIQFQSPDTVAAFIAEPIQGAGGVIVPPANYWPLVREVCDRYGVLLIADEVVTGFGRSGSMFGSRGWGVRPDIMCLAKGISSGYVPLGATVVNARIEDAFAANADFGGAIMHGYTYAGHPVACAAAIASLDIVVKEDLPANAAKQGAYLLEALKPFAERFAAVGEVRGKGLMLALDLVANKDTREPIDPLSGYANAVAEVARENGVLVRPVGTKIILSPPLVIQREQLDRIVDALAAGFEAVPFA

SEQ ID NO: 1284 - protein, 485 aa, Mesorhizobium sp. BNC1
MLKKTSHFLREANFIAGEWVNADSGATIEVINPATRQTIGTVPKCGRAETRRAIEAAQEAFQSWKKTSANDRAKLLRKLHDAIMDNQDALAELLVMEQGKPLAEAKGEVGTSAAYILWFAEEGRRIYGDIVPAPWTDRRILVTKEPVGVIGAITPWNFPSSMLARKLGPALAAGCTTVAKPASQTPYSGLAWGVLAEEAGFPKGVVNIVTGSASEIGDELTENPLVRKITFTGSTEIGKLLMEKAAGTVKKVSMELGGNAPFLVFDDADLDRAVKGAMIAKYRNAGQTCVCTNRFFVQDGIYDRFLEKFVEASRKLKVGSGLDEGVEQGPLIDGGAVEKVEELIADAVSKGGKVVTGGKRHALGGSYFEPTVIAEATPQMRFMEEEIFGPVAPVFRFKDEADGIRMANDTSFGLACYFYTSDLGRAFRVMEGLKYGLVGVNEGLITTVEAPFGGLKESGLGKEGGRQGIEDYLDTKYVCIGGLGL

SEQ ID NO: 1285 - protein, 362 aa, Thalictrum tuberosum
MGSTQKNHNLTPEEEEEACLHAMQLASASVLPMVLKAAIELSVLEIIAKAGQGAYVAPTEIASQLSTSNSQAPIILDRILRLLASYKVLTCNLRTLEDGGVERLYGLAPVCKFLVKNEDGVSIAPLVLMNQDKVLMESWYHLKDAVLDGGIPFNKAYGMTAFEYHGTDPRFNKVFNRGMADHSTITMKKLLELYKGFEGLKSVVDVGGGTGATINMIVTKHPTIKGINFDLPHVIDDAPAYPGVEHIGGDMFVSVPKGDAIFMKWILHDWSDEHSVKFLKNCYESIPADGKVIIVESILPVYPETNLASNACFQLDNIMLAHNPGGKERTEKDFEALSAKAGFTGFKIVCGAFGSWVMEFCK

SEQ ID NO: 1286 - protein, 312 aa, Glycine max
  misc_feature (284)..(284): Xaa can be any naturally occurring amino acid
MTSPSGQGSRRGGSSRTRVGKYELGRTLGEGNFAKVKFARHVETRENVAIKILDKEKLLKHKMIAQIKREISTMKLIRHPNVIRMYEVMASKTKIYIVLEFVTGGELFDKIARSGRLKEDEARKYFQQLICAVDYCHSRGVFHRDLKPENLLLDANGVLKVSDFGLSALPQQVREDGLLHTTCGTPNYVAPEVINNKCYDGAKADLWSCGVILFVLMAGYLPCEETNLSALYEKMFNADFTCPPWFSSSAKKLCTEILDPNPATRITFAEVIENDWFKKGYKPXVFEQANVSLDDLDSIFSDSTDAQNLVER

SEQ ID NO: 1287 - protein, 500 aa, Burkholderia cepacia R18194
MSTTNFVAVSDTVRTFVARDFGLFIDGEMQPAHAAARLDVYDPATGERLATVADADERDVDRAVASAKHAFDTRVWSGLRPADRERILLKLADLIERDAETLAQLETLNQGKSIHVSRAIEVGASVEYVRYMAGWATKITGQTLDVSIPFPPGARYTAYTRKEPVGVVAAIVPWNFPLMIAVWKLIPALAAGCTIVLKPSPETPLTALRLAELALEAGVPPGVFNVVTGGRVCGAALASHPSIAKISFTGSTATGKLVGAAAVQNMTRFSLELGGKNPIVMLDDIDVAQALDGVAAGAFFNQGQVCAAASRIYVHRSKFAQLADGLAGVAQSMKLGAGLDTTAQINPLVSAHHRDKVVQHIEGARRAGLTFLAGGTPADDLPGYYVKPAVIADPHPDSAIVRDEVFGPVIVVVPFDDAADAVRLANASPYGLAASIWSNDLKRVMNLVPQIEAGTVWVNCHIPLDPSMPFGGYKQSGIGREFGQYAIEGFTETKSVCIAH

SEQ ID NO: 1288 - protein, 45 aa, Zea mays
SEKLAEGIAGFTKALEVLEHLLEERLKVLDGQEHIKHGAEEIFHA

SEQ ID NO: 1289 - protein, 506 aa, Rubrivivax gelatinosus PM1
MRYAPPGSSDSKVAFKAQYDNFIGGKFVAPVKGQYFDVITPITGKTYTRAARSGPEDIELALDAAHAAADKWGRTSAAERANVLLKIADRIDANVELLAYAESVDNGKPMRETLNADIPLSADHFRYFAGCVRAQEGGVSEIDETTVAYHFHEPLGVVGQIIPWNFPILMAAWKLAPALGAGNCVVLKPAESTPVSILVLAELIADLLPPGVLNIVNGLGREAGMPLATSKRIAKIAFTGSTSTGRVIAQAAANSLIPATLELGGKSPNVFFADVMDKDDAFLDKAIEGLVLFAFNQGEVCTCPSRALIHESIYDKFMERALKRVAAIKQGSPLDTDTMIGAQASKEQLTKILSYLDLGKQEGAQVLIGGQQAQMSGDLDGGYYVQPTIFKGHNKMRIFQEEIFGPVLAVTTFKDEAEALAIANDTLYGLGAGVWSRNGNVAYRMGRAIKAGRVWTNCYHAYPAHAAFGGYKESGIGRENHKVMLDHYQQTKNLLVSYSENKLGFF

SEQ ID NO: 1290 - protein, 455 aa, Bacillus megaterium
TIKEMPQPKTFGELKNLPLLNTDKPVQALMKIADELGEIFKFEAPGRVTRYLSSQRLIKEACDESRFDKNLSQALKFVRDFAGDGLFTSWTHEKNWKKAHNILLPSFSQQAMKGYHAMMVDIAVQLVQKWERLNADEHIEVPEDMTRLTLDTIGLCGFNYRFNSFYRDQPHPFITSMVRALDEAMNKLQRANPDDPAYDENKRQFQEDIKVMNDLVDKIIADRKASGEQSDDLLTHMLNGKDPETGEPLDDENIRYQIITFLIAGHETTSGLLSFALYFLVKNPHVLQKAAEEAARVLVDPVPSYKQVKQLKYVGMVLNEALRLWPTAPAFSLYAKEDTVLGGEYPLEKGDELMVLIPQLHRDKTIWGDDVEEFRPERFENPSAIPQHAFKPFGNGQRACIGQQFALHEATLVLGMMLKHFDFEDHTNYELDIKETLTLKPEGFVVKAKSKKIPL

SEQ ID NO: 1291 - protein, 362 aa, Thalictrum tuberosum
MGSTQKNHNLTPEEEEEACLHAMQLASASVLPMVLKAAIELDVLEIIAKAGQGAYVAPTEIASQLSTSNSQAPIILDRVLRLLASYKVLTCNLRTLEDGGVERLYGLAPVCKFLVKNEDGVSIAPLVLMNQDKVLMESWYHLKDAVLDGGIPFNKAYGMTAFEYHGTDPRFNKVFNRGMADHSTITMKKLLELYKGFEGLKSVVDVGGGTGATINMIVTKHPTIKGINFYLPHVIDDAPAYPGVEHIGGDMFVSVPKGDAIFMKWILHDWSDEHSVKFLKNCYESIPADGKVIIVECILPVYPETNLASNACFQLDNIMLAHNPGGKERTEKDFEALSAKAGFTGFKIICGAFGSWVMEFCK

SEQ ID NO: 1292 - protein, 500 aa, Pseudonocardia sp. K1
MTVIAKPDHLLRDDVQKFIDRPKKLFINGQWHDSIKGETLEVYDPAVGTKICTVAAGDAEDVDRAVAAARHAFDEGPWSKLNPSERGRLVWRLADLLEEHADEFAQIDALDNGKPVTDARAVDVAFSIELLRYMAGWSNKIYGETIPLTNPADFHAYTLREPVGVVGQIVPWNFPLMMAVWKVAPALAAGCTVILKPAEQTPLSALRLAELTEEAGFPPGVFNVITGFGETAGAAIAAHDNIDKVAFTGSTEVGRLIAQAASGNLKKVSLELGGKSPVIVFGDSDIEQAVAGASSAIFYNNGQTCTAGSRLYVHRKVYDKVVEGIASEASALPIGHGLDPATRIGPLISAEQRDRVTGYIAQGREAGAEVIVGGDTVGDGGYFIQPTILTKTDPSMSVVREEIFGPVLCAMAFDEDTIDSVVREANNSVYGLAASIYTRDISVAHRVAKRLKAGTIGINTHHVVDVALPFGGFKQSGYGRDMGRDAIDQYTEVKSIGIAL

SEQ ID NO: 1293 - protein, 364 aa, Thalictrum tuberosum
MGSTENNHNLTPAEEEEEEACLHAMQLASASVLPMVLKAAIELDVLEIIAKAGKGAYVAPSEIASQLSTSNSQAPTVLDRMLRLLASYKVLTCNLRNLEDGGVERLYGLAPVCKFLVKNEDGVSMAPLVLMNQDKVLMESWYHLKDAVLDGGIPFNKAYGMTAFEYHGTDPRFNKVFNRGMADHSTITMKKLLELYKGFEGLKSVVDVGGGTGATVNMIVTKHPTIKGINFDLPHVIDDAPAYPGVEHIGGDMFVSVPKGDAIFMKWILHDWSDEHSVKFLKNCYESIPADGKVIIVESVLPVFPETNLAAHTCFQLDNIMLAHNPGGKERTEKDFKALSVKAGFTGFKVVCGAFGSWVMEFCK

SEQ ID NO: 1294 - protein, 216 aa, Triticum aestivum
MAPTMAITTATLVLLVATLLAPSALGSRSGPSSHHGHGGHAKHSPPPSPPPAPAAPVAAALVRTTCNSTAYYDLCVAALAADPSSTTADVRGLSAIAVSAAASNASASAAALGANVTAQGGAAVDGTVQALLRTCSAKYGEARDALAAARGSIAQQDYDYAAVYVGAAAEYPQVCKALFRRQRPGAYPADLAAREEALKQLCSVSLDIISLLSATS

SEQ ID NO: 1295 - protein, 174 aa, Glycine max
MVCTANDLQEWKDFPKGLRVLLLEGDSSSAAEIREQLEAVDYNVSTFYDENEALSALSSSPEGFHVAIVEVSTSCSLGGFKFLENSKDLPTIMTSKDQCLNTMMKCIALGAVEFLSKPLSEDKLKNIWQHVVHKAFNAGANVLSESLKPVGESVESMLQLQTDIGPDKGGISMD

SEQ ID NO: 1296 - protein, 490 aa, Magnaporthe grisea 70-15
MKIEKIAATFFIGSGVLFGTITAWSLSDLQVPSALGGPLPNSTKVVGPNTSDFREATERWDTYLAPNIEMVVEPGHEDDIPKIVKYCNKHDIDFLAYSGGHGSTTTLGSFDGIQISMARLRNVTIDPKGKTAWVQGGSTGGSVINHLWDHGYVTPTGAAACVGYMGLALGGGHGRLEGLYGMVSDNILQFNLVTANGTAIRVNKTDHSDLYWAMKGAGHNFGIVTSAQVKIYPRGPDKWYHKAYTWRGDKLDAVFNALNQFHGNGTTPVGMGVNTGTFLMMPNITKEEPVIFWLFEYRGTAEQAKPLLAPFDSIEAVAVDARESTYPQLADTPWICTAAQRIITTAGLQTYNLTAEHQIWDGFKRRLSKNPKLTHKTIIIHEGYATEGVESIDRASSAYPFRGDRHLMQFQGTIEESNLEADMWEWANEVRNQWNAGQPQRTPSAYVNYANGRETKEDWYGHQPWRLAKLRDLKARYDPLNRFRFYNPIV

SEQ ID NO: 1297 - protein, 925 aa, Zea mays
MSYTISGGGTAPAAWAWLHGDLELTIHEARGLPNMDLLSTLLRRLCLCPPLAGITPARRRSLSDDDDDSAHAHAHTHPHHHHLRGRLHRRPRRRHEPQPHGHLLLPTSDPYAAVVVAGPHETTVARTYVFRNSEAPRWEASFLLPLAHAATGLEFHVKDADPFGSDLIGVAWLPAAAVLASAAAPIESQWLDLARPDARGPPAPGGGSAIRVSAAFVPAAASRGRSGVGVPAYFPLRRGCDVRLYQDAHVAAGELEGVGVVPGFLPGRCWEDLCMAVLGAQRLVYVAGWSVHTTVRLTREAMSPEMAAKVAELEELGGEPVEHMSLGELLKYKSQEGVRVLLLVWDDRTSHNNFFVKMKGVMQTRDEETKKFFKHSSVICVLSPRYPSSKLGLVKQKASEIVVGTLYTHHQKCVLVDTPASESTRRITAFLGGLDLCAGRYDTPSHRLFRDLQTVFHGDVYNPTFGGDVNGPRQPWHDLHCRLDGPAAYDILKNFEQRWRKATKLREMFGGKAAHRKDDALLKLERIPWILSPTKPKQQPPSAAADTGAADHDDDERDQPALHVLPDGDPERWHAQVFRSVDAGSVKRFPRPWERAEMARRHLVGDKNLAVERSIHAAYVAAIRSAERFVYVENQYFIGGSYAWPSYRNGGACNLVPMEIALKVASKVRAGEPFAAYVVLPMWPEGNPGSGPAQEILFWQNQTMEMMYSVVAAALEGKGGHPQEHLNFYCLGNREPAEDAGDGNKWAPADPLDDATTSSAAAHARRHRRFMVYVHSKGMIVDDEYVIIGSANINQRSLAGSRDTEIAVGAYQPDHTGACPRGKVHGYRMSLWEEHLGKEAVRRPEVLRPESPRCVKLVNRIARDNWRRYAADDDKLGPLQGHLLRYPVHVRADGRVEPLPGNELFPDVGGRVVGAPNNLPDYLTM

SEQ ID NO: 1298 - protein, 446 aa, Ralstonia metallidurans CH34
MLVIGGALVTPNGVERADVACAAGRIVALGDLQCSWTADATLDAKGLHVLPGVIDSQVHFREPGLTHKETLEAGTRGAALGGVTAVFEMPNTQPLTLRAEDLRAKLDAAQGRAWCDHAFYIGGSSVNAEHLEYLESLPGCAGVKIFMGSSFGDLLADDDEVLCRILAHGRRRMAVHAEDEARLRERRIIAESSGDVRQHPVWRDARSALLATQRIVKLAGDTGRRLHILHVSTAEEIAFLADRKDRVTVEVTPHHLTLEAPECYERLGTLAQMNPPVRERCHRNALWQAIREGVGDVIGSDHAPHTPKEKSRPYPASPSGMTGVQTLVPVMLDHVHRGQLSLQRFVDLTSAGPARIFGVEGKGRIALGYDADLTLVDLAARRTIRNDWIASVSGWTPYDGIGVTGWPIHTVVRGHIVVRDEALVGTTPLGRPLRFLEAPPRVPAGV

SEQ ID NO: 1299 - protein, 358 aa, Zea mays
MVGGGGGGPLRRVGKYEVGRTIVEGTFAKVKFAQNTETGESVAMKVLDRSSILKNKMAEQIKREISIMKLVRHPNVVRLHEVLASRKKIFIILEFITGGELFDKIIRHGRLSEADARRYFQQLIDGVDFCHKKGVYHRDLKPENLLLDSQGNLKISDFGLSAWPAQGSFLLRTTCGTPNYVAPEVLSHKGYNGALADTWSCGVILYVLLAGYLPFDEVDLTTLYGKDDNEDAFEDETGPLTLNAFDLIILSQGLNLAALFDRRQDCDKLQNRFLSRNPAKVILSSMEVVAQSMGFKTHIRNYKMRVEGLNADKTSHLSVMVEVFEVAPSIFMVELQRAAGDTSEYNTIHPKGQIYIGQ

SEQ ID NO: 1300 - protein, 141 aa, Triticum aestivum
  misc_feature (58)..(58): Xaa can be any naturally occurring amino acid
  misc_feature (99)..(99): Xaa can be any naturally occurring amino acid
  misc_feature (117)..(117): Xaa can be any naturally occurring amino acid
  misc_feature (131)..(131): Xaa can be any naturally occurring amino acid
MAPTVMASSATSVAPFQGLKSTAGLPVSRRSNGASLGSVSNGGRIRCMQVWPIEGIKXFETLSYLPPLSTEALLKQVDYLIRSKWVPCLEFNKVGFIFXVEHNASPGVLTMAGTGQXGTAMFRMHRRHQVXNEVEEVKKDT

SEQ ID NO: 1301 - protein, 175 aa, Glycine max
  misc_feature (84)..(84): Xaa can be any naturally occurring amino acid
ASSMISSPAVTTVNRAGARMVAPFSALKNMDGFPTTNTNNDITSIGINGGTPQCMQEWPTLGYKKYDTLSYLPDLDDALLTKEXKYLLKNGWIPCLEFQLEHGFAYRDHDRSPRYYDGRYWTMRNLPMFGCTDAYHVIKDLQEVNTVYPNGFIRIIEFNNFLQEQRISFIAYKTP

SEQ ID NO: 1302 - protein, 222 aa, Triticum aestivum
  misc_feature (153)..(153): Xaa can be any naturally occurring amino acid
  misc_feature (158)..(158): Xaa can be any naturally occurring amino acid
  misc_feature (160)..(160): Xaa can be any naturally occurring amino acid
  misc_feature (174)..(176): Xaa can be any naturally occurring amino acid
  misc_feature (191)..(191): Xaa can be any naturally occurring amino acid
  misc_feature (195)..(195): Xaa can be any naturally occurring amino acid
  misc_feature (210)..(210): Xaa can be any naturally occurring amino acid
  misc_feature (217)..(217): Xaa can be any naturally occurring amino acid
MKTFLIFVLLAMAMNIATAARQLNPSNKELQSPQQSFSHQQQPFPQQPYPQQPYPSQQPYPSQQPFPTPQPQFPQQSQQPFPQPQQPIPLQPQQPFPQQPQQPQQPFPQPQQPFPWQPQQPFPQTQQSFPLQPQQPFPQQPQQPFSQPQLQFXQQPFXQXQQLIPMQPQQPFPXXXQQSQQPFAGPQQLFXELQXPIPQQPQQPFPLQPXQPFPQAXQQPFP

SEQ ID NO: 1303 - protein, 481 aa, Rubrobacter xylanophilus DSM 9941
MEAIPSASYSMTLRVEFPHRAGALGRILTTIGDAGGMVGAIDIVRMGQERSIRDITVNARDSEHGQRIVRAVGALPEVRVVNVSDRTFLLHLGGKIEVHSKIPVRTRDDLSMAYTPGVARVCRAIAQEPERAFNLTIKRNSVAVVTDGTAVLGLGDIGPYAAMPVMEGKAMLFKEFAGVDAFPVCLDTKDPEEIVRTVKYVAPAFGGINLEDISAPRCFEIEERLKQELDIPVFHDDQHGTAVVVLAALINALRIVGKRMEELKVVVCGVGAAGVACAKILLAAGVKNIVGCDRYGVVYRGRGDADTSRGWFAENTNPENIRGTLADAIRGADVFIGVSAPDVLTVEHIESMADEPIVFAMANPDPEIRPEIAYGHARIIATGRSDYPNQINNVLCFPGVFRGALDIRAREINEEMKLAAARAIAGVIPEESLSEDYIIPSVFDERVVPAVAGAVAEAGVESGVARRVRERSETDFSAASF

SEQ ID NO: 1304 - protein, 290 aa, Oryza sativa (indica cultivar-group)
MKSRKSYGLLLSPVGSPPSDNESGAAAAAAAAGGGGCGSSAGYVVYGGGGGGDSPAKEQDRFLPIANVSRIMKRSLPANAKISKEAKETVQECVSEFISFVTGEASDKCQREKRKTINGDDLLWAMTTLGFEAYVGPLKSYLNRYREAEGEKAAVLGGAGGAAAARHGEGGCCGGGGGADGVVIDGHSPLAGGLSHSHHGHQQQDGGGDVGLMMGGGAAGVGYNAGAGSTTTAFYAPAATAASGNKAYCGGDGSRVMEFEGIGGEEESGGGGGGGGGERGFAGHLHGVQW

SEQ ID NO: 1305 - protein, 181 aa, Chromobacterium violaceum ATCC 12472
MRTTLLIASLLALPLAAHADAFRLSSDSMADGKPLSLKQVYRGFGCEGGNVSPQLSWSGAPLGTKSFAITAYDPDAPTGSGWWHWTVANLPASVHSLPEGAGSQGGSLPPGAVQGRTDYGESRFGGACPPAGDKPHRYQFTVWALKIDKLPIDANASGALVGFMLNANALGKAQLTATYGR

SEQ ID NO: 1306 - protein, 405 aa, Shewanella oneidensis MR-1
MEMAIGIGMFTLVVCLLVIVILIAKKKLVTTGEITIGINDDAEKSIKVAAGDKLLGALASKNIFIPSACGGGGTCGQCRVKVKSGGGDILPTELGHITKKEAKEGCRLACQVAVKTDMELELEEEIFGVKKWQCEVISNDNKATFIKELLLKLPEGEDVHFKAGGYIQIEAPAHVVKYADFDIPAKYRDDWEKYGLFDLVSTVNEDVLRAYSMANYPDEKGRIMLNVRIATPPSANVPPGKMSSYIFNLKAGDKVTISGPFGEFFVKDTDAEMVFIGGGAGMAPMRSHIFDQLKSKKTKRKMSFWYGARSTREVFYQQDFDTLAAENDNFVWHVALSEPLPEDNWTGYTGFIHNVLYENYLKNHKAPEDCEFYMCGPPIMNSSVIKMLESLGVEPENILLDDFGD

SEQ ID NO: 1307 - protein, 363 aa, Catharanthus roseus
MGSANPDNKNSMTKEEEEACLSAMRLASASVLPMVLKSAIELDLLELIKKSGPGAYVSPSELAAQLPTQNPDAPVMLDRILRLLASYSVLNCTLKDLPDGGIERLYSLAPVCKFLTKNEDGVSMAALLLMNQDKVLMESWYHLKDAVLEGGIPFNKAYGMTAFEYHGKDPRFNKVFNQGMSNHSTIIMKKILEIYQGFQGLKTVVDVGGGTGATLNMIVSKYPSIKGINFDLPHVIEDAPSYPGVDHVGGDMFVSVPKGDAIFMKWICHDWSDAHCLKFLKNCHEALPENGKVILAECLLPEAPDSTLSTQNTVHVDVIMLAHNPGGKERTEKEFEALAKGAGFRGFIKVCCAYNSWIMELLK

SEQ ID NO: 1308 - protein, 1303 aa, Oryza sativa (japonica cultivar-group)
MAAAAWGGTTQKCDSCGRTVYPVEELAADGRVYHRPCFRCTHCKATLQFSNYSSVEGVLYCKPHYDQILKSTGSLEKSFEGTSKSAKAEKSNGNKGQPNRFSSMFVGTQDKCVVCNKTVYPLEKVNLNGSSYHKSCFRCTHGGCTLSPSNNVTHEGKLYCKTHHSQLFMVKGNFSNFEDSTPNAKVDIEKQPEHEDATKNPGGPGQGDGLTEKPLESELTPEKPSQDDIVAEKQSQSSVDVPKQSESSTTVQRSEEGERVTKGESNSHVVSKKPLESSVEKPFQSSAVNLQPSGSSAAVRKPWQRNLPTDKPLLSNTTTEKSTPSSAAIEESLPSNGVDAKQPESSTASTVVKRPWQRRVATENLPQSISPSDKPSSTSADDVKPSENSKLIRKPWQRAVAAEAQIQNSGPTEKSSLTNDTKPSESTTSIKRPWEHKVVNEKPLQNNIDTEKPLQNNTDTEKSSSSAIDVKLAETSTTPTVPQEHSGITEKPSQTSADDVKPSESTAAVVKKQWQRNIGFQKQPQSSVTDAKTPESRGMGKRLWQRNVPTEKQSQSGASVVTPSQVSVASTNPLQSSVVVKKPWQRSVSREKEPEKDISSNKPLQNRVLAEEAEKTNVTADNKSQIIQDKKNNGATTENSSQISESAKKLPLTANKSQADTSTEKLSESDILAVASSQITEPSKKPSENTAENEKPSQTDIATDELPLTQSVEAMSEPSPSDAAHQEISEREILTDKLPESTMAVEKLSQTATLTEKPSKEDAAEKLPQTNEPSEQPHESEETAEKPLQNEANAESTTKQSDLSLEKPPQVDANVGNPTEPESDATSGVNSSDAQIRPTAEQLVGPQGIVSAEKTSDQILEANTDPAADQSSESQDVAPAKVATEQPLENQKAAASEQPLEPQHEAYEENPQEHNSDATAKESSEPERDTASDQLAEQPSESRTAGEKATLRESDVVTEDPAEPQIDAAAERSAEVLSESQTGVETPVLHQSDRTNEVPSEPQTDEASDKSTEQPLEPENDASVEDEKPPEIESDDVHDKPSESTPDTETLPHNTPKSSISISEAADGNVSEEAPPQSSASIETPSESAIAVEEPKHDDEASIKPSEDSSALEEPPQDDSASVEPSENTITLEKASEEDEGSVKPSEGNDALEKTLEEDEASAKLPEDSTTFEKPSEKDDAGTKQTEDPVTLEKEPEEDKGSVEPTQDNAGLEKPLEEDEASAKPSEDSVVLDKPSVEDDDSAKPSEDSMDLEKPEAHKPSEEEDGATKSSPEDAAVEEAPLQGDTETATDKPSLEADTTETA

SEQ ID NO: 1309 - protein, 440 aa, Mesorhizobium sp. BNC1
MTYILHRQIHGQLPVAAGGRGVKLFDSAGKEYIDASGGAAVSCLGHNHPDVVAALKRQAEKLAYAHTSFFTNEPAEALAERLVKAAPEGISHAYLVSGGSEANEAALKMARQFFVEKGEAQRRHIIARRQSYHGNTLGALAAGGNEWRRAQFRPLLIETHHIDPCYAYRYRQQGESDEEYGLRAAQQLEDKILELGPDTVMAFIAEPVVGATAGAVPAVSGYFKRIRDICDRYGVLLILDEVMCGMGRTGTLFACEEDGVSPDLVSIAKGLGGGYQPVGAVLLSRQIFDAFAQGSGLFQHGHTYICHPMACAAALAVQEVIERDNLLANVREMGSYLRARLEARFGNHAHVGDIRGRGLFLGLELVADRATKEPFDPARKIHAGVKKEAMARGLMVYPAGGTIDGARGDHVLLAPPFILDKETADTIVDRLGEAIDAALG

SEQ ID NO: 1310 - protein, 431 aa, Mycobacterium bovis AF2122/97
MADTDDTATLRYPGGEIDLQIVHATEGADGIALGPLLAKTGHTTFDVGFANTAAAKSSITYIDGDAGILRYRGYPIDQLAEKSTFIEVCYLLIYGELPDTDQLAQFTGRIQRHTMLHEDLKRFFDGFPRNAHPMPVLSSVVNALSAYYQDALDPMDNGQVELSTIRLLAKLPTIAAYAYKKSVGQPFLYPDNSLTLVENFLRLTFGFPAEPYQADPEVVRALDMLFILHADHEQNCSTSTVRLVGSSRANLFTSISGGINALWGPLHGGANQAVLEMLEGIRDSGDDVSEFVRKVKNREAGVKLMGFGHRVYKNYDPRARIVKEQADKILAKLGGDDSLLGIAKELEEAALTDDYFIERKLYPNVDFYTGLIYRALGFPTRMFTVLFALGRLPGWIAHWREMHDEGDSKIGRPRQIYTGYAERDYVTIDAR

SEQ ID NO: 1311 - protein, 101 aa, Nicotiana tabacum
MASSVLSSAAVATRSNVAQANMVAPFTGLKSAASFPVSRKQNLDITSIASNGGRVQCMQVWPPINKKKYETLSYLPDLSQEQLLSEVEYLLKNGWVPCLEF

SEQ ID NO: 1312 - protein, 362 aa, Thalictrum tuberosum
MGSTQNNHNLTPEEEEEACLHAMQLASASVLPMVLKAAIELDVLEIIAKAGQGAYVAPSEIASQLSTSNSQAPIILDRILRLLASYKVLTCNLRTLEDGGVERLYGLAPVCKFLVKNEDGVSMAPLVLMNQDKVLMESWYHLKDAVLDGGIPFNKAYGMTAFEYHGTDPRFNKVFNRGMSDHSTITMKKLLELYKGFEGLKSVVDVGGGTGATVNMIVTKHPTIKGINFDLPHVIEDAPAYPGVEHIGGDMFVCVPKGDAIFMKWILHDWSDEHSVKFLKNCYESIPADGKVIDVESILPVCPETNLAANACFQLDNIMLAHNPGGKERTEKDFEALSVKAGFTGFKVVCGAFGSWVMEFCK

SEQ ID NO: 1313 - protein, 479 aa, Streptomyces coelicolor A3(2)
MTDTPTQLFLGGAWADAADGAVMPVDDPATGEILAHVADAGPKDARLAEEAAVQAQEEWARAAPRARSEILRRAYEIVLERTDALARLMTSEMGKPLAEARGEVAYAAEFFRWFSEEAVRIDGGHGVLPDGRNRMLLSRRPVGPCLLITPWNFPLAMGTRKIGPAVAAGCTMVLKPAPQTPLSSLALAAILKEAGLPDGVLNVVTTSRAGEVCEPLLRGGRIRKLSFTGSTAVGRLLLAQCADTVVRTSMELGGNAPFVVFDDADLDAAVDGAMVAKMRNMGEACTAANRFFVHRSVAGEFADRLARRMGALVVGPGTGDGVDVGPLIDAAGRAKVEELVADAVERGARVLVGGTTPEGPGCFYPPTVLTDVAPESRLMATEIFGPVAAILTFDDEDEVVRRANDTPWGLVGYVFTEGLDRALRVSERLDVGMVGLNTGLVSNPAAPFGGVKQSGLGREGGRVGIEEFLEYQYVALPTG

SEQ ID NO: 1314 - protein, 450 aa, Bacillus sp. KSM-K16
MNTGMEPTLAKKDGQYVWHAMQRPGAAPLIADSGEGSWFTDTNGNRYMDGVSGLWCLNLGHGQTEIIEAATEQMNKLAYFPLSLGHQPAIALAEKLAALLGGGFRTFFANGGSDANETAFKIARQYHKQTGSPEKQKIISRYRGYHGNSLGALAATAQANRKIKYDAALPGFLHIPPPYAYRSSFGSAAEDDQQAADFLEQTILWEGPETIAAFIMEPIISGGGVIYPQSNDYYKRVRDICDRYQVLLILDEVVSGFGRTGKLFGFMHGDDDFKPDIITLAKGLTSGYLPLGATCVAENVYQAFDGKGETSHFRHISTYGGHPASCAVALKAIDIIEREQIVNRVETLGHTVLGKLKQLEQLSIVGEVRGIGFLYGIELVQDKQTKEPADDDTMKAVVTACQKQGLIIGKNSDTIPGGGNVLIIAPPLTSSEEDLAFLVDTVSSVLRTFA

SEQ ID NO: 1315 - protein, 294 aa, Saccharomyces cerevisiae
MKTLVHVASVEKGRSYEDFQKVYNAIALKLREDDEYENYIGYGDDLVRLAWHISGTWDKHDNTGGSYGGTYRFKKEFNDPSNAGLQNGFKFLEPIHKEFPWISSGDLFSLGGVTAVQEMQGPKIPWRCGRVDTPEDTTPDNGRLPDADKDAGYVRTFFQRLNMNDREVVALMGAHALGKTHLKNSGYEGPWGAANNVFTNEFYLNLLNEDWKLEKNDANNEQWDSKSGYMMLPTDYSLIQDPKYLSIVKEYANDQDKFFKDFSKAFEKLLENGITFPKDAPSPFIFKTLEEQGL

SEQ ID NO: 1316 - protein, 488 aa, Streptomyces coelicolor A3(2)
MSRAARCSLGDMNESPRTPFPTPSHWIDGRAVTGSGPLIDVVNPADESVIAHLHEATADDVDMAVDAAVAAIPGWAATPPRHRADVMRRLAEGLQKRSEELAATITLEMGAPIAFSRQAQVGFPVASTLAAIAAAERFEWSERIENSLVVREPVGVVGAITPWNFPLQQLVTKVVPAMLAGNTVVLKPSELSPLSARMFAEIATEAGLPNGVFNVVQGTGPVVGEALSRHPKIDMISFTGSTRAGKSVSSAASVTVKRVALELGGKAAHIVLPEADLDSAVARGLAFAWANAGQACGAYVRMLVPEDLQTAVVDRLRTAAQEYVVGDPADEATRIGPLASETQRRRVDDYIRRGIADGATLVTGGPGRPEGFETGAYVRPTIFSDVAPESVIAQEEIFGPVLVVIPYTDDEHAVEIANGTVYGLNAAVTGDEDHAMAIAVRLRVGQVDVNGGRHNFQAPFGGYKQSGNGREMGRAGLEEFLETKAITS

SEQ ID NO: 1317 - protein, 448 aa, Oryza sativa (japonica cultivar-group)
MTTPLPYAAAATAATGEDPDQIGRLPDCLLTTILSLLPLDAAARTTALSRRWRSLWPSAPLRLHDSDLPSRSQYLSAAISGILASHRGDAVSFRLSSGRPSSADLDTWLRILAGKRLQELLLQPPSEPLPLPPSLLGCHSLRSADLTNCRLPAAAAATASFPHLHELTLRYCFASSRALHGLLAGCPALAALSLDRVFGCRSLRVRSRTLRSLTVSVSLRRRDEVGDELQDLAVEDGPLLERLLGHDVNWGPSIHVLHAPRLEMLGYLGVGIPSLQIGAALFHSMRAVRLAAEFRCLKTLALEMVDPQVKPVVDFLRCFPCLEALYITSHMFEPRSMETLKCDNMDYPIECLNRHLKKVVLAGYEGRRRELQLARFLVSNARVLQVMKFLCANDCKPTWLASQKRQLCWESRLSLGPQVIFEVYRKSHTRFRKHASNITLVDPFDVKT

SEQ ID NO: 1318 - protein, 212 aa, Bacillus halodurans C-125
MKFFIDTANINEIREANDLGILAGVTTNPSLVAKEGVDFHERLREITSLVKGSVSAEVVALDAEGMIKEGKELAAIAPNITVKVPMTTEGLKAVHAFHQEGITTNVTLVFSAVQALLAARAGATYVSPFLGRLDDIGHDGLDLISQIAEIFHVHDLDIQIIAASIRHPQHVTEAALRGAHIATIPFKVISQLSKHPLTDKGIEQFLKDWNNR

SEQ ID NO: 1319 - protein, 1123 aa, Bordetella bronchiseptica RB50
MEQVTGYCTLCRSRCGSVNHVENGRLVAVTPLAGHPTGGALCAKGRAAPEMMAESHRLLRPLRRTNPRGAADPGWREIEWSEALDEVAARLAVARRRDGAESVAFAVTTPSGTPMVDSFEWVERFVRVFGSPNLIYAVEVCGWHKDYAHALTFGRGIGVPDLEHTDTMLLWGHNPARTWLAQAARIAAARQRGARVVVVDPNREGSSQQADLWLRVRPGADGALALGAIRHLLHTGRFDHGFVARWSNGPYLVDGASGALLRAADLWPDADPAARVVMLDGRPAASGRGADTARAELFGSWTLRLHDGRACEAVTVMHALRVAVERYTPDEVARLAWLDEAELAQFNAIFENAPRLSYHSWTGVGQHTNATQTDRAIATLYALTGACDRKGGNLWTVAPPYRAVNGYRELLSPVQRAKALGLDELPLGPPSLGWITARDFCRAVLQQDPYPVRTLVSFGTNLLVSQAETARNLEALQALDFHVHVDMSMNPTAMNADIVLPANMPWEREALKLGFEITQAAVEHVQLRPRMVEPAGESRADYEIVLELARRLGLRDAFFGADMDACWNHQLAPLGIDVQALRRQPEGIRFPQPFAHEKYKTLRDGQPVGFPTHDGRVQIHCAALHDIGQPALPSHVEPADTPARHAGAYPLVLSTAKSGWFVHSSHRYVASLRRKSPDPQVYLSTEAARDRGIASGDWVRVRTPYGEVALRAKINADLHANVAIAEFGWWQGCEGLGRADGAIVGPASSNINAIMTDRHRDPVSGSVPLRATVCDIVRDDARNRGSWSGAREFVLARKRGIAHDVAEFRLLACDAQALPDFLPGQHVIVSMPGGAVRRAYSLTGPNRAPAHLSIAVRRVRDGDGPAGLMSNALHALDEGARVLLSAPAGVFTPPLRTARPVILMASGIGITPFHGYLEALAQDAGPAPSVLLVHACRDGSSHPYGAELKRLAQRIGSVRTLTVYAEPASHDVPGRDYQQRGRLDFAWLSPETVAARPLVYLCGSPGFLALCTDALAARGIPRFDIFSETFTSEKRVPDTLAPQPIEIEAEQGGFTWDPAAGTLLDAAERAGLSLPSGCRVGQCESCAMHIVSGQVAHLIDFDGSADTCLTCQAVPITPLTLRR

SEQ ID NO: 1320 - protein, 458 aa, Bacillus megaterium
TIKEMPQPKTFGELKNLPLLNTDKPVQALMKIADELGEIFKFEAPGRVTRYLSSQRLIKEACDESRFDKNLSQALKFVRDFAGDGLFTSWTHEKNWKKAHNILLPSFSQQAMKGYHAMMVDIAVQLVQKWERLNADEHIEVPEDMTRLTLDTIGLCGFNYRFNSFYRDQPHPFITSMVRALDEAMNKLQRANPDDPAYDENKRQFQEDIKVMNDLVDKIIADRKASGEQSDDLLTHMLNGKDPETGEPLDDENIRYQIITFLIAGHETTSGLLSFALYFLVKNPHVLQKAAEEAARVLVDPVPSYKQVKQLKYVGMVLNEALRLWPTAPAFSLYAKEDTVLGGEYPLEKGDELMVLIPQLHRDKTIWGDDVEEFRPERFENPSAIPQHAFKPFGNGQRACIGQQFALHEATLVLGMMLKHFDFEDHTNYELDIKETLTLKPEGFVVKAKSKKIPLGGI

SEQ ID NO: 1321 - protein, 487 aa, Deinococcus radiodurans R1
MTTTDLRTTYSSVTRSQAYFDGEWRNAPRNFEVRHPGNGEVIGEVADCTPTDARQAIDAAEVALREWRQVNPYERGKILRRWHDLMFEHKEELAQLMTLEMGKPISETRGEVHYAASFIEWCAEEAGRIAGERINLRFPHKRGLTISEPVGIVYAVTPWNFPAGMITRKAAPALAAGCVMILKPAELSPMTALYLTELWLKAGGPANTFQVLPTNDASALTQPFMNDSRVRKLTFTGSTEVGRLLYQQAAGTIKRVSLELGGHAPFLVFDDADLERAASEVVASKFRNSGQTCVCTNRVYVQRGVAEEFIRLLTEKTAALQLGDPFDEATQVGPVVEQAGLDKVQRQVQDALTKGAQATTGGQVSSGLFFQPTVLVDVAPDSLILREETFGPVAPVTIFDTEEEGLRLANDSEYGLAAYAYTRDLGRAFRIAEGLEYGIVGINDGLPSSAAPHVPFGGMKNSGVGREGGHWGLEEYLETKFVSLGLS

SEQ ID NO: 1322 - protein, 181 aa, Paenibacillus polymyxa
MSIYDYSAIAMNGKEIVLSDYKDKVVLIVNTASQCGFTFQYQDLQRLYDQFKDRGLVILGFPCNQFADQEPDSNESVQTFCTLNYGVAFPMFQKVNVRDEQAHPLFTYLASSLPFEGFDETHSVAKILIPLIHERHPEYLPGDSIKWNFTKFLIDRNGKVIKRFEATTDPLDMEEYIEALL

SEQ ID NO: 1323 - protein, 109 aa, Triticum aestivum
  misc_feature (31)..(31): Xaa can be any naturally occurring amino acid
VTCSLEVERAPTPADMYVLGWWSIQFFKGSXLKWPVGVIRYEYDQLQAPVGGRVYFTGQYTSEHYNGYVLGAYLSGMNSADIIMIKVLINVEFKVPFQVQRVAHTCRIN

SEQ ID NO: 1324 - protein, 487 aa, Neurospora crassa
MARLTSLLTAVAAGVGTARAILPTDWTPICKQIESKISSTSDVIYPLQAVSFTSATAHWFWSSDEQPSCVFEPGSAEDVSVALRIIGATKTPFAVQSGGHTSNPGFSSTKGVHISLKRLNQVKLSADKSVAEIGFGNIWTDVYKALDGTGRNVVGGRVPGPGVGGLTLGGGYSWKTNQYGMTCDTVKSYELVLPNGTITRVSKTENPDLYFALKGGLNRFGIVTSAEFYTHEQPGKVYGGLGIYPTTAVDQILNATSQFSYLNKDPRTQIITTLDGGPLGTTAEVLFFHDGPDKPASFELFDNIAPLVKTVSSQSFVDFVQSIPAQVPELTNIRGAFITFATSELSQTFLEAVRQETDDIGKIMSLHGGITVSYDLEPFTKYGEHATESAFPHTESPLPLFIYFAWFLPENDEFWYARMKQTVEALKKVAMDDGIYNSDAFTYYPNYSLFDATPEQLYGKENAARLARIRDQVDPDRIMELAGGFKI

SEQ ID NO: 1325 - protein, 196 aa, Triticum aestivum
MAQEGLRLVCPPVSAHEGRLPRQYTLEGQGAKKDISPPLEWYGVPDGTRSLAVVVQDIDADERVPWTHWVVANISPEEKGLPEGFSGAGGNANAGGGAGGVQEGVNDWKQPGWRGPVPDSHGHRIQFRLYALDDLLSLGNKVTVDKVMEAIEGHVLRGGRRSRPSSKELLWILALGSVCLWTFLLLLLGNRVWSVL

SEQ ID NO: 1326 - protein, 254 aa, Oryza sativa (indica cultivar-group)
MEAATRARRRNGAAADGNGGAQQAAAAPAIREQDRLMPIANVIRIMRRVLPAHAKISDDAKETIQECVSEYISFITGEANERCQREQRKTITAEDVLWAMSRLGFDDYVEPLGVYLHRYREFEGESRGVGVGVGAARGDHHHGHVGGMLKSRAQGSMVTHHDMQMHAAMYGGGAVPPPPHPPPHHHAFHQLMPPHHGQYAPPYDMYGGEHGMAAYYGGMYAPGSGGDGSGSSGSGGAGTPQTVNFEHQHPFGYK

SEQ ID NO: 1327 - protein, 420 aa, Psychrobacter sp. 273-4
MQNQIFELQYALDTFYLLMCGALVMWMTAGFTMLEAGLVRSKNTVEILTKNIALFATACTMYMICGYAIMYDGNLFLSGIAGTESLVADALATSAENGFDGDAVYSSASDFFFQVVFVATCMSIVSGAVAERMKLWSFLLFAVVMTGVIYPLEGSWTWGGKAVFGLYSLGDLGFSDFAGSGIVHMAGAAAALAGVLLLGARLGKYGSKGEIRAIPGANLPLAALGTLILWMGWFGFNGGSVLKLGDIASANSVAVVFLNTNAAAAGGAIGALLIARLIFGKADLTMLLNGALAGLVAITAEPLTPSALQATLFGMTAGIIVVLSILLLDKIKIDDPVGAISVHGVVGLFGLLIVPLTNPAASLIGQLAGAATIFAWVFVSSLIIWSIIKFVIGLRISEEEEYQGADIAECGMEAYPEFIR

SEQ ID NO: 1328 - protein, 456 aa, Glycine max
MPEIGQAAVAAAADDTALFGKYELGRILGCGAFAKVHYARNVQTGQSVAVKIINKKKLAGTGLAGNVKREITIMSKLHHPHIVRLHEVLATKTKIFFIMDFVRGGELFGKISKGRFAEDLSRKYFHQLISAVGYCHSRGVFHRDLKPENLLLDENGDLRVSDFGLSAVRDQIRPDGLLHTLCGTPAYVAPEILGKKGYDGAKVDVWSCGVVLFVLAAGYLPFNDPNLMVMYRKIYKGEFRCPRWMSPELRRFISKLLDTNPETRITVDGMTRDPWFKKGYKELKFHEEDYHASGSGSFFGPKDERVVNLNAFDLISFSSGLDLSGMFGGEWGERLVTREPPERVLEAAEEAGAAAGMAVRWKKECGVELEGFNGRFGIGVEVYRLTAELAVVEVRKRGGDAAVRGVWEERLKPLLLGGATTSYSNSSEDEQQHQEEEQQHQEEKQEQEPESKVACE

SEQ ID NO: 1329 - protein, 380 aa, Cryptomeria japonica
FSIKGNGIGNGNGHCNGYSNGHGHCINGYSNGISASVSSNGVSHLPYSNGNTVHHSNSNGHIHTSPSFGDGRRRCFWYEEEIEDDLRWCFALNRILHTGVSEYQDIALIDTRPFGKALVIDGKMQSTEVDEFIYHESLVHPALVYHSQPKSAFIMGGGEGSTAREILRHKCVKKVVMCDIDKEVVDFCKKYLVVNREAFSNSRLELVINDARTELQSRQERFDVIIGDLADPVEGGPCYQLYTKSFYELVIKPKLNHQGIFVTQAGPAGVLTHTQVFSSIYNTLRQVFKHVMPYSAHVPSFADTWGWVMASDHPLTLEAGEIDDRIKQRIKGELQFLDGQTFLVAATLNKSVRKSLSKETHVYTEETARFIHGHGKASYQ

SEQ ID NO: 1330 - protein, 138 aa, Triticum aestivum
  misc_feature (58)..(58): Xaa can be any naturally occurring amino acid
  misc_feature (96)..(96): Xaa can be any naturally occurring amino acid
  misc_feature (101)..(101): Xaa can be any naturally occurring amino acid
  misc_feature (108)..(108): Xaa can be any naturally occurring amino acid
  misc_feature (110)..(110): Xaa can be any naturally occurring amino acid
  misc_feature (126)..(126): Xaa can be any naturally occurring amino acid
  misc_feature (131)..(131): Xaa can be any naturally occurring amino acid
  misc_feature (134)..(134): Xaa can be any naturally occurring amino acid
MAPTVMASSATSVAPFQGLKSTAGLPVSRRSNGASLGSVSNGGRIRCMQVWPIEGIKXFETLSYLPPLSTEALLKQVDYLIRFKWVLASSQQVGSXSVEHXRNSGYYXWXFWTMWKLPILGALTHXVLTKXEEXKKTL

SEQ ID NO: 1331 - protein, 423 aa, Oryza sativa (japonica cultivar-group)
MAGSRFGSFKSEKGDPAATAAQRRDPYEVLGVGRNATDQEIKSAFRRMALKYHPDKNGDDPVASDMFQEVTFSYNILSDPDKRRQYDTSGFEAIEADSQELELDLSSLNTVNTVFAALFSKLGVPIKTTVSATVLEEALNGSVMVSQLQLGNSVHRKVEKQSAHFYSVDITEKEAKMGLVCRVKSTDRSKFKLLYFELEENGGLSLALQEDSVKTGKVTSAGMYFLGFPVYRFEQNNLAAAAKDPDSAFFKRLDSFQPCDINELKPGTHFFAVYEVVCGESFPAEKEKLQSVEAKILTKRAELSKFETEYREVLAKFTEMTSRYTQEMQAIDNLLKERNEIHASYTNNSPLKRSSSRSKAKSPSKFSKGEEENSQRKEKKVKDQPTGGCRSADEDSNEKKTKERFPKKKWLNIPFKIDRRKPC

SEQ ID NO: 1332 - protein, 130 aa, Brassica napus
LDLVINLSHKMNVRPVIGLRAKLRTKHSGHFGSTSGEKGKFGLTTTQIVRVVRKLREACMLDCLQLLHFHIGSQIPSTSLLSDGVSEAAQFYCELIRLGANMKVIDIGGGLGIDYDGSKSGESGLSVAYT

SEQ ID NO: 1333 - protein, 87 aa, Glycine max
  misc_feature (52)..(52): Xaa can be any naturally occurring amino acid
MAALMISFPAVTTVNRAGAGMDVPFTGLKYMDGFPSMMSNIDITFIVSNGGXVQCMLDRSPYGKKKFETLFHLPDLDDAQLVKEVLF

SEQ ID NO: 1334 - protein, 484 aa, Acinetobacter calcoaceticus
MSIFTKELWDKKLFNGSWQSAQDTYSVIEVATGQVLGEIGYATAADVVSAAQQAKAAQQQWWALNYQERQAVFERAAALLTENQAEVIEWLVKESGSLQLKAGFEVSIAIQVLKHCIASPTNEQGTLLPTQNGKLSIAKRLPLGVVGVISPFNFPLYLALRAVAPALAFGNAVVLKPDERTAVCSGYVIARIFELAGLPKGLLHVLPGGVEVGEALTLDQNIASIQFTGSTQVGRIVGANAAKTLKKVSLELGGKNSLIILDDADIELAAENIAWGAFLHSGQICMTSGKILIHQKIYQQVKQRVIEKVQNFVVGNPCDKNVTIGPLINAKQAQRVEQLVSAAVNEGATLEIGGHADGVFFQPTVLTDVTANNSIFSEEIFGPVAVLIPFSSDEQAIELANDGDYGLSAGIITSNVGRGMQLGAQLKVGLLHINDQTVNDETVNPFGGFGSSGNGTRIGGPANADEFTQWQWITVQAQAPHYPF

SEQ ID NO: 1335 - protein, 489 aa, Bacillus cereus ATCC 10987
MNKELLADKLKVKDAKLFIDGKYVDSVCGETFDTFNPATNRKLASIAKANEEDTKRAIDVAERTFKSGIWSKMPVEERSNILCKMSDLIMERVDELAYIETLDVGKPIKESKGFDIPRSAHNFRFFAEMAKYIVHEHYDKHNFMSYAKYAPAGVTSLIIPWNLPFMQMTWKASAALASGNTVVVKPASYTPLSAVMLGEIANDAGLPPGVLNIITGPGSTVGTKMTTHPAVRRISFVGESNTGKTIMRNASENLIPVSLELGGKSANIVFEDADLDEAVQGSIEAIYRNQGEICLAGSRLLVQESVYEQFLEKFVAAVKRIKVGDPLSEDTDMGALVSKSHLETVDRYVELGISEGAKLAYGGKRVESLVEGNFYEPTILYDVDNSMRVAQEEIFGPVLVVIPFKTEEDAIRIANDSIYGLAGVVWTNDLRRAQRVVSQIDSGLLWINCWYVRDLRTPFGGSKASGIGREGGRHSFEFYTEAKTVTMKL

SEQ ID NO: 1336 - protein, 155 aa, Lycopersicon peruvianum
MDLRLLGIDNTPLFHTLHHMMEAAGEDSVNAPSKIYVRDAKAMAATPADVKEYPNSYVFVVDMPGLKSGDIKVQVEEDNVLLISGERKREEEKEGAKFIRMERRVGKFMRKFSLPENANTDAISAVCQDGVLTVTVQKLPPPEPKKPKTIEVKVA

SEQ ID NO: 1337 - protein, 206 aa, Triticum aestivum
  misc_feature (6)..(6): Xaa can be any naturally occurring amino acid
IRHQIXHQTFHHQPQQTYPHQPQQQFPQTQQPQQPFPQPQQTFPQQPQLPFPQQPQQQFPQPQQIPQQQQIPQQPQQFPQQQFPQQQQFPQQQEFPQQQFPQQQFHQQQLPQQQFPQQQFSQQQFPQQQQFPQQQQLTQQQFPQPQQSPEQQQFPQQQFPQQPPQQFPQQQFPIPYPPQQSQEPSPYQQYPQQQPSGSDVISICGL

SEQ ID NO: 1338 - protein, 413 aa, Triticum aestivum
MSVSSSSMCGGDAGMKCVVWFRRDLRVEDNPALAAAARTAGEVVPAYVWSPEEDGPYFPGRVSRWWLSQSLKHLEASLHRLGAAKLVTRRSPDSVAALLQLVRDTGATHLFFNHLYDPISLVRDHRLKEMMTAEGIVVQSFNADLLYDPWEVNDDKGQPFNMFMPFWNRCLSMPYDPPAPLLPPKRINSGDLSMCPSDDLIFEDESERGSNALLARAWSPGWQNADKALSAFLNGPLIDYSVNRKKADSANTSLLSPYLHFGELSVRKVFHLVRMKQLVWSNEGNHAAEESCTLFLRSVGLREYSRYLCFNHPCSHEKPLLAHLRFFPWVVDESTFKFWRQGRTGYPLVDAGMRELWATGWLHDRIRVVVSSFFVKVLQLPWRWGMKYFWDTLLDADLESDALGWQYLGRDHA

SEQ ID NO: 1339 - protein, 160 aa, Triticum aestivum
GSAVAGGVVVDMSRGGKAPSRALPVYSPELGGHYVDVWGGELWIDVLNWTLSHGGLAPRSWTDYLYLSVGGTLSNAGISGQAFHHGPQISNVYELDVVTGKGEAVTCSEAKNPELFFGALGGLGQLGIITRARIALEPAPRKVRWIRALYSNFTEFTADQ

SEQ ID NO: 1340 - protein, 236 aa, Zea mays
MTMESPTTAAGGELESYFSLGLTVSHSQKDNAEFPKVLLLLSAYLDKTVQQNEELLDSSKIKESTTIFHGQRVPELSIKLYAERIFKYAKCSPSCFVLALIYMERYLQQPNIYMTSFSVHRLLITSVVVAAKFIDDAFFNNAYYGRVGGISTREMNMLELDLLFGLDFRLKVDIETFESYCLQLEEALVLVLERPIQVQEANVTKHLICNSSADETCKHELGLERYSSQAVQGCSW

SEQ ID NO: 1341 - protein, 84 aa, Triticum aestivum
  misc_feature (26)..(26): Xaa can be any naturally occurring amino acid
  misc_feature (29)..(29): Xaa can be any naturally occurring amino acid
  misc_feature (35)..(35): Xaa can be any naturally occurring amino acid
  misc_feature (38)..(38): Xaa can be any naturally occurring amino acid
  misc_feature (40)..(41): Xaa can be any naturally occurring amino acid
  misc_feature (48)..(48): Xaa can be any naturally occurring amino acid
  misc_feature (50)..(52): Xaa can be any naturally occurring amino acid
  misc_feature (55)..(55): Xaa can be any naturally occurring amino acid
  misc_feature (57)..(60): Xaa can be any naturally occurring amino acid
MSDTDEHHFESKADSGASKTYPQQVXAIXKGGHIXIKXRXXCKVVEVXTXXXGKXWXXXXARNEKKPDFTPNYPRRKNQVAEPS

SEQ ID NO: 1342 - protein, 197 aa, Nicotiana tabacum
MSASRFIKCVTVGDGAVGKTCLLISYTSNTFPTDYVPTVFDNFSANVVVNGSTVNLGLWDTAGQEDYNRLRPLSYRGADVFILAFSLISKASYENVSKKWIPELKHYAPGVPIVLVGTKLDLRDDKQFFIDHPGAVPITTAQGEELRKTIGAPAYIECSSKTQQNVKAVFDAAIKVVLQPPKQKKKKGKAQKACSIL

SEQ ID NO: 1343 - protein, 503 aa, Burkholderia cepacia R18194
MYDTEPLAATRGPAGGQPEPRRVRNFIDGDYRAGDRWFDKRSPLDNAVIARVAEASRADVDAAVQAARAALSGPWGGLTVAQRVDILYAVADGITRRFDDFLEAEVADTGKPVSLASHIDIPRGAANFKVFADVVKNVPGETFEMATPDGAGALNYAIRRPVGVVGVICPWNLPLLLMTWKVGPALACGNTVVVKPSEETPQTAALLGEVMNAAGVPRGVYNVVHGFGPGSAGEFLTTHPGVNAITFTGETRTGAAIMKAAADGARPVSLEMGGKNAAIVFADCDFDAAVEGTLRSCFANAGQVCLGTERVYVERPLFERFVAALKAGAEQLRPGRPEADTTGIGPLISQEHRDKVLSYYRKAAELGATVVTGGGVPDMPADLRDGAWVQPTIWTGLGDDSPIARDEIFGPCTLVMPFDSEAEVIGRANANAYGLSTAIWTTHLARAHRVAASIDVGIAWVNSWFLRDLRTAFGGAKQSGIGREGGVHSLEFYTELRNVCIKL

SEQ ID NO: 1344 - protein, 326 aa, Glycine max
  misc_feature (260)..(260): Xaa can be any naturally occurring amino acid
MEQSVLDDIINRLLEVRTRPGKQVQLSESEIRQLCVVSREIFLQQPNLLELEAPIKICGDVHGQYSDLLRLFEYGGLPPEANYLFLGDYVDRGKQSLETICLLLAYKIKYPENFFLLRGNHECASINRIYGFYDECKRRFNVRLWKTFTECFNCLPVAALIDEKILCMHGGLSPDLLNLDQIRNLQRPTDVPDTGLLCDLLWSDPSKEVQGWGMNDRGVSYTFGADKVSEFLQKHDLDLICRAHQVVEDGYEFFANRQLXTIFSAPNYCGEFDNAGAMMSVDETLMCSFQILKPADKKAKLNFGSTTTAKPGNSPAGVKCFLGAKV

SEQ ID NO: 1345 - protein, 405 aa, Neisseria meningitidis Z2491
MEIILGIVMFTVIVLVLALMILFAKSKLVSEGDITIKVNGEKELTMPAGGKLLGALANEGIFIPSACGGGGSCGQCRVVVKSGGGDILPTELSHISKREAREGCRLSCQVNVKTDMDIEVPEEVFGVKKWECTVISNDNKATFIKELKLAIPEGEEVPFRAGGYIQIEAPPHTVAYKDFDIPEEYHEDWDKYNLWQYVSKVDEPILRAYSMASYPEEKGIIMLNVRIATPPPRVPDAPPGQMSSYIWSLKPGDKVTISGPFGEFFAKDTDAEMVFIGGGAGMAPMRSHIFDQLKRLNSKRKITFWYGARSKREMFYVEDFDQLAAEFPNFTWHVALSDPLPEDNWDGYTGFIHNVVYENHLKNHEAPEDCEFYMCGPPIMNQSVIKMLKDLGVEDENILLDDFGG

SEQ ID NO: 1346 - protein, 337 aa, Bacillus sp. KSM-K16
MRSIVCERPNVFKMTKEKAPSIRPGEALVRIKRIGICGTDLHAYKGNQPFFSYPRVLGHELSGVIEEVEHNPEGLQAGDRVAIIPYLSCGNCHACRNGKTNCCTKVNVLGVHIDGGMRELVAVPTKQLMKTTSLSYDEAALIEPLAIGAHAVNRAKPRRNEQVLVIGAGPIGLGVMLFAKEQGARVIAMDVNEERLEFCQQWAKVDAVVHALDNPLSELNDRLNDELPTIVFDATGNNDSMTEAFNYVAHGGKLVYVGLVNGMIQFDDPEFHKREMTLMASRNATKEDFNYVIQVLETGSIQLDSYITHRCSFREMVEQFDSWLLPESKVIKVVVEL

SEQ ID NO: 1347 - protein, 363 aa, Buchnera aphidicola str. APS (Acyrthosiphon pisum)
MKKNYRIAVLSGDGIGPEVMQEACKILNVLKKYFFLSLEIQKFNIGGIAIEREGVALPKTTLLGCENSDSILLGSVGGKKWDNLPVEQRPERAALLPLRKHFNLFSNLRPAKLYPELKCLSPLRSDIVKNGFDILCVRELTGGIYFGEPKGFVNKNNTKYAFDTEIYHEYEIIRIAHLAFKLARSRKKKVCSIDKSNVLQSSILWREVVESVSKKYPDVHLSHLYIDNAAMQIIKDPNQFDVLLCSNLFGDIISDECATITGSIGMLPSASFNEKNFGLYEPAGGSAPDIEGKNIANPIAQILSLSMLVRYGMNLNQIADKIDKAVNNVLKKGYRTSDISHDNNFLKTDEMGDLIVDSLINGE

SEQ ID NO: 1348 - protein, 454 aa, Xanthomonas axonopodis pv. citri str. 306
MSYDTVNPANGQVEHTQQTLDAAAIEARLAASAKAFPAWAALPLAERGALLRRIGEELTRRREDLQRIMTAEMGKLRREALAEIDKCAQACAYYAEHAADYLAPRDIPTEAQSSYVRYEPLGCVFAVMPWNFPLWQAFRFLAPSLMAGNVSLLKHASNVPRCADAMKEVLDAAGIPPGVFDVLHIDNDQAADVLRDDRIAAVTLTGSERAGRSLAANAGDQLKKCVMELGGSDAFVVLEDADLAHTVPSAVQSRFDNSGQTCIAAKRFIVVDAIADRFIERFVAAAAQRVVGDPQQDSTTLAPMARADLRDELHKQVQASVAKGAKVLLGGEPVAGSHAGYPATILDTVAPGMPAYDEEFFGPVASIIRVADEAEAVRVANDTTFGLGGSVWTADAKRGERVAQQLQCGAAFVNSVVKSDVRLPFGGIKRSGFGRELAEHGIHEFMNVKTIYVA

SEQ ID NO: 1349 - protein, 192 aa, Deinococcus radiodurans R1
MSASPSLPASQGPLPQGERVNKAGRVVWFTGLSGAGKSTLATALFEELSARGEAVELLDGDAVRENLSKGLGFSREDRDTNVRRIAFVAGLLAKHGVTVLVSAISPYADTRREVLASLPNALEVFVDAPLEVVTERDVKGLYLKALAGEIPHFTGVSDPYEAPENPDLHLRTDRISVEDGVQQLLGRLSDDR

SEQ ID NO: 1350 - protein, 507 aa, Ralstonia metallidurans CH34
MKAQEIAACWQAMDLPPPWTPAEGAAPGVLAVRSPIDGEVFGQLAMCDAALANARIARAHAAQTTWALTPAPARGEVVRRFGEALRANKDALGRLVSLESGKILQEGLGEVQEMIDICDFAVGLSRQLHGLTIASERPAHAMRETWHPYGLCGVISAFNFPVAVWAWNAALALVCGNGVVWKPSEKTPLCALAAQGLLDRVFERHAPQFDGLSCVLTGGRQLGEHLVQHPAVRLMSATGSTRMGREVGMACAAHFKRAILELGGNNAAIVTPSAELEMTIRAMTFAAAGTAGQRCTTLRRAFVHADLIETVTNRLRQVFARLPVGDPLEDGTLVGPLIDHAAGDTMANALASCRAQGNVVHGGERLLGDRYPHACYVRPALVLTDAQHDTMLTETFAPILYLMPYTSLDEAIALNNAASHGLSSCIFTESLREAERFLSSAGSDCGIANVNIGTSGAEIGGAFGGEKATGGGRESGSDAWKGYMRRATNTINYGDALPLAQGIRFDV

SEQ ID NO: 1351 - protein, 472 aa, Xanthomonas axonopodis pv. citri str. 306
MHRHVHEPEILADPAAAQTAEHWRQRDLAVVWHPCTQMREHPHTLPLVPIVGGEGAWLVGHDGRRYLDAVSSWWTNLFGHTEPRIGAAIARQAGELEQVMLAGFTHTPAVQLAEQLLAIAPRQAGRAPLSKVFYADNGSAGVEVALKMAFHYFHNRGDHRRTRFIALENGYHGETIGALSVGDIPLYRRVYAPLLLEAMFTPSPDAYLAEPGQSAEDHALQAADALQALFEHSPGEICALILEPRVQCAGGMRMYHPAYLRRARELCDAHGAFLIADEIATGFGRTGTLFACEQAGVMPDLLCLSKGLTGGFLPLSAVLATQQLYDAFLDDSRERAFLHSHSYTGNPLACAAALATLKIFADDDVIARNQPIAARMRALAAQIGEHPSVADVRQAGMIVAFELTQGGNKRTPFASAARVGLKAYRAALEKGVVLRPLGDVLYWMPPYCVDEAQLALLADTTRHAITEAVACA

SEQ ID NO: 1352 - protein, 181 aa, Coffea arabica
MASSMISSAAVATTTRASPAQASMVAPFNGLKAASSFPISKKSVDITSLATNGGRVQCMQVWPPRGLKKYETLSYLPDLTDEQLLKEIDYLIRSGWVPCLEFELEKGFVYREYHRSPGYYDGRYWTMWKLPMYGCTDATQVLNEVGECLKEYPNCWVRIIGFDNVRQVQCISFIAAKPKGF

SEQ ID NO: 1353 - protein, 238 aa, Triticum aestivum
  misc_feature (150)..(150): Xaa can be any naturally occurring amino acid
  misc_feature (216)..(216): Xaa can be any naturally occurring amino acid
MPSRPAPLVHRLRLLRSAVVCSSSALLPCSRPRLAIPFAQPPLRGPAFAAASSPLLRSVGARFSLFSSMAAAASSASSIHDFTVKDASGKDVDLSTYKGKVLLIVNVASQCGLTNSNYTELAQLYEKYKDQGFEILAFPCNQFGGQEPGXTNEEIVQFACTRFKAEYPIFDKVDVNGDNVAPVYKFLKSSKGSLFGDNIKWNFSKFLVDKEGHVVXRYAPTTSPLSIEKDIKKLLASS

SEQ ID NO: 1354 - protein, 368 aa, Arxula adeninivorans
MAAQVEEQVLNLRAQADHNPSFVLKKPLELGFEERPVPVITDPRDVKIQVKKTGICGSDVHFWQHGRIGDYVVEKPMVLGHESSGVVVEVGSEVTSLKVGDRVAMEPGVPDRRSKEYKMGRYHLCPHVRFAACPPTDGTLCKYYTLPEDFCVKLPENVDFEEGALVEPLSVAVHTARLLGIYPGSKVVVFGAGPIGQLCIGVCKAFGASIIGAVDLFEQKLETAKEFGASHTYVPQKGDSHDETAHKILELLPNKQAPDVVIDASGAEQSINAGIELLERGGTFGQVAMGRTDYIQFAVSRMAMKEIRFQGVFRYTYGDYELATQLIGDGKIPVKKLVTHRRPFEKAEEAYELVKSGVAVKCIIDGPE

SEQ ID NO: 1355 - protein, 570 aa, Glycine max
MPEYIVDEGARIEAEVAEVQAWWNSERFRLTKRPYTARDVVSLRGNLRQTYASNEMAKKLWRLLKNHQANGTASRTFGALDPVQVTQMAKHLDTIYVSGWQCSATHTTSNEPGPDLADYPYDTVPNKVEHLFFAQQYHDRKQKEERMRMSREERARTPYVDYLRPIIADGDTGFGGTTATVKLCKLFVERGAAGIHIEDQSSVTKKCGHMAGKVLVAISEHINRLVAARLQFDVMGVETVLVARTDAEAANLIQSNIDTRDHQFILGVTNPNLKGKSLATLMQQGMAAGKNGAELQALEDEWLSKAQLKTLSEAVVEAIERQNNIGEEEKRRKLNEWMHHSSYERCLSNEEGREIAEKLGVRNLFWDWDLPRTREGFYRFKGSVTASVVRGCAFSPHADVIWMETASPNVVECTEFSEGVRSKHPQMMLGYNLSPSFNWDASGMSDEQMKDFIPKIAKLGYVWQFITVGGLHSNALITSTFARDFANRGMLAYVERIQREERNNGVDTLAHQKWAGANYYDRYLKTVQGGVASTAAMGKGVTEEQFKESWTRSGAVNIDRGSIVVAKARM

SEQ ID NO: 1356 - protein, 226 aa, Glycine max
  misc_feature (78)..(78): Xaa can be any naturally occurring amino acid
ITRPPTRPPTRASTRPVNGDGGRDVNLGDSNYSFGEAEALSDEMEEESRYVAEILRIRDVLLNPEDESEAVLFDSLRXLQLMELTADCLKATEIGKAVNPLRKHGSKDIRQLSRTLIDGWKEMVDEWVKATTTTAITGSEEGTPDSVNPSVVDDDEEEGLPSPPLDEGALFVTQAGSMELSQFFDGMDDDGNPRPTGPFSKNREDGRKPAFDSHVVQMRKSQPSHD

SEQ ID NO: 1357 - protein, 285 aa, Saccharomyces cerevisiae
MELSSPSKKTTTSPINIPGGNRDNLIIGPHSHSFKTDPFSSNNSSLLSKISTNPSLESPFSSKSLLDCSPVQAVKKSLESEAKTHSLDEETNEQTDVKILNIADFPTDELILMISALLNRIITANDETTDVSQQVSDETEDELLTPILAFYGKNVPEIAVVQYLERIQKYCPTTNDIFLSLLVYFDRISKNYGHSSERNGCAKQLFVMDSGNIHRLLITGVTICTKFLSDFFYSNSRYAKVGGISLQELNHLELQFLILCDFKLLVSVEEMQKYANLLYKFWNDQ

SEQ ID NO: 1358 - protein, 462 aa, Streptomyces coelicolor A3(2)
MKAHDGMYIDGAWRPADGRDTIDVVNPVDEQVIGKVPAGSALDVDTAVRAARAALSGWAATPPAERAARLAALRDVLVARKDEIAETVTAELGSPLKFSQAVHAGAPIAVAGSYAELAATHAFEEKVGNSVVHHEPVGVVGAITPWNYPLHQIVAKAAPALAAGCTMVLKPAEDAPLVAQLFAEAVHEAGIPAGVFNLVTGLGPVAGQALVEHPGVDLVSFTGSTAVGRRIGATAGAAVKRVALELGGKSANVILPSADLAKAVNVGVANVMSNSGQTCSAWTRMLVHRDQYDEAVSLAAEAAAKYGDRIGPVVNAEQRERVRGYIGKGVAEGARLVAGGPEAPREQGYFVSPTVFADVTEEMTIAQEEIFGPVLSILRYEDEDDALRIANGTVYGLAGAVWAGDEADAVAFARRMDTGQVDINGGRFNPLAPFGGYKQSGVGRELGAHGLTEYLQTKSLQF

SEQ ID NO: 1359 - protein, 159 aa, Corynebacterium glutamicum
MTSIHDISVTLNDGTETTMADWAGHLLLIVNVASKCGLTPQYEGLQKLYEEYQDRGFFVIGVPCNQFNGQEPGTDAEVCAFAQNQYDVTFPLLSKTEVNGEGTHPLYKVLKEATDGSEIEWNFEKFLVDAEGNTIKRFAPRTEPSAAEVVEAIEENLPI

SEQ ID NO: 1360 - protein, 86 aa, Glycine max
  misc_feature (61)..(61): Xaa can be any naturally occurring amino acid
GKYERVGTTQKRARAGKVAPFTGLKYMAVVPTRKTNQELTFIDRNGGGVLCLQVWPRAGKXMRVTLFYVPDIDDAHVGDEVQYLLM

SEQ ID NO: 1361 - protein, 75 aa, Zea mays
  misc_feature (6)..(8): Xaa can be any naturally occurring amino acid
GCWRRXXXTVKWFNDTKGFGFISPEDFSEDLFIHQSSIKSEGFRSLAEGEEVEFSVSDGDDVLTKAHYMTSPYKS

SEQ ID NO: 1362 - protein, 483 aa, Haloarcula marismortui ATCC 43049
MEYTGPTDLYIGGEWREATNGDSIETEDPATERTYASVQKAEASDIDAAVEAAQAAVAEGSEWATMDPGTRRAKLHAMADAIEAMKDELSMVESHDNGKTPFEAGLEIDMVIDTFRHYAGWTDKVRGDEIPVENGRLNYTTREPVGVTAHIAPWNYPFQLAGRGLAPALATGNSVILKPSAMTPLSALYYAKAAEEAGLPDGVVNVVPGKGSEAGDALTGHEGVDHVTFTGSTGVGKTVQRTAADAVADVTLELGGKGPAVVFPDADLDAAARGIQYGIFMNAGQMCWANSRIVVHEDVYEEMVSRMAEIAENIPLGGGIDDDGQMGPVVSAGQQQEILDYIETGKEEGATVAAGGGVPGDKETGHFVEPTVFADVDNEMTIAQEEIFGPVLTAIEVSDEEAAIDVANDSPFGLTACVWTNDLTRAHTVTDRLDYGMVMVNETPNTWPQTPFGGTKQSGHGRAQGEQAIESYTEVKNVHINLG

SEQ ID NO: 1363 - protein, 203 aa, Yarrowia lipolytica
MSHSQRTYDLLIKLLLIGDSGVGKSCLLLRFCEDQFTPSFITTIGIDFKIRTIDIGNQRVKLQVWDTAGQERFRTITTAYYRGAMGILLVYDVTDEKSFNNIENWYQNVQTYANEGVELILVGNKCDLDEKRVVSTEQGQALADKFGIPFLEASSKTNINVEECFYSVATRIRDTVAKTKGNESGSGGINIAEGEENSASKCC

SEQ ID NO: 1364 - protein, 341 aa, Triticum aestivum
  misc_feature (293)..(293): Xaa can be any naturally occurring amino acid
  misc_feature (314)..(314): Xaa can be any naturally occurring amino acid
  misc_feature (327)..(327): Xaa can be any naturally occurring amino acid
MGSIAAGADEDACMYALQLVSSSILPMTLKNAIELGLLETLMAAGGKFLTPAEVAAKLPSAANPEAPDMVDRMLRLLASYNVVSCRTEEGKDGRLSRRYGAAPVCKYLTPNEDGVSMSALALMNQDKVLMESWYYLKDAVLDGGIPFNKAYGMSAFEYHGTDPRFNRVFNEGMKNHSIIITKKLLESYKGFEGLGTLVDVGGGVGATVAAITAHYPTIKGINFDLPHVISEAPPFPGVTHVGGDMFQKVPSGDAILMKWILHDWSDEHCATLLKNCYDALPGHGKVVLVEWIXPVNPEATPRGQGGFHVDMIMXPPNPGGRERYKKXSFEARAKGAGLPPG

SEQ ID NO: 1365 - protein, 560 aa, Triticum aestivum
DRATEEQLVTPWTVSVASGYNLLRDPRYNKGLAFTEKERETHYLRGLLPPTVISQELQERKIMHNIRQYQLPLQRYMAMMDLQEGNERLFYKLLIDNVEELLPIVYTRTRPPAVRKYGSIFSRPQGLYISLKEKGKILEVLKNWPERSIQVIVVTDGERILGLGDLGCQGMGIPVGKLSLYTALGGVRPSACLPITLDVGTNNEELLNDEFYIGLRQRRVIGQEYADFLHEFMAAVKQNYGEKVLIQFEDFANHNAFDLLARYGTTHLVFNDDIQGTASVVLAGLVAALKLVGGTLAEHTYLFLGAGEAGTGIAELIALEMSRQTKTPIDECRKKIWLVDSQASAHASGTRKESLQHFKKPWAHEHEHVGNLLDAVNAIKPTVLIGTSGKGQTFTQEVVEAISSFNEMPIILALSNPTSQAECTAEQAYTWSKGRAVFATGSPFDPVEYNGKTHVPGQANNAYIFPGFGLGVVMSGAIRVHDDMLLAASEALAQQVTQENFDKGLIYPPFSNIRKISAHIAANVAARAYELGLASRRPRPKDLVKYAESCMYSPIYRNYR

SEQ ID NO: 1366 - protein, 483 aa, Bacillus sp. KSM-K16
MVQTYLNYIDGEWKPSISGNVFYGRNPANYEEILGAYQASTAEDARLAIKSAAAAFPNWKNKSAIERADVLYQLMPLLAAEKEKLAAIITKEVGKTMAAARKEVDASIQALKHFSGAANRLAGETVPAGNPETFAYTIKEPLGPVGVITPFNFPLGIGIYKIAPALIAGNTVVYKPHNDTVQIAARLVELFIEAGTPKGVLNLVTGDGDKVGQELGENRTLKAISFTGSSDVGLRLGRSVTNRGGKMQAEMGGKNATVILEDADLDKAVSGIVISGLLNNGQSCTGTSRVIVPKNIAKTVTSKLVEKATAIRVGDGFNENVENGPVANEAQLQKYLHYVDIAVKEGAKLECGGKRLFGEGKDKGYFVAPTVLSGVTPEMTIAQEEVFAPVVAIMEVDSFDEAIAVANQTDFGLSSAIYTTNLQKAHEFVRRVETGVTHINIPSNHYENQLPFGGKKNSSIGPREQGSTALDFWVDTKAVYLKP

SEQ ID NO: 1367 - protein, 436 aa, Arabidopsis thaliana
MPGHRSKSEKKDADKQLRRDPYEVLGVLRNSTDQEIKSAYRKLALKYHPDKTANDPVAADMFKEVTFSYNILSDPEKRRQFDSAGFEAVEAESQELELDLSSLGAVNTVFAALFSKLGVPIKTSVSATILEEALNGRVSVDPLVLGQAVSKKVEKQCAHFYAVTISEEEVSAGLVCRVESSSKSKFKLLYFDQEANSGLSLALQEDSKRTGKITSAGMYFLGFPVYRLDHTINSMAQAKDPETAFFKKLDGFQQCEVTELKAGTHVFAVYGDNFFKNVSYTIQVLCAAAFTQEKEDLRSVEAQILTKRAELAKFETEYREVLVQFTDMTSRYAQEMQSIDELLKQRNEIHSAYTTIPLMKRSSSKNRMRKSSFKKAAAKAPAPTEQEEEEEEEEEEEEESSRQKNKKPSTCDKSETLKKKSKWFNLHLKLDKKKPC

SEQ ID NO: 1368 - protein, 455 aa, Xanthomonas axonopodis pv. citri str. 306
MDPSVLKALQQLDAAHHLHPFNDNAALAQKGTRILTRGEGVYVWDADGNQLLDAFGGLWCVNVGYGRKELAQAAARQMEQLAYYNSFFQCTTEPTIQLAAKLAELAPGDLNHAFFANSGSEANDTILRLVRHFWAVQGQPQKRIFIGRHDGYHGTTMAGASLGGMRGMHQQGGLPIADIHHVAPPYHFGDGGEMDPEEYGLLAARRLEDKILELGPDNVAAFIGEPIMGATGVYIPPRSYWPEIERICRRYDVLLVADEVICGFGRTGEWFGAEYFGFQPDVMTLAKGITSGYIPLAAAMFNDRVAGVLKTQGGELAHGGTYAGHPVCAAVALENLRLLQDEGIVETARTQVAPYLAQRWAALGEHRLVGEARIAGLVGALELVPDKQRRGAYFPRRGRVGAMCRDFALRRGLILRATYDAMLLSPPLIITPAQVDELFDKAWAALDDTAQALGR

SEQ ID NO: 1369 - protein, 494 aa, Photorhabdus luminescens subsp. laumondii TTO1
MKRLHDIEKEMLPVESYKMLIGGQWVDSVSKATTKSYNPATGELLAEYASGNAEDVDLAVSAAKKAFHAWSQTSAIERQSALLKIADLLEAEQKRFAILESLDTGKPLNESLYMDLPASIDQFRYFAGVIRSHTDEASVLDTNTLSLVIREPIGVVGQVIPWNFPLLMAAWKLAPALAAGNTIVINPATLTSITLLELGRILDKVLPAGVVNIVTGRGSVVGQAILDHEDVEKVAFTGSTKVGYTVAEAAAKKLIPATLELGGKSANIIFPDANMKKAVKYAAKAILLNQGQACESGSRLFLHKDIHDEFLKSLKTEFESIQVGDPLEKETQMGSQVSQEQMEKILEYVEIAKKEGATIFTGGKRITEKGYDEGFFIQPTIITDVTNDMRVAREEIFGPVLAVIPFSEEEDVIRMANDSDYGLAGAVWTQDIDRALRVAKAVRTGRMWINTYHELPAHAPFGGYKKSGIGRETHKMMLDAYTQVKNIYIKTSEE

SEQ ID NO: 1370 - protein, 275 aa, Bacillus halodurans C-125
MELWYTEKQTEHFGITAKIKRTLHTEKTDFQQLDVIETEEFGNMLVLDGMVMTTEKDEFVYHEMVAHVPLFTHPNPKHVLVVGGGDGGVIREVLKHPSVEKATLVEIDGKVIEYSKKYLPSIATALNDPRVDVQVDDGFLHIAKAESAYDVIMVDSTEPVGPAVKLFEKGFYQGIAKALKEDGIFVAQTDNPWFHGELIRKVYADVQEIFPITRLYTANIPTYPSGLWTFTIGSKTYDPLHVEPSRFYDIETKYFTKDLHKAAFALPRFVDDLIK

SEQ ID NO: 1371 - protein, 170 aa, Zea mays
MAPTVMMASSATAVAPFQGLKSAASLPVARRSTRSLGNVSNGGRIRCMQVWPAYGNKKFETLSYLPPLSTDDLLKQVDYLLRNGWIPCLEFSKLGFVYRENSTSPCYYDGRYWTMWKLPMFGCTDATQVYKELQEAIAAYPDAFHRVIGFDNVRQTQCVSFIAYKPPGSE

SEQ ID NO: 1372 - protein, 474 aa, Rhodococcus ruber
MTAGHFTELYINGSWVASTSKTVIEVLNPATEEVIGTVPDGTAADVDAAVAAARAAFDGWASTPVDKRAQYLRAIAAGIADRSDELARTISAEMGAPLSFAQAMQVPLPINSFSHAAAVAESFPFERTEGSSVIVREPIGVVGAITPWNYPLHQIAAKVAYALAAGNTIVVKPSEVAPLNAWMLAEIIDAAGVPAGVFNLVSGTGPVVGEALASHHEVDMISFTGSTNAGKRVSELAAQTVKRVALELGGKSANIVLDDADIDELMPNAVQWAMINSGQTCSALTRLLVPRAILTEAETAAKTIAEAYTVGAPDDPDTTLGPLVSATQLKRVRGYIDRGVQEGATLITGGSEPVEGLAVGYYVKPTIFSEVTPDMTIHREEIFGPVLSIAPYDTEEDAVRIANDSEYGLRGGVWSRDVDRARAVAARMRTGQVMINGGEFNPNAPFGGYKQSGTGREFGTHGLEEFLEIKSLQF

SEQ ID NO: 1373 - protein, 179 aa, Glycine max
MDNKATILMQKYEVGHFLGQGNFAKVYHARNLKTGQSVAIKVFNKESVIKVGMKEQLKREISLMRLVRHPNIVQLHEVMASKTKIYFAMEMVKGGELFYKVSRGRLREDVARKYFQQLIDAVGHCHSRGVCHRDLKPENLLVDENGDLKVTDFGLSALVESRENDGLLHTICGTPAYVA

SEQ ID NO: 1374 - protein, 163 aa, Triticum aestivum
MSDTDEHHFESKADSGASKTYPQQAGAIRKGGHIVIKARPCKVVEVSTSKTGKHGHAKCHFVAIDIFNGKKLEDIVPSSHNCDVPHVDRQDYQLIDITDDGDRYVSLLTESGNTKDDLKLPTDDVLLGQIKTGFADGKDLILSVMSAMGEEQICAVKEIGGGK

SEQ ID NO: 1375 - protein, 470 aa, Novosphingobium aromaticivorans DSM 12444
MLFATLAAGEGLDVLNPATQQRIATVKAYSTEEIARLIEAADAARGAWAARTAKERSVVLRRWYDLVMSHQEDLAALVTAESGKPLAEARGEVAYGAAFIEWFAEEGKRAYGDTIPTFANGKRVLTIRQGVGTCAAITPWNFPVAMITRKVAPALAAGCAMVVKPAEATPLSALALETLAHEAGVPAEVFRVVPTDDPAGVGTLFCTHPQVRKLSFTGSTRVGQLLMEQAAANVTRLSLELGGNAPFIVFDDADLDAAVDGLMASKFRNAGQTCVCANRILVQDSVHDAFLAKVQERVAALVVGDGAQPGTTIGPLINEAAVKKVGALVADACEAGARVLAGGGKSPVGTGFFEPTILADVTPDMAVASAEIFGPVVPVIRFADEPQAIRIANDTPYGLAAYFYARDVGRIWRVMEALEYGMVGVNDGIISTEVAPFGGIKHSGLGREGSRHGLDEYLELKYCLMGGIDR

SEQ ID NO: 1376 - protein, 380 aa, Pichia angusta
MKGLLYYGTNDIRYSETVPEPEIKNPNDVKIKVSYCGICGTDLKEFTYSGGPVFFPKQGTKDKISGYELPLCPGHEFSGTVVEVGSGVTSVKPGDRVAVEATSHCSDRSRYKDTVAQDLGLCMACQSGSPNCCASLSFCGLGGASGGFAEYVVYGEDHMVKLPDSIPDDIGALVEPISVAWHAVERARFQPGQTALVLGGGPIGLATILALQGHHAGKIVCSEPALIRRQFAKELGAEVFDPSTCDDANAVLKAMVPENEGFHAAFDCSGVPQTFTTSIVATGPSGIAVNVAVWGDHPIGFMPMSLTYQEKYATGSMCYTVKDFQEVVKALEDGLISLDKARKMITGKVHLKDGVEKGFKQLIEHKENNVKILVTPNEVS

SEQ ID NO: 1377 - protein, 534 aa, Zea mays
MGNCCAAPSTEGSGKTRPKKQKENPYNVAYNRGAAAPPPPPARPGLVVLRDPTGRDLGAEYELGGELGRGEFGVTYLCTEPATGARYACKSISKRKLRTPVDVEDVRREVDIMRHMPPHPNIVSLRAAYEDRDAVHLVMELCEGGELFDRIVARGHYTERAAAAVMRTIVEVVQKCHRHGVMHRDLKPENFLYASKDSSPLKAIDFGLSVFFRPGERFTEIVGSPYYMAPEVLKRNYGPEVDVWSAGVILYILLCGVPPFWAETEQGVAQAIIRSVVDFKREPWPRVSEPAKDLVRRMLDPNPLTRFTAAQVLEHPWLHDSKNTPDVSLGDTVRARLQQFAAMNKLKKKALRVIAEHLSAEEVADIKQMFDKMDVNKNGKLTFEEFKAGLRKLGNQMHDSDLQILMDAADVDRNGTLDYEEFVTVSVHVRKIGNDEHIQKAFAYFDRNKSGYIEIEELREALADELDGSDEDIIGGIIRDVDTDKDGKIGYDEFAAMMKAGTDWRKASRQYSRQRFSNLSLKLQKDGSLGADTR

SEQ ID NO: 1378 - protein, 159 aa, Shewanella oneidensis MR-1
MRTLTKIIGGLVLLLSMVTTVMATPVDTYEFKSPENQKRALELAHSLRCPQCQNQNLIDSNSPVASDLRLEVFKMVDEGKGDDEIIEFMTSRYGEFVLYKPKMETKTYILWLGPVGLLLLGLIVGFIFIRKQRITGAAGLEISAEDQKALDALLKRDSK

SEQ ID NO: 1379 - protein, 279 aa, Klebsiella pneumoniae
MTTDSILLNDGYYMPRPGCGLWLIDNRDVDSLIRQALKAGFRHFDTAQAYFNEDGVGRALRYTEVPREQLFITSKIRGRDMGYARTLVSFNETLERLGVEYLELFLIHWPIPAKNLYVETWEASIELEASGLIRSIGVSNFTCQHIERLIEDTGVVPAVNQLELHPHFQQCDVRDYHHEAGIAIQSYSPFGSNGAAVLRNAVVMVLARRHDHSPAQIVLRWHLQQGLTPLPRTTNGARFSENVDVWDFELSEEEMKLLASLNTRTGNTQPLPDAMNMSF

SEQ ID NO: 1380 - protein, 80 aa, Brassica napus
STHASGYRDWRLRSQSCPFCRGSLKRVNSGDLWVYTSSREIVELPEIYKENVKRLLMYIDKLPLVARDHPTLVPYSPVPR

SEQ ID NO: 1381 - protein, 135 aa, Triticum aestivum
  misc_feature (31)..(31): Xaa can be any naturally occurring amino acid
  misc_feature (52)..(52): Xaa can be any naturally occurring amino acid
  misc_feature (73)..(73): Xaa can be any naturally occurring amino acid
  misc_feature (85)..(85): Xaa can be any naturally occurring amino acid
  misc_feature (98)..(98): Xaa can be any naturally occurring amino acid
  misc_feature (112)..(112): Xaa can be any naturally occurring amino acid
MSDTDEHHFESKADSGASKTYPQQAGAIRKXVGHIVIKARPCKVVEVSTSKXLGKHGHAKCHFVAIDIFNGKXNLEDIVPSSHNXDVPHVDRQDYQLXIDITDDGYVSLLTXDGNTKDDLKLPPDDVLLGQIKTD

SEQ ID NO: 1382 - protein, 337 aa, Triticum aestivum
IIFDSVLGEGGFGMVYKGWVDEKTMQSTKSGTGMVVAVKKLNSESMQGYEEWQSEINFLGRLSHPNLVKLLGYCWEDKELLLVYEFMAKGSLENHLFRKGCAPLSWELRLKIAIGAARGLAFLHASEKQVIYRDFKASNILLDASYNAKLSDFGLAKLGPTGSNSHITTRVMGTYGYAAPEYVATGHLYVKSDVYGFGVVMLEMLSGKRARGPNRPNGQQSLVDWAKPYLADRRKLARLMDPQFEGQYNSKQSHQAAQLTLNCLAGEPRSRPSMKEVLEPLEQIEALKSRTREARGGSGTSSRDRGPRTLCCSAPTVVATWRQRCAPWFEGHQRPRH

SEQ ID NO: 1383 - protein, 152 aa, Oryza sativa (japonica cultivar-group)
MMWIQSMLYFAFYCTGKPLEMLLDRGTSKPDKYLKAKSDSDGAGLLILDPYGGKMVHVAPVVMSFPHRQALYNIQYYGFWSKSRAATEKHMGWIRGLYGEMEPYVSKNPRGGAAAIAAVTGSLAVCRSWRGGIWLQGQSCHFENFPPLLSRK

SEQ ID NO: 1384 - protein, 447 aa, Anabaena variabilis ATCC 29413
MSEQKIDAQGVNVIQDQSLVSSVITDFGNLIKGNTLGIIQPHNIEEISSAIEFAKQQNSRLKARGKGYTQSGQSVAQDAFTLDLTRLNHISKVDTVTQAIATEAGATWQDIVTTTMKFGMLPCVLPLNLEQTVGGLLSTGGIGSTSKTYGPVVANVIDLHIITGNGEHIQCSRTQAPELYHAVLGGLGGCGIIASATLALRKTKKYIRTFHLLYDSLKAWMDDHVLLSRNHQIEHLEGFCWTSAKGIRQTTNGKSFFAHWLYGLQVGIEYDEAAPSVSDVLQNLNYWQLFHTEDEETVSHVFRYQPRFEVMRASGGWNQAHPWIECFISAEALTEILPEILDMLPLSLGDGHRAIMVASDNLPSLFMMPPAKNILCFAILPMAVPVGDTKTFDVLAKVSQILLSAGGKRYLSGWLGKSDFDWQQHYGTSYETWETMKQRYDPSHILG

SEQ ID NO: 1385 - protein, 477 aa, Acinetobacter sp. ADP1
MNQLIWFRNDLRLNDHAALWHATQAGSTIAFVALSPLQWQQHDDAIIKIDFYMRQLTQLKQELNTINIPLIVQIIPLWKDIATEIISISDRYHIQDVYANIETGINEIERDHAVQEALSKIGKNLILFHDKTLFPLGSIRNKSQAPYQVFTPFKKTCYERLNIDIPKCFPYPHKQKQQPEIAKKEAAIPSLKQLGYSQIDQHIQNEWPIGETFALNLLEDFTQDKINRYHESRDYPAQDGTSHISAYLTIGILSIRQCIQAIFQKQHGQFFLNNKGQEIWLNELLWREFYQQLLFDFPKLSRHQPFQDHTKNIPWNENDEHFEAWIQGKTGIPIVDAGMRQLKATGWMHNRVRMICAMFLSKNLLIDWRKGEKWFMQHLIDGDLAANDGGWQWSASTGTDASPYFRIFNPVTQSQKFDPEGVFLKKWIPELKHLDSKHIHDPYAYQHKTELNYPKPIIDLKATRKNAIEVFKKSSSL

SEQ ID NO: 1386 - protein, 90 aa, Triticum aestivum
  misc_feature (24)..(24): Xaa can be any naturally occurring amino acid
  misc_feature (31)..(32): Xaa can be any naturally occurring amino acid
  misc_feature (44)..(44): Xaa can be any naturally occurring amino acid
  misc_feature (52)..(53): Xaa can be any naturally occurring amino acid
MSDTDEHHFESKADSGASKTYPQXAGAIRKXXHIGIKARPCKVXVEVSTSKXXKHVFVLWGGGLKLGYPLSSKLSPCSPNCCPSPAVPLF

SEQ ID NO: 1387 - protein, 74 aa, Triticum aestivum
MPFVPSCVQCGTRSNPCRCKVVGPTLGFVAFVVTGVVEWPLGAAVYLFRHRKGRRIMGHPARVVYPRVTRAIPI

SEQ ID NO: 1388 - protein, 414 aa, Arabidopsis thaliana
MATHSSRSENKDAGEEDELRRRNPYEVLGIPSNSTDQEIKSAYRRMALRYHPDKNPDDPVAADMFKEVTFAYEVLSDPENRRLYDTTGSEAVGPENEDLELDLSSLGAVNTIFAALFNKLGVQIKTTVSANLLGEALNGTVTTLPLMVGQVVSRKVEKQSAHFYSVTLTEEEAQDGLICKVHSSAKNKFKLLYFDQVENGGLSLALQEDSRKTGKLSTAGLYFFGFPVYRFDHRVNSRALSRDPETGFFKRLDAFQPFEITELKAGSHVFAVYGDNFFKSVSYTLEIFSSAPFGNEKESLRSTEAQIVSKRTELLKFESEYHEVFAQFTEMASKCTGEVQEIDELLKRRNEICAAYTIFPPTKQGSSKSRSWSKKKSSLLMEPREEGEVAVREEGGVKKKKWYNIQLRQDKKKN

SEQ ID NO: 1389 - protein, 162 aa, Oryza sativa (japonica cultivar-group)
MSDSEEHHFESKADAGASKTYPQQAGTIRKNGYIVIKNRPCKVVEVSTSKTGKHGHAKCHFVGIDIFNGKKLEDIVPSSHNCDVPHVDRTDYQLIDISEDGFVSLLTESGNTKDDLRLPTDDTLTNQIKNGFGEEGKDMILTVMSAMGEEQICAVKEIGAKN

SEQ ID NO: 1390 - protein, 1320 aa, Emericella nidulans
MGKTSAKDVAELKDYQLGDCLGRGAFGSVYRALNWNTGETVAVKQIKLADLPKSELRVIMLEIDLLKNLDHPNIVKYQGFVKSAETLNIILEYCENGSLHSIAKNFGRFPETLVGVYMSQVLHGLLYLHDQGVIHRDIKGANILTTKEGLVKLADFGVASRTTGLSESSVVGTPYWMAPEVIELSGATTASDIWSLGCTVIELLEGKPPYYNLQPMPALFRIVNDDHPPLPQGASPAVKDFLMQCFQKDPNLRVSARKLLKHPWIVNARRSDSVVPKKSTEYEEAVKSVQEWNEALRSPESNALRRGTRNENQNPPSLRLDTRHTPTKVTLPSPVSRIVADKFSSPSSGEEDNWDDDFATAISPSALQLPHLRPHDNFGGMLSSEKLKAFASLDGTVLKSDESFEESDDPFKGSLLAGEHDPLKTIRPPPSQQANSGTSQSQNGPYGAHMRRGPPLNTAITPVYGGQMLQNSSSPIRQQRPPLFYKENSVEDYSDLISANEDVLDRKISAFQVGPTLRTPEGSDHAADVHQESDEHKDLADTGRSREVIRYQSSYEQEDTPRIGRQISVKRYRGTVEIQQFAENEHDEDFSDILGVDGVTLDKAESDDGSNKSTLMLNTKLSNNSWLGDLDDEDDPFALLEEGLDETDLEANIARDKHARLRSQVEGLVGSLKTSQDEEVLGDISEQLLAVFCDFPETKNIIISAHGMLPILEILDLCRRRDITLCLLKIVNAIIYDDYEIQENLCFVGGIPIINEFAAKKYPREIRLEAAAFVQQMYQTSTLTLQMFVSAGGLNVLVEFLEDDYEDERDLVLVGVNGIWSVFELQGSTPKNDFCRILSRSSVLDPLSLVLSRVLDEEGELAEVVEGRIANIFFIFSQAENHVKEMVSERTVLHRVLKELKRMTPAHQITMLKFIKNLSMLSTTLDSLQNSNAIDVLTDLLRSTIKRPHFREVSNQILNTIYNMCRLNKSRQEDAALNGIVPLLQKIVKTERPLKEFALPILCDMAHSGKVGRRELWRNKGLAFYISLLSDPYWQVTALDAIFIWLQEETAKVEEHLLENRYDQPSFTDAIVRCLTLSKANAFENILEPLQKLLRLSPPIASTLARPDLFSRLGQKLHHSKAAVRLNLLRIISSICDSSEQQGGLLASYGLLDSIRELEHDPAILVRDMAGKLIQSSERNDSYGLCKLKPNVRRGSTSATSPGLLANQSAPVTPQLSRQNQSKGYYDSRETQRRPRSAISGSALALRPGSRDGPTPGIVGGANGSAGASRNRIARGVSNRLSHIELLPNDDDRIPSSITRRSSVLPRRRRLTQFEAERGS

SEQ ID NO: 1391 - protein, 86 aa, Zea mays
  misc_feature (35)..(35): Xaa can be any naturally occurring amino acid
  misc_feature (49)..(49): Xaa can be any naturally occurring amino acid
  misc_feature (51)..(51): Xaa can be any naturally occurring amino acid
MTSASELFSTRRSRPGRSDPALKSDTSSYRHHSHXHHHRRHGVHHHNQXHXSDGLRSSPGPTYPHPGGGGQRNTLIVRINDPGNLP

SEQ ID NO: 1392 - protein, 277 aa, Bacillus cereus G9241
MNLTSLKDYTTLHNGVKMPWFGLGVFKVEDGSEVIESVKAAIKNGYRSIDTAAIYQNEEGVGQAIRESGISREELFITSKVWNSDQGYETTLQAFETTLEKLGLEYLDLYLVHWPVKGKYTESWKALEKLYKDGRVRAIGVSNFHIHHLQDVFEIAEIKPMVNQVEYHPRLAQEELHAFCKEHNIQLEAWSPLMQGQLLDNPTLQDIATKYNKSTAQIILRWDLQNEVVTIPKSIKEHRIIENANIFDFELSADDMKAIQALNEDRRVGPDPDNFNF

SEQ ID NO: 1393 - protein, 436 aa, Acinetobacter sp. ADP1
MSFVAYIYSPVTKGSTCTMGYQKIVVPVDGDRIKVNADLSLNVPNHPIIPFIEGDGIGVDITPAMKAVVDAAIVKAYGGKRSIEWMEVYCGEKANTIYGSYMPEETFEALREFVISIKGPLTTPVGGGIRSLNVALRQELDLYVCVRPVRWFEGVPSPVQHPELTDMVIFRENSEDIYAGIEWKADSPEAKKVIQFLQEEMGVQKIRFPEHCGIGIKPVSKEGTQRLVRKAIQFAIDNDKPSVTLVHKGNIMKYTEGAFKEWGYELAIERFGGELIDGGPWVQIKNPKTGKDIVIKDVIADAFLQQILMRPADYSVIATLNLNGDYISDALAAEVGGIGIAPGANIGGAIAVYEATHGTAPKYAGQDKVNPGSIILSAEMMLRDMGWTEAADLIIKGISGAIEAKTVTYDFERLMPGATLLTCSEFGQAIIKHMDD

SEQ ID NO: 1394 - protein, 468 aa, Mesorhizobium loti MAFF303099
MRLSNLGTEQLREKDRSFVFHPSTHLAKHSRGETPNRIMAGAEGVYIWDTEGRKSLDGFGGLYCVNMGYGCTEIAEAIARQAHELPFAHVYASQGTEPVALLAEAVVEYFGQNMRRVFFGLSGSDANETNIKLVWYYNNILGRPEKKKIISRHRGYHGSGLVTGSLTGLAFFHNFFDLPLDLVRHTTTPHHYRQAHDGESEQAFSTRCADELEGLILAEGPETVAAFIGEPVLGTGGIVPPPKGYWTAIQGVLDKYDILLIADEVVCGFGRTGEQFGSHLYGMRPDFVTIAKGLSSAYLPISGSIIGDRVWSVLEQGTEKHGALGHGWTYSGHTLCAAAALANIRLLKERNILEHVRDVGPYWHARMNAELAGHPIVGEVRGVGILAAVELMRDPKQRIPFESDLQVGVRAAAALFENGVIGRAMPHGDILGFAPPLIITRKEIDIIVDATAKSVETTYRALKAEGAI

SEQ ID NO: 1395 - protein, 281 aa, Arabidopsis thaliana
MVLTHNVLAVTFGVLGNIISFIVFLAPVPTFVRICKKKSIEGFESLPYVSALFSAMLWIYYALQKDGAGFLLITINAVGCFIETIYIILFITYANKKARISTLKVLGLLNFLGFAAIILVCELLTKGSNREKVLGGICVGFSVCVFAAPLSIMRVVIRTKSVEFMPFSLSLFLTISAITWLFYGLAIKDFYVALPNILGAFLGAVQMILYVIFKYYKTPLVVDETEKPKTVSDHSINMVKLSSTPASGDLTVQPQTNPDVSHPIKTHGGDLEDQMDKKMPN

SEQ ID NO: 1396 - protein, 423 aa, Arabidopsis thaliana
MDRISGLPDELLLRVLSLLPNVKDVVVTMVLSKRWQFLWMMVPKLVYDDSYQNLEYGKFSRFVDRSLFMRKAPGIETLHFKLGQNCGNGDIQWWIRAASKFCFRELIIEINCSTSASPSILPRSLYTECRMLVTLKLKKAVLVDVSSPTCFPSLKNLSLVSVKYPGNEFVKSLLSSCHVLEDLVVEQCINDNVTIFSVKVPSLKSLVLRTSKERAPDGESGFVVEAPSLEYLDIDQTGGFCVIENGMPNLAEAYVSVLHHHPVKFLSSITSVKRLYLCLLPHSILSCMQDMYPIRCVFHRLVHITLCTCDDEWLNLLACLLKGSPKLISLKLEKVIFQFIQCLMYRLSQHHGHLICSPSPLRDDLSSVPECVLSSLETVEWVDYEGTEAERQLVEFILRNGSCLKKFVISPESVNPDKKYEMI

SEQ ID NO: 1397 - protein, 267 aa, Escherichia coli O157:H7 EDL933
MAIPAFGLGTFRLKDDVVISSVKTALELGYRAIDTAQIYDNEAAVGLAIAESGVPRHELYITTKIWIENLSKDKLIPSLKESLQKLRTDYVDLTLIHWPSPNDEVSVEEFMQALLEAKKEGLTREIGISNFTIPLMEKAIAAVGAENIATNQIELSPYLQNRKVVAWAKQHGIHITSYMTLAYGKALKDEVIARIAAKHNATPAQVILAWAMGEGYSVIPSSTKRENLESNLKAQNLQLDAEDKKAIAALDCNDRLVSPEGLAPEWD

SEQ ID NO: 1398 - protein, 395 aa, Arabidopsis thaliana
MALFLSPKTITLLFFSLSLALYCSIDPFHHCAISDFPNFVSHEVISPRPDEVPWERDSQNSLQKSKILFFNQIQGPESVAFDSLGRGPYTGVADGRVLFWDGEKWIDFAYTSSNRSEICDPKPSALSYLRNEHICGRPLGLRFDKRTGDLYIADAYMGLLKVGPEGGLATPLVTEAEGVPLGFTNDLDIADDGTVYFTDSSISYQRRNFLQLVFSGDNTGRVLKYDPVAKKAVVLVSNLQFPNGVSISRDGSFFVFCEGDIGSLRRYWLKGEKAGTTDVFAYLPGHPDNVRTNQKGEFWVALHCRRNYYSYLMARYPKLRMFILRLPITARTHYSFQIGLRPHGLVVKYSPEGKLMHVLEDSEGKVVRSVSEVEEKDGKLWMGSVLMNFVAVYDL

SEQ ID NO: 1399 - protein, 460 aa, Saccharomyces cerevisiae
MPINAITSDHVIINGANKPATIVYSTESGTILDVLEGSVVMEKTEITKYEIHTLENVSPCTILPGLVDSHVHLNEPGRTSWEGFETGTQAAISGGVTTVVDMPLNAIPPTTNVENFRIKLEAAEGQMWCDVGFWGGLVPHNLPDLIPLVKAGVRGFKGFLLDSGVEEFPPIGKEYIEEALKVLAEEDTMMMFHAELPKAHEDQQQPEQSHREYSSFLSSRPDSFEIDAINLILECLRARNGPVPPVHIVHLASMKAIPLIRKARASGLPVTTETCFHYLCIAAEQIPDGATYFKCCPPIRSESNRQGLWDALREGVIGSVVSDHSPCTPELKNLQKGDFFDSWGGIASVGLGLPLMFTQGCSLVDIVTWCCKNTSHQVGLSHQKGTIAPGYDADLVVFDTASKHKISNSSVYFKNKLTAYNGMTVKGTVLKTILRGQVVYTNANGVSKTPLGQTLLDSRR

SEQ ID NO: 1400 - protein, 245 aa, Zea mays
LQISTMFTHHQKIVVVDHELPNEGSQQRRIVSFVGGIDLCDGRYDTQYHSLFRTLDTVHHDDFHQPNFEGGSIKKGGPREPWHDIHSRLEGPIAWDVLYNFEQRWRKQGGKDLLVRLRDLSDIIIPPSPVMFPEDRDTWNVQLFRSIDGGAAFGFPETPDEAARAGLVSGKDQIIDRSIQDAYINAIRRAKNFIYIENQYFLGSSYDWKPEGIKPEDIDCLHLIPKELSLKIVSKIEAGERFTVY

SEQ ID NO: 1401 - protein, 308 aa, Triticum aestivum
MKTLLILTILAMATTIATANMQVDPSSRVQWPQERPFPQSQQPFSQQPQQIFPQPQQTFPHQPQQAFPQPQQTFPHRPQQQFPQPQQPQQPFPQPQQPQLPFPRQPQQPFPQPQQPQQPFPQSQQPQQPFPQPQQQFPQPQQPQQSFPQQQQLMIQSFLQQQMNPCKNFLLQQCNPMSLVSSLVSIILPRSDCQVMQQQCCQQLAQIPQQLQCAAIHSVAHSIIMQQEQQQGVQILRPLFQLAQGLGIIQPQQPAQLEGIRSLVLKTLPTMCNVYVPPDCSTINVPYASIDAGHWWPMKNARVMLIGR

SEQ ID NO: 1402 - protein, 498 aa, Yersinia pestis KIM
MSEYHEKNNALFKSITALDGALFINGEFRKGAGGRLPVENPATGKVIGHLAAATPEEIEEAVAAARRAFPAWAAERPKARANALHRLGDLIAGDALNMARNMTIEQGKPVNEAQGEILKLAEICHFYGEEATRVQGDVVPNDPPGFQSLVVREPVGVVGAITPWNYPAELVGWKLCASLAAGCTLIIKPAELTPYTALAIAEKCLEAGIPAGVVNVLTGKGEQVGQALVEHPQVDKIAFTGSSAVGLHIQQSCPQVKRLSLELGGNGPMVVTACADVAAAVKGAVRRSFRNCGQVCIAINRIYVHRSCYRAFVSKMGVATNGLRLGNGLDDPAADLGAMASVEPLNKTRAHLEDALAKGARLVAGGKAPEGVEYAKGHFFRPTVLADCTHQMRVMTEETFGPLVGLAPFDDIDEVISRANDTPYGLAAYVYARDLAAIHRLSAALDYGNVAINNVDASMMNAPYGGRKQSGVGYEHGREGLLEYFNFKHIRLYHGIGD

SEQ ID NO: 1403 - protein, 447 aa, Triticum aestivum
MAASVREGAAAAAAAGHAADDYDVSDGEMDVDVEAGSELQRAGDDRRDGDGDGDDEYALLTRITDTSAAEARAGKDIQGIPWERLQITRQDYRKARLEQYKNYENFPQSGELMDKLCKQVESSSKYYEFQYNTRIVKPSILHFQLRNLLWATSKHDVYFMSNSTVGHWSSLSHKMTDVLDFSGHVAPAKKHPGCALEGFTGVQVSTLAVNEGLLVAGGLQGELVCKSLGERDVKFCTRTTLSDNAITNAMDIHRSTSGSLRITVSNNDSGVREFDMERFQLLNHFRFNWPVNHTSVSPDKKLLAVVGDDRDALLVDSRNGKVTSTLVGHLDYSFASAWHPDGVTFATGNQDKTCRVWDIRNPSTSLAVLRGNIGAIRCIRYSSDGRFLLFSEPADFVHVYSAAECYRKRQEIDFFGEISGISLSPDDESLFVGVCDRVYASLLNYRM

SEQ ID NO: 1404 - protein, 196 aa, Sulfolobus tokodaii str. 7
MAHGPNYRVKYRRRREGKTNYYKRYTYVINNTTRLVVRLTNKYIIAQIAKFNPKGDVIVVAAHSMELAKKFGWKGDLNNTPAAYLTGYLLGVRALKAGIKEAVADIGLFVPVKGSRIFTAIKGAIDAGLSIPVGDLGIKEDRIKGVHIASYAQKLEAENPELFKRLFSKYLERGLHPKDLPSHFEEILNKIKSGGA

SEQ ID NO: 1405 - protein, 294 aa, Arabidopsis thaliana
MKRRKRGRGIVNADRISQLPEALIIQILSLLPTEVAVTTSVLSKQWQFLWKMLPKLNFDSLDQRHEFKTFSKNVKRALLSHKAPVLHSLHLIVHLHLCNSMNTAKLIGIAFACNLRKLVLEVDGGRFSIPESLYNCETLDTLELKYSILMDVPSSICLKSLRTLHLHYVDFKDNESALNLLSGCPNLENLVVHRYPFSSVKTYTIAVSSLKRLTIYTSSTVDPRAGYVINSPSLTYLKIVGQIGFCLIENVPELVEASMIVSSQIINKNLLESLTSVKRLFLEFSPLMVDFLAN

SEQ ID NO: 1406 - protein, 250 aa, Capsicum annuum
MGKCYPTVSEEYLKAVDKCKRKLRGLIAEKNCAPLMLRLAWHSAGTYDVCSKTGGPFGTMRFKTEQSHGANNGIDIALRLLEPLGEQFPIVSYADFYQLAGVVAVEVTGGPDVPFHPGREDKPEPPVEGRLPDATKGSDHLRDVFVKQMGLSDQDIVALSGGHTLGRCHKERSGFEGPWTANPLIFDNSYFKELLGGEKEGLLQLPSDKALLSDPAFRPLVEKYAADEDAFFADYAEAHLKLSELGFAEA

SEQ ID NO: 1407 - protein, 373 aa, Arabidopsis thaliana
MGYLFEETLSSNPKTPIVVDDDNELGLMAVRLANAAAFPMVLKASLELGVFDTLYAEASRTDSFLSPSEIASKLPTTPRNPGAPVLLDRMLRLLASYSMVKCEKVSVGKGERVYRAEPICRFFLKNNIQDIGSLASQVIVNFDSVFLNTWAQLKDVVLEGGDAFGRAHGGMKLFDYMGTDERFSKLFNQTGFTIAVVKKALEVYQGFKGVNVLVDVGGGVGNTLGVVTSKYPNIKGINFDLTCALAQAPSYPGVEHVAGDMFVDVPTGDAMILKRILHDWTDEDCVKILKNCWKSLPENGKVVVIELVIPDEAENGDINANIAFDMDMLMFTQCSGGKERSRAEFEALAAASCFTHCKFVCQAYHCWIIEFCK

SEQ ID NO: 1408 - protein, 208 aa, Brassica napus
MTEESPEEDHKSPEGAETNLGSSSLKNNNINNKEQDRFLPIANVGRIMKKVLPGNGKISKDAKETVQECVSEFISFVTGEASDKCQREKRKTINGDDIIWAITTLGFEDYVAPLKIYLGKYRETEGEKVNSPKQRHQQQQPQHNHHFQFQEQDHNNISCTSYISQHHPSPFLPADHQPFPNLPFSPKSLQNQFPQQNDNTDSMGQWSV

SEQ ID NO: 1409 - protein, 377 aa, Yersinia pestis KIM
MPAQNPLQHQRQHDGIYHIGYFVGGKWSQAQEQFDVYNPATGELVARVAKSGKQETEAAIKAASEAFPAWRKTPAKQRAEILQRWYLLIMEHQQSLAELMVSEQGKPLKEALVEVAYAASFIQWFSEQAKRANGEIIPSAKEGARILATREPIGVVAAITPWNFPLAMLTRKLGPALAAGCTGLIKPANNTPLSAFALLALAEQAGVPAGVLNGVVGDTHAISDAIMASSDVRKISFTGSTNVGKTLMRNAAATMKRISMELGGNAPYIVFDDADLEAAVAGAMACKFRNAGQVCVCVNRFYIQDAIYDEFVNRLAAEVKKLKVGNGMDKDVNMGPLINLAGLEKVEEHVKDALEKGGRLLAGGIAMRWAVISSSQR

SEQ ID NO: 1410 - protein, 426 aa, Thermus aquaticus
MILIRNVRLVDAMGERGPLDVLIGEGRILSLEGGEAKQVVDGTGCFLAPGFLDLHAHLREPGEEVKEDLFSGLLAAVRGGYTDLVSMPNTNPPVDTPEAVRALKEKAKALGLARLHPAAALTEKQEGKTLTPAGLLQEAGAVLLTDDGRTNEDAGVLAAGLLMAAPLGLPVAVHAEDAGLRRNGVMNDGPLADLLGLPGNPPEAEAARIARDLEVLRYALRRSPATPRLHVQHLSTKRGLELVREAKRAGLPVTAEATPHHLTLTEEALRTFDPLFKVAPPLRGEEDREALLEGLLDGTLDAIATDHAPHTQAEKEMDLLRAPFGIPSLEVAFPLLYTELHLKRGFPLRRLVELFTDGPRRVLGLPPLHLEEGTEASLVLLDPKERPVDPQGFASKARFSPWTGWRLGGWPVLTLVEGRIVHEALE

SEQ ID NO: 1411 - protein, 315 aa, Mycobacterium avium subsp. paratuberculosis str. k10
MGPRDVLVRMRACGICGSDAFYISIGGVPPRQGHTPLGHEPAGEVVEVGAEVTGLAVGDHVVINPMAAPSGIIGNGGASGALADYLLIENAVRGTSLEVIPDHIPWEVAALNEPMAVARHGVNRCQPRPTDKVVVFGAGPIGLGATLAFKSLGVQHIVVIDLIPGRLDKAVRIGADAVVNSAEEDVAARLVELHGSGESMFPGKAGTDIYLDAAGAPAVVSTALAAAKKGATLGIVGVHKEPVPVDLINVMSNEITIVGSMGYPDEIFEVTGDLVRNWEKYALIVSHTIPFDRVGEALELARTPGAADKVVVTFC

SEQ ID NO: 1412 - protein, 326 aa, Bartonella henselae subsp. arupensis
DGDKGILLYRGYPIEQLAEKGDFLESCYLLLYGELPTKQEKSDFDRCIMQHTMVHEQFARFFHGFRRDSHPMAVMVACLGAMSAFYHDSIDITDPQQRMIASVRLISKVPTLAAMAYKYSIGQAFVYPRNDLSYAANFLRMCFSVPCEEYKTNPVLTRAMDRIFILHADHEQNASTSTVRLAGSSGANPFACIAAGVACLWGPAHGGANEACLKMLQEIGSVKRIPEFIARAKDKNDPFRLMGFGHRVYKNYDPRAKIMQKTCHEVLKELNIQDDPLLDIAIELEKIALNDEYFVEKKLYPNVDFYSGITLKALGFPTEMFTVLFE

SEQ ID NO: 1413 - protein, 112 aa, Zea mays
MASALSFFTCLVLTVCIVASVDAAISCGTVTSNLAPCAVYLMKGGPVPAPCCAGVSKLNSMAKTTPDRQQACKCLKTAAKNVNPSLASSLPGKCGVSIPYPISMSTNCDTVK

SEQ ID NO: 1414 - protein, 367 aa, Lentinula edodes
MDDRTTAFIVGSSYQPLDIIGEGAYGVVCSAVHIQSQRKVAIKRITPFDHSMFCLRTLREIKLLRHFQHENIIGILDILKPNLGPDGSLDGMTEVYLVQELMETDLHRVIKTQELSDDHCQYFIYQTLRALKALHSADVLHRDLKPSNLLLNANCDLKLCDFGLARSASPLPDHPVDASTFMTEYVATRWYRAPEVMLTFKQYTKAIDKWSLGCVLAEMLSGKPLFPGRDYHHQLSLILDVLGTPTLDDFYAISSSRSREYIRALPFRKKKVFGKPVHEGGVKGFEGKNPLAIDLMEKCLSFNPKRRIDVEGALAHPYLAPYHDPSDEPGAERIDSEFWSFDTFNNGKGLSKEELKVLIYEEVMRGA

SEQ ID NO: 1415 - protein, 246 aa, Triticum aestivum
KAATLRRAATYEAGTAAPKGAPYPGTTESPELRWALIRKVYVVLCLQLLLTAVVAVVFVKVRSIPHFFASSYVGLGLYIFILIFPFIVMCPLHFYRQKHPVNLLLLGVFTVAISFSVGLTCAFTSGKVILEAGILTIVVVLSLTAYTFWAARRGKDFSFLGPFLFACLMILLVFGFIQIFFPLGKLSHMIYGALAALIFIGYIVYDTGNIIKRYKYDEYVWAAVTLYLDIINLFLGLMTLFRAGDS

SEQ ID NO: 1416 - protein, 342 aa, Corynebacterium diphtheriae NCTC 13129
MRIATLTSGGDCPGLNAVIRGIVRTCSEYGSTVVGYQDGWVGLMEDKRIQLYDDENIDRILLRGGTILGTGRLHPDKFKSGLDQIKANLEDAGIDALIPIGGEGTLKGAKWLSDNGIPVVGVPKTIDNDVNGTDYTFGFDTAVSVATDAIDRLHTTAESHNRVMIVEVMGRHVGWIALHAGMAGGAHYTVIPEQPFDIAEICKAMERRFQMGEKYGIIVVAEGALPKEGTMDFVEGGVDQFGHQTFNGIGQVIGEEIKKRLGHDVRTTVLGHIQRGGTPTSYDRVLATRYGVHAARACHNGDYGKMVALHGEHIDLIPLEDAVDTLKTVPEGRYRTARALFG

SEQ ID NO: 1417 - protein, 118 aa, Glycine max
MAISMISSRADTTVNRAGAGMVATFTGLKFMAGLPTRKTNNDITSIASNGGRVQCMQVWPPIVKNKFETLSYLPDLDDSQLAKEVEYLIMKRWIPCLEFELEHGFEYREHNRSPGYYD

SEQ ID NO: 1418 - protein, 450 aa, Xanthomonas axonopodis pv. citri str. 306
MPDHLPSDAADALQAPTQLDAFWMPFTANRQFKARPRLLASAQGMYYRDVQGRQILDGTAGLWCCNAGHSRERIVAAIRDQAGTLDFAPTFQMGSPLPFVLAQRLAAIAPPGLGHVFFTNSGSEAVDSAMKIVLAYHRLRGEGQRTRFIGREKAYHGVGFGGMSIGGLPNNRKWFGPLLAGTDHLPHTLDLQHNAYARGLPVHGAELADDLERLITLHDASTIAAVFVEPVSGSAGVILPPEGYLQRLRAICDRHGIVLVFDEVITGFGRVGDAFAAQRFGVIPDIITAAKGLTSGTVPMGAVLVADAIHDAFMHGPQNAIELFHGYTYSGHPLACAAAIATLDTYAEEELFTRAITLGPQWEDALHGLRGSPHVIDIRNIGLIGAIELAPRDGAPGARGYDVFERCFHEGGLLVRVTGDVIALSPPLIVTPEQIGQMVETLGKILRQVD

SEQ ID NO: 1419 - protein, 353 aa, Burkholderia cepacia R18194
MTAVVCHGPEDYRVEQVAKPRPGANELVIRIAACGICASDCKCYTGAKMFWGGPSPWVKAPVIPGHEFFGYVEALGDGAAEHFGVAVGDRVIAEQIVPCGKCRYCKSGQYWMCEVHNIFGFQREVADGGMAEYMRIPPTAIVHRIPLGVSLEDAAIIEPLSCAIHTVNRGDVQLDDVVVIAGAGPLGLMMTQVAHLKTPKKLVVIDLIDERLELAREYGADVTINPKRDDAREIVRSLTDGYGCDVYIETTGAPVGVSQGLDLIRKLGRFVEFSVFGEDATVDWSIIGDRKELDVRGAHLGPYCYPIAIDLLARGLVTSKGIVTHDFALEDWDDAIRVAKSPESIKVLLKPAR

SEQ ID NO: 1420 - protein, 458 aa, Aspergillus nidulans FGSC A4
MPFHADIPQFQPTNDDIERTQAEKKHKETPTMAVDEQKAESVPYRQDVFGDEEHAEVKYKVLKWWQCGLLMVAETISLGILSIPAAIAGLGLVPAIVILLVMGLIASYTGYVIGQFKWRYPHVVSMADAGEVLMGRFGREVLFGGQMLFLIFLMASHILTFTVAMNRLTNHGTCSLVFGVIGLLVSLVFSLPRTMKNMSWLSLASFISIFTAVMIAMVAIGVEHPGGPVKATAETNLVTGFTAALNIILSYASHNAFFNVIAELKEPRDFPKALTLLQCIDITLYLVSGVVIYYFAGDDVKSPALGSINPLVSKVAYGVALPTIIIAGVINGHIACKSIYTRVFAGTSHMHKQDFRAVGSWIGIAVGLWVIAWVVATAIPVFSNLLSLMTALFASWFSFSLPAAFWLFMNRGLWFSSPRKTGITIFNCLVFGMGVVMSLGTILLACICVSSGNGKSSS

SEQ ID NO: 1421 - protein, 170 aa, Fusarium oxysporum f. sp. lycopersici
MSESTSTQKVWLASNDSATIEVDRVVAERSMLIKNMLEDIGDEGINAENPIPIPNVNEAVLRKVIEWCDHHRNDPLQAQDDDSDARKKTTDIEEWDQKFMQVDQEMLFEIILASNYLDIKPLLDVGCKTVANMIKGKSPEEIRKTFNITNDFTPEEEEQIRRENEWAEDR

SEQ ID NO: 1422 - protein, 339 aa, Escherichia coli K12
MKSILIEKPNQLAIVEREIPTPSAGEVRVKVKLAGICGSDSHIYRGHNPFAKYPRVIGHEFFGVIDAVGEGVESARVGERVAVDPVVSCGHCYPCSIGKPNVCTTLAVLGVHADGGFSEYAVVPAKNAWKIPEAVADQYAVMIEPFTIAANVTGHGQPTENDTVLVYGAGPIGLTIVQVLKGVYNVKNVIVADRIDERLEKAKESGADWAINNSQTPLGEIFTEKGIKPTLIIDAACHPSILKEAVTLASPAARIVLMGFSSEPSEVIQQGITGKELSIFSSRLNANKFPIVIDWLSKGLIKPEKLITHTFDFQHVADAISLFEQDQKHCCKVLLTFSE

SEQ ID NO: 1423 - protein, 154 aa, Triticum aestivum
  misc_feature (127)..(127): Xaa can be any naturally occurring amino acid
  misc_feature (140)..(140): Xaa can be any naturally occurring amino acid
MAPTVMASSATSVAPFQGLKSTAGLPVSRRSNGASLGSVSNGGRIRCMQVWPIEGIKKFETLSYLPPLSTEALLKQVDYLIRSKWVPCLEFSKVGFIFREHNASPGYYDGRYWTMWKLPMFGCTDAXQVINEVEESRRSXPDAYVRSSDHNVGW

SEQ ID NO: 1424 - protein, 421 aa, Bacillus halodurans C-125
MDSIALMDNVWIMLCAVLVLLMQGGFILLEAGSTRMKNAGHIAGKTIFTVGIASLVYWAVGWGFTYGEGNAFIGLSDFFFGDYSTAEEGLVGSVDFFFQLMFAAIALTIAFGGFAERAKLSVYILFAVLFSAFVYPIVAHWIWGDGWLADLGKQDFAGSTVVHLTGAMGALAATILLKPRLGKYNKDGSMNDIQGHNQVYTALGVLLLWVGWFGFNAGSTLEVADAFFGYVALNTQLAAAAGAVAAMFIAWALSGKADVPTTLNGALAGLVAITASCAFVAPWAAVVIGIVGGLIVYFSMKFFDKAKIDDPIFALSVHGVAGVWGTLSTGFFATPELAEMNGGQAGLFYGGGFAQLGVQTLSVVACGVFAFIASYVLLLVCKSVLGGLRVTEEEEIIGLDLSEHGSYGYPESMPGSEKSGA

SEQ ID NO: 1425 - protein, 459 aa, Rhodobacter sphaeroides 2.4.1
MEGLAQANDLSEVIEADRAHMWHHLSQHKQYETVDPRIIVEGKGMRVWDAAGKEHLDAVSGGVWTVNVGYGRESIANAVRDQLIKMNYFAHSAGSIPASRFSKRLIEKMPGLSRVYYSNSGSEANEKVFKMVRQISHRHHGGKKGKILFRERDYHGTTITALATSGQPQRAEQYGPLTPGFVMVPHCLEYRKQWDVENYGERAADAIEEVILREGPDTIGALCLEPVTAGGGVIVPPAGYWERVQEICRKYDILLHIDEVVCGLGRTGTWFGYQNFGVKPDFVTMAKGVASGYAAISCTVTTEAVFDMFKDDPSDPMSYFRDISTFGGCTAGPVAALENMRIIEDEGLLENTLKMGARVVENLSALQEKHAVIGDVRGKGLFCGAELVADRATKEPMDEKRVAAVVADVMAQGVIIGMTNRSLPGFNNTLCLSPALIATPDDIDQITDAIDRALTRVFG

SEQ ID NO: 1426 - protein, 163 aa, Saccharomyces cerevisiae
MSEFYKLAPVDKKGQPFPFDQLKGKVVLIVNVASKCGFTPQYKELEALYKRYKDEGFTIIGFPCNQFGHQEPGSDEEIAQFCQLNYGVTFPIMKKIDVNGGNEDPVYKFLKSQKSGMLGLRGIKWNFEKFLVDKKGKVYERYSSLTKPSSLSETIEELLKEVE

SEQ ID NO: 1427 - protein, 213 aa, Triticum aestivum
  misc_feature (210)..(210): Xaa can be any naturally occurring amino acid
MSPSAVEGNGVVDVKTTLKPNVGVYTNPNHDLWVAPAEPSAEAVKSGSDLKQGEVSVAIRSTGICGSDVHFWHAGCIGPMIVEGDHILGHESAGEVIAVHPSVSHLKVGDRVAVEPNIPCGTCEPCLTGRYNGCETVQFLSTPPVPGMLRRYINHPAVWCHKIGNMSYENGALLEPLSVALAGMQRAEVRLGDPVLICGAGPIGLITLQXCAA

SEQ ID NO: 1428 - protein, 158 aa, Salmonella typhimurium LT2
MKLISNDLRDGDKLPHRHVFNGMGYDGDNISPHLAWDNVPMGTKSFVVTCYDPDAPTGSGWWHWVVVNLPADTRVLTQGFGSGLVAVPDGVIQTRTDFGKAGYGGAAPPKGETHRYIFTVHALDVERLDVDEDASGAMVGFNVHFHSLASASITAMFS

SEQ ID NO: 1429 - protein, 389 aa, Escherichia coli
  misc_feature (185)..(195): Xaa can be any naturally occurring amino acid
TLQNGKLNVPENPIIPYIEGDGIGVDVTPAMLKVVDAAVEKAYKGERKISWMEIYTGEKSTQVYGQDVWLPAETLDLIREYRVAIKGPLTTPVGGGIRSLNVALRQELDLYICLRPVRYYQGTPSPVKHPELTDMVIFRENSEDIYAGIEWKADSADAEKVIKFLREEMGVKKIRFPEHCGIGIXXXXXXXXXXXVRAAIEYAIANDRDSVTLVHKGNIMKFTKGAFKDWGYQLAREEFGGELIDGGPWLKVKNPNTGKEIVIKDVIADAFLQQILLRPAEYDVIACMNLNGDYISDALAAQVGGIGIAPGANIGDECALFEATHGTAPKYAGQDKVNPGSIILSAEMMLRHMGWTEAADLIVKGMEGAINAKTVTYDFERLMEGAKLL

SEQ ID NO: 1430 - protein, 363 aa, Oryza sativa (japonica cultivar-group)
MMYKHVGDDARGSSAGVVCCVDVVDDDVDALLCGEDAGELEREGEPAQGSSPSSSLSCAAAAAAAADDDDEDEDEHGVHGEVVQVTPGGEEHCYDYDYDVDVPVGAELVMPACSPPRTAVHRPGWSESVSWILKVRSVHGFQPATAYLAVSYMDRFMSSRSLPDHGWASQLLCVACLSLAAKMEESSAPPLLDLQIEGTRFIFEPRTIQRMELIVLVELDWRLRSVTPFAFVDFFACKVGSSGRSSRILALRACQIILSAIHELEFLNHCASSMAAAAVLFAVNESPAAMSHRSSVSSESAASWCIGLTEERISSCYQLLQRALNATARKRKRHPMILAACSSVTSSSSRSKRRKLDGHFGED

SEQ ID NO: 1431 - protein, 345 aa, Streptomyces argillaceus
MTNTPAAAPSPADAREILQLNVAYTRARVLHTAMELGLFEYLSAGPRTEAEIREHGRLHSHLVRDWLDALVGLGLLTADGGTYANTPRAEHFLVPGHPHYIGGAVLQHGRVHYELWNRFADALRDGKATSGKDITAGAVVEEQPDLDRARRFLDHMDTFNQFVVAELSKALDWSRWKTFVDVGGARGNVAAQLVLDHPDLKGSVFDVPGVEPLFDEHMAARGTTGRVDFVGGDFFTDALPAADVVLFGHVLHDHPEESRKRLLGQAFRALPPGGTLLVYDAMLDDRSEAGAYLQSLVCSVILDGGSEYRVRDITAWAEETGFTVEQVVPLDTMTHDRLFVARKPG

SEQ ID NO: 1432 - protein, 389 aa, Escherichia coli
  misc_feature (180)..(180): Xaa can be any naturally occurring amino acid
  misc_feature (185)..(201): Xaa can be any naturally occurring amino acid
TLQNGKLNVPENPIIPYIEGDGIGVDVTPAMLKVVDAAVEKAYKGERKISWMEIYTGEKSTQVYGQDVWLPAETLDLIREYRVAIKGPLTTPVGGGIRSLNVALRQELDLYICLRPVRYYQGTPSPVKHPELTDMVIFRENSEDIYAGIEWKADSADAEKVIKFLREEMGVKKIRFPEHXGIGIXXXXXXXXXXXXXXXXXYAIANDRDSVTLVPKGNIMKFTEGAFKDWGYQLAREEFGGELIDGGPWLKVKNPNTGKEIVIKDVIADAFLQQILLRPAEYDVIACMNLNGDYISDALAAQVGGIGIAPGANIGDECALFEATHGTAPKYAGQDKVNPGSIILSAEMMLRHMGWTEAADLIVKGMEGAINAKTVTYDFERLMEGAKLL

SEQ ID NO: 1433 - protein, 258 aa, Arabidopsis thaliana
MFLKVHEIAFLFGLLGNIVSFGVFLSPVPTFYGIYKKKSSKGFQSIPYICALASATLLLYYGIMKTHAYLIISINTFGCFIEISYLFLYILYAPREAKISTLKLIVICNIGGLGLLILLVNLLVPKQHRVSTVGWVCAAYSLAVFASPLSVMRKVIKTKSVEYMPFLLSLSLTLNAVMWFFYGLLIKDKFIAMPNILGFLFGVAQMILYMMYQGSTKTDLPTENQLANKTDVNEVPIVAVELPDVGSDNVEGSVRPMK

SEQ ID NO: 1434 - protein, 511 aa, Aspergillus nidulans FGSC A4
MADLFVDLVAPNGTHYSQPTGLFINNAFVASSGQTITSLDPATDKPIATVHAASAEDVDRAVIAARAALVHPSWKKLPGTERGQLMARLADLMEKNKELFATIDAWDNVLSLTEKSGKPYHIALSEDLVEAIGTIRYYSGWADKTFGQTISTTPAKFAYTIRQPVGVVGQIIPWNYPLSMACWKLGPALACGNTVVLKPAEQTPLSVLVLGSLIKEAGFPPGVVNIVNGYGREAGAALAGHPLIDKIAFTGSTVTAREIMKLAAGTLKNITLETGGKSPLLVFPDADLEQAVKWSHFGIMSNQGQICTATSRIYVHQDIFQLFLSKFKAAVETTSKIGDQWDESTFQGPQITRAQYDRILSYIETAKKGGMAVVTGGSAHAPSSEKNKDGYFIQPTVFTGTDDSHAIVREEVFGPVVVILPFASEEEAIRRANDTTYGLGAAVFTCDLERAHRVAAEIEAGMVWVNSSQDCDPRVPFGGVKQSGIGRELGEAGLEAYTQVKAVHVNMGNKL

SEQ ID NO: 1435 - protein, 160 aa, Glycine max
AMSIDPKWKMIRPDLGRIEKWVLRNAFDDDKNPYLPKHILYRQKEQFSDGVGYSWIDGLKDHANKQVTDATMMAANFIYPENTPTTKEGYLYRTIFEKFFPKNSAKATVPGGPSVACSTAKAVEWDASWSKNLDPSGRAALGVHAAAYDGAVDTTKNGPL

SEQ ID NO: 1436 - protein, 366 aa, Cryptococcus neoformans var. neoformans
MTIDQSQINFNVPSTYKLEEIVGEGAYGLVVAGTHLPSGTQVAIKRITPFDHTMFCQRTLREIKLLRHFHHENIISILDLIQPESYEVFNEVYLVQELMETDLHRVIRSQELSDDHCQYFVYQTLRGLKALHSADVLHRDLKPSNLLLNANCDLKICDFGLARSSAKPPPGTSDGGQGFMTEYVATRWYRAPEVMLSFQEYTKAIDLWSVGCILAEMINGKPLFPGRDYHHQLSLILQVLGTPTMDDFNEITSQRSKDYLRALEFTRRQDFSAICPKAKPAAVDLLKQTLTFSPSKRITVEEALMHSYVEAYHDPHDEPNAEPLKPGFFDFEFHQEKLSRDQWKRMIYDEVQDPVPTILSQWTESH

SEQ ID NO: 1437 - protein, 389 aa, Escherichia coli
TLQNGKLNVPENPIIPYIEGDGIGVDVTPAMLKVVDAAVEKAYKGERKISWMEIYTGEKSTQVYGQDVWLPAETLDLIREYRVAIKGPLTTPVGGGIRSLNVALRQELDLYICLRPVRYYQGTPSPVKHPELTDMVIFRENSEDIYAGIEWKADSADAEKVIKFLREEMGVKKIRFPEHCGIGIKPCSEEGTKRLVRAAIEYPIANDRDSVTLVHKGNIMKFTEGAFKDWGYQLAREEFGGELIDGGPWLKVKNPNTGKEIVIKDVIADAFLQQILLRPAEYDVIACMNLNGDYISDALAAQVGGIGIAPGANIGDECALFEATHGTAPKYAGQDKVNPGSIILSAEMMLRHMGWTEAADLIVKGMEGAINAKTVTYDFERLMEGAKLL

SEQ ID NO: 1438 - protein, 144 aa, Brassica napus
MKKIISLVRNVHSRQCQPKLNWSAQVRFLQQDTVSKPKPNKYKYPSFYDPYGPRPQPSSKIVELAERIAALSPEERKQIGPALNEHLRLPKQQMISTQGMMSVGAKQEAGAGKVGDCCEEPCDQRSESVFDTAAKIKVIKEVRA

SEQ ID NO: 1439 - protein, 161 aa, Bacillus cereus ATCC 10987
MTVYDFSAKTITGEEKSLKDYEGKALLIVNVASKCGFTPQYKGLQEVYDKYKEQGLEILGFPCNQFGGQEPGTEADITSFCELNYGVNFPMFAKIDVKGDKAHPLYTYMTEQAPGLLGMKAVKWNFTKFLIGKDGKVVGRFAPQTKPVDLEVEIEKVLGNN

SEQ ID NO: 1440 - protein, 294 aa, Saccharomyces cerevisiae
MKTLVHVASVEKGRSYEDFQKVYNAIALKLREDDEYDNYIGYGPVLVRLAWHISGTWDKHDNTGGSYGGTYRFKKEFNDPSNAGLQNGFKFLEPIHKEFPWISSGDLFSLGGVTAVQEMQGPKIPWRCGRVDTPEDTTPDNGRLPDADKDAGYVRTFFQRLNMNDREVVALMGAHALGKTHLKNSGYEGPGGAANNVFTNEFYLNLLNEDWKLEKNDANNEQWDSKSGYMMLPTDYSLIQDPKYLSIVKEYANDQDKFFKDFSKAFEKLLEDGITFPKDAPSPFIFKTLEEQGL

SEQ ID NO: 1441 - protein, 288 aa, Escherichia coli CFT073
MAEKKQWHETLHDQFGQYFAVDNVLYHEKTDHQDLIIFENAAFGRVMALDGVVQTTERDEFIYHEMMTHVPLLAHGHAKHVLIIGGGDGAMLREVTRHKNVESITMVEIDAGVVSFCRQYLPNHNAGSYDDPRFKLVIDDGVNFVNQTSQTFDVIISDCTDPIGPGESLFTSAFYEGCKRCLNPGGIFVAQNGVCFLQQEEAIDSHRKLSHYFSDVGFYQAAIPTYYGGIMTFAWATDNDALRHLSTEIIQARFLASGLKCRYYNPAVHTAAFALPQYLQDALASQPS

SEQ ID NO: 1442 - protein, 453 aa, Zea mays
  misc_feature (179)..(179): Xaa can be any naturally occurring amino acid
  misc_feature (212)..(212): Xaa can be any naturally occurring amino acid
  misc_feature (291)..(291): Xaa can be any naturally occurring amino acid
  misc_feature (364)..(364): Xaa can be any naturally occurring amino acid
MWNGYVNNDDRALLKVIKYSSPTSAGAECVDLDCSWVEQWVHRAGPRKEIYYEPEEVKAAIVTCGGLCPGLNDVIRQIVFTLETYGVKNIVGIPFGYRGFFEKGLKEMPLSRGLVENINLNGGSFLGVSRGGAKTSEIVDSIQARRIDMLFVLGGNGTHARDHYLEHPNRKSIYIPHNXCRKRKLKVSVVAVPKTIDNDILLMDKTFGFDTXVEEAQRAINSAYIEARSAYHGIGLVKLMGRSSGFIAMHASLSSGQVDVCLIPELLLCLKLPYVFLSHVSTNRSLQVTIXMKVPFTLDGEFGVLRQLEHLLKSKGFCVVCVAEAAGQDLLQESGATDASGNVILSDIGVHMQQKIKMHFKDIXVPADVKYIDPTYMVRACRANASDAILCTVLGQNAVHGAFAGFSGITSCICNTHYVYLPITEVITAPKRVNPNSRMWHRCLTSTGQPDFH

SEQ ID NO: 1443 - protein, 492 aa, Triticum aestivum
MDQPPDGFAAGGLFVQHIDGQKASPPAVIVRRGGISGIASARALSNASFKVTLLESRERLGGRVHTDYSFGCPIDMGASWLHGVCNENSLAPLIRLLGLRLYRTSGDNSVLYDHDLESYALFDKDGRQIPQEIVTKVGEIFEQILKETVKVRDEYANDMPLVQAISMVLDRNPHLKLEGLQYEVLQWCICRLEAWFATDVDNISLKNWDQEHVLTGGHGLMVNGYDPVIKALSRDLDVHLNHRVTKIIQRYNKVIVCVEDGTSFVADAAIITVPLGVLKANIIKFEPELPDWKLSAISDLGVGLENKIALRFNTIFWPNVEVLGRVAQTSNACGYFLNLHKATGHPVLVCMVAGRFAYEMEKLSDEESVNFVMSQLRRMLPGATEPVQYLVSRWGTDPNSLGSYSCDLVGKPADLYERFCARVGNLFFAGEAACIDHSGSVHGAYSSGIDAAEDCRRRLSTQLGISDLFQVGKIVMREEMTEVMVPLQISRL

SEQ ID NO: 1444 - protein, 135 aa, Methanocaldococcus jannaschii
VIIMPGTKQVNVGSLKVGQYVMIDGVPCEIVDISVSKPGKHGGAKARVVGIGIFEKVKKEFVAPTSSKVEVPIIDRRKGQVLAIMGDMVQIMDLQTYETLELPIPEGIEGLEPGGEVEYIEAVGQYKITRVIGGK

SEQ ID NO: 1445 - protein, 341 aa, Aspergillus niger
MKVDTPDSASTISMTNTITITVEQDGIYEINGARQEPVVNLNMVTGASKLRKQLRETNELLVCPGVYDGLSARIAINLGFKGMYMTGAGTTASRLGMADLGLAHIYDMKTNAEMIANLDPYGPPLIADMDTGYGGPLMVARSVQQYIQAGVAGFHIEDQIQNKRCGHLAGKRVVTMDEYLTRIRAAKLTKDRLRSDIVLIARTDALQQHGYDECIRRLKAARDLGADVGLLEGFTSKEMARRCVQDLAPWPLLLNMVENGAGPVISVDEAREMGFRIMIFSFACITPAYMGITAALERLKKDGVVGLPEGMGPKKLFEVCGLMDSVRVDTEAGGDGFANGV

SEQ ID NO: 1446 - protein, 161 aa, Lactobacillus plantarum WCFS1
MAESVYDFTETEMSGAPLDLSQYRGQVLLIVNTASNCGLAPQFKGLEELYQKYQQEGLVVLGLPSNQFHQEKADDDETHDYCQRHYGVTFPMTKRVMVNGDDADPLFTYLKQAAGHGRIKWNFTKFLIGRDGRVLERYAPTTRPATFEAAIRDALADRSED

SEQ ID NO: 1447 - protein, 276 aa, Lactobacillus plantarum WCFS1
METYTLRDGLTVPKIGFGTYKLNGAHGVQVIDSAIDRGYRLLDTAFNYENEGAVGKAVRRSSVPRSELLISSKLPGRHHTYTEAINTIQESLYRAGLDYYDLYLIHWPNPKEDHYVEAWQALINAQKLGLIRSIGVSNFLPEHLERLNKETGVLPVINQVELHPYFNQQAQRDYDQAHGILTQDWSPLGRASEMLQNETLKEIAVHYHKNVGQLILRWELQLGTLPIPKSSTPSRQAGNMDVFDFEISAADMATINGLSQVDGRLNNQDPAVYQEF

SEQ ID NO: 1448 - protein, 250 aa, Saccharomyces cerevisiae
MSQEEKVDAKATLKTEISNNKKNDKQELELDELVGKLSIEGTPQVSQKLSKEEKHAHQLEADSRSIFVGNITPDVTPEQIEDHFKDCGQIKRITLLYDRNTGTPKGYGYIEFESPAYREKALQLNGGELKGKKIAVSRKRTNIPGFNRHYNSQNQYFQQWQWNYPLMAYPNPDTFPYYPPYPPNQSPNQNFGYNKNNYYRSPYNNKNRTFQKKHFNSAKDSTKNIRSTSQKPVVMPSDNVKSSTQEKDSK

SEQ ID NO: 1449 - protein, 510 aa, Glycine max
MGSDNHQNLEFLKEIGLGSSNIGSYINGQWKATGSSVTSVNPSNNQSIAQVTEATLQDFEEGLRACSEAAKTWMTIPAPKRGEIVRQIGEALRAKLDPLGRLVSLEMGKILPEGIGEVQEIIDMCNYGVGLSRQLNGSIIPSERPDHMMFEVWNPLGIVGVISAFNFPCAVLGWNACIALVCGNCVVWKGAPTTPLITIAVTKLVAEVLERNKLPGAIFTSFCGGADIGQAIAKDTRIPLVSFTGSSKVGLMVQQTVNERFGKCLLELSGNNAIIVMDDADSNWLYVYFGCCCGSTGQPVYTWPCRRLFLHESIYTDVLDQLVEVYKQVKTGNPLEKGTLVGPLHTRTSVENFQKGISVIKSQGGKILTGGSVLESGGNFVQPTIVEISPDAPVVKEELFGPVLYVMKFQTLDEAIALNNSVPQGLSSSIFTQRPGTIFKWIGPRGSDCGIVNANIPTNGAEIGGAFGGEKATGGGREAGSDSWKQYMRRSTCTINYGSELPLAQGINFG

SEQ ID NO: 1450 - protein, 235 aa, Sandersonia aurantiaca
MSGYLPFDEPNILALYKKIWKANFSFPSWFSSGAKKLIKRILDPNPHTRITIPEILEDEWFKKGYMPPHFQQGEEVNLDDIDAVFNDSKEHLVTEKKEKPESMNAFALISRSQVFDLGNLFEKQRGLIKRETRFTSQCPPNEILSKIEETAKPLGFNVRKHNYKMNLQGDKTGRKGHLSVATEVFEVAPSLHMVELRKTGGDTLEFHKFYKNFSSGLKDIVWKAEALPEQEETRS

SEQ ID NO: 1451 - protein, 231 aa, Rubrobacter xylanophilus DSM 9941
MSPDGMERLKRAAAREAVDRYVESGMVVGLGTGTTASWAVRRIGERLLEGSLSGVRGVPTSEYTAALARECGVPLVSLSERRPELTIDGADEIAPDLSVIKGRGGALLREKIVAAASRRGVVIVADGSKQVSLLGNGPLPVEVEPFGWEATAEALAALGCEPELRRVKTQPFVTDGGHYTLDCRFPGIPDPPGLACKIKRVPGALECGLFVGLARAAVIARPEGVEVLEAA

SEQ ID NO: 1452 - protein, 207 aa, Zea mays
  misc_feature (49)..(49): Xaa can be any naturally occurring amino acid
  misc_feature (81)..(81): Xaa can be any naturally occurring amino acid
  misc_feature (94)..(94): Xaa can be any naturally occurring amino acid
  misc_feature (112)..(112): Xaa can be any naturally occurring amino acid
  misc_feature (127)..(127): Xaa can be any naturally occurring amino acid
  misc_feature (144)..(144): Xaa can be any naturally occurring amino acid
  misc_feature (160)..(160): Xaa can be any naturally occurring amino acid
  misc_feature (169)..(169): Xaa can be any naturally occurring amino acid
ARADEEWPRIGRNMVAPLLVLNLIMYIIVIGFASWNLNHFINGQTNYPXAWRGNGATFYFLVFAILGPAWWGAASKLAGVXHVRAWRHDSLATXTPASSLIAWAITALAFGXLACKEIHIGGHRGWXRLRRAGGPFVIILAFTXLLYVLMLHTGPSSAGXGGYRDHDYXGVGGAAGEPKGVTQGLEDSDRCSSYMCHHIRRCWSVMT

SEQ ID NO: 1453 - protein, 378 aa, Mycobacterium leprae TN
MARDYYGLLGVSRNASDADIKRAYRKLARELHPDINPDEAAQAKFKEISMAYEVLSDPEKRRIVDLGGDPMENAAASPSGFGGFGGLGDVFEAFFGGSSASRGPIGRVRPGSDSLLPMWLDLEECATGVTKQVTVDTAVLCDRCQGKGTNGDSAPIPCDTCGGRGEVQTVQRSLLGQMVTARPCPTCRGVGVVIPDPCCQCVGDGRVRARREITVKIPSGVGDGMRVRLAAQGEVGPGGGPAGDLYVEVHEQAHDIFVRDGDDLHCTVSVPMVDAALGTTITVDAILDGMSEIDISPGTQPGSVIELRGQGMPHLRSNTRGNLHVHVEVMVPTRLDQHDTELLRELKRRRSRDVAEVRSTHAAGGGLFSRLRETFTNR

SEQ ID NO: 1454 - protein, 359 aa, Triticum aestivum
TAARGVRERKVRDMVGYFRCHAGEEVDVGQAVYGGVLNLVSSAFFSVDVVDVGSESASGLREVLEDIIAALAKPNVSDIFPFLRPLDLQGWRRWAGARYQKVFGILDGIVDRRLADARTSTTGHAHGNFLDSLLELVSAGKIGRDKVTVILFDVFAAGTDMMAITVEWAMAELLRHPHAMAKVHAEMEDILGGKDTDTLEEPDAANLPYLQAVVKEVMRLHPVAPIMLPHQAAEDGVEIGGFAVPRGATVIFNVWAIMRDSAAWERPDEFVPERFLDKSAAVEFRGKDYEFIPFGSGRRLCPGLPMAERVVPFVLASLLHAFEWRLPGGVAADELDVAERFTTVNTLAVPLRAVPVVVT

SEQ ID NO: 1455 - protein, 389 aa, Escherichia coli
TLQNGKLNVPENPIIPYIEGDGIGVDVTPAMLKVVDAAVEKAYKGERKISWMEIYTGEKSTQVYGQDVWLPAETLDLIREYRVAIKGPLTTPVGGGIRSLNVALRQELDLYICLRPVRYYQGTPSPVKHPELTDMVIFRENSEDIYAGIEWKADSADAEKVIKFLREEMGVKKIRFPEHCGIGIKPCSEEGTKRLVRAAIEYAIANDRDSVTLVHKGNIMKFTEGAFKDWGYQLAREEFGGELIDGGPWLKVKNPNTGKEIVIKDVIADAFLQQILLRPAEYDVIACMNLNGDYISDALAAQVGGIGIAPGANIGDECALFEATHGTAPKYAGQDKVNPGSIILSAEMMLRHMGWTEAADLIVKGMEGAINAKTVTYDFERLMKGAKLL

SEQ ID NO: 1456 - protein, 384 aa, Mycobacterium avium subsp. paratuberculosis str. k10
MSNTMSKTTSPITANLGDTKRPVVAGAERHPGWHALRKLAARITTPLLPDDYLHLANPLWSARELRGRVVDVRRETEDSATLVIKPGWGFNFDYQPGQYIGIGLLIDGRWRWRSYSLTSSPATSASARTVTITVKAMPEGFLSSHLVAGVEPGTVVRLAAPQGNFVLPDPAPASILFLTAGSGITPVMSMLRTLVRRNQIGDIVHLHSAPTEADVMFRGELAALANEHPGYRLQLRETRTRGRLDLSLLDREVPDWRERQTWACGPEGMLNAAERVWSAAGIGEQLHLERFAVSKAAPAGAGGMVTFARSGRSVDADAATSLMDAGEAAGVQMPFGCRMGICQSCVVGLVEGHVRDLRTGAEHEPGTRVQTCVSAASGDCVLDI

SEQ ID NO: 1457 - protein, 257 aa, Triticum aestivum
PRFRIWESFLELSAPSNLMPVTLELGGKSPFIVMDDADIDQAVELAHFALFFNQGQCCCAGSRTFVHERVYDEFVEKSKARALKRVVGDPFRKGVEQGPQIDDEQFKKILRYIKSGVDSGATLVTGGDKLGDKGYYIQPTIFSDVQDGMKIAQEEIFGPVQSIFKFNDLNEVIKRANASQYGLAAGVFTNNLDTANTLTRALRAGTVWVNCFDIFDAAIPFGGYKMSGIGREKGIDSLKNYLQVKAVVTALKNPAWL

SEQ ID NO: 1458 - protein, 389 aa, Escherichia coli
TLQNGKLNVPENPIIPYIEGDGIGVDVTPAMLKVVDAAVEKAYKGERKISWMEIYTGEKSTQVYGQDVWLPAETLDLIREYRVAIKGPLTTPVGGGIRSLNVALRQELDLYICLRPVRYYQGTPSPVKHPELTDMVIFRENSEDIYAGIEWKADSADAEKVINFLREEMGVKKIRFPEHCGIGIKPCSEEGTKRLVRAAIEYAIANDRDSVTLVHKGNIMKFTEGAFKDWGYQLAREEFGGELIDGGPWLKVKNPNTGKEIVIKDVIADAFLQQILLRPAEYDVIACMNLNGDYISDALAAQVGGIGIAPGANIGDECALFEATHGTAPKYAGQDKVNPGSIILSAEMMLRHMGWTEAADLIVKGMEGAINAKTVTYDFERLMEGAKLL

SEQ ID NO: 1459 - protein, 389 aa, Escherichia coli
TLQNGKLNVPENPIIPYIEGDGIGVDVTPAMLKVVDAAVEKAYKGERKISWMEIYTGEKSTQVYGQDVWLPAETLDLIREYRVAIKGPLTTPVGGGIRSLNVALRQELDLYICLRPVRYYQGTPSPVKHPELTDMVIFRENSEDIYAGIEWKADSADAEKVINFLREEMGVKKIRFPEHCGIGIKPCSEEGTKRLVRAAIEYPIANDRDSVTLVHKGNIMKFTEGAFKDWGYQLAREEFGGELIDGGPWLKVKNPNTGKEIVIKDVIADAFLQQILLRPAEYDVIACMNLNGDYISDALAAQVGGIGIAPGANIGDECALFEATHGTAPKYAGQDKVNPGSIILSAEMMLRHMGWTEAADLIVKGMEGAINAKTVTYDFERLMEGAKLL

SEQ ID NO: 1460 - protein, 160 aa, Neurospora crassa
MLTGEMLTLDFLLLTCLLISYTTNAFPGEYIPTVFDNYSASVMVDGKPVSLGLWDTAGQEDYDRLRPLSYPQTDVFLICFSLWHPEIQHHAPGIPIILVGTKLDLREDPDTIQSLSQKRMAPITFEMGVNCAKEIGARKYLECSALTQRNLKSVFDEAIR

SEQ ID NO: 1461 - protein, 234 aa, Hordeum vulgare subsp. vulgare
MATIYDIGLGAGFNILMATIFLLIFAFLRLQPINDRIFFPKWYLKGMRDSPSSAGAAVTKYVNLNVRSYLKFLSWMPAALKMPEEELIEHAGLDSVVYLRIYLTGLKIFVPITILAFAVLVPVNWTNDTLEGLKVVHSDIDKLSISNIPYGSKRFIAHLVMAYVFTFWTCYVLKNEYERVATMRLRFLASEKRRPDQFTVLVRNIPPDPDESVSELVEHFFLVNHPDHYLKHQV

SEQ ID NO: 1462 - protein, 343 aa, Triticum aestivum
  misc_feature (228)..(228): Xaa can be any naturally occurring amino acid
  misc_feature (295)..(295): Xaa can be any naturally occurring amino acid
MKTLLILTILAMAITISTANMQVDPSGQVQWPQQQLVPQPQQPLSQQPQQAFPQPQQTFPHQPQQQVPQPQQPQQPFLQPQQAFPQQPQQPFPQTQQPQQPFPQQPQQPFPQQPQQPFPQTQQPQQPFPQQPQQPFPQTQQPQQPFPQFQQPHQPFHQPQQQFPQPQQPQQSFPQQQRPFIQPSLQQRLNPCKNILLQQCKPASLVSSLWSIIWPQSDCQVMQQQCCXQELAQIPQQLQCAAIHSVVHSIIVQQQQQQQQQQQQQQQQGMHILLPLSQQQQLGQGTLVQGQGIIXQPQQLAQLEAIRSLVLQTLPTMCNVYVPPECSIIRAPFASIVAGIGGQ

SEQ ID NO: 1463 - protein, 490 aa, Erwinia carotovora subsp. atroseptica SCRI1043
MQLKQSISLKQQVLFRQHCLIDGEWQDSQSGERLNVTNPATGEVLGTVPLVTVSQTEQAIAAAEQALVEWRKKTGKERAALLQAWARLIMDNQDDLAVLLTAEQGKPLAEARGEIAYATSFIDWFAEEAKRIEGSVLQSPQGQQRLMVIKQPIGVCAAITPWNFPAAMITRKVGPALAAGCTMIVKPAEQTPFTALALAELAQQAGIPRGVLQVIVGDAQSVGKVLCDSPVVRKLSFTGSTEVGRILMAQSAPTVKKLSLELGGNAPFIVFDDADVDQAVKGILASKFRNSGQTCVCANRIYVQNGIYPTLVERLIEEVRKLNVGDGTQPGVTQGPLIDDDAVSKVEQHIADALSHGATLLLGGQRHERGGTFFTPTIVGDVTREMRFAREETFGPVAPLFRFSDEAEVIAMANDTEFGLAAYVYTRDAIRQWTVPEALDYGMVGINTGLISNEVAPFGGVKQSGLGREGSRFGIEDYLEMKYLCVDLSR

SEQ ID NO: 1464 - protein, 287 aa, Glycine max
MLMDSPSRSSVIIVGAGISGIAAAKVLAENGVEDLVILEASDRVGGRICKESFGGVTVELGAGWIAGVGGQQPNPIWELAAQFELRTCFSDYSNARYNIYDRSGNIIPSEIAADSYKKAVDSAIQKLRNQEEEEEAYGDDHCNNNIKNSETKLPSTPETPIELAIDFILHDFEMAEVEPISTYVDFGEREYFVADERGYDYLLYKMAEEFLFTSKGRILDNRLKLNKVVRELQYSKSGVTVKTEDGCVYETNYVILSVSIGVLQSDLLAFNPPLPVRLLFFVQLSLA

SEQ ID NO: 1465 - protein, 210 aa, Zea mays
MFGYRKADPDLEAGGSSLLYPGMTESPVSNFFVSSNAGVALYIFLIILPFLVLCPLRYYHQKHPVNLLLLGLFTVAISFAVGMTCAFTSGKIILEAAILTAVVVISLTAYTFWAAKRGHDFNFLGPFLFAAIMVLMVFSLIQIFFPLGKISVMIYGGLASLIFCGYIIYDTDNVIKRYTYDEYIWAAVSLYLDVINLFLSLLQLLRAADS

SEQ ID NO: 1466 - protein, 278 aa, Bacillus halodurans C-125
MIQSIQDRVKLANGVEMPWFGLGVYKAAEGEEVIGAVRAALKAGYRSIDTASLYQNEVGVGQAIRESGIPRDEIFVTTKVWNTEQGYDETLAAFERSRKRLGLEVIDLYLIHWPVREKFLDTWRALETLYKERKVRAIGVSNFNIHHLETVMNISDINPMVNQVEFHPFLTQKPLLTFCKAHDIQLEAWRPLTKGEIFTHPVVQALAKKYGKTPAQIVLRWNLEHRVVTIPKSVREERIQENANIFDFHLSPEDVEALDGLNEDRRLGQDPDSFSFDF

SEQ ID NO: 1467 - protein, 280 aa, Leuconostoc mesenteroides subsp. mesenteroides ATCC 8293
MSLNELYELNDGHQLPKIGLGTFQIRGYQGVDQILNAIQIGYRLLDTSTNYDSEGAVGEAIRRSGIPRSQFYVTTKLPGKYHHFDDALKIIEESLLRLGLDYLDLYLIHWPLPKRDNYVEAWQALIEAQRRGLVRSIGVSNFEKEHLDKIISATGVTPAVNQNEIHPYWPQESLVATNQEYGIVTEAWSPLGRGSSELTEPLILKLAEKYDKNAGQIILRWHIQRGILPVAKSTTPQHQRRNLDIFDFTLTETEVSQISDLERKDGRVDDQDPKEYEEFV

SEQ ID NO: 1468 - protein, 78 aa, Zea mays
  misc_feature (26)..(26): Xaa can be any naturally occurring amino acid
MAAAARHRGTVKWLNDTKGFGFIYPXDGSEDLFVHQSLIKSEGLRSLAEGEEVQFSNFDGDYGPSKGGPTNHRSGCIQ

SEQ ID NO: 1469 - protein, 456 aa, Ralstonia eutropha JMP134
MDEFAIQGFRGRLIGPSDKDYDDARALYNGMIDKRPKLIARCTDAADIIAAVNYARENKLLLAVRGGGHNGPGLGSCDGGLVIDLSQMRSVRVDPASGTVRVEPGCTAADLDHATHAFGLAVPLGIVGSTGVAGLTLGGGTGYLTRKYGLTVDNLLEVDVVLADGSFVTANKDEHVDLFWAVRGGGGNFGVVTSFLFQAHPAKMVFAGPIFWDARDARQVMSTYRDFIPNAPEELGLFVGLKTVPPTDPFPQEHWNKRACALIGAFNGPIDAGKQLVDSLLEKLPAPLFNWMGEMPWTAINSLFDPFFPKGLQWYWKGDFVKALPDEAIDVHIANAIEAPTPFCLMHLYPIDGAVRRIGRDATPWSARDASFSMVIAGISPDPKDAEALKTWGRAYWSAIHPFNLQGAYVNFLDADEAENRVELSYGENYTRLAAIKAKYDPDNLFRVNQNIKPKA

SEQ ID NO: 1470 - protein, 495 aa, Mesorhizobium loti MAFF303099
MAVRNDVSTRSYQQFIGGRFVDGSGSGSIERRSPATGDLVARYADGTPEDVDLAVEAARIAFEDGPWPRMSGMERAEVLNRLADLIRTNRDRLVRIEVEEVGKPVRFARGDIDGAAGLTRYAASLAMQMAGLTYTNIGDGKTALISREAVGVVALVTPWNFPALILSQKVPFALAAGCTVVLKPSEFTPGSAFEIAALAAEAGVPAGAFNVVSGYGATAGDHLTGHMGIDFVSFTGSTRTGSRVVGNTSRHLVKSSVELGGKSANIVFADADLEAAADGALMGVFFNNGECCVSGSRLFVQSSIADDFIAKVIARSRKMKVGDPFDDDTDVGALIDRNHLAKVTGFVKSGIEEGAQLVLGGNVAAGAVGHFHEATIFDRVEPHMTIFREEIFGPVLSITRFDTVDDAVRLANDTAYGLSNYIWSKNIDTVLTVAKRLKSGWVQANTIIDGAPQLPLTGVKGSGFGYEMGQAGFEEFTQLKTLLIQTGPRAPVFPV

SEQ ID NO: 1471 - protein, 268 aa, Zea mays
  misc_feature (99)..(99): Xaa can be any naturally occurring amino acid
MFGYRKAGPDLEAGGSSLLYPGMTESPELRWAFVRKIYVILAVQLAMTAAVSAFVVKVPAVSNFFVSSNAGVALYIFLIILPFLGKPGSPVFWGIFSPXAEIGCNLLRAVLCPLRYYHQKHPVNLLLLGLFTVAISFAVGMTCAFTSGKIILEAAILTAVVVISLTAYTFWAAKRGHDFNFLGPFLFAAIMVLMVFSLIQIFFPLGKISVMIYGGLASLIFCGYIIYDTDNVIKRYTYDEYIWAAVSLYLDVINLFLSLLQLLRAADS

SEQ ID NO: 1472 - protein, 89 aa, Triticum aestivum
  misc_feature (57)..(57): Xaa can be any naturally occurring amino acid
APTVMAFSATSVAPFHGLKSTAGLPISRRSSSAGLSSATNGGRITCMQVWPIEGIKXFFTLSYLPPLSTEALLKQVHYLIRSKWVPCLE

SEQ ID NO: 1473 - protein, 391 aa, Mesorhizobium sp. BNC1
MTQRLVSSERAAAILGVSRQTLYAYVSRGQIRAEVDPADPRRQLYDARELEAIAARKALGRKPREAAANALDWGLPVLNSALSHISNDTLFYRGIDAIEFSRHATLESTARLLWGCGSTDPFALPFTHAMLQPPHELSLVAKCQFILALHASDLPTIWRRDQRNLWPSAASIVRMLEWAGAGCPIAELPVHEALARHWDRVEAADLFRRALVLVADHELNASTFAARVVASTGGSLAAAVTGGLAALSGPRHGGQIPMVEALFEQARQAGNLRAFIDAKLRLGERLPGFGHPLYLVADPRANELLHWLPEDRFRMELSDVVFELSGHRPNIDFALVGLRHTLGLPQDTALFLFLLGRSVGWIAHALEQHSDGRVIRPRASYVGQRSETIPR

SEQ ID NO: 1474 - protein, 448 aa, Klebsiella pneumoniae
MKPLLLTNALIISEDMRYQADILIDKGRIQKIASFIPSRPEWLVIDVRGKWVIPGMIDDQVHFREPGLTHKGTIATESAAAVMGGITSFMEMPNVTPPTTTRQALREKFQRASRSSLANHSFYFGATNDNLDELKALTASQACGVKVFMGASTGNMLVDDEQVLESIFANAPCLVATHCEHTPTIKQNEAIWRARFGDAIPPGEHAAIRSVDACLTSSRQAVSLAKKHRTRLHVLHITTADELVLFDAAPTLEALRQKTITAEACVHHLFFNYDDYETLGHKLKCNPSVKTSFHQEALWKGVNEGIIDVIATDHAPHLLEEKQSDYFAAPSGLPLVQHALPALLDMCSRGIFTPEMVVRKTSHAVAERFQLKDRGYIREGYWADLVVIDPFSHQQIIREDVAYKCGWSPFEGRILSGGAVDMTLVNGHVIWNGHTIQQKYGLPLEFCR

SEQ ID NO: 1475 - protein, 197 aa, Bacillus cereus ATCC 10987
MDTNITWHTASVSKDERRVKNGHHSFVIWFTGLSASGKSTVANAVARKLFEKNIGNYVLDGDNIRHGLNKDLGFSESDRMENIRRIGEVAKLFVDQGTVVLTAFISPFRVDRKQVRDLLAADEFIEVFVKCPIEECEKRDPKGLYKKARKGDIKDFTGIDSPYEEPEQAELIVETHKYSIEECAEQIVKYLQERSFI

SEQ ID NO: 1476 - protein, 344 aa, Glycine max
  misc_feature (60)..(60): Xaa can be any naturally occurring amino acid
  misc_feature (143)..(143): Xaa can be any naturally occurring amino acid
  misc_feature (152)..(152): Xaa can be any naturally occurring amino acid
MAAENVVEFTDLPVKRPREEEEEEEEQTNGVSNDAVSALPNDPQYPGISAVIPGWFSEIXSPMWPGEAHSLKMEKILFQGKSDYQNVMVFQSSTYGKVLVLDGVIQLTERDECAYQEMITHLPLCSIPNPKKVLVIGGGDGGXVLREVARHXSVEKIDICEIDKMVVDVSKQFFPDIAVGFEDPRVTLTVGDGVAFLKDVPEGTYDAVIVDSSDPIGPAQELFEKPFFASVAKALRPGGVVCTQAESIWLHMHIIEDIVANCRQIFKGSVNYAWTTVPTYPSGMIGFMLCSTEGPLVDFKHPVNPLSENDSQQSRPLKFYNSEIHTAAFCLPSFAKRKIGSKTN

SEQ ID NO: 1477 - protein, 280 aa, Propionibacterium freudenreichii subsp. shermanii
MIIPTTPTPTVELSGGTRMPMLGMGTWPLKGEECRAAVASAIEQGYRLVDTAEAYGNEEAVGKAVREAGPDRAEIFVTTKFSKQWHSRKGVHEALEHSLERLGLDYVDLFLMHWPMPGEGSYVDAYRGMVELKEQGLAKAIGVSNFKVHHLDDLITEGMTPEVNQIQLDPSRPRLEVRDFLDNHDIVTEAWSPLGRGADGVLNAPAVLDAAKKHGITPAAAVLAWELNQGIVTIPKSANPEHQRTNLEAIGVELSAQEMKAIDALADPNAKIDDSDKTGN

SEQ ID NO: 1478 - protein, 336 aa, Lycopersicon esculentum
MSHHYQEQEQLEAQKIPFLLDSLYCEENNILTEVSIETESFSSHDLLWEEEELTSLFSKETEYEISYNVLEKNQSFISSRRESVEWILKTTAYYSFSAQTGFLAVNYFDRFLLFSFNQSLNHKPWMNQLVAVTCLSLAAKVEETDVPLLLDLQVEESGFLFESKTIQRMEMLILSTLKWKMNPVTPFSFLDFITRRLGLKHCLSLEFLRRCEKVLLYTITDDRFIGYLPSAMASATMLHVLDRLKPCIGEKYQDQLLGILGIVKEKVEGCYRLIQEVACNIDFGSNKRKFGTLPGSPTGVMDMSFSSDYSNDSWSVATSVTSSPEPLSKKIRESNE

SEQ ID NO: 1479 - protein, 328 aa, Mycoplasma pneumoniae M129
MSPKTTKKIAILTSGGDAPGMNATLVYLTRYATSSEIEVFFVKNGYYGLYHDELVPAHQLDLSNSLFSAGTVIGSKRFVEFKELKVREQAAQNLKKRQIDYLVVIGGDGSYMGAKLLSELGVNCYCLPGTIDNDINSSEFTIGFLTALESIKVNVQAVYHTTKSHERVAIVEVMGRHCGDLAIFGALATNADFVVTPSNKMDLKQLESAVKKILQHQNHCVVIVSENIYGFDGYPSLTAIKQHFDANNMKCNLVSLGHTQRGFAPTSLELVQISLMAQHTINLIGQNKVNQVIGNKANVPVNYDFDQAFNMPPVDRSALIAVINKNII

SEQ ID NO: 1480 - protein, 389 aa, Escherichia coli
TLQNGKLNVPENPIIPYIEGDGIGVDVTPAMLKVVDAAVEKAYKGERKISWMEIYTGEKSTQVYGQDVWLPAETLDLIREYRVAIKGPLTTPVGGGIRSLNVALRQELDLYICLRPVRYYQGTPSPVKHPELTDMVIFRENSEDIYAGIEWKADSADAEKVIKFLREEMGVKKIRFPEHCGIGIKPCSEEGTKRLVRAAIEYAIANDRDSVTLVHKGNIMKFTEGAFKDWGYELAREEFGGELIDGGPWLKVKNPNTGKEIVIKDVIADAFLQQILLRPAEYDVIACMNLNGDYISDALAAQVGGIGIAPGANIGDECALFEATHGTAPKYAGQDKVNPGSIILSAEMMLRHMGWTEAADLIVKGMEGAINAKTVTYDFERLMEGAKLL

SEQ ID NO: 1481 - protein, 119 aa, Zea mays
LQVYGYRMSLWAEHLGTVQECFRRPESEECVQQVNQMADDNWASYVSPQMADMKGHLMKYPVRVEQDGRVGPLHGQESFPDVGGKVLGTHSSKKLEGGRLVNGELKLCSSESLDVVQQG

SEQ ID NO: 1482 - protein, 490 aa, Bordetella parapertussis 12822
MQDFPNILQRWYSMKQHFIDNASVPGSSGERIPVIDPSTGQEFDSIARGNAADIDLAVQAARRAYEGAWGRLSAAERGRLMLALSLKVLEHRDELTALESRDCGKPLKQARADVLAIARYFEYYGGAADKLHGETIPYQQGYTVLTLREPHGVTGHVVPWNYPLQIFGRSVGAALAAGNACVVKPAEDACLSLLRVAELAAETGFPAGALNIVTGYGHEAGDALTRHPGIDHISFTGSPRVGVLVTQTAAERHVPVTLELGGKSPQIVFADADLDALVPVAVNAIVQNAGQTCSAGSRLLVERGAYERVLERLGAAFAALRAGPAQSDLDCGPLIRKTQQERVRGFLDLARGDGIATVAQGRIVPEAPAEGYYQAPTLLRDVPVDHPLAQEEVFGPVLAAIPFDDEADAVRIANATEYGLAASVWTRDGGRQLRIARKVRSGQVFINNYGAGGGIELPFGGVKASGHGREKGFEALYGFTVLKTISIKHD

SEQ ID NO: 1483 - protein, 581 aa, Glycine max
  misc_feature (8)..(8): Xaa can be any naturally occurring amino acid
  misc_feature (382)..(382): Xaa can be any naturally occurring amino acid
  misc_feature (514)..(514): Xaa can be any naturally occurring amino acid
MCGILAVXLGCSDSSQAKRVRVLELSRRLKHRGPDWSGLHQYGDNYLAHQRLAIVDPASGDQPLFNEDKTVVVTVNGEIYNHEELRKQLPNHTFRTGSDCDVIAHLYEEHGENFMDMLDGIFSFVLLDTRDNSFIVARDAIGVTSLYIGWGLDGSVWISSELKGLNDDCEHFESFPPGHLYSSKERAFRRWYNPPWFSEAIPSAPYDPLALRHAFEKAVVKRLMTDVPFGVLLSGGLDSSLVAAVTARYLAGTKAAKQWGTKLHSFCVGLEGAPDLKAAKEVAEYIGTVHHEFHYTVQDGIDAIEDVIYHIETYDVTTIRASIPMFLMSRKIKSLGVKMVISGEGSDEIFGGYLYFHKAPNKEEFHQETCRKIKALHKYDCXRANKSTFAWGLEARVPFLDKEFIRVAMNIDPECKMIKKEEGRIEKWALRRAFDDEEHPYLPKHILYRQKEQFSDGVGYGWIDGLKAHAEKHVTDRMMLNAANIFPFNTPTTKEAYHYRMIFERFFPQNSARXLTVPGGPSVACSTAKAVEWDAAWSNNLDPSGRAALGVHASAYGNQVKAVEPEKIIPKMEVSPLGVAI

SEQ ID NO: 1484 - protein, 506 aa, Daucus carota
TSADSTQRFIQCLTKYAKNSESISQVVFTPANASYNPILQLNLQNLRFNTSGTRKPLAIVTPIEETQIQTVIYCARKNSMNVRTRGGGHDFEGVSYTAEVPFVLLDMINFNRVNIDLKTSTAWVQSGISLGEFYYRISQKSDVLAFPAGLLSSVGLTGLLGGGGYGMLKRKYALAADNTLDARIVDYNGKILDRKSMGEDLFWAIRGGDPASFCVVLELKLQLVPVPKSVTYFAVQRTLEQNGSALFQKWQATAANVFPRDLDVRVVVDTITSNSSPRQDKKTVRFVFQCLYLGKIDTLLPIMQKYFPELGLVRDDCTETSWIKTAPMFSGFPVGTDPTILLNKTAIPRNSVKIKSSFTTQPISLEGLNGIWDLWLKQPVQTTLIQYTPFGGIMNEFAESALPFPHRPGVLYMINMAVTLAQNEEATLQWINDLFKYYAPYVTKNPRTSYVNYRDADLGIGSRTFQQASIWGKKYYKNNFDRLVKIKSIVDPLNFFNHKQSIPLLM

SEQ ID NO: 1485 - protein, 373 aa, Arthrobotrys dactyloides
MASPTPPNSTASPKPQAPPSQVQACRYKTGKTLGSGSYSVVRECVHIHTGRYYAAKIINQKLMAGREHMVRNEIAVLKKVSMGHQNILTLVDYFETMNNLYLVTDLALGGELFDRICRKGSYFESDAADLIRATLSAVAYLHDHGIVHRDLKPENLLFRTPEDNADLLIADFGLSRIMDEERFHVLTTTCGTPGYMAPEIFKKTGHGKPVDIWAIGVITYFLLCGYTPFDRDSNLEEMQAILKADYKFEPAQYWSDISENAKDFIRRCLTIDPKARPTAHAALEHPFICEDQPEREADLLPTVRKNFNARRTLHAAIDTIRAINKLREGGMMDGALSSAPENQKEKQPQNQPATGLWQGTAQAATAKGLWSKS

SEQ ID NO: 1486 - protein, 458 aa, Rhizobium sp. NGR234
MYSNSLIELDRAHLIHPVASYRGHEKLGVRVLASAKGATVTDASGRQLIDGFAGLWCVNAGYGHESIVEAATRQMRELPYATGYFGLGSEPAIRLASELAERAPGNLDHVFFTLGGSDAVDSTIRFIRYYWIGRGEPQRDQFISVEQGYHGSSTVGAGLTALPAFHAGFGIPFDWQHKIPSHYAYRNPVGDDPQAIIDASLAALRQKVEEIGPERVAAFYAEPIQGSGGVLVPPKGWMKAMRQLCQELGILFVADEVITGFGRTGPLFACHEDEIVPDFMTVAKGLTSGYVPMGAVFMGDHIYQTIADSAGAGAVGHGYTYSAHPVSAAVGLEVLKLYENELLDNGRKAGARLMAGLESLKDHPLVGDVRGRGMLAAVELVVDKEKKTPLPAKAEPARRIFDRAWENGLVIRAFANGVLGYAPPLCCTEAEIDGIVERTRKVLDETLEDPAVRSGLSD

SEQ ID NO: 1487 - protein, 217 aa, Lactobacillus plantarum WCFS1
MKFFLDTANTEDIKHFAELGLVDGVTTNPTLVSREGRDFETVIKEITQIVSGPVSAEVTATKAEEMIAQARNEIKWASNIVVKIPMTEEGLKAVKVLSGEGIKTNVTLVFSVSQGLLAAKAGATYISPFLGRLDDIGGNGIQLVKDLRQVLDTYGFKTEIIAASVRGPQHVQEAALAGADIATIPATVFGKLWSHPLTDKGLASFASDWKAFQATQK

SEQ ID NO: 1488 - protein, 321 aa, Malus x domestica
ILPFKLPAIGPNDVRIRIKAVGICGSDVHYLRTMKCADFEVKEPMVIGHECAGIVDKVGSEVKHLVPGDRVAVEPGISCSRRQQCKGGQYNLCPDMKFFATPPVHGSLANQIVHPADLCFKLPENVSLEEGAMCEPLSVGVHACRRANVGPETTVLIVGAGPIGLVSVLAARAFGAPRIVIVDMDDRRLAMAKSLGADGTVKVSIKMEDLDDEVAKIKEAMGSEVDVTFDCVGFNKTMSTGLNATRPGGKVCLVGMGHGVMTVPLTPAAAREVDVVGVFRYKNTWPLCLEFLRSGKIDVKPLITHRFGFTEKEVEEASLEF

SEQ ID NO: 1489 - protein, 1526 aa, Zea mays
MAMAYKMVKPSPRSGHAPAPQPLAIEQPWLTIDALCVCVRGLQATEGMNVKEECQRWFMEMKWKKVHRFVVYKIDERSRAVLVDKVGGPGEGYEELVAALPGDDCRYAVFDFDFVTVDNCQKSKIFFIAWSPAASRIRAKILYATSKQGLRRLLDGVHYEVQATDPSEMGFDEARHLYPDTRLRQSRGDRRHSTAPLASLTEGQRRLRHSDCSATRQSKSDRQSGLDKGATANSAPPDPRARTRAKTRKTANSAPPDPRARTRAKTRKTANSAPPDPRARTRAKTRKTANSAPPDPRARTRAKTRKTANSAPPDPRARTRAKTRKTTKLRLARPQGSDSALASAERLPPRPTPWLGLGHGNRRQTQPRLRRKPHVALLRAQTATSTGGAIIIPPRIDSGQRQQGLDRSNSCPSIRLRRTSNSHDITPAGCPDLSGCHIGMGLLRADEQLPVKLQMGSLQQPLRPGTVLRFGTLEFMSFDGSYDMTLLPPPRDYDNGGRQPARRRRNRRRLPRVVEEQHSGSLRSLPRQRRRRRGRQGQTGGHASPAVERIDAPDAPTEGTPDVDLAFETEASVVPPRHADPEQEDDAGALAESLQDVALEPETTAQPVPDVTTSLLVDQKVTTNSHLASFRLGLNPPNDLVLAGALIEASATPLRFCMRSPWDRLTDVSTYGPSGSEEDDDPSIGWDFSGHGNPSAMRDFMTACDYCLSDRSDESRSLGDESCGPSRECFHIELGDPTEGNHLGMPEDGDLPRPVPRADIPRELAVVPAPAGGYDPQLEQVREAQARLNEGTGALEPIRRDAGQAWVGQPLAGEIRHLPQGLQHRVANDVRIRPPPASSGVGQNLATAAMLIRAMPEPSTTEGRRIQGELKNLLEGAAARRAESTASRRQGYPSEPHAATSRFMREASVYTGRTRNTAPAAPAHLGNEHHRRDRRAHLDERVRQGYHPRRGGRYDSGEDRSPSPEPPGPQAFSRAIRRAPFPTRFRPPTTITKYSGETRPELWLADYRLACQLGGTDDDNLVIRNLPLFLSDTARAWLEHLPPGQISNWDDLVQAFAGNFQGTYVRPGNSWDLRSYRQQPGESLRDYIRRFSKQRTELPNITDSDVIGAFLAGTTCRDLVSKLGRKTPTRASELMDIATKFASGQEAVEAIFRKDKQPQGRPSEEAPEASAPRGAKKKGKKKSQSKRDAADADLVAAAEYKNPRKPPGGANLFDKMLKEPCPYHQGPVKHTLEGAGPPAEGGRAHDDDKNEEHPAEGFPEVRDCFMIYGGHAANTSARHRKQERREVCSVKVAAPVYLDWSDKPITFDRADHPDHVPSPGKYPLVVDPVVGDVRLTKVLMDGGSCLNIIYAETLKLLRVDPSSVRAGAAPFHGIIPGKRVQPLGRLDLPVCFGTPSNFRRETLTFKVVGFRGTYHAVLGRPCYAKFMAVPNYTYLKLKMPGPNGVITVGPTYKHAFECDVECVEYAEALAESEALIADLENLSKEVPDVKRHAGNFEPAETVKAVPLDPSGDTTKQIRIGSGLDPK

SEQ ID NO: 1490 - protein, 319 aa, Malus x domestica
ILPFKLPAIGPNDVRIRIKAVGICGSDVHYLRTMKCADFEVKEPMVIGHECAGIVDKVGSEVKHLVPGDRVAVEPGISCSRCQQCKGGQYNLCPDMKFFATPPVHGSLANQIVHPADLCFKLPENVSLEEGAMCEPLSVGVHACRRANVGPETTVLIIGAGPIGLVSVLAALAFGAPRIVIVDMDDKRLAMAKSLGADGTVKVSTKMEDLDDEVAKIKEAMESEVDVTFDCVGFNKTMSTGLNATRPGGKVCLVGMGHGMMTVPLTPAAAREVDVVGVFRCKNTWPLCLEFLRSGKIDVKPLITHRFGFTEKEVEEASL

SEQ ID NO: 1491 - protein, 465 aa, Bacillus anthracis str. A2012
MTIVTFSKSTTDKPSYTYEELSVKNKAYVWHPFTQMKDYLEEDPVIIERGEGRKLYDVNGNEYWDGVSSIWLNVHGHQVPELDEAIREQLNKIAHSTMLGLANVPSILLAEKIIEVVPEGLKKVFYSDSGSSAVEIAIKMAFQYWQHKGKPKKQRFVTLKEAYHGDTIGAVSVGAIDLFYQVYSSLLFEAIKMPYPYTYRSPYGNDKAEIVKKHLEEMEELLKDKHEEIAAIIVEPLMQGAGGMITMPKGYLRGLRNLCTKYNVLFITDEVATGFGRTGKMFACEHENVTPDILTAGKGLTGGYLPVAITVTTDEIYNAFLGSYEEQKTFFHGHSYTGNPLGCAVAIANLELYEKTNLIEEVARKTEYVATQLEELFACKHVGDIRQCGLMVGIELVKNKETKEAFEWTERVGVQVCKRSRELGMILRPLGNTIVFMPPLASTIDEIDEMLRILYKAISDITEGE

SEQ ID NO: 1492 - protein, 187 aa, Glycine max
  misc_feature (100)..(100): Xaa can be any naturally occurring amino acid
MPLILAKSDSIQIREVWNDNLEEEFALIREIVDNYPYIAMDTEFPGIVLRPVGNFKNSYDYHYQTLKDNVDMLKLIQLGLTFSDEHGNLPTCGGDDPARXCIWQFNFREFNVNEDVFANDSIELLRQSGIDFKRNNENGIDAHRFGELLMSSGIVLNDNIHWVTFHSGYDFGYLYELLTCQALPDTQ

SEQ ID NO: 1493 - protein, 142 aa, Zea mays
INDHDHDHRAGHGRYRMNNAVPGAWVYVGGEQLWIDVLHATLEHDLAPRVWTDYLHITVGGTLSNGGIGGQAFRHGPQISNVHELDVVTGTGEMVSCSPGKNSDLFYAALGGLGQFGVITRARIALEPAPRRVLWVRLAYSD

SEQ ID NO: 1494 - protein, 352 aa, Lactobacillus plantarum WCFS1
MEAVVKTESGYDNMELKQIPIPEVTGDKVLLKVAYTGICGTDIHTFKGQYANAVTPLVLGHEFSGEVVEVGPDVKTLKPGDRVTSETTFATDGTCVYCQDKEYNLCPNRVGIGTKANGSMANYVLTREESAHILPDNVSYKMAAMSEPLASCVHAMYQKTPFTLHDTLLIMGPGPMGLLSLQIAKEIGAFVIVSGITKDADRLQIAKELGADIIVDTQKEDLAKVVMDATDGVGVTKVYDCSGATPAVNSALPLIRKGGTFQQVGLFAKPMNELDERSIIQHEITYRGSRSQNPYDWAIALHLESKGAINQDAMITKVFDLEHWRDAFDAMMAGKELKVMIASNPDDPDLAD

SEQ ID NO: 1495 - protein, 149 aa, Glycine max
  misc_feature (34)..(34): Xaa can be any naturally occurring amino acid
SPTNAARGCRGLNPGSFLTLAKGSESGGSYGQWXSAIGRTAATTTLAESTVVLTTLLIKRTLDGHWNVIDVRYGLVGGYAVITYRCAVAQPSGAIVCGFVAAWVLIGLNKLAANVEYDDPLDAAQLHGGCGAWRCLFTGLFAKKEYVEE

SEQ ID NO: 1496 - protein, 403 aa, Sinorhizobium meliloti 1021
MLTQKTKDIVKATAPVLAQHGYAIIQHFYKRMFQAHPELKNIFNMAHQERGEQQQALARAVYAYAANIENPESLSAVLKDIAHKHASLGVRPEQYPIVGEHLLASIKEVLGDAATDEIISAWAQAYGNLADILAGMESELYERSEERAGGWAGWRRFIVREKNPESDVITSFVLEPADGGPVADFEPGQYTSVAVQVPKLGYQQIRQYSLSDSPNGRSYRISVKREDGGLGTPGYVSSLLHDEINVGDELKLAAPYGNFYIDVSATTPIVLISGGVGLTPMVSMLKKALQTPPRKVVFVHGARNSAVHAMRDRLKEASRTYPDFKLFIFYDEPLPTDIEGRDYDFAGLVDVEKVKDSILLDDADYYICGPVPFMRMQHDKLLGLGITEARIHYEVFGPDLFAE

SEQ ID NO: 1497 - protein, 313 aa, Eucalyptus globulus
ANLFAMQLATASVLPAVLTAAIELDLLEIMARAGPGAYLTPGEVASQLPTQNPDAPVMLDRIFRLLASYSVLTCTLCDLPEGKVERLYGLAPLCKFLVKNEDGVSLAPLRLIDQDRVFLESWYYMKDAILEGGIPFHKAHGMTAFDYPGTDPRFNKIFNRAMSDHSTIMMKKILETYNGFEGLKTVVDVGGGTGAILNMIVAKYPSIKGINFDLPHVIEDAPSYPGVEHVGGDMFVNIPNGDAVFMKWICHDWSDEHCAKLLKNCYDALPVNGRVIVAEYILPAYPDQSLSTKGVIHMDCIMLTHFSGGKERT

SEQ ID NO: 1498 - protein, 400 aa, Zea mays
MVLEATMICIDNSEWMRNGDYAPSRFQAQADAVNLICGAKTQSNPENTVGVMTMAGKGVRVLVTPTSDLGKILACMHGLEVGAEANLAAAIQVAQLALKHRQNKRQQQRIIAFIGSPVKYDKKVLETIGKKLKKNNVALDIVDFGESDDEKPEKLEALIAAVNSSDSSHIVHIPPGENALSDVLLSTPIFTGEEGGSGFAASAAAAAATGASGFEFGVDPNVDPELALALRLSMEEERARQEAIAKKAAEDTSNTEHNNVPSSNSDSVMAEGEPASNAAAGDKEQPKDDDDLLQQALAMSMEGGASGSAAVTDSAMAEAGAVDPDLALALQMSVQDANMSSDTDMSKVFEDRTFVSSILNSLPGVDPNDPSVKDLLASLHSQGEQEKKEDTSDKTEDDKN

SEQ ID NO: 1499 - protein, 312 aa, Eucalyptus globulus
ANLFAMQLASASVLPMVLKAAIELDLLEIMAKAGPGAFLSPGEVAAQLPTQNPEAPVMLDRISRLLASYSVLTCTLRNLPDGKVERLYGLAPVCKFLVKNEDGVSIAALNLMNQDKILMESWYYLKDAVLEGGIPFNKAYGMTAFEYHGTDPRFNKIFNRGMSDHSTITMKKILETYKGFEGLETVVDVGGGTGAVLSMIVAKYPSMKGINFDLPHVIEDAPPLPGVKHVGGDMFVSVPKGDAIFMKWICHDWSDDHCAKFLKNCYDALPNNGKVIVAECVLPVYPDTSLATKNVIHIDCIMLAHNPGGKER

SEQ ID NO: 1500 - protein, 218 aa, Glycine max
VKCDVMVYTKIFLKFPYKFWPSGPDKEFFIYAHERRGYYTFWQHMENAYPGSNMLVVTLTNEESKRVEAQADEETLREAMAVLRDMFGPNIPNAIDILVPRWWNNRFQRGSYSNYPIISNHKLFHNIKAPVGRIFFTGEHTSERFNGYVHGGYLAGIDTSKALLEEMRKEKESQTLLLEPLLASLTMSKPETVSNIHKCDIPTQLYLSGKLGVPEAIL

SEQ ID NO: 1501 - protein, 355 aa, Methanosarcina barkeri str. fusaro
MSKNICFIDGLEGILKYREIDINQLVDLPYDAVSYLLILGDLPGDQELAEYSACLHGEREVNREVIDVIHMCNFNIDSIEALRTIVSFISQFDPDINDSSPEGNMRKATRLIAKIPTIVAAYYRIANGKEPVPPDPSLSHGANFLYMLRGNKPTQLEAEVMEKDFILSAEHELNASTFSSRVTASTLSDLYSAVVSGLCTLKGPLHGGARAEVTAMIEEIACPENAENYVLDKLSKKEKIMGFGHRVYKTYDPRGMIFKQLAKQLAEAKGDMHWYNIAEVVENTVIRELVEKKGKPIYPNVDFYSGVIYKYMDIPPQLATSIFAIGRVSGWIAHCFDQYEKKKIIRPRAFMLDEC

SEQ ID NO: 1502 - protein, 355 aa, Arabidopsis thaliana
MDRISGLPDELLVEILHCLPTKEVVSTSILSKRWEFLWLWVPKLTFVMNHYESDLPIQDFITKNLRLLKPQVIESFHLQCFSSSFKPEDIKHWVVTTISRRVRELIINYCDLSWLDKPVVLLDLPNSLYTCTSLVTLKLIGHSIIVDVPRTVSLPCLKTLELDSVAYSNEESLRLLLSYCPVLEDLTIHRDMHDNVKTLVIIVPSLLRLNLPIDGAYSCDGYVIVTPALKYLKVPGLYREDFSYLLTHMPNVEEADLSVEQDVERLFESITSVKRLSLFVLLDIEDESMYHNGIYFNQLEHLNLHIYRDNWSKLLVRLLEDSPKLRVLKIVVDVSFFIGNLKALVLLIISFLTKI

SEQ ID NO: 1503 - protein, 268 aa, Agrobacterium rhizogenes
RVTHHTMVHKQMSRFFTGFRRDAHPMAVMCGCVGALSAFYHDSTDITDPHQRMVASLRMIAKMPTLAAMAYKYHIGQPFVYPKNDLDYASNFLRMCFAVPCEEYVVNPVLARAMDRIFILHADHEQNASTSTVRLAGSSGANPFACIAAGIACLWGPAHGGANEAALNMLNEIGTVDRIPEFIARAKDKNDPFRLMGFGHRVYKNYDPRAKIMQKTAHEVLGELGIKDDPLLDIAIELERIALTDEYFIEKKLYPNVDFYSGITLKAL

SEQ ID NO: 1504 - protein, 375 aa, Glycine max
MGVCFASLARHQTPSKSIPYAGSGRESLGSKDENMGITESTSSVNGGSCSSHSSKNIVFPSVEVRNLKEFSFANLKAATKSFKSDALLGEGGFGKVYKGWLDEKTLAPTKAGSGIMVAIKKLNSESMQGFREWQSEINFLGRISHPNLVKLLGYCCDDIEFLLVYEFMPKGSLENHLFRRNTNSEPLSWDTRIKIAIGAARGLAFLHTSEKQIIYRDFKASNILLDEDYNAKISDFGLAKLGPSGEDSHVSTRIMGTYGYAAPEYIATGHLYVKSDVYGFGVVLLEMLTGLRALDKNRPIEQQNLIEWAKPSLSDKRKLKSIMDERIEGQYSTKAALKSAHLILKCLQCDRKKRPHMKDVLDTLEHIEAIKDRTK

SEQ ID NO: 1505 - protein, 338 aa, Bacteroides thetaiotaomicron VPI-5482
MKAVQIVNPSEMKVVELEKPTVGAGEVLVRIKYVGFCGSDLNTFLGRNPMVKLPVIPGHEVGAVIEEIGPDVPAGFEKGMNVTLNPYTNCGKCASCRNGRVNACEHNETLGVQRNGVMCEYAVLPWTKIIPAGNISSRDCALIEPMSVGFHAVSRAQVIDNEYVMVIGCGMIGIGAIVRAALRGATVIAVDLDDEKLVLAKRVGASYAVNSKTENVHERIQEITAGFGADVVIEAVGSPVTYVMAVDEVGFTGRVVCIGYAKKEVAFQTKYFVQKELDIRGSRNALPADFRAVINYMKEGKCPVEELISKIAKPEDALEAMKEWAADPGKVFRILVEM

SEQ ID NO: 1506 - protein, 251 aa, Arabidopsis thaliana
MENEREKQVYLAKLSEQTERYDEMVEAMKKVAQLDVELTVEERNLVSVGYKNVIGARRASWRILSSIEQKEESKGNDENVKRLKNYRKRVEDELAKVCNDILSVIDKHLIPSSNAVESTVFFYKMKGDYYRYLAEFSSGAERKEAADQSLEAYKAAVAAAENGLAPTHPVRLGLALNFSVFYYEILNSPESACQLAKQAFDDAIAELDSLNEESYKDSTLIMQLLRDNLTLWTSDLNEEGGILIFFCFPIS

SEQ ID NO: 1507 - protein, 268 aa, Agrobacterium rhizogenes
RVVHHTMVHEQMSRFFTGFRRDAHPMAVMCGCVGALSAFYHDSTDITDPHQRMVASLRMIAKMPTLAAMAYKYHIGQPFVYPKNDLDYASNFLRMCFAVPCEEYVVNPVLARAMDRIFILHADHEQNASTSTVRFAGSSGANPFACIAAGIACLWGPAHGGANEAALNMLTEIGSVDHIPEYIARAKDKNDPFRLMGFGHRVYKNYDPRAKIMQKTAHEVLGELGIKDDPLLDIAIELERIALTDEYFIEKKLYPNVDFYSGITLKAL

SEQ ID NO: 1508 - protein, 97 aa, Triticum aestivum
  misc_feature (80)..(80): Xaa can be any naturally occurring amino acid
KALHQYDCLRANKATSAWGLEVRVPFLDKEFIDVAMSMDPEWKLYDADLGRIEKWVLRKAFDDEKEPYLPRHILYRQKEXFNDGVGYNWIRRLKRFY

SEQ ID NO: 1509 - protein, 229 aa, Triticum aestivum
  misc_feature (21)..(21): Xaa can be any naturally occurring amino acid
QQSFPLQPQQPFPQQPQQPFXLQPQQPFPQQPQQPFPQPQQPIPVQPQQSFPQQSQQSQQPFAQPQQLFPELQQPIPQQPQQPFPLQPQQPFPQQPQQPFPQQPQQSFPQQPQQPFPQQPQQPFPQQPQQPFPQQPQQPFPLRPQQPFPQQPQQSQQSFPQPQPQQPQQPSILQPQQPLPQQPQQPFQQPQQQLSQQPEQTISQQPQQPFPPATTPTSTTISTTTTIWE

SEQ ID NO: 1510 - protein, 178 aa, Zea mays
MAEAPASPGGGGGSHESGSPRGGGGGGSVREQDRFLPIANISRIMKKAIPANGKIAKDAKETVQECVSEFISFITSEASDKCQREKRKTINGDDLLWAMATLGFEDYIEPLKVYLQKYREMEGDSKLTAKSSDGSIKKDALGHVGASSSAAQGMGQQGAYNQGMGYMQPQYHNGDISN

SEQ ID NO: 1511 - protein, 302 aa, Zea mays
MAGMSLQHPWAFAFGLLGNVISFMTFLAPIPTFYRIYKSKSTEGFQSVPYVVALFSAMLWIFYALIKSNETFLITINAAGCVIETIYVVMYFVYAPKKAKLFTAKIMALLNGGVFGVILLLTLLLFKGSKRVVLLGWICVGFSVSVFVAPLSIMRRVIQTKSVEYMPFSLSLSLTLSAVVWFLYGLLIKDKYVALPNVLGFIFGVVQMVLYVFYMNKTPVAATAVGKDAGKLPSAADEHVLVNIAKLNPALPERTSGMHPVTQMAAVPARSCAAEAIAPAMLPNRDVVDVFVSRHSPAVHVV

SEQ ID NO: 1512 - protein, 495 aa, Pseudomonas aeruginosa UCBPP-PA14
MSIAIDPSVSAFLRSPHGLLIEGESGPARSGADMPLYDPATGAELARVARAGAEDVDRAVAAARRAFEGNWAGQRPADRERLLLRLAERIEAHGEQLAQLETLNNGKSINLSRALEVGASVEFIRYMAGWATKIEGRSLDLSIAAVPGARYRAYTVPEPVGVVGAIVPWNFPLLMAIWKIVPALACGCTVVLKPADETPLTALRLGQLCLEAGIPPGVVNIVTGTGAEAGAALAAHPGIDKLAFTGSTPVGKLIGHAAVENMTRFSLELGGKSPVIILDDTSLDMAAAGSAGAIFFNQGQVCTAGSRLYVQRKRFDQVLERLAAIAGDLSIGPGLDPTTQINPLVSARQQERVLGMIESGVAEGASVVCGGARQGETGFYVQPTILADVTPGMQVVREEIFGPVLVATPFDDLDEAVRLANDSIYGLGASIWSNDLRQVMDLVPRIKAGTVWVNAHNLLDPSMPFGGFKQSGIGREMGHAAIEAYTENKSVCIAY

SEQ ID NO: 1513 - protein, 389 aa, Escherichia coli
TLQNGKLNVPENPIIPYIEGDGIGVDVTPAMLKVVDAAVEKAYKGERKISWMEIYTGEKSTQVYGQDVWLPAETLDLIREYRVAIKGPLTTPVGGGIRSLNVALRQELDLYICLRPVRYYQGTPSPVKHPELTDMVIFRENSEDIYAGIEWKADSADAEKVIKFLREEMGVKKIRFPEHCGIGIKPCSEEGTKRLVRAAIEYAIANDRDSVTLVHKGNIMKFTEGAFKDWGYQLAREEFGGELIDGGPWLKVKNPNTGKEIVIKDVIADAFLQQILLRPAEYDVIACMNLNGDYISDALAAQVGGIGIAPGANIGDECALFEATHGTAPKYAGQDKVNPGSIILSAEMMLRHMGWTEAADLIVKGMEGAINAKTVTYDFERLMEGAKLV

SEQ ID NO: 1514 - protein, 503 aa, Avicennia marina
MSTMAIRMPTRQLFIDGEWREPVQRKRILIINPANEQTIGDIPAATAEDVDIAVEAARKAFFRNSGKDWSSTTGAHRAKYLRAIAAKIKDRKAELVKLEAIDSGKPLVEASLDMDDVIGCFEYFAGIAERLDSEQRTPVSLPMETFKCHLLKEPIGVVGLISPWNYPLLMAIWKVAPALASGCTAILKPSELASVTCLELAEVCMEVGLPPGVLNILTGLGPEAGAPLVTHPHVAKISFTGSDTTGVKIMTAAAQLVKPVTLELGGKSPIVVFEDVDLDTAAEWTLFGCFWTNGQICSATSRLLVHESIAATFLEKLVKWCEKIKISDPLEEGCRLGPIVSRRQYEKVMKYISTAKEEGATILCGGARPEHLEKGYFVQPTIITDVKTSMQIWIEEVFGPVLCVKTFATEDEAIDLANDTHYGLAAAVISKDLDRCERMAKAFQVGAVWVNCSQPCFYQAPWGGKKRSGFGRELGERGLDIYLNVKQVTQYVSSEPWDWYKSP

SEQ ID NO: 1515 - protein, 389 aa, Escherichia coli
TLQNGKLNVPENPIIPYIEGDGIGVDVTPAMLKVVDAAVEKAYKGERKISWMEIYTGEKSTQVYGQDVWLPAETLDLIREYRVAIKGPLTTPVGGGIRSLNVALRQELDLYICLRPVRYYQGTPSPVKHPELTDMVIFRENSEDIYAGIEWKADSADAEKVIKFLREEMGVKKIRFPEHCGIGIKPCSEEGTKRLVPAAIEYAIANDRDSVTLVHKGNIMKFTEGAFKDWGYQLAREEFGGELIDGGPWLKVKNPNTGKEIVIKDVIADAFLQQILLRPAEYDVIACMNLNGDYISDALAAQVGGIGIAPGANIGDECALFEATHGTAPKYAGQDKVNPGSIILSAEMMLRHMGWTEAADLIVKGMEGAINAKTVTYDFERLMEGAKLL

SEQ ID NO: 1516 - protein, 484 aa, Rhizobium sp. NGR234
MKLKDKELFRQAGVIGGEWIGAASGDVVEVFDPASQAVLGTVPDMGTAETRAAIEAAETAFGPWKKKTHAERAALLERWHALMIEHLEDLALILTLEQGKPLDEARGEIRYGAAFVKWFAEEARRIGGHTIPSPTPDRRIVVLKEAVGVCAIVTPWNFPNAMITRKVAPALAAGCTVVIKPSEFTPFSALALGVLAERAGIPAGVVNIVTGMPTAIGNEIMANETVRKISFTGSTRVGSLLMRGAADSVKRLSLELGGNAPFIVFDDADLDLAVEGAIASKFRNGGQTCVCANRILVQSGVYDAFAEKLAARVNAMKVGPGTEPGVAIGPMINAAAIDKIDRHVEDALAKGAKIAARGRSLPVGRQYTAPLVLTGATTEMLLASEETFGPVAPLFCFETEEEAITIANGTPFGLAAYFYTENLKRSWRVAEALEFGMVGLNTGAISTEVAPFGGVKQSGLGREGAQVGIEEYLELKSFHIGGLA

SEQ ID NO: 1517 - protein, 335 aa, Xylella fastidiosa Dixon
MTQTITVIRGDGIGPEIMDATLSVLNALQANLNYEFADAGLSALEKHGDLLPEATLNSISKNKIALKSPLTTPVGEGFSSINVALRRKFDLYANVRPAKSFPNTKSRFSDNVDLITVRENTEGAYLSEGQTISPDGEVATSSARVTRKGSERIVRYAFDLARTTGRKKVTAVHKANIIKSTSGLFLKTARDVASQYPEIDFQEMIVDNTCMQLVMRPEQFDIIVTTNLFGDILSDLCAGLVGGLGLAPGANIGNEQAIFEAVHGSAPDIAGQGKANPCALLLGAVQMLDHIGQPQNAERLRNAIVATLNAKDSLTPDLGGNGNTMGFAKAIASRL

SEQ ID NO: 1518 - protein, 158 aa, Zea mays
  misc_feature (42)..(42): Xaa can be any naturally occurring amino acid
  misc_feature (91)..(91): Xaa can be any naturally occurring amino acid
MIQKNEKAFHTRRNKDEEITMVHGSRAPAMNIQRYTERVHRXARCSPACFVAAFVYIIRYLERPGATSMTLRLTSLNVDRLLITSLLVAAXFLDRKCYNNAYYAKIGGASTEEMNRLERTFLFDLDFRLNITAEMFEKHCLMLQRQTVPWWFKRTNSP

SEQ ID NO: 1519 - protein, 487 aa, Rhizobium sp. NGR234
MTLSFDPDSLPLPVGHFIGDRLLPAEGFIDMHRPSDGKAYAGCPIADEALVDQAVETAKKALKASNWGGLRPRERTVALQRWADLIESEAETLAKLEALSSTRPVGHLVAGDIAVSAEQIRFFAEFADKEGSDLVPTDDSNLGMIMTEPYGVVAAITPWNFPVSMAAWKLGPALAAGNAVVLKPSEMTPFSTVYLAELAIRAGMPAGLINIVLGDGTVTGTAITGHPDIAKVSFTGSTGAGAAIMANIARTGVKPMTLELGGKSPQLVFADADLDKAAAAIAQSMLSNAGQACVAGSRLIVEESVAAPLAEAIVTRMKAAKPGPTWDEATEYSPIISKRQLNRIHGIVEAAVAAGGECLFGGKQMDAPGYFYQPTLMAVRDSSSPAITEEIFGPVLTMQTFADEEEALALADHPTYGLAAGLFTRDLSRALRLTRRLQAGTVWVNRYSRSRDHILPTGGYKRSGIGKDLGREAYHANRKSKSVLISL

SEQ ID NO: 1520 - protein, 388 aa, Escherichia coli
TLQNGKLNVPENPIIPYIEGDGIGVDVTPAMLKVVDAAVEKAYKGERKISWMEIYTGEKSTQVYGQDVWLPAETLDLIREYRVAIKGPLTTPVGGGIRSLNVALRQELDLYICLRPVRYYQGTPSPVKHPELTDMVIFRENSEDIYAGIEWKADSADAEKVIKFLREEMGVKKIRFPEHCGIGIKPCSEEGTKRLVRAAIEYAIANERDSVTLVHKGNIMKFTEGAFKDWGYQLAREEFGGELIDGGPWLKVKNPNTGKEIVIKDVIADAFLQQILLRPAEYDVIACMNLNGDYISDALAAQVGGIGIAPGANIGDECALFEATHGTAPKYAGQDKVNPGSIILSAEMMLRHMGWTEAADLIVKGMEGAINAKTVTYDFERLMEGAKL

SEQ ID NO: 1521 - protein, 291 aa, Oryza sativa (indica cultivar-group)
MSAAPVVDAEYMAEVERARRDLRALIASKSCAPIMLRLAWHDAGTYDKATKTGGPNGSIRFPQEYSHAANAGIKIAIDLLEPMKQRHPKITYADLYQLAGVVAVEVTGGPTIDYVPGRRDSSDSPEEGRLPDAKKGAAHLREVFYRMGLSDKDIVALSGGHTLGKARPERSGFDGAWTKDPLKFDNSYFIELLKENSEGLLKLPTDKALVEDPTFRRYVELYAKDEDAFFRDYAESHKKLSELGFTPPRSAFIYKSCQKPKSLLMQTAAGVAVAAAVVAWAYLCESNKRLG

SEQ ID NO: 1522 - protein, 483 aa, Buchnera aphidicola str. APS (Acyrthosiphon pisum)
MQKNLIWFRNDLRVYDNTALHQACQNDTDKVISLFISTPKQWHNQSVSKKKISFMYYHLISLQKELLKLNIILYYHESTDFLNSIEYLIFFCKKHKVNNLFYNYEYAINERYRDYLVKKKLSQKGFLVKGFHDNLLFSNRQIRNQKNETYKVFTFFKKKVIQNLHNNIPQCFPVPSKRKSDRDIFLTSISLKNVNLNFNKNFFPVGEKEAINRLKNFCIYKFNDYFLKRDYPFLDATSMLSPYLSAGIISSRYCLKVLLKTKNSLPLNVLLTSPWFDQILWREFYYHLLIGFPKISRSESLVTWEKEIHWINNIKHFNAWKEGNTGFPIIDAGMRQLNELGWMHNRLRMITSSFLVKNLLINWREGEEHFISNLIDGDLALNNGGWQWSASVGCDSVPYIRIFNPLHQSKTFDESGNFIKKFIPELKNVPNHHIHQPHEWSKQKNFKIDYPNPIINYSESRKTSLSLFKQARLKLHKNGLKNS

SEQ ID NO: 1523 - protein, 455 aa, Rhodospirillum rubrum
MVSNALRDADLSYTIHPYTNLVAHETKGPLIAVRGEGVRVFDDKGKDYIEGMAGLWCASLGFSEPRLAAAAARQMAELPFFHMFSHKSHEPGIRLSEELVKRAPVPMARAFFCNSGSEANDTAIKMIWYINNALGRPQKKKIIARKRAYHGVTVASASLTGLPANHRDFDLPIANILHTSSPDYYREGKPGESEEAFAKRCADELEAMILAEDPNTVAAFFAEPIMGAGGVVLPPKGYFEHIQAVLKKYDILLVADEVICGFGRTGQYWGSQTFGLKPDILTCAKALSSAYMPISAVLVTEEVYKPLRDNSGKIGTFGHGYTYSAHPVAAAVALETLAIYDERDILGNVAVSGARLQERLRSFADHPLVGNVRGIGLIGAIELVADKATHGAFPASDAVGPRVVTKAEEAGVILRAMAGDVVAFSPPLIITPEEVDQMMDRFTVALEAVTAEVLG

SEQ ID NO: 1524 - protein, 305 aa, Nicotiana tabacum
MGLDYYDVLKVSRNASEEDLKRSYKRLAMKWHPDKNSQNKKEAEAKFKQISEAYDVLSDPQKRQIYDVYGDDALKSGQFASASPTSAGSNGRGFRFNTRDAEAIFAEFFGGSDSNSAAGVGRKAAPVENKLPCSLEELYKGSRRKMKISRILLDDSGKPTTVEEVLAIHIKPGWKKGTKITFPEKGNYEPGATPGDLIFVIDEKPHAVFKRDGNDLVINQKISLLDALTGKTISLITLDGRELTIPITDVVKPGHEHIIPNEGMPISKERGKKGNLKIKFDIKFPSRLSADQKSDIRRVLCRNSD

SEQ ID NO: 1525 - protein, 490 aa, Escherichia coli O157:H7
MSRMAEQQLYIHGGYTSATSGRTFETINPANGNVLATVQAAGREDVDRAVKSAQQGQKIWAAMTAMERSRILRRAVDILRERNDELAKLETLDTGKAYSETSTVDIVTGADVLEYYAGLIPSLEGSQIPLRETSFVYTRREPLGVVAGIGAWNYPIQIALWKSAPALAAGNAMIFKPSEVTPLTALKLAEIYSEAGLPDGVFNVLPGVGAETGQYLTEHPGIAKVSFTGGVASGKKVMANSAASSLKEVTMELGGKSPLIVFDDADLDLAADIAMMANFFSSGQVCTNGTRVFVPAKCNAAFEQKILARVERIRAGDVFDPQTNFGPLVSFPHRDNVLRYIAKGKEEGARVLCGGDVLKGYGLDNGAWVAPTVFTDCSDEMTIVREEIFGPVMSILTYESEDEVIRRANDTDYGLAAGIVTADLNRAHRVIHQLEAGICWINTWGESPAEMPVGGYKHSGIGRENGVMTLQSYTQVKSIQVEMAKFQSIF

SEQ ID NO: 1526 - protein, 498 aa, Bacillus halodurans C-125
MQKISTNDSKLNPRLVAFLNGGPKKLFINGEWVDSFSGQSFETMNPATGETLALVAEAGSEDIDFAVKAARKAFDEGPWSKMSAAERSRLIYKLADLIEDHKEALAQLETLDNGKPIRETANADIPLVIEHFRYFAGWATKIVGQTIPVQGHYFNYTRHEAIGVVGQIIPWNFPLLMAAWKLGAALATGCTVVLKPAEQTPLSALYLGELINEAGFPKGVVNIVPGFGHSAGTPLVNHPAVDKVAFTGSTDVGKLIMKQASESLKRVTLELGGKSPNIILPDADLSKAVPGSLMGIMFNQGQVCCAGSRLYVQKKQYDHVVADLVSLTNEIQQGDGLLEQTTMGPLISNQQQSRVKNYIDRGVEEGAELLTGGNIPYDQGYFVAPTIFADVDHSMTIAKEEIFGPVVAAMPFDSIDDLIDKANDSDYGLAAGVWTQDIKKAHYIAHRIKAGTIWVNCYNVFDAASPFGGYKQSGIGREMGSYALENYTEVKSVWVNMD

SEQ ID NO: 1527 - protein, 378 aa, Arabidopsis thaliana
MANHLQVPLTKPDRVKEEQEVEEEARLLARRLANAAASPMVLKAALELGVIDTITTVGGGDLWLSPSEIALRLPTKPCNLEAPALLDRMLRFLVSHSVLKCRTVIEENGQTGKVERVYAAEPVCKYLLNKSDDVSGSFASLFMLDLSDVFIKTWTHLEDVILEGRDAFSSAHGMKLFEYIQADERFGKVFNRAMLESSTMVTEKVLKFYEGFKDVKTLVDVGGGLGNTLGLITSKYPHLIGINFDLAPVLANAHSYPGVNHVAGDMFIKIPKGDAIFMKWILHDWTDEQCVAILKNCWKSLEENGKLIIVEMVTPVEAKSGDICSNIVFGMDMTMLTQCSGGKERDLYEFENLAYASGFSRCAIVCAVYPFSVIEIYK

SEQ ID NO: 1528 - protein, 320 aa, Buchnera aphidicola str. APS (Acyrthosiphon pisum)
MIKKIGVLTSGGDAPGMNAAIRGVVRTALSERLEVFGIYDGYLGLYENRMVQLDRYSVSDMINRGGTFLGSARFASFYQDKIRSIAVQNIKKRKIDALVVIGGDGSYIGAQKLTEMGIPCISIPGTIDNDVSGTDYTIGYFTALQTVVEAIDRLRDTSSSHQRISIVEVMGRHCGDLTLAAAIAGGCEFIVLPEIDYKKEDLVIEIQAGIAKGKKHAIVAITEYICDVEELAQYIEKKTNRETRATILGHIQRGGAPVVYDRILASRMGAYSVELLIKGYQGKCVGIQNEKMVFNDIKNALKNMKRTFKKDWLITAKKLY

SEQ ID NO: 1529 - protein, 150 aa, Zea mays
MAMAYKMATEGMNVKEECQRWFMEMKWKKVHRFVVYKIDERSRAVLVDKVGGPGEGYEELVAALPGDDCRYAVFDFDFVTVDNCQKSEIFSIACKIFFIAWSPAASRIRAKILYATSKQGLRRLLDGVHYEVQATDPSEMGFDVIRGRAQ

SEQ ID NO: 1530 - protein, 275 aa, Arabidopsis thaliana
MSLFLKDDSIQIREVWNDNLESEMALIREVVDDFPFVAMDTEFPGIVCRPVGTFKTNTEYHYETLKTNVNILKMIQLGLTFSDEKGNLPTCGTDNKYCIWQFNFREFDLESDIYATDSIELLRQSGIDFVKNNEFGIDSKRFAELLMSSGIVLNENVHWVTFHSGYDFGYLLKLLTCQNLPETQTGFFEMISVYFPRVYDIKHLMKFCNSLHGGLNKLAELLDVERVGICHQAGSDSLLTSCTFRKLQENFFIGSMEKYSGVLYGLGVENGQIVH

SEQ ID NO: 1531 - protein, 167 aa, Zea mays
  misc_feature (41)..(41): Xaa can be any naturally occurring amino acid
MRGILTALGCSDWPQAKRARILACSRRMKHRGPDWTALYQXHEGNFLAQQRLTVISPLSGDQTLFSEDRTVVAAASGEIYNHKNVRKKVTGTPNFSTGSDCEVIIPLYYKYEENFVDTLDGEFAVVVYDTRDRTYTTDRDAIGVKPLYIGCGSDRSGCIAAEKNALN

SEQ ID NO: 1532 - protein, 180 aa, Arabidopsis thaliana
MASSMLSSATMVASPAQATMVAPFNGLKSSAAFPATRKANNDITSITSNGGRVNCMQVWPPIGKKKFETLSYLPDLTDSELAKEVDYLIRNKWIPCVEFELEHGFVYREHGNSPRYYDGRYWTMWKLPLFGCTDSAQVLKEVEECKKEYPNAFIRIIGFDNTRQVQCISFIAYKPPSFTG

SEQ ID NO: 1533 - protein, 137 aa, Triticum aestivum
SAEAALVELLLDEPERRVCELALPVLDRLCTCAEGRAELVAHAAGVAVVGKKVLRVSDAASERAVRVLRSVARHAATPAVLQEMAHAGVVGKLCLALRSELCGVKTKEKAHEVLKLHSRIWRSSPCLSPKFLALYPS

SEQ ID NO: 1534 - protein, 520 aa, Zea mays
MGEAQDYYNTSTALAGAAAAGLALLAVCSYYLLVGRRRGKAPKRYAPVVGTVFHQLYHVRRLHDYHTDLFRQRKTFQLLVPAGRRQIYTCDPAVVEHILRTNFANYGKGSFNYENMTDLLGDGIFAVDGDKWRQQRKIASYDFSTRALRDFSGAVFKRNAARLAGIVSGNAASGQPMEFQGLALRATMDSIFTIAFGLDLDTLGGSAEGSRFAAAFDDASEFTLLRYVNAFWKAQRFLGVGSEAALKKRVKVVDEFVYKRIRERAQELSDSKMATEDTVPDSRQDMLSRFIHTATNESGTVDYKYLRDIILNIVIAGKDTTAGALAWFLYMACKHPEIQEKICQEAAKATSASETAGVDEFAQSLTDEALNKMHYLHAALTETLRLYPSVPLDNKQCFGDDVLPDGSSVSKGDIVFYVPYAMGRMEYLWGKDAEVFRPERWLDQDGEFQQESPFKFTAFQAGPRICLGKEFAYRQMKIFAAVLLRFFVFRLRDGDKASVNYRTMITLHIDEGLHLTATAR

SEQ ID NO: 1535 - protein, 349 aa, Oceanobacillus iheyensis HTE831
MEALNLYGIEDLRYEDTPKPMIEKDDDVIIKVKSVGICGSDTSRYKKLGPYVEGMTFGHEFAGEVIEVGKSVTNFKSGDRVVACPTFSCGNCHYCREGHPTRCVELTVIGARNPGAYAEYTKLPEGHVKILPDSIDDDTAALVEPSAVVAHGFYRASITPGSSVAIMGVGSIGLLAVQWAKIFGASKVIAIDIDDHKLKIAQELGADIVVNPMKENAEGIVKQHTDELGVDLAVESAGSPITSEQVLALPKKGGEVVFLGIPYGDITLKRYYFEKIVRNELRILGSWNALSAPFPGKEWNATLHYMSTGQLNIKPMISHRLGLQAGPEIFHQITNKLSDAVKVIFHPGK

SEQ ID NO: 1536 - protein, 157 aa, Brassica rapa subsp. pekinensis
SNADKLLTEFIEKQLIDYAKNSKKVVGNSTSLLSPYLHFGEISVRRVFQCARMKQIIWARDKNGQGEESAVLFLRGIGLRDYSRYICFNFPFTHEQSLLSHLRFFPWDADVEKFKAWRQGRTGYPLVDAGMRELWATGWMHNRIRVIVSSFAVKFLL

SEQ ID NO: 1537 - protein, 475 aa, Staphylococcus epidermidis ATCC 12228
MRNFTKQYINGEWVDSASGETIDVINPATEEVMGKIAKGNEEDVNKAVDAADKVYLEFRHSSVEERRELLDKIVKEYQNRKNDLIEAITDELGAPLSVSENVHYQMGLNHFTAARDALDSFQFEEQRGDDLVVKEAIGVAGLVTPWNFPTNQTSLKLAAAFAAGSPVVLKPSEETPFAAIILAEIFDKVGVPKGVFNLVNGDGSGVGNPLSEHPKVRMMSFTGSGPTGSKIMEKAAKDFKKVSLELGGKSPYIVLDDVDVEEAANATTKKVVNNTGQVCTAGTRVLIPESIKEDYLTAVKEAFSKVKVGQPREEGTQVGPIISKKQFDQVQDYIDKGINEGAELFYGGPGKPEGLDKGYFARPTIFINVDNHMTIAQEEIFGPVMSVITYNNLDEAIEIANDTKYGLAGYVIGKDKDTLRHVARSIEAGTIEINEAGRKPDLPFGGYKESGLGREWGDYGIEEFLEVKSIAGYFK

SEQ ID NO: 1538 - protein, 344 aa, Oceanobacillus iheyensis HTE831
MKALVKTELGHGNLHIQNVEEPSVSSHQVKIKVAYAGICGSDIHTYEGHYKVAAPVTLGHEFSGRIVEVGEGVTDFKVGDRVTSETTFSICGECRYCQTGDYNLCNHRKGLGTQQNGGFTNYLIAREESLHHLPDEVDDRSASMTEPLACTYHAIQKINIKPGDLVVVLGPGPIGLLAAQVAKSYGATVMMSGLDNDKIRLDKAKEVGIDYVINIQEEDIKEKIAALTDGYGVDVVLECSGSIHAANQGLDLLRKKGSYAQVGIFPDSHVKFDMEKVIQKEIHVVGSRSQKSADWEPSLQLMKEKKVDAKALVTHEFTIDQWDEAYQAIKDGEAIKVLLKPLQD

SEQ ID NO: 1539 - protein, 268 aa, Mesorhizobium mediterraneum
RVTRHTMVHEQMSRFFTGFRRDAHPMAVMCGVVGALSAFYHDSTDISDPYQRMVASMRLIAKMPTIAAMAYKYHIGQPFIYPKNELNFAANFLHMCFAVPCEEYKINPVPARAMERIFILHADHEQNASTSTVRLAGSSGANPFACIAAGIACLWGPAHGGANEAALNMLGEIGHVDHIPEFIARAKDKNDPFRLMGFGHRVYKNYDPRAKIMQKTAHEVLGELGIKDDPLLDIAMELEKIALTDSYFIEKKLYPNVDFYSGITLKAL

SEQ ID NO: 1540 - protein, 57 aa, Triticum aestivum
MAVEGTDNCIDIILAIILPPLGVFFKFACGIEFWICLLLTFFGYLPGIIYAVWVITK

SEQ ID NO: 1541 - protein, 347 aa, Solanum tuberosum
MADECAAFVKGTELPVKRPREEEAETEMEAANNSNNNNGCSTNEKEEPSPYISSVLPGWFSEISPLWPGEAHSLKVEKILFQGKSDYQNVLVFQSSTYGKVLVLDGVIQLTERDECAYQEMITHLPLCSIPNPKKVLVIGGGDGGVLREVSRHSSVEQIDICEIDKMVVEVAKQFFPDVAVGYEDPRVNLRIGDGVAFLKNVPAGTYDAVIVDSSDPIGPAQELFEKPFFESIAKALRPGGVVATQAESIWLHMHIIEEIVANCRQIFKGSVNYAWTTVPTYPSGMIGFMLCSTEGPAVDFKNPINPIDDESPVKTIEPLKFYNSEIHQASFCLPSFAKRVIETKGK

SEQ ID NO: 1542 - protein, 502 aa, Avicennia marina
  misc_feature (158)..(158): Xaa can be any naturally occurring amino acid
MAIRIPSRQLFIDGKWREPVNRKRLPIVNPATEETIGDIPAATAEDVNIAVEAARKAFFHNGGKDWATASGAHRAKYLRAIAAKVTEKKEELAKLEVLDCGKPLEEAAWDMDDVAGCFEYFADLAERLDSNQIPVSLPMDTFKCHVLKEPIGVVGLVXPWNYPLLMATWKVAPALAAGCTAILKPSEIASVTCLELAQVCKEVGLPAGVLNILTGLGPEAGAPLASHPHVDKITFTGSGATGSKIMTAAAQLVKPVTLELGGKSPIVVFEDVDLDTAAEWTLFGCFWTNGQICSATSRLLVHESIATTFLEKLVKWCEKIKISDPLEEGCRLGPIISRGQYEKVMKFISTAKEEGATILCGGARPEHLEKGYFVQPTIITDVKTSMQIWIEEVFGPVLGVKTFSKEDEPFELANDPHYGWAAAVLSQDLERCERMTKAFQAGIVWVNCSQPCFCQAPWGGKKRSGFGRDLGEWGLDNYLNVKQVTRYVSSEPWDWYKSPSKL

SEQ ID NO: 1543 - protein, 268 aa, Rhizobium galegae
RVTHHTMVHEQMSRFFTGFRRDAHPMAVMCGCVGALSAFYHDSTDITDPHQRMVASLRMIAKMPTLAAMAYKYHIGQPFVYPQNNLDYASNFLRMCFAVPCEEYVVNPVLSRAMDRIFILHADHEQNASTSTVRLAGSSGANPFACIAAGIACLWGPAHGGANEAALNMLTEIGTVDKIPEYIARAKDKNDPFRLMGFGHRVYKNYDPRAKIMQKTTHEVLGELGHKDDPLLQVAMELERIALTDEYFIEKKLYPNIDFYSGITLKAM

SEQ ID NO: 1544 - protein, 268 aa, Sinorhizobium terangae
  misc_feature (68)..(68): Xaa can be any naturally occurring amino acid
RVTHHTMVHEQMSRFFTGFRRDAHPMAVMCGCVGALSAFYHDSTDITDPHQRMVASLRMIAKMPTIAXMAYKYHVGQPFVYPKNDLDYASNFLRMCFAVPCEEYVVNPVLSRAMDRIFILHADHEQNASTSTVRLAGSSGANPFACIAAGIACLWGPAHGGANEAALNMLAEIGTVDRIPEYIARAKDKNDPFRLMGFGHRVYKHYDPRAKIMQKTTHEVLAELGHKDDPLLEVAMELERIALTDEYFIEKKLYPNIDFYSGITLKAL

SEQ ID NO: 1545 - protein, 459 aa, Brassica rapa
MTSINVKLLYHYVITNLFNLCFFPLTAIVAGKAYRLTIDDLHHLYYSYLQHNLITIAPLFAFTVFGSVLYIATRPKPVYLVEYSCYLPPTHCRSSISKVMDIFYQVKKSCPSRNGTCDDSSWLDFLRKIQERSGLGDETHGPEGLLQVPPRKTFAAAREETEQVIIGALENLFKNTNVNPKDIGILVVKSSMFNPTPSLSAMVKNNFKLRSNVRSFNLGGMGCSAGVIAIDLAKDLLHVHKNTYAFVVSTENITYNIYAGDNRSMMVSNCLFRVGGAAILLSNKPGDRRRSKYELVHTVRTHTGADDKSFRCVQQGDDENGKIGVSLSKDITDVAGRTVKKNIATLGPLILPLSEKLLFFVTFMGKKLFKDKIKHYYVPDFKLAIDHFCIHAGGRAVIDVLEKNLALAPIDVEASRSTLHRFGNTSSSSIWYELAYIEAKGRMKKGNKVWQIALGSGFK

SEQ ID NO: 1546 - protein, 268 aa, Rhizobium etli
RVTHHTMVHEQMSRFFTGFRRDAHPMAVMCGCVGALSAFYHDSTDITDPHQRMVASLRMIAKMPTLAAMAYKYHIGQPFVYPKNDLDYASNFLRMCFAVPCEEYVVNPVLSRAMDRIFILHADHEQNASTSTVRLAGSSGADPFACIAAGIACLWGPAHGGANEAAPNMLTEIGTVDRIPEYIARAKDKNDPFRLMGFGHRVYKNYDPRAKIMQKTTHEVLGELGVKDDPLLEVAMELERIALTDEYFIEKKLYPNIDFYSGITLKAL

SEQ ID NO: 1547 - protein, 275 aa, Desulfovibrio desulfuricans G20
MASISVRQAGCYYYPHRHAKSHTTSDHADIRGAACYAGSNIRHNSCPFHHAVRSVSKETYMEFFLDTADLDEIRLAGKQGLIDGVTTNPTLLSRQGGDWKKRMQQICDEVDGPVSLEVISPDAEGMLREAEELVRYGDNVVIKVPMTAEGLIATRTLTGKGIKTNVTLVFSAMQALLAAKAGATYVSPFLGRLDGIGHEGMEIVSQIRTIFDNYGYETKILAASIRHAQHVLDSALVGADVVTVPYSVLRQLMHHPLTDSGLDAFLADWNKLTQS

SEQ ID NO: 1548 - protein, 345 aa, Marinomonas mediterranea
MRGFFVTATNSAVEMLIANSNTFFILLGAIMVFAMHAGFAFLEVGTVRSKNQVNALVKIMTDFAISALVYFFIGYQIAYGINFFESAATLAEQSGYALVKFFFLMTFAAAIPAIISGGVAERARFYPMLISAAVIVGVAYPFLEGLIWNGNYGFQDWLETQFGAPFHDFAGSIVVHGFGGWVALAAIILLGTRNGRFRGDKLVAFAPSNIPFLALGAWILCIGWFGFNVMSAQTLDGISGLVAVNSLMAMVGGIIAAMILGKNDPGFIHNGPLAGLVAVCAGSDIMHPIGALATGLVAGALFTWLFTLIQQKFQHIDDVLGVWPLHGICGAWGGIAAGIFGLESL

SEQ ID NO: 1549 - protein, 458 aa, Brassica rapa
MTSINVKLLYHYVITNLFNLCFFPLTAIVAGKAYRLTIDDLHHLYYAYLQHNLITIAPLFAFTVFGSVLYIATRPKPVYLVEYSCYLPPTHCRSSISKVMDIFYQVRKADPSRIGTCDDSSWLDFLRKIQERSGLGDENHGPEGLLQVPPRKTFAAAREETEQVIIGALENLFKNTNVSPKDIGILVVHSSMFNPTPSLSAMVNNFKLRSNVRSFNLGGMGCSAGVIAIDLAKDLLHVHKNTYALVVSTENITYNIYAGDNRSMMVSNCLFRVGGAAILLSNKPGDRRRSKYELVHTVRTHTGADDYSFRCVQQGDDENGKTGVSLSKDITDVAGRTVKKNIATLGPLILPLSEKLLFFVTFMGKKLFKDKIKHYYVPDFKLAIDHFCIHAGGRAVIDVLEKNLALAPIDVEASRSTLHRFGNTSSSSIWYELAYIEAKGRMKKGNKVWQIALGSGFK

SEQ ID NO: 1550 - protein, 459 aa, Brassica oleracea var. alboglabra
MTSINVKLLYHYVITNLFNLCFFPLTAIVAGKAYRLTIDDLHHLYYSYLQHNLITIAPLFAFTVFGSVLYIATRPKPVYLVEYSCYLPPTHCRSSISKVMDIFYQVRKADPSRNGTCDDSSWLDFLRKIQERSGLGDETHGPEGLLQVPPRKTFAAAREETEQVIIGALGNLFKNTNVSPKDIGILVVNSSMFNPIPSLSAMVVNTFKLRSNVRSFNLGGMGCSAGVIAIDLAKDLLHVHKNTYALVVSTENITYNIYAGDNRSMMVSNCLFRVGGAAILLSIKPGDRRRSKYELVHTVRTHTGADDFSFRCVQQGDDENGKTGVSLSKDITDVAGRTVKKNIATWGPLILPLSEKLLFFVTFMGKKLFKDKIKHYYVPDFKLAIDHFCIHAGGRAVIDVLEKNLALAPIDVEASRSTLHRFGNTSSSSIWYELAYIEAKGRMKKGNKVWQIALGSGFK

SEQ ID NO: 1551 - protein, 475 aa, Rhizobium sp. NGR234
MKHARKFYIDGEWVEPSVSKTLEVIDPSTEQPMGTIALGSAADAEKAVAAARRAFASYSQTSKQERVELLRRILTILKRRNDELGDIISREMGAPLAMARAEQAGIGAAHFEQAIKSFETFAFDYMQGTTRIVHEPVGVVAMITPWNWPINQIACKVAAALATGCTMVLKPSEIAPFNAVLFAEIMDEAGVPKGVFNLVQGDGPTVGAALASHPDVDMVSFTGSTRAGIAVAQAAAPTVKRVHQELGGKSPNIILRSADFPAAVAAGVRRCFGNSGQTCTAPTRMLVPAERMDEAGAIAARQADALVVGPPSDSRTDLGPVASAAQFDKIQALIERGIAEGAELVAGGLGRPSHLNAGYYVRPTVFARVTNQMSIAREEIFGPVLSIIGYDSEDEAIAVANDTPYGLAAYIQGDPKETRALAGKLRSGTVRLNSSGWDSAAPFGGYKQSGNGREYGKFGLHEFTEIKGIVGFLNE

SEQ ID NO: 1552 - protein, 243 aa, Zea mays
  misc_feature (24)..(24): Xaa can be any naturally occurring amino acid
  misc_feature (71)..(71): Xaa can be any naturally occurring amino acid
HRRRPRQLQELPKPDLPPLPKPVXPPRPDLPPLPKPEEQPPLPKPELPVPPQPLPIPPQPLPKPELPVPPXLFPVPPQPLPVPPQPMPKPELPVPPQPLPKPDMPVPPESLPKPELPVPPQPLPKPELPVPPEPLPKPELPVPPQPLLKPELPVPPEPLAKPELPMPPQPLPKPELPVPPEPLPKPELPVPPEPLPKPELPVPPEPLPKPELPPPVLPGELPPKPELVPLPPKAEIMPPLPKP

SEQ ID NO: 1553 - protein, 173 aa, Lemna gibba
MMVSTAAVARVRPAQTNMVGAFNGCRSSVAFPATRKANNDLSTLPSSGGRVSCMQVWPPEGLKKFETLSYLPPLSVEDLAKEVDYLLRNDWVPCIEFSKEGFVYRENNASPGYYDGRYWTMWKLPMFGCTDASQVIAEVEEAKKAYPEYFVRIIGFDNKRQVQCISFIAYKPT

SEQ ID NO: 1554 - protein, 283 aa, Hordeum chilense
MKIFLLFALLGLATTITTATVQFDPSGHGVQRPQQSYPQWQPVPQQQPFPQQDPQQQLLPQQQPFSQQQQLPQQHPFPQQMPLLPQPPQFPQQQPFAQPQQPLTQQPYPQEQPLSQQQPSVEEQQQLNVCKEFLLQQCNPNEKVSSLQSVIPFLRPQTWQQNSCQLKRQQCCRQLANINEQSRCPAIQTIVHAIVMQQQQVQQQVGHGFIQSQPQQLGQGMPIYPQQQPGHGFFLPQQQAQSFNLVRSLVIQTLPMLCNVHVPPYCSTTTAPFGSMPTGISGQ

SEQ ID NO: 1555 - protein, 475 aa, Mesorhizobium loti MAFF303099
MDTQMLIGSKFENGAETEESILNPKTGATILNLPEASQAQIEAAVAAAEKAFVSWSRTTPAQRSGYLLKIADRIEAEAKEFAALEALNCGKPINSVLNDEIPAIVDCYRFFAGAVRSMPGVVAGEYLPGHTSMVRRDPIGIVASIAPWNYPLMMMAWKLAPAIGGGNTVVFKPSEQTPLTALRLARILAEILPEGVVNVVLGRGDSVGNALINHPKVNMISITGDVATGKKVLQAAAKSVKRTHLELGGKAPVIVFDDADLGAVVNGLRAFGYYNAGQDCTAACRIYAGKKIYDKLVADLSSAVSTIKYNQPDDTENEIGPLISRRQRDRVSSFVERASELKHIEITTGGRPGEGTGFYYQPTVVAGALQEDEIVRREVFGPVVSITRFTEVDEAVNWANDSDYGLASSVWTKDVSRAMATAARLQYGCTWINTHFMLTNEMPHGGLKQSGYGKDMSLYALEDYTAVRHVMVAHA

SEQ ID NO: 1556 - protein, 284 aa, Hordeum chilense
MKIFLLFALLGLATTITTATVQFDPSGHGVQRPQQSYPQWQPVPQQQPFPQQDPQQQLLPQQQPFSQQQQLPQQHPFPQQMPLLPQPPQFPQQQPFAQPQQPLTQQPYPQEQPLSQQQPSVEEQQQLNVCKEFLLQQCNPNEKVSSLQSVIPFLRPQTWQQNSCQLKRQQCCRQLANINEQSRCPAIQTIVHATVMQQQQVQQQVGHGFIQSQPQQLGQGMPIYPRHQPGHGFFLPQQQAQSFNLVRSLVIQTLPMLCNVHVPPYCSTTTAPFGSMPRHRWPMK

SEQ ID NO: 1557 - protein, 136 aa, Neurospora crassa
MMSRQLRYIIYKLSDDFKEIVIESTSEGATENYDEFREKLVNAQTKSASGAISKGPRYAVYDFEYKLASGEGSRNKVTFIAWSPDDAGIKSKMVYASSKEALKRSLSGIAVELQANEQDDIEYEQIIKTVSKGTAA

SEQ ID NO: 1558 - protein, 479 aa, Burkholderia cepacia R18194
MEEAKHFIAGEWTLPAQLETIAVVDPSDGQPFASIARGTAPDIERAVAAARDAFAGPWGAASAAERGRVLMRLSARVAGSIEELAAIEARDTGKPLKQARADAAALARYFEFYAGAADKLHGETLPYQAGYTVLTVREPHGVTGHIVPWNYPMQIFGRSVGAALAAGNACVVKPAEDACLSLLRVAELAVEAGLPAGALNIVTGYGHEAGAALARHPGIDHISFTGSPATGKLVTQMAAENHVPVTLELGGKSPQIVFADADLEAALPVLVSAIVQNGGQTCSAGSRVLIERAVYEPLVERLATAFNGLRVGPSRADLDCGPLINAKQQQRVWDFLSDAQHDGIPMAAHGQVVADAPESGFYQAPALLRDVPPSHRLAQEEVFGPVLAAMRFVDEDEAVALANGTPYGLVAGIWTRDGARQMRLARRLRAGQVFINNYGAGGGVELPFGGVGHSGHGREKGFEALYGFTMLKTIAIRHG

SEQ ID NO: 1559 - protein, 117 aa, Brassica napus
MATVGRNIAAPLLFLNLIMYLIVLGFASWCLNRYINGQTNHPSFGGNGATLFFLTFSILAAVIGIASKLAGANHIRFWRNDSLAAAGSSSIVAWAVTALAMGLACKQINIGGWRGWR

SEQ ID NO: 1560 - protein, 112 aa, Bartonella sp. Rl3725tl
ANEACLKMLQEIGSIKRIPEFIARAKDKNDPFRLMGFGHRVYKNYDPRAKIMQQTCHKVLKELNIQNDPLLDIAIELEKIALSDEYFIEKKLYPNVDFYSGIILKALGFPTE

SEQ ID NO: 1561 - protein, 337 aa, Glycine max
MAKETSVVYLYPSKSQVWGENFDHKKLVITTLAANGKKEESNGAPNDTYPAFPGWYADVSWPGEAHTYKIEKILFHGKSEFQELLVFESSRQGKVAILDGHIQLTENDEFAYQEMLTHLALCSIPDPKKVLLIGGGDGGILREISRHSSVEHIDICELDQMVIDVYSEFFPDIAVGYEDPRVHVHISDGVAFINSVPEGTYDVIISDAFPAMGHSADVLADECFLESVAKALRPGGVFSAPADSLWHKNFVVADTIANCKKIFKGSVNYAWTTVPTYASGVIGFMLCSTEGPPVNFKHPINKLNPEKNGVAKGPTKFYNPEIHAAAFCLPSFVDKVD

SEQ ID NO: 1562 - protein, 381 aa, Glycine max
  misc_feature (154)..(154): Xaa can be any naturally occurring amino acid
  misc_feature (160)..(160): Xaa can be any naturally occurring amino acid
  misc_feature (168)..(168): Xaa can be any naturally occurring amino acid
YSNFELLCSSTCFLTGPDHMMFEVWNPLGIVGVITAFNFPCAVLGWNACIALVCGNCVVWKGAPTTPLITIAVTKLVAEVLERNKLPGAIFTSFCGGADIGQAIAKDTRIPLVSFTGSSKVGLMVQQTVNERFGKCLLELSGNNAIIVMDDADXSNWLYXYFVCCCGXTGQRCTTCRRLFLHESIYTDVLDQLVEVYKQVKIGNPLEKGTLVGPLHTRTSVENFQKGISVIKSQGGKILTGGSVLESGGNFVQPTIVEISPDAPVVKEELFGPVLYVMKFQTLEEAIALNNSVPQGLSSSIFTQRPGTIFKWIGPRGSDCGIVNANIPTNGAEIGGAFGGEKATGGGREAGSDSWKQYMRRSTCTINYGSELPLAQGINFG

SEQ ID NO: 1563 - protein, 172 aa, Schizosaccharomyces pombe
MGDPTNNNDSETKPNPATYWKSRFPVARIKKIMQADQDVGKVAQVTPVIMSKALELFMQSIIQESCKQTRLHQAKRVTVSHLKHAVQSVEQFDFLQDIVEKVPDAPPIKAERKTKRPRARRAANEGEHNESVPAKKVKKNTVKEEEIEKDDESATTETPVKEEPTGEETEAD

SEQ ID NO: 1564 - protein, 180 aa, Musa acuminata
MVSSMMVSSAATFTRASPAQSSMVAPFTGLKSASAFPVTRKPNADLSHLPSNGGRVQCMKVWPIEGVKKFETLSYLPTMKDEALVKQIEYLLRSKWIPCLEFCPKGFVWRENHRSPGYYDGRYWTMWKLPMFGCTDAVQVAKEVEECKKEYPHAFIRIIGFDNNRQVQCISFIAYKPTGY

SEQ ID NO: 1565 - protein, 346 aa, Pirellula sp. 1
MKALLLTEYKNMQVTDVDEPEVGPDDVLVQVEACGICGSDIHGYDGSTGRRIPPLVMGHEAAGVVVQVGENVRDLELGARVTFDSMVSCGNCEFCREGHGNLCDNRMVLGVSCGDYRRHGAFAERISVPRRIVYRLPDTLPFEHAALVEAVSVAVHAAEVTPIKLGDTAVVVGAGMIGLLAVQAVRAAGATQVIAVDLNDKRLETAGTLGADVLLRADQVDVPEKVRELTGGRGADVALEVVGATPTVKTAIESVRKGGAVTLVGNVSPTIELPLQSVVTREIRLQGTCGCNGEYPQCIDLMNRGVINVEPLITAKISLADGPKWFDRLHAGDAEQMKVLVCPRSE

SEQ ID NO: 1566 - protein, 425 aa, Lactobacillus johnsonii NCC 533
MTTVIKNGTVYQNGHLIKADVLIDGQKIKAIGTDLEGEEIIDASGMIVSPGLVDVHVHYRDPGQTYKEDIKTGSQAAARGGFTTVGAMPNVTPVPNTAELMDKMVRENQKKGLVHILQYGPVTNDETTDIIPDYAALKKAGAFALSNDGHGVQSAQTMYLAMQKAKENNLIIAAHAQDDSLFNKGIVNEGIAAEKLDLPPVTELAETTQIARDLLLAQKTGVHYHICHVSTKTSVELVRLAKARGIKVTCEVAPHHILLTDSDIPEDNAYFKMNPPLRSKEDQVALLVGLLDGTIDLIATDHAPHAKAEKQGGMRGAAFGITGSETAFSTLYTRFVKEEKVFTLEQLLSLLTDKPATVFGIENAGLLAPGENADIAIFDIEHQREIKEDDFKSKGVNTPFTGHKVYGETVMTFVDGKVVYQRGTK

SEQ ID NO: 1567 - protein, 389 aa, Clostridium tetani E88
MDVKEMALKLHSEKKGKLEVVGKISVKNREDLALAYTPGVAEPCVHISKDKNKVYEYTTKGNMVAVVTNGTAVLGLGNIGPEAALPVMEGKALLFKEFANVDAFPICLDTEDPEEIIRTVKLMAPGFGGINLEDIKAPECFYIEERLKKELDIPVFHDDQHGTAIVVLAGIYNALKIVDKKLEEAKILINGAGSAGIAICKLLLNAGACNIVMCDINGSLVEGDENLNPAQKEIAKVTNKEKEKGKLVDVIKDKDIFIGVSGPKILTKEMVSTMAKDSIVFAMANPEPEILPDEAKAGGARVVATGRSDFPNQINNVLVFPGIFRGALDVKAREINEEMKIAAARGVANLIKEEDLNEEYIIPDPFNKEVAESVSKEVRRIAKEMNICK

SEQ ID NO: 1568 - protein, 331 aa, Zea mays
MYPTYLCNSCGLPVSRNVSELFVSAMEKKKKKKKKKKKKKKKKKKKKKKKQAPKPSSYWGRPSAASHRIAFYNSKLSLLAAMAKNYPTVSAKYSEAVKKARRKLRALIAEKSCAPLMLRLAGHSAGTFNKSSRTGGPFGTMKCPGELAHGANAGLDIAVRLLEPIKEEFPTLSYANFYQLAGVVAVEVTGGPEIPFHPGREDKPQPPPEGRLPDVTKGSDHLRQVFGKQMGLSDQDIVALSGGHTMGRCHKERSGFEGAWTTNPLVFDNSYFKELLRGDKEGLLQLPSAKALLGDLVFRLLGGKYAANGKAFFDDYKEAHLKLSELGDADA

SEQ ID NO: 1569 - protein, 483 aa, Pneumocystis carinii
  misc_feature (133)..(133): Xaa can be any naturally occurring amino acid
  misc_feature (195)..(195): Xaa can be any naturally occurring amino acid
MCCKAIKLGNARVFPVTTFRDAKKVRWINLLKSGKAKRNKSGKIIKQGEFQSKDVQDARIQPYRRWFSNTRVISQDVLNMFRESFAEKLNDPCKVLLKQNKLPMSLLMEPTKTRKANIIDIEPFDDTFGKKSXRKRAKLYASSIENLSNFAFESYENYIKKNSEYENVDKNIQKSFEAIFSKGTSKRIWNELYKXIDSSDVIIQLLDARNPLGTRCKHVEEYLKKEKPHKHMILLLNKCDLIPTWCTREWIKQLSKEYPTLAFHASINNPFGKGSLIQLLRQFSKLHSNRRQISVGFIGYPNTGKSSVINTLRSKKVCNTAPIPGETKVWQYVRMTSKIFMIDCPGIVPPNSNDSETEIIIKGALRIEKVSNPEQYIHAILNLCETKHLERTYQISGWENDSTKFIELLARKTGKLLKGGEVDESSIAKMVINDFIRGKIPWFIAPAQENDPSNIKLSNNTLVEKNHLTTLDDEIYNDANPNA

SEQ ID NO: 1570 - protein, 479 aa, Anabaena variabilis ATCC 29413
MSDLVLFWHRRDLRITDNIGLATARQHSSKVVGVFCLDPNILERDDVAPVRVTYMIGSLQELQQRYVQAGSQLLILRGDPVQAIPHLAEALNAKAVFWNWDVEPYSQTRDRAIIATLKDKGIQCLTHNWDQILHSPDEIRSGSNTPYTVYTPFWKNWSSKPKAKPVETLHNVEGLTEAEQELAQKAGVKALPTAKDLGFFWDADLIIAPGEAAAQAKLAEFTAKAITEYQEQRNFPGVNGTSQLSAALKFGVIGIRTVWQTTLEALENSRSEETTTSIRTWQQELAWREFYQHAMYNFPELADGAYRATFKNFPWETNEEHFQAWCEGKTGYPIVDAAMRQMNESGWMHNRCRMIVASFLTKDLLINPQWGEKYFMQKLIDGDLSANNGGWQWSASSGMDPKPLRIFNPASQSQKFDPDAEYIRQWVPELRSMDTEYLVTGKITPLERHAVGYVKPIVDHQKQQQLFKQRYQQQKAIGI

SEQ ID NO: 1571 - protein, 262 aa, Malus x domestica
MSPTDSSREENVYMAKLAEQAERYEEMVEFMEKVAKTVDVEELTVEERNLLSVAYKNVIGARRASWRIISSIEQKEESRGNEDHVAIIKEYRSKIETELSKICDGILNLLESHLIPSASSAESKVFYLKMKGDYHRYLAEFKTGGERKEAAESTLLAYKSAQDIALAELAPTHPIRLGLALNFSVFYYEILNSPDRACNLAKQAFDEAISELDTLGEESYKDSTLIMQLLRDNLTLWTSDITDDAGDEIKEASKRESSETQQ

SEQ ID NO: 1572 - protein, 358 aa, Rhizobium sp. NGR234
MMREYSIATIPADGIGPEVIAAGRTVLATLEKRLGDVKFTVENFDWGSDYYRKHGVMMPSDGLEQLKKFDAIYFGAVGAPDVPDHITLWGLRLPICQGFDQYANVRPTKILPGITSPLRNCGPGDLDWVIVRENSEGEYSGHGGRAHRGLPEEVGTEVAIFTRVGVTRIMRYAFKLAQSRPRKLLTVVTKSNAQRHGMVMWDEIAAEVAEEFPDVTWDKMLVDAMTVRMTLKPQSLDTIVATNLHADILSDLAGALAGSLGVAPTANIDPERRFPSMFEPIHGSAFDITGKGIANPVATFWTAAQMLDHLGEQDASARLMRAVERVTGARILTPDVGGTATTREVTEAVCDAIHSSNV

SEQ ID NO: 1573 - protein, 305 aa, Glycine max
  misc_feature (140)..(140): Xaa can be any naturally occurring amino acid
  misc_feature (225)..(225): Xaa can be any naturally occurring amino acid
MEHFNNDDLEYVVDEYYDVPDFAVEDTSSDIVPELTSDVDSDFEDEFPTSNAKTDTTASEARNGKDIQGIPWERLNYSRDKYRETRLKQYKNYQNFSRSRHDLRKECLEVQKGETFYDFFFNTRLVKSTIVHFQLLRQVXVSSLAGPNIMLRNLLWATSKHDVYFMQNYSVMHWSALLRRGKEVLNVAKPIIPTLKRPGFLAQPVSRVQISTMTVKENLMVAGGXSRVSLYNLKHPGVLFCGKITTDDNAITNAVDVYSNPAGSLRVITANNDFQVRVFDAENFASLGWFKYDWSVNNTSVSPDG

SEQ ID NO: 1574 - protein, 283 aa, Hordeum chilense
MKIFLLFALLGLATTITTATVQFDPSGHGVQRPQQSYPQWQPVPQQQPFPQQDPQQQLLPQQQPFSQQQQLPQQHPFPQQMPLLPQPPQFPQQQPFAQPQQPLTQQPYPQEQPLSQQQPSVEEQQQLNVCKEFLLQQCNPNEKVSSLQSVIPFLRPQTWQQNSCQLKRQQCCRQLANINEQSRCPAIQTIVHAIVMQQQQVQQQVGHGFIQSQPQQLGQGMPIYPQQQPGHGFFLPQQQAQSFNLVRSLVIQTLPMLCNVHVPPYCSTTTAPFGSMPTGIGGQ

SEQ ID NO: 1575 - protein, 256 aa, Hordeum chilense
MKIFLLFALLGLATTITTATVQFDPSGHGVQRPQQSYPQWQPVPQQQPFPQQDPQQQLLPQQQPFSQQQQLPQQHPFPQQMPLLPQPPQFPQQQPFAQPQQPLTQQPYPQEQPLSQQQPSVEQQQQLNVCKEFLLQQCNPNEKVSSLQSVIPFLRPQTWQQNSCQLKRQQCCRQLANINEQSRCPAIQTIVHAIVMQQQQVQQQVGHGFIQSQPQQLGQGMPIYPQQQLGHGFFLPQQQAQFNLVRSLVIQTLPML

SEQ ID NO: 1576 - protein, 240 aa, Hordeum chilense
TTATVQFDPSGHGVQRPQQSYPQWQPVPQQQPFPQQDPQQQLLPQQQPFSQQQQLPQQHPFPQQMPLLPQPPQFPQQQPFAQPQQPLTQQPYPQEQPLSQQQPSVEQQQQLNVCKEFLLQQCNPNEKVSSLQSVIPFLRPQTWQQNSCQLKRQQCCRQLANINEQSRCPAIQTIVHAIVMQQQQVQQQVGHGFIQSQPQQLGQGMPIYPQQQLGHGFFLPQQQAQFNLVRSLVIQTLPML

SEQ ID NO: 1577 - protein, 256 aa, Hordeum chilense
  misc_feature (252)..(252): Xaa can be any naturally occurring amino acid
MKIFLLFALLGLATTITTATVQFDPSGHGVQRPQQSYPQWQPVPQQQPFPQQDPQQQLLPQQQPFSQQQQLPQQHPFPQQMPLLPQPPQFPQQQPFAQPQQPLTQQPYPQEQPLSQQQPSVEQQQQLNVCKEFLLQQCNPNEKVSSLQSVIPFLRPQTWQQNSCQLKRQQCCRQLANINEQSRCPAIQTIVHAIVMQQQQVQQQVGHGFIQSQPQQLGQGMPIYPQQQLGHGFFLPQQQAQFNLVRSLVIQXLPML

SEQ ID NO: 1578 - protein, 225 aa, Bacillus cereus G9241
MVIQWFPGHMAKARRQVTEKLKLIDVVIELVDARLPLSSRNPMIDEIITHKPRLVVLNKADMADDHLTKQWIAYFKEKGHMAISINAQAGQGMKEIAAACKVLVKEKFDKMVAKGIRPRAIRALIVGIPNVGKSTLINKLAKKNIAKTGDRPGVTTAQQWIKVGKEMELLDTPGILWPKFEDQLVGLRLATTGAIKDSILNLQDVAVYALRFYGETLPRAIKRAL

SEQ ID NO: 1579 - protein, 146 aa, Triticum aestivum
MSDEEHHFESSDAGASKTYPQQAGNIRKGGHIVIKGRPCKVVEVSTSKTGKHGHAKCHFVAIDIFTAKKLEDIVPSSHNCDVPHVNRVDYQLIDISEDGFVSLLTDSGGTKDDLKLPTDDNLSALMKSGFEEGKDVVVSVMSSMGE

SEQ ID NO: 1580 - protein, 110 aa, Brassica napus
  misc_feature (6)..(6): Xaa can be any naturally occurring amino acid
  misc_feature (21)..(21): Xaa can be any naturally occurring amino acid
  misc_feature (44)..(44): Xaa can be any naturally occurring amino acid
  misc_feature (46)..(46): Xaa can be any naturally occurring amino acid
  misc_feature (49)..(49): Xaa can be any naturally occurring amino acid
  misc_feature (61)..(63): Xaa can be any naturally occurring amino acid
  misc_feature (65)..(65): Xaa can be any naturally occurring amino acid
  misc_feature (89)..(89): Xaa can be any naturally occurring amino acid
  misc_feature (91)..(91): Xaa can be any naturally occurring amino acid
  misc_feature (99)..(99): Xaa can be any naturally occurring amino acid
MSGVWXFKNGVIRLVENPNQXGSDTNSRRKVMVYLPTGEVISSXSXLEXILRSLGWERYFXXXDXDLLQFHKRSSSDLISLPKDFTKFXSXYMYDIVVXNPNYFHVRDSN

SEQ ID NO: 1581 - protein, 443 aa, Brucella melitensis 16M
MFLRSMLAFPPRRDNDMSGNQELIARRERLLGRNMSLFYQDPVHLVKGEGVWLWDADGRKYLDCYNNVPHVGHCHPRVVEAICRQASTLNTHTRYLHEGILDYVERLTATFDKSLDAAILTCTGSEANDVALRMAQAVTGKTGIIATDFTYHGNTTAVSQLSTRMPPVGGYGGHVRHVPAPDSYRPLGGKGGEAFAQAWAAEVEKAIASLQESPFGFSGLIIDPFFANEGFPDLPENFLAPAVAAVRKAGGVVIADEVQPGFGRTGGHMWGHQKAGIVPDIVTLGKPMGNGHPVGAVVAGADTLNAFRKAFRYFNTFGGNPVSCAAAMAVLDVLEEEKLQANALEVGAYARQGLEKLAQKHGMIGNVRGSGLFFGAELVLDRAEKTPAAEMATRVVNEMRERGVLMNKLGIHQNATKIRPPMPFSRENADLMLSTLDDVLGGL

SEQ ID NO: 1582 - protein, 287 aa, Archaeoglobus fulgidus DSM 4304
MGLLQDYSQRREEGEGRGSNFTRFSCWSCDFCRCLCNAEIAGESGGKVCCCGGKGGGPDQHSETRSCDNSGSWGRYGLAAFAPCSSLRLPAYLHLHEIQKIVIIFYATKIMGRHLTVFIIALAAVFAACAEEKEMAKSLTVKSAFENGGKIPAKYTCDGEDISPPLYIEGLREDVKSLVIICEDPDAPMGVFTHWIAWNVEPTSEIPENVPKTKFVDEPKMVQGRNDFGKVGYNGPCPPSGEHRYYFRIYAIDTLLQGDYSRQELLRAIEGHILQYGEIYGLYSRSR

SEQ ID NO: 1583 - protein, 371 aa, Oryza sativa (japonica cultivar-group)
MAAASLAPPTASFSPAPAPGRVKAAAPLLSRRPPGRFLLRVASESSSISGDTLLGLYEKERLSHSLYANEDYDKEMFWDNLDADLRYWTRSLRPVQWYPGHIAKTEKELKEQLKLMDVVIEVRDARIPLATSHPKMDAWLGNRKRIIVMNREDMVSNEDRNAWASYFANQGTKVVYSNGQLGMGTMKLGRMAKSLASTVNTKRREKGLLPRAVRAGIVGYPNVGKSSLINRLLKRRMCPAAPRPGVTRELKWVRFGSDLELLDSPGILPMRISDQTAAIKLAICDDIGERSYDFADVAAILVQLLVRHPAVGPEAFRRRYRLDMDSDCGKMFVTKLSVHLFNGDASQAAFRILSDYRKGKFGCVALERPPT

SEQ ID NO: 1584 - protein, 166 aa, Zea mays
  misc_feature (76)..(76): Xaa can be any naturally occurring amino acid
  misc_feature (159)..(159): Xaa can be any naturally occurring amino acid
MDAVMFGLETPLMAALQHLLDVPDGDAGAGGDSDNKTGGGATRTYVRDARAMAATPADVKELPGAYAFVVDMPGLXGTGDIRVQVEDERVLVVSGERRREEREDDAKYLRMERRMGKFMRKFVLPDNADVDKVAAVCRDGVLTVTVEKLPPPEPKKPKXTIEVKVA

SEQ ID NO: 1585 - protein, 504 aa, Brucella melitensis 16M
MSKLDDNVAKAKTYLARFEKGVLNRIGGEDVAAADGATFETISPVDLKPLATVALGKAADIDRAARAAKAAFPEWAAMSGDARKKLLHKIADAIVARAEEIAFVEFMDTGQSLKFMAKAALRGAENFRFFADRAPEARDGKTLRGPGQVNMTTRVPIGPVGVITPWNTPFMLSTWKIAPALAAGCTVVHKPAEFSPLTARLLVEIAEEAGLPKGVWNLVNGFGEDAGKALTEHPDIKAIGFVGESRTGSLIMKQGADTLKRVHFELGGKNPVVVFADADLERAVDAAVFMIYSLNGERCTSSSRLLVEASIYEKFTALVAEKAKRIKVGHPLDPETVVGPLIHPVHEKKVLEYIEIGRSEGATVAAGGAKFAGPGGGCYVSPTLFTAAHNGMRIAQEEIFGPVLTAIPFKDEAEALALANDVKYGLTGYLWTNDVTRAFRFTDALEAGMIWVNSENVRHLPTPFGGVKNSGIGRDGGDWSFDFYMETKNIAFANAAHAIAKLGG

SEQ ID NO: 1586 - protein, 149 aa, Sulfolobus tokodaii str. 7
MNVKSSAFKNEDFIPVRYTCDGEDISPEIEWDKVQNAKSYALIVEDPDAPGGIFIHWIIYNIKGTKLPENIKKVEKTEFGIQGENDFGKIGYGGPCPPRTHPPHRYYFYVYALDTELPERSRITADELKNLMKGHIIDQGVIMGKYKRK

SEQ ID NO: 1587 - protein, 156 aa, Zea mays
MDAVMFGLETPLMAALQHLLDVPDGDNKTGGGATRTYVRDARAMAATPADVKELPGAYAFVVDMPGLGTGDIRVQVEDERVLVVSGERRREEREDDAKYLRMERRMGKFMRKFVLPDNADVDKVAAVCRDGVLTVTVEKLPPPEPKKPKTIEVKVA

SEQ ID NO: 1588 - protein, 443 aa, Oryza sativa (japonica cultivar-group)
MPPSTGSVPPAASTPAAGDEATAAGRVLLGRYELGGLLGRGASAKVYLARDLLTGRDVAIKSFPNPRHGGGLRGGEEDVLLRPAPIEREAAILPRLRHRHVMRLREILATRKKVHFVLDLAAGGELFSLLDASGRMTEDLARHYFRQLISAVRYCHSRGVYHRDIKPENLLLDDAGDLKVADFGLGAVADGALHHTLCGTPAYVAPEILSRKGYNPAKVDIWSCGVVLFVLAAGYLPFNDASLVNMYRKIYAGKFRCPAWFSPELRCLVRRILDPNPATRIDTEEIITHPWFRQDASHFAMAQLMQHGHDEEAKFKTEFKEDDMARDMTAFDILACSPGSDLSGLFGAEPGKERVFVGEPAAAVLSRVEEAGKKEGYMVTREGKKGTGPVYVKGENGGIVAKVCVFKIADAVSVVEVVKGYGAEAARFWKARLEPAMKPPAAI

SEQ ID NO: 1589 - protein, 348 aa, Mycobacterium leprae
MQDEGMRIGILTGGGDCPGLNAVIRAIVRTCDARYGSSVVGFQDGWRGLLENRRMQLCNDDRNDRLLAKGGTMLGTAHVHPDKLRAGLHQIKQTLDDNGIDVLIPIGGEGTLTAAHWLSQEDVPVVGVPKTIDNDIDCTDVTFGHDTALTVATEAIDRLHSTAESHQRVMLVEVMGRHAGWIALSSGLASGAHMTLIPEQPFDVEEVCCLVKRRFQRGDSHFICVVAEGAKPVPGSITLRQGGMDEFGHERFTGVAAQLGAEVEKRINKDVRVTVLGHVQRGGTPTAFDRVLATRFGVNAADASHAGEYGQMVSLRGQDIGRVPLEDAVRQLKLVPESRYDDAAAFFG

SEQ ID NO: 1590 - protein, 169 aa, Triticum aestivum
RREDVKQQHDNKNNNNNNNNIVGDEVCSAVTTDDSSAAVGSENSKSSASAKGHSKMTSKPASAAAATKSSHGRRKVKVDWTPELHRRFVQAVEQLGLDKAVPSRILELMGNEYRLTRHNIASHLQKYRSHRKHLMAREAEAASWTQKRQMYAAAGGPRKDAAAGGGPWV

SEQ ID NO: 1591 - protein, 310 aa, Magnetospirillum magnetotacticum MS-1
MKDPYLVLGVARTACDDEIKKAYRALARELHPDLNPGDTKAESRFKDISAAYDFLSDSTKRAQFDAGEIDATGSPKRRAWRTRPGPGPGAGPGAGPGAGGPRGGFGGFGENVDDIMAELFRRKQKGQAHARAKTRGGDVRHALTISFLDAAAGGTKRVTLMSGRTLEVRIPPGSTDGQTLRLKGQGHGAEDGAIPGDAFIELKVEDHPHFKRRDLDVLLDLPVSVQEAVLGGKVPVPTIDGKVMVTVPPGSNTGAVLRLKGKGIAGPQGTRGDQLVTLSVVLPEDAEFRQLVEKWGPRHGYDPRAKAGLG

SEQ ID NO: 1592 - protein, 321 aa, Oryza sativa (japonica cultivar-group)
MATIPEVPASELIQTMPRVGMGTAAFPFTSSEDTTAAMLRAIELGYRHFDTARIYATEGCVGEAVAEAVRRGLIASRADVFVTSKIWCSDLHAGRVVPAARETLRNLGMDYVDLLLVHWPVSLTPGNYDFPFPKEVILPSFDMEGVWRGMEECHRLGLARAIGVSNFSAKKLEQLLSLAAVRPAVNQVEVNPMWQQRTLREVCRREGVQLCGYSPLGAKGTPWGSAAVMDSGVLQEIAGAKGKTLAQICLRWLYEQGDVLLVKTYNEKRMKENLDIFNWELTDEERERISQLPQLRGLPGLEFISDHGPYKSVEDLWDGDV

SEQ ID NO: 1593 - protein, 322 aa, Oryza sativa (japonica cultivar-group)
MAMATIPEVPASALLPTMPRIGMGTAAFPFTSSEETTAALLRAIELGYRHFDTARLYATEGCVSEAVAEAVRRGLVASRADVFVTSKLWCSDLHAGRVVPAARETLRNLGMDYVDLLLVHWPATVAPGSYDFPFPKEEMAPAFDMEGVWRGMEECHRLGLARAIGVSNFSAKKLEQLLSFAVVRPAANQVEMNPMWQQRTLREVCRREGVQLCGYSPLGAKGTPWGSAAVMDSGVLHDIAQTKGKTLAQICLRWMYEQGDVLLVKTYNENRMKENLDIFDWELTEEERDKISKLPQQRGLTGMQFVCDNGPYKCVEDLWDGA

SEQ ID NO: 1594 - protein, 481 aa, Burkholderia cepacia R18194
MVPRTLAHIGGCSVPARSGRTFAAINPATEAVIAEVASCDAPDVDDAVRAARHAFESGAWSRCAPAERKRVLCRLGELIASHGAELALLDSLNMGKRVADAFSIDVPAAGGLFSWYGEAVDKLHGEVASTDPGNLAVVTREPLGVVGAVVPWNFPLDMVAWKVAPALAAGNSVVLKPAEQSPLSALRLAELALEAGLPPGVLNVVPGYGETAGRALGLHPDVDVLAFTGSTAVGKKFLEYAAQSNMKQVWLECGGKSPNLVFDDTDDLDLAARKACFGIFFNQGEVCSANSRLLVQRSIHDAFVDRLIAHAAAFMPGDPLDPSSGMGAIVDEQQHRRVREWIARGRDSATLAIGGGAPRVDGKGYFIEPTIFIDVKHDDAIAREEIFGPVLSVMAFDTEDEAVRLANDSIYGLAASLWTGSLSRAHRVSGRLRAGTVSVNTVDALSAQTPFGGFRQSGFGRDLSLHAIDKYTGLKTTWISY

SEQ ID NO: 1595 - protein, 463 aa, Burkholderia cepacia R18194
MNAPNFPHRTTQDYQRSDAAHHLHAFVDQKALNEEGARVMVRGEGVHLWDNDGNRYLDGMSGLWCTNVGYGRPELVDAAARQMKELSYYNMFFHTTHPSVIELSERLFALLGNRFSHVVYTNSGSESNEVLIRTVRRFWDVMGKPEKKVLIGRVNGYHGSTVGSASLGGMAFMHEMGDLPIPNITHVDEPYWYANGGDLSPEAFGKQAALSLERKILEIGADRVAAFVAEPFQGAGGMIFPPDGYWQEIERICRQYDVLLCADEVIGGFGRTGEWFAHRHFGFEPDLICVAKGLTSGYVPMGGLIMSRRVGDALVDKGGVYAHGLTYSGHPVAAAVALANLDVLEREGLVERTKTDTGPYLQKALRDAFGSHPLVGEVQGVGAVGAIQFAKNKATRERFANEADLTWHSRTVGFELGAIVRSTNGRLIVAPPLVIDHAQIDELVDTMRKAVDATAREVLGIDC

SEQ ID NO: 1596 - protein, 493 aa, Pseudomonas putida KT2440
MTLVRFQMCIDGQWRDAQSGKTFDSLNPATAQAWAQLPDADEADVELAVQAAQRAFDSKAWRSITATARGKLLRRLGDLIAENKEHLAQLESRDNGKLIRETRGQVGYLPEFFHYTAGLADKLEGGTLPLDKPDLFAYTVHEPIGVVAGIIPWNSPLYLTAIKLAPALAAGNTIVLKPSEHASATILELARLALEAGFPAGVVNVVTGYGPSTGAALTRHPLVRKIAFTGGAATARHVVRSSAENFAKLSLELGGKSPNIIFADADLDSAINGAVAGIYAASGQSCVAGSRLLVQDEIFDEFVERLIARAKRIRIGNPQDDASEMGPMATAQQLAVVEGLVAAAKAEGAKLHMGGKRADVEGDGWFYEPTLFECDSNAMTIMQEEVFGPVAAVIRFKTEEEALAMANDSQFGLAAGIWTRDLGRAHRLARDVRSGIIWVNTYRAVSAMAPIGGFKNSGYGRESGIDSVLAYTELKTVWINLSTAPMPDPFVMR

SEQ ID NO: 1597 - protein, 476 aa, Sphingomonas paucimobilis
MTAYPSLHMIIDGEAVTGGDRRTQTIVNPATGETLGELPLADTADLDRALETAQRGFQRWRNSTPQERAAVLSGAARLLMERQETLARIATMEQGKTLAESRIEVMMVAGLFNFYAGEVFRLYGRALVRPAGTRSTVTYEPVGPLAAFSPWNFPLGNPGRKLGAPIAAGCSVIMKSAEETPASALGVLQCLLDAGLPSDVAQAVFGVPDEVSRYLLASPVIRKLSFTGSTVVGKHLAKLAADDLKRTTMELGGHGPVLVFNDVDVDRVLEVMVGHKYRNAGQVCVSPTRFIVQEDVYETFRDGFAERAKALRVGNGLEDGIQMGPMANARRPDAMERLNRSAVDAGATLNAGGERIGNQGFFYAPSVLSDVPLDAEIMNEEPFGPVALINPYRTADEMIAEANRLPYGLAAYSWTNDVKMQRRIAREVETGMLGINSVAIGGADSPFGGVKWSGHGHEDGPEGVQACLVTKAVHEG

SEQ ID NO: 1598 - protein, 221 aa, Zea mays
MSAPPPPASSDDDGKPADEEGVEIREVWANNLEAEFAVIRDIVDDYPYIAMDTEFPGIVCRPLGSFRSNDEYNYATLKANVDMLSLIQLGLTLSDENGALPARGTGGRPCTWQFNFRGFDPRSDPANADSIDLLRNSGIDFDRFTTEGADTGHFAELLMSSGVLLNAELQWVTFHSGYDFGYLLKLLTGRNLPDTMPGFFDLIRIYFPVLYDIKHLMKYCG

SEQ ID NO: 1599 - protein, 426 aa, Listeria monocytogenes str. 4b F2365
MYVLKNGQVLNASGELENKDVLIQNGKVNLIADSIEVTSGEEFDATGKLIAPGFIDVHVHLREPGGEHKETILTGTQAAARGGYTTICSMPNTKPVPDSKEVMESLQAKIKETAKVRVLPYASITTSLGTDELVDFEALKEAGAFAFTDDGVGVQLAGTMYEAMKRAAALDMAIVAHCEDNSLIYGGVVHDGIFAEKEGLKGIPNIAESVQIARDVLLAEAAGCHYHVCHISTKESVRVVRDAKRAGIRVTAEVSPHHLILDEEAIPGNDGNWKMNPPLRSKEDRAALLEGLLDGTIDFIATDHAPHAAEEKNVPMEQAAFGIVGLETAFPLLYTHFVKTNEWTLKQLIDWMTVKPAECFKLPYGKLEEGSVADIVVLDLEKEANIDPATFYSKGKNTPFVGETCIGWPVATFSEGTLVYNEGEIK

SEQ ID NO: 1600 - protein, 484 aa, Triticum aestivum
MANNNSTYGENVSRKSHTPSAIVIGGGFAGIAAANALRNASFEVVLLESRDRIGGRVHTDYSFGFPVDLGASWLHGVCEENPLAPIIGRLGLPLYRTSGDDSVLFDHDLESYALYDTNGSQVPQEFVEKIGKVFEAILEETGKLREEMKEDISIAKAIAIVLERNPHLRQEGIAHDVLQWYLCRMEGWFATDADAISLQCWDQEVLLPGGHGLMVRGYRPVINTLAKGLDIRLGHRVVEIVRHWNRVEVTVSNGKTFVADAAVITVPLGVLKSNTVKFEPRLPEWKEEAIRELSVGVENKIVLHFSEVFWPNVEFLGVVSSTTYGCSYFLNLHKATGHAVLVYMPAGRLACDIEKMSDEAAAQFAFSQLKKILPNAAEPLNYLVSHWGSDENTLGSYTFDGVGKPRDLYEKLRIPVDNLFFAGEATSVQYTGTVHGAFSTGEMAAEECRMRVLEKFRELDMLEMCHPMAEQTATVSVPLLISRL

SEQ ID NO: 1601 - protein, 449 aa, Zea mays
MSASVGRTRVGRYELGRTLGEGTFAKVKFARNVETGENVAIKILDKEKVLKHKMIAQIKREISTMKLIRHPNVIRMYEVMASKTKIYIVMELVTGGELFDKIASRGRLKEDDARKYFQQLINAVDYCHSRGVYHRDLKPENLLLDASGTLKVSDFGLSALSQQVREDGLLHTTCGTPNYVAPEVINNKGYDGAKADLWSCGVILFVLMAGYLPFEDSNLMSLYKKIFKADFSCPSWFSTSAKKLIKKILDPNANNRITIAELINNEWFKKGYQPPRFETADVNLDDVNSIFDESGEPAQLVVERREERPSVMNAFELISTSQGLNLGTLFEKQTGSVKRETRFASRLPANEILSKIEAAAGPMGFNVQKRNYKLKLQGENPGRKGQLAIATEVFEVTPSLYMVELRKSNGDTLEFHKFYHNISNGLKDVMWKPESGIVEGDEARQRRSP

SEQ ID NO: 1602 - protein, 471 aa, Parachlamydia sp. UWE25
MTNPSIVWFRQDFRLEDNPALNAATQKGGPVIPVFNWVFNPEKEWQLGGASQWWLYYSLISLKNDLSELGLSLIIRKEDPLKSLLEIAHETGADTVYWNRRYEPMLIQDDAKIKTELQKQGIKAHSFNGNLLFEPWTIANKQGKPFQVFTPFWNQCLKLNDPEVPLPVPHSLKKFVGQLQTESIDSLNLLPKIKWDKGLKEVWSPGAKSAKALLKKGLTGVIDQYLDIRDLPDHDGTSLLSPYLHFGEISPRMIWQAVKENSTSKGAEGYLRQIGWREFAHHLLYHFPETPQKPLRSQFNSFSWKNDKQNLKAWQKGQTGYPIIDAGMRQLWKIGWMHNRVRLIVGSFLVKDLMIHWIEGAKWFWDTLVDADLANNTMGWQWIAGCGADAAPYFRIFNPITQGEKFDPEGNYVKKWVPELINLPKEWLHQPWEAPEEILRQSGIELGINYPKPIVNHAKAREEALQAYSRL

SEQ ID NO: 1603 - protein, 162 aa, Glycine max
  misc_feature (58)..(58): Xaa can be any naturally occurring amino acid
  misc_feature (85)..(85): Xaa can be any naturally occurring amino acid
  misc_feature (92)..(92): Xaa can be any naturally occurring amino acid
  misc_feature (97)..(97): Xaa can be any naturally occurring amino acid
  misc_feature (121)..(121): Xaa can be any naturally occurring amino acid
  misc_feature (140)..(140): Xaa can be any naturally occurring amino acid
ASSMISSPAITTINHTNTNIITPFTNLKSITNFPTKKTNNNITSITSNNKRIQYIPIXPPINKKKFKTLSYLPDLDNTQLAEKIXYLLRKEXNSLLXFHLNHNFIYHNHNRSPKYYNERYXTIYKLPIFGYTNTSQVLKXLEQAKTTYPNNCIHIMIFNNTQ

SEQ ID NO: 1604 - protein, 588 aa, Zea mays
  misc_feature (254)..(254): Xaa can be any naturally occurring amino acid
MCGILAVLGCSDWSQAKRARILACSRRLKHRGPDWSGLYQHEGNFLAQQRLAVVSPLSGDQPLFNEDRTVVVVANGEIYNHKNVRKQFTGTHNFSTGSDCEVIMPLYEKYGENFVDMLDGVFAFVLYDTRDRTYVAARDAIGVNPLYIGWGSDGSVWIASEMKALNEDCVRFEIFPPGHLYSSAGGGFRRWYTPHWFQEQVPRTPYQPLVLREAFEKAVIKRLMTDVPFGVLLSGGLDSSLVASVTKRHLVETXAAEKFGTELHSFVVGLEGSPDLKAAREVADYLGTIHHEFHFTVQDGIDAIEEVIYHDETYDVTTIRASTPMFLMARKIKSLGVKMVLSGEGSDELLGGYLYFHFAPNKEEFHRETCRKVKALHQYDCLRANKATSAWGLEVRVPFLDKEFINVAMGMDPEWKMYDKNLGRIEKWVMRKAFDDDEHPYLPKHILYRQKEQFSDGVGYNWIDGLKSFTEQQVTDEMMNNAAQMFPYNTPVNKEAYYYRMIFERLFPQDSARETVPWGPSIACSTPAAIEWVEQWKASNDPSGRFISSHDSAATDHTGGKPAVANGGGHGAANGTVNGKDVAVAIAV

SEQ ID NO: 1605 - protein, 494 aa, Sphingomonas sp.
MTSVSSSPITDTILNFIDGSYREGSEGKSFSNVNPATGAEIGVVHEASQADVADAVAAAKAALTGPWGKMTTAERVKLITAVATEIERRADDFLAAEVADTGKPRHVASHIDIPRGAANFRMFADVVSTMPGESFNTPTPDGGQAFNYTVRKPKGVVAVVCPWNFPLLLMTWKVGPALACGNTVVVKPSEETPRTAALLGEVMNAVGMPKGVYNVVHGFGPGSAGEFLTSNPDVDAITFTGETGTGQAIMQKAATGVRDISFELGGKNPAIVFADADLDKAVEGLSRSVFLNTGQVCLGTERVYVERPIFDAFVARMAAAAQDFKPGVTGDRAYLGPLISAEHREKVLGYYRRAVEDGATVVTGGGVPEISGAEAGGFFVEPTLWIDVAHGDTVMREEIFGPCCGILPFDSEDEVIALANDTVYGLCASVWTENLSRGHRVAAAMEVGVCWVNSWFLRDLRTAFGGSGHSGIGREGGVHSLEFYTEITNICVKL

SEQ ID NO: 1606 - protein, 568 aa, Zea mays
GRDLTKFACDDLTIGFFFPPPPPPPPSSGYTLLRDPRHNKGLAFSEAERDAHYLRGLLPPALASQELQEKKLMQNLRQYERPLHRYIAMMDLQERNERLFYKLLIDNVEELLPVVYTPTVGEACQKYGSIYRRPQGLYISLKDKGKILEVLKNWPERSIQVIVVTDGERILGLGDLGCQGMGIPVGKLSLYTALGGVRPSACLPITIDVGTNNEALLNDDFYIGLRQRRATGEEYHELVEEFMAAVKQNYGEKVLTQFEDFANHNAFDLLEKYRESHLVFNDDIQGTASVVLAGLLAALKVVGGTLADHTYLFLGAGEAGTGIAELIALEMSKHTGSPIEECRPKIWLMDSRGLIVASRKESLQAFKKPWAHEHGAVETLLEAVRSLKPTVLIGTSGKGGTFTKDVVEAMASQNERPVVFALSNPTSHSECTAEQAYTWTEGRAVFASGSPFPAVELDGRALVPGQSNNAYIFPGFGLGVVISGAIRVRDDMLLAASEALAEQVTEAHYAKGLIFPPFTNIRAISARIAAKVAAKAYELGLASRLPRPDDLVSYAESCMYTPTYRSYR

SEQ ID NO: 1607 - protein, 317 aa, Haemophilus influenzae 86-028NP
MTTQLDSLRNMTVVVADTGDIDAIKKYQPQDATTNPSLILSASALPQYAPLIDEAVAYAKAQSNDKAQQLIDAEDKLAVNIGLEILKIVPGRISTEVDARLSYNTQATVEKARKLIALYNAAGISNDRILIKIASTWQGIRAAEILEKEGINCNLTLLFSEAQARACAEAGVYLISPFVGRILDWYKANSDKKEYAPAEDPGVISVTKIYNYYKEYGYNTVVMGASFRNVGEITELAGCDRLTIAPALLKELQENSTALIRKLEYKGEVKAKPQPLTEAEFYWQHNSDAMAVEKLAEGIRKFAIDQEKLETMLSAKL

SEQ ID NO: 1608 - protein, 293 aa, Hordeum vulgare subsp. vulgare
MSPTLSLKLKKSSHTPQSSVSSSTMLRLFKKEAACQSPSTLPVAMDMGLEVSSSSPSSSSVSSSPEHAARRASPAKRPAGRTKFRETRHPVYRGVRRRGNTERWVCEVRVPGKRGARLWLGTYATAEVAARANDAAMLALGGRSATCLNFADSAWLLAVPSALSDLADVRRAAVEAVADFQRREAADGSLAIAVPKEASSGAPSLSPSSGSDSAGSTGTSEPSANGVFEGPVVMDSEMFRLDLFPEMDLGSYYMSLAEALLMDPPPTATIIHAYEDNGDGGADVRLWSYSVDM

SEQ ID NO: 1609 - protein, 405 aa, Glycine max
MVLEATMICIDNSEWMRNGDYSPSRFQAQADAVNLICGAKTQSNPENTVGVLTMAGKGVRVLVTPTSDLGKILACMHGLDIGGEMNLAAGIQVAQLALKHRQNKKQQQRIIVFAGSPVKHEKKMLEMIGRKLKKNSVALDIVNFGEEDEGKTEKLEALLAAVNNNDTSHIVHVPSGPNALSDVLISTPIFTGDGEGGSGFAAAAAAAAAGGVSGFEFGVDPNLDPELALALRVSMEEERARQEAAAKKASEDASKQEKDGEQQASPQDTTMTEGASAAASEAETKRTDLTDDENALLQQALAMSMDDPTINHEVRDTDMSEAAAEDPELALALQLSVEDSSKDSASQSDVSKLLADQSFVSSILASLPGVDPNDPSVKDLLASMQNQSEPQQKNEDKPPNEEEKK

SEQ ID NO: 1610 - protein, 443 aa, Oryza sativa (japonica cultivar-group)
MAEQRGNMLMKKYEMGKLLGQGTFAKVYHARNTETSESVAIKMIDKEKVLKGGLMDQIKREISVMKLVRHPNIVQLYEVMATKTKIYFVLEHVKGGELFNKVQRGRLKEDAARKYFQQLICAVDFCHSRGVYHRDLKPENLLLDENSNLKVSDFGLSALADCKRQDGLLHTTCGTPAYVAPEVINRRGYDGAKADIWSCGVILFVLLAGYLPFHDKNLMDMYKKIGKAEFKCPSWFNTDVRRLLLRILDPNPSTRISMDKIMENPWFRKGLDAKLLRYNLQPKDAIPVDMSTDFDSFNSAPTLEKKPSNLNAFDIISLSTGLDLSGMFEESDKKESKFTSTSTASTIISKIEDIAKGLRLKLTKKDGGLLKMEGSKPGRKGVMGIDAEIFEVTPNFHLVELKKTNGDTLEYRKVLNQEMRPALKDIVWAWQGEQPKQQQQPTC

SEQ ID NO: 1611 - protein, 356 aa, Oryza sativa (japonica cultivar-group)
MDQIKREISVMKLVRHPNIVQLYEVMATKTKIYFVLEHVKGGELFNKVQRGRLKEDAARKYFQQLICAVDFCHSRGVYHRDLKPENLLLDENSNLKVSDFGLSALADCKRQDGLLHTTCGTPAYVAPEVINRRGYDGAKADIWSCGVILFVLLAGYLPFHDKNLMDMYKKIGKAEFKCPSWFNTDVRRLLLRILDPNPSTRISMDKIMENPWFRKGLDAKLLRYNLQPKDAIPVDMSTDFDSFNSAPTLEKKPSNLNAFDIISLSTGLDLSGMFEESDKKESKFTSTSTASTIISKIEDIAKGLRLKLTKKDGGLLKMEGSKPGRKGVMGIDAEIFEVTPNFHLVELKKHLNTVRS

SEQ ID NO: 1612 - protein, 192 aa, Pseudomonas fluorescens PfO-1
MGAAALLLSFIPSLKSEAVPYLQQPDALYLAFFGLLNLILAPVIPYWNKGPRQHLQNLVSALLVLTVVLQTLTLIAPMPVIAGQPAVLFSLVIALVAVVLHLAVSFYKSSPAAATQSYDMSNRDTGTVKWFNTSKGFGFISRDSGDDIFVHFRAIRGEGHRVLVEGQRVEFSVMNRDKGLQAEDVIAALPRR

SEQ ID NO: 1613 - protein, 379 aa, Streptococcus mutans UA159
MSNLFQNYTRADLEFIKAEGNYLFDTQGKKYLDFSTGIGVTNLGFHPQVQVALQKQAEQIWHTPNLYQNSLQEEVAAKLMAGKDYLAFFCNSGAEANEAAIKIARKATGKQEIITFQNSFHGRTFGSMSATGQDKIKVGFGDAVPHFHYAVFNDLNSVKALVTENTAAVMLELVQGESGVLPAEQDFVTALADYCQKNGLLLIIDEVQTGMGRTGKLYAFQHYGIEPDIFTLAKGLANGVPVGAMLAKKQFGSAFGPGSHGSTFGGNKLAMAASSAVLDIMTKAGFLEQAWENAHYLQEQLTSALQVADTVTQVRGLGYMIGIETTADLGQLVKATRDRGLIVLTAGTNVIRLLPPLTLTKDEIDQGIMILQEVFEQHN

SEQ ID NO: 1614 - protein, 311 aa, Triticum aestivum
MNIQVDPSSQVQWLQQQLVPQLQQPLSQQPQQTFPQPQQTFPHQPQQQVPQPQQPQQPFLQPQQPFPQQPQQPFPQTQQPQQPFPQQPQQPFPQTQQPQQPFPQQPQQPFPQTQQPQQPFPQLQQPQQPFPQPQQQLPQPQQPQQSFPQQQRPFIQPSLQQQLNPCKNILLQQCKPASLVSSLWSIIWPQSDCQVMRQQCCQQLAQIPQQLQCAAIHSVVHSIIMQQQQQQQQQQGMHIFLPLSQQQQVGQGSLVQGQGIIQPQQPAQLEAIRSLVLQTLPSMCNVYVPPECSIMRAPFASIVAGIGGQYR

SEQ ID NO: 1615 - protein, 372 aa, Streptococcus mutans UA159
MAETNGLKDMIACDTRISAIKDNKLSYAGYDIADLMDNKARFEEVIYLLWNLHLPTAIELKQFEEKLRKNYAISDAIEQCILIQSRQHLHPMSVLRSTVSLLGVYNLKAEERSVEATYDQSIQLMAKIPTIIATFARLRQGLSPIAPRKDLGFAANFLYMLNGRLPSELEILAMNRALVLHAEHELNASTFAARVCASTLSDIYSCVTTAIGTLKGPLHGGANERVFDMLREIREYGDVDSYLQEKLNSKEKIMGFGHRVYQTQDPREKYLREMARELTKGTEHDIWYQLSKKVEICMKQKKNLIPNVDFYSATVYHVLGIDSSIFTLIFAMSRVSGWIAHIQEQQKNNKLIRPRSHYTGMRKLRYIPIERR

SEQ ID NO: 1616 - protein, 286 aa, Zea mays
  misc_feature (33)..(33): Xaa can be any naturally occurring amino acid
MAALPPAAEDPDAVEIREVWASNLEEEFAVIRXSVDVYPYVAMDTEFPGFVVTPSAEYRFTCDRNYAALEGNVNVLKLIQLGLTLSNGAGALPPCGTGGRRCIWQFNFRGFDPHTDPSSSDSIDLLRRSGIDFDLFAAEGVDSTRFAELMMSSGVVLNDDVQWVTFHSGHDFGYLLKLLTGREMPNTLDEFLKLTKTFFPVMYDIKHLMKFCGGGLYGGLSKLGELLKIERVGISHQAGSDSLLTLQCFMKLKQLYLKESVKLYDGVLFGLIPGEVEIKPVAPPIE

SEQ ID NO: 1617 - protein, 456 aa, Corynebacterium glutamicum
MALKGYTNFDGEFIEFGSVQAKEEEKRAFDNDRAHVFHSWSAQDKISPKVWAAAEGSTLYDFDGNAFIDMGSQLVSANLGHNNPRLVEAIQRQAARLTNINPAFGNDVRSDVAAKIVSMARGEFSHVFFTNGGADAIEHSIRMARLHTGRNKILSAYRSYHGATGSAMMLTGEHRRLGNPTTDPDIYHFWAPFLHHSSFFATTQEEECERALKHLEDVIAFEGAGMIAAIVLEPVVGSSGIILPPAGYLNGVRELCNKHGILFIADEVMVGFGRTGKLFAYEHAGDDFQPDMITFAKGVNAGYAPLGGIVMTQSIRDTFGSEAYSGGLTYSGHPLAVAPAKAALEIYAEGEIIPRVARLGAELIEPRLRELAEENVAIADVRGIGFFWAVEFNADATAMAAGAAEFKERGVWPMISGNRFHIAPPLTTTDDELVALLDAVEAAAQAVELTFAGALF

SEQ ID NO: 1618 - protein, 124 aa, Ralstonia solanacearum
MAITKDDILEAVSAMSVMELNDLVKAFEDKFGVSAAAVAVAGPAGGAAAPAAEEKTEFDVILKGAGANKVGVIKAVREITGLGLKEAKDLVDGAPKTVKEAMPKADADAAAKKLIEAGAEVEVK

SEQ ID NO: 1619 - protein, 348 aa, Pyrococcus furiosus DSM 3638
MSEKMVAIMKTKPEYGAELVEVDVPKPGPGEVLIKILATSICGTDLHIYEWNEWAQTRIRPPQIMGHEVAGEVVEVGPGVEGIEVGDYVSVETHIVCGKCYACKRGQYHVCQNTKIFGVDTDGVFAEYAVVPAQNVWKNPKNIPPEYATLQEPLGNAVDTVLAGPIAGKSVLITGAGPLGLLGIAVAKASGAYPVIVSEPSEFRRNLAKKVGADYVINPFEEDVVKEVMDITDGNGVDVFLEFSGAPKALEQGLQAVTPAGRVSLLGLFPGKVSIDFNNLIIFKALTVYGITGRHLWETWYTVSRLLQSGKLNIDPIITHKYKGFDKYEEAFELMRAGKTGKVVFMLK

SEQ ID NO: 1620 - protein, 191 aa, Arabidopsis thaliana
MSDEEHHFESSDAGASKTYPQQAGTIRKNGYIVIKNRPCKVSFSNISPLSSSDLIRSVHYLDSSDSFFCHLHDVVEVSTSKTGKHGHAKCHFVAIDIFTSKKLEDIVPSSHNCDVPHVNRTDYQLIDISEDGYVSLLTDNGSTKDDLKLPNDDTLLQQIKSGFDDGKDLVVSVMSAMGEEQINALKDIGPK

SEQ ID NO: 1621 - protein, 310 aa, Arabidopsis thaliana
MKQISSGEVWRWNKEVEMNSIRDCLKHCSSIAIDTEFPGCLKETPMDASEEIRYRDMKFNVDNTHLIQLGFTLFDRRGFAKTWEINLSDFDEHKCFKNDKSIAFLKSNGLNLDKIREEGIGIDEFFRDFSQILTEKDGKITWVNFQGSYDNAYLVKGLTGGKPLPETKEEFHETVQQLLGKFVFDVKKIAESCSGLSSQFGLQRIADVLQMKRVGKAHHAGSDSELTARVFTKLTFDLLNSRKQSVRRVDHQQFQLEQQQHQQFMMTRCYIPIPMPIPRPRPVMFAAHHQNPYFGGGYFRMPVQGMNYVL

SEQ ID NO: 1622 - protein, 198 aa, Agrobacterium tumefaciens str. C58
MSVASLPSFLCLSQESSRRASARRESPSSPRTWAGWIPVTGTGMRECVVALCLLLTLIFAAASPALAFNPDEVLKDPVLEQRARNLTSQLRCMVCQNQSIDDSNAELARDLRVLVRERLVQGDSDKAVIDYVVSRYGEFVLLKPRLSLRTLLLWGAPIGLTLAGIFAVFVFSRRRATQERPQKLSADEEERIRNLIEK

SEQ ID NO: 1623 - protein, 397 aa, Oryza sativa (japonica cultivar-group)
MEGGGARNGSTTGAARTGGSGGDAAAGGGGGSAGNGKPLPPCCVKARAAAPESEAKCHATVVSGWFTEPRSRGGKTSKVQYYNNPMWPGEAHSLKVEKILYQGKSPYQEVLVFESSTYGKVLVLDGIVQLTDKDECAYQEMITHLPLCSIPSPKKVLVIGGGDGGVLREICRHGSVESIDICEIDQLVIDVCKDFFPDLSVGFKDPRVRLHVGDAVEFLRNAPEGTYDAIIVDSSDPIGPAQELVEKPFFDTIARALRPGGVLCNQAESMWLHTHLIQDMLSICRETFKGSVHYAWTSVPTYPSGVIGFLLCAKEGPPVNFLTPANPIEKLEGAMEAGRDIRFYNSEMHRAAFVLPTFARRELEAYCTTVEREQQEETTAEPLKMNIMPNSEILTAS

SEQ ID NO: 1624 - protein, 180 aa, Vibrio cholerae O1 biovar eltor str. N16961
MKARHLLPVLAAAITFPALSSPVMTLTSQDIQEGSRMAKHFVFNGFGCSGDNLSPQLSWNNAPKGTKSFAITAYDPDAPTGSGWWHWVALDIAADQHNVARGAAKQLKGVRELNNDYGFSGFGGACPPQGHGMHRYQFTVWALPFEKMEIPQGASNALVGFMLRANALEQATLTATYVNE

SEQ ID NO: 1625 - protein, 569 aa, Glycine max
  misc_feature (332)..(332): Xaa can be any naturally occurring amino acid
  misc_feature (457)..(457): Xaa can be any naturally occurring amino acid
MWKLVRYAAASNLARSRRFSAAIPGPCIVHKRGADILHDPWFNKDTGFPLTERDRLGLRGLLPPRVISFEQQYDRFMNSFRSLENNTQGQPDKVVSLAKWRILNRLHDRNETLYYRVLIDNIKEFAPIIYTPTVGLVCQNYSGLFRRPRGMYFSAKDKGEMMSMIYNWPAHEVDMIVLTDGSRILGLGDLGVQGIGIPIGKLDVYVAAAGINPQRILPVMLDVGTNNQKLLEDHLGLRQPRLEGEEYLSIVDEFMEAVHARWPKAIVQFEDFQMKWAFETLKRYQKRFCMFNDDIQGTAGVALAGILGTVRAQGRPLTDFVNQKIVVVGAGXGLVTTERNSLDPAAAPFAKNPRDIEGLTEGASIIEVVKKIRPHVLLGLSGVGGIFNEEVLKAMRESVSTKPAIFAMSNPTMNAECTSIDAFKHAGENIVFASGSPFENVDLGNGKVGHVNQANNXMYLFPGIGLGTLLSGAHLITDGMLQAASECLASYMAEEDILKGILYPSVDSIRDVTAEVGAAVLRAAVEEELAEGHGDVGPKELSHMSKDEAVEYVRSNMWYPVYSPLVHEK

SEQ ID NO: 1626 - protein, 502 aa, Zea mays
MATANGSSKGPFEVPKVEVRFTKLFIDGKFVDAVSGKTFETRDPRTGEVIASIAEGGKADVDLAVKAAREAFDNGPWPRMTGYERGRILHRFADLIDEHVEELAALDTVDAGKLFAVGKARDIPGAAHLLRYYAGAADKVHGATLKMAQRMHGYTLKEPVGVVGHIVPWNYPTTMFFFKVGPALAAGCAVVVKPAEQTPLSALFYAHLAREAGVPAGVLNVVPGFGPTAGAAVAAHMDVDKVSFTGSTEVGRLVMRAAAESNLKPVSLELGGKSPVIVFDDADLDMAVNLVNFATYTNKGEICVAGTRIYVQEGIYDEFVKKAAELASKSVVGDPFNPSVSQGPQVDKDQYEKVLRYIDIGKREGATLVTGGKPCGDKGYYIEPTIFTDVKDDMTIAQDEIFGPVMALMKFKTVEEVIQKANNTRYGLAAGIVTKNIDVANTVSRSIRAGAIWINCYFAFDPDAPFGGYKMSGFGKDMGMDALDKYLQTKTVVTPLYNTPWL

SEQ ID NO: 1627 - protein, 557 aa, Zea mays
  misc_feature (32)..(32): Xaa can be any naturally occurring amino acid
  misc_feature (68)..(68): Xaa can be any naturally occurring amino acid
  misc_feature (179)..(179): Xaa can be any naturally occurring amino acid
  misc_feature (212)..(212): Xaa can be any naturally occurring amino acid
  misc_feature (231)..(231): Xaa can be any naturally occurring amino acid
  misc_feature (428)..(428): Xaa can be any naturally occurring amino acid
  misc_feature (496)..(496): Xaa can be any naturally occurring amino acid
  misc_feature (506)..(506): Xaa can be any naturally occurring amino acid
  misc_feature (535)..(535): Xaa can be any naturally occurring amino acid
MAATVRRAASSVLSRFLLTKPSPSPAASAAGXSPALLGAGAAALRHRFSTAPASAAAAAEEPIQPAVXRVKHTQLLINGNFVDAASGKTFPTLDPRTGEVIARVAEGDSEDIDRAVAAARRAFDEGPWPRMTAYERCRVLLRFADLIERHAEEVAALETWDNGKTLAQAAGAEVPMVAXRCVRYYAGWADKIHGLVAPADGAHHVQVLHEPXGVAGQIIPWNFPLLMFAWXKVGPALACGNTVVLKTAEQTPLSALYVANLLHEAGLPEGVLNVVSGFGPTAGAALSSHMGVDKLAFTGSTGTGQIVLELAEESNLKPVTLELGGKSPFIVMDDADVDQAVELAHQAVFFNQGQCCCAGSRTFVHERVYDEFVEKSKARALKRVVGDPFRDGVEQGPQIDGEQFNKILRYVQSGVDSGATLVAGGDRXGDRGFYIQPTVFADAKDEMKIAREEIFGPVQTILKFSGVEEVIRRANATPYGLAAGVFTRSLDAANTXLSRALRAGTXVWVNCYDVFDATIPFGGYKMSGVGREKGXYALRNYLQTKAVVTPIKNPAWL

SEQ ID NO: 1628 - protein, 503 aa, Zea mays
MATANGSSKGSFEVPKVEVRFTKLFIDGKFVDAVSGKTFETRDPRTGEVIASIAEGGKADVDLAVKAAREAFDNGPWPRMTGYERGRILHRFADLIDEHVEELAALDTVDAGKLFAVGKARDIPGAAHLLRYYAGAADKVHGATLKMAQRMHGYTLKEPVGVVGHIVPWNYPTTMFFFKVGPALAAGCAVVVKPAEQTPLSALFYAHLAREAGVPAGVLNVVPGFGPTAGAAVAAHMDVDKVSFTGSTEVGRLVMRAAAESNLKPVSLELGGKSPVIVFDDADLDMAVNLVNFATYTNKGEICVAGTRIYVQEGIYDEFVKKAAELASKSVVGDPFNPSVSQGPQVDKDQYEKVLRYIDIGKREGATLVTGGKPCGDNKGYYIEPTIFTDVKDDMTIAQDEIFGPVMALMKFKTVEEVIQKANNTRYGLAAGIVTKNIDVANTVSRSIRAGAIWINCYFAFDPDAPFGGYKMSGFGKDMGMDALDKYLQTKTVVTPLYNTPWL

SEQ ID NO: 1629 - protein, 309 aa, Salmonella typhimurium LT2
MPLEKGIAELVAGFIAAGRPSSREQNIDDRRAGYIASTTLAGETETRVQVEDIELDAMTFRVVSPLNATGKLPCIIYYHGGCFVSGGFATHDNQLRQLAFYSRCRVIAAQYRLAPDHTFPAAHNDAETGANTIWKYAQKLGIDRENITLAGDSAGGHLALVTALRLKAARQWQPAQLILIYPMLDATARFASYTCNGLDYIITRDTLLSGYEMYMPRTDPLHPEASPLWREDFAGLPSTHIITAEFDPLRDEGEALYQRFQEQGVECTCQRYLGVIHGFFQLGGVSQAARSAMRDVAWRVVSPSTGKMT

SEQ ID NO: 1630 - protein, 513 aa, Triticum aestivum
  misc_feature (263)..(263): Xaa can be any naturally occurring amino acid
  misc_feature (268)..(268): Xaa can be any naturally occurring amino acid
  misc_feature (281)..(282): Xaa can be any naturally occurring amino acid
MDSPLPFLVAMSSLLLILAGLYMTRLGLLGKRRRSYPPVAGTMLHQLLNWGRLPEYMTELSRRYRTFSMLTLTRSSVHTVDPANVEYILRTNFANYGKGTMTHDTMEDLLGDGIFNVDGAKWRHQRKVASFEFSTRMLRDYSSGVFRDMAAQLAGIVAAAAAAGERLSMEDLFMRSTLDSIFKIGFGVNLGALSGSNQKGAAFARAFDNASEQVLYRILDPLWKDKRLLNIVSKAAMKRSMRTIDDFVYTVIDNKIDHMARDXNNSAXKQDILSRFLLERXXTPGCFDHKHMRDIILNFMIAGRDTTELTLTSFLYVMCREQRIQDKIAREVREATSTGDRQDAGGVEEFTARLTEDAIGSMHYLHAALTETLRLYPAVPVDVKCCFSDDTLPDGHAVRRGDMVNYQPFAMGRMKFLWGDDAEEFRPERWLDGDGVFVPESPYKFTAFQAGPRICLGKEFAYRQMKIFAATLLYLFRFEMWDRGSTVGYRPMLTLKMDGPLYVRASPRRSIGN

SEQ ID NO: 1631 - protein, 466 aa, Zea mays
KTFDTRDPRTGDVLAHVAEADKADVDLAVKSARDAFEHGKWPRMSGYERGRIMSKLADLVEQHTEELAALDGADAGKLLLLGKIIDIPAATQMLRYYAGAADKIHGDVLRVSGRYQGYTLKEPIGVVGVIIPWNFPTMMFFLKVSPALAAGCTVVVKPAEQTPLSALYYAHLAKMAGVPDGVINVVPGFGPTAGAALASHMDVDSVAFTGSTEVGRLIMESAARSNLKTVSLELGGKSPLIIFDDADVDMAVNLSRLAVFFNKGEVCVAGSRVYVQEGIYDEFVKKAVEAARSWKVGDPFDVTSNMGPQVDKDQFERVLKYIEHGKSEGATLLTGGKPAADKGYYIEPTIFVDVTEDMKIAQEEIFGPVMSLMKFKTVDEVIEKANCTRYGLAAGIVTKSLDVANRVSRSVRAGTVWVNCYFAFDPDAPFGGYKMSGFGRDQGLAAMDKYLQVKSVITALPDSPWY

SEQ ID NO: 1632 - protein, 294 aa, Saccharomyces cerevisiae
MKTLVHVASVEKGRSYEDFQKVYNAIALKLREDDEYDNYIGYGPVLVRLAWHISGTWDKHDNTGGSYGGTYRFKKEFNDPSNAGLQNGFKFLEPIHKEFPWISSGDLFSLGGVTAVQEMQGPKIPWRCGRVDTPEDTTPDNGRLPDMDKDAGYVRTFFQRLNMNDREVVALMGAHALGKTHLKNSGYEGPWGAANNVFTNEFYLNLLNEDWKLEKNDANNEQWDSKSGYMMLPTDYSLIQDPKYLSIVKEYANDQDKFFKDFSKAFEKLLENGITFPKDAPSPFIFKTLEEQGL

SEQ ID NO: 1633 - protein, 443 aa, Glycine max
MDRRSHPTGTVSTRNILFNKYEIGKLLGQGNFAKVYHGRNLSTNESVAIKVIKKERLQKERLVKQIKREVSVMRLVRHPHIVELKEVMANKAKIFMVVEYVKGGELFAKVAKGKLTEDLARKYFQQLISAVDFCHSRGVTHRDLKPENLLLDQNEDLKVSDFGLSTLPEQRRADGMLVTPCGTPAYVAPEVLKKKGYDGSKADLWSCGVILFALLCGYLPFQGENVMRIYRKAFRAEYEFPEWISPQAKNLISNLLVADPGKRYSIPDIMRDPWFQVGFMRPIAFSIKESYVEDNIDFDDVENNQEEEVTMRKPARPFYNAFEIISSLSHGFDLRSLFETRKRSPSMFICKFSASAVLAKVEAVAKKLNFRVTGKKEFVVRMQGTEEGRKGKLAMTVEVFEVAPEVAVAEFTKSAGDTLEYVKFCEEQVRPSLKDIVWSWQGD

SEQ ID NO: 1634 - protein, 511 aa, Zea mays
MASNGCNGNGNGNGNGKAAPAGVVVPEIKFTKLFINGEFVDAASGKTFDTRDPRTGDVLAHVAEADKADVDLAVKSARDAFEHGKWPRMSGYERGRIMSKLADLVEQHTEELAALDGADAGKLLLLGKIIDIPAATQMLRYYAGAADKIHGDVLRVSGRYQGYTLKEPIGVVGVIIPWNFPTMMFFLKVSPALAAGCTVVVKPAEQTPLSALYYAHLAKMAGVPDGVINVVPGFGPTAGAALASHMDVDSVAFTGSTEVGRLIMESAARSNLKTVSLELGGKSPLIIFDDADVDMAVNLSRLAVFFNKGEVCVAGSRVYVQEGIYDEFVKKAVEAARSWKVGDPFDVTSNMGPQVDKDQFERVLKYIEHGKSEGATLLTGGKPAADKGYYIEPTIFVDVTEDMKIAQEEIFGPVMSLMKFKTVDEVIEKANCTRYGLAAGIVTKSLDVANRVSRSVRAGTVWVNCYFAFDPDAPFGGYKMSGFGRDQGLAAMDKYLQVKSVITALPDSPWY

SEQ ID NO: 1635 - protein, 393 aa, Streptococcus mutans UA159
MAEKVSFEEGKLQVPDKPVIPYIEGDGVGQDIWKNAQIVFDKAIAKVYGGHKQVIWREVLAGKKAYNETGNWLPNETLEIIKTHLLAIKGPLETPVGGGIRSLNVALRQELDLFACVRPVRYFKGVPSPLKHPEKTAITIFRENTEDIYAGIEWNAGTAEVQKVINFLQDDMQVKKIRFPKSSSIGIKPISIEGSQRLIRAAIEYALANNLTKVTLVHKGNIQKFTEGGFRKWGYELAKREYAAELASGQLVVDDIIADNFLQQILLKPERFDVVALTNLNGDYASDALAAQVGGIGISPGANINYQTGHAIFEATHGTAPDIAGQDLANPSSVLLSGCMLFDYIGWSKVSDLIMKAVEKAIANGQVTIDFAKELGVEALTTRQFSEVLLTYL

SEQ ID NO: 1636 - protein, 321 aa, Burkholderia cepacia R18194
MSTTTLTVRVARKWQEARDICGFEFVSDDGSPLPHFDAGAHIDVHLPGGFVRQYSLCNHPEHGDRYEIAVLRDADGRGGSRAIHDDVRQGDTVRIGVPRNQFALVPDAPHHLLLAGGIGVTPILSMAQRLFSSGTPFDLHYCARSTDRMAFAERINAAAFHDRARFHVDDGAPAQRFDLAAVLAAAPAGTHLYVCGPRGFMDAVLNAARERNWAEARLHYEFFGGTVASSGSDRAFQVRIASSGKVIDVPAECTVIAALAANGVDVLTSCEQGVCGTCATRVLQGEPDHRDSYLTAEEQAAGDQFMPCCSRARSDLLVLDL

SEQ ID NO: 1637 - protein, 133 aa, Brassica napus
MINLRIPILVSFMFFLVFISSSLLFATPIFAARVGHSLVQEEATKIPQYNRLEESEEPEIPEDPEEPEIPEDPEVPEEPEELPKESEEGSFEFPSWIPSFPFPGTNGGLPKTEKTKPTSVISEATSSGSNKKP

SEQ ID NO: 1638 - protein, 152 aa, Glycine max
  misc_feature (21)..(21): Xaa can be any naturally occurring amino acid
  misc_feature (27)..(27): Xaa can be any naturally occurring amino acid
  misc_feature (45)..(45): Xaa can be any naturally occurring amino acid
  misc_feature (47)..(47): Xaa can be any naturally occurring amino acid
  misc_feature (59)..(59): Xaa can be any naturally occurring amino acid
  misc_feature (107)..(107): Xaa can be any naturally occurring amino acid
  misc_feature (112)..(112): Xaa can be any naturally occurring amino acid
  misc_feature (116)..(116): Xaa can be any naturally occurring amino acid
PPPSSSSDGCVIEVRDRRIPXSTSHPXKRILVLNREDMISTADRXAXADYFTRNGTKVXFSNGQLGMGTMKLGRLAKELAADVNVRRRTKGLLPRAVQAGIVGYPNXGKSSXVNRXLKRRMCPAAPRPGVTRELRWVRLGKDLELLDSPGIL

SEQ ID NO: 1639 - protein, 359 aa, Glycine max
MASQLLRRTFGSRFLANPRAFSSAASTPIRATLFPGDGIGPEIADSVKQIFQAADVPIEWEEHYVGTEIDPRTQSFLTWESLESVRKNKVGLKGPMATPIGKGHRSLNLTLRKELNLYANVRPCYSLPGYKTRYDNVNLITIRENTEGEYSGLEHQVVRGVVESLKIITRQASLRVAEYAFHYAKAHGRERVSAIHKANIMQKTDGLFLKCCREVAEKYPEITYEEVVIDNCCMMLVKNPALFDVLVMPNLYGDIISDLCAGLIGGLGLTPSCNIGEGGIALAEAVHGSAPDIAGKNLANPTALLLSGVTMLRHLNLHDKAEQIQKAILNTIAEGKYRTADLGGSSKTTEFTKAIIDHL

SEQ ID NO: 1640 - protein, 342 aa, Oryza sativa (japonica cultivar-group)
MAGGGVGASAAAAATIPEAALRSGKPMPLVGMGTASFPLDAPQLPATVRDAVLRAIDAGYRHFDTAAAYGTEAPLGEAVLEAVRAGMVASRDDLYITSKLWISDTHPGRVLPALRRTLRNLQMVYIDLYLIHWPIRLRVEQETPSPVYDNDFVMMDMEGVWKDMEECQRLGLTKAIGVSNFTCKKLNTLLSFATIPPAANQVEINPYCRQNKLREFCKEKEIQLCAYSPLGASGTIWGSNAVLDCPVLKHIAVQKGKTVAQVCLRWLHEQGDCIIVKSFNERRMRENLEIFDWELTDADRQEISALPEFRGNRDFYVHESGPYKTTDEFWDGEITGPQLKTC

SEQ ID NO: 1641 - protein, 507 aa, Mycobacterium avium subsp. paratuberculosis str. k10
MTVFARPGSAGALMSYESRYDNFIGGQWVAPARGRYFENPTPVTGQTFCEVARSDEADVDKALDAAHAAAPAWGKTAPAERAAILNKIADRIEENLESLAVAEVWDNGKPIREALAADIPLAADHFRYFAGALRAQEGSLSQIDDDTVAYHFHEPLGVVGQIIPWNFPILMGAWKLAPALAAGNAVVLKPAEQTPVSVLYLMSLIGDLLPPGVVNVVNGFGAEAGKPLASSNRIAKIAFTGETTTGRLIMQYASQNLIPVTLELGGKSPNIFFSDVMAKADDYQDKALEGFTMFALNQGEVCTCPSRSLIQADIYDEFLELAAIRTKAVRQGDPLDSETMLGSQASNDQLEKVLSYIAIGKDEGATIITGGERAELGGDLSGGFYMQPTIFAGNNKMRIFQEEIFGPVVAVTSFTDYDDAISIANDTLYGLGAGVWSRDGNTAYRAGRDIQAGRVWVNCYHAYPAHAAFGGYKQSGIGRENHKMMLDHYQQTKNMLVSYSNKAQSFF

SEQ ID NO: 1642 - protein, 146 aa, Zea mays
QDRLLPIANVGRIMKQILPPNAKISKEAKETMQECVSEFIGFVTGEASDKCHKEKRKTVNGDDLCWAFGALGFDDYVDPMRGYLHKYREVEGDRAAAAASSSRGGGDHHPASASTSTSPAAAAAPGHFMFGAAAIDRPDNNTSSAR

SEQ ID NO: 1643 - protein, 280 aa, Streptococcus mutans UA159
METVVLSNGVKMPILGFGVFQVPDLEECERVVTEAIKVGYRLLDTAQVYGNEEAVGNAVRKSGLAREEFFITTKVWISNAGYEKAKASLDESLRKLQTDYVDLVLIHQPFGDYYGTWSALEAYYKSGKIKAIGVSNFYPDRLVDLASFNEIVPMVNQVETHVFNQQIEAKKVSEEYGVQLESWGPFAEGKNNFFTNPTLTAIGEKYGKSAAQVGLRYLIQRGVVVIPKTVHQERMVQNFDVFGFNLSDDDMADILKLDQGESLFINHYDPETVKFLANYK

SEQ ID NO: 1644 - protein, 275 aa, Triticum turgidum subsp. durum
MNIQVDPSSQVQWPQQQLVPQPQQPLSQQPQQAFPQPQQTFPHQPQQQVPQPQQPQQPFLQPRQPFPQQPQQPYPQQPQQPFPQTQQPQQPFPQSKQPQQPFPQPQQPQQSFPQQQPSLIQQSLQQQLNPCKNFLLQQCKPVSLASSLWSIILPPSDCQVMRQQCCQQLAQIPQQLQCAAIHSVVHSIIMQQEQQEQLQGVQILVPLSQQQQVGQGILVQGQGIIQPQQPAQLEVIRSLVLQTLPTMCNVYVPPYCSTIRAPFASIVAGIGGQYR

SEQ ID NO: 1645 - protein, 288 aa, Streptococcus mutans UA159
MEYITLNTGVKMPMEGFGVFQVTDPEICKESVLNAIKTGYRLFDTAAVYGNEKALGEAIHEAIEQGLVTRNELFITSKLWVQDMNYEAAKKGIERSLEKLGLDYLDLYLLHQAMRDYFGAYRALEEAYQAGKLRAIGVSNFYPNILTNFCETVSVIPAVNQIELHPFFTQEEALETARYYGVVPEAWAPLGGGRYDAFNNAILQEVASAHQKTVGQIMLRWNVQRGVVVIPKSTHKERIEENFAIWDFSLTDDEMTKIASLDMGYGDTRTKHFDPNFVRSVLNVKIHD

SEQ ID NO: 1646 - protein, 154 aa, Glycine max
  misc_feature (24)..(24): Xaa can be any naturally occurring amino acid
MSGVWGFKNGVVRLVENPEGEAAXGSRGGRRTVLVHRASSEVLIYYAALEHTLDSLDWETDYDHANLLQFHKRCTYHLIYVTIDFIMFMPMLMSDILMKNKIPFEVRDIQSMSGKRLNIIHIRTNMPTTCKAYVHCTLPATTVQRQLIVTICTT

SEQ ID NO: 1647 - protein, 491 aa, Listeria monocytogenes str. 4b H7858
MVFLSIKETALPKVQTKLFINGKWTDGDNKETKDIVNPANGEVIAKIAQAGPNETKKAIKAAKEAFPDWAKMELADRVKLLHKIADLMEEKADTLAKIMTLEQGKPLKESKGEVLTGAENFRFAAEEARRLYGETIPAPNNHAFIVKKQPIGVVAAITPWNFPGGMVTRKLAPALATGNTIVLKPSGDTPLSALAIFEIFEEAGLPKGVANIVMGSSKEIGETLTDSDDVRKLTFTGSTKVGQTLFKQSAETLKKISLELGGHAPFIVFDDANLDAAVNDLVAAKFRNNGQVCVSPNRIFVAKEIKEKFTKALVAKVKQLKVGNGLDDVNVGPLIREDAIDKIDKQLKNATDKGAKVLTGGGRLTGSDYDKGNFYKPTVLDNVTREMDIFYEETFGPVIPLITFETEDEAIEMANDSEFGLASYFYTKDLARVEKVGAALEYGMVGANEIVISNPETPFGGVKHSGFGRENGHYGMEEYIQVKFINLKYRD

SEQ ID NO: 1648 - protein, 280 aa, Zea mays
  misc_feature (201)..(201): Xaa can be any naturally occurring amino acid
MDPMDIVGKSKEDVSLPKSTMFKIIKEMLPPDVRVARDAQDLLVECCVEFINLLSSESNEVCSREEKKTIAPEHVIKALSDLGFREYIEEVYAAYEQHKLETLDSPKAGKFTRIAMTEDDAAAEHQRMFAVARARMNNGAPKPKEPEQEPPQLPQAQPQLQLHTEPQQPMQSQVQLHSQTQHYLQPQLQLHSQPQLQPLSXQLPPQLQVHQQLQQPPQVQVHQQPEVQPQEAQLQSSAQQTSQPQPQAQLQSQGHSQAQLQAGLLGQLQTQAQTGPDMDS

SEQ ID NO: 1649 - protein, 438 aa, Mycobacterium avium subsp. paratuberculosis str. k10
MSTALGGKVLLPDSPQFAGAKQVFNTNYNGSTPAAVVTPTSAADVQKAMAFAAAHNLKVVPRSGGHSYTGASTANGTMVLDLRQLPGDANFDAATGQVTVTPATSLYTMHRTLAAVGRGVPTGTCPSVGAAGHALGGGMGAQSRHAGLLCDQLTSASVVLPSGQAVTASAASNPDLFWALRGGGGGNFGVTTSLTFATFPTKDVDAVNLNFPPQSFAQVLVGWQNWLRTADPNSWALADATVDAMGVHCRILATCPAGSGNSAAAAITQAVGIQPSGVETHTFNYMDLVNYLAVGNLNPQPLGYVGGSDVFPTVNAAVAQGIAAAVNAFPRNAGRMLAIMHALDGALATVAPAATAFPWRRQSALVQWYVETSGDPAAATNWLASAHQAVQQYSVGGYVNYLEANQSPARYFGPNLSRLSAVRQKYDPGRVMFSGLNY

SEQ ID NO: 1650 - protein, 479 aa, Magnaporthe grisea 70-15
MHRVTKAVVLAALTVCTALASPLSKIALLDDCLSAAEVPVDAPGSTDWLLDSMTFNLRLNYTPAAIATPTTIPQTQAAVSCAASAGLKANAKSGGHSYASFGTGGEDGHLVIQLDRMNNVSLDVDNGIATVQGGARLGRVASELYKQGKRAISHGTCPGVGVGGHALHGGYGMSSHMKGLMLDWLVGATVVLANSSVVECSSVENTDLFWAIRGAGSSMGVVAEMRFETFEAPDEVTYFIAQVPWKNTTAVDGFRALQEFAAEQMPAELNMRLFITRQFANLEGMYWGNKTVLQQTLAPLVTATGAKLQYSQTDNWLGQLTHFGNGLNLDQSRPYKMIQAFVDYWFNKGKATRRDWYVQVDLHGGKNSAVSRPEADSAAYAHRNHLLLFLFYDRVDTKGVYPSDGFAFINEFVGDLTKTIGEDDGETWGRYPNYPDSRLSPESAQRGYWGSHLQRLREIKTAVDPGDMFHYPQGVPPAV

SEQ ID NO: 1651 - protein, 343 aa, Listeria monocytogenes str. 1/2a F6854
MKAVVKTNPGYDQMELKDVEEPQVYGDKVKIKVAFTGICGSDIHTFKGEYKNPTTPVTLGHEFSGVVVEVGPDVTSIKVGDRVTSETTFETCGECIYCKEHDYNLCSNRRGIGTQANGSFAEFVLSREESCHVLDERISLEAAALTEPLACCVHSALEKTTIRPDDTVLVFGPGPIGLLLAQVVKAQGATVIMAGITKDSDRLRLAKELGMDRIVDTLKEDLAEVVLGMTGGYGAERVFDCSGAVPAVNQGLPLTKKKGDFVQVGLFAEKKNAIDEESIIQREIAYIGSRSQKPSSWILALDLLANGKINTDKMITKVYGLDDWREAFEAVMAGNEIKVLVKS

SEQ ID NO: 1652 - protein, 134 aa, Aspergillus niger
DTAGQEDYDRLRPLSYPQTDVFLVCFSVTSPASFENVREKWFPEVHHHCPGVPCLIVGTQTDLRDDPAVREKLARQKMQPIRKEDGDRMAKELGAVKYVECSALTQYKLKDVFDEAIVAALEPAPKKSKKCVLL

SEQ ID NO: 1653 - protein, 350 aa, Listeria monocytogenes str. 1/2a F6854
MRAAVLYENNVIKAEQIDEATCGKDQVRVEVKAVGICGSDIHKMQTRWKYPLPAVMGHEFAGVVTEIGSEVTNVAIGDRVAGIPLEPCMECNYCKAGDFALCDNYRMVGSHFHGGFAENVVMKADNVISIGDLDFEEGAMIEPLAVSMHGVLGIQPRLGDTVIVFGIGTIGILVVQCLLLAGVKDIIAVDISDKKLADAREFGCKYTINPKNEDLKERVFAYTNGLGADIALECAGSKITQEQCLLVTKKKGKVGFLGIAYADVLLHEEAFENIFRRELTLKGFWNSYSAPFPGEEWRTSIEFVKQGRIKLKPLISHRYKLEETKEAFDMILSREHDYNKVMILPQKGDD

SEQ ID NO: 1654 - protein, 275 aa, Triticum turgidum subsp. durum x Hordeum chilense
MNIQVDPSSQVQWPQQQPFLQPHQPFSQQPQQIFPQPQQTFPHQPQQQFPQPQQPQQQFLQPRQPFPQQPQQPYPQQPQQPFPQTQQPQQPFPQFQQPQQPFPQPQQPQQSFPQQQPSLIQQSLQQQLNPCKNFLLQQCKPVSLVSSLWSIILPPSDCQVMRQQCCQQLAQIPQQLQCAAIHSVVHSIIMQQEQQEQLQGVQILVPLSQQQQVGQGILVQGQGIIQPQQPTQLEVIRSLVLQTLPTMCNVYVPPYCSTFRAPFASIVAGIGGQYR

SEQ ID NO: 1655 - protein, 489 aa, Gibberella zeae PH-1
MALLSVNLRDGLILTAVITILLYIWEKKTAKITRNGEPLRKPPNTLPLVGNGIIFLQPRQKLFSWFHRCERLYGYETLHITVPSLPPGVIVNDPQNLDFIFRNEGVFEKGEFFKQRSWDLFGHGIINVDGEFWRLQRKAGLRFLSAAALKTLTNEKLPKYLDQAIGVLEAKTNTKEVVDLQAVVHEVTTQLMGRMAYNMEMHADDDFTVAFEHASGGTAERFQNPLWFVTEMFTGARMRRSITTVKAYGKRIVTSAVADRKEAEGKTQSDAPGSLIQSLLDSIGDETLVADAALNYLSAGRDTVAQALTWTLYLLMKNPHVATKLRQSVESLRDEDTSTGDDPELLTPVRLPYVLAVFYESLRLRPPIPFEIKQAQQATTLPDGTFLPAGAIVVWCAWAMGRSHTTWGPNADDFRPERWLTTSLAGDVTVAQRPAAEFPVFNGGPRTLARLVPLFKFEPAFEGERVSKSSLTLPMEGGLPVYVQHQTPS

SEQ ID NO: 1656 - protein, 164 aa, Glycine max
  misc_feature (68)..(68): Xaa can be any naturally occurring amino acid
  misc_feature (109)..(109): Xaa can be any naturally occurring amino acid
  misc_feature (116)..(116): Xaa can be any naturally occurring amino acid
  misc_feature (125)..(125): Xaa can be any naturally occurring amino acid
  misc_feature (133)..(133): Xaa can be any naturally occurring amino acid
  misc_feature (135)..(135): Xaa can be any naturally occurring amino acid
VYRASVCMVGPFTGLKSMAGLPTKKTNYDITFIALNCGILQCMRVCPPDGKKKFETLCYLPHLDDAQXAKEVQYLLRKGWIPCLQFQLDHGFVYREHNRSPRYYDGRYXTMWDLPXFGCTDAYQXVKELQEAXTXYPNCFIRIIRFDHLSPSPCINFIAFKSPS

SEQ ID NO: 1657 - protein, 279 aa, Streptococcus pyogenes M1 GAS
MVTTVKMTSGYEIPVLGFGTYQAADGEEAYQSTLAAIKAGYRHIDTAAIYKNEESVGRAIKDSGVLREDLFITTKLWNDAHSYEGAKDALAASLDRLGLDYVDLYLIHWPNPKALRNTWKEANAQAWQYMEEAVEAGLIKSIGVSNFMVHHLEALQETAKITPAINQIRLAPGCYQKEVVDYCKANEILLEAWSPLGQGEIFDNETMQQLANKYDKTVAQVALAWSLAEGFIPLPKSVHDERIKENMAIFDVSLTQEDKKTIRYLSGMSAIPNPDTTSF

SEQ ID NO: 1658 - protein, 355 aa, Pyrococcus furiosus DSM 3638
MKQKKAWAIVKEVINEADIVVEVVDARDPIGTRNRKLERMVLESGKKLLLVMNKADLVPKDWAEEYKRKSEIPVVFISARERKGTGIFRKELKKLAKEIDKEKVKVALIGYPNVGKSTIINVLKGKHAVGTAPIPGYTKGKQLIRLTKRIWLLDTPGVVPIDDFDELVIKGGFPADKIRDPVKPALKLIKRILETRKEAITEKFGIEKFENEEEILEEIGKRRGLIKAGGEVDIEETARWFLREWQTGRFTLFGKEEKREEEYLPSFHDILEYIKKEKITEPRMILWKFGKKLEEYLGSEKRLGTIQIDEFTVAIATGFKKCPNALKFIEKVTGKTVISAECFGKKWKGIVAILE

SEQ ID NO: 1659 - protein, 394 aa, Oryza sativa
MRMEGGGGGGHGHHGGGGGGHGHHGGIGGGEAQIKGTLTHGGRYVQYNVYGNLFEVSSKYVPPIRPVGRGACGIICAVVNAQTRQEVAIKKIGNAFDNQIDAKRTLREIKLLRHMDHDNVISIKDIIRPPRRENFNDVYIVYELMDTDLHHLLRSNQPLTDDHCQYFLYQVLRGLKYVHSANVLHRDLRPSNLLLNAKCDLKIGDFGLARTTNETDFMMEYVVTRWYRAPELLLNCSEYTAAIDIWSVGCILGEIVTREPLFPGKDYVHQLRLITELIGSPDDSSLGFLRSDNARRYVRSLPQYPKQQFRARFPTMSSGAMDLLERMLVFDPSKRITVDEALCHPYLASLHEIYDEPVCPAPFSFDFEQPSLTEEDIKEIIWREALKFNPEPIH

SEQ ID NO: 1660 - protein, 430 aa, Mycobacterium avium subsp. paratuberculosis str. k10
MPTSVVGTPKSAEEIQKDWDTNPRWKDVTRTYTAEDVVALQGTVVEENTLARRGAEVLWEQLHDLEYINALGALTGNMAVQQVRAGLKAIYLSGWQVAGDANLSGHTYPDQSLYPANSVPTVVRRINNALLRADQIAKVEGDTSVKNWLAPIVADGEAGFGGALNVFELQKAMIAAGVAGSHWEDQLASEKKCGHLGGKVLIPTQQHIRTLTSARLAADVCDVPTVVIARTDAEAATLITSDVDERDQPFITGERTKEGFYRVRNGLEPCVARAKAYAPYSDLIWMETGTPDLELAAKFAEGVKAEFPDQMLAYNCSPSFNWKKHLDDATIAKFQKELAAMGFKFQFITLAGFHALNYSMFDLAYGYARNQMTAYVELQEREFAAEERGYTATKHQREVGAGYFDRIATTVDPTSSTTALTGSTEEGQFH

SEQ ID NO: 1661 - protein, 164 aa, Hordeum vulgare subsp. vulgare
MAQESLRLVCPPVSAHDGRLPRQYTLEGQGAKKDISPPLEWYGVPGGARSLALVVQDIDADERVPWTHWVVANISPEEKGLPEGFSGAGGNANAGGEGGLQEGVNDWKQPGWRGPVPDSHGHRIQFRLYALDDVLSLGNKVTVDKVMEAIEGHVLGEAELTAVF

SEQ ID NO: 1662 - protein, 164 aa, Ralstonia eutropha JMP134
MSNVYQFEAKSLAGQPVPLSQFRGKVLLIVNTASECGFTPQYAGLQALHDAYAARGLEVLGFPCNQFGKQEPGDAQQIGQFCESRFSVKFPMFAKIDVKGPDAHPLYQWLTSAKRGVLGTQAIKWNFTKFLLRRDGTVYKRYGSITKPEEIRADIETLLADPAA

SEQ ID NO: 1663 - protein, 316 aa, Vibrio vulnificus CMCP6
MSNKLEQLRKLTTVVADTGEIDAIKKYQPEDATTNPSLILKAAQIAEYAPLIDASIEYAKTQSDDKAQQIQDTCDMLAVNIGKEILKTIPGRISTEVDARLSYDMEGSVAKARQLVKMYNDAGITNDRILIKLASTWEGIRAAEILEKEGINCNLTLLFSFAQARACAEAGVFLISPFVGRIMDWYKAKEGRDFEAQEDPGVLSVTKIYNYYKEYGYKTVVMGASFRNIGEILELAGCDRLTIAPALLAELEAAEGEVVEKLVDSKGAAERPAAMTHAEFLWEHNQDPMAVEKLAEGIRNFAVDQGKLEAMIAAKL

SEQ ID NO: 1664 - protein, 460 aa, Glycine max
MEQKGGVLMQRYELGRLLGQGTFAKVYHARNIITGMSVAIKIIDKEKILKVGMIDQIKREISVMRLIRHPHVVELYEVMASKTKIYFVMEHAKGGELFNKVVKGRLKVDVARKYFQQLISAVDYCHSRGVCHRDLKPENLLLDENENLKVSDFGLSALAESKCQDGLLHTTCGTPAYVAPEVINRKGYDGIKADIWSCGVILYVLLAGHLPFQDTNLMEMYRKIGRGEFKFPKWFAPDVRRFLSRILDPNPKARISMAKIMESSWFKKGLEKPAITVTENEELAPLDADGIFEACENDGPIAEPKQEQAKPCNLNAFDIISFSTGFDLSGLFEDTFLKKETRFMSKKPASIIVLKLEEICKRLCLKVKKKDGGLLKLEGSKEGRKGTLGVDAEIFEITPHFHMVELRKSNGDTMEYQKLFKQDIRPALKDIVWTWQGEKPQQEQEQHEVVQEEHQPSHTA

SEQ ID NO: 1665 - protein, 405 aa, Arabidopsis thaliana
MPLSLQSPPCATLSASIRKGRWKTLAAGFSVTPLPAVNFSLRRSIPRILASASSSSSPASSSLEAGENNELNAVSAFSEIVPDTVVFDDFERFPPTAATVSSALLLGICGLPDTIFRNAVDMALADSSCAGLETTESRLSCFFNKAIVNVGGDLVKLVPGRVSTEVDARLAYDTNGIIRKVHDLLRLYNEIDVPHDRLLFKIPATWQGIEAARLLESEGIQTHMTFVYSFAQAAAASQAGASVIQIFVGRLRDWARNHSGDTEIKSAIKSGEDPGLALVKRSYNYIHKYGYKSKLMAAAVRNKQDLFSLLGVDYVIAPLKVLQSLKDSPAIPDDEKYSFVRKLTPETATHYHFTNKELVKWDQLSLASSMGPASVELLSAGVEGYANQAKRVEELFGKIWPPPNV

SEQ ID NO: 1666 - protein, 335 aa, Lycopersicon esculentum
MVHQKQVKDVVSGWLTVFDDGSVDRTWTGPPEVKFMAEPVPPHDDFIDGVAVKDVVAGENSGSRFRIYLPERNDSSVDKLPVILHFHGGGFCISQADWFMYYAVYTRLARVANAIVVSVFLPLAPEHRLPAACDAGFAGLLWLRDVSREQGHEPWLNEYADFNRVFLIGDSSGGNVVHQVAARAGEEDLSPMKLAGAIPIHPGFMRSQRSKSELEQEQTPFLTLDMVDKFMELALPIGSTKDHPITCPMGDAAPAVEELKLPPYLYCVAEKDLIEDTEMEFYESLKTGEKDVELLINNGVGHSFYLNKIAVDMDPVTGSATEKLFEAIAEFINKH

SEQ ID NO: 1667 - protein, 352 aa, Triticum aestivum
  misc_feature (96)..(96): Xaa can be any naturally occurring amino acid
  misc_feature (127)..(127): Xaa can be any naturally occurring amino acid
  misc_feature (136)..(136): Xaa can be any naturally occurring amino acid
  misc_feature (150)..(150): Xaa can be any naturally occurring amino acid
MGSTAADMAASADEEACMYALQLVSSSILPMTLKNAIELGLLETLVAAGGKLLTPAEVAAKLPSTANPAAADMVDRMLRLLASYNVVSCTMEEGRXRLSRRYGAAPVSSSSPQRRRVSMAALALMNXTVSWRLYYXDRPDADPLKAYGFXSFEYHGTDPRFNRVFNEGMKNHSIIITKKLLESYKGFEGLGTLVDVGGGVGATVAAITAHYPTIKGINFDLPHVISEAPPFPGVTHVGGDMFQKVPSGDAILMKWILHDWSDEHCATLLKNCYDALPAHGKVVLVECILPVNPEATPKAQGVFHVDMIMLAHNPGGRERYEREFEALAKGAGFAAMKTTYIYANAWAIEFTK

SEQ ID NO: 1668 - protein, 147 aa, Oryza sativa (japonica cultivar-group)
MSFAIRSSEPEFWFLIPSEEAAVAVAAHRLVVMDQRRSGSAYRPKRTHMAAAEDEHRRPGTSSRRRVAPTPTTQTQTQTAPGYFTVELVMAFVCVTASLVLLPLVLPPLPPPPSLLLVVPVCLLAVLVAMAFVPLDAQSNVVGSSCL

SEQ ID NO: 1669 - protein, 145 aa, Brassica napus
DEERPYLPKHILYRQKEQFSDGVGYSWIDGLKAHAAENVNDKMMSNAAFIFPHNTPLTKEAYYYRMIFERFFPQNSARLTVPGGATVACSTAKAVEWDASWSNNMDPSGRAAIGVHLSAYDGSKVALPLPPHKAIDDIPMMMGQE

SEQ ID NO: 1670 - protein, 199 aa, Aspergillus niger
MATGPATQSLKCVVTGDGAVGKTCLLISYTTNAFPGEYIPTVFDNYTASVMVDGRPISLGLWDTAGQEDYDRLRPLSYPQTDVFLICFSIVSPPSFDNVKAKWFPEIEHHAPNVPIILVGTKLDLRDDRGTIDALRQRKMEPVSYEQALAVAKEIRAHKYLECSALTQRNLKSVFDEAIRAVLNPRPAAKPKNKKCVIL

SEQ ID NO: 1671 - protein, 393 aa, Bordetella parapertussis
MSSALANIYARLPVSFTHGRGVWLWDTGERRYLDALAGIGVSCLGHGHPGLVAAISEQAARLIHTSNIYEVPQQAALARRLAELSGMSEVLFSNSGSEANEAAIKLARYYGYKQGNTHAHIITMDSSWHGRTLATLAATGSDKARQGFGPMPSGFIQVPYNDLPAIRAAGEAEPRVTAVLLEVLQGEGGIRPSDMAFLRGVRQLCTERGWLLMIDEVQSGIGRTGKWFAHQWADIRPDVMTLAKGLAGGVPIGAMLAAGPAAGVFAPGSHGTTFGGGPLACAAGLAVIDAIEQEGLLANAHEVGAHLHAALASELAGVPGIIEVRGHGLMLGIELDRPCGILATRAMEAGLLINVTRERVVRLLPPLILSGEEADQIVRILVPLIKQFLAQQQ

SEQ ID NO: 1672 - protein, 419 aa, Crocosphaera watsonii WH 8501
MTSPSLTLLRQIQVLDPVANSTMTNDVLLGSSLIQAIDSHLDNIPPDTNIVDGKGLILAPGLMDLYSYSGEPGHEDRETLDSLAASAIAGGFTRVAILPQTQPSIDNLATLSHLKQRTASISGVKFDFWGTFTHQGKGEQITELGELAQGGIIGFTDNQGIENLALLRRVLEYLKPLKKPLALVAEFPSLKGSGVMREGYFSTTYGLTGNPAMTEGTAVATILEMVAAMETPVHLMRISTRRAVELIAWGKARGIPITASTTWMHLLLDSENIASYNPNLRLDPPLGNPEDRLALIEGISQGIIDAIAVDHRGYTYEEKTVPFAEAPPGAIGLQLALPLLWQTLVETETLSPLQLWKALSSNPRKCLGQTVHPVKAGHPSELIVFAPQKTWTPTPSTLKSLNYNTPWLGQEIKGQVIAI

SEQ ID NO: 1673 - protein, 125 aa, Mesorhizobium loti MAFF303099
MADLAKIVDDLSKLTVLEAAELSKLLEEKWGVSAAAPVAVAAAGGAAAAAAPAEEKTEFDVVLTDAGAQKINVIKEVRAITGLGLKEAKDLVEAAPKPVKEGVSKADADKFKAQLEAAGAKVDLK

SEQ ID NO: 1674 - protein, 362 aa, Wolbachia endosymbiont of Drosophila simulans
MDKKVLLELSNGLKIELPVLSGTTGPDVLNIKDLYKMTGLFTYDPGFVSTASCSSTITFIDGDEGVLKYRGHNIADLAENNNFTAVIYLLLYGELPSSEQHKKFLLKIQESSKVSEQVTNVIKAFPKTAHPMSILVACFASLSASYHEKHGNNVNGEDLDFGISAIAQVSTIIAMICRHNNNQEFINANNELSYSENFLKMIFGDAVDNDKSALFAKALDKIFTLHADHEQNASTAAVRLVGSAGSNLFASLSAGVATLWGPAHGGANEAVINMLKEIEQSGDIDKFIEKAKDDKDPFKLMGFGHRVYKNYDPRARILKGACHEVLSKLEQNNELLKIAKKLEEIALKDEYFIVRKLYRIPP

SEQ ID NO: 1675 - protein, 427 aa, Aspergillus nidulans FGSC A4
MEILQKKPKNIAIHTSPVHDLRVVDCEIPRLAPDGCLIHVRATGICGSDVHFWKHGRIGPMVVTGDNGLGHESAGVVLQVGDAVTRFKPGKYHACPDVVFFSTPPHHGTLRRYHAHPEAWLHRLPDHVSFEEGALLEPLTVALAGIDRSGLRLADPLVICGAGPIGLVTLLAANAAGAAPIVITDIDSNRLAKAKELVPRVQPVLVQKQESPQELAGRIVQRLGQEARLVLECTGVESSVHAGIYATRFGGTVFVIRVGKDFQNIPFMHMSAKEIDLRFQYRYHDIYPKAISLVNAGLVDLKPLVSHRYKLEDGLEAFATASNTAAKAIKLGTSSREPYSGICPKDEVVPTVLTKPGTRFLRDCTTHIALHGSSPSSNVYGKPGIECLRRSAEHTREQQWTLQFDGCSSLASSGSGERLGQARPEPV

SEQ ID NO: 1676 - protein, 500 aa, Crocosphaera watsonii WH 8501
MCGIAGIWGQTEQTNVEAMMKSIIHRGPDAKGIFTVPNGSGILGHQRLSIMDVDGGDQPIYSKANTQAIIGNGEIYNYPKLQPELAKKYKFLTKSDTEAVLHLYEEKNTTAVGELDGMFAFAIIDDNKFIAARDPIGIKPLYYSEKDGNFWFASELKAITQFCENVEEFPPGHFFSSETGFSQYYSLPDIPPELDANVDELLQEIRETVEASVVKRLMSDVPLGAFLSGGLDSSIIAAIAKKHKSELHTFSVGIAGSKDINAARLVSDYLGTIHHEYIITPEEAIAKLPEIIYYLESFDQDLVRSGIPCYFTSRLASEYVKVILTGEGADELFAGYTYYKDIPSDDTLHRELRRSVNSLHNINLQRVDRLTMAHSIEGRVPFLDLKMIELGQKVPAHLKLKGTPPVEKWILRKAFEDILPEEIVWRKKEQFDEGSGTVDLLTETLKDVMNEQQAQQYQKEHPDIKLRSAEECYYHQIFMKAFDNPDALLTNVARWAETRF

SEQ ID NO: 1677 - protein, 98 aa, Triticum aestivum
MASRLLAAASSSSSSSSSSPLARLISSRRMAGAADHHGSTKVNMWQEPLNPGNWKEEHFVLTSLAMWGAIIYGGLKAFGGKKEVKTEAGSAPAAAPAH

SEQ ID NO: 1678 - protein, 75 aa, Zea mays
MGLCSCCCRCLELLCSVLLPPLGVCLRHGCCSMEFWISVLLTILGYLPGVLYAVYVICSVDPHRHRDNDDYVYVA

SEQ ID NO: 1679 - protein, 274 aa, Pseudomonas putida KT2440
MQRLSTRTGLDLPAIGLGTWPMTGSECTQAVRQALDVGYRHIDTATAYENEAAVGQALRDSDVPREQIHLTTKVWWDRLEPKAMRQSLEDSLRALGTEQVDLFHIHWPGTDWDLARSIDTLVALRDEGKARHIGVANFPLGLLRQVVETLGAPLSAIQVEYHVLLSQQPLLDFARGHDLLLTAYTPLARGQAAAQPVIQAIARKHGVLPSQVALKWLLDQDGVAAIPKASSRENQLANLAALTVPLDDEDRTAIAGLPKDQRVVSPPFAPDWNS

SEQ ID NO: 1680 - protein, 54 aa, Brassica napus
MGTATFIDILLAILLPPLGVFLRYGCEVEFWICLVLTLFGYLPGILYALYVLTK

SEQ ID NO: 1681 - protein, 105 aa, Triticum aestivum
TSVALPEGEVFYLVALLRFCPGGSGAAVEELVAQNGAIVDACRSSGYDFKTYFPHYRTEADWARHFGAKWARFVDRKARYDPLAILAPGQKIFARTPSSSRTDRS

SEQ ID NO: 1682 - protein, 490 aa, Glycine max
MTKISPEVEIRMPMEAFPPVSADVSFISNSFPKYKLDVDNQVLEEPVEDNLGPSLKDVIEQEAFNLSDQHKRISVRDLASKFDKNLAAAAKLSNEAKLREVASLEGHVLLKKLRDALENLRGRFAGINKEDVEKAISMVEALAVKLTQNEGELIQEKFEVKKLVNFLKQASEDAKNLVNQEKSFACAEIESARAVVLRIGEALEEQEKASQASKPQDVDGLIEEVQESRRIKLLHHPSKVMAMEYELRALRDQIRSREVCRVKLQKELIMSKRNEENKCCLYMLDGSEALGSYLRVQPCSDEVPQVSKCSFQWYRLSSEGSWREVISGANKSIYAPDPSDVGRILQVDIVSNGKKLTLTTNPIQTVSGLGSHVETLLRKSNTDFNVVISQMNGKDHSSHSTHSFNVGRMRIKLCRGWITKAREIYSPSMQLCGVRSDIANAAKALFWQARKGLSFVLTFESERDRNAAIMVARKYALDCNVVLAGPDDLV

SEQ ID NO: 1683 - protein, 485 aa, Magnaporthe grisea 70-15
MATKGSEGFATHEFFNIINGQRRGAGAGGVDRVIDPRTEEPLWEVPIGSAEDLEDAVTAARAALPGWAATTAEERQQLLAKMAEALGANMEFLAGVVMKETGKSQLMATIEIANSLDQCKYFANNTLQDKVQFEDDTIKIIETHAPLGVVGAISPWNFPLILSSIKVVSALVMGNTVIMKPSPFTPYCVLKFAELCQSFLPPGVLQAINGGGELGGLMTLHDGIDKISFTGSIPTGKKVMANCAKTLKRVTLELGGNDAALVCANVDLDKVVAQTCAGSFFNAGQFCAATKRIYVHADIYDAFVDKFVAETKANYESAFAGDGVSVPTIFGPVSNKMQFDVVKRILDDAARPESGGKILTGGKPHDKGYWIQPTVVAGPKEDSMVVKDEQFGPVIPILKWSDEQDVIKRANLSNSGLGATVYSKDLTQAERIARQLESGSVWINMSEKPNAAAWFGGWKDSGFGGEMGLLGLYSYCHIKSIHFAK

SEQ ID NO: 1684 - protein, 316 aa, Glycine max
  misc_feature (269)..(269): Xaa can be any naturally occurring amino acid
  misc_feature (300)..(300): Xaa can be any naturally occurring amino acid
MAKETSVVYLYPSKSQVWGENFDHKKLVITTLAANGKKEESNGAPNDTYPAFPGWYADVSWPGEAHTYKIEKILFHGKSEFQELLVFESSRQGKVAILDGHIQLTENDEFAYQEMLTHLALCSIPDPKKVLLIGGGDGGILREISRHSSVEHIDICELDQMVIDVYSEFFPDIAVGYEDPRVHVHISDGVAFINSVPEGTYDVIISDAFPAMGHSADVLADECFLESVAKALRPGGVFSAPADSLWHKNFVVADTIANCKKIFKGSVNXLGPVNFKHPVNRLDPEKNGVAEGPTKFYNPXINAAAFCLPSFVDKVD

SEQ ID NO: 1685 - protein, 432 aa, Bifidobacterium longum DJO10A
MPINEALFAAMKAASYIKPNAGKSYKLQRVAEELIAKQAPDNPKCRVEDAFAPMADGYAVPLRVFTPLVAYGAPLPEALEESSANGTPVASAISAILPAVLPKVLPKILIKESTSSGNADGISGNANTELPSVTPRGTILFFHGGGWTTGGINLYTQACAHMAVRLQRRVISVEYRLAPEYRFPTAVEDCYEVARQLFAGELPISGVGGSVDVDHPQSAAPTAPAGGGDISATIPAPDPDSIVLFGDSAGGNLAAAVSLMARDRGEFMPRTQMLLYPVVGNDYNPETSPFESVRTNGTDYILTAQDMADYIDMYRSSVADLTNPYFAPLTAHDLSNQPRTLVLSAEYCPLRDEDEAYARRLQLVNDNVSCYRIHDGIHGYLLNTSAVGLVATTYRIIEHFLDGTPLEPAPGTGTTANAPEGGDAWQDVLGTD

SEQ ID NO: 1686 - protein, 371 aa, Rubrobacter xylanophilus DSM 9941
MPKKSVGLSGAIAGDTAICTVGSSGDSLEYRGYPIEELAERATFEEVMHLLIRGELPDRRQLEEYTGRLSGMRKIPQELRDVLERIPASTHPMEVLRTGCSMLGTLEHEGEGRDAREIGERLISCLPSVLLYWHHFAGSGKRIETDTGEHSLAGHFLRLLHGREPGEEERRAVDVSLILYAEHEFNASTFTARIIASTGSDFYSAITGAIGALRGPLHGGANEAAMAFIERFRSAEEAERGLREALSRGERLMGFGHPVYTRVDPRSDIIKGWSRRLSEGHEEGYLYEVSERIERILHEEKNLFPNLDFYSASAYRFCGIPTEMFTPLFVFSRTSGWTAHVIEQRESGKIIRPSANYTGPERRPFVPLEER

SEQ ID NO: 1687 - protein, 161 aa, Glycine max
TTSPVGSPTSGNISDSYSSKEQDRFLPIANVSRIMKRALPANAKISKEAKETVQECVSEFISFITGEASDKCQREKRKTINGDDLLWAMTTLGFENYVGPLKLYLNNYRETEGEKSSTSMAKQDTEMGGLNGYRESSIAQSALSADQIQDASGNRMMPPIL

SEQ ID NO: 1688 - protein, 205 aa, Glycine max
MAELESPNVMPKLISFLSSLLKRVAESNDLNQQQLLHQKVSVFHGLTRPTISIQSYLERIFKYANCSPSCFIVAYVYLDRFTQRQPSLPINFFNVHRLLITSVMVAAKFMDDLYYNNAYYAKVGGITTIEMNFLEVDFLFGLGFHLNVTPGTFQAYCAHLQSEMLLMQPLNFADSSLSLGKSLKAHLCYNEDESSSHQKQQQLAV

SEQ ID NO: 1689 - protein, 438 aa, Zea mays
MAEKENILMQRYEMGKLLGKGSFAKVYHARNVKTSESVAIKVIDKDKIKKCGLMDQIIQEISVMKLVKHPNIVQLYEVMATKTKIYFVIEYVKGGELFKKVQRGRLKEDVARTYFQQLISAVDFCHTRQVYHRDLKPENLLLDGSHNLKISDFGLSALPNCKRKDGLLHTICGTPAYVAPEVISQKGYDGAKADIWACGVILYVLLAGYLPFQDKNMMDMYKKICKAELKWPSWFSSDVRKLLRRILHPNPNRRISIEEIRTHPWFRIGLDARLFDSTTRDHVPSDMDLALNSLNSNMVECNSAAEKLTILNAFDIISLSNGFDLSGIFENSNKESKFMSTNTAMTIITKLMEVAKSLDLKVITKTGGLLNMEAAKSGIKGVMSINAEIFQITPNYHLVEIKKINGDILEYHNFMNQSMRPALEDIVWAWHGEQPDEK

SEQ ID NO: 1690 - protein, 147 aa, Brassica napus
VNNRGPTCGQELGDLRGLVLEKVAGSLGLPGRFYNLGGPGIFPYSSKLNHGFFGNFRPYGGPYAGSKGGVVGDILFLVSNLRDDHKVAMHAGSTLNHRFVRFNPREGENATGMLTGFNGLGQYFCLHFGAFQLGRGPVYMAFLGLMG

SEQ ID NO: 1691 - protein, 473 aa, Nostoc punctiforme PCC 73102
MYEKITPPAAGAKIAFKNGEPIVPDNPIIPFIRGDGTGIDIWPATQKVLDAAVAKAYKGQRQISWFKVYAGDEACDLYGTYQYLPQDTLTAIEEYGVAIKGPLTTPVGGGIRSLNVALRQIFDLYACVRPCRYYAGTPSPHKNPEKLDVIVYRENTEDIYLGIEWRQGSEIGDRLIKILNEELIPATPEHGKKRIPLDSGIGIKPISKTGSQRLVRRAIKHALLLPKNKQQVTLVHKGNIMKYTEGAFRDWGYELATSEFRQETVTEQESWILSNKEKNPNISLEENARQIEPGFDNLTPDKKAQVVKEVETVLNTIWATHGDGKWKEKVLVNDRIADSIFQQIQTRPDEYSILATMNLNGDYLSDAAAAIVGGLGMGPGANIGDSSAIFEATHGTAPKHAGLDRINPGSVILSGVMMLEFLGWQEAADLIKKGLSDAIANSQVTYDLARLLEPPVEPLKCSEFADAIIQHFG

SEQ ID NO: 1692 - protein, 292 aa, Pyrobaculum aerophilum str. IM2
MREIIELYRKVGGFQALHVAEAYDVLKEAVEAADVRFLSFTGNLVATGLREFIADAIRRRLFNVVVTTAGALDHDIAKSMGAVYAPGSFDLDDVDLAAKGYHRLGNVVIKKEEYGPLVEKFILAHCEKLWGKTLATYELAYLLGAELPEDSILGAAARAGAKVFVPGIVDGAVGTALMTCNDLARTKRGGSRAFIDVLKDEEELREIVHNSKKLAALIVGGGISKHHVIWWAQFKGGLDYVVYISTAVEYDGSLSGARPREAISWGKVKPSAKSVFIFADATLVLPVLLKAL

SEQ ID NO: 1693 - protein, 171 aa, Larix laricina
APSKTGNSNVVSAFTGLKSMAQFPSSKTMSNAGAEWERKTTSNGARVRCMQVWPPYANKKWETLSYLPRLTPEQLVKEVEYLLKNKWVPCLEFEEDGEIKRVYGNSPGYYDGRYWVMWKLPMFGCTEASQVLNEVNECAKAYPNAYIRVIGFDNVRQVQCISFIVHKPEYN

SEQ ID NO: 1694 - protein, 97 aa, Triticum aestivum
MGLNYNRKTPSFPSTSALLSSTASPPSTDRVKSSPSAGTSTTMAGTANCIDIILAIILPPLGVFLKFGCGHEFWICLLLTFLGYIPGIIYAIYAITK

SEQ ID NO: 1695 - protein, 122 aa, Deinococcus radiodurans R1
MAYDKQALIDQLGQLTIMELADLIDGLKETWGVTAAVAVSGGGAGAASPAAEEKTEFDVVLIDAGASKINVIKEIRGITGLGLKEAKDMSEKGGVLKEGVAKDEAEKMKAQLEAAGARVELK

SEQ ID NO: 1696 - protein, 274 aa, Rhodopseudomonas palustris CGA009
MDSIKTQGLNVPKLGLGTFKLQGKDCHEAVLTALSLGYRHIDTAEMYANEDFVGDALEDTDVPRDQIHLTTKVWWTNLAPDAIRKAFDQSLRKLKTDYVDFYLIHWPAPDMNLGAALETLLRIKDQGGARAIGVCNFPVALMKQAVEEIGAPIACNQVEHHVLLGQTKLLPYLQSKGIPLTAYAPLAQGRLASYPELQAIADKHGATAAQVALAWLLEQEGVMAIPKARGEASQRSNLGALKIKLDFDDRAVIAKLPKNQRFVTPAFSPKWDAE

SEQ ID NO: 1697 - protein, 422 aa, Yersinia pestis CO92
MTPSDLVFDQQHIWHPYTSMTEPLPCYPVVGAEGVELQLADGRRLIDGMSSWWAAIHGYNHPVLNFAAHQQLDKMSHVMFGGITHPPAVKLCRQLVAMTPPPLECVFLADSGSVSVEVALKMALQYWQAKGERRQRILTLRHGYHGDTFGAMSVCDPQNSMHSLYQGYLAENLFANAPQCGFDDPWDPQDIANFVALITQHANEIAAVILEPVVQGAGGMRIYHPSYLREVRALCDKHQILLIADEIATGFGRTGKLFACEHAQIVPDILCLGKALTGGYLTLSATLTTRAVAETISKGDAGCFMHGPTFMANPLACAVASANLSLLAENSWQQQVSKIEDQLKRELLPLAQEDTVADVRVLGAIGVVEMKKPVNVARLQRSFVEQGVWIRPFGKLIYLMPPYIISQHALTRLTAAVVDRGS

SEQ ID NO: 1698 - protein, 124 aa, Glycine max
MASSMISSPAVTTVNRAGAGMVAPFTGLKSMAGFPTRKTNNDITSIASNGGRVQCMQVWPPIGKKKFETLSYLPDLDDAQLAKEVEYLLKKGWIPCLEYEYEHGYVYREHNRSTIYYDRRYLTM

SEQ ID NO: 1699 - protein, 495 aa, Pseudomonas putida
MSLLIRGATVVTHEESYPADVLCVDGLIRAIGPNLEPPTDCEILDGSGQYLMPGGIDPHTHMQLPFMGTVASEDFFSGTAAGLAGGTTSIIDFVIPNPQQSLLEAFHTWRGWAQKSASDYGFHVAITWWSEQVAEEMGELVAKHGVNSFKHFMAYKNAIMAADDTLVASFERCLQLGAVPTVHAENGELVYHLQKKLLAQGMTGPEAHPLSRPSQVEGEAASRAIRIAETIGTPLYVVHISSREALDEITYARAKGQPVYGEVLPGHLLLDDSVYRDPDWATAAGYVMSPPFRPREHQEALWRGLQSGNLHTTATDHCCFCAEQKAMGRDDFSRIPNGTAGIEDRMAVLWDAGVNSGRLSMHEFVALTSTNTAKIFNLFPRKGAIRVGADADLVLWDPQGTRTLSAQTHHQRVDFNIFEGRTVRGVPSHTISQGKVLWADGDLRRRGRGGAVCGTAGVSVGVRGAGATRRTAAPDARSALRPLGLLRSPSPASQI

SEQ ID NO: 1700 - protein, 296 aa, Escherichia coli
MSYYHHHHHHLESTSLYKKAGLANPTVIKLQDGNVMPQLGLGVWQASNEEVITAIQKALEVGYRSIDTAAAYKNEEGVGKALKNASVNREELFITTKLWNDDHKRPREALLDSLKKLQLDYIDLYLMHWPVPAIDHYVEAWKGMIELQKEGLIKSIGVCNFQIHHLQRLIDETGVTPVINQIELHPLMQQRQLHAWNATHKIQTESWSPLAQGGKGVFDQKVIRDLADKYGKTPAQIVIRWHLDSGLVVIPKSVTPSRIAENFDVWDFRLDKDELGEIAKLDQGKRLGPDPDQFGG

SEQ ID NO: 1701 - protein, 141 aa, Triticum aestivum
  misc_feature (124)..(125): Xaa can be any naturally occurring amino acid
MGERLKGTVKWFNVTKGFGFISPEDGSEDLFVHQSAIKADGYRSLNENDVVEFEVITGDDGRTKATDVTAPGGGALAGGSRPSEGGGDRGGRGGGGYGGGGYGGGGGGYGGGGRGGGGGGGGCXXCGESGHFSRECPNKTN

SEQ ID NO: 1702 - protein, 302 aa, Arabidopsis thaliana
MGEVWRWNKEVEMDSIRDCLKHFSSIAIDTEFPGCLKETPMDASEEIRYRDMKFNVDNTHLIQLGFTLFDRRGITKTWEINLSDFNEHKCFKNDKSIAFLKSNGLNLDKIGEEGIGIEEFFRDFSQILKEKDGKITWVNFQGSYDNAYLVKGLTGGKPLPETKEEFHETVEQLLGKFVFDVKKIAESCSGLSSRFGLQRIADVLQMKRVGKAHHAGSDSELTARVFTKLTFDLLNSRKQCVRRVDHQQYQLEQQQLMMTRCYIPIPIPIPRPRSVMFAAHHPNPYFGGGYFGMPVQGRNYVL

SEQ ID NO: 1703 - protein, 512 aa, Arabidopsis thaliana; identical to SEQ ID NO: 374

SEQ ID NO: 1704 - protein, 1832 aa, Podospora anserina
MYNPPGQRDATRPFHVPPPPPPMSPPPPTVGINNPMMTIPPPPPRHPNAPSTTGNVLLPPPPSGPPPNSGFPNSAIAPPSALGSTAPWHGAWGRAYDGRTAFNIPPPPPGGGAGGGGGGGSGGVLRAYDPKYHAQVLAAANNGATYTVPPPPPPQQQQQQQQQQQQQQQQQQQQQQQQQQQQQQQQQQQQQQQQQQQQQQQQQQQQQQQQQQQQSDQMGALTSATYIPQGDTYGEGVGIPGLGLEDSAIGWNMGAHLESATATPLDESSGRDRLYANAMAQRGSSTTSNATVSSVSVPPELAAQWPMEKVLGWLQANSFSSHWQETFKYLGLDGARFLELGSSHGGRGNFGMMHQQVYPRLLALSGPEWNQAREREEGKRMRRLVRSIVTGRPVEVKGGRLGGGQQQPQHARQNSTSAPPAVTGGQTGNRSAESPNVSVDDGFWDTGVTDADDGDKQTPNPIKIPEFGFSRRFSQSRATTMPTLSSTMPTDHRNMMKEIDTSRRHSPTLSESGEAGGTFRGGSTPLGGGGGGGGGGGRDSPSAGSPNPASGLFPSSTAGNLSASPHSSRFGHRSRNSTDSVSSSAAIYGSGVPADAAAMLKSGMNIADVVNAARNANDRRHAQDGGRPSPQESGGGDRSAGEPPGSAKGSGSFLSIFTRKKHGRKDDGFGGDEDSPTSPGLSFKPQSLGDNRPGSSAGTYGHHHAGNVRANRGGPRVFILATADCWNYRMLDVTDIETASDLRQLICINLGLPESEGAHLYPTELGKFEHDGEALDDSKLLAIKTQRADAIGTLKLFVRVGGPPQMRQTGAQIAMDEETYVKLNGRMRSSSSPPTSRQNTLTGKEGEDKMLTAEAIEYRTEQLRKQKEYLAKRKQVAENNHVADRSPSSSIVGRTVDFDQPRHSPFEDRKMDTLLPQRKPPAPPSDPSATLIKANSLKKTGHGLRLSGDSGYHPKRKTSSDLRSSGDVVFEKQKRWGPVADPSAGIGALLVGMSDGMASIARPRPGGGMMQQRQPSPHRVATEPITSQELQRGKKAMSTVNFGPAHQRERSGSGGGSPRPGGMPGSPGSYTWSSKNVPFLVPDYSPNGTPAPPTASRMPDGGGNSGDGCLDQNHNHQAQNGTIAKMRNVARAPSPGNVSPSSRRRPSDSFSSQAAVAKKRKSHGPDTDFTDNDVTFSASSTRASKKVDDSDSDDDSDDGLFAIPIAARNSGPDKGKTTAPAEGNSGDSDGASGTGTGKRPSLRLNTRSGSNSRAKKTLSVAFAVSPQSSSAGGKTPLEDDDSGRSSSQRRGTPGTPQSEGGWDSEEKDSKISRRKSFIEKDVWANRPPTDALVNNLEDFFPDLDVDQPVLEEGVDQEPPSPIAEGDENNQGSASVPPLPPLPPGLSTGKLHTFYNDNDTLGSDESTLKALESRPVSMQSLAHRSIRRSGGGGGLGRMKSIREVARGANEFGKRYTQGPGQIDAQSSAAAAGNRNTNLMRRKSTKMFNANIVQIQPDRGSLNLAMGGLTTIPQDSLPTRSTNSRESIPKRQTTFRWFKGQLIGKGTFGRVYLGMNATTGEFLAVKEVEVNPKAAQGDKKKMQELVAALDQEIDTMQHLDHVNIVQYLGCERKETSISIFLEYISGGSIGSCLRKHGKFEEPVVASLTRQTLSGLAYLHREGILHRDLKADNILLDLDGTCKISDFGISKKTDNIYGNDKTNSMQGSVFWMAPEVIRSQGEGYSAKVDIWSLGCVVLEMFAGRRPWSKEEAVGAIYKIANGETPPIPEDIREVISPVAIAFMLDCFTVVSSERPTADVLLSQHPFCELDPTYSFLDTELYAKIAGRVNDLGRGQ

SEQ ID NO: 1705 - protein, 305 aa, Zea mays
  misc_feature (262)..(262): Xaa can be any naturally occurring amino acid
MKNVAKRRYLSLTRPQGGIFAGPAAPGFLQHEGGRGVEAALPYQKADRGPRKEAGIRLCSATMSSLYDVSCFAAGLAGNVFALALFLSPVPTFKRVLKAKSTEQFDGLPYLLSLLNCCICLWYGLPWVSDGGRALVATVNCTGALFQLAYISLFIFYADSRTTRLKVAGLLVLVVFAFALIAHASIAFFDQPLRQLFVGSVSMASLVSMFASPLAVMGVVVRTECVEFMPFYLSLSTFLMSASFAVSRMGSESSWEQCSWCXKSTTAGDGKAATRQHRCLPDHVAEFVSPIARAVLSVVLCSAIL

SEQ ID NO: 1706 - protein, 312 aa, Saccharomyces cerevisiae
MSFHQQFFTLNNGNKIPAIAIIGTGTRWYKNEETDATFSNSLVEQIVYALKLPGIIHIDAAEIYRTYPEVGKALSLTEKPRNAIFLTDKYSPQIKMSDSPADGLDLALKKMGTDYVDLYLLHSPFVSKEVNGLSLEEAWKDMEQLYKSGKAKNIGVSNFAVEDLQRILKVAEVKPQVNQIEFSPFLQNQTPGIYKFCQEHDILVEAYSPLGPLQKKTAQDDSQPFFEYVKELSEKYIKSEAQIILRWVTKRGVLPVTTSSKPQRISDAQNLFSFDLTAEEVDKITELGLEHEPLRLYWNKLYGKYNYAAQKV

SEQ ID NO: 1707 - protein, 465 aa, Zea mays
MEDVRATYSMGKELGRGQFGVTHLCTHRTSGEKLACKTIAKRKLAAREDVDDVRREVQIMHHLSGQPNVVGLRGAYEDKQSVHLVMELCAGGELFDRIIARGQYTERGAAELLRAIVQIVHTCHSMGVMHRDIKPENFLLLSKDEDAPLKATDFGLSVFFKEGELLRDIVGSAYYIAPEVLKRKYGPEADIWSVGVMLYIFLAGVPPFWAENENGIFTAILRGQLDLSSEPWPHISPGAKDLVKKMLNINPKERLTAFQVLNHPWIKEDGDAPDTPLDNVVLDRLKQFRAMNQFKKAALRIIAGCLSEEEITGLKEMFKNIDKDNSGTITLDELKHGLAKHGPKLSDSEMEKLMEAADADGNGLIDYDEFVTATVHMNKLDREEHLYTAFQYFDKDNSGYITKEELEHALKEQGLYDADKIKDIISDADSDNDGRIDYSEFVAMMRKGTAGAEPMNIKKRRDIVL

SEQ ID NO: 1708 - protein, 338 aa, Oceanobacillus iheyensis HTE831
METVTYAGPKNILFQNNRKPTITKGWAIIKTSYAGICGSDLSIFAGVHPRAEAPLVMGHEFSGTIEEGHPTLKKGTRVTVNPLLRCGECYPCQNGYSHVCENLKLVGIDCDGGMGEYVKVPIHSIVPLKDNISMKLGALIEPVAVAVHAIRQGNYMPGDSVVIFGAGTIGLCVALTLRSYGAKNLIIVEPNKLRLEKAKQLGFQTLDPLSENVTEKIVEGTDNIGADYVFDCAGHPSVVEAITEVVRVRGNIVIVAMYKQPPTLDMRQGMFKELNIQFVRVYTDKDFQIAIDLVDNHKEYEDIITHVLQPEEAQKGFDLLTTHTDAVKVMYEFNRGEL

SEQ ID NO: 1709 - protein, 307 aa, Triticum aestivum
  misc_feature (195)..(195): Xaa can be any naturally occurring amino acid
  misc_feature (232)..(232): Xaa can be any naturally occurring amino acid
HYRTSLYKKAGWYRSGIPGISSTHASACTSSRSLHSQWKKGKLLGSGTFGQVYLGLNSEGDQMCAIREVKVIADDSELKECLRKLNQEMCILNQLSHPNIVQYYGSELSSETFSLYLEFVNGGSIHKLLREYGPFEEAVLRNYTAQILSGLAYLHRRNIVHRDIKGSNIFVNRNGDIRLADFSMTNHISEATSIXSFKGSPYWMAPEVIMNTNGDSLSVDIWSLGCTIIEMXATTRPPWNQYEGVAAIFKIANSKDIPDMPDHLSSEAKSFLKLCLQRDPAARPTAAQLIVHPWVKDQASVTKSPVK

SEQ ID NO: 1710 - protein, 357 aa, Triticum aestivum
SGFRRVLAPSKWYGILVTICVAPRQRAWLPCMASAVGANEKKRALSTSPAHSLKMPSLKLSFKKKSGEANPASTLLSTKDFLERPIAGSQVQLCSLEKKVLNSWSHIDPGTFRVRGSNYLRDKKKELAQNCAAYYPFGVDVYLSPQKLHHISRFVKLPDIQTSSKLPPLLVVNVQVPLYPASLFQNETDGEGMSFVLYFRLSEGYSKELSPLFIENIRRLVDDDVEKIKGFPMETSISFRERLKILGRVANLEDLPLSAAERKLMHAYNEKPVLSRPQHQFFLGDNYFEVDIDMHRFGYISRKGFETFLDRLKICMLDVGLTIQGNKPEELPEQVLCCVRLNGIDYAKYQPLMTNGA

SEQ ID NO: 1711 - protein, 520 aa, Zea mays
  misc_feature (76)..(76): Xaa can be any naturally occurring amino acid
  misc_feature (261)..(261): Xaa can be any naturally occurring amino acid
MAAITPPTQSEPSPQTGRPASSAAAAAKRGGGGAGAAGGPLMGKYELGRLLGHGTFAKVYHARHVDTGDNVAIKVXLDKEKAVKSGLVPHIKREIAVLRRVRHPNIVHLFEVMATKTKIYFVMELVRGGELFSRVSKGRLREDTARRYFQQLVSAVGFCHARGVFHRDLKPENLLVDEQGNLKVSDFGLSAVAEQFRPDGLLHTFCGTPAYVAPEVLGRRGYDGAKADVWSCGVILFVLMAGYLPFHDKNIMAMYKKIYKXGEFRCARWFSKDLTSLLMRILHTNPNTRITLPEIMESRWFKKGFKPVKFYIEDDQLHNVIDDEDGLLDMGPAGPVPPPLPPPPPPLPPPKVDGDESGSDSDSSISSCPASMLSDESQRPRGSLPRPASLNAFDIISFSRGFNLSGLFEEKGDEVRFISAEPMSDIITKLEDIAKLKSFKLRRKDWRICLEGTREGVKGPLTIGAEIFELTPPLVMVEVKKKAGDNEEYENFCDKELKPGMQHLVHHMVRAPSMLLTDAK

SEQ ID NO: 1712 - protein, 489 aa, Novosphingobium aromaticivorans DSM 12444
MTPEGVNVAHPDKLYIAGRWVPAHSGRMIELVSPNTELVVGRVAEADETDMDAAVAAARDAFDHGPWPTTPPAERIAAFRRMVAHLETRVPELAKAWTAQMGGLASFAGPMHGGSVMALGQIAGFAEKFEFVERRPSMAADTALIAYEPVGVVAAIAPWNGPFGIMANKVAYALLTGCTVIMKPSPETPLEAYIIAEAAEAAGIPAGVVNLVTGHREASDHLVCNEGVDKVSFTGSTVAGKRIASVCGSRMARCTLELGGKSAAIVRDDFPIDAAAKMLAGTITMMSGQVCAMLSRVIVPRRRHDELAEAIAAEMKKVRIGNSDDPETQLGPVAMKRQLERIEMYIEEGRKTADLVTGGGRPAHLNRGYFIEPTLFANVRNESRIAQEEIFGPVLSLIPVEDEEDAIRTANASAYGLNGSVLTNDAEAAYRIARRVRTGGFGQNGLRMDFGLPFGGFKQSGIGREGGPEGLFPYLEMKTILIDGMPSAL

SEQ ID NO: 1713 - protein, 269 aa, Pirellula sp. 1
MEAVNADVANEHSPSHSRSIENMSQSNSDDSASSSTQQAGDGQDDVQQNIVWHAHTVSREDRESKLGQRGVVVWFTGLSGCGKSTIANELDRLLIDRGATCTLLDGDNVRHGLCAPPSVLKEEHGEDFAGRFGLGFGPTDREENIRRIGAVTELFASAGVIVLAAFVSPYQRDRDRVRNTIESSGRAGDFLEVFVDTPLEICKQRDPKGLYQKAIAGEIKNFTGISDPYDAPPSPEIHLKWREGQTPHDQASEIIREMEKRGVLGPAKG

SEQ ID NO: 1714 - protein, 65 aa, Zea mays
LLHRLQIPTTDLLYDGVGEAAQIYCELARLGADMLVIDVGGGLGIDYNRTHLAQTDMLVAYSPEE

SEQ ID NO: 1715 - protein, 307 aa, Zea mays
NLKVSDFGLSALRECQKQDGLLHTTCGTPAYVAPEIINKKGYDGAKADIWSCGVILFVLLAGYLPFHDANLVEMYRKISRADVKYPQWFSPELRRLMPKLLEPNPNNRITIEKLVEHPWFKKGYRPAVMLAQPHGSSSLKDVQVAFSNADHKDSSSKVEQPADSSLKPASLNAFDIISHSRGFDLSSLFEVDQEQKASNSRFMTQKPASAIVSKLEQIAETERFMVKKQDGLVKLQGSKQGRKGQLAIDAEIFEVTPAFHVVEVRKSAGDTLEYEMFCSKGLRPSLSDICWSSRSEENMAPSVVQPS

SEQ ID NO: 1716 - protein, 487 aa, Mycobacterium avium subsp. paratuberculosis str. k10
MTATASSPPRTGALLIGTERITAASGGSHQHRYPGTGVPNATIPLAGHSEVDRAVHSAREAQREWISYPVDRRRDLLFGLADLLRDHFAELTELNVHDYGVPISVAGNSVLTERFVRYYAGYPDKLTGASTPVSGAFDVNIVEREPYGVVAVIAPWNGPLVVAGAAVAPALAAGNAVIFKPSELASLAPLRFGELCLEAGLPPGLVNVLPAGPEGGEALVRHPGVGKVHFTGGHATAQQVLRAASDNVTPVTAELGGKSAYLVFADADLDTAAVIAAHQGPLTQAGQSCACASRILVEASVYVSFVEKLVAQVQAATIGDPLRPDVMLGPVITEAAADRILGVIDRAVAEKAGDLVTGGRRLGGELASGYFIEPTIFSNVDNRSSLAQTETFGPVASVMPFADEAQAVSLANDSRYGLNAFVATANLERAHRVARRLQAGSVWVNRHSDIEPQGPYGGYKQSGFGRTGGVEGLHEFLQVKNIRIGMS

SEQ ID NO: 1717 - protein, 238 aa, Oryza sativa
MCGIKQEMSGESSGSPCSSASAERQHQTVWTAPPKRPAGRTKFRETRHPVFRGVRRRGNAGRWVCEVRVPGRRGCRLWLGTFDTAEGAARAHDAAMLAINAGGGGGGGACCLNFADSAWLLAVRRSYRTLADVRHAVAEAVEDFFRRRLADDALSATSSSSTTPSTPRTDDDEESAATDGDESSSPASDLAFELDVLSDMGWDLYYASLAQGMLMEPPSAALGDDGDAILADVPLWSY

SEQ ID NO: 1718 - protein, 435 aa, Saccharomyces cerevisiae
MTLSKYSKPTLNDPNLFRESGYIDGKWVKGTDEVFEVVDPASGEIIARVPEQPVSVVEEAIDVAYETFKTYKNTTPRERAKWLRNMYNLMLENLDDLATIITLENGKALGEAKGEIKYAASYFEWYAEEAPRLYGATIQPLNPHNRVFTIRQPVGVCGIICPWNFPSAMITRKAAAALAVGCTVVIKPDSQTPLSALAMAYLAEKAGFPKGSFNVILSHANTPKLGKTLCESPKVKKVTFTGSTNVGKILMKQSSSTLKKLSFELGGNAPFIVFEDADLDQALEQAMACKFRGLGQTCVCANRLYVHSSIIDKFAKLLAERVKKFVIGHGLDPKTTHGCVINSSAIEKVERHKQDAIDKGAKVVLEGGRLTELGPNFYAPVILSHVPSTAIVSKEETFGPLCPIFSFDTMEEVVGYANDTEFGLAAYVFSKNVNT

SEQ ID NO: 1719 - protein, 463 aa, Anabaena variabilis ATCC 29413
MADLTPNSSFSVTLRLQIPNRVGMLASITQAIASSGGNLGQIDLIEQTRQVSLRDLTVDAASTEHAETIVQAVKAIPDIKLVSVYDRTFNLHRGGKISITSRIPLKSVSDLAMAYTPGVGRVCTAIAQDPSQVYNLTIKQNTVAIVTDGSAVLGLGNLGPHAALPVMEGKAMLFKEFAGLDAFPICLATQNTEEIIQAVKNIAPVFGGVNLEDIAAPRCFEIEQRLKQELDIPVFHDDQHGTAIVTLAALFNSLKLVQKSLTDIRIVINGAGAAGVAIARLLRKAGAEKIWMCDSKGIISTTRTDLNEEKQEFAVKAQGTLAGAVQGADVFIGVSAPGVLTPEMVKSMAKDPIVFAMANPIPEIQPELVQNDVAVIATGRSDYPNQINNVLAFPGVFRGALDCRAQTITTTMYLEAASAIASLVNPSDLSREHIIPSVFDERVVTAVAAAVQRAAREEGIARA

SEQ ID NO: 1720 - protein, 204 aa, Streptomyces avermitilis MA-4680
MNPQLPAVLSLPKVPAGPQLRKARRVRKVPVTPEWLPTVRKAPAVPERLPKVPKVLVIPEARKAPKVRKIPAVPEFRKGRKAPAVPERLPKVRKIPAVPKRRRVPKIPTNPRIPTSPVPDVSRPLPPRRAGAFPAGHAEDRGHRSPRPVRHRDAYLHPTAVLGRVAPAAQPDHRVSDLPHGVPPKRAVKHLSAGSWRPLTPWLV

SEQ ID NO: 1721 - protein, 499 aa, Dechloromonas aromatica RCB
MRHALLFSVFVIASCGLAYELIAGALSSYLLGDSVTQFSTVIGTYLFAMGAGSWLSKYITRDLIGRFIQIELMVGLLGGFSAVGLFLVFTWLSAPFKLVLYLAVFGVGVLVGLEIPLVMRILKRELAFKDLVSQVLTFDYLGALAVSILFPLVLAPQLGMVRTGLLFGVLNVAVALWALHLFREQLPSRRWLAMQSWGVFGLLAIGFAGAGQLTTFAEAHLYADEIVHAETTPYQRIVVTRWRDDLRLFLNNNLQFSSHDEYRYHEALVHPGLASLPGAKRVLVLGGGDGLAVREILKYPNVESVTLVDLDPAMTDLFATAPALVALNQGALKSERVTVVNADALQWLEDSKEYFDFIVIDFPDPANFALGKLYTSAFYRLIEKRLSARGLLVVQSTSPLYARQSFWCVVATLESAGFKTAPYHALVPSFGEWGYIIAGRQAFSMPAFASDKTRFLTSETLAGMFNFPADMARVPAEVNQLNNQVLVRYFETEWRKVIR

SEQ ID NO: 1722 - protein, 368 aa, Arabidopsis thaliana
MEDDRVFSSVHSTVFKESESLEGKCDKIQGYDFNQGVDYPKLMRSMLTTGFQASNLGEAIDVVNQMLDWRLADETTVAEDCSEEEKNPSFRESVKCKIFLGFTSNLVSSGVRDTIRYLVQHHMVDVIVTTTGGVEEDLIKCLAPTFKGDFSLPGAYLRSKGLNRIGNLLVPNDNYCKFEDWIIPIFDEMLKEQKEENVLWTPSKLLARLGKEINNESSYLYWAYKMNIPVFCPGLTDGSLGDMLYFHSFRTSGLIIDVVQDIRAMNGEAVHANPKKTGMIILGGGLPKHHICNANMMRNGADYAVFINPGQEFDGSDSGARPDEAVSWGKIRGSAKTVKVYCDATIAFPLLVAETFATKRDQTCESKT

SEQ ID NO: 1723 - protein, 102 aa, Fragaria x ananassa
MATLDSDVPMIPVGEGSSSAGPSSTKKPKRFEIKKWNAVALWAWDVVVDNCAICRNHIMDLCIECQANQASATSEECTVAWGVCNHAFHFHCISRWLKTRQV

SEQ ID NO: 1724 - protein, 274 aa, Listeria monocytogenes str. 1/2a F6854
MNLKDTVKLANGVEMPRLGFGVWKVQDGDEAVNSVKWAIEAGYISIDTAAAYKNEEGVGQAIKESGIKREDLFVTTKLWNAEQGYESTLAAFDESLRKLELDYVDLYLIHWPVKGKFKDTWRAFEKLYKDKRVRAIGVCNFHEHHLKELMEDAEIAPMVNQIELHPQLTQEPLRKFCAENNIVVEAWSPLGNGKLLSNPEIKAIADAHGKSVAQVILRWDLQIGVVTIPKSVHQERIIQNADIFDFELSEEEVAKISGLNKDERTGPDPDNFNF

SEQ ID NO: 1725 - protein, 160 aa, Bacillus cereus G9241
MTVYDFSAKTITGEDKSLKDYEGKALLIVNVASKCGFTPQYKGLQEVYDKYKDQGLEILGFPCNQFGGQEPGTEADITSFCELNYGVNFPMFAKIDVKGDKAHPLYTYMTEQAPGLLGMKAVKWNFTKFLIGKDGKVVGRFAPQTKPVDLEVEIEKVLGE

SEQ ID NO: 1726 - protein, 219 aa, Helianthus annuus
MKSFTGTTQKCTVCEKTVYLVDKLVANQRVYHKACFRCHHCNSTLKLSNFNSFDGVVYCRHHFDQLFKRTGSLEKSFDGTPKFKPERTFSQETQSANRLSSFFEGTRDKCNACAKIVYPIERVKVDGTAYHRACFKCCHGGCTISPSNYIAHEGRLYCKHHHIQLFKKKGNYSQLEVEETVAAPAESETQNTETQNAETQNADTQNADTQNTETQNGSV

SEQ ID NO: 1727 - protein, 179 aa, Glycine max
  misc_feature (122)..(122): Xaa can be any naturally occurring amino acid
  misc_feature (125)..(125): Xaa can be any naturally occurring amino acid
  misc_feature (162)..(162): Xaa can be any naturally occurring amino acid
MASSMISSPAVTTVNRAGAGMVAPFTGLKSMAGFPTRKTNNDITSIASNGGRVQCMQVWPPVGKKKFETLSYLPDLDDAQLAKEVEYLLKKGWIPCLEFELKHSFIYHKHNKSPEYYDRHYXPYXKLPIFNYTNTSQVLKELQEAKTTYPNHFIHIIKFNNXVRQVQYIIFITYKPPSF

SEQ ID NO: 1728 - protein, 444 aa, Nanoarchaeum equitans Kin4-M
MKIEVRAVGGYNEIGANMTAIGIDDEWLIIDMGVHVDKMLAFQKDQEEVVEWNRELLEKINALPKIEYIEDIKDKVKAILITHGHLDHIGAVIHLAYEFNAPIIGPPYAIELIRSFEKDYKIILPNEMKKINLNSSIQISDKISVDFIYATHSIPHSAHLAIHTPKGVIFFSGDYKFDNFPVIGQRYNLEKLKEIAKEGVILAFIESTRADEDKRSYSEIIAREMLRDVLFEEHEGLIIMTTFSSHIARLKSMVELSLELDRDVYILGRSMVKNVEIAEKLGIYKFSDKAKIYQYHDQIARLLKKIDDRSKYALIVTGNQGEPGSVLWRMAFEKFPFRLDKKDTVIFSCFTIPNAINIAFRNLIEEKIKSFGTRIIKDVHVSGHAMRDDHYRLIKILKPQIIIPNHGDFIKRGALADLAMNEFGYSLGKDLFLIQNGQRINFEF

SEQ ID NO: 1729 - protein, 503 aa, Burkholderia cepacia R18194
MQFNDILAALDIDLAQWKGNALTARSPLDGATLAKLAVDTPADAERKIDAAHDAFLKWRTVPAPVRGELVRVFGNVLREHKAELGALVTLEAGKITSEGLGEVQEMIDICDFAVGLSRQLYGLTIASERPGHRMMETWHPIGVCGVISAFNFPVAVWAWNAALAFVCGDSVVWKPSEKTPLTAIACHVLLQKAIREFDKTHPGVAPAELSQLVLGMRDVGEVLTASKKVPVVSATGSVRMGQEVAKVLSQRLARGILELGGNNGMIVAPSADLDLVVRAVTFAAVGTAGQRCTTLRRLIVHRSLVEQLLPRIEKAYTSVKVGNPLEEGTLVGPLVDRASFDAMQKALGDAREQGGEVKGGERVDVGHADAYYVRPALVRMPKQSAVVERETFAPILYVMVYDNFDDAIELHNAVPQGLSSAIFTNDMREAEQFMSAAGSDCGIVNVNIGTSGAEIGGAFGGEKETGGGRESGSDAWKAYMRRATNTINYSRQLPLAQGVKFDV

SEQ ID NO: 1730 - protein, 421 aa, Zea mays
  misc_feature (381)..(381): Xaa can be any naturally occurring amino acid
MGNTCIGPSAPSDRHSFFNTVSLAVLWRPPAAADRAEPSPTAEPSSSTPCSPPSRAPNPVTISDSEHPPHSTSTALGPAAPPNPNGKPKPKPKVKRVQSAGLLAGSVLKRDSERLKDVYTLGKKLGQGQFGTTYQCVEKATGKHFACKSIAKRKLVTDEDVEDVRREIQIMHHLAGHPNVVSIVGAYEDAVAVHLVMELCAGGELFDRIIQRGHYSEKAAAQLARVIIGVVEACHSLGVMHRDLKPENFLFVNQKEDAPLKAIDFGLSIFFKPGEIFSDVVGSPYYVAPEVLKKRYGCEVDVWSAGVIIYILLSGVPPFWAESEQGIFKQVLKGGLDFSSDPWPSISESAKDLVRKMLNRDPRKRLTAHDALCHPWGLCRXGVAPDKPLDSAVLTRLKQFSAMNKLKKMALKGIAENLAED

SEQ ID NO: 1731 - protein, 357 aa, Secale cereale
MKTFLIFVLAMTMSIITTARQLNPSEQELQSPQQPVPKEQSYPQQPYPSHQPFPTPQQYSPYQPQQPFPQPQQPTPIQPQQPFPQQPQQPFSQPQQQLPLQPQQPFPQPQQPIPQQPQQSFPQQPQRPEQQFPQQPQQIIPQQTQQPFPLQPQQPFPQQPQRPFAQQPEQIISQQPFPLQPQQPFSQPQQPFPQQPEQIIPQQPQQPSPLQPQQPFSQQPQRPQQPFPQQPQQIIPQQPQQPFPLQPQQPVPQQPQRPFGQQPEQIISQRPQQPFLLQPQQPFSQPQQPFLQQPGQIIPQQPQQPFPLQPQQPFPQQPEQIISEQPQQPFLLQPQQPSPQQPQLPFPQPQQPFVVVV

SEQ ID NO: 1732 - protein, 181 aa, Zea mays
  misc_feature (19)..(20): Xaa can be any naturally occurring amino acid
  misc_feature (23)..(23): Xaa can be any naturally occurring amino acid
  misc_feature (29)..(29): Xaa can be any naturally occurring amino acid
  misc_feature (112)..(112): Xaa can be any naturally occurring amino acid
RAPWLFFAAAFCGRGVALXXGEXAFSPSXPAVQRRVASGRPSGPGGSDFSYRLVVVSRSQRVAVGGWRLARLILVRALRLGAGGLLLLLSLSKGAAVNKFAVLSMAAGFLAXVVGELGRMRAMSVLLRLCPCLSSVAGASSVAGIVRAGGVFGGVGRFPGAVPCVVLLGAGRVALGSCCNG

SEQ ID NO: 1733 - protein, 429 aa, Vibrio parahaemolyticus RIMD 2210633
MADKKATLHVEGQAPIELPIMDGTLGTPVIDVRKLGANGYFTFDPGFLATASCESSITYIDGGKGILLHRGYPIDQLANNADYLEVCYILLYGEAPTREQYEQFKTTVTRHTMVHEQIASFFHGFRRDAHPMAVMCGVVGALAAFYHDSLDINNDEHREIAAYRLLSKMPTLAAMCFKYSVGQPFIYPRNDLSYAENFLHMMFANPCEEYEVNPVVARAMDKIFTLHADHEQNASTSTVRLAGSSGANPFACIAAGIASLWGPAHGGANEACLKMLEEIGSVDNIPEYVERAKDKDDPFRLMGFGHRVYKNYDPRATVMRETCHEVLKELNIKDPLLDVAMELERIALSDEYFVSKKLYPNVDFYSGIILKAIGIPVSMFTVIFAISRTIGWIAHWNEMHSDPLNRIGRPRQLYKGETQREFSPLHERE

SEQ ID NO: 1734 - protein, 435 aa, Pyrococcus furiosus DSM 3638
MARITEEQRRKLAQDALEYHRNNFPGNGKIEVIPKVPLRDFYDLSLAYTPGVAEPCKVIAKKGNYEDYTIIPNTVAVVTDGSAILGLGNIGVLAGMPVMEGKCVLFKALAGIDAFPILIDTQDVEKIVETIKLISKGFGGINLEDISAPRCFEIEMRLKRELDIPVFHDDQHGTAVVTLAGLINALKLVGKKFNEIKVAISGAGAAGIAIAKLLHHVGVKEILLVDRAGIIYEGRKENMNPYKEEVARFNIHGVQGDLAKAMEGADVFIGVSVGGIVKPWMIKKMADDPIVFAMANPIPEIMPEDAKKAGAKIVATGRSDYPNQINNVLGFPGIFRGALDVRATDITLNMNIAAAEAIASVVSDEELSEDYIIPSPLHPDVYPKEARAVAEQAIRDGVARRKLSGEWVEEHTRKLREFYAALIEPLNERRKQYIT

SEQ ID NO: 1735 - protein, 393 aa, Lycopersicon esculentum
MPQLVKLPLPFPINGKRTLPILKHFLTSSSPSPSPSHALTSVRSVTYMPRPGDGTPRAVTLIPGDGIGPLVTGAVEQVMEAMHAPVLLWRYDVHGDMKEYASGDVDGISNPGRNKVWFKREGWKTPVGGGVSSLNVQLRKELDLYASLVHCFNLKGLPTRHENVDIVVIRENTEGEYSGLEHEVVPGVVESLKVMTKFCSERIAKYAFEYAYLNNRKVVTAVHKANIMENLLMVYFWESCRRDRKQITLGSSTMRELWTTVACNLYQSLSNLMLWSPLISTEIWLTNTAAGIAGGTGCLCPGGNVGGDHAVFEQGASAGNVGNEKILEQKKANPIALFLSSAMMLRHLQFPSFADRLETSVKRVIAEGKYMTKDLGGDCTTQEITDAVIANLD

SEQ ID NO: 1736 - protein, 360 aa, Zea mays
MARILLHGSLHVTIFEAEELSNSSRPSSQAPGFLRKLVEGIEDTVGVGKGTSKIYATIGLGKTRVGRTRKLTDETASPRWYESFHVYCAHLASDVVFTIRAKNPIGASTVGVAYLPVRDIFEGHEVDRWLHLCDGGGDDKDRTPLESGGKVHVRLQYFDISKDHSWGKGVRSGKYPGVPYTFFSQRQGCRVTLYQDAHVPDGFVPRIPLDGGRCYEAHRCWEDIFDAISGAKHLMYITGWSVYTEITLLKDGARPPRPGSGVTLGELLKKKAGEGVRVLMLVWDDRTCVGALKKDGLMATHDEETMNYFEGTDVHCVLCPRNPDDFGSIVHDLQISTMFTHHQKIVVVDHDMPVQRSHRQ

SEQ ID NO: 1737 - protein, 159 aa, Exiguobacterium sp. 255-15
MLQEQTFQRIDGTEATLKDYPGQAWLIVNTASKCGLTPQFEGLEQLHQDYRKQGLVVLGFPCNQFAGQDPGTDEEIQSFCQMNYGVTFPVFSKIEVNGKGTHPLFAELKALAPNTTGEQDVEWNFTKFLVTRDGEVTRFAPKTNPTDLVAAIERIVVPV

SEQ ID NO: 1738 - protein, 366 aa, Glycine max
MGLRSKLRMSASVVQQGMKEIRRSVTYMPRPGDGAPRGVTLIPGDGIGPLVTHAVEQVMEAMHAPIYFEKYDVHGDMRRVPEEVLDSIRKNKVCLKGGLRTPVGGGVSSLNVQLRKDLDLYASLVNCFNLPGLPTRHHNVDIVVIRENTEGEYSGLEHEVVPGVVESLKVMSKFCSERIAKYAFEYAYLNNRKQVTAVHKANIMKLADGLFLESCRHVATKYPGIKYNEIIVDNCCMQLVSKPEQFDVMVTPNLYGNLVANTAAGIAGGTGVMPGGNVGADHAVFEQGASAGNVGKEKMVEQKKANPVALLLSSAMMLRHLQFPSFADRLETAVKRVISEGNCRTKDLGGDSTTQQVVDAVIANLD

SEQ ID NO: 1739 - protein, 283 aa, Streptococcus agalactiae NEM316
MATIQWFPGHMSKARRQVQENIKHVDFVTILVDARLPLSSQNPMLTKIVGDKPKLMILNKADLADPIRTKEWRDFYESQGLKTLAINSKEQSTVKKVTDIAKILMSDKIAKLRGRGIQKETLRTMIIGIPNAGKSTLMNRLAGKKIAVVGNKPGVTKGQQWLKSNKELEILDTPGILWPKFEDELVGLKLALTGAIKDQLLPMDEVTIFGLNYFKTYYPDRLKERFKSINLEDEAPEIIMALTQKLGYRDDYDRFYNLFVKEVRDGKLGRYTLDIVGEHDGNN

SEQ ID NO: 1740 - protein, 112 aa, Triticum aestivum
  misc_feature (99)..(99): Xaa can be any naturally occurring amino acid
MATPTVEKPDGVEIREVWAENLEAEFAVIREIVDDYPYVAMDTEFPGVVCRPLGTFKSNADFNYATLKANVDMLKLIQLGLTFSDERGGLPALGPDGRXASRQFNFRGEQAR

SEQ ID NO: 1741 - protein, 1342 aa, Escherichia coli O157:H7
MSQEYTEDKEVTLTKLSSGRRLLEALLILIVLFAVWLMAALLSFNPSDPSWSQTAWHEPIHNLGGMPGAWLADTLFFIFGVMAYTIPVIIVGGCWFAWRHQSSDENIDYFAVSLRIIGVLALILTSCGLAAINADDIWYFASGGVIGSLLSTTLQPLLHSSGGTIALLCVWAAGLTLFTGWSWVTIAEKLGGWILNILTFASNRTRRDDTWVDEDEYEDDEEYEDENHGKQHESRRARILRGALARRKRLAEKFINPMGRQTDAALFSGKRMDDDEEITYTARGVAADPDDVLFSGNRATQPEYDEYDPLLNGAPITEPVAVAAAATTATQSWAAPVEPVTQTPPVASVDVPPSQPTVAWQPVPGPQTGEPVIAPAPEGYPQQSQYAQPAVQYNEPLQQPVQPQQPYYAPAAEQPAQQPYYAPAPEQPVAGNAWQAEEQQSTFAPQSTYQTEQTYQQPAAQEPLYQQPQPVEQQPVVEPEPVVEETKPARPPLYYFEEVEEKRAREREQLAAWYQPIPEPVKEPEPIKSSLKAPSVAAVPPVEAAAAVSPLASGVKKATLATGAAATVAAPVFSLANSGGPRPQVKEGIGPQLPRPKRIRVPTRRELASYGIKLPSQRAAEEKAREAQRNQYDSGDQYNDDEIDAMQQDELARQFAQTQQQRYGEQYQHDVPVNAEDADAAAEAELARQFAQTQQQRYSGEQPAGANPFSLDDFEFSPMKALLDDGPHEPLFTPIVEPVQQPQQPVAPQQQYQQPQQPVAPQPQYQQPQQQVAPQPQYQQPQQPVAPQQQYQQPQQPVAPQPQYQQPQQPVAPQPQYQQPQQPVAPQPQDTLLHPLLMRNGDSRPLHKPTTPLPSLDLLTPPPSEVEPVDTFALEQMARLVEARLADFRIKADVVNYSPGPVITRFELNLAPGVKAARISNLSRDLARSLSTVAVRVVEVIPGKPYVGLELPNKKRQTVYLREVLDNAKFRDNPSPLTVVLGKDIAGEPVVADLAKMPHLLVAGTTGSGKSVGVNAMILSMLYKAQPEDVRFIMIDPKMLELSVYEGIPHLLTEVVTDMKDAANALRWCVNEMERRYKLMSALGVRNLAGYNEKIAEADRMMRPIPDPYWKPGDSMDAQHPVLKKEPYIVVLVDEFADLMMTVGKKVEELIARLAQKARAAGIHLVLATQRPSVDVITGLIKANIPTRIAFTVSSKIDSRTILDQAGAESLLGMGDMLYSGPNSTLPVRVHGAFVRDQEVHAVVQDWKARGRPQYVDGITSDSESEGGAGGFDGAEELDPLFDQAVQFVTEKRKASISGVQRQFRIGYNRAARIIEQMEAQGIVSEQGHNGNREVLSPPPFD

SEQ ID NO: 1742 - protein, 487 aa, Rubrobacter xylanophilus DSM 9941
MSETQTREELVSYPAIIGGERVSPERSFEDVDPSTGRPCALVARCGRQEVDRAVEAAREAHEKAWRRSTPAERARVLHRISQLLRRDHEEIARLESLDTGKPLSQARADATVAARYFEFYANTIESFYGETIPALPDAFVYTLREPHGVTGHIIPWNYPIQISCRSVAPALATGNCCVLKPAEEAPLTALRLGELALEAGLPPGALNVVPGYGEEAGAALAAHPGIDHLSFTGSVEVGRLVSRSAADNVVPVTLELGGKSPNIVLADADLERAVPVIVNSIIQNAGQTCSAGSRLLVESRLHGELVERVASRFQEIRIGPGPEDPDLGPIISEAQRERVKGYVETGRREAELVTGGGVPQDPRLAGGFYFEPTLFDRVEPGSTIFREEIFGPVLAVSTFEEAEEAAALANATDYGLIAAVWTRDVGKAHWLARELRVGQVYINTYGAGGGVELPFGGFKKSGHGREKGYEALYEYTQVKTVALSYAR

SEQ ID NO: 1743 - protein, 428 aa, Vibrio cholerae O1 biovar eltor str. N16961
MMMDLAFDRCHIWHPYTSTLTPLTCYPVSRADGVMITLEDGRSLVDGMSSWWAAIHGYNHPKLNQAAHQQIEQMSHIMFGGLTHQPAIELCQKLLKLAPNNLQQVFLADSGSVAVEVSLKMALQYWHSKGQPRAKFLTLRHGYHGDTFAAMSVTDPDNSMHSLYKGFLPEHIFANSPEGGFFDAWDERDIADFRHKLTEHHHQIAAVILEPIVQGAGGMRIYHPEFLRQVRALCDEFGVLLILDEIATGFGRTGKLFACEHAGIQPDILCVGKALTGGYMTLSATLTTQQVADTVCAGEAGCFMHGPTFMGNPLACAVASASLSLIEQGDWQQQVANIEAFFAEQLPKLNDSPRVKQTRWLGAIGVVETHLPVNMEVIQALFVEHGVWIRPFGRLIYLMPPYISQPEHLQKLVDAMAAALNQPDCFKQ

SEQ ID NO: 1744 - protein, 101 aa, Zea mays
MAGVSRSMVAPLLVLNLVMYIVVIGLASWNLNHFINGTTNYAGVAGNGATFYFLLFAILAGVVGAASKLAGVHHVRTWRGDSLATSASSALVAWAITALAF

SEQ ID NO: 1745 - protein, 529 aa, Glycine max
MELSYCAVFLILLIPISRADATSVEKQFKECLLTQLDGNSEHIEKITFTSSSTLYPQVWDSLAQNPRWVNISSRKPLMILTPFHESEIQAAILCSKELKLQLRVRSGGHDYEGLSYLSDVPFVMVDLINIRSIEINLADETAWVQAGASIGELYYKISKASKVHGFPAGTCPSVGIGGHISGGGQGLMLRKHGLAADNVVDAYLIDANGKIHDRKSMGEDVFWAIRGGDASSFGVILAWKIKLVRVPPIVTGFNVPRTPEEGVTDLIHRWQYIAHDLHEDLVIRVIAQISGHDKSKKFRATFNSIFLGGVDRLIPLMNESFPELGLQAKDCTEMSWIQSVMFIAGYNIEDPLELLLNRTTMFKRSFKAKSDFFKEPIPKSGLEGAWKLLLEEEIAFLIMEPYGGRMNEISESEIPFPHRKGNLYNLQYLVNWEVNSDEASRRHLQWAKMVYKYMTPYVSKSPRAAYFNYKDLDLGKNKLDSTSYSEASVWGKKYFKGNFRRLAQIKTKFDPLNFFRNEQSIPLLNSHHS

SEQ ID NO: 1746 - protein, 327 aa, Escherichia coli
  misc_feature (180)..(180): Xaa can be any naturally occurring amino acid
MNGAQWVVHALRAQGVNTVFGYPGGAIMPVYDALYDGGVEHLLCRHEQGAAMAAIGYARATGKTGVCIATSGPGATNLITGLADALLDSIPVVAITGQVSAPFIGTDAFQEVDVLGLSLACTKHSFLVQSLEELPRIMAEAFDVACSGRPGPVLVDIPKDIQLASGDLEPWFTTVENEVXFPHAEVEQARQMLAKAQKPMLYVGGGVGMAQAVPALREFLAATKMPATCTLKGLGAVEADYPYYLGMLGMHGTKAANFAVQECDLLIAVGARFDDRVTGKLNTFAPHASVIHMDIDPAEMNKLRQAHVALQGDLNALLPALQQPLNQ

SEQ ID NO: 1747 - protein, 427 aa, Schizosaccharomyces pombe
MSSVEVNRENADVANTNRQANLAEGYEIKELNESQKQYIRSSIPILESSGVNLTKAFYQKMLGNYPEVLPYFNKAHQISLSQPRILAFALLNYAKNIDDLTSLSAFMDQIVVKHVGLQIKAEHYPIVGHCLLSTMQELLPSDVATPAFLEAWTTAYGNLAKILIDSEKKVYQSQPWNGFVEFKVTELINESSDVKSVYLGPKDPAFRISHAHPGQYVSVLWEIPGLSHKTLREYSLSNRVDTCRNQFRISVRRVAGGVVSNFVHDNLKVGDIVGVSPPAGNFVYKRSEENVNRPLLCFAGGIGITPLIPIIETALLDGRKVNFCYSSRNYVSRPFKQWLEQLKLKYKENLKLKEFFSEESSVTKEQIVDEVMTRIINEEDLEKLDLSECDIYMLGPNNYMRFVKQELVKLGVEPNKVQSEFFGPYIP

SEQ ID NO: 1748 - protein, 208 aa, Glycine max
  misc_feature (183)..(183): Xaa can be any naturally occurring amino acid
MESPSRSFVIIVGAGVSGISAAKLLAENGVKDLVILEASNCIGGRIRKENFGGVSVELGAGWIVGVGGKESNPIWELVAEYGLRTCFSDYTNVPYNIYDRSGKIFSSGIAADSYKKAVDSAIRNLTNQEEADREGNSSKTTEPPSSPLELAIDFILHDFEMAEAVPISTFTAFGEREFLVADXRSMASISLSAHMSFSALTTFALERL

SEQ ID NO: 1749 - protein, 480 aa, Pseudomonas syringae pv. tomato str. DC3000
MQLKDSTLFRQQAYINGQWLDADGGQSIKVNNPATNEILGTVPKMGAAETRRAIEAADKALPAWRALTAKERGNKLRRWFELMIENQDDLGLLMTLEQGKPLAEAKGEITYAASFIEWFAEEAKRVYGDVIPGHQPDKRLIVLKQPIGVTAAITPWNFPAAMITRKAGPALAAGCTMVLKPASQTPFSALALAELAERAGIPAGVFSVVTGSAGDIGSELTGNPIVRKLSFTGSTEIGRQLMAECAKDIKKVSLELGGNAPFIVFDDADLDKAVEGAMISKYRNNGQTCVCANRIYVQDGVYDAFAEKLKVAVGKLKIGNGLEDGITTGPLIDEKAVAKVKEHIADAVSKGATVLTGGNSLEGSFFEPTILVNVSKDAAVAREETFGPLAPLFRFKDEAEAIALANDTEFGLASYFYAQNMSRVFRVAEALEYGMVGINTGLISNELAPFGGIKSSGLGREGSKYGIEDYLEIKYLCLSV

SEQ ID NO: 1750 - protein, 484 aa, Oryza sativa (japonica cultivar-group)
MANNSSYGENVRRKSHTPSAIVIGSGFAGIAAANALRNASFEVVLLESRDRIGGRIHTDYSFGFPVDLGASWLHGVCEENPLAPIIGRLGLPLYRTSGDDSVLFDHDLESYALYDTKGHQVPQELVEKIGKVFETILEETGKLREETKEDISIAKAIAIVMERNPHLRQEGIAHDVLQWYLCRMEGWFATDADAISLQGWDQEVLLPGGHGLMVRGYRPVINTLAKGLDIRLGHRVVEIVRHRNRVEVTVSSGKTFVADAAVIAVPLGVLKANTIKFEPRLPEWKEEAIRELSVGVENKIILHFSEVFWPNVEFLGVVSSTTYGCSYFLNLHKATGHPVLVYMPAGRLACDIEKLSDEAAAQFAFSQLKKILPNAAEPIHYLVSHWGSDENTLGSYTFDGVGKPRDLYEKLRIPVDNLFFAGEATSVQYTGTVHGAFSTGLMAAEECRMRVLERFRELDMLEMCHPAMGEQTATVSVPLLISRL

SEQ ID NO: 1751 - protein, 145 aa, Nicotiana plumbaginifolia
GASKTYPQQAGTIRKNGHIVIKNRPCKVVEVSTSKTGKHGHAKCHFVAIDIFTGKKLEDIVPSSHNCDVPHVNRTDYQLIDISEDGFVSLLTENGNTKDDLRLPTDDNLLALIKDGFAEGKDLVLSVMSAMGEEQICGIKDVGPK

SEQ ID NO: 1752 - protein, 174 aa, Microbulbifer degradans 2-40
MLACTFTASTHAAEESAQCPSYLDHSFKKLHSTQTVNLCELYTGKPLLIVNTASHCGYTKQFGGLEKLYQSYKDQGLQVIGFASDDFKQAAKSEMEAATICYKNYGVTFTMLAPTTVTGEKANAVFSHLNANTSAPSWNFNKYLITKNGQNIEKFNSDVTPLASDLEKKVQKAL

SEQ ID NO: 1753 - protein, 386 aa, Aspergillus parasiticus
MTGLDMEIIFAKIKEEYARTDDVGKRQIQGHIRELQVGFYSDWDVVMRLSSGPLQVALTKVGIDLGIFRSLKESDTPITLAEIVKKTGASPRLLGRILRTQAAFGLIKETGPQEYTSSAFTDVFANSDAAGAVVQLFDISGPCTQILPDFLAERNYQDITSNKDCVFQKAFGSDLTMFEWMPQHPKHMESLGHLMALERPVSWVDHYPVLEELGGFPAPDKVLMVDIGGGFGQQSKALRAKFPDLPGRLIVQDIPQTLANAQPAAGIEFMEHNFFEPQPIQNAKFYYLRHVFHDWPDEQCVLILKQIIPAMGPESQILIDEMVIPSTGVPWQAAFTDLLMMNSLGGVERTRAEWDDLMEQVGLEIIQSKVYDSKEQAILVAVPKRT

SEQ ID NO: 1754 - protein, 331 aa, Synechococcus elongatus PCC 7942
MDASLLLRQITTGYWGSQALYVAAKLGIADQLVNGPRSCEDLAIVVGAKPEVLYRLLRALASLGIFTEVSDRQFALTPAAELLRSGTAGSLRNLVMMFGEEHYVAWGELLHSIQTGENAFEHHYGAPVFAYYAQHPASADIFNGAMSDMSRPDTAAVLSSYDFQGIRCLVDVGGGHGQLLSQILAAYPDLTGILYDQPAVVAGADSVLADVSDRCEVVGGDFFASVPAGGDAYLLKHIIHDWDDADSLKILANCRQVMQPGDRLLLLEQVVRAGNEPNLAKWLDLNMLVMTQGGRERTQAEFATLLADAGFQLSQIHGTASEVCIIEGRAI

SEQ ID NO: 1755 - protein, 528 aa, Triticum aestivum
  misc_feature (215)..(215): Xaa can be any naturally occurring amino acid
  misc_feature (381)..(381): Xaa can be any naturally occurring amino acid
  misc_feature (443)..(443): Xaa can be any naturally occurring amino acid
  misc_feature (472)..(472): Xaa can be any naturally occurring amino acid
  misc_feature (479)..(479): Xaa can be any naturally occurring amino acid
  misc_feature (522)..(522): Xaa can be any naturally occurring amino acid
MSAIKPPPPDRPPQAARLPSPSSSSSAAAAAKQGATGSRGLLMGRYELGRVLGKGTFAKVYHARHVQTGESVAIKVLDREKAVRSGLVSHIKREIAVLRRVRHPNIVHLFEVMATKTKIYFVMELLVRGGELFSRVSKGRLKEDIARRYFQHLISAVGFCHTRGVFHRDLKPENLLVDEAGNLKVSDFGLSAVAEPFQPEGLLHTFCGTPAYVAXPEVLARRGYEGAKADIWSCGVILFVLMAGYLPFHDQNLMAMYRKVYKGEFRCPRWFSKDLTSLIMRFLDTNPSTRITLPEVMESRWFKKGFRPVKFYIEDDQLYNVIDAENDMLDLGLPDPLPQPLPPPPPSPSPQQVDGDDSGSESDASVVSCPATSSFEERHRXPGPLPRPASLNAFDIISFSRGFNLSGLFEEKGDEVRFISGEPMPDIITKLEEIANGKSFAVXRKKDWRVSLEGTREGGKGPLTICAEIFEXRPSLVVXEVKKKAGDKEEYDDFCNKELKPGMQHLVHQMAPVPITPTISEXAERPSR

SEQ ID NO: 1756 - protein, 190 aa, Griffithsia japonica
ARGTGGVYATAERCAVTTTLAGATGGVVTLIVIKIRDHIFDLLACLNGILAGLVAITACCAFVDPWAAVVIGAIGAVVYIGAAMLLLKFQIDDPLEAFPIHGASGAWGCLAGTLFNKQGHQVTAGFTDQIWGLFYGGGGRLLGVNALGMVVITVWTVGLVTPLFLVMKFTGILRISPEEEIIGNDVSKHG

SEQ ID NO: 1757 - protein, 502 aa, Pseudomonas fluorescens
MTRSLTMNSSLPAIDGLRLPHQMLIGGQWVNAQSDKTLNVYNPATGDTLTDVPDGDVEDVNAAVESAAATLQSDAWRRMPPSARERILLRLADLLEAHGDELARLETLNNGKLLIYSKMMEVGASAQWLRYMAGWATKLTGSTLDLSLPLPPDVRSRASTQRVPVGVVAAIIPWNFPLLMAVWKIAPALACGNTVVLKPAEETPLTALRLAELAMEAGLPAGALNVVTGRGETAGDALVRHPKVAKVAFTGSTEVGRIIGSACGRSLKAVSLELGGKSPVIVLADCDPQEAAEGAAAAIFFNHGQVCTAGSRLYVHESIYEDVIQRLAVIGESIVVGSGLEQGVHMGPMVSKKHHENVLRHIRNGIEDGADLICGGTEAPCAQGFFVKPTIFANREKKDIRLLSQEVFGPVLVATPFSDIAEVVNEANRSVYGLGASIWTNDLSAALRINDELEAGTVWVNTHNMVDPNLPFGGFKDSGVGREHGAAAIEHYTTTRSLVIAY

SEQ ID NO: 1758 - protein, 456 aa, Triticum aestivum
FIRHHRTATEEGGMAAAGGGPRRTTRVGPYELGKTVGEGSFAKVKIAKDTRNAATCAIKVLDRNHVLRHKMVEQIKGEIATMKLIRHPNVVQLHEVMASKSKIYMVLEFVEGGELFDKIVNSGKLGEDEARRYFHQLINAVDYCHSRGVYHRDLKPENLLLDSYGALKVSDFGLSAFSPQTKEDGLLHTACGTPNYVAPEVLADKGYDGMAADVWSCGIILFVLMAGYLPFDDPNLMTLYKLITRANVSCPPWFSTGARNLIKRILDPNPHTRITIAQILEDEWFKKDYKPPHSEHNEDVSLEDVDAAFDSSEEHLVAERREKPESMNAFALISRSEGFNLGNLFEKEMMGMVKRETSFASQRTPQEIMSKIEEACGPLGFNVRKQNYKMKLKGDKTGRKGHLSVATEVFEVAPTLHMVELRKTGGDTLEFHSFYKNFSSELKDIVWKTESNTIAK

SEQ ID NO: 1759 - protein, 117 aa, Prunus avium
MACSAMTKLALVVALCMVVSVPIAQALTCGQVSSNLAPCIAYVRGGGAVPPACCNGIRNINNLAKTTADRQTACNCLKQLSASVPGVNANNAAALPGKCGVNVPYKISPSTNCATVK

SEQ ID NO: 1760 - protein, 1362 aa, Ustilago maydis 521
MNPSYTERRASAHPTMSSSAHHASSTPSAASIDPTTSHAISSGIPITSPAALSYFAAHPRRQQVHFGNYLLLQTLGEGEFGKVKLGVHKEWGEEVAVKLIKRDKVANDAAPLHLDDSAQKDPAKMSKVEREIQVLKDVRHPNIVRLYEVIESDRYIGIVLEYASGGELFDHILAHKYLKEEHACRLFAQLISGVSYLHHKKIVHRDLKLENLLLDRNRNVIITDFGFANNFEHKRNDLMATSCGSPCYAAPELVVQDGLYAGSAVDVWSCGVILYAMLAGYLPFDDDPANPDGDNINLLYKYILATPLSFPEYITAQPRDLLSKMLVPDPTRRATLEQVMQHSWLRHYRELFKFSVDDLERAAMEQQTKKRQMYRQQMMYQQQLQEQQRRQQMERSQSVRHNVSHLPVGTAYTANTAVSAVSAANVAHRQTLPISATVPDRLYEPIGSASRGADHSVTPQRAPTASSHQPPVAPTASADAAIAPLPRASTHNNVAAAADAAAAVAAAPSPVDPVTALGNARGEPRTRLDDAVPTIAAAYETEPRQLAAQKVQRHTIQLEYGGDERPRKESAPGSRQASQTQRNASASSTSSKLAEIERTKTAADKPAANANAIVPPSVLQSTSVQVPATSVVVPESEKANISKAGAPDMMRSVSASAASRVSVPPPIMEQTQPSVSAHRSTQPTSSSRVRAPSSASRNNADSGSTGHATRIPTSASQRVVSTSSAASEPVGFPSSATERTIPSADADAAAGRISASRRASNGAEITEPSHRSPSATRHATADNAPVTSASASARHRKGMSTDKFFLSRLLGSNSANQPNGAGVAGDKVSANGSDAAGDKTKRDSMNRPAPERAPSSSSTGKNGRRKAMSLVVGHASGEASSAAADRNRALKAGMPHSATRATFGTQVSGKADDSVSSAQKQRKGSASLASQTTSTSRAAQSSTRPQPLQPSLQQQQQQQDKAFNDGSTIASSSTAGPSSNAAKKVMDWFRKKSLSRGTFNEQPPLGLFERSPTSSYMHGSASQTPSVIVTSAPNGTSRHAEAPSGGSSVPSSRSTSGTHSENSEATEMTQLTNLSDASHQEGDGLKSSASTVQQQATPKASLSAVSNVSDASAAGSLVSTRSQQQQRPQPRVATATSASTTPARFNEARLRYHLGAVDQSALTSRSPIEVLKEVQRVLYEMGIDVRTEKDEDFKLECVRRKRAKTLMSATHGFGMSIRSSVFPPTQADVERSSRMSHRDSLTPSASSPGGGSLRSFLKRSSLQPGATSPKMGSSTLPSSATVTSNLGGAVHDENQPPPLYGDASVDGGQEIRFSVEVTRIKNLTGLYSLDIRRMKGNLWAYKFVYQALLDRCQLGSSTAAVG

SEQ ID NO: 1761 - protein, 402 aa, Arabidopsis thaliana
MLPVKDVVTTSVLSKPWRSLWKLVPTLKFDYENNQSEDETYSEIVCRLLLSNKAPFLESLHLGFRFGECRSVEVGMWIGIAYARHVRDLVLHVESVKGSFIFPTGLYNCETLESLTLRSWVLVDVPSPACLKSLRTLRLENVDYKYDDSVYNLLSGCPNLENLVVYRGNLLEVETFTIAVPSLQRLTIYDDNDGEYCTGYVINAPSLKYLKIDGFKALESCLIENAPELVEATIMNVSKIINEKLLETLTSVKRLSLALSPLELKFSCNNYSEWWNLLVLMLDSSPKLQVLKLIGKLSGENNHLASMNWDQPKNIPGCLLFNLETFMWKGCKRIGEDEKEVAKYILRNTNRLKRATFTREIYEENNSQDMFENLEMVEELESVVRASKSCKLAFETSLWSLS

SEQ ID NO: 1762 - protein, 191 aa, Nicotiana tabacum
MASTLSTITLRSPSPSTASSTHASIPFPKKALEFPIRTPKLHHRRATFLRPLAAVEAPEKVVQLGDEISNLTLADAQKLVEYLQDKLGVTAASFAPAAVAAAPGAAAEAPAVVEEKTEFDVVIDEVPSNARIATIKAVRALTSLALKEAKELIEGLPKKFKEGVSKDEAEDAKKQLEEAGAKVSIANLNFW

SEQ ID NO: 1763 - protein, 499 aa, Sphingomonas sp.
MATQLKSGTNEYGIKSEYGHFIGGEWISSDSGKTIDLINPATGAVLTKIQAGNAKDIQRAVAAAKAAFPKWADSSAAERQEILIEVARRLKARHQHYATLETLNNGKPIRESMHFDMPQAIGQFELFAGAAYGLHGQTMDYPDAVGIVHREPLGVCAQIIPWNVPMLMMACKIAPALASGNTVVLKPAETVCLSVIEFFVEMADLLPPGVINVVTGYGADVGEALVTHEDVRKVAFTGSVGTARRIMQYASTNIIPQTLELGGKSAHIVCADADIDAAVESATMSTVLNKGEVCLAGSRLFLHESIQDEFLAKFKVALEGIRQGDPLDFATQLGAQASQMQMDKVISYLELATEEGANVLTGGSANDKLADGNFIRPTVFTNVNNSMRIAREEIFGPVTSVISWKDEDDMMKVANDTNYGLAGGIWTRDIARAHRMARKLETGTVWINRYYNLKANMPLGGYKQSGFGREFSHEVLNHYTQTKSVVVNLQEGRTGMFDQ

SEQ ID NO: 1764 - protein, 115 aa, Pyrus communis
MASSAVIKLALVVALCMAVSVAHAITCSQVSANLAPCINYVRSGGAVPPACCNGIKTINGLAKTTPDRQAACNCLKNLAGSVSGVNPGNAESLPGKCGVNVPYKISTSTNCATVK

SEQ ID NO: 1765 - protein, 409 aa, Arabidopsis thaliana
MSVLSKRWRSLWKMLPRLKFDDWMFPDNVNRCLLSHQASFLQSLHLVIDYDFVSHMHTGILMGIAFGRHIRELVLYVNGFQESFTFPLSLCNCESLETLTLGHNVLIDVPSPVFLKSLRTLHLDGVEYTDDESVVNLLSGCISLENLVVHRVIQADVTTFTIAVPSLKRLTLTTEFDDDEDSVYVINAPSLKYLKILGDKAYLIENSPELVEVSLTDRQVTVDGYPIASYVENLLRSLTSVKRMSLKISSYLEIKFPTGSIFYQLVSLELYTNKAEWWNLLVLMLDSSPKLQVLKLNGKLSGENNHLASMNWDQPKNIPGCLLFNLETFIWKGCKRIGEDEKEVAKYILRNTNRLKRATFTREIYEENNSQDMFENLEMVEELESVVRASKSCKLVFESTLWSLSNYDV

SEQ ID NO: 1766 - protein, 402 aa, Phaseolus acutifolius
MDEALGSSCSLPPFLAKTYEMVDDLSTNSIVSWSVSSKSFIVWNPPEFARDLLPRFFKHNNFSSFIRQLNTYGFKKIDPEQWEFANDDFVRGQPHLMKNIHRRKPVHSHSLQNLQAQGPLGDSERQGFTDGIEKLKRDKERLLVELQKFQHEWQTYEIQIHCSNDRLEKLEQKQHKMVSSISHVLQKPVLAVNILPLTETMDRKRRLPRSGHYYDESSIEDAIETSQMLPRENAENTTVLTLNVERLDQLESSVAFWEAIAHDIGDNFAQIQSNMDFDESTSCADSPSISCAQLDVDVRPKSSGIDMNSEPTAAAVPDPLASKDQPAGITVAATGVNDVFWEQFLTEDPGASETQEVQSERKDCDGRKNEGKPNDHSKFWWNIRNANNLSEPMGHVGQAEKT

SEQ ID NO: 1767 - protein, 355 aa, Claviceps purpurea
MSRANPPNAGGSRKISFNVSEHYDIQDVVGEGAYGVVCSAVHKPSGQKVAIKKITPFDHSMFCLRTLREMKLLRYFNHENIISILDIQKPRGYDSFNEVYLIQELMETDMHRVIRTQDLSDDHCQYFIYQTLRALKAMHSANVLHRDLKPSNLLLNANCDLKVCDFGLARSAASQDDNSGFMTEYVATRWYRAPEIMLTFKEYTKAIDVWSVGCILAEMLSGKPLFPGKDYHHQLTLILDVLGTPTMEDYYGIKSRRAREYIRSLPFKKKVPPRVLFPKTSDLALDLLEKLLAFNPVKRITVEEALKHPYLEPYHDPDDEPTAPPIPEAFFDFDKHKDNLSKEQLKLLIYEEIMR

SEQ ID NO: 1768 - protein, 494 aa, Sorghum bicolor
MAAADVPRPSFIGGDWREPCLPVCQPSTEATIGDIPAGTAEDVEMPVARGRVSDGGALVACLWGRASQLSHTIAAKIKDRKSESLALLETLDSGKPLDEASADMDDVAACFEYYADLAEALDGKQRSPISLPMENFKSYVLKEPLGVVGLITPWNYPLLMATWKVAPALAAGCTAVLKPSELASVSCLELGAICMEIGLPPGVFNVITGLGLKLVLHYPHIPCGIRLLLLGSTETGKRIMTSAAQMVKPVSLELGGKSPLIVFDDIRDIDKAVEWTMFGILPNAGQVCSAASRLLLHEKMAKKFLDRLVHGAKNIKVSDPLEEGGRLGSVVSEGQYEKIKKFISTARSEGATILYGGARPQHLKRGFFLEPTIITDVSTSMQIWREEVFGPVICVKEFRRESEAVELANDTQYGLAGAVISSDQERCRAISKALQSAIDNCSQPCFVQAPWGGNKRMFGRELGEWGLDNYMTVKQVTKYCSDEPWGWYQPPSKL

SEQ ID NO: 1769 - protein, 1462 aa, Candida albicans SC5314
MSTVVNRRSSHQFDSPSNHLDHSSSMNVDKVVQSVTNATKRLSQISTNTNNSNKKRKTQNKIGPWKLGRTLGRGSTGRVRLAKNTTTGQLAAVKIVPKSNFKKLENPKYKRSKEDATRLPYGIEREIIIMKLISHPNIMGLYDVWENKNDLYLILEYIEGGELFDYLIKRGKLQEYEAINYFKQIINGINYLHQFNICHRDLKPENLLLDFNKNIKIADFGMAALEVKEKLLETSCGSPHYASPEIVAGKNYHGAPSDIWSCGIILFALLTGHLPFDDENIRKLLLKVQSGKFNMPPELSFEAKDLITKMLKVNPRERITIDAILTHPLLAKYPEPTVSYSSTTTLDINSINIKQIESVDKIDKEILKNLSVLFHNCDEKTIISRLLSPNRCPEKMFYYLLMKYRNEHLSNSNSFNSSNDVDSARSLPRSTSYVKTTVTDHATGEKHTTVKKIQQSSSIYSNRSLLKKSTSAKGNVLSNITNRPNTPKQFSASSSFNKKKALHSKTQIYASRSRNASSRSLKSNSSTGRNGNNASVTSVNKIPEITGATVLQPIPSMAMNRGDEQQNKTKKNLTGTFGNKSLLNFQLICEEVFENDKENSKPVSKTPVSQLPPPPPPPIETPTSRTNSVKRGKTWSLARRERELAEQVRQRNEARENKLKAEELARKELEQEKKRIAEEKKRLEQQERELDEKQKLQEKQKAALEKLQKHQSAHDFEGLFASNRRSVTDMAPSSGMSSLDPRAHMVSRANTIGSPNLSSSSVNIDENASKVLHKFGIDVAPSPKRFSRASKTSTSKNLSSFLAPTVSRNLSSQLKTSSSKNLAGYLHGTTDTNGSAIAAKKKDDSTNEALTIEEFNAKERTSMSPSISKASVNKRNSNQSSYYRSMFSDNGNDDNVTKVRTGESHLSVQEEEEMDMENAIDEDISLIPNPRFSRFSFGGLLGSNTVANEEGDWTIMNSTLNHSNTVVRGTHNKSSTMLGLGIKMRDTTTIKEDEEFEDEKPFISVPSSEDDEGNTHKNKRGGLRDSGNYDFDEEHSVASTANTEYSDVASQGQQMPGSHTIHQLETELSNFDLLSYRVADIGKVNKHKPSIVDSKETLLKNHSSDEATIEVKEDNNEHDFNDKIKQHYDDNGDSEEDDEDEDEEEEDDDDDDDARSSFEARPHSHNYSLAEITSESPVGGGYESPSIANDFKKSRHSTGIFSTTQFPRSPYVVNNNGDSNKDENSQQQTKHMLNDGHKGLITSPVQDTFGSKKPVESNSLFRRLSLNPNRAAPKAPAPPPPSAPISSAAKANISQPLSSPTKGHNRFSRISIGSKNMLQKEDKSTKSNWFKKFFHSLTTPSAKDQSGNSSSKVASKDIKIIDTSLTAAQLIRVIKYQLELKKIEGSISKVDIDEEFGLISGVIPSKFANGRKLKFKIEVIDLINSSSLHVIKMKGNDKGFQSLVNIVTFIIKKEEQDKISRR

SEQ ID NO: 1770 - protein, 105 aa, Citrus sinensis
GEGTATQDSNNSGANSNGTATNGGEEDLKSWDTDFVKVDQATLFDLILAANYLNIKGLLDLTCQTVADMIKGKTPEEIRKTFNIKKDFTPEEEEEVRRENQWAFE

SEQ ID NO: 1771 - protein, 191 aa, Suillus bovinus
MQTIKVVVVGDGAVGKTCLLISYTTNKFPSDYVPTVFDNYAVTVMIGEDPYTLGLFDTAGQEDYDRLRPLSYPQTDVFLVCFSVTSPPSFENVREKWIPEVHHHCPGVPCLIVGTQIDLRDDAQVIEKLSRQKQRPVPTEHGERLSRELGAVKYVECSALTQKGLKNVFDEAIVAALEPPVVKKTHKCVVV

SEQ ID NO: 1772 - protein, 302 aa, Gonyaulax polyedra
MEALDLDRIIVQLLEVRGCRPGKLVQLTEGEICALCIRSRDIFMDQPILLELECPLKVCGDVHGQYSDLLRLFECGGLPPEANYLFLGDYVDRGKQSLETICLLLAYKVKYPENFFLLRGNHECASINRIYGFYDECKRRYSIRLWKTFTDCFNCLPVSAVIDDKILCMHGGLSPELSNLEQIKRVVRPTDVPDTGLLCDLLWSDPEKEISGWGENDRGVSFTFGPDVVQRFLRQHGLDLVCRAHQVVEDGYEFFARRALVTIFSAPNYCGEFDNAGAIMTVDESFCCAFQILRPLTRMGVP

SEQ ID NO: 1773 - protein, 180 aa, Triticum aestivum
MAGVGRNMVAPLLVLNLIMYLIVIGFASWNLNHFINGLNNRPGVGGNGATFYFLVFAILAGVVGAASKLAGVHHVRTWHGDSLATSASSSLVAWAITALAFGLACKEIHIGGYRGWRLRVLEAFVIILVFTQLLYVLALHSGLFGNMLGNHAGGYGAEHGGYGAGDPHNKGMGTGGVARV

SEQ ID NO: 1774 - protein, 335 aa, Nicotiana tabacum
MVHEKQVIEEVSGWLTVFEDGSVDRTLTGPPEDKFMAEAVPPHDDFIDGVADKDVVADENSGSRLRIYLPERNDNSVNKLPVILHFHGGGFCISQADWFMYYTVYTRLARVANAIIVSVFLPLAPEHRLPAACDAGFAALLWLRELSRQQGHEPWLNNYADFNRVFLIGDASGGNIVHQVAVRAGEENLSPLRLAGAIPIHTGFVRSYRSKSELEQEQTPFLTLDMVDKFLGLALPVGSNKDHPITCPMGEAAPAVEELKLPPYLNCVAEKDLMKDTEMEFYEAMEKGEKDIELFINNGVGHSFYLNKTAVEIDPVTASETEKFLEAVAEFINKR

SEQ ID NO: 1775 - protein, 326 aa, Triticum aestivum
MASTTAVPEVALRSGDARPMPAIGMGTAKLPVVPETTVKAVLEAVVVGYRHFDTASMYATERPLGEALAEAVRRGLLASREEVFVTSKLWCTQCHPHLVLPSLRESLQNLQMEYVDLYLIHWPISLKPGPTVFPVKREDAVPFDFEGVWRAMEECHRLGLAKAIGVSNFTTSHLDKLLAAATVHPAVNQVELNPVWQQRKLRGYCAEKGIHVAAYSPLGGQNWNGDGNAVLDSEVLAEIAKARGKTVAQVALRWIYEQGVTPIVKSFSKERLKENLGIFDWGLTDDDLRKIGQIPQKKIVKAETVLFSAEGEFTSADLADMEIVED

SEQ ID NO: 1776 - protein, 126 aa, Zea mays
  misc_feature (112)..(112): Xaa can be any naturally occurring amino acid
YNHVLQVDYACTPEEVQQHFQACGTVNRVTILTDKFGQPKGFAYVEFLEQEGVQEALNLNESELHGRQIKVAPKRTNVPGMKQRPPRGYNPYHGYPYRSYGAPYFPPYGYGXAPRFRRPMRYRPYF

SEQ ID NO: 1777 - protein, 512 aa, Gloeobacter violaceus PCC 7421
MEVRPMVVAAPAASASESIFKPRYDNFIGGQWRAPLKGQYTDNITPVNGRVLCQVPRSTVEDIELALDAAHAARESWGALSAAERSNILLKIADRMEANLHKLAVAETWDNGKPIRETTGADVPLAVDHFRYFAGCIRAQEGSISEIDGNTIAYHFPEPLGVVGQIIPWNFPILMAAWKLAPALAAGNCVVLKPAGPTPASILVWLEVVGDLLPAGVLNVVIGPGPEVGKALAASKRVAKVAFTGETETGRQIMQYAAQNIVPVTLELGGKSPNLFFADVMNADDDFLDKAVEGFVMFAFNQGEVCTCPSRALVHESIYEKFIDRAVRRVASIKQGNPLDPETMLGAQVSQAQMEKIARYVELGKQEGAEVLIGGERNSEPGEGLAGGYYYKPTVMKGHNQMRIFQEEIFGPVLAVTTFKDAEEAVRIANDTPYGLGAGVWSRDINTAYRVGRGIQAGRVWVNCYHVYPAHAAFGGYKASGVGRETHKMMLSHYQQTKNLLVSYDTKPQGFF

SEQ ID NO: 1778 - protein, 181 aa, Raphanus sativus
MASSMLSSAAVVTSQLQATMVAPFTGLKSSAAFPVTRKTNTDITSIASNGGRVSCMKVWPPIGKKKFETLSYLPDLSDVELAKEVDYLLRNKWIPCVEFELEHGFVYREHGSTPGYYDGRYWTMWKLPLFGCTDSAQVLKEVQECKKEYPNALIRIIGFDNNRQVQCISFIAYKPPSFTDA

SEQ ID NO: 1779 - protein, 486 aa, Oceanobacillus iheyensis HTE831
MLKTDKQSYLNFINGRWKSSEGGETKEVLNPADKNDVVGVIQRSTIDDVNEAIASAKSAKESWRKLSGNERGNYLYKVANILESRLDDVAETLTREMGKTLPEAKGETARGVAILRYYAGEGLREVGDVIPSTDSSGIMYTTRTPLGVVGVITPWNFPVAIPIWKMAPALIYGNTVVIKPATEAAATAAKVMECFADAELPDGVVNMVTGSGSIVGNRIAEHPDVNGVTFTGSDQTGKHIGQTALARGAKYQLEMGGKNPVIVADDADLDLAVKATISGGLSSTGQKCTATSRVIVQRSVYDAFKEKLLTQIQALTVGNGLEDGNWMGPSVSESQLETVLHYIKKGKEEGATLLTGGHRLTDAEHKDGNFVEPTVFEDVTNDMTIAQEEIFGPVLALIKVETFEEAMKLANDTEYGLSAAVFTENIRKMLTFIDDIEVGLVRVNAETAGVELQAPFGGMKSSSSHSREQGKAAIEFFTSIKTVFIK

SEQ ID NO: 1780 - protein, 163 aa, Triticum aestivum
  misc_feature (95)..(119): Xaa can be any naturally occurring amino acid
VAPFQGLKSTAGLPVSRRSNGASLGSVSNGGRIRCMQVWPIEGIKKFETLSYLPPLSTEALLKQVDYLIRSKWVPCLEFSKVGFIFREHNASPVXXXXXXXXXXXXXXXXXXXXXXXXXEVEEVKKEYPDAYVRIIGFDNMRQVQCVSFIAFKPPGCEESGKA

SEQ ID NO: 1781 - protein, 361 aa, Ocimum basilicum
MGSATNTPQINSDEEENFLFAMQLASASVLPMVLKSAIELDLLELIKKSGAGAFVSPVDLAAQLPTTNPDAHVMLDRILRLLTSYAILECRLKTLPDGGVERLYGLAPVCKFLTKNEDGVSMAPLTLMNQDKVLMESWYHLSDAVVDGGIPFNKAYGMTAFEYHGTDPRFNKVFNQGMSNHSTITMKKILETYTGFDGLKTVVDVGGGTGATLNMIVSKYPSIKGINFDLPHVIEDAPSYPGVEHVGGDMFVSVPKGDAIFMKWICHDWSDEHCVKFLKNCYDALPQNGKVILAECVLPEAPDTGLATKNVVHIDVIMLAHNPGGKERTEKEFQGLAKAAGFKQFNKACCAYNTWIMELLK

SEQ ID NO: 1782 - protein, 361 aa, Ocimum basilicum
MSSTANNPQINSDEEENFLFAMQLASASVLPMVLKSAIELDLLELIKKAGAGAFVSPAELAAQLLTTNAEAHVMLDRILRLLTSYAILECRLKTLPDGGVQRLYGLAPVCKFLTKNEDGVSMAPLALMNQDKVLMESWYHLKDAVLDGGIPFNKAYGMTAFEYHGTDPRFNKVFNQGMSNHSTITMKKILETYTGFDGLKTVVDVGGGTGATLNMIISKYPSIKGINFDLPHVVEDAPSYPGVEHVGGDMFVSVPKGDAIFMKWICHDWSDAHCVKFLKKCYEALPENGKVILAECVLPEAPDTGLATKNVVHIDVIMLAHNPGGKERTEKEFQVLAKASGFKQFNKVCCAYNSWIMELLK

SEQ ID NO: 1783 - protein, 283 aa, Enterococcus faecalis V583
MTIQWFPGHMAKARREVSEKIKYVDIVFELVDARLPLSSRNPMMDQIVQQKPRLVLLNKGDLADNDQNKKWQHYFQKKGYQTLVINAQQNKGINKIVPAAKEALKEKLAREQAKGLKPRAIRAMCIGIPNVGKSTLMNRLVGKKIAQTGNKPGVTKGQQWLRSGSQLELLDTPGILWPKFEDEEIGKKLALTGAIKDQLLHLDDLAIYGLEFFARFYPQRLTERYGLTEEELFLPAPEQLMLISQKRGFRDDYNRASEMIILEIRSGKLGTYTLDRWEELGDE

SEQ ID NO: 1784 - protein, 402 aa, Bacillus anthracis str. Ames 0581
MHKVHQGKLETVSKVKVENAKDLSLAYSPGVAEPCKEIYDDKSKVYEYTMKGNMVAVVTDGTAVLGLGNIGPEASLPVMEGKAVLFKSFAGVDAFPIALNTNDVDKIVETVKLMEPTFGGVNLEDIAAPNCFIIEERLKKETNIPIFHDDQHGTAIVTVAGLVNALKLVGKKMSDIKVVANGAGAAGIAIIKLLYRYGVRDIIMCDRKGAIYEGRPTGMNPVKDEVAKYTNKNRIEGSLADVVQGADVFIGVSAEGALTEEMVRTMNDDAIIFAMANPVPEIMPELAKAAGAAVVGTGRSDFANQVNNVLAFPGIFRGALDVHATQINEEMKMAAVQAIAELVAEDELNADYIIPAPFDARVAPQVAAYVAKAAMETGVARRQVDPNEVAEKTKQLALIGKE

SEQ ID NO: 1785 - protein, 207 aa, Zea mays
  misc_feature (98)..(98): Xaa can be any naturally occurring amino acid
MTTGEGAEAAAVPRVVSILSALLQRVAERNDAAAAAPPPAAAAGPPVLSAFQGLTKPAISIGGYLERIFRFAGCSPSCYVVAYIYLDRFLRRRPPRVXVDSYSVHRLLITAVLAAVKFMDDICYNNAYFAKVGGISLVEMNYLEVDFLFGVGFDLNVAPETFGDYCAVLHSELLCAEAAPAPLRLQHCCLSEDDAGAGCSAQQQLAA

SEQ ID NO: 1786 - protein, 110 aa, Triticum aestivum
MDSQFGALERGGSRQRRSPVLARPNTTKRHIQQQRANAADKKVVMPNYFSIEAFFVLACLTVSLLILPLVLPPLPPPPSLLLFVPVCLLILLMVLAFMPTDMRSMATSYL

SEQ ID NO: 1787 - protein, 238 aa, Oryza sativa (indica cultivar-group)
ENTMNRQVTFFKRRNGLLKKAHEISVLCDADVALIVFSTKGKLYEFSSHSSMEGILERYQRYSFDERAVLEPNTEDQENWGDEYGILKSKLDALQKSQRQLLGEQLDTLTTKELQQLEHQLEYSLKHIRSKKNQLLFESISELQKKEKSLKNQNNVLQKLMETEKEKNNAIINTNREEQNGATPSTSSPTPVTAPDPIPTTNNSQSQPRGSGESEAQPSPAQAGNSKLPPWMLRTSHT

SEQ ID NO: 1788 - protein, 363 aa, Glycine max
  misc_feature (57)..(57): Xaa can be any naturally occurring amino acid
  misc_feature (60)..(60): Xaa can be any naturally occurring amino acid
  misc_feature (97)..(97): Xaa can be any naturally occurring amino acid
  misc_feature (112)..(112): Xaa can be any naturally occurring amino acid
  misc_feature (123)..(123): Xaa can be any naturally occurring amino acid
MGEIRDLNMIDNTACLSAMFLSTLIANLVYPDVLNAVIELNMFEIIAKATPAVSFIXISXNAPTLPPQHPDRPNRLLRLLRLLVSSSFLTTPPRTTXTLEPFKQFMDSHKFXVPFGTRGNLGXFTLFDSISPLLQVWPMNFLKEALVDADIDLFKKIHGVTMYQYMENDPKMNQIFNKSMANLCATEMSRILEIYTGFEGISTLVDVGGGNGQNLKMIISKYPLIKGINFDLPQVIENAPPLPGIEHVGGDMFARVPQGDAIILKAVCHNWSDEKCIEFLRNCHKALSPNGKVIVVEFILPEEPEPTEESQLVSTLDNLMFITVGGRERTQKQYETLCKLSGFSNFQVACRAFSSLGVMEFYK

SEQ ID NO: 1789 - protein, 458 aa, Arthrobacter oxydans
MSSKLATPLSIQGEVIYPDDSGFDAIANIWDGRHLQRPSLIARCLSAGDVAKSVRYACDNGLEISVRSGGHNPNGYATNDGGIVLDLRLMNSIHIDTAGSRARIGGGVISGDLVKEAAKFGLAAVTGMHPKVGFCGLALNGGVGFLTPKYGLASDNILGATLVTATGDVIYCSDDERPELFWAVRGAGPNFGVVTEVEVQLYELPRKMLAGFITWAPSVSELAGLLTSLLDALNEMADHIYPSVFVGVDENRAPSVTVCVGHLGGLDIAERDIARLRGLGRTVSDSIAVRSYDEVVALNAEVGSFEDGMSNLWIDREIAMPNARFAEAIAGNLDKFVSEPASGGSVKLEIEGMPFGNPKRTPARHRDAMGVLALAEWSGAAPGSEKYPELARELDAALLRAGVTTSGFGLLNNNSEVTAEMVAEVYKPEVYCRLAAVKREYDPENRFRHNYNIDPEGS

SEQ ID NO: 1790 - protein, 202 aa, Glycine max
MRYILGEHNILFLKSFAFTILFLSCIAIRLNLCLSSIPSSLKSIPLEGHLKFDQVSLSHAARDFGNRYQYNPMAVLQPESVSDIVATIRHIWLMGPGSHLTIAARGHGHSLQGQAQAHGGLVINMESLKVPEMQIHVDEGNKSPPYVDVSGGELWINILHETLRYGLAPRSWTDYLHLTVGGTLSNAGVSGQTFMHGAQISN

SEQ ID NO: 1791 - protein, 570 aa, Triticum aestivum
MAGGGVEDVYGEDRATEEQLITPWSFSVASGHQLLRDPRHNKGLAFSEAERDAHYLRGLLPPAIVSQEHQEKKIMHNLRSYTVPLHRYVAMMDLQERNERLFYKLLIDNVEELLPVVYTPVVGEACQKYGSIYRRPQGLYISLKDKGKVLEVLKNWPERSIQVIVVTDGERILGLGDLGCQGMGIPVGKLSLYTALGGVRPSACLPITIDVGTNNETLLNDEYYIGLRQRRATGEEYHELLQEFMNAVKQNYGEKVLVQFEDFANHNAFDLLAKYSKSHLVFNDDIQGTASVVLAGLLAALRMIGGGLVDQTYLFLGAGEAGTGIAELIALEMSKHTELPVDDCRKKIWLVDSKGLLVESRKESLQHFKKPFAHEHEELKTLLEAVQSIKPTVLIGTSGVGKTFTQEVIEAMASFNEKPVIFSLSNPTSHSECTAEEAYTWSKGTAVFASGSPFDPVEYEGKTFVPGQSNNAYVFPGFGLGVVISGAIRVHDDMLLAASEALAEEATQENFDKGLIFPPFTNIRKISASIAAKVAAKAYDLGLASRLPRPDDLVKYAESCMYTPLYRSYR

SEQ ID NO: 1792 - protein, 500 aa, Citrus sinensis
LLLIPLLLILKKLKAQNKQQLPPSPPKLPVIGNFHQLGELPHQSLWQLSKKYGPVMLLKLGRVPLVVISSAEAARDVLKVHDLDCCSRPPLIGSGKFTYNYSDIAFSPYSDYWRELRKISVLEVFSLRRVQSFGFIREEEVALLMNSISESSSSASPVDLSEKMFALTGSIVFRMAFGRRFRGSNFDNHSFQELVHAVESLLGGFAAAECFPYVGWIIDRLNGYHAKLERVFQELDTLFQQIIDDHLKPAETTKQEHVQQDIIDVMLKIERDQAESHESEAWLTKNHIKAVLLNIFLGGVDTSAITVIWAMAELCKNPRLMKKAQAEIRNHIGNKGRVTEADIDQLQYLKMVIKETLRLHPPAPLLIARDTLYRFKVNGYDIYPKTLIQVNAWAIGRDSKYWESPEEFIPERFIDKPVDVKGQDFEYLPFGSGRRICPGINLGLIMSELALANLLYCFDWKLPNGREEDCVNMNMEEATGVSLTLSKKTPLILVPVNYLQ

SEQ ID NO: 1793 - protein, 371 aa, Candida albicans SC5314
MLIKSNYNCINIKRFLLNQTRVSVTASNSFSFYFYFKPYKFNCYKSYSTMSTTTPTIKLNSGYEMPIVGFGCWKVTNATAADQIYNAIKTGYRLFDGAEDYGNEKEVGEGINRAIKDGLVKREELFIVSKLWNNYHSPENVEKALNKTLTDLNLEYLDLFLIHFPIAFKFVPLEEKYPPGFYCGDGDKFHYENVPLLDTWKALEKLVNLGKIKSIGISNFNGGLIYDLIRGATIKPAVLQIEHHPYLQQPRLIEFVQNQGIAITAYSSFGPQSFLELQSKRALDTPTLFEHETIKSIADKHGKSPAQVLLRWATQRNIAVIPKSNNPDRLAQNLAVVDFDLTEEDLQAISKLDIGLRFNDPWDWDKIPIFV

SEQ ID NO: 1794 - protein, 488 aa, Listeria monocytogenes str. 4b H7858
MADVRKLKNYIDGEWVESKTDKYEDVINPATGEVLCQVPISTRAELDQAAVIAEQAFEKWSQVAVPRRARVLFSFQQLLIQHKEELARLITLENGKNLSEARGEVQRGIENVEFAAGSPTLMMGDSLASIATDVEAANYRYPVGVVGGIAPFNFPMMVPCWMFPMAIALGNSFILKPSERTPLLMEKLVELFSEAGLPKGVFNVVYGAHDVVNGILENEIIKAVSFVGSKPVGEYVYKTGSANLKRVQALTGAKNHTIVLNDADLEDTVTNVISAAFGSAGERCMACAVVTVEEGIADEFLAALRTAAQNVKIGNGLDDGVFLGPVIREENQKRTIAYIEKGLEEGAKLTVDGRETGLSEGHFVGPTILEDVTTDMTIWKDEIFAPVLSVIRVKNLQEAVRVANQSEFANGACIFTNNAKAIRYFREKIDAGMLGVNLGVPAPMAFFPFSGWKSSFYGTLHANGKDSVDFYTHKKVVTARYSLKGYEE

SEQ ID NO: 1795 - protein, 483 aa, Caulobacter crescentus CB15
MQVRNDSGDSKANLDAVIVWFRKDLRIADNPALRHAAQSGRPVIPLYILDETPGIRPMGGASLWWLDKSLKSLAASLETLGTKLVLRKGVAAEVLDQLIAQSGARSVVWNRLYDKPSTDRDAAIKAALRDRGVDCQSFNAGLLNEPWTVKNGSDQPYKVFTPYWRAAREHLTDVAVTAAPGHLVAPARFPASESLASWNLHPTKPDWSKGFDLWTPGEAGAHARLDAFLKGPIKGYGDQRDIPGVEATSKLSPHLHFGEIGPRQVWLATRSAADQGDIPLAEADKFLSEIGWREFNHSILYNWPHMPSANFKPEFDGFPWVKDEGALEAWKRGQTGYPIVDAGMRELWTTGFMHNRVRMIVASFLIKHLMIDWREGEAWFWDTLLDADLANNVGNWQWTAGSGADAAPYFRIFNPIAQGEKFDPKGDYVRRWVPELRNVSDDVIHKPWTKPLHLPAGAKRLYSRPIVDHAMARARALEAYHGL

SEQ ID NO: 1796 - protein, 474 aa, Ustilago maydis 521
MLSLTVPRLALRAAAPSRQFAAAAGVGAVRFASTKSLKDAVAEIIPAKQEQLKKLKAEHGESKLGEIQLQHLLGGMRGLKVMLWEGSVLDSETGITFHGKSIPDSQKVLPTAADLGLNGNEILPESMLWLLLTGNVPSKDEVKGLSAELAAKGALPAHVEKIIDSFPKTLHPMTQFAAAVAALNHDSKFAAAYAKGIKKTEYWAPVLEDSIDLIAKLPAVAARIYYNVFGRGDGKQAIDSNLDLIGNYSNMIGYGDNQGMTDYLRLYIAIHGDHEGGNVSAHTAHLVGSALSDPYLSYSAALLGLAGPLHGLANQEVLGWALSMQEAVGENASEEQIKEYLWSTLKSGRVVPGYGHAVLRQPDPRFTALSKFCDTRPELRDSSIVKLVQKVSQVAPGVLKEHGKTKNPFPNVDAASGCVLYQYGLTEFTYYTVIFGISRAIGALPQLVADRYLGMPIERPKSMSMDSLEAFLKK

SEQ ID NO: 1797 - protein, 298 aa, Candida albicans SC5314
MPMQKEFRTSAYHSRFQTPFRRRQEGKTDYYQRKRLVTQHKAKYNSPKYRLVVRFTNKDIIAQIVSAHITGDVVFTAAYAHELPRYGIKYGLTNWSAAYAVGLLVARRALQKLGLDETYTGVEEVEGEFELTEAVEDGPRPFKVFLDIGLQRTTTGARVFGVLKGASDGGLYVPHSPNRFPGWDIEAEELDAELLRKYIFGGHVAEYMEELLDDDEEKYKSIFKNYIEEEIESEDVEEIYANAHEAIRADPSFKPTEKKFTKEQYKAESKKYRQQKLTRAERQAKVAKKIAEFKAQQE

SEQ ID NO: 1798 - protein, 1230 aa, Cryptococcus neoformans var. neoformans
MSSFTPAFRLHHTHSSSVSPTASNDVAPSSPTPNQPHQLAARSPLYANSPNCASKITKGSSLSSSTAHHGLKYVRPSTSPLLRSPKGESFSAYLGNWGSQELITFLNIHKCGQYLAIFQKNDINGKILLDLDMTALKSMGIGKISERVRLIGGIKDLRRCVADESIRAPFTQRSYPSERTLLPSLPSHSNVLLDKWDCSSSASRLGKRQITLRPPPLDLQGHMPPRLLSHASLGIATIDTHDIHTTNSKIEVYIQQNPPGQPQSMPTKRSDSLTLCAAPSRNVGRRSPSSRHFEGCKSQTDGLTTLNLTLDRQVPSSTMNNVTLREDCHLQREERLPLSHQVPHSRNAFASPHKTSLSGRCPLARGDTTSHQPSGPAIAEQDSPVNYRISNTVTNTKEISQGDLKQPFVMKSLESQSHLLAGVSDMSHDPVTDGFKPKGKASVPLTVMSSSDISAVNANPAALSLADLRRQLVKFINTEDDTIRTVNVMHVTSGVEILERALKKFGKFGTGIHGSPDVYGDEDGDGTLEIGGWEVYTESTPDESSKPLSEFNLLKTCTFHREGTAIQDKGLFLRKKQRMQKRKNIQDFFGETPPPSMSPTSPTLITGPHLSLVQGKSQPTSGSAFSSSSRLSTLTHKGRNRASMISVMSGLGVPIINTLPSPQGNGLRLTGSVHSHEKKSMYNFFGHRPPSELISNHLTDYFPSAKKSDVEKARHSLLRLSGGTVAYKKSGIYEGDSTPDHWSKPGDNQPPSLPPFEPSQDTLSDSLQAFASSTPVHLSRPKHTVALRRRRDSDSSSRSHTSMLMQTRRNRDHSDTTSLLTVDEITAEVENRRVSTIQRGDYIEETEDSSSIEGDTLPQDDESKGVLRAICSDSNKLVDSGKSYQGDSDIDQQHELEDEEEDKLDDDEEEEEEEEEEDNEQGKAFTSTGSKRIIKWIKGALIGAGSFGSVYLGMDAQSGLLMAVKQVELSAGSAKNEDRKRSMLSALEREIELLKELQHENIVQYLDSSVDANHLNIFLEYVPGGSVAALLNNYGAFEEALVRNFVRQILTGLNYLHMRGIVHRDIKGANILVDNKGGIKISDFGISKKVENSLITGLRTNRPSLQGSVFWMAPEVVKQTSYSPKADIWSVGCLVVEMLTGTHPWADLTQMQAIFRIGSLARPAPPSDISVQADEFLRKTFEIEHAKRPTAAQLLKHPFIGSPRVRTAASNFINGAIASETMEVQVVEES

SEQ ID NO: 1799 - protein, 491 aa, Nicotiana tabacum
MVLSKTSSESDVSVHSTFASRYVRTSLPRFEMAENSIPKEAAFQIINDELMLDGNPRLNLASFVTTWMEPECDKLMMDSINKNYVDMDEYPVTTELQNRCVNMIARLFNAPLEEKETAVGVGTVGSSEAIMLAGLAFKRNWQNKRKAEGKPYNKPNIVTGANVQVCWEKFANYFEVELKEVKLREGYYVMDPVQAVEMVDENTICVAAILGSTLNGEFEDVKLLNDLLIEKNKQTGWNTPIHVDAASGGFIAPFLYPELEWDFRLPLVKSINVSGHKYGLVYAGIGWVIWRTKQDLPEELIFHINYLGADQPTFTLNFSKGSSQVIAQYYQLIRLGYEGYRNVMENCRENAIVLREGLEKTGRFNIVSKDEGVPLVAFSLKDNSRHNEFEVSETLRRFGWIVPAYTMPADAQHVTVLRVVIREDFSRTLAERLVLDIVKVLHELDTLPARLSAKLEEVKLVKNGKKFELEVQREVTNYWKKFVLARKAPVC

SEQ ID NO: 1800 - protein, 212 aa, Wolbachia pipientis
ASCSSAITFIDGDEGVLKYRGHSIADLAENNNFTTVIYLLLYGELPNLEQHKKFLLKIGELSELPEQVVNVVKAFPKTAHPMSILIACFAGLSALYHERHGNNVNSEDLDFGISAIAQVPAIIAMIYRYINNQEFTNANNGLSYSENFLRMMFGDTFDNDKSALFAKALDKIFTLHADHEQNASTAAVRLVGSAGSSLFTSLSAGVATLWGP

SEQ ID NO: 1801 - protein, 198 aa, Triticum aestivum
  misc_feature (96)..(97): Xaa can be any naturally occurring amino acid
  misc_feature (99)..(99): Xaa can be any naturally occurring amino acid
  misc_feature (124)..(124): Xaa can be any naturally occurring amino acid
  misc_feature (127)..(127): Xaa can be any naturally occurring amino acid
  misc_feature (134)..(134): Xaa can be any naturally occurring amino acid
  misc_feature (141)..(141): Xaa can be any naturally occurring amino acid
  misc_feature (153)..(153): Xaa can be any naturally occurring amino acid
  misc_feature (160)..(160): Xaa can be any naturally occurring amino acid
  misc_feature (165)..(165): Xaa can be any naturally occurring amino acid
MAPTVMASSATSVAPFQGLKSTAGLPVSRRSNGASLGSVSNGGRIRCMQVWPIEGIKKFETLSYLPPLSTEALLKQVDYLIRSKWVPCPSSSAKGXXCXSFFVERPTAIAPGVTLRWAPGIGSXCWXKLPLCVXVAPDGHXQVINEVEGARRXPDAYVRXIGFDXMRQVQCGDVHRLKPPGCEESGKAYNGSLTTRHI

SEQ ID NO: 1802 - protein, 427 aa, Vibrio parahaemolyticus RIMD 2210633
MVMTLTLMHRMSALQITEINIMSVTADQVHGVVQALTQSSDTLFLLLGAIMVFLMHAGFAFLEVGTVRQKNQVNALVKIIADFGISAIAYFFIGYWVAYGGTFFSDAQTLSQDNGYELVKFFFLLTFAAAIPAIVSGGIAERARFYPILIATFFTVGVVYPLFEGMIWNGNFGVQAWFESTFGYGFHDFAGSVVVHGVGGWIALVAVTFLGMRRGRIRAGKHTNFAPSNIPFLALGAWILCVGWFGFNVMSAQTLSGISGLVAMNSLMAMVGGIVASLLAGKNDPGFIHNGPLAGLVAVCAGSDLMHPLGALVTGAVAGVLFVYLFTYLQNRTKIDDVLGVWPLHGVCGAWGGIAAGVFGQSGFGGMGGVSFAVQVLGTFFGISIAVLGALVVYGAINALTGLRLSEEDEFNGADLAIHKISSTNED

SEQ ID NO: 1803 - protein, 160 aa, Zea mays
MSDSEEHHFESKADAGASKTYPQQAGTVRKNGFIVIKNRPCKVVEVSTSKTGKHGHAKCHFVAIDIFNGKKLEDIVPSSHNCDIPHVNRTEYQLIDISEDGFVSLLTSDGNTKDDLRLPTDETLVAQIKEGFESGKDLVVTVQSAMGEEQICALKDVGPK

SEQ ID NO: 1804 - protein, 190 aa, Triticum aestivum
  misc_feature (90)..(90): Xaa can be any naturally occurring amino acid
  misc_feature (106)..(106): Xaa can be any naturally occurring amino acid
  misc_feature (125)..(125): Xaa can be any naturally occurring amino acid
  misc_feature (139)..(139): Xaa can be any naturally occurring amino acid
  misc_feature (151)..(151): Xaa can be any naturally occurring amino acid
  misc_feature (156)..(156): Xaa can be any naturally occurring amino acid
  misc_feature (160)..(160): Xaa can be any naturally occurring amino acid
  misc_feature (163)..(163): Xaa can be any naturally occurring amino acid
  misc_feature (169)..(169): Xaa can be any naturally occurring amino acid
  misc_feature (174)..(174): Xaa can be any naturally occurring amino acid
MAPTVMASSATSVAPFQGLKSTAGLPVSRRSNGASLGSVSNGGRIRCMQVWPIEGIKKFETLSYLPPLSTEALLKQVDYLIRSKWVPCLXFNKVGFIFREHNASPXGTMMAGTGQCGNCLSSVQXRHTMINKVEEVKKXYPDPMSAIIGFXKMRKXKWVXFNXLKPPGXKDPGXAKKSPKGNKGIDFLNN

SEQ ID NO: 1805 - protein, 163 aa, Triticum aestivum
  misc_feature (77)..(77): Xaa can be any naturally occurring amino acid
  misc_feature (87)..(87): Xaa can be any naturally occurring amino acid
  misc_feature (94)..(94): Xaa can be any naturally occurring amino acid
  misc_feature (103)..(103): Xaa can be any naturally occurring amino acid
  misc_feature (112)..(112): Xaa can be any naturally occurring amino acid
  misc_feature (118)..(118): Xaa can be any naturally occurring amino acid
  misc_feature (120)..(121): Xaa can be any naturally occurring amino acid
  misc_feature (125)..(125): Xaa can be any naturally occurring amino acid
MAPTVMASSATSVAPFQGLKSTAGLPVSRRSNGASLGSVSNGGRIRCMQVWPIEGIKKFETLSYLPPLKHGGLLKAXSDYLIRSKWXVPCLQFXSKVGSSSRXAQRIPLGYXDGRYWXMXXLPSXGCTDPTSDRGGSQRRYTFRITVIASCSIALTTGASPEG

SEQ ID NO: 1806 - protein, 461 aa, Burkholderia fungorum LB400
MTFLKSPPPTPEDVADEYAATISGSSLPKYRIPEASSDRRAVFDLVRDELFMDGNSRQNVATFCTTYADDEVRHLMDLSIDKNMIDKDEYPQTAEIEMRCVHMLADLWHASKAWKTTGCSTTGSSEACMLGGLALKWQWKKRREAQGKPTDKPNFVCGPVQVCWAKFARYFDVEMRQVPLRGEATGLTPEDLAEYCDENTIGVVATLGITFTCVYEPVKALAGALDALQANVGLDIPIHVDAASGGFVAPFIQPDLEWDFSVPRVKSINASGHKYGLAPLGVGWVVWRSTQDLPDELIFRVDYLGGDMPTFALNFSRPAGQIIAQYYMLLRLGREGYRRIQQECADTAQALADGLAKIDQLEMIYDGRGALPAVCYKLKHPETAGFTLFDLSDQVRMRGWQIASYELPAGREDTIVQRVLIRRGVTRDMAAMLLEDIRHAIGHLTKNPVLHSSAGPTFHHN

SEQ ID NO: 1807 - protein, 316 aa, Shigella flexneri 2a str. 301
MNELDGIKQFTTVVADSCDIESIRHYHPQDATANPSLLLKAAGLSQYEHLIDDAIAWGKKNGKTQEQQVVAACDKLAVNFGAEILKIVPGCVSTEVDARLSFDKEKSIEKARHLVDLYQQQGVEKSRILIKLASTWEGIRAAEELEKEGINCNLTLLFSFTQARACAEAGVFLISPFVGRIYDWYQARKPMDPYVVEEDPGVKSVRNIYDYYKQHHYETIVMGASFRRTEQILALTGCDRLTIAPNLLKELQEKVSPVVRKLIPPSQTFPRPAPMSEAEFRWEHNQDAMAVEKLSEGIRLFAVDQRKLEDLLAAKL

SEQ ID NO: 1808 - protein, 153 aa, Chorispora bungeana
MNSVSAFSEMFGSDYEPQGGDYCPTLATSCPKEPAGRKKFRETRHPIYRGVRQRNSGKWVSEVREPNKKTRIWLGTFRTAEMAARAHDVAALALRGRSACLNFADSAWRLRIPESTCAKDIQKAAAEAALAFQDETCDTTTTNHGLDMEGRCG

SEQ ID NO: 1809 - protein, 153 aa, Chorispora bungeana
MTSVSTFSEMLGSEYESPTLSGEYCPALAASCPKKPAGRKKFRETRHPIYRGIRLRNSSKWVCEVREPNKKSRIWLGTFLTAEIAARAHDVAAIALRGKSACLNFADSAWRLRIPETTCPKDIQKAAAEAAVAFQAEINDTTTDHGLDRGDVG

SEQ ID NO: 1810 - protein, 154 aa, Chorispora bungeana
MTSFSAFSEMLGSEYESPTLSGEYCPALAASCPKKPAGRKKFRETRHPIYRGVRLRNSGKWVCEVRGPNKKSRIWLGTFLTAEIAARAHDVAAIALRGKSACLNFADSAWRLRIPETTCPKDIQKAAAEAAVAFQAEINDTTTDHGLDMERRWW

SEQ ID NO: 1811 - protein, 231 aa, Burkholderia pseudomallei
GPVASRLGLSGVPVAAETIALHTLFELMRVTGARVHVARLSSAAGVALVRAAKAEGLPVTCDVGANHLHLIDVDIGYFDAQFRLDPPLRAERDREAIRAALADGTIDAICSDHTPVDDDEKLLPFAEATPGATGLELLLSLTVKWAREAGVPLARALAAITSAPADVLKLPAGRIGEGAPADLCVFDPNAHWRVEPRALKSQGHNTPFLGYELPARVCATLVAGQVAFERR

SEQ ID NO: 1812 - protein, 274 aa, Mycoplasma penetrans HF-2
MENEKKINWFIGHMKRTVDILESKKKNIDFVIEVVDARLPYGSSNLELLSVFENKPIIKIALKSDLVKKDHYQNGFFYASIKNPADRKKIINYIDSCLKEKKDRLIKKGLRNPTFIGIVVGLPNIGKSSLINYLSNKKSLNVENRPGVTRKTENIKISDSLFLIDTPGVFLKNVTDYQMGLSLALINCVKREVVDKKDLVLFLISKFIENNNLNSFNETLNTNINSNNPSEVLSELLKVLKIDEDNNQKISVFYDFVFKKTIDNPKISLFLEKI

SEQ ID NO: 1813 - protein, 457 aa, Staphylococcus aureus subsp. aureus MW2
MAIAVLLNRMFRMEHNPLFEYIYQQKEDIDACYFIIPEEDMSSASDLKAQFYRGTLQRFYQSLHAEKLTPYVMSYDDIISFCKENNISEVVTAGDIMSYHLEEYDILHQRSLFNEARIAVTLIRGNHYFKASKTMNQQGEPYKVFTSFYKKWRPYLRHRDVYHYDLKSFEDFVIASPDDLVFDDIAFGSSQIIEQNKWQHFLDQDIQNYESGRDYLPEVLTSQLSVALAYGLLDIIEIFNDLLARYDEDEANYEAFIRELIFREFYYVLMTQYPETSYQAFKPKYRQIKWSQNEADFNAWCEGQTGFPIIDAAIMELTQTGFMHNRMRMVVSQFLTKDLFIDWTWGEKFFRKHLIDYDAASNIHGWQWSASTGTDAVPYFRMFNPIRQSERFDAKALYIKTYLPIFNQIDAKYLHDTQRNESNLFEQGIELGSHYPRQIVDHQEKRTQVLATFKALD

SEQ ID NO: 1814 - protein, 335 aa, Shewanella oneidensis MR-1
MSKRTITVIPGDGIGPSIIDSALKILDKAGCDFEYEFADAGLAALEKQGELLPQRTLELIEKNRITLKGPLTTPVGEGFTSINVTLRKKFGLYANVRPVLSFKGTQARYENIDIITVRENTEGMYSGHGQKVSEDGSTAEATSIVTRQGAEQIATFAYELARKESRKKVTIVHKANIMKSTSGLFLKVAREVSLRYPDIKTEEMIVDATCMKLVMNPENFDVIVTTNLFGDILSDLCAGLVGGLGMAPGANIGRDAAIFEAVHGSAPDIAGKNLANPTSVILASIQMLEYLGMADKAAPIRKAVSAVIEEGDRTTRDLGGTHGTTDFTQAVLDRL

SEQ ID NO: 1815 - protein, 176 aa, Chorispora bungeana
KKFRETRHPIYRGVRQRNSGKWVCELREPNKKTRIWLGTFQTAEMAARAHDVAAIALRGRSACLNFADSAWRLRIPESTCAKEIQKAAAGAALNFQDEMCHMTTDAHGLDMEETLVEAIYTPEQSQDAFYMDEEAMLGMSSLLDNMAEGMLLPSPSVQWNYNFDVEGDDDMSLWSY

SEQ ID NO: 1816 - protein, 143 aa, Glycine max
MAMAFKMATTGMWVTDECKNSFMEMKWKKVHRYIVFKIDEKSRLVTVDKVGGPGESYGDLAASLPDDDCRYAVFDFDFVTVDNCRKSKIFFIAWSPTASRIRAKMLYATSKDGLRRALDGISYEVQATDPAEMGFDVIQDRAK

SEQ ID NO: 1817 - protein, 497 aa, Vibrio vulnificus CMCP6
MAQHASSVIVCNGYKDREYIRLALIGEKLGHKVFIVLEKMSELDLVLREAKSLGVTPRLGIRIRLASQGAGKWQASGGEKSKFGLSASQVLNVISRLKKENQLDTLQLVHFHLGSQMANIRDVRNGVNESARFYCELRTLGANITYFDVGGGLAIDYDGTRSQSSNSMNYGLVEYARNIVNTVGDVCKDYKQPMPVIISESGRSLTAHHAVLISNVIGTETYKPETVTEPEEDFPLLLNNMWRSWLNLHNGTDARALIEIYNDTQSDLAEVHSQFATGVLTLEHRAWAEQTSLRIYYELNRLMSTKNRFHRPILDELSERLADKFFVNFSLFQSLPDSWGIDQVFPVLPLSGLQNAADRRAVMLDITCDSDGAIDAYVDGQGIESTLPVPAWNEDEPYLMGFFLVGAYQEILGDMHNLFGDTHSVVVNVGDQGEINIDFINEGDTVEDMMRYVHIDVDQIRKNYHSLVSQRVDQEEQQQILAELEQGLSGYTYLEDF

SEQ ID NO: 1818 - protein, 347 aa, Streptococcus agalactiae 2603V/R
MFVKKGLFVFLLLCILSMWLMIFGVAFYYFGSLHQSLTSRIIYQFVLTVLLTTTAWFMGAYFLAFEGHFKTVFQFQEADGKQIVNCLFQLCFALYAVVMLIGSIIDRVQTKRLLLAVVSWLFLVYTPLAYLIWNSEGVFAKMGVLDFSGGMIVHLSAGLSSYILAHVIGKSEHQHNKVKNDSLFLGMILITFGWFGFNMGPVGEWNSQAIMILLNTIFAIIGGGLAWTLAAKWNGEEEKTGSLLNGIIVGLVTSTAGVGYLLTWQLLAVTFFASLFTYFVTDYVAKAFAIDDVVSSFGMNGIGGLLGSLGVGLFKLSHMPVQLLALATTILLSIIMTYIISKAIFRK

SEQ ID NO: 1819 - protein, 175 aa, Chorispora bungeana
KKFRETRHPIYRGVRLRNSGKWVCEVREPNKKSRIWLGTFLTAEIAARAHDVAAIALRGKSACLNFADSAWRLRIPETTCPKDIQKAAAEAAVAFQAEINDTTKGHGLDVEETIVEAIFTEENSDGSYMDEEESMFGVPTLLASMAEGVLLPPPSVQFEYNYDFDGDTDVSLWSY

SEQ ID NO: 1820 - protein, 286 aa, Thermotoga maritima MSB8
MQVPKVTLNNGVEMPILGYGVFQIPPEKTEECVYEAIKVGYRLIDTAASYMNEEGVGRAIKRAIDEGIVRREELFVTTKLWVSDVGYESTKKAFEKSLKKLQLEYIDLYLIHQPFGDVHCAWKAMEEMYKDGLVRAIGVSNFYPDRLMDLMVHHEIVPAVNQIEIHPFYQRQEEIEFMRNYNIQPEAWGPFAEGRKNIFQNGVLRSIAEKYGKTVAQVILRWLTQKGIVAIPKTVRRERMKENISIFDFELTQEDMEKIATLDEGQSAFFSHRDPEVVKWICSLKR

SEQ ID NO: 1821 - protein, 314 aa, Aspergillus flavus
METPFAAPWRQFVEDLGQTPCLEGKDLNSVLAGWGQLAGTLATRYGFPPPDESVTTEDVQLDGLWLRCYTPPNATGQEPVGLYFHGGGWVMGGVKEEDGFCRVISRQCQMRLVSVEYRKAPETRYPGALNDGVSAALWALSRYENQPLVLMGTSAGGNLAFGTALRLIDQDMADKVSGVVALAPITVHPDAVPDHLKEQYTAYEENAELTVNSRAAMQVFFDCYKAPVDDVYTSCILHPKLHALPKVYIAELGLDTLRDDARLMKGALDTAKVPVMYDAYPGYPHCSFMFPFKSLGEHQKAFLEGVAKAVRWMS

SEQ ID NO: 1822 - protein, 152 aa, Picea glauca
MAMDPSLITVQHLLGVPDDLEKLLNAPTHSYMRDTKAMASTPVDVKEYPNSYVFIIDMPGLKSNDIKVQVEDENVLNISGERKRNEKDEEGEVKYIRMERRVGKFMRKFTLPADCNLEAISAACQDGVLTVTVPKLPPPEPKKPKTIEVKIG

SEQ ID NO: 1823 - protein, 414 aa, Thermoplasma acidophilum
MCMDRAICGNFYYGGKFDYLEVIVSDGKIAGIKKDAGNVPKTNYDGAILPAATDIHVHFRTPGETEKEDFGSGSLSAIYGGTTYVMDMPNNRFPITDYNAFGDKLGSIDSTSFADFSLYSMETGKNAMLLDRRSIGLKVYLGGSTNSTGTEVIEEGDIRKINEMNYPVVFHGESERCLKTHQMEEKNLRDHNLARPIDCEIEAAKYVSGLDIKTKIMAHVSSPDVTGNFLREVTPHHLLLNDEMPLGSFGKVNPPLRDSRTQKRLLDDYISGKFDILSSDHAPHTEDDKREFEFAKSGIIGVETRVPLFLALAQKKIVPLDVLYRTAIENPPSIFGIKKGKIEIGYDADFMVIDFTSMKRINDNRLHSKFPVSPFNGMDAIFPSHVIMRGNVVIDRYEDISDPMGVFIPKPQKE

SEQ ID NO: 1824 - protein, 174 aa, Triticum aestivum
  misc_feature (29)..(29): Xaa can be any naturally occurring amino acid
MAPAVMASSATTVAPFQGLKSTAGLPVSXRSSASLGSVSNGGRIRCMQVWPIEGIKKFETLSYLPPLSTEALLKQVDYLIRSKWVPCLEFSKVGFVFREHNSSPGYYDGRYWTMWKLPMFGCTDATQVLNEVEEVKKEYPDAYVRVIGFDNLRQVQCVSFIAFRPPGCEESGKA

SEQ ID NO: 1825 - protein, 386 aa, Aspergillus flavus
MTGLDMETIFAKIKEEYARTDDVGKRKIQGHIRELQVGFYSDWDVVMRLSSGPLQVALAKVGIDLGIFRSLKESDTPITLAEFVKKTGASPRLLGRILRTQAAFGLIKETGPQEYTSSAFTDVFANPAAAGAVVQLFDISGPCTQILPDFLAERHYQDITSNKDCVFQKAFDSELTMFEWMPQHPKHMESLGHLMALERPVSWVDHFPVLEELGDFPAPDKVLMVDIGGGFGQQSKALRAKFPNLPGRVIVQDIPQTLTNAQPAAGVEFMEHNFFEPQPIRNAKFYYLRHVFHDWPDEQCVLILKQIIPAMGPESQILIDEMVIPSTGVPWQAAFTDLLMMNSLGGVERTRAEWDDLMEQAGLQIIQSKVYDSKEQAILVAVPKRT

SEQ ID NO: 1826 - protein, 147 aa, Zea mays
MDASAATARRKRKRPDADNTGDATAAAAAAPAAVDEASDAEVEEFYAILRRIRDASRRLCGAGARPAPRAPAWRPSFSWEDFATPAPGAPAPETPTPGAAQEPAQPRPDEPVAVVRATAPSPRAGLDLNAEPEPEAPATPRSARVQA

SEQ ID NO: 1827 - protein, 116 aa, Neurospora crassa
MTDAPASAPVVKKNTAAESKGKKADGKPRFEVKKWNAVALWAWDIVVDNCAICRNHIMDLCIECQANQSSATSEECTVAWGICNHAFHFHCISRWLKARQVCPLDNRDWEFQKYGR

SEQ ID NO: 1828 - protein, 318 aa, Zea mays
  misc_feature (20)..(20): Xaa can be any naturally occurring amino acid
  misc_feature (126)..(126): Xaa can be any naturally occurring amino acid
  misc_feature (198)..(198): Xaa can be any naturally occurring amino acid
  misc_feature (289)..(289): Xaa can be any naturally occurring amino acid
  misc_feature (312)..(312): Xaa can be any naturally occurring amino acid
MSTTKVKRRVGKYELGRTRXTGEAVAIKILDKEKVLKHKMVEQIKREISTMKLIKHPNVVRIYEVMGSKTKIYIVLEFATGGELFDTIVNHGRMREDEARRYFQQLINAVDYCHSRGVYHRDLKPXNLLLDSYGNLKVSDFGLSALSQQIKDDGLLHTTCGTPNYVAPEVLEDQGYDGAMADLWSCGVILFVLLAGYXNAEFTFPPWTSFPAKRLLTRILDPNPMTRITIPEILEDEWFKKGYKRPEFDEQYDTTLDDVDAVFNDSEEHHVTEKKEEEPVALNAFELIXSMSAGLNLGNLFDSEQEFKRETXFTSKVP

SEQ ID NO: 1829 - protein, 430 aa, Streptococcus agalactiae NEM316
MYIIKNGLIIDPQSGFNQVSDMLIDQGKIKQISKEIDIKGIPIIDASNKIVAPGLVDIHVHFREPGQTHKENIHTGALSAAVGGFTTVLMMANTNPTISSPEIVKQVKESAAKEAIKIETVATITKSLNGKDLVNFEELLEAGVAGFSDDGIPLTDTKVLQEAMNLARKHDVVLSLHEEDPSLNGVLGINEHIAQKIYHVCGASGLAEYSMIARDAMIAYQTQAKVHIQHLSSSESVEVVDFAQKLGANLTAEVTPQHFSKTENLLLTKGANAKLNPPLRLEKDRQALIDGLKSGVISIIASDHAPHHIMEKAADNISQAPSGMTGLETSLALGITYLVSTKELSMIDFLAKMTCNPAQLYGFDAGYLREGGPADIVIFDQAEERIIKAEFASKSSNSPFIGDKLKGVIHYTICNGEIVYQKDSHAATLV

SEQ ID NO: 1830 - protein, 281 aa, Lactococcus lactis subsp. lactis Il1403
MQRKLTLNDGNVIPQFGLGLYQLPEGTETQNIVKTALELGYRHLDTSHAYQNETSVGQAIQDSEISNSEIWITSKLWPSDYEQAPEAIERMLKRLKVKQIDLLLLHQQVGNYRKAWIALENAVKEGKVKSIGISNFDGERLVDLFNFADIKPSVIQVETHPYHQQVELQEFLKPYGTKIESWYPLGHGDKNLLEEKIFKKMAKKYNKTVAQIILRWHIQEGIIVFPRSTQKEHLAENINIFDFELSCSEIKEIRKLNKKQPYFTMTYEEQEKNFLSWKLED

SEQ ID NO: 1831 - protein, 112 aa, Bartonella sp. sh8200ga
ANEACLKMLQEIGSVERIPEFIARAKDKNDPFRLMGFGHRVYKNYDPRAKIMQKTCHEVLKELNIQDDPLLDIAIELEKIALNDEYFVEKKLYPNVDFYSGITLKALGFPTE

SEQ ID NO: 1832 - protein, 400 aa, Streptococcus pyogenes
HNLNKLVWRYGLTSAAAVLLAFGGGASSVKADSNVLSPKDREAKIKQFKEDLKKYPQTNQSQFWNKAWYGKSYFNEEEYLKSLKEFTEKRLSEIVELIEKGATQGPAGPEGKPGPKGDKGETGARGPRGERGETGLQGPKGEAGKDGAQGEKGEKGDRGEKGEAGIQGPKGEAGKDGAPGEKGEKGDRGETGAQGPVGPQGEKGETGAQGPAGPQGEAGKPGEQGPAGPQGEAGKPGEKAPEKSPEVTPTPETPEQPGEKAPEKSPEVTPTPEMPEQPGEKAPEKSPEVTPTPEMPEQPGEKAPEKSPEVTPTPEMPEQPGEKAPEKSPEVTPTPEMPEQPGEKTPEKSPEVTPTPEMPEQPGEKAPEKSKEVTPAPEKPADKEANQTPERRNGNMAKTP

SEQ ID NO: 1833 - protein, 124 aa, Triticum aestivum
  misc_feature (57)..(57): Xaa can be any naturally occurring amino acid
RGRGRGLSVFSLLPDVWGIKWRFPIMPVSRLNEEPTRMSTLIDLTCDSYGQIDKFIXNAETLPLHPLDPERGGCYYLAVLLSGAYQEALSNKHNLFGGPSIVWVEKSTDAATGFQLHTDWAQRD

SEQ ID NO: 1834 - protein, 109 aa, Glycine max
  misc_feature (63)..(63): Xaa can be any naturally occurring amino acid
  misc_feature (96)..(96): Xaa can be any naturally occurring amino acid
ASSMISSPAVTTVNRAGAGMVAPFTGLKSMAGYTTIKTNNDITFIAINGGRVQCMQEWPPIGXTKYEILYYLSDLDDAQLAMEIEYLLTKGWILYXEFNWEHCFMYREH

SEQ ID NO: 1835 - protein, 57 aa, Zea mays
MPFTASDICKILLAIILPPVGVFLERGCGADFFINILLTILGYIPGIIHALYIILKY

SEQ ID NO: 1836 - protein, 146 aa, Saccharomyces cerevisiae
MAGDSDNVSLPKATVQKMISEILDQDLMFTKDAREIIINSGIEFIMILSSMASEMADNEAKKTIAPEHVIKALEELEYNEFIPFLEEILLNFKGSQKVKETRDSKFKKSGLSEEELLRQQEELFRQSRSRLHHNSVSDPVKSEDSS

SEQ ID NO: 1837 - protein, 151 aa, Picea glauca
MAMDPLLNTVQQLLVVPDDLERILHAPTRSYMRDTEATASTPVDVKEYPNSYVFIVDMPGLKSNDIKVQVEDENILNISGERKRNEKEEGEVKYIRMERRVGKFMRKFSLPADCNLEAISAACQDGVLTVTVPKLPPPEPKKPKTIAVQIG

SEQ ID NO: 1838 - protein, 1128 aa, Bordetella pertussis Tohama I
MGKGNMKQVTGYCTLCRSRCGSVNHVENGRLVAVTPLAGHPTGGALCAKGRAAPEMMAESHRLLRPLRRTNPRGAADPGWREIEWSEALDEVAARLAVARRRDGAESVAFAVTTPSGTPMVDSFEWVERFVRVFGSPNLIYAVEVCGWHKDYAHALTFGRGIGVPDLEHTDTMLLWGHNPARTWLAQAARIAAARQRGARVVVVDPNREGSSQQADLWLRVRPGADGALALGAIRHLLHTGRFDHDFVARWSNGPYLVDGASGALLRAVDLWPDADPAARVVMQDGSPAASGRGADTARAELFGSWTLRLHDGRACEAVTVMHALRVAVERYTPDEVARLAWLDEAELAQFNAIFENAPRLSYHSWTGVGQHTNATQTDRAIATLYALTGACDRKGGNLWTVAPPYRAVNGYRELLSPVQRAKALGLDELPLGPPSLGWITARDFCRAVLQQDPYPVRTLVSFGSNLLVSQAETARNLEALQALDFHVHVDMSMNPTAMNADIVLPANMPWEREALKLGFEITQAAVEHVQLRPRMVEPAGESRADYEIVLELARRLGLRDAFFGADMDACWNHQLAPLGIDVQALRRQPEGIRFPQPFVHEKYKAVRDGQPVGFPTQDGRVQIHCAALRDIGQPALPVHVEPADTPARHAGAYPLVMSTAKSGWFVHSSHRYVASLRRKSPEPQVYLSVQAARARGIASGDWVRVRTPYGEVALRAKINADLHENVAIAEFGWWQGCEGLGRVDGAIVGPASSNINAIMTDRHRDPVSGSVPLRATVCDIVRDDARNRGSWSGAREFVLAQKRGIAHDVAEFRLLPCDAQALPDFLPGQHVIVSMPGGAARRAYSLTGPNREPAHLSIAVRRVRDGDGPAGVMSNALHELAEGARVLLSAPAGVFTPPLRTARPVILMASGIGITPFHGYLEALAQDAGPAPSVLLVHACRDGSSHPYGAELKRLAQRIGSVCTLTVYAEPASDDAPGRDYQQRGRLDFAWLPPATVAARPLVYLCGSPGFLAFCTDALAARGIPRFDIFSETFTSEKRVPATLAPQPIEIEAEQGGFTWDPSAGTLLDAAERAGLSLPSGCRVGQCESCAMHIVSGQVAHLIDFDGSADTCLTCQAVPITPLTLRR

SEQ ID NO: 1839 - protein, 433 aa, Sulfolobus solfataricus P2
MLCLFIFRRDLRLDDNTGLIKALEDCEKVIPAFILDPRQVGNENEYKSEFAINFMINSLNELNDELRKRGSRLYVYFGLAEEVIKNLLKDVDAVYLNEDYTPFSKMRDERIRKYCEDTGKIMKSFEDYLLTSKNDFKNYRNFTTFYNVVKNKQIKKPVQNNYTNYYKNSLGDEHELPPRQGERGGRKEGIKLIERARQINYDRKDFVAEDNRTFLSPHLKFGTLSIREVYYSLLDSQAIIRQLYWRDFYTLLAYYNERVFHEPLKREYNCIEWENNERLFQAWLEGKTGYPIIDAGMRQLNRTGDMPNRVRMLTAFFLVKVLIIDWRIGEKYFASKLIDYDPSVNNGNWQWIASVGTDYIFRVFDPWKQQVTYDPEAKYIKRWVDELESYDAEIIHNAYKYTLKSYPKPIVDWRIRVNLAKRLYEVCRKSKIK

SEQ ID NO: 1840 - protein, 501 aa, Suaeda liaotungensis
MSIPIPSRQLFIDGEWREPIKRNRLPIINPSTEETIGEIPAATAEDVEAAVSAARRALKRNKGRDWAATSGAHRARYLRAIAAKVSEKKDHFVKLETMDSGKPLDEAVLDIDDVSTCFEYFADQAEALDNKQKYPVKLPMDRFKSHVLRQPIGVVGLISPWNYPLLMATWKIAPALAAGCTAVLKPSELASVTCLEFGEVCNEVGLPPGVLNILTGLGPDAGAPLVSHPDVDKVAFTGSSATGSKVMGSAAQLVKPVTLELGGKSPIIVFEDVVDLDVAAEWTIFGVFWTNGQICSATSRLLVHESIAAEFVEKLVKWSKKIKISDPFEEGCRLGPVISKGQYDKIMKYISTAKSEGATILCGGSRPEHLKKGYFIEPTIVTDITTSMQIWKEEVFGPVLCVKTFSTEEEALELANDTEYGLAAAVFSKDLERCERVTKALEVGAVWVNCSQPCFCHAPWGGVKRSGFGRELGEWGIENYLNIKQVTSDISDEPWGWYKSP

SEQ ID NO: 1841 - protein, 274 aa, Arabidopsis thaliana
MANQTQISDKYILGRELGRGEFGITYLCTDRETREALACKSISKRKLRTAVDVEDVRREVTIMSTLPEHPNVVKLKATYEDNETVHLVMELCEGGELFGRIVARGHYTERAAATVARTIAEVVRMCHVNGVMHRDLKPENFLFANKKENSALKAIDFGLSVLFKPGERFTEIVGSPYYMAPEVLKRNYGPEVDVWSAGVILYILLCGVPPFWAETEQGVALAILRGVLDFKRDPWSQISESAKSLVKQMLEPDSTKRLTAQQVLDHPWIQNAKK

SEQ ID NO: 1842 - protein, 467 aa, Listeria monocytogenes str. 4b F2365
MTSVMWFRRDLRVNDNKALYHACKENDLLLLFQVNPAQFITGSPSHQAFFASVAHFKQEIDKTAHLQIMFGEPIECFQQLKDSLPSWDKVYFNRDETGYGAKRDEAAQAFFDEQKIEVQAFHDSYLHSAEEVKKSPTEYYKIFTPYYKKWREEIKETPFKVTLKHENIRKESLFLKYEEQFAEMTSDLPILDIGERAANTRLANFIKHDVADYDKARDFPELDKTSHLSRYLRTGEISIRTIWQSLQETEATEGRATFEKELCWRDFYNMIYVSFPNQKNEPIQENYRFIEWENNREYFKAWQEGKTGFPLVDAAMRQLKETGWMHNRLRMITASFLTKDLLIDWRFGEKYFQQMLIDYDPASNIGGWQWAASTGTDAVPYFRIFNPTTQSQKFDSTGKFIRKYVKELANLPDKYIHQPEKMSETEQKEHGLLLGKDYPFPIVDHKERRKLAIARYEFSKEHSRGNI

SEQ ID NO: 1843 - protein, 475 aa, Aspergillus nidulans FGSC A4
MLEDPSYAEIVRWGDDGDSFVVLECEKFTKTILPKHFKHSNFASFVRQLNKYDFHKVRQNNEENGQSPYGQNAWEFKHPEFRANSKESLDNIRRKAPAPRKQAQAHDDSVPTQQIDLLNQQIVAQQQQIQHISDRYAQMSVDHQLMLQEVLRVQKTVVNHENVIHQLVNYLVSIDARQKRDNKAGSFQAQVGASPSQVTPMDDGVSTPLQQASKLLSDMNAEVQFNLVPVESMGEPPKTGVVSTPTMETAPRRVAPQPAAAATNPALVYPKMNGEMEPVVYPVGATNGIDPMYGEHVNNVPYTVPPKQDMDDRRQFPENRKKSNHVDPGWMRSPRILLVEDDATCRQIGGKFLYSFSCEIDTALDGLEAVNKVQDGSKYDLILMDIIMPNLDGVSACHLIRQFDRTPIIAMTSNIRSDDIQLYFQHGMDDVLPKPFTRKSLLEMLEKHLVHLKTVPQGMEAPPTCDRSHVGTSLN

SEQ ID NO: 1844 - protein, 290 aa, Arabidopsis thaliana
MARCVGRCYVSPAFGESESHRLSERRFLKLSSSTNSDPAGSKSLKLRGKIHRRMSYFRPIMAKDESISSRSGETKQINGKQKNIVWHDCPVTKSDRQELIKQKGCVIWITGLSGSGKSSLACALSRALHNRGKLSYILDGDNVRHGLNSDLSFEADDRAENIRRVGEVAKLFADSGIICIASLISPYRIERAACRALLPQGDFIEVFMDVPLHVCEARDPKGLYKRARAGKIKGFTGVDDPYEAPLDCEVHIISNFSSSSSLCEMADIVVSYLDQNGYLKKHSTKSRNCM

SEQ ID NO: 1845 - protein, 340 aa, Streptomyces fradiae
MKALVFEAPERAVLTHRDIPAPAPGEALVRVAYNSVCGSDLSFYKGVWHGFTYPVVPGHEWSGSVVDVNGPRGADLVGRNVVGDLTCSCGTCAHCAAGTPTLCEDLGELGFTRDGACAEYMTVPVANLRPLPDTLPLRTACQVEPLAVALNAVDRLGVTPGEKVAVMGAGGIGLLLVQAVRLRGGTVTAVAEPVPERRAAALALGVPAAVGGDPGALVELTRSDPAAVPDVVLEASGYPTAVQEAVEAVRPGGRVGLVGYRIEEAAVMAPHHIVLKVLTVRASMGPGTRFEEAVDVLASGAVDVDALLSHEFALDDYAKALDVALRRADGNTRSYFNLRA

SEQ ID NO: 1846 - protein, 224 aa, Magnetospirillum magnetotacticum MS-1
MQGPYSMKFFIDTAEVAEIRELAATGLVDGVTTNPSLIAKSGRKILDVIAEICDIVPGPISAEVAATDFDTMLAEGRKLAALRPNVAVKVPLTLAGLKTCKVLADDGVKVNVTLCFSANQAILAAKAGAAFISPFVGRLDDIGQDGMDLIADIVSIYREYPAFRTEVLAASIRHPMHVTEAARLGAHVVTMPASVLRQMVQHPLTDKGLAAFMADWAKTGQSIL

SEQ ID NO: 1847 - protein, 504 aa, Sinorhizobium meliloti 1021
MLSNFIAPDSNDPRLRIKSRYQMLVDGKSVDAASGSTIDRVSPGHAGEVVGTWPEASADDVRKAVAAARKAFDAGPWPRMSGAERSRLMFKVADLILARQEELALIESLEVGKPIAQARGEIGFCADLWSYAAGQARALEGQTHNNIGDDRLGLVLREPVGVVGIITPWNFPFIIASERVPWAIGSGCTVVLKPSEFTSGTSIRLAELAREAGIPDGVFNVVTGYGDPAGQVLAEDPNVDMVAFTGSVRVGTKLGEIAARTVKRVGLELGGKGPQIVFADADLDAAADGIAYGVYHNAGQCCISGSRLLVQEGIRDALMERLLDISRKVAFGDPLNERTKIGAMISEAHAEKVHSYVTAGITSGAELLLGGERIGREAGLYYAPTVFAGVTPDMSIAREEIFGPVLSTLTFKTADEAVALANATEFGLSASVWSTNLETALQTIRRIRAGRCWINSVIDGTPELPIGGYKKSGLGRELGRYGFDEYSQFKGVHVTLGRPAPWFT

SEQ ID NO: 1848 - protein, 287 aa, Listeria monocytogenes str. 4b F2365
MTIQWFPGHMAKARREVTEKLKLVDVIFELVDARIPLSSSNPMLEEIIHQKRRVIILNKADTADEKTTKEWIDYFAEKGLPAVAVNAQEGKGLFKIEQAAEKLMAEKFDRLRSKGMKPRAIRAMILGIPNVGKSTLINRLAKKNIARTGNKPGVTKAQQWIKVGKTLELLDTPGILWPKFEDQEIGYKLALTGAIKDDLLQMEEIAGYGLRFLEKHYPDRLQNWLKVETVSEDPIETLAFIAEKRGLLDRYNDPDYSRAAETVVREIRQQKLGRMSFDFPNWEDEVE

SEQ ID NO: 1849 - protein, 328 aa, Glycyrrhiza echinata
MASSTSTTTSKEIDRELPPLLRVYKDGTVERFLGSSFVPPSPEDPETGVSTKDIVISENPTISARVYLPKLNNTTEKLPILVYYHGGAFCLESAFSFLHQRYLNIVASKANVLVVSIEYRLAPEHPLPAAYEDGWYALKWVTSHSTNNNKPTNADPWLIKHGDFNRFYIGGDTSGANIAHNAALRVGAEALPGGLRIAGVLSAFPLFWGSKPVLSEPVEGHEKSSPMQVWNFVYPDAPGGIDNPLINPLAPGAPNLATLGCPKMLVFVAGKDDLRDRGIWYYEAVKESGWKGDVELAQYEGEEHCFQIYHPETENSKDLIGRIASFLV

SEQ ID NO: 1850 - protein, 369 aa, Triticum aestivum
  misc_feature (77)..(77): Xaa can be any naturally occurring amino acid
  misc_feature (117)..(117): Xaa can be any naturally occurring amino acid
  misc_feature (146)..(146): Xaa can be any naturally occurring amino acid
  misc_feature (254)..(254): Xaa can be any naturally occurring amino acid
MGSTAADMAASADEEACMYALQLVSSSILPMTLKNAIELGLLETLVAAGGKLLTPAEVAAKLPSTANPAAADMVVSXSARPCGRVSRLPCHRKNGVVTARGGQGGRFSRRKGPRPGXKDLTPHGGGFSKSGLGFMSRDKFLLGNWXIFQEFVGDGGIPFNKAYGWSAFEYHGRNVGFNRVFDEGMRNHSIIITKKLLELYKGFEGLNTLVDVGGGVGATVAAITAHYPAIKGINFDLPHVISEAPPFPGVTHVXGGDMFQKVPSGDAILMKWILHDWSDEHCAMLLKNCYDALPAHGKVVLVECILPVNPDATPKAQGVFHVDMIMLAHNPGGRERYEREFEALAKGAGFAAMKTTYIYANAWAIEFTK

SEQ ID NO: 1851 - protein, 365 aa, Candida glabrata
MAVTKTIVVPPGDHVGQEITEEANKVLNAIQECRPDKVNFKFDHHLIGGAPIDATGVPLPDEALEASKKADAVLLGAVGGPKWGTGAVRPEQGLLKIRKELQLYANLRPCNFASDSLLDLSPLKPEIARGTDFVVVRELVGGIYFGERKEDEGDGVAWDSEKYSVPEVQRITRMAAFMALQHNPPLPIWSLDKANVLASSRLWRKTVEETIKNEFPQLTVQHQLIDSAAMILVKNPTHLNGIIITNNMFGDIISDEASVIPGSLGLLPSASLASLPDKNTAFGLYEPCHGSAPDLPKGKVNPVATILSAAMMLKLSLDLFEEGEIIEQAVKKVLDSGIRTADLKGTNSTTEVGDAVAKAVRELLA

SEQ ID NO: 1852 - protein, 171 aa, Aquifex aeolicus VF5
MLGSLIVNFKLFSAGGAIMEVFSRSFKNGEEIPKVYTCDGKDISPHIGWEDVPEGTKSFVLIMDDPDAPIGTFTHWVVYDIPSQTRELLEDFPKVPEVSGIKQGINDFGRVGYGGPCPPRGHGYHRYFFKVFALSVESLGLPPGASRKDVELKMNGKILAQAHIIGLYKRD

SEQ ID NO: 1853 - protein, 336 aa, Pseudomonas aeruginosa
MGRRYLSGAAGAIRRRGSTCHCRQRRMRAFLRGAGKSRCQIAALPGRSRPMSDYQETLYQGYGQRFSIDNMLHEVRTEHQHLVIFENARMGRVMALDGVIQTTEADEFIYHEMLTHVPILAHGAARRVLIIGGGDGGMLREVAKHKSVERITMVEIDGTVVDMCKEFLPNHSQGAFDDPRLNLVIDDGMRFVATTEERFDVIISDSTDPIGPGEVLFSENFYQACRRCLNEGGILVTQNGTPFMQLEEVRTTAARTDGLFADWHFYQAAVPTYIGGAMTFAWGSTHEGLRRLPLETLRQRFRDSGIATRYYNADIHLGAFALPQYVLQAIGKQDND

SEQ ID NO: 1854 - protein, 94 aa, Zea mays
FSGGLNPFLWGTLSFANLAGQKASSPWATMFNSFCLALKGSLNLKAARELPDSLATLNIKFNSTVKNGFTPLKALFYKTKPSKVTTIRTSPPFF

SEQ ID NO: 1855 - protein, 217 aa, Triticum aestivum
LILEIHPTKGNKSWSSTAVAAARQRGRPPPGRSSPSPRAPPSPSSSSIPMQQRRGRPSGTDGSDFSYRMVVDSRYQRVADGRSRLARLMLVQTLHQVAGGALLLLSLSKGTEINKFAVLSLAAGLLAILLGEFGRRRTVAVFLRLYTSLSSIAIAFSVTCIIRSDLFVKITKQNTAAITSYEMFDVVRVALGVLLQLVVIATTTRLLQNMSPPKRTS

SEQ ID NO: 1856 - protein, 217 aa, Ophioglossum pedunculosum
RSGLLKKAYELSVLCDAEVALIIFSGTGKLFEFASSSMKKILERYRKYGGGLHDNSIATRDAEYWRNEVMRMKEHIACLEESQRHLLGENLVSLSVKNLQKLEHQLEIGANRIRTRKTQILLEQIQELQKKEHFLHGENNILKTKLEQLSTRQVPSLGTLIYTSTVTTTSTTSAGAGVEDNAGGHDSMNAMQKMTLHSNFQPATSAQNTLQLGYYPD

SEQ ID NO: 1857 - protein, 189 aa, Glycine max
  misc_feature (124)..(124): Xaa can be any naturally occurring amino acid
  misc_feature (140)..(140): Xaa can be any naturally occurring amino acid
  misc_feature (154)..(154): Xaa can be any naturally occurring amino acid
MASSMISSPAVTTVNRAGAGMVAPFTGLKSMAGFPTRKTNNDITSIASNGGRVQCMQVWPPVGKKKWETLSYLPDLGDAQLAKEVEYLLRKGWIPCLEFELEHGFVYREHNRSPGYYDGRYWTXWKLPMFGCTDALRVLXELQEAKTAYPHGFXRISGFDDGVPSAMALIVSGVQPPGLLSERRYAKLW

SEQ ID NO: 1858 - protein, 162 aa, Shewanella oneidensis MR-1
MTSTIYRHNAIDIQGNPTPLTQYQGKVILIVNTASECGFTPQYKGLEALYQEYKARGFVVLGFPCNQFGAQEKANEQGIKSFCELNFGVSFPLFSKIEVNGEHTHPLYQYLKKAAPGMLGTERIKWNFTKFLINRQGEAVARFAPTTKPEDIRDKIESLLNK

SEQ ID NO: 1859 - protein, 488 aa, Arabidopsis thaliana
MESGGKTNRQLRKAICVSTDEKMKKKRSPSVIVIGGGMAGISAARTLQDASFQVVVLESRDRIGGRVHTDYSFGFPVDLGASWLHGVCKENPLAAVIGRLGLPLYRTSGDNSVLYDHDLESYALFDKAGNQVSQELVTKVGENFEHILEEICKVRDEQDEDMSIAQAFSIVFKRNPELRLEGLAHNVLQWYLCRMEGWFAADAETISAKCWDQEELLPGGHGLMVRGYRPVINTLSKGLDIRLSHRVTKISRRYSGVKVTTEKGDTFVADAAVIALPLGVLKSGMITFEPKLPQWKQEAINDLGVGIENKIILNFDNVFWPNVEFLGVVAETSYGCSYFLNLHKATSHPVLVYMPAGQLARDIEKNSDEAAANFAFSQLQKILPDASSPINYLVSRWGSDINSMGSYSYDIVNKPHDLYERLRVPLDNLFFAGEATSSSYPGSVHGAYSTGVLAAEDCRMRVLERYGELEHEMEEEAPASVPLLISRM

SEQ ID NO: 1860 - protein, 351 aa, Aspergillus nidulans FGSC A4
MPINNAAVRVSHLTLAIQDRPVTPPGPNEVLVQVISTGICGSDTHNWNNPNVSRELILGHESAGLRGLIVEIDSEVKDRHVGQRMAVEPGFACATRKCPDNQEDAFCLRGNPNTCANLKYCGLDPTDGTLQQYFTCKAHMAIPIPEEISWEEAGAIQPLAIAVQLARRAALSATAKVVGDGGCGPLGLLVIAIAKAYGVCKIVVFDIEQSRLDFALSYGEDIGVLSPKISENVEPLKFVFEFTSSVVREHNLGHGVDISVEASGADSSAQMALTILKPRGTCIQAGLGKRLTKPLFFLLIANELTLRGRSGSRRDVTRKRLSLYKVKSASEAVDYEDFSLDEGTGGVSGTV

SEQ ID NO: 1861 - protein, 89 aa, Zea mays
WSCLSSSSPLARLISRRGLAGAAYGHGSAKVPLWKDPVSPSKLKEEHFVLSSLSMWGVIFFCVLYFIVVIILSNFYYSIFYYFFFFLFF

SEQ ID NO: 1862 - protein, 422 aa, Thiobacillus sp.
MVTKQDVEAAYLLLLGRPAEPGAAEYWMENVYHTIDLVTGLMASDEFRINRLPRLVEAGLSLSDFAPAAAPKALADNGPPMQAALHRGIGQIEVVEINRPEALPGTVVVKVGASGICGTDLRAYRQDPNSQDLPHGHEFAGTIVEVGEGVSRDRIGKRVTADLFLNAMCGNCQFCISGHAYHCIDKALPFRSGGFAEYLRVRNAATFDLPDSIDDALGALVEPLAVSTHAIRLVGVQPGMIGVVIGAGTIGLCAIAAALHAGATNVFVVARHAFQGELARAIGATDILPDDIGSAINRIREVAPHGADFVIEAVGGGQATIDQATRFLAPRGRVGIVGETGPGIKVVEAYPALMKELTFLYSNCYGYLDGKHDFEVAIENLALDGERLRKLITHEFLIADAPLAFQTANNKKFSSVKVQLKP

SEQ ID NO: 1863 - protein, 450 aa, Salmonella typhimurium
MPTHLVWFRRDLRLQDNLAAAACRDASARVLALYISTPQWQAHDMAPRQAAFISAQLALQTALAEKGIPLLFHEVAFNASIETVKNVCRQHDVSHFYNYQYEFNERQRDRAVEKLPSVICEGFDDSVILAPGAMTGNHEMYKVFTPFKNAWLRLKEDIPPCVPAPKIRVSGLSTPLTPVSLNYPQQEFDALFPVEENAVIAQLRQFCAQADEYALRRDFPAVDGTSRLASLATGGLSPRQCLHRLLAQPQALDGGPGSVWLNELIWEFYRHLMTWYPALCKHQPFRWTKRVAWQENPHYFQAWQGETGYPIVDAAMRQLNATGMHNRLRMITASFLVKDLLIWRLGERYFMSQLIDGDLAANGGWQWAASTGTDAAPYFRFNPTTQGERFDRDGEFIRQLPALRDIPGKAIHEPWRWAKAGVVLDYPRPIVEHKQARATLSAYEAARKGA

SEQ ID NO: 1864 - protein, 1955 aa, Ustilago maydis 521
MSFHLDSFVNSPASADQAPAWQLHSSTDSYLEWDANPKSLIEQQPSSTTTSPPPSMSRLRSTSSTVATLAPGAQTPAEPPSTDSASVLSHNGHTTSPERSVSPSYFTKLYFHPPDRTTSATSPTITFTSAIEPSLVAHAQPSPLLPTDAQSASHLPSPARESHTGRRPSISAVGSSSTTSPLTTPLSPTLSSRSSAAGGGFFASLRPSSPGNLPISTSKPQDGDNLGKPRRPSSVFDHVGNVWERFGRKVHHTRTATSEHHSSSSSHTRRSASQASPPIGLTPESADPFDTARNSPSGSFISQASPSQSTTTDSECRTPATPGGEPPAQLSTPQPLPSAPAYTSVSALDSSVNAPQQEEAEELPYLAPESPRPQPQSFNTIGSPRIPSGQRSATSHRRTSSLLERVLIQVTDDNERFSVVDISGVDSADAIKERMFAKLHLFDADHSSFQLFRTEIGQSEATGPVVSDDALLVLCLQMGDDRGTLKFLVQQIAPPPNSTVRALPPPTSTIVSQRAINNIRRTSGTGSAPGQHLRTESQSSKSSLSDALVYPEMIGADAAHEGSNRNSGSSLTRSKAQTRRALPSAPPVDDLRSPTHSCISSTTQSAVQDRRSIASSGDGSANESWARHGASASDGAPSAIPTQRSSSVNANASAAQSSSSGSAGRHPSNLEDDRQRYDAEPGVNRSLHAPATGSSHWQERSDEGARESLRVQTTAQLPGLTLHNAKSMDDLHRPSQSASQPSTLTTQAEVRKQAGMDRDGRYPTPAIMRPSTAAPAGAGARESASSHRQYSSDALGSSRSPQEPTLGLDPRMLQRNRSAQAAIPSGQQLVNHGPTRMSSTPQIRSPPMQHVYLGQGQIDPRFNTQPPHSAHPMQAHPSNMVARPPYSAAPSFASQPAYQSQSFGQAALRPMGHGFVNEFGARAPAASVNFNTYHGHDPRMNASAMQGSLTPRPYSYYEQPSMHQQQPMYRPYAQPSLVTASPYRTREDPFTTRYFPASSSRQVSEFQMQAGRLEPGMTVQQTLRTQEAIWGHTSAGSPGQAYQSAHAHPPGPSYGPRDPRQPGQSNQYTGMQAYPNASAAPQMQQRPSYQGSAMPNLHHVPPPRPQSYPSAQPQPQPPRNAHDRHPAPPAGHSGPQMMPQSSGSSAGRAPMQPQQNQQLSQPSQPSQREQPGHAQAMPGSESHRRDPPVRTNASERSSGSSFSSQGSFQHGRPHNDDCNSRNSIEESFSAPTSARSSQSEAASAKPVNVEHRSSYADQERDLADDELEHVRPLPKLPHSSATTRTDAFKSSSCDASGATVGGSVRRSEDEDTLRAGEWAQLWRALDPKSDGTVSGTAISGSSGGDGDTVRAEPSTPGASRPQTKDGATLPISLEPPRIPSPSLAPEENGTVSSFGTFDDDETESGTWAQPLDSDVNAPRLPLRLDADSEALSDDHATLLPGQDTLLQASTRGTRGFSAASNSPKRPELRLTIDPAAGPTVMTWTASQASTNSPRASTSHLSSALNSGGITRSNSFARRDDDWAFRPPPEQLYENLDDFFPKHDLDKPLLDTTAGPESGLVSSPRAEASVPSVASVGAQQGLSQRSRHKKSIRLVAEDRKRILERADTRRAAQGAELSSGLVRRRSTKLWGTKVVEMTPGQELATPASATSAESPWSDTASTTGQPVFKWVKGDLIGKGTYGRVYLALNATTGEMIAVKQVELPRTASDREDSRQKGVVAALKSEIETLKDLDHPHIVSYLGFEETRQFLSIFLEYVPGGSVGSCLRKHGKFEESTIKSFLHQILEGLAYLHSKGILHRDLKADNILVDFEGTCKISDFGTVRRSDDIYGNVENMSLQGSIFWMAPEVVSLSKKGYSAKIDIWSLGCVVLEMFAGRRPWSDDEAVQAMFKIGAQRKAPPIPADVKLTKQAAHFLKNCFEIDPAKRPTAQRLLDHVFTVPVPGWQFSHSALCRSLHR

SEQ ID NO: 1865 - protein, 121 aa, Saccharomyces cerevisiae
MSNEVDRMDVDEDESQNIAQSSNQSAPVETKKKRFEIKKWTAVAFWSWDIAVDNCAICRNHIMEPCIECQPKAMTDTDNECVAAWGVCNHAFHLHCINKWIKTRDACPLDNQPWQLARCGR

SEQ ID NO: 1866 - protein, 169 aa, Rhizobium etli
LGRLVSIEVGKITSEGLGEVQEMIDICDFAVGLSRQLYGLTIATERSEHRMMESWHPLGAIGIISAFNFPVAVWSWNAALAMVCGNSTVWKPSEKTPLTALAVQALFEKALKRFVAEGGKAPANLSTLIIGGREVGEVLVDHPKIPLVSATGSTAMGRAVGPRLSQRFA

SEQ ID NO: 1867 - protein, 510 aa, Xanthomonas campestris pv. campestris str. ATCC 33913
MSADLLKALDLAPSNAGTYLGEGTWSQATGAGVLQPLNPTTNAVIADVQATTPQDYELIVARAQAAFKVWRTTPAPRRGEAVRLCGEALRAHKDALGSLVALEMGKSKPEGDGEVQEMIDIADFAVGQSRMLYGYTMHSERPGHRMYEQYQPLGLVGIISAFNFPVAVWAWNAFLAAICGDICIWKPSNKTPLTAIATMKICNAALKEAGFPDIFFLINDAGTSLSEKLVEDGRVPLISFTGSTQIGRVVAEKVARRLGRCLLELGGNNAIILDETADLKLAVPGIVFGAVGTAGQRCTTTRRLIVHESIYDNVLATLVKAYKQLDSKIGDPTDPANLMGPLNSRGAVEQFLESIAKAKAAGGTVEVGGTAIDRPGNFVLPAIVTGLKNSDAVVQHETFAPILYVMKYSTLDEAIDLQNGVPQGLSSSIFTQNLKAAEKFLSAAGSDCGIANVNIGTSGAEIGGAFGGEKETGGGRESGSDAWKVYMRRQTNTINYSDSLPLAQGIKFDL

SEQ ID NO: 1868 - protein, 497 aa, Arabidopsis thaliana
MDKKKNSFPDNLPEGTISELMQKQNNVQPSVIVIGSGISGLAAARNLSEASFKVTVLESRDRIGGRIHTDYSFGCPVDMGASWLHGVSDENPLAPIIRRLGLTLYRTSGDDSILYDHDLESYGLFDMHGNKIPPQLVTKVGDAFKRILEETEKIRDETANDMSVLQGISIVLDRNPELRQEGMAYEVLQWYLCRMEAWFAVDANLISLKCWDQDECLSGGHGLMVQGYEPVIRTIAKDLDIRLNHRVTKVVRTSNNKVIVAVEGGTNFVADAVIITVPIGVLRANLIQFEPELPQWKTSAISGLGVGNENKIALRFDRAFWPNVEFLGMVAPTSYACGYFLNLHKATGHPVLVYMAAGNLAQDLEKLSDEATANFVMLQLKKMFPDAPDPAQYLVTRWGTDPNTLGCYAYDVVGMPEDLYPRLGEPVDNIFFGGEAVNVEHQGSAHGAFLAGVSASQNCQRYIFERLGAWEKLKLVSLMGNSDILETATVPLQISRM

SEQ ID NO: 1869 - protein, 457 aa, Bordetella bronchiseptica RB50
MARPLDTLLANTLVFLEGQGLVPGSIGIADGRIAVIGSHGQDMPAARETIDCQGLWTLPGVIDPHVHFGFGSPETDFETESRNAALGGTTSVISFHRSADIRESFDAVRARAESQSCIDFGFHFGITSRLHVDTLDEISRRFGVSSYKLYMMYKGAAGLSKGFTDIDDGLLWGALNATRAIPGAVLGVHCENVEVIPWLRDPLRAAGRDDLAAWNEQSPDFLEAENVHRVCYFAGKTGTPVNIVHLSSREALREVRRHRHEGRAAPIYVETCPHYLFLDDRSPAGTYAKVNPPVRSAADIDAMWEGVCDGAITTIGSDHVPRKRATKDKDIWAASNGFPGTGMILPILLHEGYHRRQVPLETLMRVASGASARIYGMSAKGRIAVGNDADLVIVDPDLEKTVDPGELESHADYSPYEGMRLKGWPVRTLVRGRTVARDGRIADEARQTPGGRYLRRL

SEQ ID NO: 1870 - protein, 243 aa, Oryza sativa (japonica cultivar-group)
MMNALGLSVAATSTGSPFHDVCCYGAGIAGNIFALVLFISPLPTFKRIVRNGSTEQFSAMPYIYSLLNCLICLWYGLPFVSYGVVLVATVNSIGALFQLAYTATFIAFADAKNRVKVSSLLVMVFGVFALIVYVSLALFDHQTRQLFVGYLSVASLIFMFASPLSIINLVIRTKSVEYMPFYLSLSMFLMSVSFFAYGVLLHDFFIYIPNGIGTVLGVIQLVLYGYFRKGSREDSLPLLVTHT

SEQ ID NO: 1871 - protein, 431 aa, Glycine max
  misc_feature (111)..(111): Xaa can be any naturally occurring amino acid
  misc_feature (136)..(136): Xaa can be any naturally occurring amino acid
SQRKRDKTKGRCGRKKKALIDRCSTLNTQEEPQNSSFCRVQGTTGTSQAISSGSYTTTTTTTTTSSGSGSSSINSKFSVSSGGQPYPNGQILPTSNLRIFTFAELKAATRXNFRADTVLGEGGFGKVFKGWLEEKXPQRAGSGTVIAVKKLNSESLQGLEEWQSEVNFLGRLSHPNLVKLLGYCLEESELLLVYEFMQKGSLENHLFGRGSAVQPLPWDIRLKIAIGAARGLAFLHTSEKVIYRDFKASNILLDGSYNAKISDFGLAKLGPSASQSHVTTRVMGTHGYAAPEYVATGHLYVKSDVYGFGVVLVEILTGLRALDSNRPSGQHKLTEWVKPYLHDRRKLKGIMDSRLEGKFPSKAAFRIAQLSMKCLASEPKHRPSMKDVLENLERIQAANEKPVEPKFRSTHAASRQGHQAVHHRSPRQDGQ

SEQ ID NO: 1872 - protein, 120 aa, Triticum aestivum
  misc_feature (46)..(46): Xaa can be any naturally occurring amino acid
  misc_feature (93)..(93): Xaa can be any naturally occurring amino acid
MSDSEDHHLEYKADAGAFKTYPMQAVAIRKGGFLVIKNRPCKVGEXPTSDTGKHGHAKCHFVGLDIFNGKKLEDISASSHICDVPHVDRSEYXLIDISEAGFESPRTDNGCTMDDLKLPT

SEQ ID NO: 1873 - protein, 158 aa, Lycopersicon esculentum
MDLRLLGIDNTPLFHTLHHMMEAAGEDSDKSVNAPSRNYVRDAKAMAATPADVKEYPNSYVFVVDMPGLKSGDIKVQVEEDNVLLISGERKREEEKEGAKFIRMERRVGKFMRKFSLPENANTDAISAVCQDGVLTVTVQKLPPPEPKKPKTIEVKVA

SEQ ID NO: 1874 - protein, 317 aa, Desulfitobacterium hafniense DCB-2
FICLRHGYHGETVGALAVTDVEIFRDAYDPLTRRAHVVMSPDARQAARSESAADVATRALAELEALLRERAGQIAALIVEPLVQGAAGMAMYDPSYLEGARALCDRYRVHLIADEIAVGCGRTGTFFAWEQARGGDAVPAHAWPDFLCLSKGITGGYLPLSLVLSRPEIQRAFVADDIARSFLHSHSYTGNPLACRAALATLDLFESEDVLARNRERAQWLGTAMAGIAADPRVSHVRQRGMIWAADIDPQAAGANFAGRFHLAARERGVLARPIGHTLYVMPPYVFDAELANWLGEQLLDTLQAVLDPAEEARHAD

SEQ ID NO: 1875 - protein, 380 aa, Mycobacterium tuberculosis H37Rv
MSKKHTTLNASIIDTRRPTVAGADRHPGWHALRKIAARITTPLLPDDYLHLANPLWSARELRGRILGVRRETEDSATLFIKPGWGFSFDYQPGQYIGIGLLVDGRWRWRSYSLTSSPAASGSARMVTVTVKAMPEGFLSTHLVAGVKPGTIVRLAAPQGNFVLPDPAPPLILFLTAGSGITPVMSMLRTLVRRNQITDVVHLHSAPTAADVMFGAELAALAADHPGYRLSVRETRAQGRLDLTRIGQQVPDWRERQTWACGPEGVLNQADKVWSSAGASDRLHLERFAVSKTAPAGAGGTVTFARSGKSVAADAATSLMDAGEGAGVQLPFGCRMGICQSCVVDLVEGHVRDLRTGQRHEPGTRVQTCVSAASGDCVLDI

SEQ ID NO: 1876 - protein, 266 aa, Schizosaccharomyces pombe
MPANYQSVPQDDPSVPNLAQAPPAYSEYNESATENPAVDQFKNTTPVAECAKSIRMAFLRKVYAILTAQLFVTSLFGGIFYLHPAFSFWVQMHPWFLILNFFISLVVLFGLIMKPYSYPRNYIFLFLFTALEGLTLGTAITFFSARIILEAVFITLGVFVALTAFTFQSKWDFSRLGGFLYVSLWSLILTPLIFFFVPSTPFIDMAFAGFGTLVFCGYILFDTYNILHRYSPEEFIMSSLMLYLDFINLFIRILQILGMLQNNDNN

SEQ ID NO: 1877 - protein, 136 aa, Zea mays
MPMYSKSMNAAVRDVWASNFDEELSNLSAVLSRYPCICLDTEFPGAVHDSDMPRYMRGPRESYELVKRNVDDLKLLQVGIALSGPAGRFPIAWQFNIRGFDPALHPHAPASIAMLREQGMDFAMLNEFGIDPEDFA

SEQ ID NO: 1878 - protein, 491 aa, Pseudomonas syringae pv. tomato str. DC3000
MTTQPLNSHRVDPHTAQKFYIDGHWSAPLSPVSIAVVNPATEEVVAHVASGSAADVDRAVAAARAAFAGWSGTSPEVRAQVIGRIHELIIERKEELAQAISLEMGAAISSARAMQVPLAAEHVRVARDLLATYRFQTVEGGTAIEREPIGVCALITPWNWPLYQITAKVAPAIAAGCTVVLKPSELSPLSALLFAQLVHDAGLPPGVFNLVNGSGPEVGGAMAAHPDIDMISITGSNRAGALVAQAAAPTVKRVTQELGGKSPNILLPDADFANAVPPGVMAAFRNVGQSCSAPTRMIVPRNRLAEVEALAAQTAGTIVVGDPQLEHTVLGPIANEAQFHRVQAMINAGICEGAKLVCGGPGRVQGHEQGFYTRPTVFSEVDSSMRIAREEIFGPVLCLIAYDTIDEAVAIANDTVYGLGAHVQGQDLELARSVASRIRAGQVHLNYPSWNPMAPFGGYKRSGNGREYGVHGFEEYLETKAIVGFAPADLM

SEQ ID NO: 1879 - protein, 506 aa, Pseudomonas aeruginosa UCBPP-PA14
MIYAAPGTPGAVVTFKPRYGNYIGGEFVPPVKGQYFTNTSPVNGQPIAEFPRSTAEDIDKALDAAHAAADAWGRTSVQERSNILLKIADRIEQNLELLAVTETWDNGKAVRETLNADIPLAADHFRYFAGCIRAQEGSAAEINDSTVAYHIHEPLGVVGQIIPWNFPLLMAAWKLAPALAAGNCVVLKPAEQTPLGICVLLELIGDLLPPGVLNVVQGFGREAGEALATSKRIAKIAFTGSTPVGSHILKCAAENIIPSTVELGGKSPNIYFEDIMQAEPAFIEKAAEGLVLAFFNQGEVCTCPSRALVQESIYPAFMEEVLKKVRAIKRGDPLDTETMVGAQASQQQYEKILSYLDIAQQEGAEVLTGGSVEKLEGNLASGYYIQPTLLKGHNKMRVFQEEIFGPVVGVTTFKDEAEALAIANDTEYGLGAGLWTRDINRAYRMGRGIKAGRVWTNCYHLYPAHAAFGGYKKSGVGRETHKMMLDHYQQTKNLLVSYDIDPLGFF

SEQ ID NO: 1880 - protein, 64 aa, Triticum aestivum
TDDGYVTLLTESGNLKDALKLPPDNVLFGQIKTGFFYGKDLILFLMSPMGEKQICPFKEIGGGK

SEQ ID NO: 1881 - protein, 126 aa, Malus x domestica
EPMVIGHECAGIVDKVGSEVKHLVPGDRVAVEPGISCAHCQQCKGGRYNLCPDMKFFATPPVHGSLANQIVHPADLCFKLPENVSLEEGAMCEPLSVGVHACRRANVGPETTVLIVGAGPIGLVSV

SEQ ID NO: 1882 - protein, 140 aa, Triticum aestivum
  misc_feature (117)..(117): Xaa can be any naturally occurring amino acid
TLSLSRSSTSLKLDTTSEPSTGSQQPAAMDMSLEHSSSASSSSTTERGGTAWPWPPKRPAGRTKFRETRHPVFRGVRRRGNAGRWVCEVRVPGDRGTRLWLGTYFTAEAAARAHDAXMLMLRGRSAACLNFRDSAWLLSV

SEQ ID NO: 1883 - protein, 181 aa, Arabidopsis thaliana
MASSMLSSTAVVTSPAQATMVAPFTGLKSSASFPVTRKANNDITSITSNGGRVSCMKVWPPIGKKKFETLSYLPDLSDVELAKEVDYLLRNKWIPCVEFELEHGFVYREHGNTPGYYDGRYWTMWKLPLFGCTDSAQVLKEVEECKKEYPGAFIRIIGFDNTRQVQCISFIAYKPPSFTEA

SEQ ID NO: 1884 - protein, 105 aa, Brassica napus
MSAINITNVSVLDNPAPFVSPFQFEISYECLTSLQDDLEWKLVYVGSAEDETYDQTLESVLVGPVNVGNYRFVLQADPPDPSKIREEDIIGVTVLLLTCSYMGQE

SEQ ID NO: 1885 - protein, 159 aa, Triticum aestivum
  misc_feature (54)..(54): Xaa can be any naturally occurring amino acid
  misc_feature (73)..(73): Xaa can be any naturally occurring amino acid
  misc_feature (83)..(83): Xaa can be any naturally occurring amino acid
  misc_feature (96)..(96): Xaa can be any naturally occurring amino acid
  misc_feature (109)..(109): Xaa can be any naturally occurring amino acid
  misc_feature (136)..(136): Xaa can be any naturally occurring amino acid
MAPTVMASSATSVAPFQGLKSTAGLPVSRRSNGASLGSVSNGGRIRCMQCWPIXEGIKNSETLSYLPPLSTEXLLKQVDYLIXRSKWVPCLQFSKXGSSSREHNASPGXYYDGRYWAMWNCLFPEHRPTQVINEVXGVQEGYLTLCRINRHNSACVNTP

SEQ ID NO: 1886 - protein, 181 aa, Arabidopsis thaliana
MASSMLSSAAVVTSPAQATMVAPFTGLKSSAAFPVTRKTNKDITSITSNGGRVSCMKVWPPIGKKKFETLSYLPDLSDVELAKEVDYLLRNKWIPCVEFELEHGFVYREHGNTPGYYDGRYWTMWKLPLFGCTDSAQVLKEVEECKKEYPGAFIRIIGFDNTRQVQCISFIAYKPPSFTEA

SEQ ID NO: 1887 - protein, 1017 aa, Geobacter sulfurreducens PCA
MPILITALIYLIFFLSGATALVYEVVWVRKLSLVFGGSHLAVTTVLAVVMGGLALGSWLFGRRVRTTRNLLRLYGALEIGIAFFALLFIALLNLYSLMPAYSFESLTEHSHQLPRVALLTLRIVLAAIALIVPTTLLGGTLPVLAAFMVRGRRAVGRGVAYLYALNTFGAVAGCFGAGFYLLGRFGVSNTMAGAITVNVLLGIACFALQGPAARYLEAGEDEAPAPLSAVTLPEEKARIGLVVWGIGVSGFCALGYEVLWTRVLGIVIGTNVYGFTLMLAAFLTGIAAGSGAYGLWARRLRPPEEGGCPVSKLIGGFGVVQIVIGLSALLVTILIRDLPTRVFFLQDLFLSQSTDLFRARQFANFALVFSYLFIPAFFMGVAFPLAGTLDACRRRKVGHAVGEVLTCNTIGAILGTVVSGFVLIQVFGIERSLYLLATVNAGFGLLILARLLRGTPRRLATAGTVLAVVGVMAVAGTMPRIWDAKYFAIYRTNQPEVFRTPDLIAEAKRHTDVLYYAEGIQSIVSSIRIRGGYQAFLRNGRIEASDHNESLQNQYALGHLPMLLHRNPRKVLVIGAGSGITLGAVSLHPSVSEMTLAEVEPKVLGVTRSFAAYNHGVLGDRRLRVAFSDGRNYLATTGERYDVITADPIHPWLSGAGYNYTREYFELAAEHLRAGGIMCQWLPLYDLSADDLRSVVRTFRQAYRHVLVWMTQGDAMLIGSNAPILLSEDELAARIAVPAVAADLARVQMGSATDLLSYFVMGTAGADRFSRTGRINTDDNLYLEFSVPRSTGKSALPEVNVNALARHRESVLAYLDDSVPPADRLARENRWMRLDRAAALALEARAIFLGGRYDSPRFGLLVSELEGNYAAFAPWRFLRSEYLEEMASSPLPLDQLALALLDESGRRVVVNVAAVMSRVSRELTVVDFVDSDERVIIGQADINGRGRDGSAKRLAAEVMEAVRLAYNEELSGAEARGKPLPDQAEFVRRMREIIATMTGRQHGNPYPAQGRPIKESA

SEQ ID NO: 1888 - protein, 159 aa, Capsicum annuum
MSDEEHHFESKADAGASKTYPQQAGTIRKNGYIVIKGRPCKVVEVSTSKTGKHGHAKCHFVAIDIFNGKKLEDIVPSSHNCDVPHVNRTDYQLIDISEDGFVSLLTENGNTKDDLRLPTDDTLLSQVKGGFEEGKDLVLSVMSAMGEEQICAVKDIGKN

SEQ ID NO: 1889 - protein, 158 aa, Picea glauca
METTFYSILGVNKDSSSAEIRSAYRKLAMKWHPDKWSTDPSSSETAKLRFQQIQEAYSVLSDDTKRALYDAGMYEPSEDMDAFCDFLDELSSLIATVKVQSNKDDELLQLQEMFTKMLEEDWFSTDNFEAFKEISSQHSDDKPENGQDHEPYGSVDDL

SEQ ID NO: 1890 - protein, 477 aa, Bordetella pertussis Tohama I
MKQHFIDNASVPGSSGERIPVIDPSTGQEFDSIARGNAADIDLAVQAARRAYEGAWGRLSAAERGRLMLALSLKVLEHRDELTALESRDCGKPLKQARADVIAIARYFEYYGGAADKLHGETIPYQQGYTVLTLREPHGVTGHVVPWNYPLQIFGRSVGAALAAGNACVVKPAEDACLSLLRVAELAAETGFPAGALNIVTGYGHEAGDALTRHPGIDHISFTGSPRVGVLVTQTAAERHVPVTLELGGKSPQIVFADADLDALVPVAVNAIVQNAGQTCSAGSRLLVERGAYERVLERLGAAFAALRAGPAQSDLDCGPLIRKTQQERVRGFLDLARGDGIATVAQGRIVPEAPAEGYYQAPTLLRDVPVDHPLAQEEVFGPVLAAIPFDDEADAVRIANATEYGLAASVWTRDGGRQLRIARKVRSGQVFINNYGAGGGIELPFGGVKASGHGREKGFEALYGFTVLKTISIKHD

SEQ ID NO: 1891 - protein, 487 aa, Sinorhizobium meliloti 1021
MTFHAKFSGYADPALHAAGLYIGGKWQSGSGITVLDPSTGNLLAEVADASIEDAQRAVDAADAAAAGWRATPARQRSEILRRWYQLMTQHAEELATLIALENGKALADARGEVAYAAEFFRWYAEEATRIPGEFRHTPSGSHNILVDHEPIGIAVLITPWNFPAAMATRKIGPALAAGCTVILKPASETPLTAYAMARLGEEAGVPPGVVNVLTTSNPGGITNAMLADPRVRKLSFTGSTGVGRVLLAEAAKSVVSCSMELGGNAPFIVFDDADLEVALDGAMIAKMRNAGEACTAANRFYVQAGIHDAFVAGLTARMKSLKLGPGYDPETQCGPMITQNAVRKIDRLVSEALAAGARATTGGKPLTENGYFYPPTVLENVPVNASIAREEIFGPVAPVYKFESDDEAIRLANNTEYGLAAYIYSRDLKRAMKVGKRIETGMLGINRGLMSDPAAPFGGVKQSGLGREGGVTGILEFMEPKYFAVDY

SEQ ID NO: 1892 - protein, 294 aa, Glycine max
MAHANPMIFVVGILGNLVSFCCFLAPVPTFYRVCKKKTTEGFQSLPYVAALFTSMLWIFYAYIKTGEILLITINAFGCFIETVYLVIYITYCPKKARFFTFKMIFLFNVGVIFLVVLLTHVLAKERTARIELLGWICVVLSTSVFAAPLSIIKVVIRTKSVEFMPITLSLLLTVSAMMWMAYGILLRDIYVTLPNFVGITFGTIQIVLYLIYRKNKPVKDQKLPEHTDDVANDENVNTAVSGENRRANATGFVDIEIGEKTQVQEQADKTQDQQAANARDQTEHNNNSIITREG

SEQ ID NO: 1893 - protein, 507 aa, Petunia x hybrida
MVLSESNFLLCLISISIASVFFFLLKKTSRSYKLPPGPSGLPIVGNMFDLGDLPHIKMEGMRNQYGPVMWLKIGAINTLVIQSAQAATAFFKNHDANFLERVVVEVNRVCNYLQGSLALAPYGNYWRMLRRICSMELFVHSRINNSESIRRKSVDKMIQWIETHGKKEQGQGIEITRFVFLASFNMLGNLIMSKELAADPDSTTASEFFDAMMGQVEWSGTPNISDVFPLLRWLDIQGLRRKMKRDMGKGKEILSTFIKERIKEQENGRAKGTDFLDVLLAFEGKGKDEPAKLSEHEINIFILEMFLAGTETSSSTTEWALTELLRNPETMARVKAEIAEVVGPNKKFEESDIDKVPYMQAVVKETFRLHPPLPFLLPRKATQDTKFMGYDVPKGTQIFINAWAIGRDPECWHDPLDFIPERFIGSKIDFKGLNYELIPFGAGRRMCVGVPLGHRMVHFVLGTLLHEFNWELPHNMSSKSIDMTERLGTTVRKLEPLKVIPNKCKLS

SEQ ID NO: 1894 - protein, 499 aa, Escherichia coli
MTEPHVAVLSQVQQFLDRQHGLYIDGRPGPAQSEKRLAIFDPATGQEIASTADANEADVDNAVMSAWRAFVSRRWAGRLPAERERILLRFADLVEQHSEELAQLETLEQGKSIAISRAFEVGCTLNWMRYTAGLTTKIAGKTLDLSIPLPQGARYQAWTRKEPVGVVAGIVPWNFPLMIGMWKVMPALAAGCSIVIKPSETTPLTMLRVAELASEAGIPDGVFNVVTGSGAVCGAALTSHPHVAKISFTGSTATGKGIARTAADHLTRVTLELGGKNPAIVLKDADPQWVIEGLMTGSFLNQGQVCAASSRIYIEAPLFDTLVSGFEQAVKSLQVGPGMSPVAQINPLVSRAHCDKVCSFLDDAQAQQAELIRGSNGPAGEGYYVAPTLVVNPDAKLRLTREEVFGPVVNLVRVADGEEALQLANDTEYGLTASVWTQNLSQALEYSDRLQAGTVWVNSHTLIDANLPFGGMKQSGTGRDFGPDWLDGWCETKSVCVRY

SEQ ID NO: 1895 - protein, 510 aa, Petunia x hybrida
MVLDWCYFAWFSIFLVPFFFLVLSRKKSCSHRLPPGPPGWPIFGNLFDLGTLPHQTIAGMKLRYGPVVLLRIGSVKTIAILSAKVATEFFKNHDACFADRKIIDTMLVHNYNKSSLVLAPYGTYWRVLRRICTVEMFTNKRINETAHLRQKCIDSMLQWIDKEAKSMKKGSGIEVARFIFLASFNMMGNLMLSRDLVDPESKKASEFFTAMEGLMEWSGQPNISDIFPCLRWLDIQGLRQKAGRDMGKAIEVASTFVKERLKEHKEGEYKKDFLEVLLEFEGSGKDEPAKLSEHQINIFILEMFIAGSETSSSSVEWALAELLCNPEAMTRVKAEINEVVGSNRKFEESDIDNLHYMQAVVKETLRLHPPAPLLVPRRAIQDTSFMGYDISEDTQVFVNAWAIGRDPECWEDPWAFKPERFLNLSSKTTDFKGQNFEFIPFGAGRRMCAGLPLGNRMSHLLLGSLLHAFDWELPSNVTPKSMDMKERMGMTVRKLQPLQVVPIKNEHILY

SEQ ID NO: 1896 - protein, 205 aa, Arabidopsis thaliana
IQKIDDSTSRQVTFSKRRKGLIKKAKELAILCDAEVCLIIFSNTDKLYDFASSSVKSTIERFNTAKMEEQELMNPASEVKFWQREAETLRQELHSLQENYRQLTGVELNGLSVKELQNIESQLEMSLRGIRMKREQILTNEIKELTRKRNLVHHENLELSRKVQRIHQENVELYKKAYGTSNTNGLGHHELVDQFMNPMHRLGCS

SEQ ID NO: 1897 - protein, 203 aa, Methanosarcina acetivorans C2A
MQGLVLYMNRKDGAVFLVFLLAGVLLISGCVKNERAETPADEQSETSNTGKGDENMDIQIIKVFSSAFESNGTIPRKYTCNGENINPPLEFTDIPEGTESLVLIMDDPDAPMNPFTHWIVWNIEPVAKIEEDSIPGIEGINNFREIGYGGPCPPSGTHRFFFRVYALDRQLELKAGAGRKELESEMIGHIIAEGELMGKYGET

SEQ ID NO: 1898 - protein, 299 aa, Zea mays
CCFSFPTVLSSVTSDGFLQCLSDNIPVGLIYTQGSSNFTDVLVSSVRNPRLFTSATVRPLCIITPVDASHVQAAVRCGRASGVRLRVRSGGHDYEGLSYRSERPEVFGVVDLSNLRAITVSADDDERPVPPTAPSAWVDSGATLGELYYTVAKNNPELAFPAGICPTIGVGGHLSGGGIGMMMRRFGLSVDNVLDAKLVNASGDLVDRAAMGEDHFWAIRGGGGESFGVVVSWKVGLVKVPSTVTAFNIVKTVADQGAVDALTKWQDVAPGLPTDITIRVIIQGQRATFQSLYLGRGTE

SEQ ID NO: 1899 - protein, 334 aa, Thermus thermophilus HB27
MAYRICLIEGDGIGHEVIPAARRVLEATGLPLEFVEAEAGWETFERRGTSVPEETVEKILSCHATLFGAATSPTRKVPGFFGAIRYLRRRLDLYANVRPAKSRPVPGSRPGVDLVIVRENTEGLYVEQERRYLDVAIADAVISKKASERIGRAALRIAEGRPRKTLHIAHKANVLPLTQGLFLDTVKEVAKDFPLVNVQDIIVDNCAMQLVMRPERFDVIVTTNLLGDILSDLAAGLVGGLGLAPSGNIGDTTAVFEPVHGSAPDIAGKGIANPTAAILSAAMMLDYLGEKEAAKRVEKAVDLVLERGPRTPDLGGDATTEAFTEAVVEALKSL

SEQ ID NO: 1900 - protein, 104 aa, Zea mays
  misc_feature (2)..(2): Xaa can be any naturally occurring amino acid
  misc_feature (14)..(14): Xaa can be any naturally occurring amino acid
  misc_feature (98)..(98): Xaa can be any naturally occurring amino acid
AXDGCEKTTEGHTXKELEDMKKRLKEIEEEASALREMQAKVEKEMGAVQDSSGTSATQAEKEEVDARSIYVGNVDYACTPEEVQQHFQSCGTVNRVTXTDRQIG

SEQ ID NO: 1901 - protein, 109 aa, Oryza sativa (japonica cultivar-group); identical to SEQ ID NO: 366

SEQ ID NO: 1902 - protein, 230 aa, Triticum aestivum
  misc_feature (167)..(167): Xaa can be any naturally occurring amino acid
  misc_feature (182)..(182): Xaa can be any naturally occurring amino acid
MGERVKGTVKWFNVTKGFGFISPDDGGEDLFVHQSAIKSDGYRSLNENDAVEFEIITGDDGRTKASDVTAPGGGALSGGSRPGEGGGDRGGRGGYGGGGGGYGGGGGGYGGGGGGYGGGGGGYGGGGYGGGGGGGRGCYKCGEDGHISRDCPQGGGGGGGYGGGGYXGGGGGGRECYKCGEXGHISRDCPQGGGGGGYSVRVRARVRVSGIAFRAADRLSSEHNTLSMLQ

SEQ ID NO: 1903 - protein, 230 aa, Thermotoga maritima
MGSDKIHHHHHHMKIFLDTANLEEIKKGVEWGIVDGVTTNPTLISKEGAEFKQRVKEICDLVKGPVSAEVVSLDYEGMVREARELAQISEYVVIKIPMTPDGIKAVKTLSAEGIKTNVTLVFSPAQAILAAKAGATYVSPFVGRMDDLSNDGMRMLGEIVEIYNNYGFETEIIAASIRHPMHVVEAALMGVDIVTMPFAVLEKLFKHPMTDLGIERFMEDWKKYLENLKK

SEQ ID NO: 1904 - protein, 446 aa, Bacillus subtilis subsp. subtilis str. 168
MAYDMVIKGAKAVTPDGVIEADIVVQNGVIAEIGSDIEASGTEIIQADGKYVFPGVIDCHVHFNEPGREDWEGFETGSQMMAAGGCTTYFDMPLNCIPSTVTAEHLLAKAELGRQKSAVDFALWGGLVPGHIEDIRPMAEAGAIGFKAFLSKSGTDEFRSVDERTLLKGMAEIAAAGKILALHAESDAITSYLQMVLANKGKVDADAYAASRPEEAEVEAVYRTIQYAKVTGCPVHFVHISTAKAVRLIREAKQEGLDVSVETCPHYVLFSHDDLRQRGSVAKCAPPLRSRQSKETLIETLIAGDIDMVSSDHSPCRPSLKREDNMFLSWGGISGGQFTLLGMLELALEHQIPFETIAEWTAAAPAKRFGLQKKGRLEAGCDADFVLVSMEPYTVTRESMFAKHKKSIYEGHTFPCSISATYSKGRCVYNDGEKVTEIDGALVVPS

SEQ ID NO: 1905 - protein, 361 aa, Glycine max
MASQLLRRTFGSRILANPRAFSFSSAASTPIRATLFPGDGIGPEIAESVKQIFQAADVPIEWEEHYVGTEIDPRTQSFLTWESLESVRKNRVGLKGPMATPIGKGHRSLNLTLRKELNLYANVRPCYSLPGYKTRYDNVNLITIRENTEGEYSGLEHQVVRGVVESLKIITRQASLRVAEYAFHYAKAHGRERVSAIHKANIMQKTDGLFLKCCREVAEKYPEITYEEVVIDNCCMMLVKNPALFDVLVMPNLYGDIISDLCAGLIGGLGLTPSCNIGEGGIALAEAVHGSAPDIAGKNLANPTALLLSGVTMLRHLNLHDKAEQIQKAILNTIAEGKYRTADLGGSSKTTEFTKAIIDHL

SEQ ID NO: 1906 - protein, 381 aa, Haloarcula marismortui ATCC 43049
MSDDLKKGLEGVIVAESELSVIDGDAGKLVYRGYTIEDLAKGASYEEVLYLLWHGHLPNRDELSEFKQAMVDARGVDDDVISTVRQLAEADENPMAALRTAVSMLSAFDPAPEDAEPTDEMVNLETGRRITAKIPTIIAAFTRIRDGKEPVEPHDDLDHAANFLYMLNGEEPDDVLADVFDQALVLHADHGLNASTFSAITTASTLSDVHSAVTSAIGTLKGPLHGGANQDVMEMLKEVDDAESDPLDWVKNALDEGRRVSGFGHRVYNVKDPRAKILGERSKELGEAAGTLKWYEMSTTIEDYLMEEKGLAPNVDFYSASTYYQMGIPIDIYTPIFAMSRVGGWVAHVFEYIEDNRLIRPRARYVGKNTDETEFVPLDER

SEQ ID NO: 1907 - protein, 330 aa, Methanocaldococcus jannaschii
MLKESEDIEGIAIEGPWLEDDISLEEIIKKYYLKIGFQASHIGKAIKIWKHIEEKRKKGDEITVFFGYTSNIVSSGLREIIAYLVKHKKIDIIVTTAGGVEEDFIKCLKPFILGDWEVDGKMLREKGINRIGNIFVPNDRYIAFEEYMMEFFEEILNLQRETGKIITASEFCYKLGEFMDKKLKSKEKEKSILYWAYKNNIPIFCPAITDGSIGDMLYFFKKYNKDEELKIDVANDIVKLNDIAINSKETACIVLGGSLPKHSIINANLFREGTDYAIYVTTALPWDGSLSGAPPEEGVSWGKIGAKADYVEIWGDATIIFPLLVYCVMK

SEQ ID NO: 1908 - protein, 405 aa, Triticum aestivum
KTGCLLIKAVAVHLPPPGCGVDGVERPRAPPQPPAHHLFDETPLSSDPMAEASGDGSMEDRISALPDDLLIHVLSHLRSREAVQTCVLARRWRYLWRSVTCIDVSFEEFEDRAAANDLEREEMFKMFVNHLLILRERVDLKEFHLEYSLVVGVSRLSAKSDEANLWIRHALQYKAQTVKIGNHSEPLQLLPSVFTSTYLKRLHITNAQLILGFFDRLRKGCPALEYLFLSTCDIEDLDIFSDTLKVLILSDAIGFSFSFEHDAQVSISAPSLISLSVKECPSGARLPILKNMSSLETASVLLSEGDITTCDADGIRQFLGGLSGVRSLDFYYGDRQLEVKNNHGWCPTFNNLTNLTLDRWCMHADLYAMIVFLQNSPNLKKLTLKLNEPRYHNEVVSAVIGELEG

SEQ ID NO: 1909 - protein, 323 aa, Pyrococcus horikoshii OT3
MVKSVTDKIKFYEFEGGLSVFKKYGVPIREEDLEEIRKMDAILFGATTTPFDVPRYKSLIITLRKELDLYANLRIIPNFKLRKEIIIVRENSEGLYSGEGAYDSNKVVDFRIITRKGAERIAKFAVKLAKDRSTFLTFVHKANILESDRFFRKIVLDIARKEDVKVREEIVDSFTIKLVKDPWNLGIILSENMFGDILSDLATIHAGSIGIVPSGNYGEDIALFEPIHGSAPDIAGKGIANPIGAILSAAMMLDYLGLDGSIIWKAVGRYVRRGNLTPDMEGRATTLEVTNGIISEIYRLDEYEIDEVWRDEVRLGRILLEIS

SEQ ID NO: 1910 - protein, 107 aa, Hyacinthus orientalis
GDIISDLCAGLIGGLGLTPSCNIGEGGICLAEAVHGSAPDIAGKNLANPTALLLSSVMMLRHLQLNDKADRIQNAILKTIAEGKYRTGDLGGTSTTSEFTEALCDNL

SEQ ID NO: 1911 - protein, 361 aa, Aspergillus nidulans FGSC A4
MVQQMPPQGGSRKISFNVSDQYEIQDVIGEGAYGVVCSAIHKPSGQKVAIKKITPFDHSMFCLRTLREMKLLRYFNHENIISILDIQRPRNYESFNEVYLIQELMETDMHRVIRTQDLSDDHCQYFIYQTLRALKAMHSANVLHRDLKPSNLLLNANCDLKVCDFGLARSAASTDDNSGFMTEYVATRWYRAPEIMLTFKEYTKAIDVWSVGCILAEMLSGKPLFPGKDYHHQLTLILDVLGTPTMEDYYGIKSRRAREYIRSLPFKKKIPFKALFPKSNDLALDLLEKLLAFNPTKRITVEEALRHPYLEPYHDPDDEPTAPPIPEGFFDFDKNKDALSKEQLKSKYLAPIDSISYATIN

SEQ ID NO: 1912 - protein, 437 aa, Beta vulgaris subsp. vulgaris
SSNLDLRSELQELIPEQQERLKKIKKEFGSFQLGNINVDMVLGGMRGMTGLLWETSLLDPEEGIRFRGFSIPECQKLLPAASAGAEPLPEGLLWLLLTGKVPSKEQVDALSADLRKRASIPDHVYKTIDALPITAHPMTQFCTGVMALQTRSEFQKAYEKGIHKSKFWEPTYEDCLSLIAQVPVVAAYVYRRMYKNGQVIPLDDSLDYGGNFAHMLGFDSPQMLELMRLYVTIHSDHEGGNVSAHTGHLVGSPLSDPYLSFAAALNGLAGPLHGLANQEVLLWIKSVVDECGENISTEQLKDYVWKTLNSGKVVPGFGLGVLRKTDPRYTCQREFALKHLPDDPFFQLVSKLYEVVPPILLELGKVKNPWPNVDAHSGVLLNHYGLTEARYYTVLFGVSRSLGICSQLIWDRALGLPLERPKSVTMEWLEKFCKRRA

SEQ ID NO: 1913 - protein, 167 aa, Aspergillus nidulans FGSC A4
MPDASSELIDEIGIVKIFRCFSPDIETARICIKVPSTREGLIACRTLEMAGVRTLATTLFTFVQAALAAEVGCTYIAPYVNQLKVHFESGFVDPQKLLPLCVSAQNYYEAIGVRTQVLPASLTSTDEIFALAGAHHITIALSLLQQLSLPLYPRLCSTLNRRVQVPK

SEQ ID NO: 1914 - protein, 398 aa, Ustilago maydis 521
MIEDIVDTLSVPLLGACASHVSRPTLMPSLASRSGPPAASSSDPKTSSSSTEKVAKSVGSASPLRSSPNRPYALSDFEVVETLGTGTFGRVLLVRLKDRDVADRSAYFALKVLAKTDVIKLKQVSHINSERCILTKVDHPFLVNMIASFQDSKNCYMLMEYVVGGEIFSYLRRAGHFSADVARFYISTIVLAIEYLHSNKVVYRDLKPENLLIDSNGYTKITDFGFAKEVEDRTWTLCGTPEYLAPEIIQCSGHGSAVDWWSLGILLFEMLAGYPPFYDPNPILIYEKILAGNLVFPEEIDPLSRDLISSLLTADRSRRLGNLRGGANDVKNHPWFHGVDWKALQEGRILPPIVPYLGRPGDTSNFSKYEPARPSAMPGLYGADSGHHDLYADLFPDF

SEQ ID NO: 1915 - protein, 293 aa, Enterococcus faecium
MKGMERTMTIQWFPGHMAKARREVSEKMKYVDIVFELVDARLPLSSRNPMLDQIIQQKPRLVLLNKADLADPQQTKLWQEYFRKQGHLALAITAQESKGIKGLVPAAKEALKEKRARDAARGIKPRAIRAMVLGIPNVGKSTLMNRLVGKKIAQTGNKPGVTKGQQWLRLGNELELLDTPGILWPKFEDEEIGKKLALTGAIKDQLVHLDDLAIYGLDFFARYYSGRISDRYGLSIEQEEKLAPELLMDITAKRGYKEDYDRGSELVVHDIRQGKLGRYTLDRCEEMEQKSDD

SEQ ID NO: 1916 - protein, 208 aa, Helicosporidium sp. ex Simulium jonesii
MQCASLFRYKTPVIQANSVSCNAPPSLVHMPRPRPASSRVRLAPLSANAKPLETRTVGNSTNIRWHKASVAREDKERLLGQRGCVLWFTGLSASGKSTVATETERQLHERGHLTLLLDGDNVRHGLNCNLGFSAEDRTENIRRVGEVAKLVAESGVMALTSFISPYREDRDAVRERVGSGSFLEVFLAVPIELCEERDPKGLYKKARC

SEQ ID NO: 1917 - protein, 362 aa, Zygosaccharomyces rouxii
MSKNIVVLPGDHAGQEIAQEAIKVLEAISEVSPEAKFNFQHHLIGGAAIDATGSPLPDDALAAAKKADAVLLGAVGGPKWGTGSVRPEQGLLKIRKELQLYANLRPCNFASESLLDLSPLKPQHAKGTDFVVVRELVGGIYFGERKEDEGDGVAWDSEKYTKPEVQRLTRMAAFLALQHNPPLPIWSLDKANVLASSRLWRKTVEETIKNEFPQLKLNHQLIDSAAMILVKSPTQLNGIVLTSNLFGDIISDEASVIPGSLGLLPSASLASLPDTNEAFGLYEPCHGSAPDLPKGKVNPIAMILSAAMMLKLSLNLSKEGEAVEKAVKQVLDSGVRTGDLGGSNSTSEVGDAIAKAVKEILA

SEQ ID NO: 1918 - protein, 161 aa, Zea mays
MDGRMFGLETPLMVALQHLLDVPDGDAGAGGDKAGGGGPTRTYVRDARAMAVTPADVKELPGAYAFVVDMPGLGTGDIKVQVEDERVLVISGERRREEREDAKYLRMERRMGKFMRKFVLPDNADMDKISAVCRDGVLTVTVEKLPPPEPKKPKTIEVKVA

SEQ ID NO: 1919 - protein, 345 aa, Triticum aestivum
  misc_feature (324)..(324): Xaa can be any naturally occurring amino acid
  misc_feature (332)..(332): Xaa can be any naturally occurring amino acid
PLPASFPPPTAYSSKSRHHPTNATSPAHRIAHALPLPSVLRSHFTLADGPASTAAGSPDEIAKLFPCLYGQPSAAVVQSAEPVETKPLKIGVVLSGGQAPGGHNVICGIFDYLQERAKGSTMYGFKGGPAGVMKGKYVELTTDFVYPYRNQGGFDMICSGRDKIETPEQFQQAEDTVNRLDLDGLVVIGGDDSNTNACLLGEYFRGRNLKTRVIGCPKTIDGDLKCKEVPTSFGFDTACKIYSEMIGNVMTDARSTGKYYHFVRLMGRAASHITLECALQTHPNVALIGEEVAEKKETLKNVTDYITDVVCKRAELGYNYGSCXLYPEALIXFIPEIQKLIAELN

SEQ ID NO: 1920 - protein, 364 aa, Glycine max
MGKGGMSIDEHGEGKEENMAAWLVGMNTLKIQPFKLPTLGPHDVRVRMKAVGICGSDVHYLKTLRCAHFIVKEPMVIGHECAGIIEEVGSQVKSLVPGDRVAIEPGISCWHCNHCKHGRYNLCDDMKFFATPPVHGSLANQIVHPADLCFKLPDNVSLEEGAMCEPLSVGVHACRRANIGPETYVLIMGAGPIGLVTMLAARAFGAPKTVIVDVDDHRLSVAKSLGADDIVKVSTNIQDVAEEVVQIQKVMGAGIDVTFDCAGFDKTMSTALSATQPGGKVCLVGMGHSEMTVPLTPAAAREVDVVGVFRYMNTWPLCLEFLRSGKIDVKPLITHRFGFSQKEVEEAFETSARGGNAIKVMFNL

SEQ ID NO: 1921 - protein, 401 aa, Thermosynechococcus elongatus BP-1
MAVPAVEFPWEEQPMSAFATPITPAPIPDNISLTELIDKYFTAYNSARLREICQLLSQRVFKPEVTVGLSLSGAMTPTGLGISALAPLVRAGFVDYIISTGANLYHDIHYALGMDLYAAHPFVDDVQLRKESKIRIYDIIFDYDVLLETDAFLRQVLRSETFQRRMGTAEFHYHLGHYVRELEVQRGQPHSCLLATAYECGVPIYTSSPGDSSIGMNVAAIALEGSKLIIDPAIDVNETAAIAYFAREAAGGKGKSAALIIGGGSPKNFLLQTQPQIHEVLGLEERGHDYFIQITDARPDTGGLSGAVPSEAVSWGKVDPQGLRDTVVCYTDSTIALPILTAYCLNRCQPRPLKRLYDRRGEMVERLQQLYLQAQLQHKVKELPTEAPVATYPCGTPIRRP

SEQ ID NO: 1922 - protein, 496 aa, Crocosphaera watsonii WH 8501
MVSTRTKKDVPIWQPLKVIARSFSPYWIACIPLAAIITIVWNKAVVAESVELITAEGNSEAIAQLQGTLNAIWVLIAAILVIFMNAGFGMLETGFCRQKNAVNILSKNLIVFALATLAYWAIGYSLMFGGPENPFIGFGGWFLSGEPATYGLDPFPAGLPISVAFLFQAAFAGTAATIVSGAVAERIKFTDFIIFSLLLVGISYPITGHWVWTGNGWLGSIGFSDFAGSTVVHSVGGWAALMGAAILGPRMGKYVEGRPQAIPGHNMSIATLGCLILWIGWFGFNPGSQLAADEAVPYIAVTTNLAAAAGGVAATFVAWFKDGKPDLSMIINGILAGLVGITAGCDGVSYFGAVIIGAVAGVIVVYSVSMIDSLLKIDDPVGAVSVHLVNGIWGTLAVGLFNTESGLFYGGGFAQLGSQIVGIVAIGAFTAIFSGIVWTVLKSTMGIRVSPEEELEGLDVGEHGMEAYAGFLKETDTFSGSGSSTADEDVTTGAGI

SEQ ID NO: 1923 - protein, 10820 aa, Neurospora crassa
MIPRDQRRRSPERERRRRADRRQSREQLAAAALAAAAVGQTAAKTAGPSSTHRSRANSSTSSSAVTSSDEDSAPKNTGWGFRSFFSLASSKKVRKRRSFRKKNYSSSSIDSNLAYGGYQSRSSLESQRGARRRSGPQRKISQTYSQHSHHDKEYQQHNQDQYRDHPQYEQPQHEYQRPEYVPQDQYAHSDQTTPRPGQPTQHPHAQPEPYYRHQHQQYHQQQPHAYQHPAQPYHGQPEYDPELFTPDGRPNLARTTTDEEIIELGRKISDLARASNLRDLERAGKQRPSQLVGAATAISNFRRQNPRRNGRRGLAPSKSSKRDEQSDDDQGWDTASDSDSDSDSGDNAEEASASDSDLAYGSSPQYSDEKLSSSPAPAPAPPPPTISPQKPYIRNKAIDPSKFGPVNSLHGLVTPLNGFRPTEDVLPPRQSKPWLSRFENDPLPDYPTPTDELDTPTQMHYPIATPDLRRFDAVTSPTLVSGSPLITSRPVTVAIQAPKPRVPVSTRALEEHPMPRQRSADGRLMTADSALAKSMGNAAGKHEVIRDDTPPSNYRQHRSRAQSNVSAHPSHTSHHSHALSHTSRTSHTSQVPVHVQVPLPTTHDLEFDDWHDFEDRNTRLASDVPQFTDPAAAGVAATLIGTALFQDRYRRDDEEDRNLDPNHVLAEYKQRVQQEEEQRRKAEEAEKERLEKERQEREARAAAAIKREREAREAQEAAEREAREKKEAEERAAAVALELAAQRQREEREAREALEKMEREAEERAAAAAAAQQELEALEKARREAHEREVQEAIEKVRREAQEREVQEAIDKARREALERDAAAAERERQEREHLEKVRREAEDLAIAARRELETRETALEAVAKEARRLRDEADYREQYERRVREAREMQYKEERRMYDARYRADRENMIIDVEPRRRSTSRQTRDESPEEKRSNAGKETEREEHHRPKREPVTIINERDVPKDEPKPKVEEPTRSVSEKKRESMGDTLDPKPKKPSKEERRAKRAETLRLLAEMQKELELEKERARKLAELEAAEQRQEKPKDEEPRKSSQPAVLEPSKSPKDQVSHDSKAAPAPGTSLSKSPSGVIDPFQFQVPDDAFATPVLATPARPLTPQVYTVPEPDFSPPKRRQLTRALTDAELEIRERVTRRDSFEIQQRQEEIRRSRNASEQPTTKDADKATIPETDKETLIAEEPERERSRSHNRAGSRVRESEPLRDATEEPERARSWSRQYSYVREAEPTPDPQTEANKWYRDYVSSRREERLRSSSPARSVVDKYDDSVFGPPTPVIVTAEPTIITAEPSWATADPADDGKPKKGKYAEPDADVRIDHVILPRDLHRFLRPAEDHSSLHAPTGQPMFSSRDPSCERERPLLNLVLPTPAPTPTPERERRERARQAVRESEVEHEESRLAPVAVDESKKPNYILNARGEIEIIAPTPKDEDTESVKSDGWVEPVADTGLTHVVVDRSRQAAVEAIKRALQPKKERKASIAWGTLAGAVLQKVAEDRKAAAEQKAEVPAAEEKSLAPEVEEKVEVLPAPVVEEKQPEEQKPREAEPETKPADVAAPTKTEVQPDVELPRQSPHPDPEPHLEPHHEATPVPAITIDEPEGPKATEEPKYEEAKEELKEEEEQSALPEGESHEEKQNEATRQILDESASSPIKPKRKLPKSLAEPSIFSPYRPTFSDNFADVVCGEHPNPEPHADTYTWRREAMATQSSIGDEWESILRKAEIGEDETTTNPTGTFNPDNREPPDRLGKEFSFEVVERENSQTNPSDENARESEKASTEQNGVADRRPSNEFIEFLKNQTNNSTSDRKHDHHIIATTEMKGNGEDEYFLGNAGTHGAGAGSAEDSEAATASDSKDAEAQSLPRPNATQASMDSTPVAEYKKEEDEEEKLYGSNAGSDSAPEPTQLQHTDSRFIDPEVLVHRPFTPAIDPQYGDLLPLPPYPTLTGPGYRYLADLPSPLDFDLEQLPALPESRPSTPPPTSSSSGTAFKAAVAAMMGTQSLIRRQRGHTRSRSALDGTAPVRVPSQTAVPIQFRLMGKKRAGSVHSLPPSEAWGQSPASRPSSAHGDAAAASEGKFPVRSSRPRPTSWEGSMREIKPLYLVERNAATATAASVLAPVVDTEEALPPPESFELPEDDDLDLLPALPDSAPESDAGSPVVAPQMESLEKDVPSEAVLPALEDTFTPETVRLPVDEDLDLLPALPESDAGSPIVTPVNLSTDLPVDEDLKHAEIPSPASTEKALPAPETVELPVDKDLDLLPALPESPTIESAVPVSLPAVAPEVVEEVPAAEIPQVVEAPKEFEIPAPETVELPVDEDLDLLPALPESGLSSPTLREPASPVSVGEDDALSTPAEDVLPVPRSVNLPEDIKLPADEELDLLPALPDSVASSPTTDTVPVSLPISASDVAKDTEEMPKAVIGVPTTVAPEVLAPEAVRLPVDEDLDLLPALPDSLATSPTTEIMPSLPFVEEVVEETSKVVEREVSVPENIKLPVDEDLDLLPALPDSVATSPTTETTPSLPILASEEATHAPKEIEVAPETITLPADEDLDLLPALPASGNTSPERSTSPVLLEKAASPVIIPEPETVALPVDEDLDLLPALPESGPASPTKEHASLATSPVVAPATEKEVDTEVELVSEVSRGLEVPEPETISLPVDEDLDLLPALPESGPASPTKEHASLATSPVAAPTLLEEIEAEVELVPAVDDEIVKELVSMPKPKPETVSLPVDEDLDLLPALPESGPASPALEHVARSASPAVPVLEKETIPEARSEGVREIIPEPENVALPVDQDLDLLPALPESGPASPTKEHASLATSPVIEAVVEKEPVVEEVPEVIPKLLPLPVDQDLDLLPALPESSPASPTKEHASLAASPIIEAVVEKEPFVEVVPDYLPLPDNEDLDLLPALPESAPVSPIKEHASLAPSPITEVVVEKEPVVEVVPELLPLPTDQDLDLLPALPESAPVSPAKEFAFPVSSPTEIPQAVPDVVPVDISKTVPEVVPELLPLPTDQDLDLLPALPESGPSSPVQEEFAAPVAQPTDISVGTEVEHPSKDTEDVLSITIPEPESVPLPAESDDGLWALPSLPQSRAGSGYASPVTVDIPTEEVSSPVKATEETSELPVSINPETVRLPSDDGLWALPSLPVSHEGSGYASPGAAMPTLGVEPPMEDLKEYFPDHYDQEVVDEVSYKQPLKIETDLPLDSLPQLPADEDLDLLPALPDSRGSSPDLAVSLPVEEYQEVPQAEESEKQLDLSELPALPVDEDLELLPGLPESRNESPEPQVETVPAVIPEQAEEEKEKEKEQEQDLSKLPPLPADEDLDVLPVLPESRNESPEPEVSLPVNTPEQADLSKLPALPVDEDLDILPALPESRNDSPEPQPSLPKVISPEVLPLPTDEDLDLLPELPESRRSTPDQETSLPVAVPQSPIAKEAVKDITEVPVAEEDLSYLPALPVDEDLELLPALPDSPAAGNFPEEEETQTTWQPEEFTQPAWEETQPTQMSDISEEDFPVPAAVKGDEVSRDLADLPALPESRSGTPLSDLPALPESRSSSRSEDMETAPSLEDPSELPPLPESREDSPEPKSPLPDLGAQPAKESLAKQIAPSQPWNESETQDEPLPASNELIVGHVRRDSSEAAHPSDIYEKPSSHNQAKSPMLIGNNDPNEIDYKLAETIYEDMCDEDDASTVAASDAPSFLSGANAEQKEQIAKALAGDSEATSSLSPESSFRVLQYLKKRDAAMKQGQTYEEPEEVVPGPSSQYEDEEEQVPQEIEDALESIEKQSKKAKGVSFESSDTPTEKRDVPEDVPADHTTSDQSTPRQELRIGIPGPSSRVANLEAVNDEVENIPDVEAQKDELSKTSTDKDKHTESPSNQESSGEPQPANITQEDSILGGGLVAEPERQRPMRVASPENQWGTLGDLDDLDDEDDDDVSEYSPGGTNLKRHSLTRLPTFPGVTAFLGRNFRSNSAPSPSDVPVQDERNYYSSDEREMLGEEQQQQQEELSGDELEKRLERVKMEEEEEVEKVEGADESQTGPEKLAETEPEPTLEGVKGEPSTTEKKGKKKKQKKKRNKGKGKADVEPEAPLPTTQADLETTLAPETEEPKELELEAEPASKPKKSKKKKNKKNKSTAASMLKGPTISDTAKPTDGPGVDRHSTWPMVKSDAVPSEKKTAPGSESTEVPPPQGSTANENTTLPEEIPLPRSRDLSPCASEEPTETATIEREPEPEIPATKHDEATTVDERQTATNELDGNGSVTPTPQQHISDGHQGKPQGDAEQGVQTAPPESSNTTEPLTSGAEQPISPQADTPMDMQPAEDPVPVEAALEGSTQQGESQTDDKGKPEEEPKIKEQLATVSPDLVSPTSDTFTPRLLRRSYPKKEKGKAGKMSNPASPTMGAGWGIASPPAMSLDKALEAADPFADGEFERRMRTVSANREAERSAKIAEKEKLERALFLQRRSTFDVGDSPTSSHTSVVGSTHSSGAAETGSNAEERPIYALKRASTDRAEKKKKLAAEKKRSKKSDWPDAWPEEFDEEATMPQEPGHPSMWPELHGRDLHGRASPSPIRGRSGYRTPTPLGQHIEVGRASGQTGDDSANHVGVLQESDRRLSAGGNSVGPDSSRSRYNNMSDPFTIGGGPKDIPPPEPIPEVPSKPIPDVGSDTATPTSEANKELGGTVRPSGKKGRKRRNSSLAIATDKEEDVDDNNSEAEQGDLDTQPSGSAPGKKTRRNRRGRKGKDKSTPSSPSVDTEGTEDQEASDGDEEPSSSGSSQDANAGAAGDASGKKRKNRKKGSQASSGLMSPPLEPNAEVAQLHAQLAQLTDLVQQLVVEKTRNSSADQGRSRRNSSVTKGNPKIRRTSSGGGGGDGEAHYDSDGNSIHDEDEELDDDDDDDAETGAADETTKAKRFMGVPYRRGSKSKSDKGEKGDKAKDKHQQQVGEDPTSELEHAVLKTTPREEDEQTGNSPQIRDVTAADNERTQQELFAIDNVNVNVIKNESRDSEAGVEFALRQQVVIERQGDEHANEQSGAEPEEQLQQGRGGGRSGRGQTPGPVQVPAVSQQAGQEQGAPSDERLVEDEGRAQSGTDSRDGVRGLGAGGRGDFASAEAGHDQSRHDGHEEFGQAGLQEAEGVVGGWGDGSSQTRNGDGCGDGVDQSGDCVDHATEGVVGHDEEGVLGHDSYHVQATSELGSAVRDRVDFRIQQAEHDEESRVGNDPGSVEATVEHGLDGRALGRTQDEHGLGVQELQHDGQVPGPVEDTGADQPGTEHRSGLAGDGQHGNQSARESSAETRSVAGSAPAAEAGNDEASVDGHEPSRLTTTAGHGGAPRIRTGSGEGEAQDARPADVRYDVKVSLDINGHGYADSGFGVQQRRTGRAGAVETGIWVGVWIKLDSSPPFAALVGKEQDQQDDEDARAGRIHKEGQAPGVGGDAAGDEQTGFVRVVSGNGHQQAQQDGSDDLRDGHVQAQEEYKPRDPSPGHGLETGNWIVNAATTAVAVPGETGSQPGAQVENGQLQQGDDAGADQGQERQDSYAQPPRAGHSDADAHGIVGERALERVEAVELEQQPVPRPTDARGEAEQVADENGQSHVCAKHPVGQQDQCLPGETGKLTPGDNDQCQLDGADGRDGRALASQPSLESDDDYHHDDDRQEGKVKDVLQERGHPGHGEQPSILEQSETQRRALVPDAAASDTTAARDAEAGTSQLWTGRFPTGISTGNIIGSGVALPASDVIGCPSSSSAGGIGVSAGNVVRVPERGDTVVRETTKGSGDGEYDESAQTGDVSENKDGDEYRESQGLEGRVGDDGDGRGEEGEEGDEHERQGELESGAEGHEGGGGHGNVYEEGQEGEGQGGLEDALSETDGSENAVGGLGVKDGVEEVTVSPEEVELPASPEVNPEEEVELPCSSPSILLLSDAAGEQLDEAVIKPIERDFDQQLEKDNSLNPQEIGLPPSPPPAMSEIEPIEHIIISQQFQTDPSSHAVNPEDVQLPASPSPSAEVAESENEPIEQGFNQRSPRHAMNPEQEVWSTLSDAGDLTESEPAVEQAKQTTVEPLSPATTTADRDQDQNPDKVWIPPLSPHVPNRMSGISLVLIHMLQFIGQQSHIPLFTPEAAQHEEPGDLVLPTSEAATTNLPSSSSPLLPCRSSRSSMSGASEELPSETTSPNLVSTTTAATIATTTTTIAATATTSSAAAVNTASSQATEASTTTDEHAPSQRAAARSSFSSSSSSLRMTEPEEVELPPSPSSPAPPHHTAPRPEEVELPASPVTTVTVNVNLNEAHHHHQFAQDIDVDNTKPKGDQHVEDDPKSDSELSLGQHADQRGQHPISEIRPTDIRLPLSPKVTPEGVVELPASPDSESTPIIIDEQLQLQPLHSSHGDDEQQLSSQSPPPKVTTTADTHAQPSSSLESPAVLMAVPSSLDMPPPPEDIELPPSPTDGVEHREEKPIVAEIHERVKSPVSGHQDVEIPTSREHSPAHSPAVEVSKSEVPTAAAEPEVSEVEDLASQSKQKTLAEELEEFDGSGSPSPEVDNRDAELVSFTGLTKDAELSSAHSSPMDAPTDVELPASPSPKPETDDQDKDLPITTESHEAIANVTIPTWTSPTVSPKVKPENIELPPSPQRPQLLPSPNIVPGYQFSPEPISDDERLPLSPDDEFEDDDDDDGSPVDVEQYERSFSDDPQEEGFASSPDEATVDHVEVQHSPPSQGSPAFASSSPRISPAQVELPASPVESPNFAPASSSPSPKSTPEDAVLSPALEAAMEFTPSSPVERSVPSTKDTTMFEERGVSSASASAPAPAPEEENVQFAPAPSSEVQHPASPKISSEDVGLPKSLLPEAEHEEMELPITAAAAQLPEDVELPMSPAETEPKIHELPITKEIPTAHELPTSTLPKISPEEVELPMSPEVEVPTPAHEVIQSLGDQSDNIHKVSSSPKIAPADIELPTSPENNVLDSPKTLLPGDSSLPESHLTEAQVEKDMDLSTAAEQDDQIVDEQSDNDLEVSTSHKIVPEEVELPRSPSSPVPVEGLDVNEIQHLHSSQIIPPHVQRADSTWGEAELEVELPSSPLTEIAHKEDELPASPVKEAATEEVEVPASPVKEAASKDIEVQKSPSPAAELDVTEIQHLHSSQIIPPHVQRAVSPAVIHEEVQSPTLPDVVPEEVELPASPVKEAALEDIEALRSPSPAAELDVTEIQHLHSSQILPPHIERAVSSNTVPEDVKAPASPSAETAPKEDVLPRSPSPGAELDVTEIQHLHSSQILPPHIQRADSTWGEVEPEEVELPKPPVEEIVHEEVHVPASFKVVSGEVENPASSPSSPKIAAEEMDIPRSPSPVDNLDVTELQHQHSTQIIPPHTQRSVLPTAQTQAVPEEIQLPASPLEQFTPEEVELPRSSSPVEAKLDIVEMQHEHSAQILPLYVQRADSTWGEVDPEDVDLPTGPLKEIMPAEAELPGSPSPVEDELDGAKLQAAHEEVELQASEPTSPKITPEEIEVPRSPSPFDESKITELQHLHSAQIIPRNIHYATSSSGSPKIIPEEVELPASPVEEVDVDELQRFHSSQIISPHIERSASPTIEEVVPEEVELPVSPVEQVDIEQLQHLHSRQIIPPHIQHPASPSPNAELLASPKVTPEEVELPASPELVPQDIELPASPIDEAEQAELPILTKESEASVDQQIDDLEEEEDARSAALELPSSPEVKHEVQPEEMELPLSPVLKPEEVDLPASPEVVPEEVELPVSPVDDLADVQHLPQPDDVPEEAVQENVNLEIPSSPVIAPEEVELPLSPKTAPEEVDVPASPVVEVEEQPATVSEPSERSINLEADIAPQEEIEPPFSPVAKPEDIQLPASPEVIPEDVELPLSPIVELEHQLPIEPVNFELPSSPKLKPEDLELPSSPEIIPEDVELPASPVVELADEQLPVEPEQSAQAIEVSEEDTKLPSTPIVKPEDLELPASPEVLAQDVELPPSPVTLSEDVELPPSPMVDLEHEQLSVEPVDLSDVQEQQVEEQLDKHTAPESSPVLLPKEVELPTSPATKSEQEPIEPVRQSFDSDLYYDAVDSKGKQPATDAEELTQQGDAAKTDSAQKWEMVDNVDDVDDLDSIDGADSEISENGLLTEAPTSKQPNQPKPTRKREEVAAAIERSEDDAPIIPRDPSSTTTTTGDGHHADILSREAEDNVDLRRSAGGSPVPTSTSIAAATAAAGAAALAAATVNELLTTTTKNDEPELSETVEVHPAVKGAINRGFDEYDYATALSPTTVGLGLIEDAPMDLYPTDGPSPKLLSASTFPLEEAGDDDGDYFNNVELPEGAIFEELPSEAEEPAHEHASHFTHDPPSEPEEHEVKKPRESIEETQGFETLFAPRTPMPYASTRETLVKESPKPTTPSPSAEQTRQPPKQAEPVRHKRIRSTEPARLSNEALAASLSPRAKSSSVRNSWPAFTTTGKAKALAASFLESSSVNRGSSPVTPRFPPSASSMHQQQPPVSVLLKEQTQRQSRELAANYLETFADDRKVRSKSRPRQPSFFGGHTAPNAANRVVPVPVDLDSLGETIVPEKEEPARPPSVSSVDSMGSPTTTHGQAQDQSMALEMAVSYLDDEGEDVGAVPMVVTPGVEMEITPSPESSPGLQPEEEEITREREAEVKVAQEPEPEPEPESEPAAEDDEHDASPEWGRGMSLPSVEIQPATPRAVPEEEEEEVESLFDIPVQHAHAPHEVETLSTVMEESEPTDEEEEPTSALAHTHEAPVVDKSEHDERPLSPEQLPEEYHDTPSVEIDVDELQRLHSRQVIPPNLQRQVPSSPKIAPEEIELPSSPELHETSRDTPADIDTAELQHSGQILPPNLQRYIAELQRLYPSQIVPPDLQRQVPSSPEVKLEEVELPSSPELHEASQDTPGDIHITELQQLHSRQIIPPKLQHPASSPPQIKPEEVELPASPALREEFQDTPADINITELQQLHSRQILPPNLHRHIAELQRLHSRQILPPNLERHIAELQRLHSGQIVPPNLQRQASPSPPPQVKPEEVELPSSPKIPEEPQDTPADINVVELQQLHSGQILPPNLQRYIAELQQLHSRQILPPSPQRQASPLPPPQIKPEEVELPSSPTLKPEDVELPSSPVEETIPVVATGLVAAGLALVSEVSKDNRDHSVEEEEEEENDSAPAPLQPVEDHNSRHVNDEFEDFYRPATPKVYPEEIELPASPEIIKPQDIELPVSPRVLTGEVELPAWPLNEPEDVQVVSDSKSEADEQDMTTPIVESHVAKPEEIELPSSPAIVPEDIDLPSSPRMVPEEVELLSSPANELEDAELSSDSDSEADEDSTPVVEAHATKPEEVELPSSPAIEARNFQLPSSSVEPENAELASDSDSESDEDSTPIVEAHVTKPEEAELPFSPQLVPEHIELPSSPVNEPEDAGFASDSDSSSEADATKLEEIKLPSSPAMVPEEIELPASPTVQPEQIEVPSTPEPEHEHEFHSEPEQETTIDPLLDSEAEYEDEEDDDYDPLADLLPSPDMSPAQHHERYERELPHPHPLMMHPVDYSAPQQHGYEESEEVHTPVYTEPVEFWHSPELRYHCSPELRSADHQEFASFPEVNPEDVQLPASPDYGAEEEEEEEDGGLSRDAPADDDEWESESGSESENYDRDDEHQVHQAQSVAIVAGTVAVLGGAALVANSLKKEERAEEQIDSENDEEREETESEDDEEKDRSEDEDDQVKPVTITRSDDKRGDSEDEESDGEPGERDGRSGDDLEDEEAGEEDVEDVHGGDNEGLPEPSLNRQDSETVPKAIREGAPMPWAMKSNRREDSSSPPVVEQRRFSFPDDIAEEEAFTVSRSNTAIEGGGDTNHGEGPAGSHATSDQSHQHQQTPSAPMSTISDYAHSYNSLPTLQEEDWATDDDRNRHDKDGDSPVNKANITGLFRYGTPIMDPNRDSVLTVAARGSPQMSRYAVFNEQYHQQQLERQAQIQEEDLRERGVDLRDFANSPSAGSDRTETGPSSPQRTTETPKVQEPVPESSEDNVEVVKEQHSSEKARKETPQDKPEQHIPKTLPGLGVALRPTGALRSVSDISKQLQSALTGQSPSPVARPIPSNTGVARLRTPEPLSATNNNNNLSLRPDSPGSSSISISSTSRSHTSTPPLRRMDKRATGNLRSLSSGSQQDAAAKSAFLGTLAEGEGGAPADAEGPGSRSSIGPVSPTTPSRAQPPRPRSDTSGSSPTAAPAAAPHQSQAPATPSPPRPNTSRATSANSVIPGAAAPALALGTSPVAHGGDDNTNNNNLVDKDKSKDKQQQQQQHKQAVATPRALSVTSATPVANEGRTRSKGSMDVPDVYDGLGEGRLGSPRSPARPPSLRKRHSAQLIDLEARLAQLMAENAALQKAKNDAEAELSQRNADLASILADKNVEIENLQREIQETQETCNRLEETYEGLKTSTSAIAVKHNETVRALEEQVRKAAEELAAAQGNHEQEYTKAIAEKDAQIAHLRAQLNAQTAQIRELQEQIESQQIARSPEPTATDDFLDLHDVDYFDQRLSQLCAHVQQWVLRFSKFSDMRHCRLTSEINDEKLIDRLDNAVLDGSDVDVYLADRVRRRDVLMSMTMTMIYEFVFTRFLFGMDRDQRQRLKYLEKQLSETGPVHAVRQWRAVTLTLLSQRRNYKAQRDRDTEAVVQAILDALDKILPPPSDKEKVILDQLRRVVREAVKLSIEMRTQRAEYIMLPPLQPEYDESGELVETVSFNAALMNERSGDVDVPSAEELERQRATVRVVLFPLVIRKGDDWGRGDDEVVVCPAQVLVQRPRKQRSAAGGRVVSGQKAREPVAQGMKGGDEMMGGMGSQV

SEQ ID NO: 1924 - protein, 459 aa, Zea mays
MMEAEKNGNILMQKYEVGKLLGQGTFAKVYHARNIETSQSVAIKVIDKDKIFKVGLMEQIKREISVMKLVRHPNIVQLYEVMATKSKIYFVLEYVKGGELFNKIAKGKLREDASRKYFQQLVSAVDFCHSRGVYHRDLKPENLLVDENGNLKISDFGLSALAESRRQDGLLHTTCGTPAYVAPEVISRKGYDGAKVDTWSCGVILFVLMAGYLPFQDSNLMEMYRKIGKADFKCPPWFPSDVRKLVSRILDPNPRTRMPITKIVECFWFKKGIDNKLIRKNIEMKGKVSALTDVNVVFSSTGIGSNNNKLVDVEQDVAKITNLNAFDIISLSEGFNLSGLFEESEKRKEARFTSSQSASTIISKLEDAATCSKMTIKKKEGGVLKMEGANEGRKGVLSIDAEIFEVTPAFHLVEIKKNNGDTLEYENLFKQDMKPALKDIVWAWQGESKDQQAKDHNQS

SEQ ID NO: 1925 - protein, 441 aa, Brassica napus
MVGAKPIENGSDGGASTGLLHGRYELGRLLGHGTFAKVYHARNVTTGKSVAMKVVGKEKVVKVGMVDQIKREISVMRMVKHPNIVELHEVMASKTKIYFAMELVRGGELFAKVAKGRLREDVARVYFQQLISAVDFCHSRGVYHRDLKPENLLLDEEGNLKVTDFGLSAFTEHLKQDGLLHTTCGTPAYVAPEVILKKGYDGAKADLWSCGVILFVLLAGYLPFQDDNLVNMYRKIYRGDFKCPGWLSSDARRLVTKLLDPNPNTRITIDKVMDSHWFKKSSTRSRNEPVAATPEAEEDVDVSVHKSKEETETLNAFHIIALSEGFDLSPLFEEKKKEEKMEMRFATSRPASSVISSLEEAAKVGNKFDVRKSECRVRIEGKQNGRKGKLAVEAEIFAVAPSFVVVEVKKDHGDTLEYNNFCSTALRPALKDIFWTSTTPA

SEQ ID NO: 1926 - protein, 131 aa, Glycine max
  misc_feature (35)..(35): Xaa can be any naturally occurring amino acid
  misc_feature (45)..(45): Xaa can be any naturally occurring amino acid
ARNSARAHCGHLYTPITKYAYHYQLLFARGFPQNXSRLTDTGGPXVARSTARAVARDAAGANCLAPSSIAALHVHALANGNQTIAADPDTIIPKMEVTPLTMPISSSHDPLHGLVIDLKPAHHIMLLGMMT

SEQ ID NO: 1927 - protein, 56 aa, Triticum aestivum
PTTPNKNHTFDSVDASASLIYPMQCSALRKNGFVLIKGRPCKIVDMSTSKTGKHGH

SEQ ID NO: 1928 - protein, 235 aa, Zea mays
  misc_feature (185)..(185): Xaa can be any naturally occurring amino acid
MARGREGEVRNLVLGKYELGRMLGQGSFAKVYYGRDLRDGQSVAIKVIDKAHLRQTDGMVEQLRREISIMRMVRHPNVVGIREVLASRQRVFVVMEYARGGELFAKVARGRLTEDAARKYFQQLVAAVAFCHSRGVAHRDLKPENLLLDEEGRLKVTDFGLAALPEQLRHDGLLHTQCGTPAYVXAPEVLRKRGYDGARADMWSCGVVLYVLLCGFLPFQHDNYVKMYQKIFKGE

SEQ ID NO: 1929 - protein, 335 aa, Malus x domestica
MADESVAGSADFPVKRPREEEENGSAAAASAVSMEPDGGKEPDSVSAVIPGWFSEISSMWPGEAHSLKIEKILFQGKSDYQNVMVFQSATYGKVLVLDGVIQLTERDECAYQEMITHLPLCSIPNPKKVLVIGGGDGGVLREVARYASVEKIDICEIDKMVIDVSKQFFPEVAIGYEDPRVTLHVGDGVAFLKAVPAGTYDAVIVDSSDPIGPAKELFEKPFFQTVANALRPGGVVCTQAESIWLHMHIIEDIVANCREIFKGSVNYAWTTVPTYPSGVIGFMLCSTEGTAVDFKHPVNSIDESKRPLRFYNSEIHTAAFCLPSFAKKVIDAKAK

SEQ ID NO: 1930 - protein, 106 aa, Glycine max
  misc_feature (10)..(10): Xaa can be any naturally occurring amino acid
  misc_feature (66)..(66): Xaa can be any naturally occurring amino acid
  misc_feature (81)..(81): Xaa can be any naturally occurring amino acid
ISSPTITRCXHSQAGMRTPFTVLKYMASFPTIKTNNDITSITTNGGRVQPMHVMTPLLMNKFKTTXYLPNLDDAQLAKEVXYLLKKVCIPCLEFELDHRFLFLEPN

SEQ ID NO: 1931 - protein, 146 aa, Brassica napus
MAIATEKEVSDVSAVAQKRWNLGDFDIGKPLGRGKFGHVYLAREKRSNHIVALKVLFKTQLQQSQVEHQLRREVEIQSHLRNPNILRLYGYFYDQKRVYLILEYAARGELYKELQKCKYFSERRAATYVASLARALIYCHGKHVIH

SEQ ID NO: 1932 - protein, 228 aa, Glycine max
MYSPGYRIAPEMIKPKPTVLIGSSGAGKTFTKEVVETMASLNEKPLILALSNPTSQSECTAEEAYTWSKGKAIFASGSPFDPVEYEGKLFVPGQANNAYIFPGFGLGLIISGAIRVRDEMLLAASEALAAQVSQENYDKGLIYPPFSNIRKISAHIAAKVATKAYDLGEFFENVFISSNTVLVILFFYILNPDFYVWWTGLASHLPRPKDLVKYAESCMYSPGYRSYR

SEQ ID NO: 1933 - protein, 335 aa, Malus x domestica
MADEIVVGSADLPLKRPREEEENGAEAAASAVSMETDGGKEPDSVSAVIPGWFSEISPMWPGEAHSLKIEKILFQGKSDYQNVMVFQSATYGKVLVLDGVIQLTERDECAYQEMITHLPLCSIPNPKKVLVIGGGDGGVLREVARYASVEKIDICEIDKMVVDVSKQFFPDVAIGYDDPRVSLHVGDGVAFLKAVPAGTYDAVIVDSSDPIGPAKELFEKPFFQTVANALRPGGVVCTQAESIWLHMDIIEDIVENCREVFKGSVNYAWTTVPTYPSGVIGFMLCSTEGPAVDFKHPVNSIDASKRPLKFYNSEIHTAAFCLPSFAKKVIDAKAK

SEQ ID NO: 1934 - protein, 237 aa, Zea mays
MAMSDLTATVIPKPDGADDESVEIREVWADNLEEEFALIRDIVDEYPFVAMDTEFPGIVCRPVGAFRSPADYNYATLKANVDMLHLIQLGLTFSGPRGVDARRFAELLMSSGVVLNDSVYWVTFHAGYDFGYLLKILTCNSLPDTQAGFFKLMKIYFPTVYDIKHLMKFCNSLHGGLNKLAELLDVERVGESHQAGSDSLVTSCAFWKLKDSFFAGSTEKYAGVLYGLNAENGVSAH

SEQ ID NO: 1935 - protein, 292 aa, Malus x domestica
MINFTPLLSYMSSSVGMQGEAHSLKIEKILFQGKSDYQNVMVFQSATYGKVLVLDGVIQLTERDECAYQEMITHLPLCSIPNPKKVLVIGGGDGGVLREVARYASVEKIDICEIDKMVVDVSKQFFPDVAIGYDDPRVSLHVGDGVAFLKAVPAGTYDAVIVDSSDPIGPAKELFEKPFFQTVANALRPGGVVCTQAESIWLHMDIIEDIVENCREVFKGSVNYAWTTVPTYPSGVIGFMLCSTEGPAVDFKHPVNSIDASKRPLKFYNSEIHTAAFCLPSFAKKVIDAKAK

SEQ ID NO: 1936 - protein, 182 aa, Triticum aestivum
  misc_feature (160)..(160): Xaa can be any naturally occurring amino acid
VPPPSKLYTYIVQPWRPTVMASSATSVAPFQGLKSTAGLPVSRRSNGASLGSVSNGGRIRCMQVWPIEGIKKFETLSYLPPLSTEALLKQVDYLIRSKWVPCLEFSKVGFIFREHNASPGYYDGRYWTMWKLPMFGCTDATQVINEVEEVKKEYPDAYVXINGFTTSSVNANSPATGSRSEG

SEQ ID NO: 1937 - protein, 291 aa, Corynebacterium glutamicum ATCC 13032
MTFTLNNGLAIPDIGFGVFQTPPDETRNSVNAALEAGYRHIDTAAAYGNEREVGEAIAASGIGRDEITIETKIWVTDYGFEETLHAFDKATGKLGVDTLDILILHQAVPSSFDRTIAAYKALEKLLFDGAVRAIGVSNFMPEHLDKLLLETSIVPALNQIECHPYFQQRDVLARNEQLGILTQAWSPIGGITFYRDGQLPSTLENEVIAGIAAEVGKTPAQVMLRWHLQRRRHAIPKSVTPSRIVENFEIFDFELSDEQLQQIDALNTDLRGGPEPENITMENYYREIPEA

SEQ ID NO: 1938 - protein, 509 aa, Zea mays
  misc_feature (122)..(122): Xaa can be any naturally occurring amino acid
  misc_feature (169)..(169): Xaa can be any naturally occurring amino acid
  misc_feature (204)..(204): Xaa can be any naturally occurring amino acid
  misc_feature (216)..(216): Xaa can be any naturally occurring amino acid
  misc_feature (234)..(234): Xaa can be any naturally occurring amino acid
MATANGSSKGPFEVPKVEVRFTKLFIDGKFVDAVSGKTFETRDPRTGEVIASIAEGGKADVDLAVKAAREAFDNGPWPRMTGYERGRILHRFADLIDEHVEELAALDTVDAGKLFAVGQGAXDFPGAAHLLRYYAGAADKVHGATLKMAQRMHGYTLKEPRGGVVGHHXVPWNYPTTMFFFKVGPAARRRLAPVVVKPAEQTPXLSALFYAHLARXEAGVPAGVLNVVPGFGPXTAGAAVAAHMDVDKVSFTGSTEVGRLVMRAAAESNLKPVSLELGGKSPVIVFDDADLDMAVNLVNFATYTNKGEICVAGTRIYVQEGIYDEFVKKAAELASKSVVGDPFNPSVSQGPQVDKDQYEKVLRYIDIGKREGATLVTGGKPCGDKGYYIEPTIFTDVKDDMTIAQDEIFGPVMALMKFKTVEEVIQKANNTRYGLAAGIVTKNIDVANTVSRSIRAGAIWINCYFAFDPDAPFGGYKMSGFGKDMGMDALDKYLQTKTVVTPLYNTPWL

SEQ ID NO: 1939 - protein, 542 aa, Zea mays
  misc_feature (461)..(461): Xaa can be any naturally occurring amino acid
  misc_feature (464)..(464): Xaa can be any naturally occurring amino acid
  misc_feature (466)..(466): Xaa can be any naturally occurring amino acid
  misc_feature (468)..(470): Xaa can be any naturally occurring amino acid
  misc_feature (472)..(472): Xaa can be any naturally occurring amino acid
  misc_feature (477)..(477): Xaa can be any naturally occurring amino acid
  misc_feature (480)..(480): Xaa can be any naturally occurring amino acid
  misc_feature (501)..(501): Xaa can be any naturally occurring amino acid
  misc_feature (520)..(520): Xaa can be any naturally occurring amino acid
MEVAMVVSARASLLILVISLCSPYKFIQSPMDLGPLNLLPTTSTAAASSDFGRILFRAPAAVLRPQSPRDISMLLSFLSGSPSLSRVTVAARGAGHSIHGQAQAPDGIVVETRSLPGEMEFHHVRGGGEGRASYADVGGGVLWIELLERSLKLGLAPRSWTDYLYLTVGGTLSNAGISGQTFKHGPQISNVLQLEVVTGRGEIVECSPSKEADLFNAVLGGLGQFGIITRARILLQEAPEKVTWVRAFYDDLGAFTRDQELLVSIPDSVDYVEGFMVLNERSLHSSSIAFPASVDFSPDFGTRSSPRIYYCVEFAVHHHHGYQQQSQAAVEAISRRMSHMASQLYSVEVSYLDFLNRVRMEEVSLRSAGMWEEVHHPWLNMFVPKAGVAGFRDLLMDNVSPDSFQGLILIYPLLRDKWDTNTSVVIPDSGPTADDPVMYVVGILRSANPGPEEDGDGCSHXCLXEXLXXXRXIADAXEAXLGAKQYLPHHPTPARWQQHLXRRWERFADRKARFDPLRIXGPGQGIFPRTAQDAAAAAAYGS

SEQ ID NO: 1940 - protein, 479 aa, Arabidopsis thaliana
MENKPSVLTDKYDVGRLLGQGTFAKVYYGRSILTNQSVAIKMIDKEKVMKVGLIEQIKREISVMRIARHPNVVELYEVMATKTRIYFVMEYCKGGELFNKVAKGKLRDDVAWKYFYQLINAVDFCHSREVYHRDIKPENLLLDDNENLKVSDFGLSALADCKRQDGLLHTTCGTPAYVAPEVINRKGYDGTKADIWSCGVVLFVLLAGYLPFHDSNLMEMYRKIGKADFKAPSWFAPEVRRLLCKMLDPNPETRITIARIRESSWFRKGLHMKQKKMEKRVKEINSVEAGTAGTNENGAGPSENGAGPSENGDRVTEENHTDEPTNLNAFDLIALSAGFDLAGLFGDDNKRESRFTSQKPASVIISKLEEVAQRLKLSIRKREAGLFKLERLKEGRKGILSMDAEIFQVTPNFHLVEVKKSNGDTLEYQKLVAEDLRPALSDIVWVWQGEKDELTSQQETEYQQQQQQEQQEQEEPLKF

SEQ ID NO: 1941 - protein, 165 aa, Crocosphaera watsonii WH 8501
MFFIQSPIATLGCLILWFGWFGFNAGSTLELNSPAVAHILVNTLVAGATGGIIGTLSAWFMFDNKPSLTFIINGILAGCVSITASCAYVHLLSAVFIGMVGGWFVVWATDFIDRFGIDDPVGAIPVHLFCGFWGTLAVGFFSAGPGVVDWVISEKAFPIGGNRLD

SEQ ID NO: 1942 - protein, 427 aa, Enterococcus faecalis V583
MKTLIKNGKIIKKENQLIEAALWLENGVIHAIGESFDEADFEQVFDANGQLITPGLVDVHVHFREPGFTYKETIKTGSKAAARGGFTTVCAMPNLNPVPDTAEKLSEVYDLIQKDAVVKVLQYAPITEELRSEVLTNQKALKEAGAFAFTNDGVGVQTAGTMYLAMKEAAALNMALVAHTEDESLLFGGVMHEGEVSKKLGLPGILSATEASQIARDITLAKETGVHYHVCHVSTEESVRVIRDAKKAGIHVTAEVSPHHLILVDEDIPGDEGFWKMNPPLRGLADRQALIDGLLDGTIDCIATDHAPHGLEEKQQSFLNAPFGIVGSETAFQLIYTNFVETGIFTLEQVIDWMAVKPAEIFGLNAGTLTIGAPADIAVFDLATAAPIDAEAFESMAVNTPFTGWTVKGKTLMTFVDGALAWSEEAQ

SEQ ID NO: 1943 - protein, 365 aa, Triticum aestivum
  misc_feature (31)..(31): Xaa can be any naturally occurring amino acid
TFSYSILSDPHKRRQYDTSGFEAIETDSQEXLELDLSSLNTVNTMFAAIFSKLGVPLKTTVSATVLEEALNGSIVVSQLQLGNSVRKKVEKQTAHFYSIDITEQEAKKGLVCRVHSTEKSKFKLLYFELEENGGLSLALQEDSVKSSKVSSAGMYFLGFPVYRFEQNNSAPAAKDPDSAFFKRLDSFQPCDINELKPGTHFFAVYGDNFFKSATYTIEIVCAESFPTEKEKLQSVEAKILTKRAELSKFETEYREVLAKFTEMTSKYTQEMQMIDELLNERNVIHASYTNNPPLKRTSSRNKSKSSPSFKYDEEKNQRKEKKVKDQHMEACGSEDDDSSDKKTKERFPRKRWLNIPFKVDRRKPC

SEQ ID NO: 1944 - protein, 381 aa, Corynebacterium glutamicum ATCC 13032
MSDSQVRKGLNGVISDYTSISKVMPESNSLTYRGYAVEDLVENCSFEEVIYLLWFGELPTTEQLRTFNTTGRSYRSLDAGLISLIHSLPNTCHPMDVLRTAVSYMGTFDPDPFTRDADHIRSIGHNLLAQLPMVVAMDIRRRSGEEIIAPDHNKGIASNFLSMVFGNDDGSVANSADDIRDFERSLILYAEHSFNASTFSARVISSTRSDTYSAITGAIGALKGPLHGGANEFVMHTMLDIDDPNNAADWMGKALDRKERIMGFGHRVYKNGDSRVPSMEKSMRSLAARHRGQKWVHMYESMQEVMEARTGIKPNLDFPAGPAYYMLGFPVDFFTPLFVLARVSGWTAHIVEQFENNALIRPLSAYNGVEEREVVPISERT

SEQ ID NO: 1945 - protein, 433 aa, Azoarcus sp. EbN1
MTLTREQQIAAIEKDWAENPRWKGIKRNYTAADVVRLRGSIQPESTLARVGAEKLWNLVNNEPYVNCLGALTGGQAMQQVKAGIKAIYLSGWQVAADNNSYAAMYPDQSLYPVNSVPTVVERINNAFQRADQIQWSKNINKGDKGYVDYFAPIVADAEAGFGGVLNAFELMKAMIRAGAAGVHWEDQLASVKKCGHMGGKVLVPTAEAVQKLLAARLAADVMGVPTLVIARTDAEAADLLTSDYDANDKPFLTGERTAEGFYKTSKGLDQAISRAIAYAEYADLVWCETGTPNLEFARKFAEAVHAKHPGKMLAYNCSPSFNWKKNLDDATIAKFQRELGAMGYKYQFITLAGIHSMWYNMFDLAQDYAKRGMSAYVEKVQEPEFAARDRGYTFVSHQQEVGTGYFDEVTTVIQGGTSSVTALTGSTEEEQFH

SEQ ID NO: 1946 - protein, 469 aa, Medicago truncatula
MASTRRVQCLMRRFYRGSRTFGVATQPNASSSSQTIIDKEFQHSAHNYHPLPIVFAHAKGSAVWDPEGNKYIDFLSGYSAVNQGHCHPKILKALKNQAGRLTVSSRAFYNDRFPVFAEYSTALFGYDMVLPINTGAEGVETALKLARKWGYDKKKIPNDEALIVSCCGCFNGRTLGVISMSCDNEATRGFGPLIPGHLKVDFGDAEALEKILKEKGDAIAAFILEPIQGEAGVKIPPDGYLKAVRDLCSKYNVLMIADEIQTGLARTGKMLACEWEEVRPDVVVLGKALGGGIIPVSAVLADKEVMLCIKPGQHGSTFGGNPLASAVAIASLEVIKEERLAERSTKLGGELLGLLEKIQKQYPDHVKEVRGRGLFIGVELNSESLSPVSFFELSEKLKDRGVLAKSTHDTIIRFTPPLCISADEIQQGSKALADVLEIDLPMLKKMKPKDAAPPAGPSACDRCGRVVYG

SEQ ID NO: 1947 - protein, 215 aa, Zea mays
  misc_feature (141)..(141): Xaa can be any naturally occurring amino acid
MAAVEVCVKAATGKPDTLGDCPFSQRVLLTLEEKKVPYEVKLVDLDNKPEWFLKISPEGKVPVFNGGDGECIADSDVITQTIEEKFPTPSLVTPVEYASVGSKIFPAFITFLKSKDASDGSEKALLDELQALDEHLKAHGXPYINGENVSAADLSLGPKLFHLQVALEHFKGWKIPENLTNVHAYTKALFSRESFVKTKPSEEHVIAGWAPKVNA

SEQ ID NO: 1948 - protein, 477 aa, Novosphingobium aromaticivorans DSM 12444
MEFNNNYHMLIGGELVAAEARLDVVNPANEQVIACVPDAGAAELDAAVAAARKAFPGWAATPIAERKAMLDALADSIFANVDGFKRLLTAEQGKPHHEAQGEIMGAGYWLKAYTALDLPETVNEDSDERLSITRHVPLGVVGAIAPWNFPMILAMFKVAPGLLAGNTMVLKPSPFTPLCTLKFAELAKEILPAGVLNVITGGDHLGPLMTAHPGFDKISFTGSTQTGRRVMASAAPTLKRVTLELGGNDAAIVMPDVDVEKIAEQLFWAAFTNNGQICIATKRMYIHKDIYEPLRDALVAYARTVKVGDGSEQGTQIGPINNEAQYNRVLDLIQDAKDNGYKFLLGGEKAEVPGYFVPITILDNPPEDSRIVQEEQFGPVLPLIRFDDFEDVLNRVNASDYGLGGSVWGSDEDKAFELAQRVQSGTVWVNETQHLSPLAAFGGMKQSGVGVEGGLEGLLEYTSAQTLVRRKKAAFVN

SEQ ID NO: 1949 - protein, 299 aa, Glycine max
KLGIRLEHRVCVRWIRVLYSNFARFCKDQEYLISLHGKAARERFDYVEGFVIVDEGLINNWRSSFFAASNPVKITSLNADGGVLYCLEITKNYDQGNADSVDEEIQALLKKLNFIPTSVFTTDLPYVDFLDRVHKAELKLKSKGLWDVPHPWLNLFVPKSRIEDFDKGVFKGILGNKTSGPILIYPMNKNKWDHRSSVVTPEEDVFYLVAFLRSALDTETLEYLTNQNRQILRFCHDSEIKVKQYLPHYTTQQEWMDHFGDKWTQFNARKMQFDPRRILGTGQQIFQFHPSLTPNKDDM

SEQ ID NO: 1950 - protein, 480 aa, Pyrococcus horikoshii OT3
MCLIAGGFKLYTDEIIRIIELGKHRGPDSFGVWSEREVIKSSDFSALEEVKGGDKVLIQCRLAMTGSKEYTQPFYNEIALVHNGEIYNHEKLRAYLVERGISFESDVDSEVILRLLEYLLFDRNLSPWNAIKKLMWMLRGDYAVAFHYNGKFYLFRDPLGIRPLYYSSQGHFGSEKKVLWGLGEEATPVMPGEAVEISKFGINRVRLYDVTAIKSFGSEYFDGLRNLLIDSVKIRSSKKIGILFSGGLDSTLIAFIASRYSNVTLYVSGTEDSKDVEWARKVSQELGLKLKEYIFSKEEVEKELKRIMFAIEEPNPMNLSIAIPLYFSTKLAREDGVKILLSGQGADELFGGYAKYLENPNLMISDVANLGERNLARDDKVSMINGVEVRYPYLDLPFAVLALNTPLQHKIKDGKRKIILREIAKSLGLPEWIAEREKKAAQYGSNAQKILEKIAKSRGIRLKELASLLFSEVFRGIHNR

SEQ ID NO: 1951 - protein, 330 aa, Methanosarcina mazei Go1
MRLAVIEGDGIGREVIPAAVEVLDAFGLEFEKVPLEIGYARWERTGTAMSEEDMEIIKSCNAVLFGAVTTVPDPGYKSVLLTIRKELDLYANVRPVKPLSGVVGVSGRSDFDFIIVRENTEGLYSGIEEIGHDLSWTKRVITRKGSERISEYACELAKKRSGKLTIVHKSNVLKSDKLFLDVCRETASSYGVEYGDMLVDSMAYSLIMHPEKYDVVVTTNLFGDILSDMCAALVGSLGLVPSANIGKKYAFFEPVHGSAPDIAGKGISNPLAAILCVKMLLEWMGKPEARLIDAAIADLLQKKIITPDLGGRASTAEVGNAVAKYIMQNL

SEQ ID NO: 1952 - protein, 494 aa, Gibberella zeae PH-1
MTSSVTLQGAQGRQITVQTGLFIDNEFVPASNNATLDVENPNTATIIAQVSAAQASDVDRAVRSSQKAFATWGRSDPGTRRTLLLKLADLVEAHGPELASLEAIEGGLLYRDSLGLHVTQSVDNLRYFAGWADKLDGVSLPIPSGVAYTRREPIGVCAAIVPWNSLMILFWKLAPAIAAGNTIVIKTAELTPLWAQKAAELIKEAGFPPGVINIICGLGREAGQALAEHPVVRKIAFTGSSVTGRQIMQSAARSNLKKVSLELGGKGPSIVFADADWENALLWTTMGITASNGQICAAGSRIYVQDTIYEKFIQEFSRRSRDAVHGDPLLDETTKGAVASKAQLDKILSYVGKAKQTKARLLHGGQPLPGKGHFMANTAFVDVDQDDTIMREEIFGPFASIAPFSTEDEVIRKANDSDLGLNSAVFTNDVSRAFRISEAIETGTVTVNCWAMLNANTPFGGVKESGFGRDSGQEALDNWTVTKTVKFNILPPKL

SEQ ID NO: 1953 - protein, 204 aa, Fagus sylvatica
MASSSPSSNYIQEASGGHIIPTDQNVLQKHVAFFDRNQDGIVYPSETFKGFRAIGCGIFFSAISAIFINFGLSQKTRPGKFPSLLFPIEVKNIQKAKHGSDSGVYDTEGRFVPSKFEEIFSKHALSYPSALTSDELMKMLKENRVPKDYRGWLASWAEWKTLYILCKDKKWVTTERNKLKLLMMEAWLKEMEKERSSAKKKAVV

SEQ ID NO: 1954 - protein, 141 aa, Burkholderia cepacia R1808
MTRYDPFSIEPVSDLFHGLFRPLRGMTLADQPDLASMKIDVTENDGAYMVKAELPGVAKDDIDVQVTGNTVSINAKVERNNEQKDGERVIRRERYSGAISRSFSLAADIDDANATATYQDGVLSLTLPKKAPVGQKKLAIS

SEQ ID NO: 1955 - protein, 436 aa, Mycobacterium leprae
MSGATSGLTPEQIGAIDAAHLWHPYSTIGAATGVIPPVVAVAAHGAWLTLIRDGKPIEALDAMSSWWTAIHGHGHSVLDAALTTQLGAMNHVMFGGLTHEPAARLAQLLVDITPAGLETVFFSDSGSVSVQVAVKMALQYWRSRGQPAKRRLMTWRGGYHGDTLTPMSICDPDGGMHSLWTDILARQVFAPQVPRDYDPAYSKAFETQLAQHTPELAAVVVEPVVQGAGGMRFHDPRYLCDVRDICRRHDVLLIFDEIATGFGRTGELFAADHCGVSPDIMCVGKALTGGYLSLAATLCTTDIAHAISVGAAGALMHGPTFMANPLACAVSVASVEVLLGQDWRSRVAEISAGLTAGLEAAQGLPGVIDVRVCGAIGVIECDRSVDLAVATPAALDRRVWLRPFRNLVYAMPPYICPPAEIAQITSAMVEVAGLVG

SEQ ID NO: 1956 - protein, 233 aa, Zea mays
  misc_feature (174)..(174): Xaa can be any naturally occurring amino acid
  misc_feature (183)..(183): Xaa can be any naturally occurring amino acid
MLLPTRRLPAAPSGPAVHPYISPARPSLRFRRQHGRAATARATSATPPVFGDTLLGLYEKERLGLSRYADEESREDVFWETLDADLQYWTRSLRPVQWYPGHIAKTEKELKGQLKLMDVVIEVRDARIPLATTHPKMDSWLGNRRRIIVMNREDMVSADDRNAWATYFSSQGIXVIYSNGQLXMGTMKLGRMAKSAASTVNTRRREKGLLPRPVRAGIVGYPNVGKSSLINRL

SEQ ID NO: 1957 - protein, 320 aa, Enterococcus faecalis V583
MKRIGILTSGGDAPGMNAAIRAVVRKSIFDGIEVYGINYGFAGLVAGDIRRLDVADVGDKIQRGGTFLYSARYPEFATEEGQLKGIEQLKKFGIEGLVVIGGDGSYHGAMALTKRGFPAVGIPGTIDNDIPGTDFTIGFDTAINTVLESIDRIRDTATSHVRTFVIEVMGRNAGDIALWSGVAGGADEIIIPEHDFDMKNVAKRIQEGRDRGKKHCLIILAEGVMGGNEFADKLSEYGDFHTRVSILGHVVRGGSPSARDRVLASKFGSYAVELLKEGKGGLCIGMLDNQVVAADIIDTLENNKHKPDLSLYELNHEISF

SEQ ID NO: 1958 - protein, 158 aa, Nitrosomonas europaea ATCC 19718
MNIYDCGIKTMDGQDKLLGDYKGKVLLIVNTASKCGFTPQYQGLEDLYRRYKDRGFVVLAFPCNQFGHQEPGSESEIQQFCTTRYDVSFPVFAKIEVNGANTHPLYRYLKNEKSGVLGTKAIKWNFTKFLVDRSGHVVRRYAPADKPESLTGDIEQLL

SEQ ID NO: 1959 - protein, 277 aa, Bacillus pumilus
MNLEEQIKIAASLRQPSEGSLASQSELKPVNPPEVNKMEYDIPTSAGETKVWVFKPVNTQKQLLPVFVNLHGGGFIMGSAEMDNPWCPVIADRAQCIVVNVEYQLAPEHPFPAALHECYDVLKWLYEHPEELQIDRNALAIGGHSAGGNLATAACLLNIQRGNTLPIAYQVLDYPPLDLATDPAQKPAFEEAIPVELARLFNSFYLQGQDPHNPLVSPVFADRSSLAQMPPALVITAERDSLAQEADQYAKKLKEAGVDVTYSSLKEFLTASHTPEI

SEQ ID NO: 1960 - protein, 50 aa, Schizosaccharomyces pombe
MTQVIFAIILPPLGVFLERGCGADVIINILLCCLGYVPGIIHALYIILKY

SEQ ID NO: 1961 - protein, 236 aa, Escherichia coli O157:H7 EDL933
MGYRSFDTAAAYKNEEGVGKALKNASVNREELFITTKLWNDDHNRPREALLDSLKKLQLDYIDLYLMHWPVPAIDHYVEAWKGMIELQKEGLIKSIGVCNFQIHHLQRLIDETGVTPVINQIELHPLMQQRQLHAWNATHKIQTESWSPLAQGGKGVFDQKVIRDLADKYGKTPAQIVIRWHLDSGLVVIPKSVTPSRIAENFDVWDFRLDKDELGEIAKLDQGKRLGPDPDQFGG

SEQ ID NO: 1962 - protein, 300 aa, Brassica napus
  misc_feature (13)..(13): Xaa can be any naturally occurring amino acid
  misc_feature (56)..(56): Xaa can be any naturally occurring amino acid
MPSKSNAYFKRYXVKFGRRRDGKTAYRARIRLINQDKNKYITPKYRFVVSFTNEGXIFAQISVPLTLPGDIVKASAYAHELPQYGLTVGLTNYAAAYCTGLLLARRVLKMLEMDEEYEGNLEATGEDFSVEPTESRRPFRALLDVGLIRTTTGNRVFGALKGALDGGLDIPHSDKRFAGFNKENKQLDAEIHRNYIYGGHVSNYMKMLNEDEPEKFQTHFSQYLKKGVDAESMEELYKKVHAAIRADPNPKKTEKPAPKTHKRYNLKKLTYEERKNKLIERVKALNGAAGGDDDDEDDEE

SEQ ID NO: 1963 - protein, 296 aa, Saccharomyces cerevisiae
MITTPLVHVASVEKGRSYEDFQKVYNAIALKLREDDEYDNYIGYGPVLVRLAWHISGTWDKHDNTGGSYGGTYRFKKEFNDPSNAGLQNGFKFLEPIHKEFPWISSGDLFSLGGVTAVQEMQGPKIPWRCGRVDTPEDTTPDNGRLPDADKDAGYVRTFFQRLNMNDREVVALMGAHALGKTHLKNSGYEGPWGAANNVFTNEFYLNLLNEDWKLEKNDANNEQWDSKSGYMMLPTDYSLIQDPKYLSIVKEYANDQDKFFKDFSKAFEKLLENGITFPKDAPSPFIFKTLEEQGL

SEQ ID NO: 1964 - protein, 346 aa, Novosphingobium aromaticivorans DSM 12444
MKALRYYGARDIRHESMDDPTPQSDRDAIVKVDACSICGSDLHIYHGHGFSEDIGFCVGHEAVGEVVEVGRGVHRLKVGQKVMIPAAVGCGACRSCLAGVVNTCENNGSGCYGLSAKLQGSQAEAVRVPAADANAVAIPEGVSTEQALMMTDALATAWFGARQADIRPGSSVGIIGLGPIGLMAAESAFVMGAHVVYAIDPVPERRAIAESLGAIALHPDEASARIKEDTHGRRLDCVVEVVGSDATVDMALRLVRVRGTVSVIGVQQSRRFPFPLERAFAGGLTFRVGTCSVPEELPALFPLVASGRLRPERYISHRLPLSQGAEAYRMFEAREAGALKMVLVPD

SEQ ID NO: 1965 - protein, 485 aa, Arabidopsis thaliana
MGGCVSTPKSCVGAKLRSSKRRKSRRRRKIQRKRAAVSSRLSDGSFDNLDHHHRNFSNPSSRATGEDAWFESNVAFETDCDDDFHSVHEDALSLNGSERVSLSSTTTTSSTRDTDSNEVMSQSKSDGDLNDTNQPDLIDSSADEGLLENCRILPSNCLPCLNTTTVPSIDKRRSLSSSPPSSRKKSSLRLSYKWREGHASGALFLSKMQLKRPIAGSQVPFCPIDKKMLDCWSTIDPNSFRVRGKTYLREKKKEFAPSHAAYNPFGVDVFLSEHKIHHVAQYVKLPVTTTSTKLPSILVVNVQIPLYPTAIFQGESDGEGMNIVLYFKLSDNYSKELPLHFQESIRRLIDDEVEKVKGFPLDTTAPFRERLKILGRVANVDDLHLSGPEKKLMQAYNEKPVLSRPQHEFYLGDNYFEIDIDMHRFGYISRKGFETFIDRLKICVLDVGLTIQGNKPEELPEQILCCVRLNGIDFMNYHQLTQELL

SEQ ID NO: 1966 - protein, 175 aa, Triticum aestivum
MAPTVMAASVTSVAPFQGLKSTAGLPVSRRSSSAGLGSVSNGGRIRCMQVWPIEGIKNFETLCDLPPLSTEALLNQVEYLIRSKWVPCLEFSKVGFVFREHNSSPGYYDGRYWTMWKLPMCGCTDTTQVLKEVEEVKKEYPDAYVRVIGFDNLRQVQCVSFIAFRPPGCEESDKV

SEQ ID NO: 1967 - protein, 1224 aa, Ustilago maydis 521
MAVVDVGFSGYFWLAIKSFAARVICLLSDSGLRSAVSDRMPTKSRKSAPSKFAFFLDQQETFSLHISIFEPLGAVGVAPFQTDNRISLHRVFDRLPDTALQGGHGRATRSQRNFLSTDKSTKSFGSPIDIRFGPLRIDWAERAQDKEMSQASQYRNASSSSTSVGPATVTASASELTKASRRRNVFHAKQPQVALPVASFEKTDSFQGDVSGSKEAESRLASCTEMFQGMTIGATEVAFGIVHLFRDKQDATSNATPTRRAASTTGQTALENQIPEQDIGAVVAVLAVPAYLTASHFLSYIEPAVEAITHLRMLRDMHPNRCMVLIRFRDAKDAEDFHKMYNGQPFNAMDPQEICQVVYITSLTVSKHSSLPFSYPTLTNSDPWPLRPPANAVNQPAYELPTCPVCLERMDSSVTGLMTISCQHTFHCSCLSKWGESRCPVCRYSQTGQPSMHQRRRTPRSSMDPSTPVRQANQVGGSDADESDAESDLDEPSCCAVCETQQDLWVCLVCASVGCGRYKHGHAHRHFSETGHLYSLELETQRVWDYAGDGYVHRLIQNKADGKLVELPSASSATATPEHSSTLPASASYASAMSMSGTKHSGPPAIHSRGDNTRPPYDAQERRRQQQQQQRDQNYAIRDQDSCRSADDQLEAIGMEYSYLLTSQLESQRHFYEDKLDQFQAQLASLTGDLEMLSRKSQLIDELSARTAELERTNEQLRRDKDKSDKKADKAIELARTLERDLHSERSMNKGLMDRLEKTKESEVGLKAQVTDLQEQVSDLMFFVQARDKLDQEGSEAQGGDVEKLDSTFGNAFVISGRNARCGTGGSSTHPPITSLKLESKLIWPVLEKKTLRVMQHGGGKSTKHNPQSTKHEAIVNLCNVLYSYHLPARQTKPREYYIMSLNKTFTLNDGNKIPLIGLGTWLSKPGEVENAVEIAVKAGYRHLDLAKIYQNQDEVGAALKKVIPSVVKREELFITSKLWNTSHQPDKVEAAYNETLKELGLDYLDLYLIHWPVAFQPGSDLVPKTEDGKFTALDLETSLVDTWKALIALQKAGKVKSIGVSNFTIAHLDAIINATGVVPAVNQIEAHPLLPQDDLVAYAQQKNIHLTAYSPLGNNLTGKTKIVDYPQVSEVAKKYNADPAQVLIAWGVKRGYSVIPKSVTETRIKSNFEQLELKDDDYETVTSLYKQLGKVRFNVPFTYSPQWDINVFGEDAEKEAKNEVKTE

SEQ ID NO: 1968 - protein, 694 aa, Glycine max
  misc_feature (412)..(412): Xaa can be any naturally occurring amino acid
  misc_feature (592)..(592): Xaa can be any naturally occurring amino acid
  misc_feature (600)..(600): Xaa can be any naturally occurring amino acid
MPALACCVDAAAPPGYAFAGDISFPAPVALTGVPPATTDDSNNNRWSPSLSAALYNVDGWGGPYFAVNTAGNISVRPHGSDTLSHQEIDLLKIVKKASDPKSLGGLSLQLPLIARFPDVLKNRLESLQSAFDYAIQSGGYESHYQGVYPVKCNQDRFVVEDIVKFGSPFRFGLEAGSKPELLLAMSCLCKGNPDALLICNGFKDAEYISLALVANKLALNTVIVVEQEEEVDLIVELSKKLCIKPVIGLRAKLRTKHSGHFGGTSGEKGKFGLTTAQILRVVKNLDLAGMLDCLQLLHFHIGSQIPSTALLADGVGEAAQIYCELVRLGANMRVIDIGGGLGIDYDGSKSCDSDISVEYSLEDYAVAVVHAVQCVCDRRSVKHPVICSESGRAIVSHHSVLIFEAVGTSSTXPGGGASPALSAQYLAEELSEDYRNLSELAFRGEYETCLVYTEEMKERCVEQFKQGTVCMEQLAAVEGLCELARKAVGAGESVRRYHVNLSVFTSVPDAWGIEQVFPIIPIHRLDEKPSVRGILSDLTCDSDGKIDKFINGESSLPLHEMEGGRTYYLGMFLGGAYEEALGGVHNLFGGPXSVVRVSQXDGPHSFAVTAWPCRGHPCGDVLRVMQHQPELMFETLKHRAQEYVSHDNAAALLAAGLARTFDRMPYLLSLSSFVADDVAAAVPAAQDLGEQWSY

SEQ ID NO: 1969 - protein, 505 aa, Agrobacterium tumefaciens str. C58
MNIQVQQKAGEAPFKLKYGNYIGGKWVEPKSGRYMDNLSPVTGHKICEVPRSDASDIEFALDAAHKAREKWGKTSITERSNILLRIAQRIEDNLDLIARAETWDNGKPLRETTNADIPLTIDHFRYFAGCIRAQEGTIGEIDNDTVAYHFHEPLGVVGQIIPWNFPILMAAWKLAPALAAGNCVVLKPAEQTPASILIVMELIEDLLPPGVLNIVNGTGLEAGKPLAQSNRIAKIAFTGSTSVGKEIMRYAADNVTNISLELGGKSPNIFFADVMNEDDAFLDKALEGFAFFALNQGEVCTCPSRALVHESIYDRFMEKAIKRVQAISQDDPLNPSTMLGAQASQEQFDKIMSYLEIGKKEGAKVLTGGDRKTLTGDLKDGYYIQPTVFEGNNKMRIFQEEIFGPVVSVTTFKTVEEALEIANDTVYGLGAGVWSRDTNIAYRAGRGIEAGRVWTNCYHVYPAGAAFGGYKQSGIGRETHKMMLDHYQQTKNLLVSYSPNKVGFF

SEQ ID NO: 1970 - protein, 518 aa, Triticum aestivum
MGNRTSRHRRAAADQPATAPPPAAQPKPQPPPKPQTAPAPAPTPEAGQVAMGRVLGRPMEDVRATYTFGRELGRGQFGVTYLVTHKATGQRFACKSIATRKLVHRDDIEDVQREVQIMHHLTGHRNIVELRGAYEDRHSVNLIMELCEGGELFDRIIARGHYSERAAALLCREMVSVVHSCHSMGVFHRDLKPENFLFLNNKEDSPLKATDFGLSVFFKHGEQFKDLVGSAYYVAPEVLKRHYGAEADIWSAGIILYILLSGVPPFWADNEDGIFEAVLLGHIDFSSDPWPSISNGAKDLVKRMLRQDPKERLTAAEILNHPWIREDGEAPDKPLDITVISRMKQFRAMNKLKKVALKIVAESLSEEEIVGLREMFKSLDTDNSGTITLDELRAGLPKLGTKITESEIRQLMEAADVDGNGTIDYVEFISATMHMNRLEKEDHIFKAFEYFDKDHSGYITVDELEEALKKYDMGDEATIKDIIAEVDTDHDGKINYQEFVAMMKNNSPEIVPNRRRLF

SEQ ID NO: 1971 - protein, 433 aa, Wigglesworthia glossinidia endosymbiont of Glossina brevipalpis
MNINEVNFDRYYIWHPYSSITKPLKTYHVVSAKKCKLKLINGKKLIDGMSSWWTVIHGYNHPKINQAIINQIKKVSHVMFGGITHSPAIKLCKKIIKLTPKGLECVFLSDSGSVSIEVALKMALHYWFSKNERKKVKFLSLRGGYHGDTFGALSVCDPKNSMHNIYQGYLPNQEFTNTFDRKFNEKWESGDDLNLVKLIEKHHKKLAAVIIEPIVQGVGGMNFYHKQYLISIKKLCKFYKILLIVDEIATGFGRTGKLFACNYSKITPDILCIGKALTGGAITLAATITKRKVSETICNKKTPEFMHGPTFMANPLSCAASCANLSLIEEGKWIQQVKFIYQEMCKYLYPLIEHSYVKDVRILGAIGVVETKFFVNLENIQNWFVRHGAWIRPFRKLIYLIPPYIISSYELKFLIKLISLSLNDDKNFLYIKN

SEQ ID NO: 1972 - protein, 241 aa, Fagopyrum esculentum
  misc_feature (7)..(7): Xaa can be any naturally occurring amino acid
  misc_feature (9)..(9): Xaa can be any naturally occurring amino acid
PFFPHQXRXNLVSWGGSNGGVLYCLEITKNYFDSTLPHLVDLEIDNLLKKLNFIPSSVFTTDLPYVDFLDRVHKAELKLRSKGLWEVPHPWLNLFIPKSRIADFDRGVFKGILGNKTSGPILIYPMNNKKWDKRTSVVTPDEEVFYLVGFLRSALEGGDEAQSLEYLSDQNRQVLKFCEEAKIEAKQYLPHFTSQTEWKNHFGNKWDEFYRRKMIFDPRQILASGQRIFEPDVGPKNVASL

SEQ ID NO: 1973 - protein, 130 aa, Triticum aestivum
  misc_feature (18)..(19): Xaa can be any naturally occurring amino acid
  misc_feature (44)..(44): Xaa can be any naturally occurring amino acid
  misc_feature (53)..(53): Xaa can be any naturally occurring amino acid
  misc_feature (59)..(59): Xaa can be any naturally occurring amino acid
  misc_feature (64)..(65): Xaa can be any naturally occurring amino acid
  misc_feature (68)..(68): Xaa can be any naturally occurring amino acid
  misc_feature (72)..(72): Xaa can be any naturally occurring amino acid
  misc_feature (74)..(75): Xaa can be any naturally occurring amino acid
  misc_feature (78)..(78): Xaa can be any naturally occurring amino acid
  misc_feature (82)..(85): Xaa can be any naturally occurring amino acid
  misc_feature (91)..(92): Xaa can be any naturally occurring amino acid
  misc_feature (94)..(94): Xaa can be any naturally occurring amino acid
MGERVKGTVKWFNVTKGXXFISPDDGGEDLFVHQSSIKSDGYRXLNENDAVEXEIITGXDGRTXXNDXTAPXGXXLSXGLLXXXXGGERTXXGXYYRLLPRYAHPRTGRIVALHRQKGLSTFGPRGKFPR

SEQ ID NO: 1974 - protein, 206 aa, Pyrococcus horikoshii OT3
MRKMAHGPRYRVPFRRRREGKTNYRKRLKLLKSGKPRLVVRKSLNHHIAQIIVYDPKGDRTLVSAHTRELIRDFGWKGHCGNTPSAYLLGLLIGYKAKKAGIEEAILDIGLHPPVRGSSIFAVLKGAIDAGLNVPHSPEIFPEDYRIRGEHIAEYARMLKEQDEDRFRRQFGGYLEKGLDPEKLPEHFEEVKARIIEKFESEGARE

SEQ ID NO: 1975 - protein, 129 aa, Brassica napus
  misc_feature (53)..(53): Xaa can be any naturally occurring amino acid
  misc_feature (115)..(115): Xaa can be any naturally occurring amino acid
MESYDLHKVSIMTQCIDGVKHLCTSVLGCFDLNLFKQSGGGLGDPELLSRDTXSASEIEALYELFKKTSSAVIDDGLINKEEFQLALFKTNEKESLFADRVFDLFDTKHNGIPWXLEEFARALSVFHPN

SEQ ID NO: 1976 - protein, 513 aa, Hordeum vulgare subsp. vulgare
MDGNNRGGGHSEVLKNYNLGKTLGLGTFGDVKVAEHKLTGQRVAIKILNRRKMETMEMEEKANREIKIMRLFIDFIHPHIIRVYEVIETPKDIFVVMEYCNNGELLDYIIENGRLQEDEARRIFQQILAGVEYCHRIMVVHRDLKPENLLLDSKYNVKLADFGLSNVMRDGHFLKTSCGSLNYAAPEIISSKLYAGPEVDVWSCGVVLYALLCGSVPFDDDNIPSLFRKIKGGTYILPSYLSDSARDLIPKLLNIDPMKRITIHEIRVHPWFKNHLPCYLAVPPPYKEQQAKMIDEDILREVVNLGYDKDHVCESLWNRLQNEETVAYYLLLDNRFRSTSGYLGADHQHLMDRSFNEFTLSESASPSTRNYLPGINDSQGGGLRPYYPVQRKWAIGLQSGAHPRDIMIEVLKALKELNVCWKKNGLYNMKCRWCPGFPQVSDMLLDSNHNFVDDSTIMDNGNADGRLPAVVKFEIQLYKTKDNKYLLDIQRVTGPQLLFLEFCGAFLTNLRVL

SEQ ID NO: 1977 - protein, 333 aa, Oryza sativa
MGKPGKLALPSHESTIGKFLTQSGTFKDGDLLVNKDGLRIVSQSEEGEEPLDHNQLSLDDLDAIKVIGKGSSGIVQLVRHKWTGQFFALKVIQLNIQENIRRQIAQELKISLSTQCQYVVACCQCFYVNGVISIVLEYMDSGSLSDFLKTVLKGLMYLHHEKHIIHRDLKPSNILINHMGEVKISDFGVSAIIASSSAQRDTFTGTYNYMAPERISGQKHGYMSDIWSLGLVMLELATGEFPYPPRESFYELLEAVVDHPPPSAPSDQFSEEFCSFVSACIQKNASDRSSAQILLNHPFLSMYDDLNIDLASYFTTDGSPLATFNTSNRYDDR

SEQ ID NO: 1978 - protein, 262 aa, Neurospora crassa
MGHEDAVYLAKLAEQAERYEEMVENMKIVASEDRDLTVEERNLLSVAYKNVIGARRASWRIVTSIEQKEESKGNSTQVSLIKEYRQKIESELAKICEDILSVLDQHLIPSATTGESKVFYHKMKGDYHRYLAEFAVGDKRKDSADKSLDAYKNATDVAQTELPPTHPIRLGLALNFSVFYYEILNAPDQACHLAKQAFDDAIAELDTLSEESYKDSTLIMQLLRDNLTLWTSSEAEAPAAQGEAAPEEPKADAPAAEEPKAE

SEQ ID NO: 1979 - protein, 507 aa, Thermosynechococcus elongatus BP-1
MKLRSILRRGFRLQHPLTQILYLPTRRTLLTFAVMIGVLSATAALGQDTAASAAVPEKVQVALNTLWVILAGVLVFFMNAGFGMLETGFCRAKNAVNLLSKNLIVFALASISYWAIGFALMFGDGNGVLGSSGFFLLGADNSPATGEAYRGVYSSLSWAAVPLSAKFFFQLVFAGTAATIVSGAVAERIKFYAFFIFSLLLVGISYPITGHWIWGGGWLQQLGMWDFAGSTVVHSVGGWAALMGAALLGPRLGRFLPDGSVAAIPGHNFAIATLGCLILWLGWFGFNPGSTMAADPGAIAHIAVTTNMAAAFGGVTATVVSTLYFGKPDLSMIINGILAGLVAITASCAFVTIESAALIGAIAGTIIVFSVVTIDRLKIDDPVGAISVHLVNGVWGTLAVGLFADGPGRFYEAGAGPLKGLLWSGDFTQFGYQLVGVLAVGGFTVAFSTAVWLLLNATIGIRVSPEEEIEGLDIGEHGMEAYAGFLLREEVKGFVDLLKRMSGSGRS

SEQ ID NO: 1980 - protein, 178 aa, Zea mays
  misc_feature (38)..(38): Xaa can be any naturally occurring amino acid
  misc_feature (97)..(97): Xaa can be any naturally occurring amino acid
PSIPYDPMALRKAFDKPVVKRLMTYVPFGVLLSGGLDXSLVTAVAVRHLAGTEAARRLGTKLHSFYVGLKGSPDLKAAREVAEYLGTLHHEFHFTVXDDIDAIEDVIYHTEAYDVTTIRASTPMFLMSHKIKSLGVKMVISGEGSDELFGGYLYFHKAPNKEELHRETCRKVCVSFFH

SEQ ID NO: 1981 - protein, 397 aa, Synechocystis sp. PCC 6803
MNYMMTDNEVFKEGLAGVPAAKSRVSHVDGTDGILEYRGIRIEELAKSSSFIEVAYLLIWGKLPTQAEIEEFEYEIRTHRRIKYHIRDMMKCFPETGHPMDALQTSAAALGLFYARRALDDPKYIRAAVVRLLAKIPTMVAAFHMIREGNDPIQPNDKLDYASNFLYMLTEKEPDPFAAKVFDVCLTLHAEHTMNASTFSARVTASTLTDPYAVVASAVGTLAGPLHGGANEEVLNMLEEIGSVENVRPYVEKCLANKQRIMGFGHRVYKVKDPRAIILQDLAEQLFAKMGHDEYYEIAVELEKVVEEYVGQKGIYPNVDFYSGLVYRKLDIPADLFTPLFAIARVAGWLAHWKEQLSVNKIYRPTQIYIGDHNLSYVPMTERVVSVARNEDPNAII

SEQ ID NO: 1982 - protein, 489 aa, Mesorhizobium sp. BNC1
MALLEHPQVGPAQNHIDGIWRHGPVSERRETFDPATGKILGHYDPGTVDLMDEAIAAARRAFDETAWASAPRLRAEVLLKLAARLSADHERLATLNAYENGKSFIQAKNEVATAISEAKYYAGLARSMTGRMMEPEPGCYSLISREPMGVAGIIVPWNAPVTLLLRSLAAALAAGCTAVVKPAPQTPLINAAVIQHLVAITEIPDGVVNSINDGGPAVGERLVASSDVDVISFTGSSAVGKRIMAAAAPTLKRVSLELGGKTPSIIFDDADLDKAISELARASLVNSGQQCVAASRFLVHRNVLDDFADGMMQRLRSVPVGPGYDTDNLVGAIIDRPNRDRLLGWLDRCADDGDILLRGETLDERYPGGAFLTPSLVLVSSTEALTVQEELFGPIITLEPFADEDEALAKAHATAYGLAASVFTRELDRSLRMARRLRAGTVWLNTHGKLIAEAEMEGHRESGIGRLHGADAIGEFQQTKHIYLPFGQS

SEQ ID NO: 1983 - protein, 274 aa, Listeria monocytogenes EGD-e
MNLKDTVKLANGVEMPRLGFGVWKVQDGDEAVNSVKWAIEAGYISIDTAAAYKNEEGVGQAIKESGIKREDLFVTTKLWNAEQGYESTLAAFDESLRKLELDYVDLYLIHWPVKGKFKDTWRAFEKLYKDKRVRAIGVCNFHEHHLKELMEDAEIAPMVNQIELHPQLTQEPLRKFCAENNIVVEAWSPLGNGKLLSNPEIKAIADAHGKSVAQVILRWDLQIGVVTIPKSVHQERIIQNADIFDFELTEEEVAKISGLNKDERTGPDPDNFNF

SEQ ID NO: 1984 - protein, 338 aa, Glycine max
  misc_feature (306)..(306): Xaa can be any naturally occurring amino acid
MLFCASTKPAPGLACILSLFFLFKDLARAESYHLVALMSRALEHDYIGLAENPSMDGKNSSSLNLKETELRLGLPGCESPERKSGSALCLFGKELQNNNNNVCSLKAGAKRGFSDAIDTSSVTEGSQGASALFSPRGGNVGKPLIGLDTQTNTTIKEVGAVPQSAKPVQENNDQFAATNAHAIAPAAKAQVVGWPPIRSFRKNTMASNLTKNNDEAEGKSGFGCLYVKVSMDGAPYLRKVDLKTYNNYMELSSALEKMFSCFTIGQCNSPGLPGKDGLSESSLRDLLHGSEYVLTYEDKDGDWMLXMFTDSCRRLRIMKGSEAIGLAPRAMEKSRSQN

SEQ ID NO: 1985 - protein, 119 aa, Zea mays
  misc_feature (55)..(55): Xaa can be any naturally occurring amino acid
  misc_feature (84)..(84): Xaa can be any naturally occurring amino acid
MDKNYGELYNILGWGEEYFAVNTEGHLSVKPFGRWTEPGQEIDVHSVIVEALATXPNDSTSKSQFPMILRFPDVLRNRIETLHXAFTGAMEATGVPVREPRRGSRTRGPKNKAVRGEKG

SEQ ID NO: 1986 - protein, 123 aa, Triticum aestivum
  misc_feature (60)..(60): Xaa can be any naturally occurring amino acid
  misc_feature (72)..(72): Xaa can be any naturally occurring amino acid
  misc_feature (80)..(80): Xaa can be any naturally occurring amino acid
  misc_feature (82)..(82): Xaa can be any naturally occurring amino acid
  misc_feature (98)..(98): Xaa can be any naturally occurring amino acid
  misc_feature (101)..(101): Xaa can be any naturally occurring amino acid
  misc_feature (109)..(109): Xaa can be any naturally occurring amino acid
  misc_feature (114)..(114): Xaa can be any naturally occurring amino acid
  misc_feature (118)..(118): Xaa can be any naturally occurring amino acid
  misc_feature (121)..(122): Xaa can be any naturally occurring amino acid
MAPTVMASSATSVAPFQGLKSTAGLPVSRRSNGASLGSVSNGGRIRCMQVWPIEGIKKFXTLSYLPPLKHGXLLKQVRLXLXRSKWVPCLEFNKLGSXSRXAQRTPGVXNGRYXTMWXLPXXR

SEQ ID NO: 1987 - protein, 243 aa, Lycopersicon esculentum
KRLMTDVPFGVLLSGGLDSSLVASVTARYLAGTKAAKQWGAQLHSFCVGLEGSPDLKAAKEVADFLGTVHHEFHFTVQDGIDAIEDVIYHIETYDVTTIRASTPMFLMSRKIKSLGVKMVISGEGADEIFGGYLYFHKAPNKEEFHRETCRKIKALHQYDCLRANKATSAWGLEARVPFLDKEFINVAMSIDPEWKMIKHDQGRIEKWVLRKAFDDEEQPYLPKHILYRQKEQFSDGVGYSWI

SEQ ID NO: 1988 - protein, 136 aa, Glycine max
  misc_feature (4)..(4): Xaa can be any naturally occurring amino acid
  misc_feature (12)..(12): Xaa can be any naturally occurring amino acid
  misc_feature (18)..(19): Xaa can be any naturally occurring amino acid
  misc_feature (31)..(31): Xaa can be any naturally occurring amino acid
KRAXSDLVAKIXLSDLVXXFGMPIVEASRNXNVGLTVLKRKCREFGIPRWPHRKIKSLDSLIHDLQEEVKSQELEDREAALAVAKRQRMLESEKENIEKKPFMDIQSETKRFRQDVFKRRHRARAVGKHNSTVSST

SEQ ID NO: 1989 - protein, 348 aa, Rhodococcus erythropolis
MKAIQYTRIGAEPELTEIPKPEPGPGEVLLEVTAAGVCHSDDFIMSLPEEQYTYGLPLTLGHEGAGKVAAVGEGVEGLDIGTNVVVYGPWGCGNCWHCSQGLENYCSRAQELGINPPGLGAPGALAEFMIVDSPRHLVPIGDLDPVKTVPLTDAGLTPYHAIKRSLPKLRGGSYAVVIGTGGLGHVAIQLLRHLSAATVIALDVSADKLELATKVGAHEVVLSDKDAAENVRKITGSQGAALVLDFVGYQPTIDTAMAVAGVGSDVTIVGIGDGQAHAKVGFFQSPYEASVTVPYWGARNELIELIDLAHAGIFDIAVETFSLDNGAEAYRRLAAGTLSGRAVVVPGL

SEQ ID NO: 1990 - protein, 105 aa, Pisum sativum
MVVVSAPMAEAAISCGAVTAAVAPCFAYLKGAPSPSLQCCGGVRRLNGIPDRKGVCNCLKGAAGSVPGLKPGNVAALPANVVLDFLSRLAPLPTVMPSVFKKKCG

SEQ ID NO: 1991 - protein, 300 aa, Zea mays
PISDYPGGGRNEGKGSPATTNTMPPHRAGGAAGGGDTSAFFAATLVLWAVSVGFEIGVRGRRELAPVAAGFAFFQAANAAVRGSVSRDPRFVNTAVSLLHSSLTSVSVIFVLVNQWRNKGLENMFEHEELFGGSWIGAYSALCFSCGYFAYDQLDMLRYRLYNGWIPGILMHHLILLICFTLALYRNVTINYLILSLVCELHSIFLHVRKVRRMVGFRDFDRTMVKLEWLLNWTTFVTARVICHILITYKLVADAHKFGKGIELPLALLGMAGMNLLNIFLGLDLLKAFTRERNQQSHQD

SEQ ID NO: 1992 - protein, 495 aa, Aspergillus nidulans FGSC A4
MLGTAVPSEPVYQSSSRQPAQSSSNLETGSSISTSSNTTPTFPAPPSASAAGSSRFSTQDVPAYIRASSHPSSRSSESSTVTPGPTPIPTSAQMNPPSVVPSGQGGQTGTAPPGFGGRHTASHSSPASPQLRPTLRSLRSLGGSEASSPSRIKIRDLSHIQSFASEEFLAPPQRTRASGHWAQERQFEISSMPVTDIIEMVAGLLTKITTTNDSHHEQVHRQIPSVDGSSNLSQQAHSVLAFHGKNVPSISILSYLTRIHKYCPTTYEVFLSLLVYFDRMTEMVNKGQLDRLRGRYNRTDALQSDVAFRPRSSESSITQRSHTSPMVTPPPSAGITAQDSASTSPVSPAMNPLQGEDYLSHFFVVDSFNIHRLVIAGVTCASKFFSDVFYTNSRYAKVGGLPLAELNHLELQFLLLNDFRLSIPVEELEAYGTMLVEFYAREIVAQQQQQQQQQQQQQQHSQSQAGPMARESESDAMYMRRQPAHPEVRQTSTPP

SEQ ID NO: 1993 - protein, 607 aa, Triticum aestivum
  misc_feature (156)..(156): Xaa can be any naturally occurring amino acid
  misc_feature (388)..(388): Xaa can be any naturally occurring amino acid
MDTHIGSVDGPSPAAVNGAVGCPASAPGCPIMSSHPVVSPGEASLGRHLARRLVQVGVSDVFAVPGDFNLTLLDHLVDEPGLRLIGCCNELNAGYAADGYARARGVGACAVTFTVGGLSVLNAIAGAYSENLPVICIDGGPNSNDYRTNRILHHTXGIPDFSQELRCFQTVTCHQAVVTNLDDAHEQIDTAIATALRESKTVDLSISCNLPGLPHPTFTRDPVPFFLAPRMSNKMGLEAAVEATVEFLNKAVKPVLVAGPKLRVAKAGKAFVDLVEAASGYAYAIIAIGRFVPETHPHFLGTHLLGRRQPFCARRDWRVGRRLFAGPTFNDCRSLGWSFLPKKDKDIIVRPERVIAGNGTACGCAMIREYRTGLARRIRKKNTANENXKNIFVFVGHPLQGEANATEPLRVHVLFKHIQDMLTGDSAVLAETGDSWFNCQKLKLPEGCGYEFQMQYGSIGWSVGALLGYAQGASDKRVIACIGDGSFQVTAQDVSTMLRCEQNSIIFLINNGGYTIEVEIHDGPYNVIKNWNYTALVEAIHNGEGKCWTAKVKCEEELTAAIETALGEKKDSLCFIEVIAHKDDTSKELLEWGSRVSAANSRPPNPQ

SEQ ID NO: 1994 - protein, 288 aa, Thermococcus kodakaraensis
MGYNEQERAFIEWYPRGYGVGFKVKRRLFETQTEYQRLEIYETEGFGKLLVLDGTVQLVEVGEESYHEVLVHPVMLAHPNPRKVLVIGGGDGGTLREVLRHDTVEKAIMVEIDEGVVEASYLYLDVAKDLLDRLIKKEEPRAELIIGDGVKYLRETDERFDVIIVDSTDPVGPAKLLFSEEFYRDAYEKLNEKGLYVTQAGSVYLFTNELLDAYKAMKKVFDRVYYFSFPVIGYASPWSFLVGVKGDVDFTRIDLERAKKLDLYYYDPERHETLFQMPRYVRKLLEGQ

SEQ ID NO: 1995 - protein, 475 aa, Aspergillus niger
MASTLRLGTSALRSSSIAAKPVVQSAAFNGLRCYSTGKAKSLKETFAEKLPAELEKVKKLRKEHGSKVIGEVTLDQAYGGARGVKCLVWEGSVLDSEEGIRFRGRTIPECQELLPKAPGGQEPLPEGLFWLLLTGEIPTEQQVRDLSAEWAARSDLPKFIEELIDRCPSTLHPMSQFSLAVTALEHESAFAKAYAKGINKKDYWNYTFEDSMDLIAKLPTIAAKIYRNVFKDGKVAPIQKDKDYSYNLANQLGYGDNNDFVELMRLYLTIHSDHEGGNVSAHTTHLVGSALSSPMLSLAAGLNGLAGPLHGLANQEVLNWLTKMKAAIGNDLSDEAIKNYLWSTLNAGQVVPGYGHAVLRKTDPRYVSQREFALRKLPDDPMFKLVSQVYKIAPGVLTEHGKTKNPYPNVDAHSGVLLQYYGLTEANYYTVLFGVSRALGVLPQLIIDRALGAPIERPKSYSTELSPSLLVLSCK

SEQ ID NO: 1996 - protein, 485 aa, Xylella fastidiosa Dixon
MHHNVHQSEILADPCDLQRAERWRQRDLRVLWHPCTQMREHPDTLPLVPIVRGEGAWLVGHDGRRYLDAVSSWWTNLFGHADPRISAAIAAQARTLEHVMLAGFSHEPAVRLAEALLRLAPRQDGREPLSKVFYADNGSAGVEVALKMAFHYFRNRGEEQRTRFIALHNGYHGETIGALAVGDIPLYRRVYAPLLTEVLFAPSPDAYLAEPGQSAAEYALQAAEALEALFKRYSGQICALILEPLLQCAGGMRMHHPVYLHRVRELCDAHGALLICDEIATGFGRTGTLFACEQACPAISTDTDDKELGIMPDLLCLSKGLTGGFLPLAAVLTTQQLYEEFLDDSRERAFLHSHSYTGNPLACIAALTTLDIFENDCIIERNQVTAARMTQLAASLSGHPHVADVRQTGMVVAFELTRDGNKRTPFPPQARLGLHVYRAALARGVILRPLGDVVYWMPPYCVDEEQLHLLAETTRVAIDEAIACV

SEQ ID NO: 1997 - protein, 505 aa, Hordeum vulgare
MAAPPAIPRRGLFIGGGWREPTLGRHIPVINPATEDTIGDIPAATAEDVELAVAAGGPVLARRREPWARASGATRAKYLNAIAAKITGKIAYLALLETVDSGKPKDEAVADMDDVAACFEYYAALAEALDGKQHAPISLPMEEFKTYVLKEPIGVVGLITPWNYPLLMATWKVAPALAAGCTAVLKPSELASLTCLELGAICEEIGLPSGVLNIITGLGPDAGAPIASHPHVDKIAFTGSTATGKTIMTAAAQMVKPVSLELGGKSPLVTFDDVADIDKAVEWPMLGCFFNGGQVCSATSRLLLHEKIAEPFLDRLVEWAKNIKISDPLEEGCRLGSVISKGQYEQIKKFISTARSEGATILHGGDRPKHLGKGFFIEPTINTGVSTSMQIWREEVFGPVICVKVFKTESEAVELANDTHYGLAGGVISDDLERCERIAKVIHSGIVWKNCSQPTLVQAPWGGNKRSGFGRELGEWGLENYLSVKQVTRYCKDELYGWYQRPSKL

SEQ ID NO: 1998 - protein, 121 aa, Helicosporidium sp. ex Simulium jonesii
FTPQYAELEQLQQEFGAQGFDVLGFPCNQFMNQEPGDSCSIRDAARAKHGATFPMFAKIKVNGSEADPLYKWLKEQKGGILTSAIKWNFAKFLVDRQGKVVGRYAPTTSPKDIANDIKKFL

SEQ ID NO: 1999 - protein, 359 aa, Bradyrhizobium japonicum USDA 110
MKDTYTIAVVHGDGIGPEVARAAVAVLQAGVQAGTLRFVDYPAGADHFLKTGDSFPAASFEGCRTADAILHGAAGIPGVVHPDGTEAGLDFTLTLRFKLDLFANVRPIKLYKGVPSPLGRPGPIDYVIVRENSEGLYAARGAGALLREEVAVDTLVQTRKGVERIVRFAFELARTRNGSPKDGRRRVTCCDKANVLRTYAFFRAVFDEVAKEYPDIEAEHVLVDAMTVHLVNKPTHFDVIVTENMFGDIISDLGAATVGGMGMAPSEEVGDGIGFFQASHGSAPDIAGKGLANPYGTILASILMLRRLDQRHRDSRLKLGADRIEAAVCAGLEDPALRTRDIGGVAPTNQVVDALLKRL

SEQ ID NO: 2000 - protein, 493 aa, Bradyrhizobium japonicum USDA 110
MTKAEIRFPLDGRARKMFVDGAWVEARSGKVFETRNPATGEVIGRVPRGEAADISVAVAAARRAFVGPWSRFKPFERQALLLRIADLFEKHWEEISQSDTADMGMPIARTRANKLRVIGMLRYYAGMATALHGQTVDNSLPGDIVSFTRKEPIGVVGAIIPWNAPTAASVWKIGPALATGCTIVLKPSEEAPLTPLLIADLMNEAGVPPGVVNVVTGTGVEAGAPLAEHPDVDKIVFTGSTATGQAIIRASAGNLKRVSLELGGKSPVIVCADADLDKAVPIAAMAAFANSGQICIAGSRLFVERKIHDELVERLGKFASALKIGDGADPTTEIGPLVSQRQLDKVEGFLQSGREEGAKVVAGGRRVREGNLAKGNFVEPTVFAGVSDDMQIARDEIFGPVISALPFDTLDEAVERANATPYGLAAGVFTRDVSKAHVISRSLRAGSVWVNTYHALDPAMPFGGYKMSGYGREGGTEHLDEYLHTKGVWIKLD

SEQ ID NO: 2001 - protein, 445 aa, Streptomyces coelicolor A3(2)
MSEAELVLRSTRVITPEGTRAASVAVTGEKITAVLPYDAPVPAGARLEDVGDHVVLPGLVDTHVHVNDPGRTEWEGFWTATRAAAAGGITTLVDMPLNSIPPTTTVDNLRTKREVAADKAHIDVGFWGGALPDNVKDLRPLHEAGVFGFKAFLSPSGVDEFPHLDQEQLARSLAEIAAFDGLLIVHAEDPHHLAAAPQQGGPKYTHFLASRPRDAEDTAIATLLAQAKRFNARVHVLHLSSSDALPLIAEARADGVRVTVETCPHYLTLTAEEVPDGASEFKCCPPIREAANQDLLWQALADGTIDCVVTDHSPSTADLKTDDFATAWGGIAGLQLSLPAMWTAARGRGLGLEDVVRWMSERTAALVGLDARKGAIAPGHDADFAVLAPDETFTVDPAALQHRNRVTAYAGKTLYGVVKSTWLRGERIVADGAFTDPKGQLLDRA

SEQ ID NO: 2002 - protein, 140 aa, Zea mays
STYKGKVLLIVYVASQCGLTDSNYTELSHLYEKHKGQGFEILAFPCNQFGAQEPGTNDEIVEFACTRFKAEYPIFDKVDVNGDTAAPIYKFLKSSKGSLFGDGIKWNFAKFLVDKEGHVVHRYAPTTSPLSIEKDIKKLL

SEQ ID NO: 2003 - protein, 139 aa, Parietaria judaica
QETCGTMVRALMPCLPFVQGKEKEPSKGCCSGAKRLDGETKTGPQRVHACECIQTAMKTYSDIDGKLVSEVPKHCGIVDSKLPPIDVNMDCKTVGVVPRQPQLPVSLRHGPVTGPSDPAHKARLERPQIRVPPPAPEKA

SEQ ID NO: 2004 - protein, 110 aa, Chromobacterium violaceum ATCC 12472
MPPAGCSSCVMCSCRSGNSRTSVAISLDLRAFYSTARFEEFNKMATGTVKWFNDSKGFGFITPDEGGDDVFAHFSQINAKGFRSLAENQRVSFDIVEGPKGKQASNIQPI

SEQ ID NO: 2005 - protein, 181 aa, Triticum aestivum
  misc_feature (14)..(14): Xaa can be any naturally occurring amino acid
  misc_feature (29)..(29): Xaa can be any naturally occurring amino acid
  misc_feature (94)..(94): Xaa can be any naturally occurring amino acid
YSPWPPTVMASSAXTSVAPFQGLKSTAGXLPSAAAPTAASLGSVSNGGRIRCMQVWPIEGIKKFETLSYLPPLSTEALLKQVDYLIRSKWVPCXLEFSKVGFIFREHNASPGYYDGRYWTMWKLPMFGCTDATQVINEVEEVKKEYPDAYVRIIGFDNMRQVQCVSFIAFKPPGCEESGKA

SEQ ID NO: 2006 - protein, 142 aa, Brassica napus
  misc_feature (137)..(137): Xaa can be any naturally occurring amino acid
MAMAFKMATTGMRVTEECTSSFLEMKWKKVHRYIVFKIDENSRKVTVDKVGGAGENYQDLTASLPVDDCRYAVFDFDFVTVDNCRKSKIFFIYWSPEASRIRAKILYATSKAGLRRVLEGIHYELQATDPTEMGFDXIQDRA

SEQ ID NO: 2007 - protein, 354 aa, Nicotiana tabacum
  misc_feature (211)..(211): Xaa can be any naturally occurring amino acid
MKTTKPLKELKLSVPAQDTPISSFLTASGTFHDGDLLLNQKGLRLISEENESPASETKEIDLQFSLEDLETIKVIGKGSGGVVQLVRHKWVGTLFALKVIQMTIQEDIRKQIVQELKINQASQCSHVVVCYHSFYHNGAISLVLEYMDRGSLADVIRQLKTILEPYLAVVCKQVLQGLVYLHNERHVIHRDIKPSNLLVNHKGEVKITDFXVSAMLASSMGQRDTFVGTYNYMAPERISGSTYDYKSDIWSLGMVILECAIGRFPYIQSEDQQAWPSFYELLEAIVSSPPPSAPAVQFSPEFCSFVSACIQKDPRDRSSALDLLSHPFIKKFEDKDIDFGILVSSLEPPVNFPR

SEQ ID NO: 2008 - protein, 182 aa, Bdellovibrio bacteriovorus HD100
MSTLNHIEFNTADGKKATLADYSGKVLLVVNVASECGLTPQYEGLEKIHQKYESQGLRVLAFPANEFGAQEPGSNEQIQEFCRTQFGVKFPVFAKMVVKGEGQHPLYQQLTTLQPAAQQVPGGKLKSVLEEHGLLSGGPSDIMWNFEKFLIGKSGNVVARFAPDMTPEDPTIVKAIEAELAR

SEQ ID NO: 2009 - protein, 386 aa, Aspergillus flavus
MTGLDMETIFAKIKDEYARTDDVGKRQIQGHIRELQVGFYSDWDVVMRLSSGPLQVALAKVAIDLGIFRSLKESDTPITLAEFVKKTGASPRLLGRILRTQAAFGLIKETGPQEYTSSAFTDVFANSDAAGAVVQLFDISGPCTQILPDFLAERNYQDITSNKDCVFQKAFGSDLTMFEWMPQHPKHMESLGHLMALERPVSWVDHFPILEELGKFPAPDKVLMVDIGGGFGQQSKALRAKFPNLPGRLIVQDIPQTLANAQPAAGIEFMEHNFFEPQPIQNAKFYYLRHVFHDWPDEQCVLILKQIIPAMGPESQILIDEMVIPSTGVPWQAAFTDLLMMNSLGGVERTRAEWDDLMEQAGLEIIQSKVYDSKEQAILVAVAKRT

SEQ ID NO: 2010 - protein, 250 aa, Glycine max
MGKSYPTVSADYQKAVEKAKKKLRGFIAEKRCAPLMLRLAWHSAGTYDVSSKTGGPFGTIKHPSELAHGANNILDIAVRLLEPLKAEFPILSYADFYQLAGVVAVEVTGGPEVPFHPGREDKPEPPPEGRLPDATKGSDHLRDVFGKAMGLSDRDIVALSGGHTIGAAHKERSGFEGPWTSNPLIFDNSYFKELLSGEKEGLLQLPSDKALLSDPVFRPLVEKYASDEDAFFADYAEAHQKLSELGFAEA

SEQ ID NO: 2011 - protein, 246 aa, Triticum aestivum
MKGGDIEAGTSGGTAAAPAGALYPGMAESPELRWALIRKIYVIVSLQLLLTAVVAAVVVKVPAIPHFFASSYAGLGLYIFLLILPFIVLCPLYIYRQKHPVNLLLLGVFTVAISFAVGMTCAFTSGKVILEAAILTTVVVFSLTAYTFWAVKRGKDFSFLGPFLFASLIMLLVFGFIQILFPLGKLSHMIYGALAALIFSGYIVYDTDNIIKRYTYDEYVWAAVSLYLDIINLFMALLTLFSAGDS

SEQ ID NO: 2012 - protein, 240 aa, Glycine max
MATCGLSTVIFSFVVLMLLSASSHTMVAGARNLLESTLPKPEVPQLPKPELPPLPKVPELPKAELPKIPTFPKPELPKVPELPKLEKPKVPELPKVSEIPKVPKLPKAPEMFKVSELPKLELPKVAEISKILELSKPELPKIPKLPKIHELSKVPELSNPELSKVSELPKVPELPKVPELSKPELPKVPELPKVRELPKPEFSKVPELPKVHELPKPEIPKILEFPKVPQFPKAFSTSNP

SEQ ID NO: 2013 - protein, 235 aa, Brassica napus
MGGFVKTHKTNAYFKRFQVKFKRRRAGKTDYRARIRLINQDKNKYNTPKYRFVVRFTNKDITAQIISASIAGDMVLASAYSHELPRYGLEVGLTNYAAAYCTGLLLARRVLKIRGLDKEYEGNVEATGEDFSVEPADERRPFRALLDVGLIRTTTGNRVFGALKGALDGGLDIPHSEKRFAGFKKDDKQLDADIHRKYIYGGHVADYMRNLAEEEPEKYQSHFSEYIKKGIEADD

SEQ ID NO: 2014 - protein, 249 aa, Triticum aestivum
MLSARTAAAASPAASLWKRGGGAGARGDGCTSCLEVRRRAAAVTVRAAQPKRVEAVAMESAAETAEAEKEVAAEKEVAAAGGGVEDKYGEDRATEELPVTPWAFSVASGYTLLRDPHHNKGLAFTERERDAHYLRGLLPPGVVSQDLQVKKIMHNLRQYKVPLQRYVAMMDLQERNERLFYKLLIDNVEELLPVVYTPTVGEACQKYGSIFRRPQGLYVSLRDRGKVIDVLKNWPERNIQVIVVTDGER

SEQ ID NO: 2015 - protein, 89 aa, Brassica napus
MDIISGLPDELLVKILLLVPTKVAVSTSILSKRWKYLWMWLPKLDYGPRDCSESECEKLRCFLDRTLPLHRAPVIESFSLDLCCSRFKP

SEQ ID NO: 2016 - protein, 131 aa, Brassica napus
LGKREPLPEDMADTNGSAESDSYRFRRFMIYVHAKGMIVDDEYVLIGSANINQRSMAGTKDTEIAMGAYQPHHTWTNKGKHPRGQVYGYRMSLWAEHLGKTGDEFVEPGDLECVRNVNEIAEGNWKTFIDS

SEQ ID NO: 2017 - protein, 399 aa, Ralstonia metallidurans CH34
MTARKHTKLNQETQMSEAQPLATPKPKKSVALSGIAAGNTALCTVGRSGNDLHYRGYDILDIADTCEFEEIAHLLVHGKLPTKSELAAYKVKLKALRGLPANVKAALEWVPASAHPMDVMRTGVSVLGTVLPEKDDHNTPGARDIADRLMASLGSMLLYWYHYSHNGRRIEVETDDDSIAAHFLHLLHGEAPSKLWERAMQTSLILYAEHEFNASTFACRVVAGTGSDMYSAICGGIGALRGPKHGGANEVAFEIQKRYDTPDEAEADIRRRVENKEVVIGFGHPVYTISDPRNVVIKEVARKLSKDAGSMKMFNIAERLETVMADAKKMFPNLDWFSAVSYHMMGVPTAMFTPLFVIARTSGWAAHVIEQRVDNKIIRPTANYTGPENLKFVPIEKRA

SEQ ID NO: 2018 - protein, 93 aa, Glycine max
RTSSQVVTTVNRAGAGLVVQLTGLKSMVGFPTRKTNIAFTSIVGTGGGVHCLQGWPPIGKKKLGTFSYLPDLDDAQLAKEVDSLLRKGWIPCL

SEQ ID NO: 2019 - protein, 231 aa, Agrobacterium tumefaciens str. C58
MDARQMKIKAAEAALSHVQDGMRLGIGTGSTAEEFVRLLAEKVAAGLKVEGVPTSERTARLCVELGVPLKSLDELPELDLTIDGADEVDHVLRLVKGGGGALLREKIVAAASGRMIVIADQSKVVETLGAFPLPIEINPFGQVATRIAIEKLAARSGLSGELTMRSSGDGAFMTDGGHLILDASFGRIPDAEALARELNTIPGVVEHGLFINLASLAIIAGPEGARMMQAV

SEQ ID NO: 2020 - protein, 421 aa, Glycine max
MDDAMGPDLISDLPQSIIESILVQLPIRDAVRTSILSSKWRYKWASITRLVFDDKCVPFSNDREVVEKSVVKFITRVLFLRQGPIHKFQITNSKLQSCPEIDQWILFLSRNDIKELVMELGEGEFFRIPSSLFNCGKLTRLDLSRCEFDPPHSFKGFVCLRSLNLHQVLISPDAIESLISRCPLLESLSLSYFDNLALTICAPNLKYLYLEGEFKDICLEDTPLLVEITIAMYMTDDIAEHFEQISNCNFVKFLGGVPNLEKLVGLIYFTKYLSIGIDFVHPPMMYNNLESIELYQVNFEDMVEILVILRLITSSPNLKELQISGSSNIPVAVDTPDLDFWEKECLSDSTLNKLKTVKLSEMGGWPHEIEFIKYLLGRSPVLETLSIIPCVFDMENNLKMLIELVKCRRASTRAEVIFTRE

SEQ ID NO: 2021 - protein, 90 aa, Glycine max
  misc_feature (5)..(5): Xaa can be any naturally occurring amino acid
  misc_feature (35)..(35): Xaa can be any naturally occurring amino acid
  misc_feature (61)..(61): Xaa can be any naturally occurring amino acid
  misc_feature (83)..(83): Xaa can be any naturally occurring amino acid
RRFFXLIKMYFPMGYDIKHLMKFCSSLHGGGNKLXELLEVERGGVCHQAGSDRGGASCTFXKWRDTFFRGSTEKYAGVLYGLXGESGQTN

SEQ ID NO: 2022 - protein, 294 aa, Saccharomyces cerevisiae
TTPLVHVASVEKGRSYEDFQKVYNAIALKLREDDEYDNYIGYGPVLVRLAWHTSGTWDKHDNTGGSYGGTYRFKKEFNDPSNAGLQNGFKFLEPIHKEFPWISSGDLFSLGGVTAVQEMQGPKIPWRCGRVDTPEDTTPDNGRLPDADKDADYVRTFFQRLNMNDREVVALMGAHTLGKTHLKNSGYEGPWTANNNVFDNSFYLNLLNEDWKLEKNDANNEQWDSKSGYLQLPTDYSLIQDPKYLSIVKEYANDQDKFFKDFSKAFEKLLENGITFPKDAPSPFIFKTLEEQGL

SEQ ID NO: 2023 - protein, 107 aa, Brassica napus
  misc_feature (99)..(99): Xaa can be any naturally occurring amino acid
MDNTNRRRRSKQHKVTLEDSEEVSSIEWKFINMTEQEEDIILRMYRLVGDRWDLIAGRVPGRQPEEIERFWIMRNSDSFAEKRLQLHHSSSHKNNKLHXRPRPSIYP

SEQ ID NO: 2024 - protein, 472 aa, Escherichia coli O157:H7 EDL933
  misc_feature (309)..(309): Xaa can be any naturally occurring amino acid
MTTHLVWFRQDLRLHDNLALAAACRNSSARLLALYIATPRQWAAHNMSPRQAELINAQLNGLQIALAEKGIPLLFREVDDFAASVEIVKQVCAENSVTHLFYNYQYEVNERARDVQVERTLRNVVCEGFDDSVILPPGAVMTGNHEMYKVFTPFKNAWLKRLREGMPECVAAPKVRSSGSIKPAPSITLNYPRQSFDTAHFPVEEKAAIAQLRQFCQNGAGEYEQQRDFPAVEGTSRLSASLATGGLSPRQCLHRLLAEQPQALDGGAGSVWLNELIWREFYRHLMTYYPSLCKHCPFIAWTDRVQWQXNPAHLQAWQEGKTGYPIVDAAMRQLNSTGWMHNRLRMITASFLVKDLLIDWREGERYFMSQLIDGDLAANNGGWQWAASTGTDAAPYFRIFNPTTQGEKFDREGEFIRQWLPELRNVPGKSVHEPWKWAEKAGVKLDYPQPIVEHKEARVQTLAAYEAARKGK

SEQ ID NO: 2025 - protein, 461 aa, Burkholderia cepacia R18194
MSEFEQVVRGRLVDAREVVDDGWLAIRNGRIAARGTGAPPAARDTIDARGQWVLPGVVDGQVHAASQANQEGLGHASRAAAAGGVTVMVDMPYDDPEPVASRAQLDRKIAEAERDCHVDVALYGTLNAKHGLEAAAGLIDGGVCAFKFSTFEATPGRFPRVEEDVLYDAFRLIAPSGLACGVHNQMQDMTRKNIARMIEAGDTGWDAFLRAHPPLIENLATALIYEIGAETGARAHAVHVSTSRGFELCNLFRQAGHRASIETCVQYLMLDHETHTKRFGSKTKHYPPIRPRAEQDLLWTHIARGECTFVSSDHVSWGLERKGDPNVFRNASGGPGLETLLPAFWTGCEQHGVAPTRVAELLATNPARHFLLDDRKGSLDVGADADFVILTPERYAFDPSRSLSAVQWSAFEGMEFTVRIAATYCRGALVYDGERIVNPAGSGRFLKPHGSRSIATHREHA

SEQ ID NO: 2026 - protein, 124 aa, Brassica napus
  misc_feature (113)..(113): Xaa can be any naturally occurring amino acid
  misc_feature (121)..(121): Xaa can be any naturally occurring amino acid
  misc_feature (123)..(123): Xaa can be any naturally occurring amino acid
MLVAAASTLFSLSSAVFTRRRSFRVSATLSREPSPLLRAAHHTVDSYVKSGMVVGLGSGEASDLAIRYLGHQLRSGSVQDVVGVPMSARSASEAAKYGVPLKHFRDDFQIDFXFHDADAVXKXT

SEQ ID NO: 2027 - protein, 329 aa, Triticum aestivum
  misc_feature (245)..(245): Xaa can be any naturally occurring amino acid
  misc_feature (279)..(279): Xaa can be any naturally occurring amino acid
  misc_feature (287)..(287): Xaa can be any naturally occurring amino acid
  misc_feature (301)..(301): Xaa can be any naturally occurring amino acid
MKTLLILTILAMATTIATANMQVDPSSRVQWPQERPFPQSQQPFSQQPQQIFPQPQQTFPHQPQQAFPQPQQTFPHRPQQQFPQPQQPQQPFPQPQQPQLPFPRQPQQPFPQTQQPQQPFPQQPQQPFPQTQQPQQPFPQLQQPQQPFPQPQQQLPQPQQPQQSFPQQQRSFIQPSLQQQLNPCKNILLQQCKPASLVSSLWSIIWPQSDCQVMRQQCCQQLAQIPQQLQCAAIHSVVHSIIMQXKQQQQQQQQGMHIFLPLSQQQQVGQGSLVQGQGXIIQPQQPXAQLEAIRSLVLQTXLPSMCNVYVPPECSIMRATMPATIPATK

SEQ ID NO: 2028 - protein, 343 aa, Haloarcula marismortui ATCC 43049
MRTAVLVEPTEFELEDRPRPSPGPDEVLVAVRDVGICGSDVHYYEHGRIGDYVVEDPLVLGHESAGKVVEVGENVTDHEPGDRVALEPGVPCRRCAHCKRGDYHLCESVRFMATPPHDGAFTEYVSWPADFAYTLPESVSTAEGALCEPLSVGIHACRRGSVGTGDTVLITGAGPIGLMVLEAARAAGATDIILTDVVKEKLEFAEKRGADLTVDVTETDLDTAVAEYTDGVGADVVVEASGAEPSIKSTIDVVRRGGTVVLVGLASEAEVPFDVLELIDNEVDVHGSFRYKNTYDAAVDLLADGEVDVEGIIDFESELEDIDDAFRRSMEPTVVKGMISLDS

SEQ ID NO: 2029 - protein, 301 aa, Gibberella zeae PH-1
MPFKLVKNSAYYSRYQTKYKRRQQGKTDYYARKRLITQAKNKYNAPKYRLVVRFTNKDIICQIVTSEISGDKVFISAYAHELKAYGIEHGLTNWAAAYATGLLVARRALKKLGLDEDFAGVEEADGEYKLTEAAETDDGERRPFKVFLDVGLKRTSTGARVFGAMKGASDGGILVPHSEKRFPGYDMETKELDADTLRNYIFGGHVAEYMETLADDDEERFRSQFQKYVDDDVEAEGLEDLYTEAHAAIREDPFKKVESDAPKKTKEEWKEISQKYKSKKLTKEEKEKRVQERIQEIMQRD

SEQ ID NO: 2030 - protein, 270 aa, Exiguobacterium sp. 255-15
MQYAKLSNGVTIPQIGFGVWQVDEETEAPAAVAEALRVGYRHIDTAAVYKNERGVAKGIKESGVNREDLFLTSKVWNDDIRAGRTKEAFAESLERLETDYLDLYLIHWPVEGYIEAWKAMVELYEAGKIKAIGVSNFKEHHLDTLAEEGLMTPMINQVELHPQLPQHELHEYLQDHSIQVEAWSPLMQGKFLEINDFKEIAEKHGKSPSQVVLRWHLDNGIVALPKSVTPERIAENFDVFDFQLDADDLEKIDRLATDVRLGPDPDEIDF

SEQ ID NO: 2031 - protein, 438 aa, Glycine max
MGEKSNVGGDAINTTLLHGKYELGRLLGHGTFAKVYHARHLKTGKSVAMKVVGKEKVVKVGMMEQIKREISAMNMVKHPNIVQLHEVMASKSKIYIAMELVRGGELFNKIARGRLREEMARLYFQQLISAVDFCHSRGVYHRDLKPENLLLDDDGNLKVTDFGLSTFSEHLRHDGLLHTTCGTPAYVAPEVIGKRGYDGAKADIWSCGVILYVLLAGFLPFQDDNLVALYKKIYRGDFKCPPWFSSEARRLITKLLDPNPNTRITISKIMDSSWFKKPVPKNLMGKKREELDLEEKIKQHEQEVSTTMNAFHIISLSEGFDLSPLFEEKKREEKELRFATTRPASSVISRLEDLAKAVKFDVKKSETKVRLQGQEKGRKGKLAIAADLYAVTPSFLVVEVKKDNGDTLEYNQFCSKELRPALKDIVWRTSPAENPTLA

SEQ ID NO: 2032 - protein, 444 aa, Ralstonia metallidurans CH34
MGKIPEGDARDAENAIAAARAAFEAWSATPPSVRADYIRKIAEGLKARCEELAQMIAGEVGMPIKLARAIQVGGPVYNWGQAAALLDQFAFEEQVGNSLVVREPVGVVAAITPWNYPLNQITLKVAPALAAGCTVVLKPSEVAPLNAFVLAEVIEAAGLPPGVFNLVTGYGPVVGEVLASHPEVDMVSFTGSTRAGKRVSELAAQSVKRVALELGGKSASVILDDADLPTAVKGTIGACYLNSGQTCSAHTRMLVPRSRYEEVKAIAAKVVEGFTVGDPLADTTKLGPLISAVQKERVTGYIRRGLDEGAELVAGGPDTPAGLDRGFFVKPTVLGNVDPKATVAQEEIFGPVLSVICYDTEDEAIRIANDSIYGLGGGVWSGDESRAIRVARRIRTGQVDINGGPFNMNAPFGGFKQSGNGREGGKFGLEEFLEYKSLQLKKPA

SEQ ID NO: 2033 - protein, 462 aa, Thermosynechococcus elongatus BP-1
MVIASVNPTTAEVLKTFSPLGAEEVDRAIAQAATTFETYRLTSFEQRAQWLENTANLLQQQRETLARLMTLEMGKPIAEARAEIDKCAWVCRYYAEQGAAFLEPEFIPTEASYSAIHYQPLGIILAVMPWNFPFWQVFRFAAPALMAGNVALLKHASNVPQCALAIAQIFRQAGFPEGVFQTLLIPGSAVADLVADPRIKAATLTGSEAAGTSLAQAAGQHLKKTVLELGGSDPFIVMPSANISQAIATAVQARMINNGQSCIAAKRFIVHEAVYDTFAEGIKAAFESWVIGDPLEPTTQLGPLATAAIRDELHAQVELALGHGAKAFYRRSLDLPTQCRQGYFFGPTILTEVTPNNPVFTQELFGPVAMLFRVSSLTAAIELANATPFGLGASAWTQDSDEAEILVRDLEAGAVFINAMVKSDPRLPFGGIKTSGYGRELGRAGLLEFVNIKTVCRANTHS

SEQ ID NO: 2034 - protein, 417 aa, Streptomyces hygroscopicus
MTPQQRSAVLSRAAALLESRAEEFSALITSESGVCRKETLREVSRAAGNLKVAAAEAERIRGESIPLPDGTRLAVTLPEPVGVVLGITPFNRPLNQVVVKAAPALAAGCPLLLKPSEKTPLTALAFAELLIEAGCAKDMLGVVTGEPGELGPLLASHPDVAMVTFTGSVATGHSVAALAAGKRQLLELGGNDPLFVLPDADLPHAARLAAGGACATAGQSCRGIKRIFVWEEVADEFTDLLSTEVAGKQAGDPRRSDTDLGPLISEEAALVVERRIADAVRDGARLVTGGERDGALVHPAVLDRVPADTELVREETFGPVAPVIRVRGADEAVRLSNSTAYGLQAGVLTRDSARFWDLAARLRVGAVNLGEGPHFDSPHIPFGGVKACGIGREGIRYAIAEMTVTKTVTLPGPYGTG

SEQ ID NO: 2035 - protein, 227 aa, Clostridium acetobutylicum ATCC 824
MAKDNLKKISAKKALEYIKDNTVIGLGGGETIGYLCDYLKEKIKSGFNIKVVTPSIKTRNTCIENGIEVLYTSSVEHLDVAFDGCDQLDEKLNALKSCGGIHSKEKIIASMADKYILLTNESKFVKKLDSTYPIVLEILEESAGYVKRRISEIGGKATFRSSAAKDGFTITDSGNLLLDVFFDELGDAKELQKGLKGITGVVETSLFVDLVSQAIIAYEDDIKIISK

SEQ ID NO: 2036 - protein, 237 aa, Zea mays
ELLPVVYTPTVGEACHKYGSIYRRPQGLYISLKDKGKILEVLKNWPERSIQVIVVTDGERILGLGDLGCQGMGIPVGKLSLYTALGGVRPSACLPITIDVGTNNEALLNDDFYIGLRQRRATGEVTHSHPFHLIVVEYHELVEEFMAAVKQNYGEKVLTQFEDFANHNAFDLLEKYRESHLVFNDDIQGTASVVLAGLLAALKVVGGTLADHTYLFLGAGEASRFAYTRSELWTAFR

SEQ ID NO: 2037 - protein, 486 aa, Rubrobacter xylanophilus DSM 9941
MQSRVIESQIESRNYIGGEWVPADSGEVEEVRNPARPSEVLGTAPRSDRGEMERAVAAAQEALPGWRSALPAARGQILLRAADIIDSRSEELARLMALEAGKPLGESRAEVSRAAAIFRYYGSEGWRLYGVEAPSTRPGVRITSTREPLGVVGLITPWNFPLAIPSWKMAPALICGNTVVIKPAANAVLNAAELVRILEEAGLPGGVVNLVMGPGGSSGDALVRDERVRAISFTGSTAVGLSIQERAAGKKVQLEMGGKNPYVVMEDADLEDAAAKVAYGAFGYAGQKCTASSRAVVVEEVYEAFLEQVVEATRALKLGEPLDEEAVIGPVINESQYESILGAIEQAREDGRVVLDGGATGPREEGYYISPVIVADVDNGSKTAREEIFGPVLAVIKARDFDHAVEIANDTRYGLTAGIATRSLRYAEEFIERSQTGLVNVNLPTAGVEFQVPFGGSKQSGVGGREQGMAAIEFYTGWKTASVLAL

SEQ ID NO: 2038 - protein, 449 aa, Xylella fastidiosa Temecula1
MNPTLIVNARLVNEGREFDSDLRIENGRIARIDTGLSAQSKDIVIDAAGRRLLPGMIDDQVHFREPGLTHKGDIASESAAAVAGGLTSFMDMPNTNPPTLGAAALQAKYDAARGRAWGNYGFYLGASNDNLAAIQALDPKTSPGIKVFMGASTGNMLVDNETTLEGIFRYAPTPIITHCEDTPTINATLAKYHSRYGNTLSAEQHPDIRSRQACLKSSQLAVSLAKKNGTRLHVLHISTADELRLFEAGPLVDAAGKRCKQITAETCIHFLHFDRMDYARLGNLIKCNPAIKEASDREALIAALAKDVIDVLATDHAPHTWEEKQQPYAQAPSGLPLVQYALVAALELVHAGRLSVTEIVRKFAHAPAQLFDVIERGFLREGYWADLVLVEDTPFTVKRQEILSKCGWSPFEGTTFRSRIASTWVNGNHVWDGNRLVGVPNGQRLEFDR

SEQ ID NO: 2039 - protein, 230 aa, Lycopersicon esculentum var. cerasiforme
ENVYMAKLADRAESDEEMVEFMEKVSNSLGSEELTVEERNLLSVAYKNVIGARRASWRIISSIEQKEESRGNEEHVNSIREYRSKIENELSKICDGILKLLDSKLIPSATSGDSKVFYLKMKGDYHRYLAEFKTGAERKEAAESTLTAYKAAQDIASAELAPTHPIRLGLALNFSVFYYEILNSPDRACNLAKQAFDEAIAELDTLGEESYKDSTLIMQLLRDNLTLWTS

SEQ ID NO: 2040 - protein, 418 aa, Schizosaccharomyces pombe
MLKLAESGAILQDYLDDYFYTSWYTGNRNLIQLDHYGFPTASNFELNPKSTDNCGTVDFQGIPWGNKAIGKRKNFRLYRLHTYSLSCNHSDWSPEELSLDTVQVAAEDSFYEFQRFLKNPNCLRNHHHLCKSVKVVGEHSVIYVSNNSIRMENTLHDNSVQIIDLKNNILQKKAISCLDTTNAVGCLGTLYGQYCIFNFKNGSFSTRKLSDDSINHIQLFSEKKFILGCNDGAVYVEDVQRTSPILVYRCSNAVNCVQLFDETPLALVCTDSKDAMLIDIRSNSVSAKLPHSDSVLTGSWHPNGNILATGGQDTTAKVWDIRALGKSFRNLGSQMSAVTNLCFSPLGESLAVTEQADFVQLFDTKLFNTSQVIDFFGEIAGTAYSSSGDSLFIGVDDPMLGGILEFRRPLQHPLSFIF

SEQ ID NO: 2041 - protein, 263 aa, Oryza sativa (japonica cultivar-group)
MEGRVLRRSVTLADQLAAVGPAGTAAATAAAGSCNLRDLLKLRDEDDLAAGRRAAVTLASAMAAERLTVAPASSAAAAAAAARTLLDIIRDDQLPSSSGGGGEGGDPLVRRAVSLPAPVTATPPPPPPPPETPPRQLPSVSPPTVGEEEEEEQGERVSLMALLEQTERQWSAGSGATVQQHLASPSAAASASVSAAAEDEAEAEAGKGAAGGGCCCVCMARAKGAAFIPCGHTFCRTCARELLAGRGRCPLCNAAILDVLDIF

SEQ ID NO: 2042 - protein, 508 aa, Malus x domestica
MGFAKKEHEFLSAIGLAPENPGGFINGKWKASGPVISTVSPSNNQEIAKVTEVSMEEYEEGLRSCNDAAKTWKSLPAPKRGEIVRQIGDALREKLQHLGKLVSLEMGKILAEGIGEVQEVIYMCDFAVGLSRQLNGSIIPSERPDHMMFEVWNPLGIVGVITAFNFPCAVLGWNACIALVCGNCVVWKGAPTTPLVTIAVTKLIAEVLEKNNLPAAIFTAFCGGAEIGEAIAKDTRIPLVSFTGSSKVGAKVQQIVTERFGKCLLELSGNNALIVMDDADVGLAVRSIFFAAVGTAGQRCTTCRRLYLHESIYQNVLDKLVGLYNQVKIGDPLEEGTLVGPVHTKASRENFEKGISTIKSQGGKILTGGSVIESDGNFVQPTIVEIASNASVVKEELFGPVLYVMKFKTLEEAIALNNSVPQGLSSSIFTSKPNTIFKWIGPHGSDCGIVNVNIPTNGAEIGGAFGGEKATGGGREAGSDSWKQYMRRSTCTINYGTELPLAQGINFG

SEQ ID NO: 2043 - protein, 449 aa, Arabidopsis thaliana
MSGSRRKATPASRTRVGNYEMGRTLGEGSFAKVKYAKNTVTGDQAAIKILDREKVFRHKMVEQLKREISTMKLIKHPNVVEIIEVMASKTKIYIVLELVNGGELFDKIAQQGRLKEDEARRYFQQLINAVDYCHSRGVYHRDLKPENLILDANGVLKVSDFGLSAFSRQVREDGLLHTACGTPNYVAPEVLSDKGYDGAAADVWSCGVILFVLMAGYLPFDEPNLMTLYKRVRICKAEFSCPPWFSQGAKRVIKRILEPNPITRISIAELLEDEWFKKGYKPPSFDQDDEDITIDDVDAAFSNSKECLVTEKKEKPVSMNAFELISSSSEFSLENLFEKQAQLVKKETRFTSQRSASEIMSKMEETAKPLGFNVRKDNYKIKMKGDKSGRKGQLSVATEVFEVAPSLHVVELRKTGGDTLEFHKFYKNFSSGLKDVVWNTDAAAEEQKQ

SEQ ID NO: 2044 - protein, 579 aa, Glycine max
MCGILAVLGCSDSSQAKRVRVLELSRRLKHRGPDWSGLHQYGDNYLAHQRLAIVDPASGDQPLFNEDKTVVVTVNGEIYNHEELRKQLPNHTFRTGSDCDVIAHLYEEHGENFMDMLDGISSFVLLDTRDNSFIVARDAIGVTSLYIGWGLDGSVWISSELKGLNDDCEHFESFPPGHLYSSKERAFRRWYNPPWLSLAIPSAPYDPLALRHAFEKLWIKRLMTDVPFGVLLSGGLDSSLVAAVTARYLAGTKAAKQWGTKLHSFCVGLEGAPDLKATKEVAEYIGTVHHEFHYTVQDGIDAIEDVIYHIETYDVTTIRASIPMFLMSRKIKSLGVKWVISGEGSDVFFGGYLYFHKAPNKEEFHQETCRTIIVLHRYDCSRANKSTFVWGLEARVPFLDKEFIRVAMNIDPECKMIKKEEGRIEKWALRRAFDDEEHPYLPKHILYRQKEQFSDGVGYGWIDGLKAHAEKHVTDRMMLNAANIFPFNTPTTKEAYHYRMIFERFFPQNSCRLTVPGGTSVACSTAKAVEWDAAWSNNLDPSGRAALGVHASAYGNQVKAVEPEKIIPKMEVSPLGVAI

SEQ ID NO: 2045 - protein, 160 aa, Triticum aestivum
  misc_feature (19)..(19): Xaa can be any naturally occurring amino acid
  misc_feature (43)..(44): Xaa can be any naturally occurring amino acid
LWGSRHDGTLESSRSGASXTYRSSPRHPQGGHIVIKARPCKVXXVSTPKTGKHGHAKCHFVAIDILMGKKLEDIVPSSHNCDVPHVDRQDYQLIDITDDGYVSLLTESGNTKDDLKLPTDDVLLGQIKTGFADGKDLILSVMSAMGEEQICAVKEIGGGK

SEQ ID NO: 2046 - protein, 190 aa, Xylella fastidiosa 9a5c
MHTHVSHAFASKLSLLSLDRFPMSSIYTFTFTRLDGRPQALADWRGQVLLLVNVASRCGFTPQYAGLEMLWQRYRDAGLIVIGFPCDQFAGQEPGDEAKIAEFCTLNYGVDFPMAAKIKVNGADAHPLWQWLKHRRRGLFGMAAIKWNFTKFLIGRNGQPIARYSPIKSPEQLEVHIVRALGEEGGGNTH

SEQ ID NO: 2047 - protein, 318 aa, Zea mays
MEAEAAAKRTRDSGEDAAAAGISAVIPGWFSEISPMWPGEAHSLKVDKVLFQGKSDYQNVMVFQSSTYGKVLVLDGVIQVTERDECAYQEMITHLPLCSIKDPKKVLVIGGGDGGVLREVSRHSSVEQIDICEIDKMVVDVSKQFFPHLAVGFEDPRVSLHIGDGVAFLKNAPEGTYDAVIVDSSDPIGPAQELFEKPFFQLVARALRPGGVVCTQAESIWLHMHIIEDIVVNCRQVFKGSVNYAWTTVPTYPSGVIGFMLCSTEGPAVDFQHPVFNIEEDEHPMKSKGPLKFYNSEIHTASFCLPSFAKRVIESKAN

SEQ ID NO: 2048 - protein, 461 aa, Zea mays
  misc_feature (172)..(172): Xaa can be any naturally occurring amino acid
  misc_feature (236)..(236): Xaa can be any naturally occurring amino acid
MAEPAAAGRKTRVGPYEVGKTIGEGSFAKVKHAHDSRTGAVRAIKVLDRNHVLRHKMVEQIKREISTLKLIKHPNVVQLHEVMASRTKIYMVLEFVDGGELFDKIVNSGRLGEDEARIYFHQLINAVDYCHSRGVYHRDLKPENLLLDSHGTLKVSDFGLSAFAPQTKEDGXLHTACGTPNYVAPEVLADKGYDGMAADVWSCGIILFVLMAGYLPFDDANLMILWLDTYPLMMPXLMRLYKLICHATFSCPPWFSSGARKFIKRILDPNPDTRITIAEILEDEWFKKGYKPPRFEQGEDVSLDDIDAAFNDSEDRLVAEKREKPESMNAFALISRSQGFNLGNLFEKEMMGMVKRETSFTSQCTAQEIMTKIEDACGPLGFNVRKQNYKMKLKGDKSGRKGHLSVATEVFEVAPSLHMVELRKTGGDTLEFHSFYKNFSSELKDIVWKAESDANNKQTNK

SEQ ID NO: 2049 - protein, 491 aa, Pseudomonas mendocina
MDTTRPAYQNLELQPLAGQWRAGSSGRPLEVFDPYNDELLLRIALASREDLDAAYRKARDSQREWATTAPAERARVLLEAVKIFDERREEIIDWIIRESGSTRIKAQIEWGAARAITLESASLPNRVHGRIIASNISGKESRVYRAPLGVIGVISPWNFPLHLTARSLAPALALGNAVVVKPASDTPITGGLLLARIFEEAGLPAGVLSVVVGSGAEIGDAFVEHPVPALISFTGSTQVGRNIGRIASGGEHLKHVALELGGNSPFVVLADADVEQAVNAAVVGKFLHQGQICMAINRIIVEQPLLEDFTRRFVERVKALPYGDPSKPGTVVGPVINARQLAGLKEKIATAKAEGATLLLGGEPQGNVMPPHVFGNVTADMEIAREEIFGPLVGIQSARDAEHALELANSSEYGLSSAVFTASLERGVQFARRIHAGMTHVNDIPVNDEPNAPFGGEKNSGLGRFNGDWAIEEFTTDHWITLQHSPRPYPF

SEQ ID NO: 2050 - protein, 597 aa, Zea mays
LPPQPPPSSPPPSVLIVGAGLAGLAAARHLIALGFKVAVIEGRLRPGGRVFTKTMRSSAVEYPDTVAAADLGGSVLTGINGNPLGVIARQLGFPLHKVRDKCPLYLPDGRPVDPDMDARVEAAFNQLLDKVCQLRQVIADGVPHGVDLSLGMALEAFRAAHGVAAEHEERMLLDWHLANLEYANAAPLADLSMAFWDQDDPYEMGGDHCFIPGGNSQFVRAFSDGIPVFYGQNVKRIRYGRDGVMVHTDKQAFCGDMVLCTVPLGVLKKGDIKFVPELPAQKKEAIQRLGFGLLNKVVMLFPYDFWDGRIDTFGHLTEDSRQRGEFFLFYSYSSVSGGPLLIALVAGESAVKFEQASPMENVEKVLETLRKIFSPKGIEVPNPLQAICTRWGTDRFTYGSYSYVAIGASGDDYDILAESVHDRVFFAGEATNRRYPATMHGALLSGYREAANILRAARRRAKNVYSPEKMDINVDVKVGVNGELKDTVRDSCIDLDDLFRSPDAAFGGFSALHDPSTSEPDSVSLLRVGIGARKLGAGSLFLYGLIMRKHVAVLAAIEGDEQRLSIMYRDFGTKLVGLDSLGDAGESLISRIKAARK

SEQ ID NO: 2051 - protein, 117 aa, Hordeum vulgare subsp. vulgare
KHMIEDDCADNGIPLPNVNSKILSKVIEYCNKHVQAKPADAAGPGASDALPPADDLKNWDAEFVKVDQATLFDLILAANFLNIKGLLDLTCQTVADMIKGKTPEEIRKTFNIKNDFS

SEQ ID NO: 2052 - protein, 124 aa, Vicia faba
  misc_feature (65)..(65): Xaa can be any naturally occurring amino acid
MASTKKITLKSSDGEAFEVDEAVALESQAIKHMIEDDCADSGIPLPNVTSKILAKVIEFCKKHVXAAASDDKPTEDELKAWDADFVKVDQVTLFDLILAANYLNIKNLLDLTCQTVADMIKGKT

SEQ ID NO: 2053 - protein, 141 aa, Zea mays
MLMLPYTQKNALVLGVSIAMYCPAYTFLFQVIPGNETRVMKMMNRLTDLGPKIIMGKDSGLHTSGHAYREELEEVLRIVKPQHFLPVHGELLFLKEHESLGRSTGIRHTTVIKNGEMLGVSHLRNRRVLSNGFVSLGKEDL

SEQ ID NO: 2054 - protein, 335 aa, Glycine max
MADESVVESPVKRQRDDDEENAVSVSMVVEGGKVPLSNGLCSVIPGWFSEISSMWPGEAHSLKVEKILFQGKSEYQNVMVFQSSTYGKVLVLDGVIQLTERDECAYQEMITHLPLCSIPNPKKVLVIGGGDGGVIREVAHHSSVEKIDICEIDKMVVDVSKQYFPDVAVGYDDPRVTLHIGDGVAFLKEVPEGTYDAVIVDSSDPIGPAQELFEKPFFSSVAKALRPGGVVCTQAESIWLHMDIIEDIVANCRQIFKGSVNYAWTTVPTYPSGMIGFMLCSTEGPPVDFKHPVNPIDENESQKSVRPLKFYNSEIHTAAFCLPSFAKRKIGSKAN

SEQ ID NO: 2055 - protein, 76 aa, Triticum aestivum
MGLCSCCCRCLEILCAILLPPLGVCLRHGCCSMEFWISVLLTILGYLPGVLYAAYVICSVDPDRVRRRDDDYIYVA

SEQ ID NO: 2056 - protein, 214 aa, Triticum aestivum
  misc_feature (58)..(58): Xaa can be any naturally occurring amino acid
MAAVEVCVKAAAGKPDTLGDCPVSQRVLLTLEEKKVPYEVKLVDLGNKPEWFLEINPXGKVPVLKGDDGKCIADSDVITQVIEEKFPTPSLVTPPEYASVGSKIFPAFVKFLKSKDASDGSEKALLDELQALDEHLKAHGPYINGARAAAADLSLAPKLFHLQVALEHFKGWKIPENLTNVHAYAKALFSRESFVKTKPSEEHVIAGWAPKVNA

SEQ ID NO: 2057 - protein, 113 aa, Vicia faba
KHMIEDDCADETGIPLPNVTSRILAKVIEYCKKHVEAPKIDEYGMPVDGKDMKKWDAEFVKVDQDTLFDLILAANYLDIKSLLDLTCKTVANMMDGRTPDEIRRTFNIKNDFT

SEQ ID NO: 2058 - protein, 153 aa, Glycine max
  misc_feature (72)..(72): Xaa can be any naturally occurring amino acid
MADSDNDSGGAHNGGKGSEMSPREQDRFLPIANVSRIMKKALPANAKISKDAKETVQEVRVKVSSAFITGEXASDKCQREKRKTINGDDLLWAMTTLGFEDYVEPLKGYLQRFREMEGEKTVAARDKDAPPLTNATNSAYESANYAAAALVES

SEQ ID NO: 2059 - protein, 354 aa, Neisseria meningitidis Z2491
MKAARFYDKGDIRIEDIPEPTVAPGTVGINVAWCGICGTDLHEFMEGPIFIPPCGHPHPISGESAPVTMGHEFSGVVYAVGEGVDDIKVGQHVVVEPYIIHDDVPTGEGSNYHLSKDMNFIGLGGCGGGLSEKIAVKRRWVHPISDKIPLDQAALIEPLSVGHHAYVRSGAKAGDVALVGGAGPIGLLLAAVLKAKGIKVIITELSKARKDKARESGVADYILDPSEVDVVEEVKKLTNGEGVDVAFECTSVNKVLDTLVEACKPAANLVIVSIWSHPATVNVHSVVMKELDVRGTIAYCNDHAETIKLVEEGKINLEPFITQRIKLDELVSEGFERLIHNNESAVKIIVSPNL

SEQ ID NO: 2060 - protein, 610 aa, Zea mays
  misc_feature (104)..(104): Xaa can be any naturally occurring amino acid
  misc_feature (245)..(245): Xaa can be any naturally occurring amino acid
  misc_feature (387)..(387): Xaa can be any naturally occurring amino acid
  misc_feature (540)..(540): Xaa can be any naturally occurring amino acid
MCGILAVLGCADEAKQGSSKRSRVLELSRRLKHRGPDWSGLRQVGDCYLSHQRLAIIDPASGDQPLYNEDQSVVVAVNGEIYNHLDLRSRLAGAGHSFRTGSDXEVIAHLYEEHGEEFVDMLDGVFSFVLLDTRHGDRAGSSFFMAARDAIGVTPLYIGWGVDGSVWISSEMKALHDECEHFEIFPPGHLYSSNTGGFSRWYNPPWYDDDDDEEAVVTPSVPYDPLALRKAFEKAVVKRLMTDVXPFGVLLSGGLDSSLVATVAVRHLARTEAARRWGTKLHSFCVGLEGSPDLKAAREVAEYLGTLHHEFHFTVQDGIDAIEDVIYHTETYDVTTIRASTPMFLMSRKIKSLGVKMVISGEGSDELFGGYLYFHKAPNKEELHREXTCRKVKALHQYDCLRANKATSAWGLEARVPFLDKEFINAAMSIDPEWKMVQPDLGRIEKWVLRKAFDDEEQPFLPKHILYRQKEQFSDGVGYSWIDGLKAHATSNVTDKMLSNAKFIFPHNTPTTKEAYYYRMVFERFFPQKSAILTVPGGAXSVACSTAKAIEWDAQWSGNLDPSGRAALGVHLAAYEHQHDPEHVPAAIAAGSGKKPRTIRVAPPGVAIEG

SEQ ID NO: 2061 - protein, 426 aa, Thermus thermophilus HB27
MILIRNVRLVDARGERGPADVLIGEGRILSLEGGEAKQVVDGTGCFLAPGFLDLHAHLREPGEEVKEDLFSGLLAAVRGGYTDLVSMPNTKPPVDTPEAVRALKEKAKALGLARLHPAAALTEKQEGKTLTPAGLLQEAGAVLLTDDGRTNEDAGVLAAGLLMAAPLGLPVAVHAEDAGLRRNGVMNDGPLADLLGLPGNPPEAEAARIARDLEVLRYASRRSPATPRLHVQHLSTKRGLELIREAKRAGLPVTAEATPHHLTLTEEALRAFNPLFKVAPPLRGEEDREALLEGLLDGTLDAIATDHAPHTLAEKEKDLLRAPFGIPSLEVAFPLLYTELHLKRGFPLPRLVELFTDGPRRVLGLPPLHLEEGAEASLVLLSPKERPVDPSAFASKARYSPWAGWVLGGWPVLTLVAGRIVHEALK

SEQ ID NO: 2062 - protein, 109 aa, Glycine max
  misc_feature (21)..(21): Xaa can be any naturally occurring amino acid
  misc_feature (66)..(66): Xaa can be any naturally occurring amino acid
VTVLIKPHFGYLLKRATCRSXPYMQPGFFDLIRMKLPTVYDIKHLIVLYNSPHGGLNKLAKSLQLXQIGACHQAGSNSSLTPGTFRQLTERFIRGSAKKDNCVTDHISH

SEQ ID NO: 2063 - protein, 320 aa, Escherichia coli
MIKKIGVLTSGGDAPGMNAAIRGVVRSALTEGLEVMGIYDGYLGLYEDRMVQLDRYSVSDMINRGGTFLGSARCPEFRDENIRAVAIENLKKRGIDALVVIGDGGSYMGAMRLTEMGFPCIGLPGTIDNDIKGTDYTIGFFTALSTVVEAIDRLRDTSSSHQPISVVEVMGRYCGDLTLAAAIAGGCEFVVVPEVEFSREDLVNEIKAGIAKGKKHAIVAITEHMCDVDELAHFIEKETGRETRATVLGHIQRGGSPVPYDRILASRMGAYAIDLLLAGYGGRCVGIQNEQLVHHDIIDAIENMKRPFKGDWLDCAEKMY

SEQ ID NO: 2064 - protein, 438 aa, Oryza sativa (japonica cultivar-group)
MTAESARDPRGPYMSGCHVGRPASPSTGAVDEPCRCGNAHRLRPRLQKPHQKPSPRSRSPLDPAPRRWRRLRRWELVVGLRELYGVRDVFGVAAGYRGFYGPDADHARLDLAAVDDWHKKGGTVLKTTRGGFDLNKIVDGIVARGYTQCLTSNTFYHDYILLKVYAIGGDGTMRGAVAIFNEFKRRGLNISITGIPKTVDNDIGIIDRSFGFQTAVEIAQQAIDAAHVEAVSAVNGIGLVKLMGRSTGHIALHATLSSRDVDCCLIPEVDFYLEGKGGLFEFLYERIKQKGHAVVVVAEGAGQELIPRTDDQKREQDESGNIVFLDVGPWLKSELGKWWKREHPSELFTVKYIDPTYMIRAVPANATDNLYCTLLAHSAIHGIMAGYTGFVPGPINGNYSYIPLEDVAVAKNPVDVNDHKWAWVRSVTNQPDFMKPKY

SEQ ID NO: 2065 - protein, 337 aa, Brassica napus
  misc_feature (188)..(189): Xaa can be any naturally occurring amino acid
  misc_feature (193)..(193): Xaa can be any naturally occurring amino acid
  misc_feature (196)..(198): Xaa can be any naturally occurring amino acid
  misc_feature (207)..(207): Xaa can be any naturally occurring amino acid
  misc_feature (212)..(212): Xaa can be any naturally occurring amino acid
  misc_feature (220)..(220): Xaa can be any naturally occurring amino acid
  misc_feature (222)..(222): Xaa can be any naturally occurring amino acid
  misc_feature (253)..(253): Xaa can be any naturally occurring amino acid
  misc_feature (255)..(255): Xaa can be any naturally occurring amino acid
  misc_feature (268)..(268): Xaa can be any naturally occurring amino acid
  misc_feature (273)..(273): Xaa can be any naturally occurring amino acid
  misc_feature (281)..(281): Xaa can be any naturally occurring amino acid
  misc_feature (296)..(296): Xaa can be any naturally occurring amino acid
MGATTVTHVTTINPTNTNIHGPAIDEVDGLIRVYKDGHVERFQLVPCVGPSLPLDLAVACSDVHIDELTNVWARLYVPTVTKSLSVSSSKLPLLVYFHGGGFCVGSVSWSCYHEFLARLSASSRCIIMSVNYRLAPENPLPAAYEDGVNAILWLKKTRDDNLWSKLCDFGKIFLAGDSAGGNIANHVXXRLQXVDXXXQPLKIEGTXLIQPXFGGEARTXSXRRVENNMKSSVLTLAASDAWWRLALPRGANXEXPYCKPAKSKTRTXVCVAXMDVLMDRXMEMCYEIDNEEMIKXVVYKGVGHAFQILGKSQLAHTMTLEMLCHIDDFIHQCDPSI

SEQ ID NO: 2066 - protein, 161 aa, Triticum aestivum
  misc_feature (91)..(91): Xaa can be any naturally occurring amino acid
  misc_feature (106)..(106): Xaa can be any naturally occurring amino acid
MAPTVMASSATSVAPFQGLKSTAGLPVSRRSSSAGLSSVSNGGRIRCMQVWPIEGIKKFETLSYLPPLSTEALLKQVDYLIRSKWVPCLEXFSKVGFVFREHNSSXPGYYDGRYWDNVGKLAMFRGGTTLQKVLKRRWGGVKERSNLNAYVPRHRVSNLQG

SEQ ID NO: 2067 - protein, 143 aa, Glycine max
MGERVKGTVKWFNVTKGFGFISPDDGGEDLFVHQSSIKSDGYRSLNENDAVEFEIITGDDGRTKANDVTAPGGGALSGGSRPVEGGGDRGGRGGGGEGYEGGEEGHISRDCPQGGGGGGGYGGGGGRGGGGGGGGCFSCGESE

SEQ ID NO: 2068 - protein, 294 aa, Saccharomyces cerevisiae
TTPLVHVASVEKGRSYEDFQKVYNAIALKLREDDEYDNYIGYGPVLVRLAWHTSGTWDKHDNTGGSYGGTYRFKKEFNDPSNAGLQNGFKFLEPIHKEFPWISSGDLFSLGGVTAVQEMQGPKIPWRCGRVDTPEDTTPDNGRLPDADKDADYVRTFFQRLNMNDREVVALSGAHTLGKTHLKNSGYEGPWTANNNVFDNSFYLNLLNEDWKLEKNDANNEQWDSKSGYLQLPTDYSLIQDPKYLSIVKEYANDQDKFFKDFSKAFEKLLENGITFPKDAPSPFIFKTLEEQGL

SEQ ID NO: 2069 - protein, 427 aa, Escherichia coli O157:H7 EDL933
  misc_feature (27)..(27): Xaa can be any naturally occurring amino acid
MADTKAKLTLNGDTAVELDVLKGTLGXDVIDIRTLGSKGVFTFDPGFTSTASCESKITFIDGDEGILLHRGFPIDQLATDSNYLEVCYILLNGEKPTQEQYDEFKTTVTRHTMIHEQITRLFHAFRRDSHPMAVMCGITGALAAFYHDSLDVNNPRHREIAAFRLLSKMPTMAAMCYKYSIGQPFVYPRNDLSYAGNFLNMMFSTPCEPYEVNPILERAMDRILILHADHEQNASTSTVRTAGSSGANPFACIAAGIASLWGPAHGGANEAALKMLEEISSVKHIPEFVRRAKDKNDSFRLMGFGHRVYKNYDPRATVMRETCHEVLKELGTKDDLLEVAMELENIALNDPYFIEKKLYPNVDFYSGIILKAMGIPSSMFTVIFAMARTVGWIAHWSEMHSDGMKIARPRQLYTGYEKRDFKSDVKH

SEQ ID NO: 2070 - protein, 395 aa, Erwinia chrysanthemi
MLDQQTIATIKSTIPLLAETGPALTAHFYQRMFHHNPELKDIFNMSNQRNGDQREALFNAICAYATHIENLPALLPAVERIAQKHASFNIQPEQYQIVGTHLLATLEEMFQPGQAVLDAWGKRYGVLANVFIQRESDIYQQSAGQNGGWHGIRPFRIVAKQPQSSLITSFTLEPVDGGPIAAFRPGQYLAVYIRDKRFEYQEIRQYSLTNEPNGRYYRIAVKRETMGSVSGYLHDVAREGDVIELAAPHGDFYLEVTPETPVALISAGVGQTPMLSMLHSLKNQQHQADIFWLHAAENTEVHAFADEIADVAATLPQLQSYVWYREASSEAARSAHAFHGLMALKDLPTPLPMTNLHCYLCGPVAFMQFAARQLLELGITESQIHYECFGPHKVI

SEQ ID NO: 2071 - protein, 166 aa, Pseudomonas aeruginosa UCBPP-PA14
MRKEYVMSAFHDLTLLGLDGQDLPLSPFKGKVLLVVNVASKCGLTPQYAGLENLYQTYRERGFAVLGVPCNQFAGQEPGSEADIQSFCSLNYGVSFPMSAKVEVNGSARHPLYRLLAGEGAEFPGDITWNFEKFLLGPDGRVLARFSPRTAPDDPALVQAIEKALG

SEQ ID NO: 2072 - protein, 327 aa, Triticum aestivum
LGCREGEEMGSTADEEACMFALQLGSSSILPMTLKNAIELGLLDTLVAADGKLLSPAELAAKLPSTANPAAPDMVDRMLRLLASYKVVSCTLEEDKDGRLSRRYGAEPVCKFLTPNEEGVSMAPLALMNQDKVLMESWYYLKDAVLDGGIPFNKAYGMSAFEYHGTDPRFNRVFNEGMKNHSIIITKKLLELYKGFNGVGTLVDVGGGIGATVGAITAHYPTIKGINFDLSHVISEAPPFPGVTHVGGDMFQKIPSGDTILMKWILHDWSDEHCATLLKNCYDALPTHGKVMLVECILPVNPEATPKAQGGFHLDMIMLAHNPGGKE

SEQ ID NO: 2073 - protein, 249 aa, Glycine max
  misc_feature (87)..(87): Xaa can be any naturally occurring amino acid
MAEERFTGVVQWFNNGKGFGFIKPDDGGEDLFVHQSSIRSDGYRTLLEGDRVEFAIATGDNDKTKAVDVTGVDGAPLQPRASAGNNXAGGSGFGARRNGGSGAACYQCGDFGHLARDCNRSSNSGGGGGGSGGGCFNCGGFGHLARDCVRGGGGSVGIGGGGGGGSCFRCGGFGHMARDCATGKGNIGGGGSGGGCFRCGEVGHLARDCGMEGGRFGGGGGSGGGGGKSTCFNCGKPGHFARECVEASG

SEQ ID NO: 2074 - protein, 159 aa, Shewanella oneidensis MR-1
MTLSSKDIGEGQLLSNQFVFNGFGCTGENISPQLAWRDAPEGTKAYAVTAYDPDAPTGSGWWHWAVYNIGGDQQQLAQGAGSKHNGLPKGAIALKNDFGTTDFGGACPPQGHGMHRYEFTVWALPNPLELPKDASPALLGFMLRAQALGSAKLTAVYHR

SEQ ID NO: 2075 - protein, 266 aa, Zea mays
  misc_feature (39)..(39): Xaa can be any naturally occurring amino acid
  misc_feature (108)..(108): Xaa can be any naturally occurring amino acid
  misc_feature (160)..(160): Xaa can be any naturally occurring amino acid
  misc_feature (194)..(194): Xaa can be any naturally occurring amino acid
  misc_feature (199)..(199): Xaa can be any naturally occurring amino acid
  misc_feature (218)..(218): Xaa can be any naturally occurring amino acid
MVLEATMICIDNSEWMRNGDYAPSRFQAQADAVNLICGXKTQSNPENTVGVMTMAGKGVRVLVTPTSDLGKILACMHGLEVGAEANLAAAIQVAQLALKHRQNKRQQXQRIIAFIGSPVKYDKKVLETIGKKLKKNNVALDIVDFGESDDEKPEKLEALXAAVNSSDSSHIVHIPPGENALSDVLLSTPIFTGXKKGGXSGFAASAAAAAATGASGFXNLGVDPNVDPELALCPCGCLWKEERARQEAIAKKAAEDTSNTEHNNVP

SEQ ID NO: 2076 - protein, 475 aa, Vibrio vulnificus YJ016
MNSLFRQQCYLLGEWRSAPQTMTITNPFNDEVIGTVPNMGEKETQEVIAGADKAFQQFKALTAQERANLLHRWHQLILEHSDELAHIMTLEQGKPLAEAKGEVLYAASFIEWFAEEARRAYGTLVPSHKANAKILVTKEPIGVVAAITPWNFPAAMITRKCGPAFAAGCPVILKPAPDTPFTALALAVLAEKAGFPAGVFNVITGDAVAIGGELTSNKRVRKLSFTGSTPVGKLLMRQSADNIKKLSLELGGNAPFIVFEDADLDAAVEGAMIAKFRNAGQTCVCANRLYVQRSVYTEFCEKLVEKVSALNVGNGFDQGVHLGPLINDAAVAKVVQHVEDAQSKGAHIECGQLPTAGSRLVQPLVLSGVTDEMLVAQEETFGPMAPLFVFDSEEEVLARANNTDFGLAAYFYTQSLSRAWRVSEALEAGIVGVNEGLISTTVAPFGGVKESGLGREGSFLGMDDYMESKYILMGL

SEQ ID NO: 2077 - protein, 201 aa, Bacteroides thetaiotaomicron VPI-5482
MEEKNHIYPIFDRMMTREDKEELLGQHSVMIWFTGLSGSGKSTIAIALERELHKRGLLCRILDGDNIRSGINNNLGFSETDRVENIRRIAEVSKLFLDSGIITIAAFISPNNDIREMAANIIGKDDFLEVFVSTPLEECEKRDVKGLYAKARKGEIQNFTGISAPFEVPEHPALALDTSKLSLEESVNRLLEMVLPKIEKK

SEQ ID NO: 2078 - protein, 112 aa, uncultured Bartonella sp.
KMLQEIGTVQKIPEFIARAKDKNDRFRLMGFGHRVYKNYDPRAKIMQQTCHEVLKELNIQDDPLLDIAMELEKIALNDEYFIEKKLYPNVDFYSGITLKALGFPTEMFTVLF

SEQ ID NO: 2079 - protein, 455 aa, Bacillus megaterium
TIKEMPQPKTFGELKNLPLLNTDKPVQALMKIADELGEIFKFEAPGRVTRYLSSQRLIKEACDESRFDKNLSQALKFVRDFAGDGLFTSWTHEKNWKKAHNILLPSFSQQAMKGYHAMMVDIAVQLVQKWERLNADEHIEVPEDMTRLTLDTIGLCGFNYRFNSFYRDQPHPFITSMVRALDEAMNKLQRANPDDPAYDENKRQFQEDIKVMNDLVDKIIADRKASGEQSDDLLTHMLNGKDPETGEPLDDENIRYQIITFLIAGHETTSGLLSFALYFLVKNPHVLQKAAEEAARVLVDPVPSYKQVKQLKYVGMVLNEALRLWPTAPAFSLYAKEDTVLGGEYPLEKGDELMVLIPQLHRDKTIWGDDVEEFRPERFENPSAIPQHAFKPHGNGQRACIGQQFALHEATLVLGMMLKHFDFEDHTNYELDIKETLTLKPEGFVVKAKSKKIPL

SEQ ID NO: 2080 - protein, 277 aa, Glycine max
  misc_feature (57)..(57): Xaa can be any naturally occurring amino acid
  misc_feature (69)..(69): Xaa can be any naturally occurring amino acid
  misc_feature (132)..(133): Xaa can be any naturally occurring amino acid
IVQTSRHGKVAIPDGYIQLTENDEFAYQEMLIHLALCSIPNPKKGFCSFFLFLACTXLSYLMKKETFVXTLQVLLVGGGDGGILREISRHSSGEHIDICEIDKMVIHVYKKFFPDIAVGYEDPRMHVHIRDXXAFINSVPEGTYDVVILDAFPAMGHSADVLADKCFLESIAKALRPRGVLLWHTNSEVADTIANCKIFKGSVNYAWATVPAYVSGAIGFMLCSTEGPPVNFKHPINKLNPEKNGVAKGPPKFYNSEIHATAFFCGQGWLIQQDIHK

SEQ ID NO: 2081 - protein, 220 aa, Triticum aestivum
  misc_feature (184)..(184): Xaa can be any naturally occurring amino acid
MAGEGGSGGERGKDPLEGVRAIVLKPSESLDESRFTKIAGADFNDAGLGLDGLLGSLASTGFQASNLGDAIDVVNQMLDWRLSHEKPTEDCDEAELDPKYRESVKCKIFLGFTSNLVSSGIRDVIRFLAQHHMVDVIVTTAGGIEEDLIKCLAPTYRGEFSLPGALLRSKGLNRIGNLLVPNDXYCKFENWIMPLFDQMLQEQSAENVWTPSKVIARLGK

SEQ ID NO: 2082 - protein, 506 aa, Perilla frutescens
MALYAALFLLSAAVVRSVLDRKRGRPPYPPGPFPLPIIGHLHLLGPRLHQTFHDLSQRYGPLMQLRLGSIRCVIAASPELAKECLKTHELVFSSRKHSTAIDIVTYDSSFAFSPYGPYWKFIKKLCTYELLGARNLAHFQPIRTLEVKSFLQILMRKGESGESFNVTEELVKLTSNVISHMMLSIRCSETESEAEAARTVIREVTQIFGEFDVSDIIWLCKNFDFQGIRKRSEDIQRRYDALLEKIITDREKQRRTHGGGGGGGEAKDFLDMFLDIMESGKAEVKFTREHLKALILDFFTAGTDTTAIVCEWAIAEVINNPNVLKKAQEEIANIVGFDRILQESDAPNLPYLQALIKETFRLHPPIPMLARKSISDCVIDGYMIPANTLLFVNLWSMGRNPKIWDYPTAFQPERFLEKEKAAIDVKGQHFELLPFGTGRRGCPGMLLAIQEVVIIIGTMIQCFDWKLPDGSGHVDMAERPGLTAPRETDLFCRVVPRVDPLVVSTQ

SEQ ID NO: 2083 - protein, 511 aa, Zea mays
  misc_feature (184)..(184): Xaa can be any naturally occurring amino acid
MDSPPLQPTVFSLILALILVLYLALRRRGGGKNRSYPPVAGTVLHQLFNFGRLMEYQTALSRRYRTFRMLTPTCSYIYTVEPANVEYILKANFGNYGKGSTLHELREDLLGDGIFNVDGAKWRHQRKVASHEFSTRVLRDYSTGVFRDTAAELAGIVAAAAAAAGEKLDMQELLMRSTLDSIFXRVGFGVSLGVLSGSSEEGAAFAKAFDDASEQVLRRFLDPFWKAKRFLNLSSEAAMKRSLRTINGFVYAVVDRKIEQMERDQQEFVSPEDITSPFLVERESDPGCSDNKYLRDIILNFVIAGRDTTAGTLSWFLYVLCRNQHVQDRIAQEVRAAASGDRDDVGVQEFVACLTEDAISRMRYLHAALTETLRLYPAVPIDVKCCFSDDTLPDGYAVKKGDMVNYQPYQMGRMRFLWGADAEEFRPERWLDDAGVFVPESPFKFTAFQAGPRVCLGKEFAYRQMKIFAAVLLYLFRFEMWDANATVGYRAMLTLKIDRPLYSSYVAPAMR

SEQ ID NO: 2084 - protein, 106 aa, Brassica napus
MGEPRDSLALSNLLICHESESCLNEQQQDDDDDETKIERSDEQQKPHCFATIGDDDEDYVAELVRKENRRFDDDDDKPTKTTSSLDRLIAIDWILATRTRFGFSIR

SEQ ID NO: 2085 - protein, 164 aa, Cucurbita pepo
DRGEMMSMVYNWPADQVDVIVVTDGSRILGLGDLGVHGIGIAIGKLDLYVAAAGINPQRVLPVMIDVGTNNEKLLKDPLYLGLQQNRLDGDEYLAIIDEFMEAVFTRWPHVIVQFEDFQSKWAFKLLQRYRNTYRMFNDDVQGTAGVAIAGLLGAVRAQGRPMI

SEQ ID NO: 2086 - protein, 122 aa, Adiantum capillus-veneris
MIQIQSYLDVADNSGARKLMCIRVLGTGNRKYADIGDIIIAVVKEAVPNMFLKRSEVVRAVVVRTRRGLKRRNGMVLEFDDNAAVIINQEGNPRGTRIFGPVARELRECNFARVVSLAPEVL

SEQ ID NO: 2087 - protein, 352 aa, Lagenaria siceraria
MVPPYALDSLYCSEDHWENDDEEEERGFHEQPYSNLTTESSSPILAVAEQDLFWENDELISLFSREKPNELFKTIQIDPSLAAARRSAVGWMLKVNAHYSFSALTAVLAVDYLDRFLSCFHFQRDKPWMSQLAAVACISLAAKVEETQVPLLLDLQVEDSRYLFEAKTIKKMELLVLSTLQWRMNPVTPFSFVDYISRRLGFKEHICWEILWQCERTILSVILESDFMSFLPSVMATATMLHVFKAMEEPTLSVEYDSQLLNILGIDKGNVEECCKLISNASRRNGNQFKKRKIGSIPGSPNGVMDVSFSSDSSNDSWSVASSVSSSPEPLTKKNRANGSMSGDCETFRTLS

SEQ ID NO: 2088 - protein, 213 aa, Gossypium herbaceum
ALNSAEAEAPTAAPSQLNLTEIMSKQGCKAFADLLTASGADDKFNENMDAGLTVFCPTDSAVKGFMPKYKNLTASKKVSLLLYHGIPVFMSLQMLKTNNGVMNTLATDGANSYDFSVSNEDEVVSLDTTVVTAKVLGILKEEEPLIVFKINKVLMPKELFKPVVAKEANEPEADAPADSEPADAEDNTNGVQGLGGGRLVMLVLSLWIGILLI

SEQ ID NO: 2089 - protein, 290 aa, Triticum aestivum
  misc_feature (161)..(161): Xaa can be any naturally occurring amino acid
MGGLSMEHPWAFAFGLLGNVISFSSLLAPIPTFYRIFKSKSTEGFQSVPYVVALFSAMLWIFYALVKTGEGLLISINAAGCVIETVYIVMYLVYAPRKAKIFTAKIVVLLNITGFGLIFLLTLFAFHGETRVVSLGWICVGFSVCVFVAPLSIIGRVIKTXSVEYMPFTLSLTLTLSAIVWFLYGLLIKDKYVALPNILGFTFGVIQMVLYVFYMNKTPVASEVKEGKEAWKAPAEDHVVVINVGKTDKGSCAEVRPVTEMASAVDVPRRCAAEAAAAPGVDFARSVDVV

SEQ ID NO: 2090 - protein, 213 aa, Gossypium raimondii
ALNSAEAEAPTAAPSQLNLTEIMSKQGCKAFADLLTASGADDKFNENMDAGLTVFCPTDSAVKSFMPKYKNLTASKKVSLLLYHGIPVFMSLQMLKTNNGVMNTLATDGANSYDFSVSNEDEVVSLDTTVVTSKVLGILKEEEPLIVFKINKVLMPKELFKPVVAKEANAPEADAPADSEPADAEDNTNGVQGLGGGRLVMVVLSLWIGILLI

SEQ ID NO: 2091 - protein, 213 aa, Gossypium barbadense
ALNSAEAEAPTAAPSQLNLTEIMSKQGCKAFADLLTASGADDKFNENMDAGLTVFCPTDSAVKGFMPKYKNLTASKKVSLLLYHGIPVFMSLQMLKTNNGVMNTLATDGANSYDFSVSNEDEVVSLDTTVVTAKVLGILKEEEPLIVFKINKVLMPKELFKPVVAKEANAPEADAPADSEPADAEDNTNGVQGLGGGRLVMLVLSLWIGILLI

SEQ ID NO: 2092 - protein, 209 aa, Zea mays
MAECEELVESGGAEEDMPRVVAALAGILERVANRNDAAAAAEVSAVAPASAFRATTKPGISVRAYMARIARFAGCSPACYVVAYVYLDRLLRRGRLLALAVDSYSVHRLLITAVLAAVKFMDDICYNNAYFAKVGGISLVEMNYLEVDFLFGVGFDLNVAPETFGDYCAVLRSELLCAEAAPAPLRLQHCCLSEDDAGAGCSAQQQLAA

SEQ ID NO: 2093 - protein, 425 aa, Triticum aestivum
MWRRTTGRPAQEHPTTRRAAASPPATAPRGSSPRGAAAPSWPPRAAAAPGGGFDEAAAGFLEGQILEAPNLRTFTFLELKTATKNFRPDSVLGEGGFGRVYKGWVDEKTMNPTKSGTGMVVAVKKLNSESMQGYEEWQSEINFLGRLSHPNLVKLLGYCWEDKELLLVYEFMAKGSLENHLFRKGCAPLSWELRLKIAIGAARGLAFLHASEKQVIYRDFKASNILLDASYNAKLSDFGLAKLGPTGSNSHITTRVMGTYGYAAPEYVATGHLYVKSDVYGFGVVMLEMLSGKRARGPNRPNGQQSLVDWAKPYLADRRKLARLMDPQFEGQYNSKQSHQAAQLTLNCLAGEPRMRPSMKEVLETLEQIEALKSRTRETRGGSGTSSRDRAHGRSAAVHQRSSPRGNGDGRRGSRPTNGHATKAR

SEQ ID NO: 2094 - protein, 226 aa, Agrobacterium tumefaciens str. C58
MKIKAAEAALSHVQDGMRLGIGTGSTAEEFVRLLAEKVAAGLKVEGVPTSERTARLCVELGVPLKSLDELPELDLTIDGADEVDHVLRLVKGGGGALLREKIVAAASGRMIVIADQSKVVETLGAFPLPIEINPFGQVATRIAIEKLAARSGLSGELTMRSSGDGAFMTDGGHLILDASFGRIPDAEALARELNTIPGVVEHGLFINLASLAIIAGPEGARMMQAV

SEQ ID NO: 2095 - protein, 351 aa, Pneumocystis carinii
MTASSRNVRFNVSDDYEILDVIGEGAYGIVCSAIHKPSGQKVAIKKISPFDHSMFCLRTLREMKLLRYFNHENIISILDIQQPQDFESFSEVYLIQELMETDMHRVIRTQDLSDDHCQYFIYQILRALKAMHSADILHRDLKPSNLLLNANCDLKVCDFGLARSAVSTEDSSSFMTEYVATRWYRAPEIMLTFKEYTKAIDIWSVGCILAEMLSGRPLFPGKDYHHQLMLILDVLGTPTMEDYYGIKSRRAREYIRSLPFKKRVSFASIFPRANPLALDLLEKLLAFNPAKRVTAEEALQHNYLEPYHDPDDEPTAPPISPSFFDFDRIKDSLTKNDLKILIYKEIMSMNN

SEQ ID NO: 2096 - protein, 102 aa, Yersinia pestis KIM
MSLLLSAQVRHPLKDRPRSLHYCGKIIEGNISMSNKMTGLVKWFDAGKGFGFITPADGSKDVFVHFSAIQSNDFKTLDEGQNVEFSIENGAKGPSAVNVIAL

SEQ ID NO: 2097 - protein, 406 aa, Micrococcus sp. 28
MAAESTGQAGVSPAPTVSPAAGAAPPDSSGVSTPPDASPAGASSLPEVPAAPPAEDAPAPSPEPDSPPRPETAPAPEATALLGDAAAIAPAPAGRSAAFPSLAAAEPLAPPATAPPWPTPVWEAPSPDLSFEFRGRTPGAAALADWPPAAGATPAAARPAAVPARAPLIGDAPPAAGLTPAPESSPSLASTRSTVPSTPPAPVPAAEVPPAAPVPWSENSAEDAPLPAAPAAPLSALLPAAPAAPLSAPPLAEPPAAPGSLPAPFAPAVSPEAVAPAVPLAPPAVSAAAPPPARPPPGPAAPPPPAAALPPPPAAPPARAAPAAAPAPAPPVPARMAAPAAMPRAAPATPAPENPPRPAPTTGDRNRIRVGRTSPAIPSRRMPVIAEESRTPKSSEVLVSSMNPNA

SEQ ID NO: 2098 - protein, 177 aa, Glycine max
  misc_feature (128)..(128): Xaa can be any naturally occurring amino acid
MVLEATMICIDNSEWMRNGDYSPSRFQAQTDAVNLICGAKTQSNPENTVGVLTMAGKGVRVLVTPTSDLGKILACMHGLEIGGEMNLAAGIQVAQLALKHRQNKKQQQRIIGFAGGPVKHEKKMLEMXGRKLKKKNILDLKGISFRKFQCRPVNVNLEHLSPFSLLLIVFFFIRNPL

SEQ ID NO: 2099 - protein, 307 aa, Glycine max
  misc_feature (297)..(297): Xaa can be any naturally occurring amino acid
NICFFYIVSLFFFFFFFFFFFFFFFFFYHNKLQYRKLDDVLRISRLISRSFSSTSFFSRGGNGFLGSRHCKYSTSSAIEEEPVKPSVQVEHTQLLIDGKFVDAASGKTFPTLDPRTGEVIAHVAEGHSEDVDRAVAAARKAFDHGPWPKMTAYERQRILLRAADLLEKHNDELAALETWDNGKPYEQAAKIEVPMLVRLIRYYAGWADKIHGLTVPADGPYHVQTLHEPIGVAGQIIPWNFPLLMFAWKVGPALACGNTIVLKTAEQTPLSALYAAKLFHEAGLPAGVLNVVSGFGXTAGAALASPW

SEQ ID NO: 2100 - protein, 380 aa, Lagenaria siceraria
MKKMALHSNKHRTQRLHNSLFFFDFLHCTEQQHLQTEHPIFLNNGGTNDFPLFQQTTTHFLVYEDEELNHLLSKEKDQNLQTGAVLKTLVQTDNALSLARTEAIDWLLKVNAFYGFSSLTALLAINYLDRILSGPYFQRDKPWMLQLAAVTCISLAAKVEEIRVPLLLDLQVEDSKYIFEAKTIQRMELLVLTALQWKMHPVAPVSFLGIITKGLGMKNQYIQREFLRRCERILLSLVSDSRSVGILPSIMAVSAMVSVVEEMGNCNPLEEFQDQLLNALKINKGRVKECCKVIMEAKIKGSGKRKHVEEEAEAEAESESSEAETEGEAEAEAGSPNGVMEANFSCESSNDSWEMGTIVSEYTHFSSSSSSSSKRIRPTR

SEQ ID NO: 2101 - protein, 350 aa, Glycine max
FLPSLSQLSFVSRSEQRDQENTVCEREEREFPKPCRPTVIISVAFGVLGNIASFVCFLAPLPTFYRVCKKKSTEGFQSIPYVAALFSAMLWIFYAYVKTGEMLLITINAFGCVIETIYLAVFITYCPKKARMSTLRMIVLLNFGGFCTIVLLTHLLAEGEGRVKLLGWICVVFATSVFAAPLSIIRVVIRTKSVEFLPFPLSLLLLISAIMWLLYGISLKDIYVTLPNVVGLTFGVIQIGLYAMYRNNKPVKDQKLPEHKGDIVDNNNESVIAPTVNGEKQEQEVKPQGGIIETGEKKEENNKQDQQQPEENKKFDQVVHEQTKLNNKNTNNINDDDNNKTGERVISCEV

SEQ ID NO: 2102 - protein, 176 aa, Cucurbita pepo
RVGLSGKGIPVGKLSLYTALGGVRPSACLPITIDVGTNNEKLLNDEFYIGLKQRRATGEEYYELLHEFMTAVKQNYGEKVLIQFEDFANHNAFELLAKYRTTHLVFNDDIQGTASVVLAGAVSALKLIGGTLADHTFLFLGAGEAGTGIAELIALEISKQTNAQLRRPARRFGWWT

SEQ ID NO: 2103 - protein, 497 aa, Rubrivivax gelatinosus PM1
MDKASGKTLDAALVWCRRDLRAHDHAALYHALRAARRVWVAFVFDTEILDPLPRTDRRVEFIRDSLVDLDAQLHTLGRSHGTEGVGLIVRHGRARDEIPRLAAALHVQAVYANTDYEPAAVARDAQVRGALAQTGIAFHPAKDQVVFDTDEVLTGAGTPYGVFTPYKNAWLKKLEPFYLQAYPVGRHAGALAPRPAGEAAGVPTLAAIGFEPTNLAALKLAPGTAGGRALLEDFGDERIDRYDQTRDFPAVKGPSYLSVHLRFGTLSIRELARLAWDRARAGSRGAEVWLSELIWRDFYHQVLHHHPQVVERSFKPEYDKIKWEHGKHADALFAAWCEGRTGYPLVDAAMLQINQTGYMHNRLRMVVASFLCKDLGLDWRRGERYFAEKLNDYDLAANNGGWQWASSSGCDAQPYFRIFNPVSQSQKFDAQGKFIRRYLPQLAALPDAALHAPWDAKPLDLVAAGLVLGRDYPEPIVRHELARERTLARYAVVKGAR

SEQ ID NO: 2104 - protein, 487 aa, Brucella suis 1330
MKAQPKASHFIGGAFVEDKAGKPLPVIYPATDEEIASLYSATPGIIEAAYAAALKAQGEWAALKPVERGRILRRTAEILREKNRKLSKLETLDTGKALQETLVADAASAADALEFFGGIISGFNGEFVELGGSFAYTRREALGICVGIGAWNYPIQIAAWKSAPALAMGNAFIFKPSENTPLSALALAEAYKEAGLPDGLFNVVQGYGDVGAALVNHRLTAKVSLTGSVPTGRRIMAQAGEQLKHVTMELGGKSPLIVFDDADLESAIGGAMLGNFYSTGQVCSNGTRVFVHKNIRERFIERLVERTRKIRIGDPFDEATQMGPLISAAQRDKVLSYIKKGKAEGATLACGGGVPKLQGFDKGFFIEPTVFADVTDTMTIAREEIFGPVMSVLEFSDEDEVIARANDSEFGLAAGVFTADLSRGHHVIGQIKAGTCWINAYNLTPVEVPFGGYKQSGIGRENGIAALAHYSQIKTVYVEMGKVDSPY

SEQ ID NO: 2105 - protein, 165 aa, Triticum aestivum
MAQEGLRLVCPPVSAHEGRLPRQYTLEGQGAKKDISPPLEWYGVPDGTRSLAVVVQDIDADERVPWTHWVVANISPEEKGLPEGFSGAGGNANAGSGAGGVQEGVNDWKQPGWRGPVPDSHGHRIQFRLYALDDVLSLGNKVTVDKVMEAIEGHVLGEAEITAVF

SEQ ID NO: 2106 - protein, 213 aa, Gossypium barbadense
ALNSAEAEAPTAAPSQLNLTEIMSKQGCKAFADLLTASGADDKFNENMDAGLTVFCPTDGAVKSFMPKYKNLTSSKKVSLLLYHGIPVFMSLQMLKTNNGVMNTLATDGANSYDFSVSNEDEVVSLDTTVVTSKVLGILKEEEPLIVFKINKVLMPKELFKPVVAKEANAPEADAPADSEPADAEDNTNGVQGLGGGRLVMVVLSLWIGILLI

SEQ ID NO: 2107 - protein, 439 aa, Rubrivivax gelatinosus PM1
MKILISNGRVVDPASGRDERADIAIANGRILTIGKVPADFAPERTIDAAGLVVAPGLVDLAARLREPGHEHEGMLESELAAAAAGGVTSLVCLPDTDPTLDEPGLVEMLKFRARKLSRCRLFPLGALTRGLGGEVLTEMAELTEAGCVGFSQADAVLRDTQVLSRALQYAATFGYTVWLRPNDPWLGSGVAASGAVATRLGLSGVPVAAETIALHTLFELVRSSGARVHLCRLSSAAGVALLREAKAEGLPVTADVSINSLHLTDVDIGYFNPAMRLVPPLRQQRDRDALRAGLADGTIDALVSDHTPVDEDAKTLPFAEAEPGATGLELLLSLALKWGEDSGAGLRRALATVSCEPVRVLGDALGSLASSAGRLVEGGVADVCVFDPEARWTVAPAALRSQGKHTPFAFDTSGFALPGRVRATLVAGHVAHEATRDAA

SEQ ID NO: 2108 - protein, 213 aa, Gossypioides kirkii
ALNSADAEAPTAAPSQLNLTEIMSKQGCKAFADLLTASGADDKFNENMDAGLTVFCPTDSVVKGFMPKYKNLTASKKVSLLLYHGVPVFMSMQMLKTNTGVMNTLATDGANSYDFSVSKEGEVVSLDTTVVTAKVSGILKEEEPLIVFKINKVLMPKELFKPVVAKEANAPQADAPADSEPADAEDNTNGVQGLGGGRLVMVVLSLWIGILLI

SEQ ID NO: 2109 - protein, 229 aa, Brassica napus
RPTRPLKDVILQGTDAFISGYGMKVFEYLAVDEQFSEMFDPGMSESSTMVMKKVLGKYTGFEDVNTLVDVGGGVGTVLGIVTSMYPHIKGINLDLASVLVNATPYPGVQHVAGDMFVEIPKGDALFMKWILHAWNDENCVKILKNCWTSLPDKGKVIVLDVVMRTEPKCYDFASNMELTMDMFILSQRSGGRERTLPELEALGCAAGFGRCEFICRAYSFSLIEFHKLI

SEQ ID NO: 2110 - protein, 284 aa, Ralstonia metallidurans CH34
MSATNETIDAGQQASQDWWRTEIIDMKPGEIRYRGYPIEQLIGNVSFAQMIWLMLRGELPGKREGELLDAALMAAVDHGPQAPSIAIARMAATCGVGLNNAMASAVNVLGDVHGGAGEQAVELYQDIARRFDAGTPFDDAVAAGLAHYRDLHGKFVSGFGHRFHPLDPRAPRLLALVDQAADDGVVSGRYAAIARAVEKALGAGRDKPIPMNIDGATAVIYAELGFPAPLARGLFCLSRSVGILSHAWEQTQQGGRNKGPIPRQFIWTYDGQPQRDVPVDGGAV

SEQ ID NO: 2111 - protein, 129 aa, Triticum aestivum
  misc_feature (53)..(53): Xaa can be any naturally occurring amino acid
  misc_feature (100)..(100): Xaa can be any naturally occurring amino acid
  misc_feature (106)..(106): Xaa can be any naturally occurring amino acid
  misc_feature (119)..(119): Xaa can be any naturally occurring amino acid
MSDSEEHHFESKADAGASKTYPQQAGTVRKNGFIVIKNRPCKVVEVSTSKTGXKHGHAKCHFVAIDIFNGKKLEDIVPSSHNCDIPHVNRTEYQLIDISXEDGFVXLLTQDGNTKDDLXLPTDEILWPD

SEQ ID NO: 2112 - protein, 354 aa, Nicotiana tabacum
MKTTKPLKELKLSVPAQDTPISSFLTASGTFHDGDLLLNQKGLRLISEENESPASETKEIDLQFSLEDLETIKVIGKGSGGVVQLVRHKWVGTLFALKVIQMTIQEDIRKQIVQELKINQASQCSHVVVCYHSFYHNGAISLVLEYMDRGSLADVIRQLKTILEPYLAVVCKQVLQGLVYLHNERHVIHRDIKPSNLLVNHKGEVKITDFGVSAMLASSMGQRDTFVGTYNYMAPERISGSTYDYKSDIWSLGMVILECAIGRFPYIQSEDQQAWPSFYELLEAIVSSPPPSAPADQFSPEFCSFVSACIQKDPRDRSSALDLLSHPFIKKFEDKDIDFGILVSSLEPPVNFPR

SEQ ID NO: 2113 - protein, 317 aa, Haemophilus somnus 2336
MTTQLDALRNMTVVVADTGDIDAIKKYQPQDATTNPSLILSASSLPQYAPLIDEAIAYAKAKSADKTQQLIDAEDKLAVNIGLEILKIVPGRISTEVDARLSYDTQATVEKARKLIALYNEAGISNDRILIKIASTWQGIRAAEILEKEGINCNLTLLFSKAQARACAEAGVYLISPFVGRILDWYKANSDKKEYAPAEDPGVISVTKIYNYYKQYGYNTVVMGASFRNVGEITELAGCDRLTIAPALLKELQENSTALVRKLAFKGEVKAKPQPLTESQFYWQHNSDPMAVEKLADGIRKFAIDQEKLEKMLLEKF

SEQ ID NO: 2114 - protein, 424 aa, Brucella melitensis 16M
MNPNTSPVWHPFTQHRLEPRPDRIVRTEGAYLFREDGSAVLDMISSWWVITHGHRHPAIMDAIRQASADLDQIIFADFSHQPAEELAKGLIALAPDGLSHVFYSDSGSTAVEVAIKMALGYFYNRGEPRSRIAVLQHSYHGDTIGTMSAGERGVFNAAYGALLFNVETLPFPSPGHEQPMLDRLEDVCRGGDLAALLVEPLVLGAGGMKMYPAHILATMREITERHGVLLAVDEVMTGWGRTGTLFACEQAGITPDILCTSKGLTGGSLPLAATLCTAAIFDAHYSDDRSKTFFHSSSYTANPIACAAALANLQVWLSEPVTERISALTRMQTERLHRFKDDSRFAGLRQTGTITALELDVPAGGYLSDAGPKLRTFFKQNGVLLRPLGNVIYVMPPYCVTAEELDRTYDVITQGVDMIAGQTR

SEQ ID NO: 2115 - protein, 155 aa, Glycine max
MASTKKITLKSSDGEAFEVEEAVALESQTIKHMIEDDCADSGIPLPNVTSKILAKVIEYCKKHVEANSADEKPSEDVLKAWDVDFVNVDQATLFDLILAANYLNIKSLLDLTCQTVADMIKGKTPEEIRKTFNIKNDFTPEEEEEVRRENQWAFE

SEQ ID NO: 2116 - protein, 201 aa, Triticum aestivum
  misc_feature (48)..(48): Xaa can be any naturally occurring amino acid
  misc_feature (55)..(55): Xaa can be any naturally occurring amino acid
  misc_feature (68)..(68): Xaa can be any naturally occurring amino acid
  misc_feature (151)..(151): Xaa can be any naturally occurring amino acid
  misc_feature (154)..(154): Xaa can be any naturally occurring amino acid
  misc_feature (173)..(173): Xaa can be any naturally occurring amino acid
  misc_feature (182)..(182): Xaa can be any naturally occurring amino acid
MVLESTMICIDNSEWMRNGDYSPSRFQAQADAVNLICGAKTQCEPGEXTVGVMTXAGKGVRVLVTPTXDLGKILACMHGLEVGAEANLAAAIQVAQLALKHRQNKRQQQRIIVFIGSPVTYDKKVLETIGKKLKKNNVAPLTLLHFMGETXDDXKPDENWQALIAAVNNSDSXHIVHVPPGXHALSDVLRSSPIFPGRDGV

SEQ ID NO: 2117 - protein, 227 aa, Arabidopsis thaliana
MGRGKIVIQKIDDSTSRQVTFSKRRKGLIKKAKELAILCDAEVCLIIFSNTDKLYDFASSSVKSTIERFNTAKMEEQELMNPASEVKFWQREAETLRQELHSLQENYRQLTGVELNGLSVKELQNIESQLEMSLRGIRMKREQILTNEIKELTRKRNLVHHENLELSRKVQRIHQENVELYKKAYGTSNTNGLGHHELVDAVYESHAQVRLQLSQPEQSHYKTSSNS

SEQ ID NO: 2118 - protein, 180 aa, Musa acuminata
  misc_feature (29)..(29): Xaa can be any naturally occurring amino acid
  misc_feature (128)..(128): Xaa can be any naturally occurring amino acid
  misc_feature (168)..(168): Xaa can be any naturally occurring amino acid
  misc_feature (170)..(170): Xaa can be any naturally occurring amino acid
MAKSYPTVSEEYQKAVEKAKRKLRGLIAXKNCAPLMLRLAWHSAGTYDVVSKTGGPFGTMRFPAELAHGANNGLNIAVRLLEPIKEQFPILTYADFYQLAGVVAVEVTGGPEIPFHPGREDKPEPPVXGRLPDATKGSDHLRDVFGHMGLSDRISLHYLVDTHWEGAXRXDLVSKGLGLP

SEQ ID NO: 2119 - protein, 129 aa, Brassica napus
PSLLSPPLLLARARFYKGFGARDGRRRQREPRGGGGVREQDRFLPIANISRIMKKAVPANGKIAKDAKETLQECVSEFISFVTSEASDKCQKEKRKTINGDDLLWAMATLGFEEYVDPLKIYLQKYRDM

SEQ ID NO: 2120 - protein, 161 aa, Zea mays
  misc_feature (95)..(95): Xaa can be any naturally occurring amino acid
  misc_feature (153)..(153): Xaa can be any naturally occurring amino acid
MTRVIHDSGDDMQKEALDLVSSDVNFPKGHFPDYRIGPNNQIIDPEETHEAVPLKEIVAKETAQLLEQHKRLSVRDLKEKFEKGLSGASKLSEEXAKRREAASLDRQVLLKKLRDVLDTLKGRVAGRNRDDAEEAISLVEALAVQLTQREGEXIYEKAEVK

SEQ ID NO: 2121 - protein, 293 aa, Anabaena variabilis ATCC 29413
MGLTDNYKLNLIQWYPGHIAKAEKNLKEQLSRVDVVFEVRDARIPLATHHPQIDEWVGNKARILVLNRLDMIPPQVRSLWIDYFQNRGEVPYCTNAQHGQGVAGVAKAAQAAGVELNQRRRDRGMLPRAVRAVVIGFPNVGKSALINRLLGKRVVESAARPGVTRQLRWVRISDQLELLDAPGVIPVKLGNQEAAVKLAICDDIGQASYDNQLVAAALIDIVNSLQEQAGELLPRSPLYARYELDPTPHTGEGYLHALAEYRHKGDVERTARQLLTDYRKGLLGTLPLELPPM

SEQ ID NO: 2122 - protein, 216 aa, Bacillus sp. KSM-K16
MKFFVDTANINEIKEANELGILDGVTTNPSLVAKEGVDFHERIAEIAKLVPGSVSAEVISLDAEGMIEEGKTLAAISENITVKVPMTVDGLKAVKAFAELGIKTNVTLIFSVPQALLAARAGATYVSPFLGRLDDIGHDGLQLISDIADIFSTHGLPTQIIAASVRHPVHVSEAAKRGAHIATIPLNVIKQLTGHPLTDKGIEKFLADWNKENVEK

SEQ ID NO: 2123 - protein, 371 aa, Malus x domestica
MGKGGMSDGDHADRCCGEAINGDVQQENMAAWLLGVKNLKIQPYKLPNLGPHDVRVRLRAVGICGSDVHHFKNMRCVDFIVKEPMVIGHECAGIIEEVGSEVEHLVPGDRVALEPGISCKRCNLCKQGRYNLCRKMKFFGSPPNNGCLANQVVHPGDLCFKLPDNVSLEEGAMCEPLSVGIHACRRANVCQETNVLVVGAGPIGLVTLLAARAFGAPRIVIADVNDERLLIAKSLGADAVVKVSTNIEDVAEEVAKIQKVLENGVDVTFDCAGFNKTITTALSATRPGGKVCLVGMGQREMTLPLATREIDVIGIFRYQNTWPLCLEFLRSGKIDVKPLITHRFGFSQKEVEEAFETSARGGNAIKVMFNL

SEQ ID NO: 2124 - protein, 352 aa, Solanum demissum
MEVETHMSFRTAEKISILVVNDDATYLPVVAGLLKKCNYQVVTVKYPIDALSKLRIKGDSFDLVVTDVHKSDINGFELQQVITQAFEIPVLLMSADDKEGTILKGLKGVSVDDQRDQGPCTALQVKRGKKPVPGKSAMKLGKQGKDNSVNFVLPTKSQIIWTDSLHNTFLEAISNIGFDKAVPKKIHEHMKVPGLSRENVASHWQKYRIYLRRVTDASSSIQVPDINLASRANQSTIASGTLGKHRQFHQENFGVQSSVPSLLIHTTGYRTGSLQHLKNKGKEVDDVLDPVRNFSVFHNVSATQGSQGIGDLSASSMNQGNDQPHQQNNEDEALVNFDGGFNQDMEKEDYLQ

SEQ ID NO: 2125 - protein, 479 aa, Zea mays
MDPTAAPGSGGTPADSDATSPTNTTVTLPPLTLRDVPRLASSSPAAAAAAAVPNPISRHPYFHPPANFYISPGDVSLRHAFFDLVSAAPTPLVAYRRGGPRRDLAVDPAAARAALVTCGGLCPGLNTVLRELVVGLQELYGVRHVFGVAAGYRGFYGADEDHVRLHPAAVDDWHKKGGTVLKTTRGGFDLGKIVDGIVARGYTQIYAIGGDGTMRGALAIFEEFKRRGLNISITGIPKTVDNDIGIIDRSFGFQTAVEVAQQAIDAAHVEAVSAVNGAGIVKLMGRSTGHIALHATLSSRDVDCCLIPEVDFYLEGKGGLFEFLYERIKKKGHAVVVVAEGAGQELIPRTDDQKREQDESGNTVFLDVGPWLKSELGRWWKREHPDELFTVKYIDPTYMIRAVPANASDNLYCTLLAHSAIHGVMAGFTGFVPGPINGTYSYIPLEDVAVAKNPVDVNDHKWAWVRSVTNQPDFLKSQA

SEQ ID NO: 2126 - protein, 334 aa, Mesorhizobium sp. BNC1
MQGITKLSNESGEMDLIEFPRPIAGHGNVVLEVAAAGICGTDIHILKGEYKVVPPVIVGHEVCGFVCDAGEGVDPALVGKRVVTETFYSVCHTCAYCRNGRPNMCANRKSIGTHANGAMTRWVEVPSHGLHAVPDFMSDAAASMAEPVAFVTNSMAGEYNYVGPDNEVLVIGPGAIGLIAAQVARAAGANVNIRGTTKDKARLDLAERLGFSVSDNDTPLVPQSFDRVVECSGSPYGIADALAALTKGGHLMQMGIVGRDSQLPFDYVCYKELKITAGFASTPKSWLRAMKLIRDRKVDLEPLVSDVCALHAWKTAFDRSMSAEGVKFVFDPRL

SEQ ID NO: 2127 - protein, 498 aa, Bordetella parapertussis 12822
MTLHDSAYWRAQAAALAPEGRAYIDGAYCDAADGATFAAHSPIDGRKLADIAACGAADVDRAVAAARRAFEAGVWSGLAPRERKHRLLRLAALITEHQEELALLETLDMGKPIRDALAFDLPETARCYAWYGEAIDKRYDEIAPTGADALATITREPLGVVAAVVPWNYPLMMAAWKVAPALAVGNSVILKPAEQASLSALRLAALAEQAGIPPGVFSVVPGLGAQAGQALGLHPDVDCIAFTGSTATGKRFMTYSGQSNLKRVWLECGGKSPHIVFADCPDLDRAAQVAALAIFSNQGEVCIAGSRLYVQHGIYDAFMEKVAAFAATLRPGNPLDPDSALGAMVDERQTQAVMARIAAGAQEGARLRLGGRQVLTDSGGYYIEPTIFDCPGQDNSLVREEIFGPVLAAQGFADEDEAVALANDSIYGLGAGLWTADLGRAHRLSRRLRAGLVWVNCYADGDITVPFGGVKQSGFGRDKSLHAMDKYSDLKTTWISLR

SEQ ID NO: 2128 - protein, 396 aa, Escherichia coli [sequence omitted]

SEQ ID NO: 2129 - protein, 504 aa, Burkholderia cepacia R18194
MLHRRALVLSILVLASCGLGYELISSALSSYLLGDSILQFSSVIGCYLFAMGIGSWLAKFVEDDDVLDRFVDIELLVGLLGGVSAALLFAVFAWLAAPFRAALYALVLALGMLIGMEIPLVMRAFQQRRQAFRHTVSEVLTFDYLGSLAVSLIFPLVLAPRLGLLRTSFLFGLLNAFVALWTTHLFRDEIRNVRGKLMRASLVIGLLVAGFALSDRITHWAEHGVYGDETIYSETTPYQRIVLTQWHDDMRLYLNGNLQFSSRDEHRYHEALIHPTIDALPWAKRVLVLGGGDGLAVRELLKHRNLEQITLVDLDPAMTKLFSTSAPLVKLNQGSLKDPRVHVINDDAVRWLESNADVYDAIVVDFPDPTNFGLGRLYSVPVFRLLARHLSENGYAVIQSTSPYFAPHAYWTIIATLHEAGLNTWPYHCYVPSFGDWGFVIAGKRRDFTVPTHYSVPTRWLDAQTAAEMFHFPADMPALPMSPNELNDQPLVRRFDDDWKHVLR

SEQ ID NO: 2130 - protein, 262 aa, Bacillus cereus G9241
MPMIGLGVYKAKEGDEVKRAVKTALEVGYRSIDTATVYENESGVGEAVRESGIPREDIFITTKVWNDDQGYEETLEAFEKSLKKLQMDYVDLYLIHWPIRGKYVDTYRALEKLYEEGKVRAIGVSNFHKHHLELLLPNCKVKPMVNQVELHPMLTQFELRNFCQGEQIQMEAWSPLMRGGEVFQHPIIQAIATKYEKTSAQVILRWDIQSGVVTIPKSVTPSRIQENFSIFDFSLTEEEMTQINTLNRNLHVGTNPDKYDTL

SEQ ID NO: 2131 - protein, 189 aa, Zea mays
STQSSVNHPTNHGFEFQELPKPEVPHPVPELTKPEVPPHPTAVPKLPKPEVPHPVPELRKPELTPHPAAVPELPKPEVPHPMPELPKPEVPPHPTAVPELPKPEVPHPVPELPKPELPPHPAVPELPKPEVPHQVAPELPKPELPPHPTVPKLPHPEVPEVPNHELPPLPKAELPPKPEGHYPEPEAKP

SEQ ID NO: 2132 - protein, 335 aa, Pyrococcus abyssi GE5
MKAKDIVLKKSEEIEGLAIEGPWLDEVESLEGVISYYEKIGFQATHLGKAVKIWRKVEEKRKGGEEVRVFLGYTSNIVSSGLREIIAWLVKERKVDVIVTTAGGIEEDFIKTLKPFILGDWEVNDAELREKGINRIGNIFVPNDRYIEFEKYMVPFFERILDIERKLKRPLTASEFIYEMGRYMDEVLGKEKEKSIIYWAYKRDVPIFCPAITDGSIGDMLYFFKEERHDSKLVIDIANDIVKLNNLAITAKETASIILGGSLPKHAIINANLFRGGTDYAIYISTAVPWDGSLSGAPPSEGVSWGKIKAKADYVEIWADATLVFPILVWMVMKA

SEQ ID NO: 2133 - protein, 546 aa, Triticum aestivum
  misc_feature (28)..(28): Xaa can be any naturally occurring amino acid
  misc_feature (271)..(271): Xaa can be any naturally occurring amino acid
MGNCCRSPAAAAREDVSSSHFPASAAGXKKPHQPRNGAAARGPAGEAAAQKRLAVLGEEGCDFIGGIDDKYLLDRELGRGEFGVTYLCVDRDTKEQLACKSISKRKLRTPVDVEDVRREVAIMRHLPRSPSIVTLREACEDEGAVHLVMELCEGGELFDRIVARGHYTERAAAAVTRTIVEVVQLCHRHGVIHRDLKPENFLFANKKENSPLKAIDFGLSIFFKPGEKFSEIVGSPYYMAPEVLKRNYGPEIDIWSAGVILYILLCGVPPXFWAETEQGVAQAILRGNIDFKREPWPNVSENAKDLVRRMLEPDPKLRLTAKQVLEHHWLQNAKKAPNVPLGDIVKSRLKQFSRMNRFKRRALRVIADHLSAEEVEDIKEMFKVMDTDNDGIVSYEELKSGIAKFGSHLAESEVQMLIEAVDTNGRGALDYGEFLAVSLHLQRMANDEHLRRAFLFFDKDGDGFIEPEELQEALAEDGAVDITEVVKDILQEVDTDKDGKISFEEFVAMMKTGTDWRKASRHYSRGRFNSLSIRLIKDGSVKMGNE

SEQ ID NO: 2134 - protein, 151 aa, Brassica napus
  misc_feature (6)..(6): Xaa can be any naturally occurring amino acid
  misc_feature (12)..(12): Xaa can be any naturally occurring amino acid
  misc_feature (16)..(16): Xaa can be any naturally occurring amino acid
  misc_feature (19)..(19): Xaa can be any naturally occurring amino acid
  misc_feature (21)..(21): Xaa can be any naturally occurring amino acid
  misc_feature (25)..(25): Xaa can be any naturally occurring amino acid
  misc_feature (28)..(28): Xaa can be any naturally occurring amino acid
  misc_feature (32)..(32): Xaa can be any naturally occurring amino acid
  misc_feature (38)..(38): Xaa can be any naturally occurring amino acid
  misc_feature (55)..(55): Xaa can be any naturally occurring amino acid
  misc_feature (58)..(58): Xaa can be any naturally occurring amino acid
  misc_feature (68)..(68): Xaa can be any naturally occurring amino acid
  misc_feature (77)..(77): Xaa can be any naturally occurring amino acid
  misc_feature (80)..(80): Xaa can be any naturally occurring amino acid
  misc_feature (85)..(85): Xaa can be any naturally occurring amino acid
  misc_feature (87)..(87): Xaa can be any naturally occurring amino acid
  misc_feature (92)..(93): Xaa can be any naturally occurring amino acid
  misc_feature (97)..(97): Xaa can be any naturally occurring amino acid
  misc_feature (102)..(102): Xaa can be any naturally occurring amino acid
  misc_feature (104)..(104): Xaa can be any naturally occurring amino acid
  misc_feature (106)..(106): Xaa can be any naturally occurring amino acid
  misc_feature (108)..(109): Xaa can be any naturally occurring amino acid
  misc_feature (115)..(115): Xaa can be any naturally occurring amino acid
  misc_feature (125)..(126): Xaa can be any naturally occurring amino acid
  misc_feature (130)..(130): Xaa can be any naturally occurring amino acid
  misc_feature (135)..(135): Xaa can be any naturally occurring amino acid
  misc_feature (142)..(143): Xaa can be any naturally occurring amino acid
  misc_feature (146)..(147): Xaa can be any naturally occurring amino acid
MASSMXSSAAVXTSPXQAXMXAPFXGLXSSAXFPVTRXANNDITSIASNGGRVSXMKXWPPVGKKKFXTLSYLPDLXEVXLGKEXYXLLRNXXIPCXEFELXHXFXYXXHGTTPXYYDGRYWTMXXLPLXFGCTXSAQVLKXXQEXXTEYP

SEQ ID NO: 2135 - protein, 328 aa, Trichosporonoides megachiliensis
MSYNKNIPLNDGNSIPALGYGTWQAEPGQVGEGVKLAVKAGYRHLDLAKVYQNQTEIGQALKELFDEGVVKREDLFITSKLWNNRHAPEHVEPALDETLKELGLSYLDLYLIHWPVAFKFTTPDELLPADPTNKDLAYVDDSVKLSDTWKAVVALKKTGKTKSVGVSNFSTRLVDLVEEASGERPAVNQIEAHPLLQQDELVAHHKSKNIVITAYSPLGNNVAGKPPLTENPGIVDAAKRLNHTPAAVLIAWGIQRGYSVLVKSVTPSRIKSNFEQITLSDEEFQRVTNLIKEYGESRNNVPFNYKPSWSIDVFGTQDEAKATHKINA

SEQ ID NO: 2136 - protein, 328 aa, Trichosporonoides megachiliensis
MSYNKNIPLNDGNSIPALGYGTWQAEPGQVGEGVKLAVKAGYRHLDLAKVYQNQTEIGQALKELFDEGVVKREDLFITSKLWNNRHAPEHVEPALDETLKELGLSYLDLYLIHWPVAFKFTTPDELLPADPTNKDLAYIDDSVKLSDTWKAVVALKKTGKTKSVGVSNFSTRLVDLVEEASGERPAVNQIEAHPLLQQDELVAHHKSKNIVITAYSPLGNNVAGKPPLTENPGIVDAAKRLNHTPAAVLIAWGIQRGYSVLVKSVTPSRIKSNFEQITLSDEEFQRVTNLIKEYGESRNNVPFNYKPSWSIDVFGTQYEAKATHKINA

SEQ ID NO: 2137 - protein, 375 aa, Shewanella oneidensis MR-1
MSDAKKLTGAGLRGQSAGETALSTVGVSGSGLTYRGYDVKDLAENATFEEVAYLILYGELPTTAQLAAYKTKLKGMRGLPQALKEVLERIPADAHPMDVMRTGCSMLGNLEAEHSFSEQSQIADRLLAAFPSIICYWYRFSHDGVRIDTETDDDQIGAHFLHLLHGKAPSALHTKVMDVSLILYAEHEFNASTFTARVCASTLSDMHSCVTGAIGSLRGPLHGGANEAAMELIQDMKDEADARDVLMGKLERKEKIMGFGHAIYRDSDPRNAIIKEWSEKLAADYGDDRLYRVSVACEALMWEQKKLFCNADFFHASAYHFMGIPTKLFTPIFVCSRVTGWTAHVMEQRSNNRIIRPSADYVGVSPRKVIPIANR

SEQ ID NO: 2138 - protein, 330 aa, Trichosporonoides megachiliensis
MSYKQYIPLNDGNKIPALGFGTWQAEPGQVGASVKNAVKAGYRHLDLAKVYQNQSEIGVALQELFDQGIVKREDLFITSKVWNNRHAPEHVEPALDETLKELGLSYLDLYLIHWPVAFKFTTPQELFPTEPDNKELAAIDDSIKLVDTWKAVVALKKTGKTKSVGVSNFTTDLVDLVEKASGERPAVNQIEAHPLLQQDELVAHHKSKNIVITAYSPLGNNVSGKPPLTQNPGIEATAKRLNHTPAAVLLAWGIQRGYSVLVKSVTPSRIESNYDQITLSPEEFQKVTDLIKEYGESRNNIPLNYKPSWPISVFGTSDEAKATHKINTNL

SEQ ID NO: 2139 - protein, 277 aa, Glycine max
  misc_feature (227)..(227): Xaa can be any naturally occurring amino acid
MPLVLAKSDSIQIREVWNDNLEEEFALIREIVDDYPYIAMDTEFPGIVLRPVGNFKNSYDYHYQTLKDNVDMLKLIQLGLTFSDEHGNLPTCGDESGTCCIWQFNFREFNVNEDVFANDSIELLRQSGIDFKRNNENGIDAHRFGELLMSSGIVLNDNVHWVTFHSGYDFGYLLKLLTCQDLPDTQVGFFNLINMYFPTVYDIKHLMKFGSSSMEAVAKLHEVFYVXTVGICHQAGSDSLLTSCTFRKLKDNFFSGSLEKYAGVLYGLGVENGQGSH

SEQ ID NO: 2140 - protein, 70 aa, Triticum aestivum
MADEGTANCIDIILAIILPPLGVFFKFACGIEFWICLLLTFFGYLPGIIYAVWVITKLGLQEGLLTSASK

SEQ ID NO: 2141 - protein, 462 aa, Triticum aestivum
MVDSSAGGKMSAHGGGGGGRTRVGRYELGRTLGEGTFAKVKFARNVETGENVAIKILDKDKVLKHKMIAQIKREISTMKLIRHPNVIRMYEVMASRTKIYIVMELVTGGELFDKIASRGRLKEDDARKYFQQLINAVDYCHSRGVYHRDLKPENLLLDANGTLKVSDFGLSALSQQVREDGLLHTTCGTPNYVAPEVINNKGYDGAKADLWSCGVILFVLMAGYLPFEDSNLMALYKKIYKADFSCPSWFSTSAKKLIKKILDPNPNTRITIAEVINNEWFKKGYQPPRFETAEVNLDDINSIFNESGDPAQLVVERREERPAVMNAFELISTSQGLNLGTLFEKQTDSVKRETRFASRLPANEILSKIEAAAGPMGFNVQKRNYKLKLQGENPGRKGQLAIATEVFEVTPSLYMVELRKSNGDTLEFHKFYHSISNGLKDVMWKPEGSIAEGDETRHRRSP

SEQ ID NO: 2142 - protein, 317 aa, Nicotiana tabacum
MAQNNEQQQQGQGLIEAGVLDDIINRLLEFRNARTVRQVQLSEAEIRSLCSASREIFLQQPNLLDLKPPIKICGDIHGQYGDLLRLFEYGGFPPEANYLFLGDYVDRGKQSLETICLLLAYKIKYPENFFLLRGNHECASINRIYGFYDECKRRFNVKLWKCFTECFNCLPVAALIDEKILCMHGGLSPVLTNLDQIRNLPRPTDVPDSGLLCDLLWSDPSREVKGWGMNDRGVSYTFGPDKVAEFLMQHDMDLVCRAHQVVEDGYEFFAERQLVTIFSAPNYCGEFDNAGAMMSVDESLMCSFQILKPTDRKPRFL

SEQ ID NO: 2143 - protein, 436 aa, Achromobacter obae
MTKALYDRDGAAIGNLQKLRFFPLAISGGRGARLIEENGRELIDLSGAWGAASLGYGHPAIVAAVSAAAANPAGATILSASNAPAVTLAERLLASFPGEGTHKIWFGHSGSDANEAAYRAIVKATGRSGVIAFAGAYHGCTVGSMAFSGHSVQADAAKADGLILLPYPDPYRPYRNDPTGDAILTLLTEKLAAVPAGSIGAAFIEPIQSDGGLIVPPDGFLRKFADICRAHGILVVCDEVKVGLARSGRLHCFEHEGFVPDILVLGKGLGGGLPLSAVIAPAEILDCASAFAMQTLHGNPISAAAGLAVLETIDRDDLPAMAERKGRLLRDGLSELAKRHPLIGDIRGRGLACGMELVCDRQSREPARAETAKLIYRAYQLGLVVYYVGMNGNVLEFTPPLTITETDIHKALDLLDRAFSELSAVSNEEIAQFAGW

SEQ ID NO: 2144 - protein, 310 aa, Nicotiana tabacum
MAQNGQGIEPAVLDDIINRLLEFRNARTVRQVQLSEAEIRSLCTASKEIFLHQPNLLELEAPIKICGDIHGQYGDLLRLFEYGGFPPEANYLFLGDYVDRGKQSLETICLLLAYKIKYPENFFLLRGNHECASINRIYGFYDECKRRFNVRLWKTNTDCFNCLPVAALIDDKILCMHGGLSPDLTDLDEIRNLPRPTDIPDSGLLCDLLWSDPSREVKGWGMNDRGVSYTFGSDKVAEFLMQHDMDLVCRAHQVVEDGYEFFAERQLVTIFSAPNYCGEFDNAGAMMSVDENLMCSFQILKPTDRKPRFL

SEQ ID NO: 2145 - protein, 63 aa, Triticum aestivum
  misc_feature (37)..(37): Xaa can be any naturally occurring amino acid
FEDGFVSLLPDNGNPKNALKLPTDETPLGQIKDGFFXRKDLVVFFLSPLGEEQINALKDLGPK

SEQ ID NO: 2146 - protein, 283 aa, Arabidopsis thaliana
MDAKETSATDLKRPREEDDNGGAATMETENGDQKKEPACFSTVIPGWFSEMSPMWPGEAHSLKVEKVLFQGKSDYQDVIVFQSATYGKVLVLDGVIQLTERDECAYQEMITHLPLCSIPNPKKVLVIGGGDGGVLREVARHASIEQIDMCEIDKMVVDVSKQFFPDVAIGYEDPRVNLVIGDGVAFLKNAAEGSYDAVIVDSSDPIGPAKELFEKPFFQSVARALRPGGVVCTQAESLWLHMDIIEDIVSNCREIFKGSVNYAWTSVPTYPRHWGHWIYALFN

SEQ ID NO: 2147 - protein, 180 aa, Zea mays
MQYLFDVWKDMEELKKEVREARRIKMLHQPSKAMDLENEIRILRNTFAEKSKDCVSLLKEWETHKRLKENGTIPSFDLEGLQCLGSMLRIVGLSGTHMDLSNISIQWFRIHPKESNKEIISGATRPVYALEPHDVGRYLQAEIDVGGEIAVAKTAGPVDPGLFDWTRSVSVIHMCCVLHD

SEQ ID NO: 2148 - protein, 304 aa, Nicotiana tabacum
MDTAAVDRIIEKLIEVRSSNPGKLVQLSESEIKQLCVASRDIFLKQPNLLESEAPIKTRGDIHGQYSDLLRLFEYGGFPPEANYLFLGDYVDRGRQSLETICLLLAYKIKYPENFFLLRGNHECASINRIYGFYDECKRRFNVKLWKSFTDCFNCLPVAALIDEKILCMHGGLSPDLSSLDQIRNLPRPTAIPDTGLLCDLQRSDPGKDVKGWGMNDRGVSYTFGPDKVSEFLSKHDLDLVCRAHQVVEDGYEFFAESELVTIFSAPNYCGEFDNAGAMMSVDENLLCSFQILKPAEKKNKFVM

SEQ ID NO: 2149 - protein, 180 aa, Zea mays
MADHHHHHHHGHPPDGPGGAGDQLEVIKEQDRLLPIANVGRIMKQILPPNAKISKEAKETMQECVSEFISFVTGEASDKCHKEKRKTVNGDDVCCAFGALGFDDYVDPMRRYLHKYRELEGDRAASSRGGGGGGPAGAGDPASASAAAGPSPSAASAGHFMFGAAMDRPDNNSSAGARPF

SEQ ID NO: 2150 - protein, 373 aa, Zea mays
  misc_feature (26)..(26): Xaa can be any naturally occurring amino acid
  misc_feature (50)..(50): Xaa can be any naturally occurring amino acid
  misc_feature (143)..(143): Xaa can be any naturally occurring amino acid
  misc_feature (152)..(152): Xaa can be any naturally occurring amino acid
  misc_feature (164)..(164): Xaa can be any naturally occurring amino acid
  misc_feature (185)..(185): Xaa can be any naturally occurring amino acid
  misc_feature (198)..(198): Xaa can be any naturally occurring amino acid
  misc_feature (211)..(211): Xaa can be any naturally occurring amino acid
  misc_feature (226)..(226): Xaa can be any naturally occurring amino acid
  misc_feature (245)..(245): Xaa can be any naturally occurring amino acid
MGKGAQGSDAAAAGGEVEENMAAWLXVAKNTLKIMPFKLPPVGPYDVRVXMKAVGICGSDVHYLREMRIAHFVVKEPMVIGHECAGVVEEVGARRERTCPVGDRVALEPGVSCWRCRHCKGGRYNLCEDMKFFATPPVHGSLXANQVVHPAXDLCFKLPDGVSXLEEGAMCEPLSVGVHACRRAXVGPETGVLVVGGXAPIGLVSLLGGAXPFGAPRVVVVDVDDXRLAVARSLGADAAVPVVAXAEDLADEVERIRAAMGSDIDVSLDCAGFSKTMSTALEATRPGGKVCLVGMGHNEMTLPLTAAAAREVDVVGVFRYKDTWPLCIDFLRSGKVDVKPLITHRFGFSQRDVEEAFEVSARGRDAIKVMFNL

SEQ ID NO: 2151 - protein, 123 aa, Arabis holboellii
AVLIQILNVVAFCHLQGVVHRDLKPENFLYTSKEENSQLKVIDFGLSDFVRPDERLNDIVGSAYYVAPEVLHRSYTTEADVWSIGVIAYILLCGSRPFWARTESGIFRAVLEADPSFDEPPWP

SEQ ID NO: 2152 - protein, 506 aa, Glycine max
  misc_feature (149)..(149): Xaa can be any naturally occurring amino acid
MASLSCSANDLAPLFNDTAAANYLCAQFDSISRKLNVTTYAVDNTYLLFSAYLVFAMQLGFAMLCAGSVRAKNTMNIMLTNVLDAAAGGLSYYLFGFAFAFGGPSNGFIGRHFFGLRKFPKDSPPSGDYSFFLYHWAFAIAAAGITSGXSIAERTQFVAYLIYSSFLTGFVYPIVSHWFWSSDGWASATRSHGNVLFGSGVIDFAGSGVVHMVGGIAVLWGALIEGPRIGRFDRSGRSVALRGHSASLVVLGSFLLWFGWYGFNPGSFLTIAKGYGSGGYYGQWSAIGRTAVTTTLAGSTAALTTLFSKWLLAGHWNVIDVCNGLLGGFAAITSGCAVVEPWAAIVCGFVAAWVLIWLNKLAAKVEYDDPLEAAQLHGGCGAWGVFFTGLFAKKVYVEEIYGVGRPFGALMGGGGRLLAAQVIQILVVCGWVTATMAPLFYGLHKMKLLRISRDDETAGMDLTRHGGFAYAYHDDEDGSSRGVGFMLRRIEPAASTTPSPPAAPQV

SEQ ID NO: 2153 - protein, 496 aa, Triticum aestivum
MALSRAQTNSGESLISSTFASRYVRTALPRFRIPEQSIPKDAAYQIINDELMLDGNPRLNLASFVTTWMEPECDKLIQNSVNKNYVDMDEYPVTTEFQNRCVNMIAHLFNAPIGEDETAVGVGTVGSSEAIMLAGLAFKRKWQNKMKAEGKPHDKPNIVTGANVQVCWEKFARYFEVELKEVKLREGYYVMDPAKAVELVDENTICVAAILGSTLNGDGEFEDVKMLNDLLVKKNEETGWDTPIHVDAASGGFIAPFLYPELEWDFRLPLVKSINVSGHKYGLVYAGIGWCIWRSKEDLPDELIFHINYLGADQPTFTLNFSKGSSQVIAQYYQLIRLGFEGYRNIMDNCQENAMVLKEGLERTGRFNIVSKDQGVPLVAFSLKDSSRHDEFEISEFLRRFGWIVPAYTMPPDAQHVTVLRVVIREDFSRTFAERLVIDIEKVLHELDALPSRSSGPALQHPNGDTVSEKDLARQREVVSVWKRAVAARKKTQGVC

SEQ ID NO: 2154 - protein, 362 aa, Schizosaccharomyces pombe
MGEEGIKINDTHKRRIDEVEPSEKEDNVERQTKKYNFEIDEPEEQEKKDEKEDDKEESPSKSLEEISQSVSPVEEEPRDVRFKELSTPFSYPINDPPEGRPVRVYADGVFDLFHIGHMRQLEQAKKVFPNVHLIVGLPNDQLTHRLKGLTVMNDKERAEALRHCKWVDEVLENAPWVITPEFLEEHKIDFVAHDDIPYASDDSGDIYLPVKKVGKFIPTKRTEGVSTSDLITRIIRDYDQYVMRNLARGVNRKELNVSLFKKNELDLRHHIKVLRDTLRNHWVSTTRDLKADIKSFLSMATTDYQLQKNPLHGSSEPSSPGPTGFLGGINRWMQRRSSSHYDLPRVGNEIAASSSSATEENH

SEQ ID NO: 2155 - protein, 324 aa, Triticum aestivum
MEAETAAKRARENEGAAAADGAGEQAGISAVIPGWFSEISPMWPGEAHSLKVEKVLFQGKSDYQDVLVFQSSTYGKVLVLDGVIQVTERDECAYQEMITHLPLCSIKDPKKVLVIGGGDGGVLREVSRHSSVEQIDICEIDKMVVDVSKQFFPHLALGFEDPRVSLHIGDGVAFLKNAPEGTYDAVIVDSSDPVGPAQELFEKPFFESVSRALRPGGVVCTQAESIWLHMHIIEDIVTNCRQVFKGSVNYAWTTVPTYPSGVIGFMLCSTEGPSVDFQHPVFSIEEDEYSTKSKGPLKFYNSEFHTASFCLPSFARRVIEAKAN

SEQ ID NO: 2156 - protein, 123 aa, Arabis holboellii
AVLIQILNVVAFCHLQGVVHRDLKPENFLYASKEENSQLKVIDFGLSDFVRPDERLNDIVGSAYYVAPEVLHRSYTTEADVWSIGVIAYILLCGSRPFWARTESGVFRAVLKADPSFDEPPWP

SEQ ID NO: 2157 - protein, 571 aa, Triticum aestivum
MAGGGVEDVYGEDRATEEQLITPWSFSVASGHQLLRDPRHNKGLAFTEAERDAHYIRGLLPPAIVSQEHQEKKIMHNLRSYTVPLHRYIAMMDLQERNERLFYKLLIDNVEELLPVVYTPVVGEACQKYGSIYRRPQGLYISLKDKGKVLEVLKNWPERSIQVIVVTDGERILGLGDLGCQGMGIPVGKLSLYTALGGVARPSACLPITIDVGTNNETLLNDEYYIGLRQRRATGEEYHELLQEFMNAVKQNYGEKVLVQFEDFANHNAFDLLAKYSKSHLVFNDDIQGTASVVLAGLLAALKMIGGGLVDQTYLFLGAGEAGTGIAELIALEMSKHTELPVDDCRKKIWLVDSKGLLVESRKESLQHFKKPFAHEHEELKTLLEAVQSIKPTVLIGTSGVGKTFTQEVIEAMASFNEKPVIFSLSNPTSHSECTAEEAYTWSKGTAVFASGSPFDPVEYEGKTFVPGQSNNAYVFPGFGLGVVISGAIRVHDDMLLAASEALAEEATQENFDKGLIFPPFTNIRKISASIAAKVAAKAYDLGLASRLPRPDDLVKYAESCMYTPLYRSYR

SEQ ID NO: 2158 - protein, 181 aa, Cicer arietinum
MASSMISSSAVTTVKRASSVPSGAVAPFVGLKSMAGFPVRKVNNDITSIASNGGRVHCMQVWPPIGKKKFETLSYLPPLTEEQLLKEVEYLLRKGWVPCLEFELEKGFVYREHNNSPGYYDGRYWTMWKLPLFGCTEAVQVLKELQEVVKAYPNAFVRIIGFDNVRQVQCISFIAHTPKEF

SEQ ID NO: 2159 - protein, 255 aa, Brassica napus
  misc_feature (126)..(126): Xaa can be any naturally occurring amino acid
ASVSFASASKPVSASISSAGHASVEEDAVVMRKPVWEDEWEFAEVETKTIPLWVVFDKPPSLQEAKEATDDLKDALNMAYMEGSNEVGSVSRMFSSFQPSENRAVESAVPQVALKAFAFLSENTAXAQSVVASIASDPKVWDAVMENKDLMKFLETNTASTTVEADNDDKSELSSETESEEESEAKPINLMEILRDMKLKPVQMMENVSSYFGGLFRTETFTKGGQERKRMLLNDPTTLFGLAVCVIFMVVLKRA

SEQ ID NO: 2160 - protein, 123 aa, Arabis holboellii
AVLIQILNVIAFCHLQGVVHRDLKPENFLYTSKEENSQLKVIDFGLSDFVRPDERLNDIVGSAYYVAPEVLHRSYTTEADVWSIGVIAYILLCGGRPFWARTESGIFRAVLKADPSFDEPPWP

SEQ ID NO: 2161 - protein, 314 aa, Zea mays
  misc_feature (149)..(149): Xaa can be any naturally occurring amino acid
MGGGVMRTAAKVSIAGGAAAAKSGRFRNAAPVFATAPAAAGSEAAPLVSVSSGEVPPAAAQWAASWELDDWEFADWRDDAAAAAAVVEREATAAAAKPRLVFAPPSREEAEEATTELRDAVERAYFNESPVEVVKEQDKEFNKLATDAXDSFYPGHVVQAFTLLKSSTEAQSVVASLASDRNVWDAVLKNEKVMEFYKTHQTTLVQTSPNEAVTVELPGKLEDAASENTSSGELPAGSGPSFSDFVDNAKKTVMDVVHNITDFFKDLFDDSAKTQTGAGPSAAEKGPSTADMAVGGSFMALAIAVILVVMFKRA

SEQ ID NO: 2162 - protein, 211 aa, Asarum caudigerum
NRQVTYSKRRNGLLKKAYELSVLCEAEVALIVSSSRGRLYEYANNSVRTTIDRYKKASDSSNPASVSETNSQYYQQEATKLRQQIDILQNANRQLMGESISAMNVKQLKQLETRLEKGISRIRSKKNELLFAEIEYMQKREVELRNDNIYLRGKIVENERAQQNMNMLPGGGGYEVMSQHPSYDSRNYLPVNLLEHNQHFSHQEPTALQLG

SEQ ID NO: 2163 - protein, 315 aa, Vitis vinifera
MAPGGSTYKEVLESHSTVTDYDIAMTKADTNLTPAKTTAGLSGKKGISSPNGVHELLECPVCTSLMYPPIYQCPSGHTLCSNCKSRVHNCCPTCRHELGDIRCLALEKVAESLELPCRYQSLGCHDIFPYYSKLKHEQQCRFHPYNCPYAGFECSVTGDIPTLVEHLKGDHKVDMHDGCTFNHRYVKSNPQEVENATWMLTVFNCFGKQFCLHFEAFQLGTAPVYMAFLRFMGDDNEAKKFSYSLEVGGNSRKLIWQGVPRSIRDSHRKVRDSQDGLIIQRNLALYFSGGDRQELKLRVTGRIWKESELWKDNGC

SEQ ID NO: 2164 - protein, 282 aa, Magnaporthe grisea 70-15
MAANAKYTAAPTQDPDDHLDYTSAPPSYQATGSSAAQPSDAERLASGVPRSSEDDLPDDFKFGGNVAEATVEIRHQFIRKVYSILTVQLLITGGVSALGFMSTSYRDWVRAHPGVLWLSLFGAMGMMLLTYWKRKSYPTNLLFLGGFTLLEAYTISVVVTFYDSSIVLNAVLLTAGMFVFLTAFAFQTKYDFTSWMPYLFGALWGLVLFGFVAMFLPYSSTAELIYGALAALVFSGYILVDTQLVMRTHHVEEEIAAAISLYLDIINLFLAILRILNSQQQN

SEQ ID NO: 2165 - protein, 275 aa, Bacillus sp. KSM-K16
MEFWFTEKQTERFGITMKIKRTLHTEKTDFQQLDMVETEEFGNMLLLDGMVMTTEKDEFVYHEMVTHVPLFTHPNPKHVLVVGGGDGGAIREILKHPSVEKATLVDIDGKVIEYSKTYLPTIACALEDERVDVKVADGFMHIAQSANEYDVIMVDSTEPVGPAAKLFERGFYEGISKALKEDGIFVAQTDNPWFHQELVSNVYKDVKEIFPITRLYTANIPTYPSGMWTFTIGSKKHDPLAVEATRFHDVQTKYYTPDIHRAAFVLPKFVQDLLK

SEQ ID NO: 2166 - protein, 158 aa, Escherichia coli
MKLISNDLRDGDKLPHRHVFNGMGYDGDNISPHLAWDEVPAGTKSFVVTCYDPDAPTGSGWWHWVVVNLPADTRVLPQGFGSGLVAMPDGVLQTRTDFGKTGYDGAAPPKGETHRYIFTVHALDVERIDVDEGASGAMVGFNVHFHSLASASITAMFS

SEQ ID NO: 2167 - protein, 345 aa, Burkholderia cepacia R18194
MLKALVLERTRELALRDIDLPQEVGPGDVRIKVHTVGVCGSDVHYYVHGGIGPFRVDAPMVLGHEASGTVVETGAGVTHLRVGDRVCMEPGVPRFDSPATLRGLYNLDPDVRFWATPPIHGCLTPYVVHPAAFTYRLPDTVSFAEGAIVEPLSIGLQAAKKAAMKPGDLAVVIGAGTIGAMTALAALAGGAARVILADVVPDKLALFADNPAVTTVDVRTQPLADVVAEATDGWGADVVFEASGSANAYAGLVDLMCPGGCAVLIGMPVAPVPLDVVALQAKEGRIESVFRYANIFPRALALIASGAIDVKPFISRTFPFSEGVRAFEEAASGHPRDVKIQIEMD

SEQ ID NO: 2168 - protein, 451 aa, Zea mays
MVGGGGGGPLRRVGKYEVGRTIGEGTFAKVKFAQNTETGESVAMKVLDRSSILKNKMAEQIKREISIMKLVRHPNVVRLHEVLASRKKIFIILEFITGGELFDKIIRHGRLSEADARRYFQQLIDGVDFCHKKGVYHRDLKPENLLLDSQGNLKISDFGLSAWPAQGSFLLRTTCGTPNYVAPEVLSHKGYNGALADTWSCGVILYVLLAGYLPFDEVDLTTLYGKIESAEYSFPAWFSGGAKSLIRRILDPNPETRIRIEEIRSDEWFQKNYEPIKEIENEEVNLDDVNAAFDDPEDDNEDAFEDETGPLTLNAFDLIILSQGLNLAALFDRRQDCDKLQNRFLSRNPAKVILSSMEVVAQSMGFKTHIRNYKMRVEGLNADKTSHLSVMVEVFEVAPSIFMVELQRAAGDTSEYNTFVNNYCGKLDDIIWKFPTEKGKSRIPRLSKSHS

SEQ ID NO: 2169 - protein, 496 aa, Solanum tuberosum
MEPKPATEPKKSSVWVLPYKTQSLQSLYTIGKKLGQGQFGTTHLCIEKSSGNLYACKTIPKKKLICKEDYEDVWKEIQIMHHLSEHPNVVRIKGTYEDALYVHIVMELCAGGELFDRIVEKGHYSEREAAKLIKTIVGVVEACHSLGVMHRDLKPENFLFLSSDEDAALKATDFGLSVFYKPGETFSDVVGSPYYVAPEVLCKHYGHESDVWSAGVILYILLSGVPPFWAETDMGIFRQILRGKLDLESEPWPGISDSAKDLIRKILDRNPKRRLTAHEVLCHPWIVDDTVAPDKPLDSAVLSRLKQFSAMNKLKKMALRVIAERLSEEEIGGLKELFKMLDTDNSGTITFEELKEGLRRVGSELMESEIKDLMDAADIDNNGTIDYGEFIAATVHLNKLEREENLLSAFSYFDKDGSGYITIEELQQACKEFGLSELNLDEIIKDIDQDNDGQIDYKEFSAMMRKGTGGAVGRRTIRNNLNLGEALGLVQSEEIL

SEQ ID NO: 2170 - protein, 272 aa, Pisum sativum
FVRQLNTYGFRKVDPDRWEFANEGFLAGQRILLRTIKRRRNVAQSPSMQRESGGACIELGEFGLEGEIERLRRDRSVLVAEIVKLRQQQNNSRDQISAMEARLLITEKKHQQMMAFLARALSNQSFIQQLANNKELKGVEMKRKRRLPASSSLENLQNDSVTMMTVPIESVVDYSSREQQEGLTAIESEIETLLSAYDNESRSEIKDPSANESNLSDWEELLNQKLVGGNPEDEVLIGDFSQIDAPVEDLVEKNDDWTVDLQNLVDEMDFEP

SEQ ID NO: 2171 - protein, 509 aa, Glycine max
  misc_feature (14)..(14): Xaa can be any naturally occurring amino acid
  misc_feature (152)..(152): Xaa can be any naturally occurring amino acid
  misc_feature (177)..(177): Xaa can be any naturally occurring amino acid
MSLPACPAEQLAQXLLGPNTTDASAAASLICGQFAAVDSKFVDTAFAVDNTYLLFSAYLVFSMQLGFAMLCAGSVRAKNTMNIMLTNVLDAAAGGLFYYLFGFAFAFGSPSNGFIGKHFFGLKDIPSSSYDYSYFLYQWAFAIAAAGITSGXIAERTQFVAYLIYSSFLTGFVYPVXVSHWFWSPDGWASAISSADHVFSPGDRLFSTGVIDFAGSGVVHMVGGIAGLWGALIEGPRMGRFDHAGRAVALRGHSASLVVLGTFLLWFGWYGFNPGSFNKILLTYGNSGNYYGQWSAVGRTAVTTTLAGSTAALTTLFGKRVISGHWNVTDVCNGLLGGFAAITAGCSVVEPWAAIVCGFVASIVLIACNKLAEKVKFDDPLEAAQLHGGCGTWGVIFTALFAKKEYVKEVYGLGRAHGLLMGGGGKLLAAHVIQILVIAGWVSATMGPLFWGLNKLKLLRISSEDELAGMDMTRHGGFAYAYEDDETHKHGMQLRRVGPNASSTPTTDE

SEQ ID NO: 2172 - protein, 365 aa, Stylosanthes humilis
MGSTGETQITPTVVSDEEANLFAMQLASASVLPMVLKSAIELDVLEIIAKAGPGVHLSPADIAANVPTTNPDAAVMLDRMLRLLACYNILNHSLRTLPDGKVERLYGLAPVAKFLVKNEDGVSLSALNLMNHDKVLMESWYYLKETVLEGGIPFNKAYGMTAFEYHGTDPRFNKVFNKGMNDHTTITMKKILEIYTGFEGLKSLVDVGGGVGAVVNMIVTKYPHIKGINFDLPHVIEDAPSYPGVEHVGGDMFVSVPKADAVFMKWICHDWSDEHCIKFLKNCYDAVPDNGKVIVAECILPVAPDSSLATKGVVHIDVIMLAHNPGGKERTEKEFEALAKAAGFQGFRVVCCAFNTYIMEFLKKP

SEQ ID NO: 2173 - protein, 401 aa, Triticum aestivum
MVLESTMICIDNSEWMRNGDYSPSRFQAQADAVNLICGAKTQSNPENTVGVMTMAGKGVRVLVTPTSDLGKILACMHGLEVGAEANLAAAIQVAQLALKHRQNKRQQQRIIVFIGSPVTYDKKVLETIGKKLKKNNVALDVVDFGETDDEKPEKLEALIAAVNSSDSSHIVHVPPGDHALSDVLISTPIFTGEEGGSGFAASAAAAAATGATGYDFGVDPNVDPELALALRLSMEEERARQEAIAKKAAEDNKDQASSSTDAIMAEAELTLNAPADVDADLLKDDDDAQLLQQALAMSMDEGASGAAAVADAAMAEAAADDQDLALALQMSVQDAEAAGQSDMSKVFEDRSFVTSILNSLPGVDPNDPSVKDLLASLHGQGEQEEKKDTEDKPDKPEDGKN

SEQ ID NO: 2174 - protein, 58 aa, Zea mays
FGTANCLHILIAIILPTMGVYLKYRCRHEFWICLLFTFLGYIPSIIYSIYSITKNTYH

SEQ ID NO: 2175 - protein, 416 aa, Ralstonia solanacearum
MYQHIKVPAGEKITVNQDFSLNVPDNPIIPYIEGDGTGFDITPVMIKVVDAAVEKAYAGKRKISWMEIYAGEKSTKVYGPDVWLPEETLQVLKDYVVSIKGPLTTPVGGGIRSLNVALRQELDLYVCLRPVRYFKGVPSPVKEPEKTDMVIFRENSEDIYAGIEFEAQSDKAKKLIKILQDEFGVKKIRFPETSGIGVKPVSKEGTERLVRKAIQYAIDNDKPSVTIVHKGNIMKFTEGGFRDWAYALAQKEFGAELIDGGPWCKFKNPKTGKEIVVKDAIADAFLQQILLRPAEYSVVATLNLNGDYISDALAAQVGGIGIAPGANLSDSVAMFEATHGTAPKYAGKDYVNPGSEILSAEMMLRHMGWTEAADLIISSIEKSILSKKVTYDFARLLEGATQVSCSGFGQVMIDNM

SEQ ID NO: 2176 - protein, 86 aa, Zea mays
GSGVARAAAVTQRRTVKWFNDTKVFGFICPEDGSKHLFVHQSYIKSDGFHSLADGDDVEFSIYHGDYGRTKAVDLTIPDGSFLRGC

SEQ ID NO: 2177 - protein, 123 aa, Arabis holboellii
AVLIQILNVVAFCHLQGVVHRDLKPENFLYTSKEENSQLKVIDFGLSDFVRPDERLDDIVGSAYYVAPEVLHRSYTTEADVWSLGVIAYILLCGSRPFWARTESGIFRAVLKADPSFDEPPWP

SEQ ID NO: 2178 - protein, 365 aa, Iris hollandica
MDSTPVIQIPTPYPFSDEEACLYAMQLRSFSVLPMTLKAAIELDLLEIIAKAGPGAYLSPAEISSQLPTENPEAPAMIDRMLRLLACYSVVSCRVDAAGDDGKPRRRYGAERVVKYLTKNEDGVSMAALTLMNQDKVFMESWYHLKDAVLEGGIPFKKAFGMSPFEYQGTDPRFNKVFNEGMRNHSAFIMKKILETYQGFDSVKLLVDVGGGLGGTMKAIVTKYPHIEGINFDLSHVISEAPPIPGVKHVGGDMFESVPSGDAIFMKWILHDWSDAHCLKLLSNCWKALPEDGKVIVMEGILPTIPEPTSAAQGVVHIDLVMMAHNPGGKERTKAEFESLARDAGFSGSKALCSYANCWILEFYK

SEQ ID NO: 2179 - protein, 564 aa, Zea mays
MAAAAVTSNGGAVAANGPAPGRLASVYSEVQTNRLLHALPLPSVLRSNFSVVVGPASSAAGNPDEIAKLFPNLFGQPSASLVPSAEPAATRPLKIGVVLSGGQAPGGHNVICGIFDYLQERAKGSTLYGFKGGPAGIMKCKYVELTSDFVYPYRNQGGFDMICSGRDKIETPEQFKQAEDTANKLDLDGLVVIGGDDSNTNACLLGEYFRSRNMKTRVIGCPKTIDGDLKCKEVPTSFGFDTACKIYSEMIGNVMTDARSTGKYYHFVRLMGRAASHITLECALQTHPNAALIGEEVAAKKQTLKNVTNYITDIICKRADLGYNYGVILIPEGLIDFIPEVQKLIAELNEILAHDVVDEAGAWKSKLQAESRELFEFLPKTIQEQLMLERDPHGNVQVAKIETEKMLISMVETELEKRKAEGRYSAHFRGQAHFFGYEGRCGLPTNFDSNYCYALGYGAGALLQSGKTGLISSVGNLAAPVEEWTVGGTALTSLMDVERRHGKFKPVIKKAMVELDAAPFKKYASLRDEWAIKNRYISPGPIQFSGPGSDDSNHTLMLELGAEL

SEQ ID NO: 2180 - protein, 157 aa, Zea mays
SSSVPLSAEGITVQSFNADLLYEPWEVLDDDGFPFTMFAPFWNRCLCMPDPAAPLLPPKRINSGDLSRCPWDELIFEDESERGSNALLARAWSPGWQNADKALTAFLDGPLVDYSANHKKADSASTSLLSPYLHFGELSVRKVFHQVRMKQGDPLES

SEQ ID NO: 2181 - protein, 1994 aa, Gibberella zeae PH-1
MSSAALQTAPHQHTALASSPLGTPSSRQYRPSQSSPNSQAYNAQQTSTASSSSRRPPSRKTNDSAPSPSYHLTPGFGSPVTASVANHQEPVASDWQGNMPPVAPPRSSSNHQSGSSRRSHYPNEKPPSSPRRNESTRTGSRGEQAAAENGYRSSKADTAARASSRDGKAAPSQLPVRSTHSTPSKPVHDATDSLTKAIAAAQDTIDRDRNHASNQHNGDDTAAPPPAVATGEHGEERRQRSRHDHSRSNKGNTKFGDFILGNTIGEGEFGKVKLGWKQDSSVQVAIKLIKRDTVGSNPSRFAKIYREVAILRGVQHPNIVRLIDKVETDRHIGIILEYASGGELFDYILNHRYLKDNAARRLFAQLVSGVGYLHKKGIVHRDLKLENLLLDRNRNIIITDFGFANTFDAHEELTKEEELNLTDKEFVKRMGLDRVKMNGSRKGDLMQTSCGSPCYAAPELVVSDSLYTGRKVDVWSCGVILYAMLAGYLPFDDDPANPEGDNINLLYKYIVTTPLTFPEYVTPHARDLLRRILVPNPRKRADLFEVARHSWLSEYANLVEFITSTTTLPSEVPDSGVSPDDYAEAPTVARSNSVREASKHKQPHPPVVGGLAKTHGSVDPDSEATHRGTPKDAKRRTVQVEYVAPTTKTQRGADVAPSKPSSHSLQQQQPANTPEPVTEKPLPREPPLTKDNPSRAQQSRRPQSSHKNAPPPHRPSRDTRATSDNAFMTGGTTTTRPRTQGSMQSSTSMGLQSQTNYGQPAPPTIADTNAHGRIQQPQNPEEEGNIAKDVGSVPPKVMKMTTFQNETKAAGRGHKRSNTLGDIGSKIMGRSGSIFGGRSKKRPEQQQQQQQQQAEKSSRKYPPVSMSNTMLPGEDAGPRPSMDSKASRRSFSIGLGKKRSGSVQGSSDKQNRRFSLAKAMGLGRNEGSVTGSEADSQQDLPIQHPRTEQLRGYSAHDEPRHSEPYFDAPYEQYPQRDTAQSSPVYNTRYGSQQQDGRRPSAIPTYIQGGSHLNTGSDSSVDMRRPNDPRSRPYQEDFSGSEGYDGRPVGSSREDRPGVLHKSHKKFADAYDGENYRGHEGSSGAAKRVMDFFRRRGKARGATSNEGRTPRALDDAHSQLGDHPGQLILTTYARDWLCFDCYNHINWRSVVCFDGNETRDDETTISSLTVPFAKQITSHELAGKLTERAKKLSSQRVATIAYLEYMYMRPGSVSLPDTYVTWAKLAFAYSGIQTHRRIDLNLPFGSDASYTRMLSPLRHVTSNVGFASYGSRSVAQPTAPTAQGLSEQPRLQEFDEKKTRLDNQNGRKTKSLHKIPSAGGVSSPAAGSGSVLEAPSKAEEPAQGETPSTTSKNAGFFAELKRSVRIVITYSWLNVFMVFVPVGIAVSQVPGVPAGLIFGMNAIAIIPLAGLLAFATESVALKMGDALGALLNVTFGNAVELIIFILALVKNEIRVVQSALLGSILANLLLILGMSMLLGGLRFREQVYNSTVTQMSACLLSLSVISLVLPTAFHASFKDNDKADRESLKISRGTSVVLLIVYVIYLTFQLKSHAYMYESTPQHIIDAELAPGPAAGFLDSSSSDDSSSSSSDSSDSDSSHGTMRKRMKKVLRNRRHRRSSAASADTADTKGTRSASFATNNTTTPQEEVSEAKASRQRVPRSASYEGSEHAVDDDDEEEAERSHRRRRYRRHRHRRSKKEARKAKKEAKNAQSQNGVPESIPENKGEGEPRRVDFAVQDDLEAGPSTNGGKRPFPLRGISVKALAPVFTEKPPTASGPAPHVRYGIRRTNSLPDRLQFRAPGAMLPAQIPPMLNAPGVKSTDSDEEDEEEHLSQFSAVILLLVSTALVAVCAEFLVDSIQEVVKTSHINQVGIGLIILPIVGNAAEHVTAIKVAYKNNMDLAIGVAVGSSIQIALLLTPFMVILGWIMNKEMTLYFTLFETVCLFVSAFIVNFLVLDGRSNYLEGALLCAVYIIIAVVAFFYPDSEDASVWGGGT

SEQ ID NO: 2182 - protein, 175 aa, Triticum aestivum
MAPTVMASSATSVAPFQGLKSTAGLPVSRRSNGASLGSVSNGGRIRCMQVWPIEGIKKFETLSYLPPLSTEALLKQVDYLIRSKWVPCLEFSKVGFIFREHNASPGYYDGRYWTMWKLPMFGCTDATQVINEVEEVKKEYPDAYVRIIGFDNMRQVQWVSFFAFKPPGCEESGKA

SEQ ID NO: 2183 - protein, 138 aa, Pyrococcus abyssi GE5
MGDKTKVQVSKLKPGRYIIIDDEPCRIVNITVSSPGKHGSAKARIEAVGIFDGKVRSIVKPTSAEVDVPIIDKKTAQVIAITPDTVQIMDMETYEMFEVPIDTGVAEEIRDQLKEGINVEYWETLGRVKIMRIKGEGE

SEQ ID NO: 2184 - protein, 430 aa, Deinococcus radiodurans R1
MSNVFYRSSKPYPVAVRGEGVFLYDDAGRRYLDGSSGALVANIGHGRAEVGERMAAQAARLPFVHGSQFSSDVLEEYAGRLARFVGLPTFRFWAVSGGSEATESAVKLARQYHVERGEPGRFKVITRVPSYHGASLGSLAASGMGARRELYTPLMRPEAWPKLPKPDPARNGAEDAEGLRALLEREGPETVAAFMAEPVVGASDAALAPAPGYYERVRDICDEAGIIFIADEVMSGMGRCGSPLALSRWSGVTPDIAVLGKGLAAGYAPLAGLLAAPQVYETVMGGSGAFMHGFTYAGHPVSVAAGLSVLDIVEREDLTGAAKERGAQLLAGLQALQARFPQMMQVRGTGLLLGVVLGDLATGQAFETPGIASRIGAAALKRGLITYPGSGAEPNGRGDHLLLGPPLSITAAEVDELLALLAGALEDVLG

SEQ ID NO: 2185 - protein, 168 aa, Oryza sativa
MAAAPSATSVHDFTVKDASGKDVNLSTYKGKVLLIVNVASQCGLTNSNYTELSQLYEKYKVQGFEILAFPCNQFGGQEPGSNEEIVQFACTRFKAEYPIFDKVDVNGNNAAPLYKYLKSNKGGLFGDSIKWNFSKFLVDKEGRVVDRYAPTTSPLSIEKDIKKLLGSS

SEQ ID NO: 2186 - protein, 314 aa, Thermus thermophilus HB27
MDYGMYFFEHVTPYETLVRRMERVIASGKTPFQDYFLFESKGFGKVLILDKDVQSTERDEYIYHETLVHPAMLTHPEPKRVLIVGGGEGATLREVLKHPTVEKAVMVDIDGELVEVAKRHMPEWHQGAFDDPRAVLVIDDARAYLERTEERYDVVIIDLTDPVGEDNPARLLYTVEFYRLVKAHLNPGGVMGMQAGMILLTHHRVHPVVHRTVREAFRYVRSYKNHIPGFFLNFGFLLASDAFDPAAFSEGVIEARIRERNLALRHLTAPYLEAMFVLPKDLLEALEKETMVSTDQNPFYVTPEGEARQAPYKG

SEQ ID NO: 2187 - protein, 495 aa, Deinococcus radiodurans R1
MTAEPQVSPAPTPPPAAPLLVRDRLFIGGEWVTPCGQGTLEVVNSATEEVMGTVPEGTPEDAERAILAARAAFDSWSQTPAEERAALLERISRGLNERQSEIAALVAQEVGMPFVLSNVIQVGLPAVTFMSMAEEIRQLPAEETLASSLLLREPVGVVAAITPWNYPLHQIAAKVAPALAAGCTVVLKPSEVAPLNAFVLAEIIEAAGAPAGVFNLVTGTGPVVGEVLAAHPEVDMVSFTGSTAAGKRVSELAARTVKRVALELGGKSPYLILDDADLSGEALVQAVMNGIQGCYLNSGQTCSALTRMLVPRSRLPEVEAVAQAVVSQVKVGSPFDAATTLGPLVSDVQRERVRGHIRQGVAEGARLIAGGAESPEGLERGYYVQPTIFSDVTPEMTIAREEIFGPVLVIQPYEDEEDAVRIANATHYGLAGGVWSSDRERAVRVARRLRTGQVSINGGAFNPVAPFGGYKQSGNGREFGRLGLEEFMEVKALQF

SEQ ID NO: 2188 - protein, 387 aa, Rubrobacter xylanophilus DSM 9941
MGQAGGPTAVMNASLLGFLEGCPPGAEIWGVLDGFRGLVEGDLARLPPGCVDRRLYLSPGAWLGAGRRPLGEGDPERCVERLAARGVRGLAMVGGNGTMWACARIEEAARRAGYGLAVVGIPKTVDNDLAGTDHAPGFPSAARYVAAVVRDIGADLEAMRGFESVRVLETMGRNAGWLALSAGYLRREPSDPPHLIYVPERPFDPDAFLGDVEAAVRAHGFVVAVVSEGLVRRPREEGLRRPVIGGVAPELARRVEEALGLPSRGELLGMGQRSFSLAASPLDREEARALGNRAARMLLEGRSGLMPALRRLPGRRYRVAVEEVPFGRVAGAERPLPPRWVVPPQEVPQGFRGWLAPLVGEDLAPHPPPLVRRLRGAAAGREGRSES

SEQ ID NO: 2189 - protein, 138 aa, Triticum aestivum
  misc_feature (21)..(21): Xaa can be any naturally occurring amino acid
  misc_feature (80)..(80): Xaa can be any naturally occurring amino acid
  misc_feature (99)..(99): Xaa can be any naturally occurring amino acid
  misc_feature (102)..(102): Xaa can be any naturally occurring amino acid
  misc_feature (110)..(110): Xaa can be any naturally occurring amino acid
MAPAVMASSATTAAPFQGLKXTAGLPVSRRSCSAGLSSVSNGGRIRCMQVWPIEGIKKFETLSYLPPLSTEALLKQVDYXIRSKWVPCLEFSKVGFRLXREXNSSPRVLXTVRYWDKCGNCPIVRGCTDAKGCGWREV

SEQ ID NO: 2190 - protein, 311 aa, Archaeoglobus fulgidus DSM 4304
MLDMPIDPVYYQLAEYFDSLPKFDQFSSAREYREAINRIYEERNRQLSQHERVERVEDRTIKGRNGDIRVRVYQQKPDSPVLVYYHGGGFVICSIESHDALCRRIARLSNSTVVSVDYRLAPEHKFPAAVYDCYDATKWVAENAEELRIDPSKIFVGGDSAGGNLAAAVSIMARDSGEDFIKHQILIYPVVNFVAPTPSLLEFGEGLWILDQKIMSWFSEQYFSREEDKFNPLASVIFADLENLPPALIITAEYDPLRDEGEVFGQMLRRAGVEASIVRYRGVLHGFINYYPVLKAARDAINQIAALLVFD

SEQ ID NO: 2191 - protein, 299 aa, Bartonella sp.
  misc_feature (27)..(27): Xaa can be any naturally occurring amino acid
  misc_feature (105)..(105): Xaa can be any naturally occurring amino acid
DGDKGILLYRGYPIDQLAEKGDFLESXYLLLYGELPTQQEKNDFDRCIMQHTMVHEQFARFFHGFRRDSHPMAVMVSCLGAMSAFYHDSIDITDPHQRMIASVRXISKVPTLAAMAYKYSIGQPFVYPRNDLSYAANFLRMCFAVPCEEYKTNPVLSRAMDQIFILHADHEQNASTSTVRLAGSSGANPFACIAAGVACLSIKRIPEFIARAKDKNDPFHLMGFGNRVYKNYDPRAKIMQKTCHEVLKELNIQDDPLLDIAIELEKIALNDEYFIEKKLYPNVDFYSGITLKALGFPTE

SEQ ID NO: 2192 - protein, 421 aa, Zea mays
MADNNFVCKNYLLIYKTINIRLKTSFGVALLERDILLKNLKCVLESLRGRVTGKTKDEIEESISMVEILAVQLSKREAELLQQKEEVTKLAKSLKQASEDAKRIVEEERANAHTEIETAKGSVQRVQQAVQEHEKMSQNTGKQDMEELKKEVREARRIKMLHQPSKAMDLENEIRILRNTFAEKSKDCVNLLKELEMHKRLKENGTIPSFDLEGLQCLGSMLRIAGLSGTHMDLSNISIQWFRIHPEESNKEIISGATRPVYALEPHDVGRYLQAEIDVGGEIAVAKTAGPVDPDAGLVDYVETLVRKPETEFNVVVLQLNGIDLPKESVHVLNVGRLRMRLTKGKSVVAKEFYSSSMQLCGVRGGGEAASQAMFWRPRNDLSLVLAFESTRERNTAIMLARRFAVDCNIILAGPGDKTPW

SEQ ID NO: 2193 - protein, 351 aa, Zea mays
HWVPRGRPPPRRPAKRVGLLLGRYELGRLLGHGTFAKVYHARQADTGETVAIKVLDKEKALRNGLVPHIKREIAILRRVRHPNIVRLFEVMATKSKIYFVMEFVRGGELFARVAKGRLKEDTARRYFQQLISAVGFCHARGVFHRDLKPENLLVDERGDLKVSDFGLSAVADQFHPDGLLHTFCGTPSYVAPEVLARRGYDGAKADIWSCGVILFVLMAGYLPFHDQNLMAMYRKIYRGEFRCPRWFSRDLSSLLIRLLDTNDKIMISGNKILLSMGEIRRLRMQQRIKNVELGISDEERDHELPDFPSFIPFLPPLSAANLKDYYATCFTLIAGIMGVWMAFLATNPGNL

SEQ ID NO: 2194 - protein, 322 aa, Bartonella sp.
TYIDGDKGLLLYRGYPIDQLAEKGDFLESCYLLLYGELPTKQEKNDFDRCIMQHTMVHEQFARFFHGFRRDSHPMAVMVACLGAMSAFYHDSIDITDPQQRMIASVRLISKVPTLAAMAYKYSIGQAFVYPRNDLSYAANFLRMCFSVPCEEYKTNPVLTRAMDQIFILHADHEQNASTSTVRLAGSSGANPFACIAAGVACLSGPAHGGANEACLKMLQEIGSVKRIPEFIARAKDKNDPFRLMGFGHRVYKNYDPRAKIMQKTCHKVLKELNIQDDPLLDIAIELEKIALNDEYFVEKKLYPNVDFYSGITLKALGFPTE

SEQ ID NO: 2195 - protein, 154 aa, Neurospora crassa
MSQSGVQVDPECRRAFDKLMSRQLRYIIYKLSDDFKEIVIESTSEGATENYDEFREKLVNAQTKSASGAISKGPRYAVYDFEYKLASGEGSRNKVTFIAWSPDDAGIKSKMVYASSKEALKRSLSGIAVELQANEQDDIEYEQIIKTVSKGTAA

SEQ ID NO: 2196 - protein, 585 aa, Triticum aestivum
MCGILAVLGCADDTQGKRVRVLELSRRLKHRGPDWSGMHQVGDCYLSHQRLAIIDPASGDQPLYNEDKSIVVTVNGEIYNHEQLRAQLSSHTFRTGSDCEVIAHLYEEHGENFIDMLDGVFSFVLLDTRDNSFIAARDAIGVTPLYIGWGIDGSVWISSEMKGLNDDCEHFEIFPPGHLYSSKQGGFKRWYNPPWFSEVIPSVPYDPLALRKAFEKAVIKRLMTDVPFGVLLSGGLDSSLVAAVTVRHLAGTKAAKRWGTKLHSFCVGLEGSPDLKAAKEVANYLGTMHHEFTFTVQDGIDAIEDVIYHTETYDVTTIRASTPMFLMSSKIKSLGVKMVISGEGSDEIFGGYLYFHKAPNKEELHRETCQKIKALHQYDCLRANKATSAWGLEARVPFLDKEFINEAMSIDPEWKMIRPDLGRIEKWVLRKAFDDEEQPFLPKHILYRQKEQFSDGVGYSWIDGLKAHAESNVTDKMMSNAKFIYPHNTPTTKEAYCYRMIFERFFPQNSAILTVPGGPSVACSTAKAVEWDAQWSGNLDPSGRAALGVHLSAYEQEHLPATILTGTSKKPRMIEVAAPGVAIES

SEQ ID NO: 2197 - protein, 111 aa, Glycine max
  misc_feature (51)..(52): Xaa can be any naturally occurring amino acid
CLQGPEIKVYNGELPYVDVSGGELWINILHETLKHGLAPKSWTDYLHLTVXXTLSNAGISGQAFKHGPQINNIFQLEVITGNCSCTIYILNFPCVAGFCVLRLVLVLVWGS

SEQ ID NO: 2198 - protein, 155 aa, Lycopersicon esculentum
MDLRLMGIDNTPLFHTLQHMMEAAGEDSVNAPPKKYVRDAKAMAATPVDVKEYPDSYVFVVDMPGLKSGDIKVQVEEDNVLLISGERKREEEKEGVKFIRMERRVGKFMRKFSLPENANTDAISAVCQDGSLTVTVQKLPPPEPKKSKTIQVKVA

SEQ ID NO: 2199 - protein, 199 aa, Triticum aestivum
MSSNLSFVLNKPGDVSFEERPKPSLASPHDVLVAVNYTGICGSDVHYWVHGSIGKFVVEDPMVLGHESAGTVVEVGDKVKTLKAGDRVALEPGYPCRRCQNCLAGKYNLCPDMVFAATPPYHGTLTGFWSAPADFCFKLPDNVSLQEGALIEPLAVAGHIVKQARVKPGDSVVVMGAGPVGLLCAAVAKAYGASKDVSV

SEQ ID NO: 2200 - protein, 131 aa, Triticum aestivum
  misc_feature (70)..(70): Xaa can be any naturally occurring amino acid
  misc_feature (81)..(81): Xaa can be any naturally occurring amino acid
  misc_feature (90)..(90): Xaa can be any naturally occurring amino acid
  misc_feature (99)..(99): Xaa can be any naturally occurring amino acid
  misc_feature (101)..(101): Xaa can be any naturally occurring amino acid
MAPTVMASSATSVAPFQGLKSTAGLPVSRRSSSAGLGSVSNGGRIRCMQVWPIEGIKNSETLSYLPPSPXEASLKQVDYLXRSNWVPCLXFNKLVPFPXRXHSPGYMAILAWNCYFGSTKVSVRRYLSVTA

SEQ ID NO: 2201 - protein, 470 aa, Mycobacterium bovis AF2122/97
MQGQLSRTRVYAVPVPGSAQSAYACGVERLLASYRSIPATASIRLAKPTSNLFRARVKHDARGLDASGLTGVIGIDPEARTADVAGMCTYEDLIAATLHYGLSPLVVPQLRTITLGGAVTGLGIESASFRNGLPHESVLEMDILTGAGELLTVSPGQHSDLYRAFPNSYGTLGYSTRLRIQLEPVRPFVALRHIRFSSLTAMVAAMERIIDTGGLDGESVDYLDGVVFSADESYLCIGMQTSVPGPVSDYTGQDIYYRSIQHEAGIKEDRLTIHDYFWRWDTDWFWCSRSFGAQNPRLRRWWPRRYRRSSVYWRLMALDQRFGIADRFENSRGRPARERVVQDIEVPIERTCEFLEWFGENVPISPIWLCPLRLRDHAGWPLYPIRPDRSYVNIGFWSSVPVGATEGATNRKIENKVSALDGHKSLYSDSFYTREEFDELYGGETYNTVKKAYDPDSRLLDLYAKAVQRR

SEQ ID NO: 2202 - protein, 441 aa, Sulfolobus tokodaii str. 7
MDDDKKIIREHTFKTWSKQSSWEPIIVTSSRGVYFYDSNGKKYLDFSSQFVNVNLGYGNERVINAIKEQLDTLQYINPSFGAVVRAKATKALLEVMPKNLTKFFFSTSGTEANEAAVKVSRLYKKPSYKILARYRSYHGSTEASISLTGDYRRWFVEPNTMPGVVRFPEPYCFRCPLKLKYPECNLACANYVDYIIKQEKNVAAIIVEPITGTNGVIVPPKEYMPLLWKIAKENDVLFIADEVMTGWGRVGEWFAVNLWNIQPDILTTAKGASASYVPIGITAFNKEIGEFFEDHIFAHGHTFEAHPVSLAAIPAVIEEYKRLNLLSHVKVMGEYLGKRLLELKERHKSIGDIRGIGLFWAVELVKDKNNTPFGDYEDKYEGKPTVVDIISKKALEKGVYVYNGPSWLIISPPLIINKEEIDQGIETLDEVIKEADSAFKD

SEQ ID NO: 2203 - protein, 123 aa, Arabis holboellii
AVLIQILNVVAFCHLEGVVHRDLKPENFLYTSKEENSQLKVIDFGLSDFVRPDERLNDIVGSAYYVAPEVLHRSYTTEADVWSLGVIAYILLCGSRPFWARTESGIFRAVLKADPSFDEPPWP

SEQ ID NO: 2204 - protein, 509 aa, Mycobacterium avium subsp. paratuberculosis str. k10
MTLPTAAELRARAADALRSLGAHVELGAPDAHGLPASTPITGEVLFTVAPTTSDQAEHTITQATQAFSEWRRTPAPVRGALVARLGELLRAHRDELAALVTLEVGKITSEAAGEVQEMIDICQFAVGLSRQLYGRTIASERPGHRLSETWHPLGVVGVITAFNFPVAVWAWNAALALVCGDTVVWKPSELTPLTALATQALIARAAADVGAPPGVSAVVLGDRELGELLVDDERVALVSATGSVRMGRAVGPRVAARFGRVLLELGGNNAAVVTPSADLDLAVRAVVFAAAGTAGQRCTTLRRLIVHRSVADEVVARVVSALRRLPIGDPFEPGTLVGPLIHETAYRDMVGALESARADGGEVIDGDRRHPFAVEHPSSYYVAPAVVRMPAQTPIVATETFAPILYVLTYDRLDDAIALNNAVPQGLSSAIFTTDLREAERFLDESDCGIANVNIGTSGAEIGGAFGGEKQTGGGRESGSDSWKAYMRQSTNTVNYSGALPLAQGVEFG

SEQ ID NO: 2205 - protein, 272 aa, Pseudomonas aeruginosa UCBPP-PA14
MSSTIHPLPSFGLGTFRLTGQVVVDSVRSALELGYRAIDTAQIYGNEADIGRAIAESGVPRSELFLTTKVWVDNYACEKLLASLRESLEKLRTDRLDLVLIHWPAPGNGVELAEYMAALAEAKSLGLTRRIGVSNFNIELTRQAIAAVGAGEISTNQIELSPYLQNRALTAYLEEQGIAVTSYMTLAYGKVLKDPALAGIAARHRATVAQVALAWAMQLGYAVIPSSTRRENLASNLLARDLRLDAEDMARIAGLERNGREVSPQGLAPAWD

SEQ ID NO: 2206 - protein, 212 aa, Ralstonia eutropha JMP134
MNRRQTAFAASVRRAMFATALALAAASAALLPHPARAADKPAAMPAAAPAGNCPASLNFQFPRLQDEAPQNLCQYAGKVVLVVNTASYCGFTPQYEGLEALYSKYRDRGLVVLGFPSNDFSQEPGSSKEIADFCYNTYGVKFPMLGKSHVRGGDVNPMYALLAKETGTAPKWNFYKYLIDRSGNVVGSYNSMTKPDDKQFVAKIEQLLSSPR

SEQ ID NO: 2207 - protein, 123 aa, Arabis holboellii
AVLIQILNVVASCHLQGVVHRDLKPENFLYTSKEENSQLKVIDFGLSDFVRPDERLNDIVGSAYYVAPEVLHRSYTTEADVWSLGVIAYILLCGSRPFWARTESGIFRAVLKADPSFDEPPWP

SEQ ID NO: 2208 - protein, 162 aa, Triticum aestivum
MEGRMFGLETPLMTALQHLLDVPDGEAGGPGNAAGEKQGPTRAYVRDARAMAATPADVKELPGAYAFVVDMPGLGSGDIKVQVEDERVLVISGERRREEKEDAKYLRMEPRMGKMMRKFVLPENADMEKISPVCRDGVLPVPVEKLPPPEPKKPKPIQVQVA

SEQ ID NO: 2209 - protein, 123 aa, Arabis holboellii
AVLIQILNVVAFCHLQGVVHRDLKPENFLYTSKEENSQLKVIDFGLSDFVRPDERLNDIVGSAYYVAPEVLHRSYTTEADVWSLGVIAYILLCGSRPFWARTESGIFRAVLKADPSFDEPPWP

SEQ ID NO: 2210 - protein, 282 aa, Beta vulgaris
MCESFKRQYQLCDEIGRGRFGVVFRCFSPSSHTSFAVKSIDKRLLLDDETDRECLDKEPKILQILSPHPNILQIHDIFDSDSHLLIVTDLCQESTLYDRVVSAGPFSETDACSVFTQLIDALAHCHRNYICHRDVKPDNILFDSRNRVKLCDFGSAEWFGGVEGRERMNGIVGTPYYVAPEVLAGREYNEKIDVWSAGVILYIMLGGVPPFYGDTVEDTFAAVLRGNLRFPTKIFRSISPEAKDLMRKMLSKDVSRRFSAEQVLRHPWVTSGGMTSTMNDMS

SEQ ID NO: 2211 - protein, 356 aa, Schizosaccharomyces pombe
MFKSLVRKSSAFQPLKYGGKYTVTLIPGDGIGRETSNAVTEIFKTANVPIEFEEIDVTGMEKNNKSSGDALHEAIQSLKRNKVGLKGILFTPFEKGGHTSFNVALRKELDIYASLVLIKNIPGFKTRHDNVDFAIIRENTEGEYSGLEHQSVPGVVESLKIITEYKSKRIAQFAFDFALQNGRKSVTCIHKANIMKLADGLFRRTFYDVANGYDAITPKDLIVDNASMQAVSRPQQFDVLVMPNLYGSILSNIGSALVGGPGVIPGANFGRDYALFEPGCRHVGLSITGRGEANPTAAILSACLMLRHLGLKDYADLINAATYSVIEEGKTLTKDLGGSASTGDFTHAILERMESL

SEQ ID NO: 2212 - protein, 465 aa, Bacillus cereus G9241
MTIVTFSKSTTDKPSYTYEELSEKNKAYVWHPFTQMKDYLEEDPVIIERGEGRKLYDVNGNEYWDGVSSIWLNVHGHQVPELDEAIREQLNKIAHSTMLGLANVPSILLAEKIIEVVPEGLKKVFYSDSGSSAVEIAIKMAFQYWQHKGKAKKQRFVTLKEAYHGDTIGAVSVGAIDLFHQVYSSLLFEAIKMPYPYTYRSPYGNDKAEIVRKHLEEMEELLKDKHEEIAAIIVEPLMQGAGGMITMPKGYLRGLRNLCTKYNVLFITDEVATGFGRTGKMFACEHENVTPDILTAGKGLTGGYLPVAITVTTDEIYNAFLGGYEEQKTFFHGHSYTGNPLGCAVAIANLELYEKTNLIEEVACKTEYVATQLEELFACKHVGDIRQCGLMVGIELVKNKETKEAFEWTERVGVQVCKRSRELGMILRPLGNTIVFMPPLASTIEEIDDMLRILYKAISDVTEGE

SEQ ID NO: 2213 - protein, 426 aa, Neisseria meningitidis Z2491
MENSLKEAALKFHELPVPGKISVTPTKSLATDKDLALAYSPGVAAPCMEIHADPQNAYKYTAKGNLVAVISNGTAVLGLGDIGALAGKPVMEGKGVLFKKFAGVDVFDIEIDEKDPQKLVDIIAALEPTFGGINLEDIKAPECFYIERELRKRCKIPVFHDDQHGTAIITAAAVLNALRFTGRKIEEATLVCSGAGAAAIACLNQLLDLGLKRENVTVCDSKGVIYQTREDKDRMDESKQFYAIEDNGQRVLADAVKGKDIFLGLSGANLLTPEILNTMNEKPIVFAMANPNPEILPPLAKETRPDVVIGTGRSDFPNQVNNVLCFPFIFRGALDVGATTINEEMKRACVYALADLAMEEVTEEVVAAYGKKFEFGAEYLIPTPFDSRLLPRVATAAAKAAMESGVATRPIADLEAYAAKLSEWKL

SEQ ID NO: 2214 - protein, 321 aa, Bartonella sp.
YIDGNAGVLLYRGYPIDQLAEKGDFLESCYLLLYGELPTKQEKNDFDRCIMQHTMVHEQFARFFHGFRRDSHPMAVMVACLGAMSALYHDSIDITDPQQRMIASVRLISKVPTLAAMAYKYSIGQAFIYPRNDLSYAANFLRMCFSVPCEEYKTNPVLTRAMDRIFILHADHEQNASTSTVRLAGSSGANPFACIAAGVACLWGPAHGGANEACLKMLQEIGSVERIPEFIARAKDKNDPFRLMGFGHRVYKNYDPRAKIMQKTCHEVLKELNIQDDPLLDIAIELEKIALNDEYFVEKKLYPNVDFYSGITLKALGFPTE

SEQ ID NO: 2215 - protein, 481 aa, Methylobacillus flagellatus KT
MTKSLVWFRRDLRDYDHAALYHALKDSEQVVCAFVFDTDILDGLPRDDRRVEFIWESVRELKLALQERGGDLLVRHGKATEEIPALASVLGVECVYCNRDYEPAAVKRDDTVSQQLGTQGIAFKSFKDQVIFERDEIMTKSGTPFSVFTPYKNACLRKLDDFHLKAYPVDRYIHHLAQSAPQPMPSLESLAFARSNLKQLRLPTGMSGGMALFEDFSERMPRYRDARDFPALKGPSYLSVHLRFGTVSIRHLARTAWQQGGAGAETWLNELLWRDFYFQVLYHHPQVAEGHSFKPEFEHIPFPNGESLFKAWCEGRTGYPLVDAAMRQINQTGYMHNRLRMVAAGFLVKDLLIDWRWGERYFAEKLIDFDLAANNGGWQWAASTGCDAQPWFRIFNPVTQSEKFDPEGKFIRKYVPELQPCDDKEIHAPWLIPPLRQQALGLVIGKDYPAPVVDHAMRREQVLSLYRQASSRKKWPASSVL

SEQ ID NO: 2216 - protein, 97 aa, Glycine max
  misc_feature (35)..(35): Xaa can be any naturally occurring amino acid
ILKAGEKANDVWWNEPRWKGIKRPHSAHEVHSTRXTVNQEYPRTTMAKKLFGLLKERSEQGQSGHTMGAIDPVQVTQQGANQEVLYVSRWACSSVLT

SEQ ID NO: 2217 - protein, 222 aa, Bacillus thuringiensis serovar konkukian str. 97-27
MKFFIDTANLEDIKKAYKLGVLAGVTTNPSLVAKEGIKFEDRIAEICQAVPKVESVSAEVTPDAVTAEEMIAQAEELIKINGGDEKVTIKLPMTLAGLEACRYLTEKGVKTNVTLIFTVNQALLAARAGATYVSPFLGRLDDISEDGVLLVAKIAELFDVHQLDTQIIAASVRHPDHVTRVAMAGAHIATIPYKVIEQLAMHPLTDQGIEKFAADWVKAPKL

SEQ ID NO: 2218 - protein, 312 aa, Burkholderia cepacia R18194
MPIDNHIAALLARLALAEPPSSLDALRQATETTLTGWHGPLEAVDRTETFAVPTRDGRQIRVRAYWPAATSAHAERQPAIVYAHGGGWCLGTLELYDNPCRALANATQCVVLSVDYRLAPEHEFPVPLEDFCDALDWVFGEAAGLGLDPARIAVGGDSAGGNLAAAACLVARERGGPSIAHQLLLYPPLDASMSTTSYRTCGQGYYLTDEIMQYCFDLYLADPADGSSPSVSPLRAASLEGLPPATLLACEYDPVRDDAHAYAARLREAGVPVDCVVLPGMIHACIHMVGVTPAARQVFDVAGAQMRRAFQR

SEQ ID NO: 2219 - protein, 322 aa, Bartonella taylorii
TYIDGNKGILLYRGYPIDQLAERGDFLESCYLLLYGELPTKQEKHDFDRCIMQHTMVHEQFARFFHGFRRDSHPMAVMVACLGAMSAFYHDSIDITDPQQRMIASVRLISKVPTLAAMAYKYSIGQAFVYPRNDLSYAANFLRMCFSVPCEGYNINSVLTRAMDRIFTLHADHEQNASTSTVRLAGSSGANPFACIAAGVACLWGPAHGGANEACLKMLQEIGSVERIPEFIARAKDKNDPFHLMGFGHRVYKNYDPRAKIMQKTCHEVLKELNIQDDPLLDIAMELEKIALNDEYFVEKKLYPNVDFYSGITLKALGFPTE

SEQ ID NO: 2220 - protein, 198 aa, Triticum aestivum
KPAIKTVLEAYLPQIVLIVFLALLPTLLMFLSKQEGIPSQSHAVRAASGKYFYFIVFNVFLGYTLGSTLFKSLTTIIDHPAGIVTMLANSLPGSATFFLTFVALKFFVGYGLELSRLVPLIIFHLKRKYLCKTEEDVKAAWAPGDLGYNTRVPNDMLIATVVLCYSVIAPLIIPFGVAYFALGWLIAKNQILRVYVPS

SEQ ID NO: 2221 - protein, 342 aa, Agrobacterium tumefaciens str. C58
MLSHVDGQAGELVVRGHHLAELADWSFEQVLELLWSGQTATKITAEDIRSQLGKARLRAFELMQLLFPGLAALTSVEALRLLLSWLPDDETTPHHLVAVAAVPVFATAIIRNRQGFAPIAPDASLTHSADFLRMLSGTLPSTEKVRALDTYLTTVADHGLNASTFTARVIASTGAGLFSSVVGALCALKGPLHGGAPGPVLDMLDAIGAEAEIEPWLLDALGRGERLMGFGHRIYRVRDPRADVLKHAVSTLKEGSDRIAFAGKVEEAALALLKEKKPLRPLQTNVEFYTALVLEAVGFPRDSFTNVFAAGRMAGWTAHVLEQERTGRLIRPQSHYIGPHPR

SEQ ID NO: 2222 - protein, 368 aa, Bacillus halodurans C-125
MSIKQPFVPGLDRVIAAETAISFLDTEREKIIIRGHDLIDLSVSNDYLDIVHLLLDGTLPNASEKSALEDTLKKHYDIPSYVMEILSLLPETTHPMDGLRTGLSALSSVDKEIENRSTEANKARAYKLLGKLPAITVNSYRLINGLKTVQPVPTLSYSANFLYMITGKEPKPFEAKIFDRSLLLYSEHEMPNSTFTARVIASTHSDLYGALTGGVASLKGNLHGGANEAVMYMLQSVDSAAEFQQLIQKKLVNKEKVMGFGHRVYMKKMDPRALEMKESLKQLCEKKGDYSLLDRCEAGEKTMLEEKGLYPNLDYYAAPVYWMLGIPIELYTPIFFTARTAGLAAHVMEQHQNNRIFRPRVSYIGESY

SEQ ID NO: 2223 - protein, 456 aa, Archaeoglobus fulgidus DSM 4304
MYRVKTFKYYSTYKICMIEEVFELTQNGRAKKWHAFYGGKIEILPKVPIRTLDDFSIWYTPGVAEVCNEIAEDEEKAYDYTNKWNLIAIITDGSRTLGLGNIGPKAAMPVMEGKALLFKFLGAVDAFPIALAEQDADRFIEIVKAISPTFGGVNLEDISSPKCFYILERLQKELDIPVWHDDQQGTATATLAALINALKIVGKDISEVKISIIGVGAANFATIRLLKAAGADPKKMFVVDSKGILHPDRADLKEKKGYKWQVAIETNGERRTGGMEEAIRGTDVLIAASKPGPDVIKKEWIAEMNDDAIVFPLANPTPEIWPWEAKDAGARIVGTGRSDFPNQVNNSLVFPGVFRGALTVRARKITDEMCLAAANALAEFAERNGLSEDYIIPRMTEKEVFPEVATAVGVKAVELGLARLELREEEIYEIAELMISATQRKIKKLYELGFIKEPPS

SEQ ID NO: 2224 - protein, 492 aa, Rubrivivax gelatinosus PM1
MDMKNSPLATLADPTLLKTAALIDGAWVDRGEHFAVTDPATGQVLAQVANLGAADAEAALAAAARAWPAWRAKTAKERASVLMKWYQLLLQHADDLARIMTAEQGKPLAEAKGEVGYGASFIEWFAEEAKRVYGETVPTTDNNKRYLVLKQAMGVCAAITPWNFPIAMITRKVAPALAAGCPVVIKPAEQTPLSALAVAELAQRAGMPAGVLNVLTADAERSIQIGNVLCASDTVRHLSFTGSTEVGRILMKQCAPTIKKLSLELGGNAPFIVFDDADLDSAVEGAMISKYRNAGQTCVCANRLYVQAGVYDAFVEKLAAKVKAIKVGNGFEAGVTQGPLIDEAALAKVESHVADALAKGAKLLTGGQRIGERFYSPTVLAQATGEMLCAREETFGPVAPVFRFETEAEVVALANDTEFGLASYFYSRDVGRIFRVGEALEYGMVGINTGLISTAEVPFGGVKQSGLGREGSHHGIDDYVEIKYLCLGDIQK

SEQ ID NO: 2225 - protein, 355 aa, Glycine max
  misc_feature (316)..(316): Xaa can be any naturally occurring amino acid
MGEAPEVFYINGFSKFGHEIETQQNHVNDQNHDSSWYEEIIDEDLKWSFKLNSVLHKAISEYQDIALLDTKRFGKALVLDGKMQSAETDEFVYHECLIHPPLLCHPNPKTVFIMGGGEGSAAREALKHRSMVRVVMCDIDKEVVDFCRKYLIANKEAFSHKKLDLVINDAKSNKLPPRPPARPPSRPAELEKRKEKFDIIVGDLADPLEDGPCYQLYTKSFYEKILKPKLNDNGIFVTQAGPAGIFTHKEVFTSIYNTVKQVFKYVIAYTTHVPSFADTWGWVMASDQPLSICADEMDRRIEARIDGELLYLNGGXFHSSTTMNKTVYQSLQNETHVYTEENARFIPGHGMAFHL

SEQ ID NO: 2226 - protein, 181 aa, Zea mays
MASSIVSSAAAATRSNVAQASMVAPFTGLKSAASFPVTKKNNNVDITSLASNGGRVRCMQVWPPINMKKYETLSYLPDLSDEQLLSEIEYLLKNGWVPCLEFETERGFVYRENNSSPGYYDGRYWTMWKLPMFGCTDATQVLAEVQEAKKAYPQAWVRIIGFDNVRQVQCISFIAYKPEGF

SEQ ID NO: 2227 - protein, 138 aa, Parietaria judaica
MRTVSARSSVALVVIVAAVLVWTSSASVAPAPAPGSEETCGTVVGALMPCLPFVQGKEKEPSKGCCSGAKRLDGETKTGPQRVHACECIQTAMKTYSDIDGKLVSEVPKHCGIVDSKLPPIDVNMDCKTLGVLHYKGN

SEQ ID NO: 2228 - protein, 434 aa, Escherichia coli O157:H7
MKTRTQQIEELQKEWTQPRWEGITRPYSAEDVVKLRGSVNPECTLAQLGAAKMWRLLHGESKKGYINSLGALTGGQALQQAKAGIEAVYLSGWQVAADANLAASMYPDQSLYPANSVPAVVERINNTFRRADQIQWSAGIEPGDPRYVDYFLPIVADAEAGFGGVLNAFELMKAMIEAGAAAVHFEDQLASVKKCGHMGGKVLVPTQEAIQKLVAARLAADVTGVPTLLVARTDADAADLITSDCDPYDSEFITGERTSEGFFRTHAGIEQAISRGLAYAPYADLVWCETSTPDLELARRFAEAIHAKYPGKLLAYNCSPSFNWQKNLDDNTIASFQQQLSDMGYKFQFITLAGIHSMWFNMFDLANAYAQGEGMKHYVEKVQQPEFAAAKDGYTFVSHQQEVGTGYFDKVTTIIQGGTSSVTALTGSTEESQF

SEQ ID NO: 2229 - protein, 123 aa, Arabis holboellii
AVLIQILNVVAFCHLQGVVHRDLKPENFLYTSKEENSQLKVIDFGLSDFVRPDERLNDIVGSAYYVAPEVLRRSYTAEADVWSIGVIAYILLCGSRPFWARTESGIFRAVLKADPSFDEPPWP

SEQ ID NO: 2230 - protein, 316 aa, Escherichia coli CFT073
MNELDGIKQFTTVVADSGDIESIRHYHPQDATTNPSLLLKAAGLSQYEHLIDDAIAWGKKNGKTQEQQVVAACDKLAVNFGAEILKIVPGRVSTEVDARLSFDKEKSIEKARHLVDLYQQQGVEKSRILIKLASTWEGIRAAEELEKEGINCNLTLLFSFAQARACAEAGVFLISPFVGRIYDWYQARKPMDPYVVEEDPGVKSVRNIYDYYKQHHYETIVMGASFRRTEQILALTGCDRLTIAPNLLKELQEKVSPVVRKLIPPSQTFPRPAPMSEAEFRWEHNQDAMAVEKLSEGIRLFAVDQRKLEDLLAAKL

SEQ ID NO: 2231 - protein, 112 aa, Glycine max
MILLLGGSQLPNCSASAIITYSSSPSMSGFYIVMQTASSIISFSAVVAVFRAAPGMVTPFSDIKTMVGFPSKKTNNDITSIPSTGGRVQCMQVWPPVGKKKFETLSYLPDLM

SEQ ID NO: 2232 - protein, 123 aa, Arabis holboellii
AVLIQILNVVAFCHLQGVVHRDLKPENFLYASKEENSQLKVIDFGLSDFVRPDERLNDIVGSAYYVAPEVLHRSYTTEADVWSIGVIAYILLCGSRPFWARTESGIFRAVLKADPSFDEPPWP

SEQ ID NO: 2233 - protein, 454 aa, Vibrio vulnificus CMCP6
MTITNPFNDEVIGTVPNMGEKETQEVIAGADKAFQQFKALTAQERANLLHRWHQLILEHSDELAHIMTLEQGKPLAEAKGEVLYAASFIEWFAEEARRAYGTLVPSHKANAKILVTKEPIGVVAAITPWNFPAAMITRKCGPAFAAGCPVILKPAPDTPFTALALAVLAEKAGFPAGVFNVITGDAVAIGGELTSNKRVRKLSFTGSTPVGKLLMRQSADNIKKLSLELGGNAPFIVFEDADLDAAVEGAMIAKFRNAGQTCVCANRLYVQRSVYSEFCQKLVAKVSALKVGNGFDQGVHIGPLINDAAVAKVVQHVEDAQSKGAQIECGQLPTAGSRLVQPLVLSGVTDEMLVAQEETFGPMAPLFVFDSEEEVLARANNTDFGLAAYFYTQSLSRAWRMSEALEAGIVGINEGLISTTVAPFGGVKESGLGREGSFLGMDDYMESKYILMGL

SEQ ID NO: 2234 - protein, 431 aa, Corynebacterium diphtheriae NCTC 13129
MENNSFAQFDRDHIWHPYGPMPATVAPYVVAATNNTDIILDNGTRLIDGMSSWWAAAFGHGNERLKAAAHRQIDVMSHVMFGGLTHVPAIKLARQLCELTDEPLTKVFFSDSGSVAVEVALKMVYQYQLGQGHPERRRMLTWRGGYHGDTFATMSLCDPEGGMHAMWEGRVMDNVFASRPPLWGAASNEISAYIDHLDSLIDSTIAGIIVEPVVQGAGGMRFHAPEILKGIRQLCDQHGILFIADEIATGFGRTGNLFATQAAKVTPDILCVGKSLTGGFMSLAATITTDAVAESISSAAGGGALMHGPTFMGNPLACAVASEALSIIAEGDWKQQVAEIESELKKGLVPLASNPAVRDVRVLGAIGVVEMKEPVDMKRATHAAVNAGVWLRPFGRLVYTMPPFVCTHKQIQKISCAIASIVHTEQERFER

SEQ ID NO: 2235 - protein, 267 aa, Escherichia coli CFT073
MAIPAFGLGTFRLKDDVVISSVKTALELDYRAIDTAQIYDNEAAVGQAIAESGVPRHELYITTKIWIENLSKDKLIPSLKESLQKLRTDYVDLTLIHWPSPSDEVSAEEFMQALLEAKKQGLTREIGISNFTIPLMEKAIAAVGAENIATNQIELSPYLQNRKVVAWAKQHGIHITSYMTLAYGNALKDKVIARIAAKHNATPAQVILAWAMGEGYSVIPSSTKRENLESNLKAQNLQLDAEDKKAIAALDCNDRLVSPEGLAPEWD

SEQ ID NO: 2236 - protein, 127 aa, Glycine max
KKMVNVGNIFPPPPPKTKGGFFFRMVFGGFFPQNSGRVPVSGGASFAFCPPQTFGGGAAWFNTLVPFGRAALGGPLSAFENPNNKGGGIGKINPLGGAPPGGAPPGLFKNVAKNNLGAHEDNLAKGG

SEQ ID NO: 2237 - protein, 421 aa, Bacillus sp. KSM-K16
METVLMDNLWLTISAILVLLMQGGFILLEAGSTRMKNAGHIAGKTIFTVGIASLVFWAVGYGFIYGDGNPFIGMADFFFGNYADGVGSVDFFFQLTFAAIALTIAFGGFAERGKLAAYAIFAVLFSAFVYPLVAHWIWSDQGWLANLGKQDFAGSTVVHLTGAMAALAATLMLKPRLGKYDKNGKVNDLFGHNQVYTALGVLILWVGWFGFNAGSTGGVADAFFGYVALNTQLAAGAGTIAALFLVWALNGKADVPTTLNGTLAGLVAITASCAFVAPWAAVLIGVIGGLIVVVSMNMFDKLKIDDPIFALSVHGVAGVWGTLSNGLFATPELAEMNGGLPGLFYGGGFEQLGVQLLSVVVCGVFAFVASYVLLFITKGLLGGNLRVTEEEEILGLDMSEHGSYGYPETVQSEKTSTQTGS

SEQ ID NO: 2238 - protein, 405 aa, Arabidopsis thaliana
MDRISGLPDELLVEILHCLPTKEVVSTSILSKRWEFLWLWVPKLTFVMNHYESDLPIQDFITKNLRLLKPQVIESFHLQCFSSSFKPEDIKHWVVTTISRRVRELIINYCDLSWLDKPVVLLDLPNSLYTCTSLVTLKLIGHSIIVDVPRTVSLPCLKTLELDSVAYSNEESLRLLLSYCPVLEDLTIHRDMHDNVKTLVIIVPSLLRLNLPIDGAYSCDGYVIVTPALKYLKVPGLYREDFSYLLTHMPNVEEADLSVEQDVERLFESITSVKRLSLFVLLDIEDESMYHNGIYFNQLEHLNLHIYRDNWSKLLVRLLEDSPKLRVLKIVVDGEPSFDEEFEHVSWIYNDESSVPKCLLDSLEVFEFAGYTRRPEERDFVSFILKHACHLKSSSISRLSCYVLE

SEQ ID NO: 2239 - protein, 102 aa, Glycine max
MVQQLPSLFSWGPPLMTSKLEQLKQFTTVVCDTGDLEAISRLRPVDATTNPSLLLKAAAIPEYAELLRNAVSLSKGNVGLACDHFAVSVGAGILKVIPGRIS

SEQ ID NO: 2240 - protein, 85 aa, Zea mays
  misc_feature (7)..(7): Xaa can be any naturally occurring amino acid
  misc_feature (9)..(9): Xaa can be any naturally occurring amino acid
  misc_feature (15)..(15): Xaa can be any naturally occurring amino acid
  misc_feature (17)..(18): Xaa can be any naturally occurring amino acid
  misc_feature (21)..(21): Xaa can be any naturally occurring amino acid
  misc_feature (25)..(26): Xaa can be any naturally occurring amino acid
  misc_feature (28)..(30): Xaa can be any naturally occurring amino acid
  misc_feature (32)..(32): Xaa can be any naturally occurring amino acid
  misc_feature (37)..(37): Xaa can be any naturally occurring amino acid
  misc_feature (39)..(39): Xaa can be any naturally occurring amino acid
  misc_feature (47)..(47): Xaa can be any naturally occurring amino acid
  misc_feature (70)..(72): Xaa can be any naturally occurring amino acid
  misc_feature (74)..(75): Xaa can be any naturally occurring amino acid
LEEEVVXAXSMLSSXAXXVPXRSQXXMXXXFXGLKSXAXFPVTRKAXNDITSIASNGGRASCMKVCPPVXXXKXXIFLPAPPLPS

SEQ ID NO: 2241 - protein, 64 aa, Triticum aestivum
  misc_feature (18)..(18): Xaa can be any naturally occurring amino acid
  misc_feature (35)..(35): Xaa can be any naturally occurring amino acid
  misc_feature (51)..(51): Xaa can be any naturally occurring amino acid
  misc_feature (55)..(55): Xaa can be any naturally occurring amino acid
KSSPSAGKNKGGKGNCIXINLAIILPPLGVFLKFXCGHEFWIWLLVNFLGXIPGXIYAIYANNK

SEQ ID NO: 2242 - protein, 123 aa, Arabis holboellii
AVLIQILNVVAFCHLQGVVHRDLKPENFLYTSKEENSQLKVIDFGLSDFVRPDERLNDIVGSAYYVAPEVLHRSYTTEADVWSIGVIAYILLCGSRPFWARTESGIFRAVLKADPSFDEPPWP

SEQ ID NO: 2243 - protein, 351 aa, Thermoplasma volcanium GSS1
MNPGCRLRGPMGYPDYLTGPLSLSCINIKTKRNIQKAYFRMFDVNPMPIDPQVRKYLDAMSKVSVPELNKTPIEDLRKIFDTPASGAPKVKISVVEDMILDTDAAKLPARLYDDSNSDSLVLYFHGGGFVFGSIETHDSLCRRIAKYSGSKVISVGYRLGPENKFPVAQIDAFNSYLYVLKRSEELGVDSDKIALMGDSAGGNLAAVASLMARDKGIKLPRLQVLVYPSTGPDMTSKSYLEYSSIYLTKELLNWFSSQYLNSIEDALNPYFSPILADLSGLPEAIVVTDEYDPLLEQGETYSATLRDSGVPVTSIRVNGMIHGFLSNFHLFRAADVSLMMISGAIHTILES

SEQ ID NO: 2244 - protein, 243 aa, Zea mays
MRAKARPCPRWPRRKHCPPSSVASRRVACSASAADADVVDLFDAAKLTVDKFVTSGMVVGLGSGPASALAIQYLGTRLRRGSLAGITAVTSASEADKAGIRANSYQEGTQIDFAFTDAEAIEEGTLAAVIGRRKTESGEPSFMAEKAMAKSAHKLAFITGNDKYVTTGVEGSIPVLIKSVWRRPSFGTAGPLGGDHPLVTKEGHHVLDVIFTTPIQDLGTPPYAVIASKGEVQVLDEKSSVIQ

SEQ ID NO: 2245 - protein, 148 aa, Glycine max
MSDAPPSPTHESGGEQSPRGSSSGAREQDRYLPIANISRIMKKALPPNGKIAKDAKDTMQECVSEFISFITSEASEKCQKEKRKTINGDDLLWAMATLGFEDYIEPLKVYLARYREAEGDTKGSARSGDGSATPDQVGLAGQNSQLVH

SEQ ID NO: 2246 - protein, 403 aa, Oryza sativa (japonica cultivar-group)
MRGGAGALPVPGGLALGVVLLLVLAVLPSRAAGVNVTAALAAFPSFADFARLLESSPVAGELAARSSLTLLAVPNNNLPRSPSAFAAASGADIADVLRYHVLLEYLSPSDLARLPASGKLVTTLFQTTGRAPSDLGAVNLTVGGNSTVVVRSPAPFPGSSATVLGAVTAVPYNLSVLAVGGLIVPSGLDVAASDSRPAGGVNITHVLADARGFNVAASMLEASGVADEFTADERGAGITVFVPTDDAFADLPATDRLQSLPADRKATVLRFHVLHSYYPLGSLESIVNPVQPTLATERFEAGQFTLNITRVNGSVAIDTGIVQASITRTVFDQNPVAVFAVSKVLLPKEMFGRGGADSDVMAPPPDAMAPDAAENVRTPPTRLSSPPALRGGADKCVLRECDG

SEQ ID NO: 2247 - protein, 201 aa, Brassica rapa subsp. pekinensis
PGTDTAAAVVVWAMTYLIKYPEAMKKAQDEVRNVVGDKGYVSEEDIPNLPYLKAVIKESLRLEPVIPILLHRETIADAKIGGYDIPAKTIIQVNAWAVSRDTAAWGDNPNEFIPERFMNEQKGVDFKGQDFELLPFGSGRRMCPAMHLGVAMVEIPFANLLYRFDWSLPKGIKPEDIKMDVMTGLAMHKKDHLVLAPRTHI

SEQ ID NO: 2248 - protein, 326 aa, Candida albicans
MTGSSSQFQQLEKLGEGTYATVYKGRNRATGALVALKEISLDSEEGTPSTAIREISLMKELDHENIVTLYDVIHTENKLTLVFEYMDKDLKKYMEVHGQQSALDLKVVKSFMFQLLKGIMFCHDNRVLHRDLKPQNLLINNKGELKLGDFGLARAFGIPFNTFSNEVVTLWYRAPDVLLGSRAYTTSIDIWSAGCIFAEMCTGKPLFPGTANEDQLIKIFRLMGTPNERTWPGISQYTNYKNNWQIFVPQDLRLIVPNLDSMGLNLLQSLLQMRPESRITARQALQHPWFHEITMPNAVPQHLSDPYQQQQQQQQHPHQPIIDQQY

SEQ ID NO: 2249 - protein, 428 aa, Myxococcus xanthus
MYDATPTTADTSPHAKLHAQRFEGIKRNYTPKDVEKLRGSITVSHTLAELGAKKLWELLHTEDYINALGSLTGNQAVQMVRAGLKAIYLSGWQVAADANSAGQMYPDQSLYPVDSVPTVVRKINNALRRADQIDHAEGRKDRYWFAPIIADAEAGFGGPLNAFELMKGMIEAGAAGVHFEDQLASEKKCGHMGGKVLVPTSHFIRTLNAARLAADVMGVPTLLVARTDADSAKLLMSDADEYDHAFIDKKSGRTPEGFYRLNGGLDCAIARGLAYAPYADLVWCETITPDLAQAKKFAESIRAKYPNKLLAYNCSPSFNWKKNLDDATIAKFQRELGAMGYKFQFVTLAGFHALNFGMYELARKYKDRGMAAYSELQQAEFAAEKDGYTATRHQREVGTGYFDQVAEAICGGNASTLALTESTEAHQF

SEQ ID NO: 2250 - protein, 316 aa, Buchnera aphidicola str. Sg (Schizaphis graminum)
MNQLNALKQFTTIVADTSDIESICKYKPQDATTNPSLILKAVSSSVNKRFIDQAIEYARKKGGSYNYKIVNASDKILVDLGVEILKHIPGYISSEVDARLSFNKEKCILKAKKIIDMYEEKGISRNRVLIKLAATWECIKAAEELKKNNIACNLTLLFSFAQARACAESNVFLISPFVGRIYDWYLSQNLILKNPADQDPGVLSVCKIYDFYKKYNYKTIIMGASFRNVQQILSLSGCDRLTISPVLLKELESSNKELNRKLCPPTSFLNPPVPLTEAEFRWEHNQDEMAVQKLSEGIRNFGKDQLSLEKIFSKLI

SEQ ID NO: 2251 - protein, 305 aa, Bordetella parapertussis 12822
MGHGVIIRENVLQECRIFHPVRFVNTREGFMAQVPVLKLNDGNAMPQLGLGVWQVPNDQAAASVKAALAAGYRSIDTAAIYGNEAGVGEGLRAAGVARKDLFVTTKLWNDRHGYDEAQRAMDESLRKLGLAYVDLFLIHWPVAGSDKFVDAWRAMVAMKEDGRARSIGVSNFTIANLRRLVDETGVVPAVNQVELHPGFAQRELRAFHAEQGIATESWSPLGQGAVMHDATLAGIAARHGKSAAQVTLRWHLQNGLIVIPKSVTPARIQANIDVFDFELSADEMADIDALPEGPRLGPDPATFTG

SEQ ID NO: 2252 - protein, 509 aa, Xanthomonas axonopodis pv. citri str. 306
MNALASAKSLNNDPHSIFKPRYDNFIGGQWVAPHSGQYFDNTTPINGKVFTSIARSTAPDIEAALDAAHAAKDAWGKTSTTERSNVLLKIADRIEQNLELLAYAETWDNGKPVRETLNADVPLCVDHFRYFAGAIRAQEGGISEIDSDTIAYHFHEPLGVVGQIIPWNFPLLMACWKLAPALAAGNCVVMKPAEQTPASILVLMELIGDLLPPGVLNVVNGFGLEAGKPLASNPRIAKIAFTGETTTGRLIMQYASQNLIPVTLELGGKSPNIFFADVMAEDDDFLDKAVEGFVLFAFNQGEVCTCPSRALIQESIYDAFMEKALSRVAAIKQGNPLDPNTMVGAQASSEQLEKILSYIDIGKQEGAEVLIGGERNTLDGDLAEGFYVKPTVFKGHNKMRVFQEEIFGPVVSVTTFKDEADALAIANDTLYGLGAGVWSRDASRLYRMGRAIQAGRVWTNCYHAYPAHAAFGGYKQSGIGRENHKMMLDHYQQTKNLLVSYSPKALGFF

SEQ ID NO: 2253 - protein, 296 aa, Magnaporthe grisea 70-15
MGYRHIDGAHAYGNEKQIGEAIKESGIPREEIFVTSKLAQTWHEPGDVERGLDLSLRNLQLDYGKPWKVGTGPLPHAYKAGENNETIRHPSGNGKPVIDYDLSRRYPETWQAMERLVDSGKAKAIGVCNFNVLKTKRILEIARIIPAVNQVELHPYLPQHELMEFSAKHGILLMAHQPLGGRPVPAVRGHPDQSPPTEDQTIVDVASSCGMSPAQVCLSWLIQKGIPVIPKSNQREHLRSNMQVRKLSVELFNLVDGLAALRLGGPVRFLDPSRHVGFEIFDEENDQPIEDAAAWD

SEQ ID NO: 2254 - protein, 425 aa, Bacillus thuringiensis serovar konkukian str. 97-27
MKNERIEKLQESWELDTRWKGITRPYSAEDVIRLRGSIDIEHTLAHRGAEKLWASLHTEDYINALGALTGNQAMQQVKAGLKAIYLSGWQVAADANLSGHMYPDQSLYPANSVPAVVKRINQTLQRADQIQHMEGSGDTDYFVPIVADAEAGFGGQLNVFELMKGMIEAGASGVHFEDQLSSEKKCGHLGGKVLLPTQTAVRNLISARLAADVMGVPTIIVARTDADAADLITSDIDPVDKAFITGERTPEGFYRTKAGLDQAIARGLAYAPYADLVWCETSEPNLDDAKRFADAIHKEHPGKLLAYNCSPSFNWKQKLDEKTIASFQKEIASYGYKFQFVTLAGFHSLNYGMFELARGYKERGMAAYSELQQAEFAAEKHGYSATRHQREVGTGYFDEVAQVITGGTSSTTALKGSTEEAQFTK

SEQ ID NO: 2255 - protein, 469 aa, Agrobacterium tumefaciens str. C58
MSAVAFMGVRSVMNEVSKPMSNLAAIDAAHHLHPFSDMGKLNAAGTRIIERAEGVFIYDSTGKKYLDAFAGLWCVNIGYGRREIADVVQRQMNELPYYNAFFGTTTPPATLLAQKIASRAGPKMNHVFFTNSGSEATDTWFRMARVYWKALGHPTKTRVIARRNGYHGSTVAGASLGGMKWMHEQGNLPIEGIAHIGQPYWYAEGGDLSPAEFGLKVARELDAKIDELGEENVAAFVAEPIQGAGGVIVPPETYWPEIARICKARNILLVSDEVICGFGRLGSWFGYQHFGVEPDLAPVAKGLSSGYLPIGGVIVSDRVAEVMLSEVGDFNHGFTYSGHPVCAAAALENLRIIEDEGLVERVRDDIGPYFSEGWKSLADHELVGEAVNVGLMGGLQLTADKATRRRFAKPDDIGTAVRNHCLANGLVMRATGDRMLASPALTVSRSEVDEIIETLRQGLNHLRDTREHF

SEQ ID NO: 2256 - protein, 468 aa, Archaeoglobus fulgidus DSM 4304
MVGRMCVAVLIVLLLVATAGADPNGAETLKENPELPVDFVWALICGFLVMFMQAGFAMLEAGFSRAKNVANVMMKNLMDFAVGSLAFFAVGFALMMGADWQGIAGTTGWFLAGESYDVSTIELWFFMLVFAATAATIVSGSIAERPKFSVYLVYSAVVSAVIYPIYGHWLWGGGWLSSSEFMVKLGGGYGALDFAGSGVVHALGGYIALAAVMLLGPRLGKYDSDGNPRAIPGHNLAFAVIGTFILWFGWFGFNAGSTLSAHELRVSIIASNTNLAAAAGAVTAMAITWLRNGKPDVGMTCNGAVAGLVAITAPCAWVQPWSSVVIGTIAGFIATYGYWWLEKRGLDDVVGAIPVHGFSGTWGLIALGIFADGSYGLYATESPLVTGLLYGNWGFFIVQLISAIVNFAWAFGTGFALFWILKKVIGIRVSPEEEMLGLDIAEHAAVAYPNFVCTETELPLAMKQGGGR

SEQ ID NO: 2257 - protein, 116 aa, Cicer arietinum
MASMKVVCVALIMCIVIAPMAESAITCGRVDTALAPCLGYLQGGPGPSAQCCGGVRNLNSAAVTTPDRQAACNCLKSAAGSISRLNANNAAALPGKCVVNIPYKISTSTNCATIRV

SEQ ID NO: 2258 - protein, 75 aa, Zea mays
CFFFSYSRDQLYPFTIIAEANSTAQHLVDFTEAEEDLVSRMHRLVGNRWEIIAGRIPGRTAEEVEMFWSKKYQER

SEQ ID NO: 2259 - protein, 176 aa, Triticum aestivum
  misc_feature (124)..(124): Xaa can be any naturally occurring amino acid
MAPTVMASSATSVAPFQGLKSTAGLPVSRRSNGASLGSVSNGGRIRCMQVWPIEGIKKFETLSYLPPLSTEALLKQVDYLIRSKWVPCLEFSKVGFIFREHNASPGYYDGRYWTMWKLPMFGCXTDATQVINEVEEVKKEYPDAYVRIIGFDNMRQVQCVSFIAFKPPGCEESGKA

SEQ ID NO: 2260 - protein, 182 aa, Zea mays
GFKNKKRFQAGPFEVEPIRVTHSIPDCCGLVLRCGDGIIFHTGDWKIDESPVDGKKFDRQALEELSKEGVTLMMSDSTNVLSPGRSISESVVAGSLLRHISEAKGRVITTQFASNIHRIGSIKAAADLTGRKMVFVGMSLRTYLEAAFKDGKAPLDPSTLESPGVNARKVPRHRSTPRWMAG

SEQ ID NO: 2261 - protein, 182 aa, Fagus crenata
MASSMISSATVATVSRATPAQATMVAPFTGLKSTAAFPATRKSNNDITSLASNGGRVQCMKVWPPLGLQKFETLSYLPPLSIESLAKQIEYLILKGWIPCLEFELEHPFVYRENNRSPGYYDGRYWVMWKLPMFGCTDATQVLAELQEASKTYPTSHIRIIGFDNKRQVQCISFIAYKPPAK

SEQ ID NO: 2262 - protein, 496 aa, Nicotiana tabacum
MVLSKTASESDVSIHSTFASRYVRTSLPRFKMPENSIPKEAAYQIINDELMLDGNPRLNLASFVTTWMEPECNKLMMDSINKNYVDMGEYPVTTELQNRCVNMIAHLFNAPLGDGETAVGVGTVGSSEAIMLAGLAFKRKWQNKMKAQGKPCDKPNIVTGANVQVCWEKFARYFEVELKEVKLSDGYYVMDPEKAVEMVDENTICVAAILGSTLNGEFEDVKRLNDLLIEKNKETGWDTPIHVDAASGGFIAPFLYPELEWDFRLPLVKSINVSGHKYGLVYAGIGWAIWRNKEDLPDELIFHINYLGADQPTFTLNFSKGSSQVIAQYYQLIRLGFEGYKNVMENCQENARVLREGLEKSGRFNIISKEIGVPLVAFSLKDNSQHNEFEISETLRRFGWIIPAYTMPPNAQHVTVLRVVIREDFSRTLAERLVIDIEKVLHELDTLPARVNAKLAVAEANGSGVHKKTDREVQLEITAAWKKFVADKKKKTNGVC

SEQ ID NO: 2263 - protein, 500 aa, Arabidopsis thaliana
MVNFLLVLCYCRLILIHCKTIQLTQWLSKSFLTDVLVTKVPNCVLWQYFVDADDSVPQKIVVHKDGPRGIHFRRAGPRQKVYFESDEVHACIVTCGGLCPGLNTVIREIVSSLSYMYGVKRILGIDVSFCDCNLLLTKTNTGGYRGFYAKNTVSLDSKVVNDIHKRGGTILGTSRGGHDTTKIVDSIQDRGINQVYIIGGDGTQRGASVIFEEIRRRGLKVAVIGIPKTIDNDIPVIDKSFGFDTAVEEAQRAINAAHVEAESIENGIGVVKLMGRYSGFIAMYATLASRDVDCCLIPESPFYLEGEGGLFEYIEKRLKESGHMVLVIAEGAGQDLMSKSMESMTLKDASGNKLLKDVGLWLSQSIKDHFNQKKMVMNLKYIDPTYMIRAVPSNASDNVYCTLLAQSAVHGAMAGYTGYISGLVNGRQTYIPFYRITEKQNHVVITDRMWARLLSSTNQPSFLGPKDVFDNKEKPMSALLDDGNCNGVVDVPPVTKEITK

SEQ ID NO: 2264 - protein, 494 aa, Brassica juncea
MVLSRAATESGENVCSTFGSRYVRTALPKHKIGESSIPKEAAYQIIKDELMLDGNPRLNLASFVTTWMEPECDKLIMESINKNYVDMDEYPVTTELQNRCVNMIARLFNAPLEETETAMGVGTVGSSEAIMLAGLAFKRNWQNKRKAEGKPYDKPNIVTGANVQVCWEKFARYFEVELKEVKLSEGYYVMDPDKAAEMVDENTICVAAILGSTLNGEFEDVKRLNDLLVKKNEETGWNTPIHVDAASGGFIAPFIYPELEWDFRLPLVKSINVSGHKYGLVYAGIGWVVWRTQQDLPDELIFHINYLGADQPTFTLNFSKGSSQIIAQYYQLIRLGFEGYKNVMENCRENMVVLREGIEKTERFNIVSKEVGVPLVAFSLKDHSFHNEFEISEMLRRFGWIVPAYTMPADAQHITVLRVVIREDFSRTLAERLVADIVKVLHELDTLPSKISKKMGAEDFGNVKGKKVDRDVLMEVIVGWRKFVKDRKKMNGVC

SEQ ID NO: 2265 - protein, 325 aa, Glycine max
  misc_feature (171)..(171): Xaa can be any naturally occurring amino acid
MGGGGAMRSAAAKIAGIGISKAALRPSALPTEQAVHNASRPTSVVGVKGAKSTEVAPLHAAAPWDDWDLADDGDLVVPRMVFGSVPTFAEAKEATAELKDAIDQVYLSPESSQYSSRGGQVSALSPTGGQVSALSPTLYEPVNRSCVVDAISDSSAPKHAIQAFHLLSTSXTAQAVVASLACDPNVWNAVMENPAVSSFFQSQQSVADLGAAGNTEELDKFSSCTSETVESPERLGVSAESHPGNGIFDFMDLLQNVKLTVIELVSRVSGFLQNIFPTPDAMKEKMSGDVDGNTKASFMDSKISMGGTFTGLAIIVIMVIVTKRA

SEQ ID NO: 2266 - protein, 368 aa, Glycine max
MGEAKGKEEEVLASVHSTVFKESESLDGKCVKIEGYDFNRGVNYPLLLSSMVTTGFQASNLGDAIQVVNQMLDWRLVDEPVAEDCSDQERDLEYRKSVTCKVFLGFTSNLISSGVRDTVRFLLQHRMVDVVVTTTGGIEEDLIKCLAPTYKGDFSLPGAYLRSKGLNRIGNLLVPNDNYCKFEDWIIPIFDQMLGEQNNENVLWLREDDRRGLGKEIKNESSYLYWAYKNNIPVFCPGLTDGSLGDMLYFHSFRNPGLIVDIVQDIRAMNGEAVHASPRKTGMIILGGGLPKHHICNANMMRNGADYAVFINTAQEYDGSDSGARPDEAVSWGKIRDSAQTVKVHCDATIAFPLLVAETFASRVKPPH

SEQ ID NO: 2267 - protein, 293 aa, Meiothermus ruber
MNMAYKDYYKILGVPKNASEDEIKKAFKKLARKYHPDVNKEPGAEEKFKEINEAYTVLSDPEKRRYYDTYGAAAGSAGWQGPPPGPGGFGGFTGNVGDFSDFFQQLFGGRGGFGGLGDLFEQTPGRGARRVAGDLEAELPLSLEEAYRGGEKTISVGAERLTVRIPPGVREGQKIRLAGKGRAGGDLYLHVKLQSRPEMRLEGDDIYTVVEVPAPIAVVGGKVRVQTLDGPVEITIPRRTQAGRKLRLAGKGWPRKDKSRGDQYAEVRVTIPTNPSPEEERLYAQLAELIKVQ

SEQ ID NO: 2268 - protein, 176 aa, Triticum aestivum
MAGVGRNMVAPLLVLNLIMYIIVIGFASWNLNHFINGLTNRPGVGGNGATFYFLLFAILAGVVGAASKLAGVHHVRTWRGDSLATSASSALVAWAITALAFGLACKEIHIGGYRGWRLRVLEAFVIILVFTQLLYVLALHSGLFGNHAGGYGAEHGGYGAGDPHNKGMGTGGVARV

SEQ ID NO: 2269 - protein, 212 aa, Zea mays; identical to SEQ ID NO: 208

SEQ ID NO: 2270 - protein, 239 aa, Treponema denticola ATCC 35405
MDTSQLKERVAYHAIDTLFSEGKIFDGMKIGLGTGSTAMPAVHRLAQLLSSGKLKKIYAVPTSFQTSIECEKLGIPIYSLSSQQIGGSLDLAIDGADEIDPDKNLIKGGGAALLKEKIIAYNSKEFVVIADERKKVKSMGKGFALPIEIIPEARLSITKALEAQGIEVFLREGVKKMGPVVTDNGNFIIDVKWPKAADVDPKALEESLNKITGVVENGFFTKNTPRVFIVHQDGNIEDL

SEQ ID NO: 2271 - protein, 402 aa, Bordetella parapertussis 12822
MLSPEVRALVKATAPVLKEHGEALTRHFYTRMLGGNPELRQLFNQGHQQSGQQQQALAAAVAAYAEHIDDPSVLLPVVERIAHKHVSLGVRAEHYAIVGKHLLASIREVLGEAATDELIDAWAAAYGQLADLLIGRERALYAAAASRDGGWTGWRAFKVVRKTPESAEITSFYLAPADGGATPDYLPGQYVSVRVYVPELGLMQPRQYSLSEAPGMPGQLRISVKREAGSPAGMVSGTLHNRINEGDVLDVSPPQGDFTLDAEDGRPVVLLSGGVGLTPMVSMLNHLTARDDGRQIRFVHACREAGVHAMKEHINALAAKRPNVRKAVFYERVGADDRRGVDYDYEGRVDLHAIRDEVILPDADYYLCGPLPFMQAQRRALADLGVAEHRIHAEVFGTGGVA

SEQ ID NO: 2272 - protein, 348 aa, Bacillus halodurans C-125
MQALRWHGVKDVRVDDIAEPATLKGKVKIKVKWCGICGSDLHEYAAGPIFIPQNSPHSLTEEKAPIVMGHEFSGQVVEVGDGVTKCEEGDRVVVEPIFACGTCTACKQGKYNLCEQLGFLGLAGGGGGFSEYVTVDEHMVHKIPDTVSFEQGALVEPAAVALYAVRQSQFNVGDQAVVFGTGPIGLLVIEALKASGASKIYAVELSTERRQRAEQLGAIALNPAEVNVVEEIQRLTDGGADVSFEVTGVPIVLTQAIESTKLNGQTMIVSIFEKEASFQPNLVVMRERNIAGIIGYRDIFPAVISLMNQGYFSAETLVTKRIGLHDIVEQGFEALMKTNCNIKCDTTK

SEQ ID NO: 2273 - protein, 374 aa, Wolbachia endosymbiont of Drosophila simulans
MIENKFGKFDIVVIRENEEDVYTGIEHRLTGDSYQCTKIITRSGSEKICRYAFEYAKKHNRKKVTCLTKDNIMKMTDGTFHAAFDRIAKEYQDIKAEHYIVDIGMARVATEPENFDVIVTENLYGDILSDIVAQTSGSVGLAGSSNIGNEYAMFEAVHGSAPDIAGKNIANPSGLLNAAVHMLIYIGQVGTAKLIYDAWLKTLEGGIHTADLYKEKRSKQKVGTKEFAEAVIDNLGKKPAELTIGSGSDSKINLDSKINKVQDNYEQDYKVKKLVGSDITLAWDKSSNVDQIVGLFESSNPQIIAIYSKGLAIWPGSSKSSSDQITCRFIANSEKKPITNSDVNDLLIKLEENTFDVVRMDKLYLYDGKEGFFS

SEQ ID NO: 2274 - protein, 413 aa, Thermobifida fusca
MGPAAVAVADGRIAAVADYFDDLPSRKEVDLGETALLPGMVDVDAAVQAPGQLLSQGYARTTRAAAAGGITTLVVAPAPAQPAITSTEALRAHLHASASNSATHVAFLGGITPRSSSAELADLRANGVVGFACSLSDELMGLPALDDIHLSKSMAEVAAMDVPIVVHAEDANELGTVVGPGNSALLAARPPRAERRGLERVLAAARSSGARVHISPFVAAECAAILAAARDIGIPVSAQTCPHYLCLPAEHVPDTDPSYRCRPPLRSDANRQALWNALLHGAESFGDVIVDSVGSGNRPGTGISAIRWTLPALWTAAQKRGCGLAELTQWTAQRPAELMGLATKGRIQVGYDADLVAFEPDTFQRVPASDGGPYRGRRLQGRVTGTWLCGIPVPSDADNDPSPRGGPLLSAYR

SEQ ID NO: 2275 - protein, 506 aa, Arabidopsis thaliana
MERTLLQWRLLPLLALIVALFSFFFASPRSLQGNNKCSLLPHDHYWISSKRIVTPNGLISGSVEVKGGIIVSVVKEVDWHKSQRSRVKVIDYGEAVLMPGLIDVHVHLDDPGRSEWEGFPSGTKAAAAGGITTLVDMPLNSFPSTVSPETLKLKIEAAKNRIHVDVGFWGGLVPDNALNSSALESLLDAGVLGLKSFMCPSGINDFPMTNITHIKEGLSVLAKYKRPLLVHAEIERDLEIEDGSENDPRSYLTYLKTRPTSWEEGAIRNLLSVTENTRIGGSAEGAHLHIVHLSDASSSLDLIKEAKGKGDSVTVETCPHYLAFSAEEIPEGDTRFKCSPPIRDAANREKLWEALMEGDIDMLSSDHSPTKPELKLMSDGNFLKAWGGISSLQFVLPITWSYGKKYGVTLEQVTSWWSDRPSKLARLHSKGAVTVGKHADLVVWEPEAEFDVDEDHPIHFKHPSISAYLGRRLSGKVVSTFVRGNLVFGEGKHASDACGSLQLATT

SEQ ID NO: 2276 - protein, 492 aa, Burkholderia cepacia R18194
MQANDRTIPLDHPDCFYIDGQWTPAPSAETFEVLDCSTERVAARVARADAAVAARAIDAARRAFDQGPWPRMTPAERAACLERIAQHLEAANDEFARGWSIESGILQRIAKPRIGQFLGAAFRQYAAMADTYPFVEPHRSVTGHQAYAVKEAVGVVLAIVPWNGPAALIAYKVAPALLAGCTVIIKPSPEAPTSAYLFAQICDEIGLPPGVVNVVTADREVSEAMVRNPSVDKITFTGSTAAGRSISEAAAGRIARVTLELGGKSAALVLDDYDLDAAAQVLGKSYFSYLTGQVCHSLTRIIVPRAKHDTMVEALSEAAREMVLGDPFSDATTVGPLATARQRDTVEHHVAKGIAEGATLAAGGARPRHLSRGFFFEPTVFANVDNRSTLAQQEIFGPVLSVIAADSEAHAIELANDSIFGLNAVVFTSDAQHALQVARQLRTGSVGHNASRTDFSIGFGGFKQSGIGREGGVEGLNAFVESKTIVLDQPLA

SEQ ID NO: 2277 - protein, 377 aa, Zea mays
  misc_feature (224)..(224): Xaa can be any naturally occurring amino acid
ACRVAASKTKIYMVLEFVNGGELFDKIAIKGKLSEHEGRRLFQQLIDGVSYCHDRGVYHRDLKPENVLVDRKGTIKISDFGLSALPQHLGSDGLLHTTCGSPNYIAPEVLQNRGYDGSLSDLWSCGVILYVMLVGCLPFDDRNLVVLYQKIFKGDCQIPKWLSPAAQDLLKRILQPNPMKRINVAGIREHEWFKKDYVPAVPHDDDEDVLPSPAPSIKPIDEPXQEKCSPINAFQLIGMASSLDLSGFFEEEDAAQRKIRFTSTHPPKDLFDKIESVVMEMGFKVHRGAGKLKVLKNSKCSRNPSSLLVCTEVFELGPSLYVVELRKSHGDSTLYRQLCERLSDELGACKTDQIARTESSSDDLSSVDGEAFPLSGF

SEQ ID NO: 2278 - protein, 493 aa, Brassica juncea
MVLSKTASESDVSIHSTFASRYVRTSLPRFEMPENSIPKEAAYQIINDELMLDGNPRLNLASFVTTWMEPECDKLMMESINKNYVDMDEYPVTTELQNRCVNMIARLFNAPLGDGEAAVGVGTVGSSEAIMLAGLAFKRQWQNKRKAQGLPYDKPNIVTGANVQVCWEKFARYFEVELKEVKLREGYYVMDPEKAVEMVDENTICVAAILGSTLTGEFEDVKLLNDLLVEKNKQTGWDTGIHVDAASGGFIAPFLYPELEWDFRLPLVKSINVSGHKYGLVYAGIGWVVWRTKSDLPDELIFHINYLGADQPTFTLNFSKGSSQVIAQYYQLIRLGFEGYRNVMDNCRENMMVLREGLEKTGRFNIVSKENGVPLVAFSLKDSSRHDEFEVAETLRRFGWIVPAYTMPADAQHVTVLRVVIREDFSRTLAERLVADFEKVLHELDTLPARVQAKMANGNANGVKKTEEETTREVTAYWKKFVEAKKSNKNRIC

SEQ ID NO: 2279 - protein, 134 aa, Helianthus annuus
GVGYSWIDGLKSHAEQHVTNKMMLNAERIFPHNTPVTKEAYYYRMIFERFFPQNSAKLTVPGGASVACSTAKAIEWEGFWSNNLDPSGRGALGVHNAAYKKKSGSISPAKLAPSIADNVPRMMDITGPEIVIRS

SEQ ID NO: 2280 - protein, 267 aa, Salmonella typhimurium LT2
MTIPAFGLGTFRLKDDVVIASVKTALELGYRAVDTAQIYDNEAAVGQAIAESGVPRNELYITTKIWIENLSKDKLIPSLKESLKKLRTDYVDLTLIHWPSPGDAVSVEEFMQALLEAKKQGLTREIGISNFTIPLMEKAIAAVGADNIATNQIELSPYLQNRKVVDWAKAHGIHITSYMTLAYGKALKDEVIARIAAKHNATPAQVILAWAMGEGYSVIPSSTRRENLASSLLAQDLHLDAEDKNAIAALDCNDRLVSPEGLAPAWD

SEQ ID NO: 2281 - protein, 493 aa, Brassica juncea
MVLSKTASGTDVSVHSTFASRYVRNSLPRFEMPENSIPKEAAYQIINDELMLDGNPRLNLASFVTTWMEPECDKLMMESINKNYVDMDEYPVTTELQNRCVNMIARLFNAPLGDGEAAVGVGTVGSSEAIMLAGLAFKRQWQNKRKAQGLPYDKPNIVTGANVQVCWEKFARYFEVELKEVKLREGYYVMDPEKAVEMVDENTICVAAILGSTLTGEFEDVKLLNDLLVEKNKQTGWDTGNHVDAASGGFIAPFLYPELEWDFRLPLVKSINVSGHKYGLVYAGIGWVVWRTKSDLPDELIFHINYLGADQPTFTLNFSKGSSQVIAQYYQLIRLGFEGYRNVMDNCRENMMVLREGLEKTGRFNIVSKENGVPLVAFSLKDSSRHNEFEVAETLRRFGWIVPAYTVPADAEHVTVLRVVIREDFSRTLAERLVADFEKVLHELDTLPARVRAKMANGKAKVVKQTEEETTREVTAYWKKFVETKKTNQNKIC

SEQ ID NO: 2282 - protein, 374 aa, Arabidopsis thaliana
MDRISQLSDDLLLQILSFIPGKDVVATSLLSKRWQSLWMLVSELEYDDSYHTGDYKSFSQFVYRSLLSNNAPVIKHLHLNLGPDCPAIDIGLWIGFALTRRLRQLKINIRTSSNDASFSLPSSLYTSDTLETLRLINFVLLDVPSSVCLPSLKVLHLKTVDYEDDASLPSLLFGCPNLEELFVERHDQDLEMDVTFVVPSLRRLSMIDKNYGQCDRYVIDVPSLKYLNITDDAVYDVRQIENMPELVEAHVDITQGVTHKFLRALTSVRQLSLCLSLSEKQHESGLCGIETPIGWKLPSSVPECLLFSLEAFEWIGYKGRRGDREVATYVLKNAACLRTAKFSPESTDVGEKYHMLKELASVPTASTSSKLLFD

SEQ ID NO: 2283 - protein, 183 aa, Triticum aestivum
  misc_feature (69)..(69): Xaa can be any naturally occurring amino acid
  misc_feature (119)..(119): Xaa can be any naturally occurring amino acid
MAPTVMASSATSVAPFQGLKSTAGLPVSRRSNGASLGSVSNGGRIRCMQVWPIEGIKKFETLSYLPPLXSTEALLKQVDYLIRSKWVPCLEFSKVGFIFREHNASPGYYDGRYWTMWKXLPMFGCTGPTGYSTKVEGGQKRSYPGRVISQSRIPTTRPCAFKFPPSSQPSGSPGKGKLHNANI

SEQ ID NO: 2284 - protein, 262 aa, Brassica juncea
MVLSHAASDSDVSVHSTFASRYVRTSLPRFKMPENSIPKEAAYQIINDELMLDGNPRLNLASFVTTWMEPECDKLIMASINKNYVDMDEYPVTTELQNRCVNMIAHLFNAPLGRDETAVGVGTVGSSEAIMLAGLAFKRKWQNKRKAEGKPFDKPNIVTGANVQVCWEKFARYFEVELKEVKLSEGYYVMDPEKAVEMVDENTICVAAILGSTLNGEFEDVKLLNDLLVLKNKENGWDTPIHVDAASGGFIAPFLYPELEWD

SEQ ID NO: 2285 - protein, 431 aa, Arabidopsis thaliana
MDIISQCPDHLLLRILSFIPTKDVIVTSLLSKRWGSLWRWVPKLEYDFTRQNMRFVKFVYRSLLQNNAPVLESLHLKNIILYAECRTVDIGGWIDIAVSRRVRELEISINCSDEKFRLPSSLYTCGTLESFILTIKHCHLVDVPLAVCLPSLKKLHLRCIGWAYNATLLRLISGCTNLEELRLARPDDDGDYIMIHEAGSTIDYMSIFERRYMFEFMFDQMFGKGSSNGINAPLKYFSISNNYRIHNFRGIEKMPDWVEARIAVTGGSHKYLKEITYAKGLYVCLSVSEVMNPYDMIFHMLVDLTICTCTQGWWDLLTHMLQGSPKLRFLTLTNDHCRELPSLETPACWKRPSSVPACLLSSLQAFTWSGYKGRQGDKEVVKYVLRNATGLKKRIFISKSNDFGEKFCMLQELASVPTPSPSCQLLFDRIF

SEQ ID NO: 2286 - protein, 206 aa, Zea mays
MEAGGAGSGLNGAVQAKGTGADDGSAKRLPPCCVKARAAAPESEARCHATVVSGWFTEPRSRCGKASKVQYYNNPMWPGEANSLKVEKILYQGKSLYQEVLVFESSTYGKVLVLDGIVQLTDKDECAYQEMITHLPLCSIPSPKKVLVIGGGVGGVLREVSRHSSVESIDICEIDQLVIDVCKDFFPHLSVGFQDPRVQLHVGDGM

SEQ ID NO: 2287 - protein, 1342 aa, Shigella flexneri 2a str. 2457T
MSQEYTEDKEVTLTKLSSGRRLLEALLILIVLFAVWLMAALLSFNPSDPSWSQTAWHEPIHNLGGMPGAWLADTLFFIFGVMAYTIPVIIVGGCWFAWRHQSSDEYIDYFAVSLRIIGVLALILTSCGLAAINADDIWYFASGGVIGSLLSTTLQPLLHSSGGTIALLCVWAAGLTLFTGWSWVTIAEKLGGWILNILTFASNRTRRDDTWVDEDEYEDDEEYEDENHGKQHESRRARILRGALARRKRLAEKFINPMGRQTDAALFSGKRMDDDEEITYTARGVAADPDDVLFSGNRATQPEYDEYDPLLNSAPITEPVAVAAAATTATQSWAAPVEPVTQTPPVASVDVPPSQPTVAWQPVPGPQTGEPVIAPAPEGYPQQSQYAQPAVQYNEPLQQPVQPQQPYYAPAAEQPAQQPYYAPAPEQPVAGNAWQAEEQQSTFAPLSTYQTEQTYQQPAAQEPLYQQPQPVEQQPVVEPEPVVEETKPARPPLYYFEEVEEKRAREREQLAAWYQPIPEPVKEPEPIKSSLKAPSVAAVPPVEAAAAVSPLASGVKKATLATGAAATVAAPVFSLANSGGPRPQVKEGIGPQLPRPKRIRVPTRRELASYGIKLPSQRAAEEKAREAQRNQYDSGDQYNDDEIDAMQQDELARQFAQTQQQRYGEQYQHDVPVNAEDADAAAEAELARQFAQTQQQRYSGEQPAGANPFSLDDFEFSPMKALLDDGPHEPLFTPIVEPVQQPQQPVAPQQQYQQPQQPVAPQQQYQQPQQQVAPQPQYQQPQQPVAPQQQYQQPQQPVAPQPQYQQPQQPVAPQPQYQQPQQPVAPQPQDTLLHPLLMRNGDSRPLHKPTTPLPSLDLLTPPPSEVEPVDTFALEQMARLVEARLADFRIKADVVNYSPGPVITRFELNLAPGVKAARISNLSRDLARSLSTVAVRVVEVIPGKPYVGLELPNKKRQTVYLREVLDNAKFRDNPSPLTVVLGKDIAGEPVVADLAKMPHLLVAGTTGSGKSVGVNAMILSMLYKAQPEDVRFIMIDPKMLELSVYEGIPHLLTEVVTDMKDAANALRWCVNEMERRYKLMSALGVRNLAGYNEKIAEADRMMRPIPDPYWKPGDSMDAQHPVLKKEPYIVVLVDEFADLMMTVGKKVEELIARLAQKARAAGIHLVLATQRPSVDVITGLIKANIPTRIAFTVSSKIDSRTILDQAGAESLLGMGDMLYSGPNSTLPVRVHGAFVRDQEVHAVVQDWKARGRPQYVDGITSDSESEGGAGGFDGAEELDPLFDQAVQFVTEKRKASISGVQRQFRIGYNRAARIIEQMEAQGIVSEQGHNGNREVLAPPPFD

SEQ ID NO: 2288 - protein, 336 aa, Bartonella schoenbuchensis
STASCESKITYIDGDEGVLLYHGYSIDQLAENGDFLEVCYLLLYGELPTKQEKDDFDRRIMHHTMVHEQFSRFFHGFRRDSHPMAVMVACLGAMSAFYHDSIDITDAKQRMIASIRLIAKVPTLAAMAYKYSIGQPFVYPRNDLGYAANFLHMCFSVPCEEYKVNPVLARAMDRIFTLHADHEQNASTSPVRLAGSSGANPFACIAAGVACLWGPAHGGANEACLKMLQEIGSIEKIREFIARAKDKNDPFRLMGFGHRVYKNYDPRAKLMQKTCHEVLKELNIKDDPLLDIAMELEKIALSDEYFIEKKLYPNVDFYSGITLKALGFPTEMFTVL

SEQ ID NO: 2289 - protein, 564 aa, Zea mays
  misc_feature (248)..(248): Xaa can be any naturally occurring amino acid
MASSHIILPKEEEEEAAAAAVAEVGLGAAVEADHDHRPYQEQGPGKAALPFSATCVRISRDSYPNLRALRNASTMTLHDDDAAFVKLEEGDYGYVLDDVPHLTDYLPDLPTFPNPLQDHPAYSTVKQYFVNADDTVPEKVVVQKNSPRGVHFRRAGPRQRVYFESEEAKACIVTCGGLCPGLNTVIRELVCGLSHMYNVSNVFGIQNGYKGFYSSNYLPMTPKSVNDIHKRGGTVLGTSRGGHDTKKXVDNIQDRGINQVFIIGGDGTQKGAYEIYKEIRRRGLQVAVAGIPKTIDNDIAVIDKSFGFDSAVEEAQRAINAAHVEASSAENGIGLVKLMGRYSGFIAMYATLASRDVDCCLIPESPFYLEGEGGLFEYIDRRLKENNHMVIVVAEGAGQDLIAQSIPAADQQDASGNKLLLDVGLWLTHKIKDYCKSKKMEMTIKYIDPTYMIRAIPSNASDNVYCTLLAHSAIHGAMAGYSFTVGMVNGRHAYIPFHRVTSTRNKVRITDRMWARLLSSTNQPSFLSQKDIDAAREADKAANRTKSREDAKKQSTPVLANGEK

SEQ ID NO: 2290 - protein, 294 aa, Triticum aestivum
  misc_feature (103)..(103): Xaa can be any naturally occurring amino acid
MSAPPPPASSDDDGKPADEEGVEIREVWANNLEAEFAVIRDVVDDYPYIAMDTEFPGIVCRPLGSFRSNDEYNYATLKANVDMLSLIQLGLTLSDENGALPAXATGGRPCAWQFNFRGFDPRSDPANADSIDLLRNSGIDFDRFTTEGADTGHFAELLMSSGVLLNAELQWVTFHSGYDFGYLLKLLTGRNLPDTMPGFFDLIRIYFPVLYDIKHLMKYCGSLHGGLSKLGELLGVQRVGICHQAGSDSLLTLQCFQKLKEAYFRGSTENYAGVLYGLISDGGENRPPAALLIE

SEQ ID NO: 2291 - protein, 337 aa, Bartonella schoenbuchensis
STASCESKITYIDGDEGVLLYHGYSIDQLAENGDFLEVCYLLLYGELPTKQEKDDFDRRIMHHTMVHEQFSRFFHGFRRDSHPMAVMVACLGAMSAFYHDSIDITDAKQRMIASIRLIAKVPTLAAMAYKYSIGQPFVYPRNDLSYAANFLHMCFSVPCEEYKVNPVLARAMDRIFTLHADHEQNASTSTVRLAGSSGANPFACIAAGVACLWGPAHGGANEACLKMLQEIGSIEKIPEFIARAKDKNDPFRLMGFGHRVYKNYDPRAKLMQKTCHEVLKELNIKDDPLLDIAMELEKIALSDEYFIEKKLYPNVDFYSGITLKALGFPTEMFTVLF

SEQ ID NO: 2292 - protein, 493 aa, Ustilago maydis 521
MMNTKLKDLSLLEASDFLKAPDSLDTSDNESFDVMDPGSGRPICRLTASNLKDVDYAIQAASQAFPSYSAIPARERAMLLLNFDKLIRDNLDDLAWILVYETGKPLEEARAEVQYALTFSWWYVGETERVQGQVVKSATNPSLRYLTVWQPVGPVAILTPWNFPVALFVRKAVSALAAGCTIVAKPSPETPLSTLAVANLLHRAGFPSGSVNIVLASYRNTPAIGQALCTDLRIKKLSFTGSTRVGRLLMQQCAPTLKKLTLELGGLGAYLIFDDADIEAAATALVANKLRHAGQTCISAQRTFVHESIVDRVLKCIIELLDRVTLGHGAQPSTTLGPLQTERSQQKVREHIEDARAKGATVYTSKAAVPSSGYFVAPTLIVGCTAEMLVFQEESFGPLISLTSFATEQEAVALANKTDMGLTSYVFTKDSARLWRMFEQLKAGNVGLNVGGSTTAAEIPFGGVDQSGFGKEAGIGAGLKEYMVEKSATMSIA

SEQ ID NO: 2293 - protein, 474 aa, Bacillus cereus ATCC 10987
MKKHLYINGDWKSVNTYKPLYAPYSEETLAEIAQGTEEDVKEAVIAAKNAMKEMNRLSAYDRATILEKVAQKMDERREEFAEIIAKEAAKPIRAARGEVDRTVQTYKFAAEEAKRIYGETLPLDAAPGADGRIAYTIRKPIGVIGAITPFNFPLNLVAHKVGPAIAAGNTVVLKPADQTPLSSYALVELFEEAGLPKGALNIISGPGSTVGEAIVTNDDVASITFTGSPKVGLGIKAKAGLKRVTLELGSNAAVIIDEDVELTDELIERVKWGAFVNNGQVCISVQRVFVHEERMDEFLSKLQKAMETVVVGDPLLEETDVSALISKKDVERIDNWVQEAVKEGASVLYGGNKRDERIFKPTVLTNVPEHVSVQCQEVFGPLMTVNTFKEFDEAIEQVNHSRYGLQAGVFTNNLFKVMRAIDELEVGGVMINDIPTFRVDHMPYGGVKESGTGREGIKYAIEEMTEMKLVCIKK

SEQ ID NO: 2294 - protein, 324 aa, Bartonella schoenbuchensis
STASCESKITYIDGDEGVLLYHGYSIDQLAENGDFLEVCYLLLYGELPTKQEKDDFDRRIMHHTMVHEQFSRFFHGFRRDSHPMAVMVACLGAMSAFYHDSIDITDAKQRMIASIRLIAKVPTLAAMAYKYSIGQPFVYPRNDLSYAANFLHMCFSVPCEEYKVNPVLARAMDRIFTLHADHEQNASTSTVRLAGSSGANPFACIAAGVACLWGPAHGGANEACLKMLQEIGSIEKIPEFIARAKDKNDPFRLMGFGHRVYKNYDPRAKLMQKTCHEVLKELNIKDDPLLDIAMELEKIALSDEYFIEKKLYPNVDFYSGITLK

SEQ ID NO: 2295 - protein, 473 aa, Hordeum vulgare
GSFGKVKIAEHIITGHKVAIKILNRRKIKSMEMEEKVKREIKILRLFMHPHIIRLYEVIDTPADIYVVMEYVKSGELFDYIVEKGRLQEEEARRFFQQIISGVEYCHRNMVVHRDLKPENLLLDSKCNVKIADFGLSNVMRDGHFLKTSCGRPNYAAPEVISGKLYAGPEVDVWSCGVILYALLCGTLPFDDENIPNLFKKIKGGIYTLPSHLSPLARDLIPRMLVVDPMKRITIREIREHSWFKARLPRYLAVPPPDTAQQVKKLDDETLNDVIKMGFDKNQLTESLQKRLQNEATVAYYLLLDNKLRTTSGYLGAEYQESMDSSFSQISPETPSSASEARQYGSPGFGLRQHFAAERKWALGLQSRAHPREIITEVLKALQELNVCWKKIGHYNMKCRWSPGFFENMMHNNNGFGVESAIIEADGLGDKSTHIVKFEIQLYKTRGDKYLLDLQRVSGPQLLFLDLCSAFLT

SEQ ID NO: 2296 - protein, 318 aa, Bartonella schoenbuchensis
  misc_feature (25)..(25): Xaa can be any naturally occurring amino acid
KITYIDGDEGVLLYHGYSIDQLAEXGDFLEVCYLLLYGELPTKQEKDDFDRRIMHHTMVHEQFSRFFHGFRRDSHPMAVMVACLGAMSAFYHDSIDITDAKQRMIASIRLIAKVPTLAAMAYKYSIGQPFVYPRNDLSYAANFLHMCFSVPCEEYKVNPVLARAMDRIFTLHADHEQNASTSTVRLAGSSGANPFACIAAGVACLWGPAHGGANEACLKMLQEIGSIEKIPEFIARAKDKNDPFRLMGFGHRVYKNYDPRAKLMQKTCHEVLKELNIKDDPLLDIAMELEKIALSDEYFIEKKLYPNVDFYSGITLKA

SEQ ID NO: 2297 - protein, 280 aa, Listeria monocytogenes str. 1/2a F6854
MTLSFSDTYRLNNGIEMPRHGFGVYKLTDEARMRTALETAVDVGYRLFDTASFYHNEKELGDFFASSGLKRDEFFVTTKMWNTEQGYDETLWAFEKSQKKLQLDQIDLYLVHWPKQDTFFDTWRAVEKLYDEGLVRAIGVSNFEAHHLDRLRTSANVLPVVDQLETHPHFPNHLLHRYLEELHIVHQAWSPLGRGGVLQEQILIDLAEKHGKSPAQIVLRWHLQNNISIIPKSETPSRIRENAAIYDFELSEADMRQVERLNTGERVSHAPDVMYVRSEI

SEQ ID NO: 2298 - protein, 417 aa, Rubrivivax gelatinosus PM1
MYQHIKVPADGQKITVNADFSLNVPDQPIIPFIEGDGTGFDITPVMIKVVDAAVEKSYGGKRKIHWMEIYAGEKSTKVYGPDVWLPEETLQVLKEYVVSIKGPLTTPVGGGIRSLNVALRQELDLYVCLRPIQYFEGVPSPVKEPHKTNMVIFRENSEDIYAGIEFEAESEKAKKLIKILQDEFGVKKIRFPATSGIGIKPVSREGTERLVRKAIQYAIDNDKPSVTIVHKGNIMKFTEGGFRDWAYGLAQKEFGAQPIDGGPWCKFKNPKTGKEITVKDSIADAFLQQILLRPAEYSVIATLNLNGDYVSDALAAQVGGIGIAPGANLSDSIAMFEATHGTAPKYAGKDYVNPGSEILSAEMMLRHMGWTEAADLVISSMEKSILSKKVTYDFARLLDGATQVSCSGFGQVMIDNM

SEQ ID NO: 2299 - protein, 175 aa, Triticum aestivum
MAPTVMASSATSVAPFQGLKSTAGLPVSRRSSSAGLGSVSNGGRIRCMQVWPVEGIKKFETLSYLPPLSTEALLKQVDYLIRSKWVPCLEFSKVGFVFREHNSSPGYYDGRYWTMWKLPMFGCTDATQVLNEVEEVKKEYPDAYVRVIGFDNLRQVQCVSFIAFRPPGCEESGKA

SEQ ID NO: 2300 - protein, 319 aa, Clostridium acetobutylicum ATCC 824
MKTIAVLTSGGDAPGMNAAIRAVVRTAIEKGINVKGIQGGYSGLINGEIFDMNRHSVSDIIQRGGTILRTARCPEFLKEEVRQKAANVLRVFGIDGLVVIGGNGSFMGAQKLSKLGVKTVGLPGTIDNDLPYTDYTIGFDTTLNTVLDAINKLRDTSTSHERVSIIEVMGRDCGDIALFSGIAGGAESVIIPEIGYDFNELCKNILEGKLRGKMHNLIILAEGVGGAAELAKKVEEVTGIETRSTILGHIQRGGSPSAFDRMLASRMGVKAVEVLMEGKTSRVIGIKEGKIMDQDIDEALAVPRSFNKELYDIANMLSK

SEQ ID NO: 2301 - protein, 156 aa, Glycine max
  misc_feature (99)..(99): Xaa can be any naturally occurring amino acid
  misc_feature (101)..(101): Xaa can be any naturally occurring amino acid
  misc_feature (142)..(142): Xaa can be any naturally occurring amino acid
ASSMIYSPTVTTVNRAGAGMVATFTGLKSMAGFPTKNTNNDITSIASNGGRVQCMHVWPPVGKNKDETHCYLPDLDDAQLAKEVEYLFRKGWIPRLEFXVXHGFMYGEHTRSPGYYDGHYWTMWKLPMVCCTDASKVLNDLXDAKTAYPNGFIRII

SEQ ID NO: 2302 - protein, 399 aa, Oryza sativa (japonica cultivar-group)
MALSISTPPTSSSLLPASLQVGRWSSSAAMSARPVAFSLRRPVLAARVAAGGNAPSSSVDEVVTELDAVASFSEIVPDTVVFDDFEKFAPTAATVSSSLLLGIAGLPDTKFKSAIDTALADGECNTMEKPEDRMSCFLTKALANVGAEMAHLVPGRVSTEIDARLAYDTQGIIQRVHELLKLYSDHDVLSERLLFKIPATWQGIEASRLLESEGIQTHLTFVYSFAQAAAAAQAGASVVQIFVGRVRDWARTHSGDPEIDEALKKGEDAGLALAKKVYAYIHKNGYKTKLMAAAIRNKQDVFSLLGIDYIIAPLKILQSLEESVTDTDVKYGYVPRLTPALGKTYNFTEEELVKWDQLSLAAAMGPAAEELLASGLEGYVNQARRVEELFGKIWPPPNV

SEQ ID NO: 2303 - protein, 286 aa, Rubrivivax gelatinosus PM1
MAWADQWIPVGAGEPLKARVYGSRPRGRSAPLVLHFHGGAFVAGGLDSGATVAGLLAEAGAVVVSLDYPLAPAHPFPAAIEAGHAALTWMHRHRSRLAGQSATVWVAGEEAGGNLAAAVALMARDRRSPPLAGQILMSPMLDPCVATASLRDADAGPVGCLWADGWHQYLPGAADADHPYAAPASAMRLTGVPRTLLITAQDDPLRDEARAYARRLRDAGVEVDEAFLDQPTGWPCACKQPAGAQAAWAPVVRGQFQAFLQRAHAPAAVPVSASSSIQNRRPGSLS

SEQ ID NO: 2304 - protein, 255 aa, Neurospora crassa
MSDSPQSNSKDVEQGAPSPGEEPQMNDPQDPHSSGLNQYEFEVKEQDRWLPIANEHFQNKRCAYSLYTSMSHHSSSKSPEAPRASSSSSKADRCDAYDANIRNFAPVARIMKNALPENAKIAKEAKECMQECVSEFISFITSEASEKCQQEKRKTVNGEDILFAMTSLGFENYAEALKIYLSKYREQQQNQTNRSENQQNRPSSQGYGAPQGQNQPGQGGFSSNDLGGQQESGDASGYNLYGAQTGHNGGGAEGY

SEQ ID NO: 2305 - protein, 169 aa, Lactobacillus plantarum WCFS1
MQLSIPTINGALAATYSKQAAVAQTYKGHPIISFPVDISDVPAGTHSLAFTFVDHDAIPVGGFTWIHWIAANLPATTTHIPENASQTGAIPMVQGNNSTAGAYVHETDPKVSQHYVGPYPPDKDHRYSFKLFALDTELDLQPGYWLNEFHDAIAGHVLATAKTTVIGKV

SEQ ID NO: 2306 - protein, 480 aa, Streptomyces coelicolor A3(2)
MASAPAFDYAPAPESRAVVDIAPSYGVFIDGEFTEAADGKVFKTVSPATEEVLSEVAEAGEADVDRAVKAARKAFEKWSALPGAERAKYLFRIARIIQERSRELAVLETLDNGKPIRETRDADLPLVAAHFFYYAGWADKLDHAGYGADPRPLGVAGQVIPWNFPLLMLAWKIAPALATGNTVVLKPAETTPLSALFFADICRQAGLPKGVVNIITGDGRAGAALTAHPDVNKVAFTGSTAVGKQIARTVAGTRKKLTLELGGKGANIVFDDAPIDQAVEGIVNGIFFNQGQVCCAGSRLLVQESIHDELLDSLKRRLTTLRLGDPLDKNTDIGAINSAEQLARITALADQGEAEGAERWSPACELPSAGYWFAPTLFTNVTQAHTVARDEIFGPVLSVLTFRTPDEAVAKANNTPYGLSAGIWTEKGSRILAVANKLRAGVIWSNTFNKFDPTSPFGGYKESGFGREGGRHGLEAYLDV

SEQ ID NO: 2307 - protein, 291 aa, Ralstonia metallidurans CH34
MTKTTTARSSAVQPAAEQGEPYVVQHMVVSGDREIKVCVCYPAGYWPLSAGSATLPWLVYLHAGGFVEGDVEAAKELARDLAESVPAVVVTPGYSLAPENPFPAAPEDAVATVTWVLKQAKKLKVDKLRFALVGEEAGGNLAIATAQMLRDRGLPQPAGQWLIRPVTDPCLSAMSSTRQVPMEMLRRLACNYREYLPTPADSVHPYAAPALASRMAGLPATLVQVAEQDALRAEGEAFAAKLAKAGISARALIMPGACGDGVEQSHEKCQAWVEEGARFLRDCFAKADDAS

SEQ ID NO: 2308 - protein, 188 aa, Mougeotia scalaris
VYEDDGQPFTTFSQFWTRWQDMPFQPDNPLSTPNRLVLPPAVELQSMRVDELGLEERQEKSSNALLARAWTPGWANADRSLLVFIQGPLQRYSSSKNKADKHTTSLLSPHLHFGEILRTLKCTIKVRRMKAQWKSQGAEGASQGVDAFVRSLGLREYSRYLSFNFPFTHERSLLSNLKSFPWRLDEAG

SEQ ID NO: 2309 - protein, 350 aa, Mesembryanthemum crystallinum
EDEACSYAMTITSGSVPPMVLKAVIELDVLEIIKRAGPGAQLSPAEIANQLPTKNPDAATMLDRMLRLLASYSILSYSLRTLSDGRVERLYGLAPVCQFLTKNQDGVTLGALSLMNQDKILMESWYHLKDAVLDGGIPFNKAYGMSAFEYHGTDPRFNKVFNSGMSNHSTITMKKILDDYQGFEGLSTLVDVGGRHWGYPNMIISKHTTIKGINFDLPHVIEDAPAYPGVEHVEGDMFVSVPKGDAIFMKWICHDWSDEHCLSFLKNCYAALPNHGKVIVCEYILPVAPETSHAARTVFHVDAIMLAHNPGGKERTEQEFQALAKGSGFEGFKVACSAYDTKVMEFLKQN

SEQ ID NO: 2310 - protein, 77 aa, Glycine max
  misc_feature (30)..(30): Xaa can be any naturally occurring amino acid
  misc_feature (52)..(52): Xaa can be any naturally occurring amino acid
TTVNRAGAGMVAPFTGLKSMAGLLTKKTNXDITCIATNRGRVQCMHVWPRVXQEELETLSYLTTMDDTQYQTEAEYL

SEQ ID NO: 2311 - protein, 567 aa, Triticum aestivum
  misc_feature (116)..(116): Xaa can be any naturally occurring amino acid
  misc_feature (127)..(127): Xaa can be any naturally occurring amino acid
  misc_feature (313)..(313): Xaa can be any naturally occurring amino acid
  misc_feature (332)..(332): Xaa can be any naturally occurring amino acid
  misc_feature (378)..(378): Xaa can be any naturally occurring amino acid
  misc_feature (393)..(393): Xaa can be any naturally occurring amino acid
  misc_feature (398)..(398): Xaa can be any naturally occurring amino acid
  misc_feature (433)..(433): Xaa can be any naturally occurring amino acid
  misc_feature (502)..(502): Xaa can be any naturally occurring amino acid
IVPASAARSSWLLPPRGGPPPRSPPAACSPRPAASPAAVPSALRRADGARGLLPGTPSGVRHCGSSRRSPFRLLSKWATITAPYQRQIPVAAASGKTLPDCGTRRTGEVIARVAEXGDAEDVDRAAXAARKAFDEGPWPRMTAYERSRILLRFADLIEKHNDDIAALETWDNGKPYEQAAHIEVPMLVRLMRYYAGWTDKIHGLIVPADGPHHVQVLHEPIGVVGQIIPCDFPHLMYRAKILPPLACGDTILLKTAEQTPLSALYVSKLLHEAGLPEGVLNIVSGFGPTAGAALASHMDVDKIAFTGSTATGXVILELSARSNLKRVRLGRXGKTPFIVMDDVHIEPAPESSHISLCFIHGHSCGAGCRTFVYMSVYXERFLRKSKARALKRXVVGDXPFRKGVEQGPQIDDEQFKKILRYIKSGVDSGATLXTGGDKLGDKGYYIQPTIFSDVQDGMKIAQEEIFGPVQSIFKFNDLNEVIKRANASQYGLAAGVFTNNLXTPANTLTRALRAGTVWVNCFDIFDAAIPFGGYKMSGIGREKGIDSLKNYLQVKAVVTALKNPAWL

SEQ ID NO: 2312 - protein, 490 aa, Burkholderia fungorum LB400
MWRARAQEIRPEGRAFIDGNYVGALSGRTFATVNPATGQVIAQVAECGEEDVNLAVASARKAFESGVWSRRAPAERKAVMLRFAQLMMEHREELALLESLDVGKPVANAYNGDIVSSATCIQWYGEAIDKLYGETAPAAPDMTTMIVREPLGVVAAVVPWNYPLSMASWKLGPALAAGNSVVLKPAEQSPLSAIRIAALAMEAGLPAGVLNVLPGYGETAGRALGLHMDVDAVGFTGSTAVGKLFMQYSGQSNIKRVGLECGGKSPHIVLDDCADLDAAARAVAAGIFGNSGQVCNAGSRLIVQAAVRDELLEKVAAIARELVPGDPLDPATKMGAIVSDVQHASIMSYIDAGRADGARVVAGGRAARPESGGYFIEPTVFDGVNNDMRIAREEIFGPVLSAITVDSPEEAVRVANDTIYGLAAAVWTSNVTRAQQVSRQLKAGVVWVNCFDRGTMSSPFGGFKQSGFGRDKSMHAFDKYMDWKAIWIAG

SEQ ID NO: 2313 - protein, 282 aa, Saccharomyces cerevisiae
MVPKFYKLSNGFKIPSIALGTYDIPRSQTAEIVYEGVKCGYRHFDTAVLYGNEKEVGDGIIKWLNEDPGNHKREEIFYTTKLWNSQNGYKRAKAAIRQCLNEVSGLQYIDLLLIHSPLEGSKLRLETWRAMQEAVDEGLVKSIGVSNYGKKHIDELLNWPELKHKPVVNQIEISPWIMRQELADYCKSKGLVVEAFAPLCHGYKMTNPDLLKVCKEVDRNPGQVLIRWSLQHGYLPLPKTKTVKRLEGNLAAYNFELSDEQMKFLDHPDAYEPTDWECTDAP

SEQ ID NO: 2314 - protein, 330 aa, Burkholderia cepacia R18194
MPVPEVPDVPDVPDVPDVPDVPEVPDVPEVPEVPEVPDVPEVPDVPEVPDVPEVPDVPEVPDVPEVPEVPEVPDVPEVPDVPEVPDVPEVPDVPEVPDVPEVPDVPEVPEVPEVPDVPEVPEVPEVPDVPEVPDVPEVPDVPEVPDVPEVPEVPEVPEVPEVPEVPEVPDVPEVPEVPEVPDVPEVPDVPEVPEVPEVPEVPEVPEVPEVPDVPEVPEVPEVPDVPEVPEVPEVPDVPEVPDVPEVPDVPEVPDVPEVPDVPEVPDVPEVPDVPEVPEVPDVPEVVPDVPEDPEVPEEPDVPEVPELPPVPDVLGLIVGGVVGPSTEPQP

SEQ ID NO: 2315 - protein, 501 aa, Ustilago maydis 521
MPHMPQGIVKGGKEDVKLNNQSLWQTKAYINGVWTDADNKSTLKVFNKATGAEIGQVPDMGANETAAAISAADEAFKSWSKTTAKHRHDLLMKLYYAHQENAEDLAKIIVAENGKALPEAKGEISYSNGFLEWFAEEATRTYGHTVPSPLPGVRNVVQMQPVGVAGLITPWNFPAAMITRKAAPALAAGCTVVVKAPAETPFSALAFAHLAEKVGFPKGTINVVTCAKGDNEIAVGKQLCENPAVRKISFTGSTRVGKILMSQSASTLKKLSMELGGNAPFIVFEDADLDKAVEGAIACKFRGSGQTCICANRIYVHASIKDEFLQKLAAKVNDFKVGYGMDKGTTHGPLVSEAGLSKVEEHVNDSVKKGAKVIVGGKRGEGLFFEPTIITDLPEDVPTDREETFGPLAAVYTFTSEQEVVRKANNVDVGLAGYFFSKDTARCWRVAEELQVGMVGINTGLISQHAVPFGGVHESGFGREGGRTGIDEYLVQKLMVFGGVN

SEQ ID NO: 2316 - protein, 272 aa, Kineococcus radiotolerans SRS30216
MEVGRAVTVHPATLVGEGDLPARIAGRTNLWPQVRYFGSAAFDPHTDGGFSQFRTVRSDQLRFLPEGVDTLRGALAEPLAVAMHAVGRAGSLAGRDVLVNGAGPIGSLVVAAAVHAGAASVTAADVSPAALRVAAAMGARSVLDLSAGAVLPADVELVFEASGAAAALGGVLRATARGGTLVQVGNLPGGAVQAVLGDLVTREITWIGSYRFVEEIDDALVALAEGLDVMPVVSHRFAMADAAEAFAVMGDRSSGSSKVVLRLDGKPVEDAS

SEQ ID NO: 2317 - protein, 131 aa, Zea mays
  misc_feature (90)..(90): Xaa can be any naturally occurring amino acid
FFQACGTVHRVPFFSAKFGHPKGFAYVEFLEQKPVQEVLNLNEWELHGRQIKVAPKRTNVPGMKQGPPPGFNPSHGSPYSSYGAPFFPPXGFGGAPKFPPPLGSSPFFLRTGGGIMFNANPPMVCGRFQEN

SEQ ID NO: 2318 - protein, 490 aa, Burkholderia cepacia R18194
MNTTPDLAFDPPLHTRHFIDGAWRASVDGATLPVVDPSTEAVLADVSAGSEADVEHAVQAASRAYPGWKRTTGAMRAALLRAIARGVDARRTRLATLQSLNNGKPLAEAEIDVADVIATFDYYAGLAERLDTDGETEIALPDADHRAWIRREPAGVAALIVPWNFPMVTTAWKLAPALAAGCTVVLKPSEITPLPELELAAIAAEAGLPPGVLNVVTGTGHDVGARLCAHPRVAKVSFTGSTAVGAQVMKTAADTIKGVGLELGGKSSIVVFDDADLDHAVELVTGGGLFNAGQMCSATSRVLVAASLADDLIARLAQRIDATVVGPPFAPGVQMGPLTNRAQYERVQRHIAQGRADGARLVTGGNALDGPGYFIRPALFADVPADSSLWCEEIFGPVLCVRAFDTEDEAIAAANDTEYGLVATVVTRDTARARRVADALEAGVVWINTPQLIYPQTSWGGYKRSSIGRELGPFGLAAFQEIKQVMMPAG

SEQ ID NO: 2319 - protein, 333 aa, Enterobacter cloacae
NGVAGSYAEYVPLLHIVGAPCSGVQQRGELLHHTLGDGDFHHFYRMSEPVTAARAILTAQNACYEIDRVLEVMLMQSRPGYLMLPADVAKKPATPPVNALTTPPFPVNEACLNAFRQHAQAMLSVGSSVALLADFLAAFGFIQMLQCWMTDQLPTHTTVILGKGIVKRKHGGFSYPYHGAGGQRGPVPAIEGADTVICIGTRFTDTVTAGFTQQFARERTIEIQPFAARVGDVWFSGIPMREAINALIPLVRARAHAAANHRPPQAARAPVHQGTLNQETLWQTVQQFIRPDDILLADQGTAAFGAASLRLPAGAELLVQPLWGSIGYTLAAA

SEQ ID NO: 2320 - protein, 388 aa, Glycine max
  misc_feature (73)..(73): Xaa can be any naturally occurring amino acid
GIPWERLNYSRDKYRETRLKQYKNYQNFSRSPHHLRKECFQVQKGQTFYDFFFNTRLVKSTIVHFQLQLGRTXIMLRNLLWATSKHDVYLMQNYSVMHWSALLRRGKEVLNVAKPIIPTLKRPGFLAQPVSRVQISTMTVKENLMVAGGFQGELICKNLKHPGVLFCGKITTDDNAITNAVDVYSNPAGSLRVITANNDFQVRVFDAENFASLGCFKYDWSVNNTSVSPDGKLLAVLGDSTECLIADANTGKITGSLKGHLDYSFSSAWHPDGQILATGNQDKTCRLWDIRNLSQSMAVLKGRMGAIRALRFTSDGRFLAMAEPADFVHIFDSHSGYEQGQEIDLFGEIAGISFSPDTEALFVGIADRTYGSLLEFNRKRHYNYLDSF

SEQ ID NO: 2321 - protein, 475 aa, Bacillus halodurans C-125
MFRGKLYIDGTWTGDLLDTFDVKNPATGEVVGVMPNGGKAEAAAAIEAAQRAFLKWRKYTAAERANFLMTWHDLLLQQKEEIAEMLTMEMGKPLAEARGEIEYSASFIRWFAEEGKRVYGRTVPASAENKRIHVQKQPVGVVAAITPWNFPAAMIVRKMAPALAAGCTFVGKPAELTPLTAVKIVELCEEAGFPKGVVNLVCGDAKEIGEEMTSHEHVRKLTFTGSTAVGKLLMKQSAGRMLNLSLELGGQAPMIICDDADLDKAVAGVVASKYRNAGQTCVCGNRIYVQETIVDEFVKRLTGKVVQLKVGNGLEEGVHIGPLIEKKGYEKVKAHVDDAVAKGARVVIGGKGQEGNDSYFYDPTILTDVHDEMLVMQEETFGPVAPIQTFATDEDVIEKANGTRYGLAAYFFTENYARGIRLSEALDFGIVGWNDGAPSIAQAPFGGMKESGLGREGGQEGIEAFLETKFVSIGL

SEQ ID NO: 2322 - protein, 202 aa, Bacillus sp. KSM-K16
MTKTNSNLVWHEASVSKQERHARHNHKGCVLWFTGLSGSGKSTLANALDRSLFDAGLSTYVLDGDNIRHGLNKDLGFSDRDRQENIRRIGEVAKLFVDAGTIVSTAFISPFQSDRDQARALLADGEFVEVYVKCPLEECERRDVKGLYKKARNGEIPQFTGISSPYEEPETPEITVDTSVQTVEESVEQIIGWLEKHHILTR

SEQ ID NO: 2323 - protein, 485 aa, Mesorhizobium loti MAFF303099
MLQKTSHFMRQANLINGEWVQADSGQTVDVNNPATGLKIGTVPKSGKAETRRAIEAADAAFKTWRKTTALERSKLLRKLHDAMMDNQDVLAELLTIEQGKSLFESKGEIGSAAAYILWFAEEGRRTYGDVVPSPWADRRILVTKEPVGVIAAITPWNFPSSMLARKLGPALAAGCTAVVKPASQTPYSGLAWGALAEEVGFPKGVVNILTGSASEIGDEICANPLVSKITFTGSTEVGKLLIQKSSVTVKKVSMELGGNAPFIVFDDADIERAVAGAITAKYRNSGQTCVCTNRFLVQAGVYDKFVEKLAAASNGLKVGSGLEEGVQQGPLIDEKAVEKVEELIADATSKGGKIVAGGKRHALGGSFFQPTVIANATPKMRFMKEEIFGPVAPVFKFETEAEAIALANDTEFGLACYFYTGDLGRAFRVMEGLKYGMVGVNEGLITTPEAPFGGVKESGLGKEGGHQGIEDYLDTKYVCIGGLGL

SEQ ID NO: 2324 - protein, 126 aa, Glycine max
  misc_feature (13)..(13): Xaa can be any naturally occurring amino acid
  misc_feature (25)..(25): Xaa can be any naturally occurring amino acid
  misc_feature (27)..(27): Xaa can be any naturally occurring amino acid
  misc_feature (47)..(47): Xaa can be any naturally occurring amino acid
  misc_feature (60)..(60): Xaa can be any naturally occurring amino acid
SSMICSPAGATVXRGGGGMVAPFAXLXSMGGLPTGETRADITCVASXGGRAPCFFFWPPXGAKKGEILSYLPEVGDAQLAKEVESLLRKGWIPCLEFELEPGFVSRAPGRAPRIYDGRSRSLGKLA

SEQ ID NO: 2325 - protein, 124 aa, Arabidopsis thaliana
MSGVWVFNKNGVMRLVENPYNQSAGDSSESSSSGGNQQQRMRRKILVHLPSSEVVSSYGSLEKILKNLGWERYYSGDNTDHLLQFHKRTSIDLISLPRDFSKFNSIHMYDIVVKNPNVFHVRDM

SEQ ID NO: 2326 - protein, 129 aa, Treponema pallidum subsp. pallidum str. Nichols
MAALSNEQIIEAIRGKTILELSELIKAVEEEFGVTAAVPVAPVAEGGGAGSVAAEEQTEFTVVLKGLAEPGKKIAVIKEVRNVISGLGLKEAKDLVEGAPKTLKENVSKEEAAKIKESMTAAGALIEIS

SEQ ID NO: 2327 - protein, 488 aa, Vibrio cholerae O1 biovar eltor str. N16961
MRSLAMLPTDFPFFHQSAFINGQWILGEPQARQTVTNPFDGSLIGSVPLLSAAQVQEAIAGAQAAQILWCQQPAENKAKILRRWYELIEQHHESLAKLLTIEQGKPLAEARGEIHYAASFVEWYAEEAKRAYGELIPSHKPDARIMVSRQPVGVVAAITPWNFPAAMITRKCAPAFAAGCAVVLKPAPDTPFTALALADLAQQAGIPDGLLQVVTGDAIEIGRVLTESKTVRKLSFTGSTGVGKLLMAQSANNVKKLSLELGGNAPFIVFEDADINAAIDGVMVAKFRNAGQTCVCANRIYVHDAVYDQFAAKLVDRVSRLNVGYGLDAGVNIGPLINDAAVAKVTSHIVDAQSKGAKVMFGALPEAGSRLFQPHVLTEVTDEMRVADEETFGPLAALFRFSSEQEVIERANATDSGLAAYCYTQSLRRAWHMSEALEAGIVGINEGLISTTLAPFGGIKESGLGREGAKHGLEEYLEVKYTLMGGLA

SEQ ID NO: 2328 - protein, 526 aa, Triticum aestivum
  misc_feature (148)..(148): Xaa can be any naturally occurring amino acid
  misc_feature (215)..(215): Xaa can be any naturally occurring amino acid
MAMAMRRAAALGARHILAASVSASSRVASRRHMGSVDAGAAMEKIRAAGLLRTRGLIGGKWVDAYDGKTIEVQNPATGEVLANVACMGNRETADAITSANTTFYTWSKLTASERSKALRKWHDLLMSHKEELALLMTLEQGKPMKEAXGEVNYGASFIEFFAEEAKRVYGDIIPPTLADRRLLVLKQPIGVVGAITPWNFPLAMITRKVGPALGXGCTVVVKPSEFTPLTALAAADLALQAGIPAGALNVVMGNAPEIGDELMQSMQVRKITFTGSTAVGKKLMAGSANTVKKVSLELGGNAPCIVFDDADIDVAVKGSLAAKFRNSGQTCVCANRILVQEGIYEKFASAFVKAVQSLQVGNGLEESTSQGPLINEAAVQKVEKFVGDATSKGANIMLGGKRHSLGMSFYEPTVVGNVSNDMLLFSEEVFGPVAPLIPFKTEEEAIHLANDTNAGLAAYMFTKNIARSWRVSEALEYGLVGVNEGLISTEVAPFGGVKQSGLGREGSKYGMDDYLEIKYVCMGNLG

SEQ ID NO: 2329 - protein, 156 aa, Glycine max
MEPMDIVGKAKEDASLPKATMTKIIKEMLPPDVRVARDAQDLLIECCVEFINLVSSESNEVCNKEERRTIAPEHVLKALGVLGFGEYIEEVYAAYEQHKLETMQDSLKGAKWSNRAEMTEEEALAEQQRMFAEARARMNGGAITSKQPDAHQSLES

SEQ ID NO: 2330 - protein, 451 aa, Thermoplasma volcanium GSS1
MTTMIMENEERTEKYNEDALRYSEYYKGKIQTMSKVPVRSLDDFSIWYTPGVAAVSRKIATDHDLSFELTGRWNTIAILTDGTRVLGLGNIGPEAAMPVMEGKALIFNYLGGVNAIPVPIRVSSREEFVSVAKSLEPSFGGINLEDIESPKCFFLLETLQKEMNIPVWHDDQLGTASITLAGIINSIRIVGKKIEEVKVVFNGAGAANIAAAYLFKAAGFKKENIILVDSKGVLQPERQDMDSLMLNNPWKYQLAIETNGERVKGDLKEALKGADILISAAKSGPDTVDAKLVKEMNNDPIVFVLANPIPEMWPEEAKENGAKIVATGRSDFPNQINNSLVFPGVFRGVLDARAKGVNFDVMVAASYEIANFVEEPTAEKIVPTMEEWELYPRLASAVATKTVELGLARKIDSKEGFYKRARDIIENNRNIYRKMMDLGLIRMMPNGERKY

SEQ ID NO: 2331 - protein, 275 aa, Schizosaccharomyces pombe
MLGSFVKLNNGLKCPQFAYGSYMVNRTKCFDSVYAALQCGYRHIDSAQMYHNEADCGRAILKFMEETGTKREDIWFTSKLNDLSGYKSTLSSIDASVKACGLGYIDLFLLHSPYGDRIESWKALEKGVEEGKLRAIGVSNFGPHHIQELLDSHPKIIPCVNQIELHPFCSQQKVVDYCESKGIQLAAYAPLVHGEKFGNKQLLAIASKYNKSEAQIMIRYCLQRGFIVLPKSSTPRRIKENGDVFDFEISKEDMEKLYNLDEDYHSDWNPCVSPL

SEQ ID NO: 2332 - protein, 213 aa, Triticum aestivum
MEIAMVCTRVNLLILILSLCSPYKFIQSPMDFGPLNLLPTTIAASSDFGRILFHSPSAVLKPQSPRDISLLLSFLSASSLGKVTVAARGAGHSIHGQAQALDGIVVEMRSLPAEIELHKGGEGDASYADVSGGAMWIELLEQSLKAGLAPRSWTDYLYITIGGTLSNAGISGQTFKHGPQISNVLQLEVVTGRGETVTCSPTKNAELFSAVLG

SEQ ID NO: 2333 - protein, 308 aa, Neurospora crassa
MADHTEVDLDSIIDRLLEVRGSRPGKQVQLLEAEIRYLCTKAREIFISQPILLELEAPIKICGDIHGQYYDLLRLFEYGGFPPEANYLFLGDYVDRGKQSLETICLLLAYKIKYPENFFILRGNHECASINRIYGFYDECKRRYNIKLWKTFTDCFNCLPIAAIIDEKIFTMHGGLSPDLNSMEQIRRVMRPTDIPDCGLLCDLLWSDPDKDITGWSENDRGVSFTFGPDVVSRFLQKHDMDLICRAHQVVEDGYEFFSKRQLVTLFSAPNYCGEFDNAGAMMSVDESLLCSFQILKPAEKKQKFGRR

SEQ ID NO: 2334 - protein, 117 aa, Atriplex nummularia
MASSVVFKLACAVFMCMLVAAPHAEALTCGQVTSSMTPCMSYLTGGGSPTPACCGGVKSLNSMASTPADRKAACGCLKSAAGAMTNLNMGNAASLPGKCGISLPYPISTSTDCSKVN

SEQ ID NO: 2335 - protein, 108 aa, uncultured Rickettsia sp.
MLKEIGSSEYIPRYIAKAKAKDKNDPFRLMGFGHRVYKNYDPRAAVLKETCKEVLKELGQLDNNPLLQIAIELEAIALKDEYFIERKLYPNVDFYSGIIYKAMGIPSQ

SEQ ID NO: 2336 - protein, 296 aa, Bacillus thuringiensis serovar konkukian str. 97-27
MVIQWFPGHMAKARRQVTEKLKLIDVVIELVDARLPLSSRNPMIDEIITHKPRLVVLNKADMADDRLTKQWIAYFKEKGHMAISINAQAGQGMKEIAAACKVLVKEKFDKMVAKGIRPRSIRALIVGIPNVGKSTLINKLAKKNIAKTGDRPGVTTAQQWIKVGKEMELLDTPGILWPKFEDELVGLRLATTGAIKDSILNLQDVAVYALRFMEKHYPERLKERYNLNDIPEDIVELFDAIGKNRGCLMGGGMIDYDKTSELVLRELRGGKLGKMTFETPEEFAEQTEDAEKVEEV

SEQ ID NO: 2337 - protein, 520 aa, Glycine max
  misc_feature (84)..(84): Xaa can be any naturally occurring amino acid
  misc_feature (415)..(415): Xaa can be any naturally occurring amino acid
MESRTKSNPQLTRALCYGNDGKQQGRSPSVIVIGGGMAGIAAARALHNASFQVVLLESRDRIGGRIHTDYSFGFPVDMGASWLXMGVSNENPLASVIGRLGLPLYRTSGDNSILYDHDLESYGLFDMDGKQVPQELVAKVGEIFEAILQETDKIRQESSEDMSVLRGLSIVFDRKPELRLEGIAYKVLQWYLCRLEGWFAADTDAISLKGWDQEVLLPGGHGLMVRGYLPVVNSLAKGLDIRLGHRVTKVVRRYNGVKVTVENGKTFFADAAVIAVPLGVLKAKKILFEPKLPDWKEAAIADLGIGLENKIILHFENVFWPNVEFLGVVADTPYECSYFLNLHKATGRAVLVYMPSGQLAKDVEKMPDEAAVNFAFMQLKKIFPDASSPIQYLVSRWGSDINSLGSYSYDAVGKXPHELYERLRVPVDNLFFAGEATSMSYPGSVHGAYSTGTMAAEDCRMRVLERYGEVDLFQPVMGEEGSMGSVCSASLLLCLIDLDMRNVQCINIPTLSLQHCSQHF

SEQ ID NO: 2338 - protein, 263 aa, Arabidopsis thaliana
METDSIDSVIDDDEIHQKHQFSSTKSQGGATVVISPATSVYELLECPVCTNSMYPPIHQCHNGHTLCSTCKSSKLKHESQCNFRPYSCPYAGSECAAVGDITFLVAHLRDDHKVDMHTGCTFNHRYVKSNPREVENATWMLTVFQCFGQYFCLHFEAFQLGMAPVYMAFLRFMGDEDDARNYTYSLEVGGSGRKQTWEGTPRSVRDSHRKVRDSHDGLIIQRNMALFFSGGDKKELKLRVTGRIWKEQQNPDSGVCITSMCSS

SEQ ID NO: 2339 - protein, 444 aa, Glycine max
  misc_feature (306)..(306): Xaa can be any naturally occurring amino acid
MEKRGNVLMEKYEFGKLLGQGNFAKVYHARDVRTGESVAVKVIDKEKILKIGLVDQTKREISIMRLVKHPNVLQLYEVLATKTKIYFIIEYAKGGELFNKIAKGRLTEDKARKYFQQLVSAVDFCHSRGVYHRDLKPENLLLDENGVLKVADFGLSALVESHRQKDMLHTICGTPAYVAPEVISRRGYDGTKADVWSCGVILFVLLAGHLPFYDLNLMSLYNKIGKADYKCPNWFPFEVRRLLAKILDPNPNTRISMAKLMENSWFRKGFKPKSGQVKREAVNVALVDSDQVFCLCENTSAAVVEXRASIVKPSQFNAFNIISLSAGLDLSGLFAGNVELDDTKFTFMSSASSIMSTMEDIARVLSMEIIKKDGGLLKLERSREGRKGPLSIDAEIFEVAPSFHLVELKKSCGDALEYQKILKEDLRPALKDIVGVWQGEQHLH

SEQ ID NO: 2340 - protein, 294 aa, Arabidopsis thaliana
MALTNNLWAFVFGILGNIISFVVFLAPVPTFVRICKKKSTEGFQSLPYVSALFSAMLWIYYAMQKDGTAFLLITINAFGCVIETIYIVLFVSYANKKTRISTLKVLGLLNFLGFAAIVLVCELLTKGSTREKVLGGICVGFSVSVFAAPLSIMRVVVRTRSVEFMPFSLSLFLTISAVTWLFYGLAIKDFYVALPNVLGAFLGAVQMILYIIFKYYKTPVAQKTDKSKDVSDHSIDIAKLTTVIPGAVLDSAVHQPPALHNVPETKIQLTEVKSQNMTDPKDQINKDVQKQSQV

SEQ ID NO: 2341 - protein, 355 aa, Colletotrichum lagenarium
MSRANAPNPSGSRKISFNVSEQYDIQDVVGEGAYGVVCSAIHKPSGQKVAIKKITPFDHSMFCLRTLREMKLLRYFNHENIISILDIQKPRSYETFNEVYLIQELMETDMHRVIRTQDLSDDHCQYFIYQTLRALKAMHSANVLHRDLKPSNLLLNANCDLKVCDFGLARSAASQEDNSGFMTEYVATRWYRAPEIMLTFKEYTKAIDVWSVGCILAEMLSGKPLFPGKDYHHQLTLILDVLGTPTMEDYYGIKSRRAREYIRSLPFKKKVPFRTLFPKTSDLALDLLEKLLAFNPVKRITVEDALKHPYLEPYHDPDDEPTAPPIPEEFFDFDKHKDNLSKEQLKQLIYQEIMR

SEQ ID NO: 2342 - protein, 228 aa, Triticum aestivum
  misc_feature (127)..(127): Xaa can be any naturally occurring amino acid
  misc_feature (177)..(177): Xaa can be any naturally occurring amino acid
  misc_feature (188)..(188): Xaa can be any naturally occurring amino acid
  misc_feature (205)..(205): Xaa can be any naturally occurring amino acid
MGERLKGTVKWFNVTKGFGFISPEDGSEDLFVHQSAIKADGYRSLNENDVVEFEVITGDDGRTKATDVTAPGGGALAGGSRPSEGGGDRGGRGGGGYGGGGYGGGGGGYGGGGGGYGGGGGSYGGGXAGYGGGGGGGRYGGGSGGGGRYGGGSGGGRECYKCGEEGHISRDCPQGGXGGGGGGYGGGXPFAVVGGGGGCFSWGDXGHFSRHCPNRTIRRACRSNLSSR

SEQ ID NO: 2343 - protein, 417 aa, Pirellula sp. 1
MRSSTKAPPMLSEKTIRIVKEITPLVAANAETITRRFYERMFEANPEVKAFFNQAHQHSGGQQKALAGAICAYFTHIDNPAVLMPAVELIAQKHVSLGIKPEHYPIVGSNLLAAIGDVMGDAATPEIVEAVSEAYGFLADIFIGREGAIYEEQASMPGGWNGTRTFVVTKKVRESEIVTSFYLKPEDEGPLPPFKPGQYITVHMDHPHTPTSPRNYSLSDCASQPHYRISVKREERLVPDAPDGLISNHLHDGIEEGHRIELGPPCGEFTVDPATIAKPIVLIAGGIGVTPLLSMAKSIVHANPNAELHFIQAARNSKVHAFADELRRLAQAGPNVHTKVIYDSPLPGDVEEGKCDEAGFVTENQIRESTPFTDADFYFCGPKPFMKNVHSCLRELGVDEHRVRYEFFGPKEELVAV

SEQ ID NO: 2344 - protein, 277 aa, Sinorhizobium meliloti 1021
MGGPMSVYFEKSYQRGFGTYPLKGEPLKAAVREAITVGYRAFDTAQMYGNEAETGEALAESGLARDELCITTKVHPDNYSEEAFLPSVEASLKALRVDQADVLMLHWPEINGENARSLRLLQKAFDIGLARNIGVSNYTAPMMREAQSIVEAPLVTNQVEFHPLIDQSRLLDAAEETKIALSSYCSVARGEVFKHPVFAEIGARYGKTAAQTVLRWILQKGVSMNTMSTKPENIRANFEILDFALSPHDMKRIDAMNATNYRILKAGMLPWVPDWDR

SEQ ID NO: 2345 - protein, 331 aa, Bartonella koehlerae
STASCESKITYIDGNEGILLYRGYPIDQLAEKGDFLESCYLLLYGELPTKQEKIDFDRCIMQHTVVHEQFARFFHGFRRDSHPMAVMIACLGAMSAFYHDSIDITDPQQRMIASIRLISKVPTLAAMAYKYSIGQAFVYPRNDLSYAANFLHMCFSIPCEEYKINPVLTRAMDRIFTLHADHEQNASTSTVRLAGSSGANPFACIAAGVACLWGPAHGGANEACLKMLQEIGSVERIPQFIARAKDKNDSFRLMGFGHRVYKNYDPRAKIMQQTCHEVLKELNIQDDPLLDIAIALENIALNDEYFVGKKLYPNVDFYSGITLKALGFPTE

SEQ ID NO: 2346 - protein, 498 aa, Sinorhizobium meliloti 1021
MDQLNNFLSPPAAPRDFGFFVDGKWQSGHDFFVRHSPGHGVAVTRTAKCSVDDLNAAVAAARRAFEDRRWSGLPGGSRASVLLRVAEILRTRRDELAYWETLENGKPIAQARGEIDHCIACFEVGAGAARLLHGDSFNSLGDGLFGMVLREPIGVVGLITPWNFPFLILCERVPFILASGCTMVVKPSEVTSATTLILAEVLAEAGLPDGVYNVITGSGRTIGQAMSEHPDIDMLSFTGSTAVGRSCVHAAADSNFKKLGLELGGKNPIIVFADSDLEDAADGAAFGISFNTGQCCVSSSRLIVERSVAREFEALLAEKMKRIRVGDPLDETTQVGAITTEAQNTTILDYIAKGKTEGAELVTGGTAIDLGRGQYIAPTLFSGVSREMAIARDEIFGPVLCSMTFDTVEQAVELANDTVYGLAASVWTKNIDKALTVTRRVRAGRFWVNTMMAGGPEMPLGGFKQSGWGREAGMYGVEEYTQVKSVHVEIGKRTHWIS

SEQ ID NO: 2347 - protein, 341 aa, Sinorhizobium meliloti 1021
MKAAVLVEPRRFEVREVGIPEIGPADVLIRVTRAGICGTDLHIFNGHYAADRLPIVPGHEFCGTIAEIGASVTHLKTGMRVVADINIGCGNCYWCRRNEVLNCGEVEQIGIGRDGAFAQYVALPGRLVLPVPDGVPEAVLALVEPVACVVRAARKAGAAFGRSGVVLGAGPIGNLHVQMMRLVGMAPIIVADLSSERCRMAVEAGADAAVSEPATLRSKVLEMTGGRGADFVVESVGSSKLYRQAFDLVRKGGHVAFFGITPPGETIPIEILRTVLEENSLKGSVAGMGEDMHDALTLLSHGRFRTAAFTAAHYPLERIQEAFETIPARTGHLKTQILLDA

SEQ ID NO: 2348 - protein, 185 aa, Brassica napus
RVIFHINYLGADQPTFTLNFSKGSSQIIAQYYQLIRLGFEGYKNVMQNCRENMLVLKEGIEKTERFNIVSKDVGVPLVAFSLKGQSFHSEFEISEMLRRFGWIVPAYTMPADAQHITVLRVVIREDFSRTLAERLVADILKVLHELDTLPSKISRKMGAEDFGNVKGKKVERDILMEVIVGWRKV

SEQ ID NO: 2349 - protein, 473 aa, Brucella melitensis 16M
MRIGKMEMQTRYPDVKLFIDGTWRDGSRGETIEIFNPATDEVIGHIARATTADLDDALAAVDRGFEAWSKVSAFDRYKIMRRAADIFRSRGEEVARLLTMEQGKPLAEARIEAAAACDLIDWFAEEARRSYGRIVPPRQAYVMQAEVKEPVGPVAAFTPWNFPINQAVRKISAALAAGCSILLKAAEDTPAAPAELVRAFAEAGLPDGAINLVYGDPAEISAYLIPHPVIRKVSFTGSTQVGKQLAALAGLHMKRVTMELGGHAPVIIAADADVEQAIKVVSGSKFRNAGQVCISPTRFLIENSVYDQVVEGMAAYATSLKVGDGLEAGTTMGPLVNAKRVNAMERLVQDAREHKARVVTGGERIGNRGNFFEPTILADVPRDAAIMNEEPFGPVALLNRFDALDEALSEANRLNYGLAAYAFTGSSAKAARISSTVRSGMITINQLRSGPAGSALRRDQRFRLWNGRRCRRA

SEQ ID NO: 2350 - protein, 472 aa, Oceanobacillus iheyensis HTE831
MQSYKMFVGGKWFGNNLEQIDVINPATNEQIGTIPNGGKEEAKQAVDAAHNALKEWSARTAEDRSNYLVKWHELIKEERETIAKIMTEEQGKPLKEAIGEVDYANGFISWYAEEGKRIYGDIIPASHTNKRIFVQKKPVGVVAAITPWNFPAAMITRKVGPALAVGCTVVIKPATQTPLTAFKLVELAEKAGIPRGVINIVTGSSSQIGKVWNDDGRVRKLTFTGSTEVGKILMKDAANTMKKISLELGGHAPFVVMEDADLDKAVAGVIASKFRNAGQTCVCTNRVYVHESIKDIFQDKLTEAVSKLKVGNGLEEGINIGPLIDQSAVDKVDEQVKDAISKGGRVTFGGKSLRGLYVEPTIVVDATDDMLCMYEETFGPLVPVTTFRDEEEVIARANNSPYGLAAYVFTENIGRAIRISEALEYGIVGLNDGAPSTPQAPFGGFKESGLGREGGYYGIEEFLEIKYISLAF

SEQ ID NO: 2351 - protein, 169 aa, Oryza sativa (japonica cultivar-group)
MEHMFRYQNVLKHSSFLFYYTTNTATRTHPPPNVYAVTNTTTMDATTTAKRKRPAASDIADDAPTTVDEVSDAEVEEFYAILRRMRDATRRLGARPPPPRAPAWRPSFSWEDFADAPPKQAPPPPQQPADHERVAENATPPRRPAPGLDLNVEPPSDAPATPRSARAPA

SEQ ID NO: 2352 - protein, 469 aa, Glycine max
KVYYARNIKTGEGVAIKVIDKEKILKGGLVAHIKREISILRRVRHPNIVQLFEVMATKSKIYFVMEYVRGGELFNKVAKGRLKEEVARKYFQQLISAVGFCHARGVYHRDLKPENLLLDENGNLKVSDFGLSAVSDQIRQDGLFHTFCGTPAYVAPEVLARKGYDGAKVDLWSCGVVLFVLMAGYLPFHDQNVMAMYKKIYRGEFRCPRWFSPDLSRLLTRLLDTKPETRIAIPEIMENKWFKKGFKQIKFYVEDDRLCNVVDDDGLMDNDDDTASIVSVASFSDYSVSESDSEIETRRRINAPLPRPPSLNAFDIISFSPGFNLSGLFEEKEDETRFVTAAPVNRIISKLEEIAQLVRFSVRKKDCRVSLEGTREGVRGPLTIAAEIFELTPSLVVVEVKKKGGDRAEYERFCNDELKPGLQNLMVEESATSSELSTPIQPSLLRGLSEPVPDISSDIETPLCIPSDD

SEQ ID NO: 2353 - protein, 363 aa, Pichia jadinii
MPEKTIVVLPGDHVGTEITAEAIKVLKAIEEVKPEIKFNFQHHLIGGAAIDATGVPLPDDALEASKKADAVLLGAVGGPKWGTGAVRPEQGLLKIRKELNLYANLRPCNFASESLLDLSPIKAEVVKGTDFVVVRELVGGIYFGERKEDDGSGVASDTETYSVPEVQRITRMAAFMALQHNPPLPIWSLDKANVLASSRLWRKVVTETIEKEFPQLTVQHQLIDSAAMILIKYPTQLNGIVITSNMFGDIISDEASVIPGSLGLLPSASLASLPDSNKAFGLYEPCHGSAPDLPANKVNPIATILSAAMMLKLSLDLYEEGVAVETAVKQVLDAGIRTGDLKGTNSTTEVGDAVAEAVKKILA

SEQ ID NO: 2354 - protein, 423 aa, Schizosaccharomyces pombe
MKPNTTNLRNECWDTFSIPKRSQNIKINQSTKHQRSISDFVGTAGPGRQVGNWIIKKTIGAGSMGKVKLVVNILTGEKAALKMIPFTPNNTSQTVRVQREALLGRLLRHPNICRVIDCIRTPACTYILFEYVPGGQLLEYILARGKLDEDLARSFAMQLINALVYLHKNFIVHRDLKIENVLLTQDSRQVKLIDFGLSNFYSKDDLLRTYCGSLYFAAPELLDAKPYIGPEVDVWSLGVVIYVMVCGRVPFDDVSVPMLHSKIKSGKLEFPSYISEDCCSLIAAMLNVNPRKRCSLEQAAKFPWLKKNSFCLYLPIPLTSIPSTPSIRSHVFKPPFNLKVLQLLHEHGLASIPELKHELYMAYIERKTTSLVCLYLLGVESLAPALRIPTALPPVYSRHQRHHSEILGAMDLTEKITAMQCPP

SEQ ID NO: 2355 - protein, 124 aa, Cyanidioschyzon merolae strain 10D
MSTKINSLLEEIKSLTLLEAAELVKQMETTFGIDASAVATAAPAVQVETKKEEKTEFALVLSQVPADKKINVLKVVRTITGLGLKEAKELVDSVPKTLKEGLSASEAEQLKTQLTEAGAQVELK

SEQ ID NO: 2356 - protein, 509 aa, Brassica juncea
MTSVNVKLLYHYVITNLFNLCFFPLTAIVAGKAYRLTIDDLHHLYYSYLQHNLITIASLFAFTVSGFGLYIATLPKPLTLVEYSCYLPPRHLKVSVSKIMDIFYQIRKADTSSRNVACDDPSSLDFLRKIQERSGLGDETYSPEGLIHVPPRKSFAASREETEKVIIGGIENLFENTKVKPKDIGILVVNSSKFNPTPSLSAMVVNTFKLRSNIKSFNLGGMGCSAGVIAIAIDLAKDLLHVHKNTYALVVSTENITQGIYAEENRSMMFSNCLFRVGGAAILLSNKSGDRRRSKYELVHTVRTHTGADDKSFRCVQQGDDEDGKIGVCLSKDITNVAGTTLTKNIAICRPLILPLSEKFLFFATSVAMKLLKDKIKHYYVPDFKLAVDHFCIQPGGRAVIDELEKNLGLSPIDVEASRSTLHRFGNTSSSSIWYELAYIEPKERLKKGNKGWQIALGLGFKCNSAVWVALNNVKASANSPWEHCIDRYPVKNDSDLSKSKTHVQNGRS

SEQ ID NO: 2357 - protein, 178 aa, Arabidopsis thaliana
MAESQAKSPGGCGSHESGGDQSPRSLHVREQDRFLPIANISRIMKRGLPANGKIAKDAKEIVQECVSEFISFVTSEASDKCQREKRKTINGDDLLWAMATLGFEDYMEPLKVYLMRYREGDTKGSAKGGDPNAKKDGQSSQNGQFSQLAHQGPYGNSQVTFPLFSSHSSNTHHSLLIC

SEQ ID NO: 2358 - protein, 174 aa, Triticum aestivum
  misc_feature (98)..(98): Xaa can be any naturally occurring amino acid
  misc_feature (109)..(109): Xaa can be any naturally occurring amino acid
  misc_feature (120)..(120): Xaa can be any naturally occurring amino acid
  misc_feature (124)..(124): Xaa can be any naturally occurring amino acid
  misc_feature (141)..(141): Xaa can be any naturally occurring amino acid
  misc_feature (150)..(150): Xaa can be any naturally occurring amino acid
MAPTVMASSATSVAPFQGLKSTAGLPVSRRSNGASLGSVSNGGRIRCMQVWPIEGIKKFETLSYLPPLSTEALLKQVDYLIRSKWVPCLDSTSWFIFXREHNASPGVLXDGGYWTMWNCXYFGXTGPTQVINEVEESKKDXPDAYFRIIXSTTSSRAWLNSSPTGSKIRKAKYH

SEQ ID NO: 2359 - protein, 252 aa, Arabidopsis thaliana
MEGIQHPIPRTVEEVFSDFRGRRAGLIKALSTDVQKFYHQCDPEKENLCLYGLPNETWEVNLPVEEVPPELPEPALGINFARDGMQEKDWISLVAVHSDSWLISVAFYFGARFGFGKNERKRLFQMINDLPTIFEVVTGNAKQSKDQSANHNSSRSKSSGGKPRHSESHTKASKMSPPPRKEDESGDEDEDDEQGAVCGACGDNYGGDEFWICCDACEKWFHGKCVKITPAKAEHIKHYKCPSCTTSKKMKA

SEQ ID NO: 2360 - protein, 409 aa, Aspergillus nidulans FGSC A4
MFNKLSGQPESYEKKSLYRFGRTLGAGTYGIVREADCSSGKVAVKIILKRNVRGNERMVYDELDLLQKLNHPHIVHFVDWFESKDKFYIVTQLATGGELFDRICEYGKFTEKDASQTIRQVLDAVNYLHQRNIVHRDLKPENLLYLTRDLDSQLVLADFGIAKMLDNPAEVLTSMAGSFGYAAPEVMLKQGHGKAVDIWSLGVITYTLLCGYSPFRSENLTDLIEECRSGRVVFHERYWKDVSKDAKDFILSLLQVDPAQRPTSEEALKHPWLKGESASDRDLLPEIRAYIARSRLKRGIEIIKLANRIEALKMQEEDEEDIPSAVDVQASEASDKSGLSPFPALSTENSNTHPASTGNGESGGTKKRSLSKIARGAIFREVVLAKVREMKENEEREKVEREARERAHS

SEQ ID NO: 2361 - protein, 210 aa, Triticum aestivum
  misc_feature (47)..(47): Xaa can be any naturally occurring amino acid
  misc_feature (88)..(88): Xaa can be any naturally occurring amino acid
MEEEDQELYGQKTPVDAEDVNRAAGGDAAARLQDLEKMSRLLKRMEXEDAAPRDKMPKELQREMRGRAPSAHISEEKKRMVFLLFLCXDVYSACTPEEEQQPAFSSLADPSTTFTTDKFGQPKGFAYVEFVEAEAIQEAVKLSESELHGRQIKVAPKRTNVPGLKQPRGGRGFNPYGGHPYMRPYPPPFYNPYGGYGRAPRFRRPRRPFY

SEQ ID NO: 2362 - protein, 244 aa, Triticum aestivum
  misc_feature (116)..(116): Xaa can be any naturally occurring amino acid
  misc_feature (152)..(152): Xaa can be any naturally occurring amino acid
  misc_feature (158)..(158): Xaa can be any naturally occurring amino acid
  misc_feature (176)..(176): Xaa can be any naturally occurring amino acid
  misc_feature (193)..(193): Xaa can be any naturally occurring amino acid
  misc_feature (219)..(219): Xaa can be any naturally occurring amino acid
MCGILAVLGCADDTQGKRVRVLELSRRLKHRGPDWSGMHQVGDCYLSHQRLAIIDPASGDQPLYNEDKSIVVTVNGEIYNHEKLRAQLSSHTFRTGSDCEVIAHLYEEHGENFIDXLMGFSSLVIHATQFLCRDAGSTPLWIAVEAKPLYIXWGIDGXSVGISSEMKGLNDDCGHXEIFPPGHLFSQEGGKVXRFDPPPWVLESSSLRGLYNPFSPRKXFQKGLSQRGLMRDLPCGVLPSGGAC

SEQ ID NO: 2363 - protein, 113 aa, uncultured Rickettsia sp.
ANEAVINMLKEIGSSEYIPRYIAKAKDKNDPFRLMGFGHRVYKNYDPRAAVLKETCKEVLKELGQLDNNPLLQIAIELEAIALKDEYFIERKLYPNVDFYSGIIYKAMGIPSQ

SEQ ID NO: 2364 - protein, 418 aa, Pseudomonas aeruginosa PAO1
MGYQKIQVPATGDKITVNADMSLSVPKNPIIPFIEGDGIGVDISPVMIKVVDAAVEKAYKGERKIAWMEVYAGEKATQVYDQDTWLPQETLDAVRDYVVSIKGPLTTPVGGGIRSLNVALRQQLDLYVCQRPVRWFEGVPSPVKKPGDVDMVIFRENSEDIYAGVEWKAGSPEAEKVIKFLTEEMGVKKIRFTENCGIGIKPVSQEGTKRLVRKALQYAVDNDRSSVTLVHKGNIMKFTEGAFKDWGYEVARDEFGAELLDGGPWMQFKNPKTGKNVVVKDVIADAMLQQILLRPAEYDVIATLNLNGDYLSDALAAEVGGIGIAPGANLSDSVAMFEATHGTAPKYAGQDKVNPGSLILSAEMMLRHMGWTEAADLIIKGTNGAIAAKTVTYDFERLMDGATLLSCSEFGDAMIAKM

SEQ ID NO: 2365 - protein, 113 aa, uncultured Rickettsia sp.
ANEAVINMLKEIGSSEYIPKYIAKAKDKNDPFRLMGFGHRVYKNYDPRAAVLKETCKEVLKELGQLDNNPLLQIAIELEAIALKDEYFIERKLYPNVDFYSGIIYKAMGIPSQ

SEQ ID NO: 2366 - protein, 208 aa, Vibrio harveyi
LAPHREEIGKNIRTMIMGIPNVGKSTIINALAGRTIAVTGNQPAVTRRQQRINLQNGIVLSDTPGILWPKVENPHSGFRLAATGAVKDTAMEYDEVAFYTVEYLAAHYPEKLKERYQIDELPESDIEIMEEIGRRRGALRAGGRVDLHKVSEILLHELRQGTLGQITLELPEMITQELIEVEIETARKEEEKAKRKEERRKRYLRNKR

SEQ ID NO: 2367 - protein, 213 aa, Zea mays
MGCFHSTAKRQHPGYEDPVHLASQTAFSVSEVEALFELFKSISGSVIDDGLINKEEFQLALFKNQRKENLFANRIFDLFDVKKRGVIDFGDFVRALNVFHPNIPMEEKVDFSFKLYDMDSTGFIERKEVKQMLIALLGESEMRLSDEIIETILDKTFSDADANQDGKIDRTEWENFVTRNPSLMKIMTLPYLKDITTTFPSFVFNSEVDDLVT

SEQ ID NO: 2368 - protein, 128 aa, Brassica oleracea var. alboglabra
DPFEGLLTPSSARDMAAFTNARVDWKETPEAHVFKADLPGLMKEEVKVEVEDKNILQISGERSKENEEKNDKWHRLERASGKFMRRFKLPENAKMEEVKATMENGVLTVTVPKAPEKKPEVKSIDISG

SEQ ID NO: 2369 - protein, 347 aa, Anabaena variabilis ATCC 29413
MNREELLQETVQPIDIKAFDVVGLVEAMSKTAFQGRNLGRAAKIYDAMLQDKECTIILCLAGSLFSAGLKGIVHDLITHNMVDAIVSTGANIVDQDFFEALGYRHYVGDPFADDEVLRQQRIDRIYDTYIDEDQLRVCDMTIAEIAENLEKRPYSSREFIEQMAVYLERRGNYGQSVVQAAYQHQVPIFVPAFSDCSAGFGLVHHQWNSPESHVTIDSVRDFRELTQCKLASNYTGLVMIGGGVPKNFAQDTVVAAELLGFETSMHKYTIQVTVADERDGALSGSTLKEAHSWGKVDKATEQMVFSEATVALPLIAGYAYHKGNWRDRQPHRLAQLFTKPQPKVATV

SEQ ID NO: 2370 - protein, 507 aa, Oceanobacillus iheyensis HTE831
MSGNQEVDVLSGKHEELANKLDDIKLYINGEFMDAEDRGTFDNISPFSNEKINSVASGQAADIDKAVQSAKKAFKGEWGNLKQVERLEYVYKIGDLIEQHTDEIAILESLDTGLPISQTRKQVSRSANNFRFYADTVKSQMYGEVYQVDDEFINYTVRSAVGVAGLITPWNAPFMLETWKIAPALATGNTVILKPAEWSPLTANRMAEIIDQAGLPDGVFNIVHGFGETAGDALVKHPDVQLISFTGETTTGSTIMRNGADALKRFSMELGGKSPIIVFEDADLERALDAATWGIFSFNGERCTANSRLYLHESIADEFIEKLKQRVWNIRVGDPLENNTQIGPLIKTEHYNNVKKYLKIAEEEGCEIISGVIPKELNRGNYVAPTILLNASNEMRVVQEEIFGPVIAVMTFNDETEVIEKANDVRYGLAGYVWTNDMKRGHRVAHAIDSGMLWVNSQNVRDLRTPFGGSKDSGIGREGGHYAFEFYTEQKIIHVAIGDHHIPQFGK

SEQ ID NO: 2371 - protein, 221 aa, Glycine max
MGRGKIVIRRIDNSTSRQVTFSKRRNGLVKKARELSILCDAEVGLIVFSSTGKLYDYASTSMKSVIERYNKVKEDHQQLINPASEVKLWQREVASLRQQVQYMQECHRQMMGQELSGLGIEELGNLEKRLEMSLKGVRMKKDQILIDEVKELHQKGSLAHQENVELNRKINLIRKENEELQKVIEAKCRKGVAASNPPFTINYGCNMLAPISLQLSLPEST

SEQ ID NO: 2372 - protein, 169 aa, Hordeum vulgare
MAAAASSASSVHDFTVKDASGKDVDLSTYKGKVLLIVNVASQCGLTNSNYTELAQLYEKYKDQGFEILAFPCNQFGGQEPGTNEEIVQFACTRFKAEYPIFDKVDVNGDNVAPVYKFLKSSKGSLFGDNIKWNFSKFLVDKDGNVVDRYAPTTSPLSIEKDIKKLLASS

SEQ ID NO: 2373 - protein, 131 aa, Glycine max
  misc_feature (102)..(102): Xaa can be any naturally occurring amino acid
  misc_feature (125)..(125): Xaa can be any naturally occurring amino acid
MAPLMISSPAATTGNRALAYVGAPFTDLKYMAGLRTRNTNTDITSIASNGGRVQCMQAWPPIGKKKFETLSYLPDLDDAQLTKEVAYLLRNGWIPCLAFELXTGSLYREHITSPGYYDRRYWTCXKLSMFG

SEQ ID NO: 2374 - protein, 347 aa, Listeria monocytogenes EGD-e
MKNTIKWIAIGFAGIILLPLLIVFFIYKKAVGKKDYNPEVLENLDKASQEFVKNTSPLSDVDSRYKYMRLATKALPSAKDIEIGDVENKKIDGPAGKIPIRIYTPQEDGPFEIIVYYHGGGFVLGGLQTHDAIARKLVQTTGARVVTVDYRLAPENPFPAAVEDAYAALLWVQNHRTSLRAKSSDIIVAGDSVGGNLATVVTQIAKSKGKPNITAQILLYPATDIFSRDASVLYPSMDEFAEGYVLTKESLDKFFKLYIANASDRKYDPLVAPIRSKDLVGLPKTFIATAEFDPLRDQGEAYAKKLKDAGVEVFAKRFEKVPHGFMTTNSEATDETYELISEFLEEK

SEQ ID NO: 2375 - protein, 267 aa, Shigella flexneri 2a str. 2457T
MAIPAFGLGTFRLKDDVVISSVKTALELGYRAIDTAQIYDNEAAVGQAIAESGVPRHELYITTKIWIENLSKDKLIPSLKESLQKLRTDYVDLTLIHWPSPNDEVSVEEFMQALLEAKKQGLTREIGISNFTIPLMEKVIAAVGAENIATNQIELSPYLQNRKVVAWAKQHGIHITSYMTLAYGKALKDEVIARIAAKHNAIPAQVILAWAMGEGYSVIPSSTKRKNLESNLKAQNLQLDAEDKKAIAALDCNDRLVSPEGLAPEWD

SEQ ID NO: 2376 - protein, 485 aa, uncultured bacterium 582
MREVKGYWQNYIDGAWVDGGAGRIDVINPGTGEKIAEQALADARDVDLAVQAAKRVHSTGVLTDMRPVERGRIVQAMGRYLLEHLEEIAALLSLEQGKPIWEARIEVTGAARYFEYYGNQAETLEGRSIPLGAGYFDFTTDEPYGVSAQIIPWNFPVEMTARSLSAALTTGNTVVVKPPEMTPLSNAWFAHAAEAVGLPKGAVNLVCGYGHQAGAALSAHPDINQVVFTGSVATGIAIASAAAKNVVPCVLELGGKSAAIVHSDADLVAMETDIRKGIFINAGQVCSAMSRIIVHESRHDELVQRAVSIAESLSVGPGADRQTFGANMGPMVSVKQRDRAAGLVSEAVSQGAKLVTGGRAMNIPGAFLQPTVLAEVTPEMTIAQTEVFGPVLSVLRFREDAEAIEIANGTDYGLVGGVFTRDLDRATQVARKIRAGQVFVNEWFAGGVETPFGGYGKSGYGREKGREALWNYVQTKNIAIKLKRT

SEQ ID NO: 2377 - protein, 175 aa, Oryza sativa (japonica cultivar-group)
MAPSVMASSATTVAPFQGLKSTAGMPVARRSGNSSFGNVSNGGRIRCMQVWPIEGIKKFETLSYLPPLTVEDLLKQIEYLLRSKWVPCLEFSKVGFVYRENHRSPGYYDGRYWTMWKLPMFGCTDATQVLKELEEAKKANPDAFVRIIGFDNVRQVQLISFIAYKPPGCEESGGN

SEQ ID NO: 2378 - protein, 330 aa, Triticum aestivum
  misc_feature (143)..(143): Xaa can be any naturally occurring amino acid
MAAAGDDDLQLQHAAVPIPCVTLNTGHAMPVLGFGTGSSRAPADLPDTIVHAVRLGYRHLDTAAMYGTEPAVGVAVAEAVRSGAGGISSREDLFVTSKLGIPDARPGRVVPALRESLGRLGVDYLDLFLVHWARRRRQPRGQXSTHTEFDMEGVWRGMEECHRLGLARSVGVSNFSAAKMERLLALAAVPPAVNQVELNVGWRQEKVREVCARHGVVVAAYSPLGAYGAFWGSDAVMHSGVMHDVAAAKAKTVAQVALRWVYEQGVCFVARSFNKERLKQNMDIFVDWELSDEDKAMIATIPQKRACQGDYFVSPDGPYKSLEELWDGEM

SEQ ID NO: 2379 - protein, 431 aa, Azoarcus sp. EbN1
MSTERTATLTVDGKTVEFPVMTGTHGNDVIDIRTLGAKTGFFTYDSGFLSTASCKSTITFIDGDKGELLYRGYPIEQLADKCSFLEVAYLLKNGELPNGTQKVEFENTIKNHTMLHDQMTKFFTGFRRDAHPMAVMVGVVGALSAFYHEAMDFSDSEHRNISINRLIAKLPTIVAMAYKYNMGQPFMYPRNELDYTANFMHMMFGTPCEEYKPNPVLVRALDTIFTLHADHEQNASTSTVRLAGSSGANPFACISAGIACLWGPAHGGANEACLNMLEEIGDVSRVGEYIARAKDKNDSFKLMGFGHRVYKNFDPRAKLMRQVCYDVLGELGLENDRLFKLAMELEKIALEDQYFVEKKLYPNVDFYSGIVQKALGIPTSMFTCIFALARTVGWITQWEEMITDPEYKIGRPRQLYIGAARRDVPTLAQRP

SEQ ID NO: 2380 - protein, 280 aa, Thalassiosira weissflogii
PHSFPPHSVALQVLGTFILWFGWYGFNPGSTLGISGEGVPDVAALCAVTTTIAAASGSVSAMFTDMLPSRRSTGETMYDITMCMNGALSGLVGITAGCSVVEPWAAFVIGIVAGWTYIFWSALLVKLKIDDAVDAIPVHFGNGIWGCIAVGLFAEPTRTINAFGEHGHYGRFYSWGNGSADAHLLAAQVCGVLWIIGWVTVIMLPYFLILNAIGLFRVDALEEEVGLDISHHKGAAYDMSGPSADVQEKFEISRSQRKIRFPRRTLMKQPKQATLQLLDF

SEQ ID NO: 2381 - protein, 143 aa, Brassica napus
  misc_feature (23)..(24): Xaa can be any naturally occurring amino acid
  misc_feature (26)..(26): Xaa can be any naturally occurring amino acid
  misc_feature (28)..(29): Xaa can be any naturally occurring amino acid
  misc_feature (31)..(32): Xaa can be any naturally occurring amino acid
  misc_feature (34)..(34): Xaa can be any naturally occurring amino acid
  misc_feature (39)..(39): Xaa can be any naturally occurring amino acid
  misc_feature (49)..(49): Xaa can be any naturally occurring amino acid
  misc_feature (53)..(53): Xaa can be any naturally occurring amino acid
  misc_feature (58)..(64): Xaa can be any naturally occurring amino acid
  misc_feature (66)..(66): Xaa can be any naturally occurring amino acid
  misc_feature (70)..(71): Xaa can be any naturally occurring amino acid
  misc_feature (78)..(78): Xaa can be any naturally occurring amino acid
  misc_feature (82)..(83): Xaa can be any naturally occurring amino acid
  misc_feature (87)..(87): Xaa can be any naturally occurring amino acid
  misc_feature (89)..(90): Xaa can be any naturally occurring amino acid
  misc_feature (93)..(94): Xaa can be any naturally occurring amino acid
  misc_feature (96)..(96): Xaa can be any naturally occurring amino acid
  misc_feature (103)..(106): Xaa can be any naturally occurring amino acid
  misc_feature (109)..(109): Xaa can be any naturally occurring amino acid
  misc_feature (111)..(116): Xaa can be any naturally occurring amino acid
  misc_feature (118)..(118): Xaa can be any naturally occurring amino acid
  misc_feature (126)..(126): Xaa can be any naturally occurring amino acid
  misc_feature (131)..(132): Xaa can be any naturally occurring amino acid
  misc_feature (134)..(134): Xaa can be any naturally occurring amino acid
  misc_feature (141)..(141): Xaa can be any naturally occurring amino acid
NVKRKEEEEVVVASSMLSSAAVXXSXAXXTXXAXFTGLXASAAFPVTRXAYNXITSIXXXXXXXSXMKVXXPVEKKKXETLXXLPDXTXXELXXEXDYLLRNXXXXCGXFXXXXXXVXREHGNTPXYYDGXXWXMWKLPLXGC

SEQ ID NO: 2382 - protein, 146 aa, Treponema denticola ATCC 35405
MNSLSLFSPSFTDSVFDALDRSLGPNFGVFAPIKNASCGMPSVDIRETEKAYVMEVDLPGYSEKDVEISLKDRLMTISSSKKEEKEDKGAEYIIKERSSRHFMRRFTLPEDINSDEVSAKFENGVLVVNIPRKPDTQPKQIEIKTA

SEQ ID NO: 2383 - protein, 484 aa, Dechloromonas aromatica RCB
MKQILNFINGEFVATGKQFEKRTPLDNSLIGMVHEAGKAEVDAAVKAAHDALEGPWGKMTVVERTDILNKVADEITRRFDEFLEAECADTGKPKSLASHIDIPRGAANFKIFADVIKNAPTEFFEMATPDGKGALNYAIRRPVGVVGVVCPWNLPLLLMTWKVGPALACGNTVVVKPSEETPSTATLLGEVMNACGVPKGVYNVVHGFGPNSAGEFLTTNQNVNAITFTGETRTGAAIMKAAADGARPVSLEMGGKNPAIVFADANLDVAIEATLRSCFSNCGQVCLGTERVYVERPFFETFVAALKAGAEKLKLGVPSDPSANMGPLVSQEHRNKVLSYYKKAVEEGATVVTGGGIPDMPGELANGAWVQPTIWTGLDDNAAVVREEIFGPCTTVMPFDSEDEVIKRANNTTYGLAASVFTQDVNRAHRVAGRIEAGLVWVNSWFLRDLRTPFGGAKQSGIGREGGVHSLEFYTELKNVCIKL

SEQ ID NO: 2384 - protein, 292 aa, Zea mays
  misc_feature (124)..(124): Xaa can be any naturally occurring amino acid
  misc_feature (168)..(168): Xaa can be any naturally occurring amino acid
EDYYNPNFAVEDARGPREPWDDLHSKIDGPEAYDVLKNFEERWLKASKRSAAKKLSKLSRSHNDSLLWINKIPDIIAIDDEIYSNDDDPERWDMQIFRSIDSNSVKGFPKDPREATSKNLVCGXNVLIDMSVHTTYVNAIRGAQHFIYIENQYFLGSSFNWDSHRDVXKMTMQIMYEIIYKAMKEVGLDGTYEPQDYLNFFCLGNREAEDTTCTSSGPFSTTWISNQDQARNNRRFMVYVHSKGMIVDDEYVIIGSANINQRSMEGTRDTEIAMAAYQPQHTLANMLSAPRG

SEQ ID NO: 2385 - protein, 184 aa, Aspergillus nidulans FGSC A4
MSNKFKITDLLPLPNSSVKIPRLGFGVYRSPATQTKQSVLKALETGYRHIDTAQFYANEKEVGDAIHESGLPRSEIFVTTKILAPAGSPEATYEKIIESVNKIGGKDGYVDLFLIHSSSSGSSGRKELWQALEKLLEEGRTKSIGVSNFGVKHIEEMKEYAKVWPPHVNQIEVGFQEFSAPEAC

SEQ ID NO: 2386 - protein, 384 aa, Zea mays
  misc_feature (102)..(102): Xaa can be any naturally occurring amino acid
PLWVDVLRATLRHGLAPRVWTDYLRLTVGGTLSNAGIGGQAFRHGPQIANVHELDVVTGTGEMVTCSMDVNSDLFMAALGGLGQFGVITRARIRLEPAPRRXRWVPLAYTDVATFTKDQEFLISNRASQVGFDYVEGQVQLSRSLVEGPKSTPFFSGADVARLAGLASRTGPAAIYYIEGAMYYTKDTAISVDKVQKMKALLDQLSFEPGFAFTKDVTFVQFLDRVREEERVLRSAGAWEVPHPWLNLFVPRSRILDFDDGVFKALLKDSNPAGIILMYPMNKDRWDDRMTAMTPATNDDDVFYAVSFLWSALSADDVPQLERWNKAVLDFCDRSGIECKQYLPHYTSQDGWRRHFGAKWSRIAELKARYDPRALLSPGQRIFP

SEQ ID NO: 2387 - protein, 316 aa, Pseudomonas putida KT2440
MIDAVVVSRNDEAQGICSFELAAADGSLLPAFSAGAHIDVHLPDGLVRQYSLCNHPEERHRYLIGVLNDPASRGGSRSLHEQVQAGARLRISAPRNLFPLAEGAQRSLLFAGGIGITPILCMAEQLSDSGQAFELHYCARSSERAAFVERIRSAPFADRLFVHFDEQPETALDIAQVLGNPQDDVHLYVCGPGGFMQHVLDSAKGLGWQEANLHREYFAAAPVDASNDGSFAVQVGSTGQVFEVPADRTVVQVLEENGIEIAMSCEQGICGTCLTRVLQGTPDHRDLFLTEEEQALNDQFTPCCSRSKTPLLVLDI

SEQ ID NO: 2388 - protein, 178 aa, Triticum aestivum
  misc_feature (100)..(100): Xaa can be any naturally occurring amino acid
  misc_feature (109)..(109): Xaa can be any naturally occurring amino acid
  misc_feature (131)..(131): Xaa can be any naturally occurring amino acid
  misc_feature (137)..(137): Xaa can be any naturally occurring amino acid
  misc_feature (149)..(149): Xaa can be any naturally occurring amino acid
MAPTVMASSATSVAPFQGLKSTAGLPVSRRSNGASLGSVSNGGWIRCMQVWPIEGIKKFETLSYLPPLSTEALLKQVDYLIRSKWVPCLEFNKVGFIFRXEHNASPGVXYNGRYWTMWKLPMFGCTDATQXINEVEXVKKGVPDAYVRXIGFQKMLKVQWRQLHPSNQPGAKESRQRP

SEQ ID NO: 2389 - protein, 503 aa, Burkholderia cepacia R18194
MLNESLATTDHAPLRRYEHLYIDGAWVKPIDGELAESIDPATGQPWAIAPMGGPQDIDRAVEAARTAFHGTWRSTPGHVRAALLRRLADLFSAAIPELAIIESRDNGNLVREHRASLTAQVQWYQWFASLADKAQGATIPIDDSVHAFTTRVPIGVVGAIIPWNAPLLATCLKVGAALAAGCTVVVKPAEQTPVSALELARLVHEAGFPPGVFNVVPGYGRTAGAHLVKHPDVNKISFTGASQTAKHMVRDGADNLKRFTFELGGKAPHILFADADLDNAINAATASAWRLTGQSCALGSRVLVERPIYDRVVEAFRTRAKAVRVGLPSIDSNHMGPQSHETQLAKTLSYVDAGKQDGAELVTGGRRITTPELAAGYFVEPTVFAGVTNQMRIAREEIFGPIASLIPFDGEDEAIAIANDTPYGLTAGLWTRDVGRAHRVSNRIDAGMVWVNTYSFLRWSTPYGGFKASGWGRENGIDALDPYLETRTTVISTTGQFPNLYED

SEQ ID NO: 2390 - protein, 194 aa, Suillus bovinus
MHNIKCVVVGDGAVGKTCLLISYTTNAFPGEYVPTVFDNYSANVMVDGKTISLGLWDTAGQEDYDRLRPLSYPQTDVFLICFSLVSPPSYENVRTKWWPEISHHAPSTSVVLVGTKLDLREDPATIEKLRDRRMQPIQYTQGVSMARDIGAVKYLECSALSQKGLKTVFDEVIRAVLNPPPKEKKRSGRGCVIV

SEQ ID NO: 2391 - protein, 250 aa, Pimpinella brachycarpa
MGKCYPTVSEEYKVAVEKCRRKLRGFIAEKNCAPLMLRLAWHSAGTYDVKTKTGGPFGTMRQKLEQSHAANNGLDVAVRLLEPFKEQFPIISYGDLYQLAGVVAVEITGGPDVPFHPGRPDKDEPPQEGRLPNATLGNDHLRNVFVKTMGLSDKDIVTLSGGHTLGRAHKERSGFEGPWTSNPLIFDNSYFKELLTGEKEGLLQLPTDKSLLEDPVFRPLVDKYACDEDAFFADYAESHMKLSELGFAEA

SEQ ID NO: 2392 - protein, 175 aa, Triticum aestivum
MAPAVMASSATTVAPFQGLKSTAGLPVSCRSGSTGLSSVSNGGRIRCMQVWPIEGIKKFETLSYLPPLSTEALLKQVDYLIRSKWVPCLEFSKVGFIFREHNASPGYYDGRYWTMWKLPMFGCTDATQVINEVEEVKKEYPDAYVRIIGFDNMRQVQCVSFIAFKPPGCEESGKA

SEQ ID NO: 2393 - protein, 123 aa, Dianthus caryophyllus
MITIHHPWVFAFGLLGNFISFMVFLAPLPTFIRVYKKKSTEGFQSFPYVVAIFSAMLWIYYALLKGNSLLLITVNVTGVIIETIYVIIFITYAPRQARISTMKLLLFMNFGGFCMIVPRPRPR

SEQ ID NO: 2394 - protein, 435 aa, Streptomyces coelicolor A3(2)
MTGRFEFMHQSSHPDRPTTPADDWSGANAAHLAAPARIAAAPASVTDEDVALVRASLTVVTPHVSELAAHFYSILFSRYPQVRDLFPAELDVQRERLVRALLRIVELVDDPDNLVAFCSRLGRGHRKFGTQSGHYPAVGECLLQALSHFAGPAWHPALATAWQRAYTAAADVMVRAAEEDARSRPAVWDAHIVGHVHRGHGIAEITVRPHQPYPFVAGQYVSIETPWAPRQWRQYSPANAPRPNSELTFHVRAVREGKVSNALVHHARPGDPVRLGPPEGDMVLRPTRQRDLLFVAGGTGLAPIRALIEEVAQGSISDAREVSLFIGARTANELYGLDDMLRMSQRYHWLRVRAAVSDERIPGLEGTLPEVLAEFGPWYRHEAYLCGPPQMLSGAVHALRRHGVPPRHIHYDPWDTPVLTAPLGPPPPDEEDDQL

SEQ ID NO: 2395 - protein, 130 aa, Pimpinella brachycarpa
GTRESKVFYLKMKGDYHRYMAEFKVGDERKNAAEDTMNSYKAAQDIALADLAPTHPIRLGLALNFSVFYYEILNSSDKACSMAKQAFEEAIAELDTLGEESYKDSTLIMQLLRDNLTLWTSDSQDQLDEP

SEQ ID NO: 2396 - protein, 106 aa, uncultured Rickettsia sp.
MLKEIGSSENIPKYIAKAKDKDDPFRLMGFGHRVYKNYDPRAAVLKETCSEVLKELGQLENNPLLQIAIELEAIALKDEYFIERKLYPNVDFYSGIIYKAMGIPSQ

SEQ ID NO: 2397 - protein, 149 aa, Rhodospirillum rubrum
MQVSEIYEVEGGSPGGFGGGGYDRGGYSGGFDRGGYNGGFDRGAADRGGYAGATDRGGYAGGAADRGGYAGGADRGGFQGETEIDGVVKFFSADKGFGFVVPDGGGKDVYVGSRTLQDCGVSVLEQGQRVRMSIRMGKKGPMAGSLELI

SEQ ID NO: 2398 - protein, 507 aa, Candida albicans SC5314
MLILLPIAVIAASIYYIAEYWKRESIKRKYDCQPVKQAPLVTWYDIFGIKALVDNSNLTKSGYFYQDIQRKLDNLDTTTMKTTALGKNQIITIEPENFRTMCSSADLNNWTIGTRPIALKPLLGNGIFSSEGESWKHSRIMLRPIFAKEHIKQITAMESYIQSLIKVIKLQQQGEGEFDLQHLFHCFTIDYATDFLFGESCDCLKSILGETSISTMSEEEKSKFAPNFDVMQYHMTKRLVFGYFSFLVNPPEFKNAVKHLHEFVFHFVDRAINFTDEELNDPSKNYVFLYQLAKQTKDRKVILDELLSVLLAGRNTTASLLSFMFFELAQNKPVWNKLKKEITEHFPDVESITFETIHNCEYLRWCIHESLRINPPVPINTRTANRDTVLPKGGGKGNNYPIFVRKGEQVIFPLFSSNRQERFFGPEPEKYIPERWANLPRNGGVAFGPFGTGPRLCLGQQLALVEASYVTIRLLQTFSQLDSNHTECRRSVGATMRLMDGCQVTLK

SEQ ID NO: 2399 - protein, 287 aa, Glycine max
MSQQVLRPLRQWPWFHHHHHRTCVTLSLHHLLTPPPKTSHRFSFATVAASSRPKVRTPKSPVPPPPTADSDLEEKKSRNQLKREARRTVKWGMDLASFSPPQIKRILRVASSDHLLLFEALMLVKRLGPDVREGRRRQFSYIGKLLREVDPELMERLIKATKDSNQKELQALTGLGPDDPEPEDDDDLVESESEEDEEESNWHDNQVARWFDGLISKDIEITNEIYSVQGVEFDRQELRKLVRRVHNTQEMKADNEEEKKKIETATNGAKKALNRFLRGLSKRIPNE

SEQ ID NO: 2400 - protein, 471 aa, Pyrococcus furiosus DSM 3638
MCLITGGINLTKEEIVKMIITGKHRGPDSFGVWSDGLVIKSEDFSEIKEIRGGNVVLAQCRLAMTGSKNYTQPFYNDIVLVHNGEIYNHESLRKWLIERGASFESDVDSEVILRLLEYFIFDKKMKVEEAVKKAMLMLRGDYAVAFALNGKIYLFRDPIGVRPLYYSPRGRFGSEKKVLWSVGEEAIPVNPGELVKLPEEEKMKLLSPWDIKGSGKGYYDGLKNLLQDAVRIRTAKKVGVLFSGGLDSSLIALLASKYSKVVLYTAGTEDSKDVEWARKVSDELRLELREYIFTREEVEREIKNVMFAIEEPNPMNLAIAIPLYFATKLARKDDVKVLLSGQGADELFGGYAKYLENPSLMRKDIEEIAERNLGRDDKVGMLNGVEVRYPYLDLPFVSLALRVPLEEKIREGVRKAILRRIALDFGLPEEVAFREKKAAQYGSNAQKILSKIAKKSLREFAQKLFSEVFST

SEQ ID NO: 2401 - protein, 525 aa, Zea mays
  misc_feature (110)..(110): Xaa can be any naturally occurring amino acid
  misc_feature (241)..(241): Xaa can be any naturally occurring amino acid
  misc_feature (245)..(245): Xaa can be any naturally occurring amino acid
  misc_feature (274)..(274): Xaa can be any naturally occurring amino acid
MKPPSLVHCFKLLVLLALARLTMHVPDEDMLSPLGALRLDGHFSFHDVSAMARDFGNQCSFLPAAVLHPGSVSDIAATVRHVFSLGEGSPLTVAARGHGHSLMGQSQAAXGIVVRMESLRGARLQVHDGGVSPPSVDAPGGELWINVLRETLKHGLAPKSWTDYLHLTVGGTLSNAGVSGQAFRHGPQVSNVNQLEIVTGRGDVVTCSPDDNADLFYAALGGLGQFGIITRARIALEPAPXMVRXWIRVLNRDEESFTEDQEMLIMAENSFDYXEGFVIKNRTGVLNTWRAFFKPQDPVEASHFQSDGRVLYCREPRGRPGSGDTDTMEQEVTVLLSRLRFIQSTLFHTDVTYLEFLDRVHTSELKLRAQGLWEVPHPWLNLLIPRSSIRRFAKEVFGRILKDSNNGPILLYPVNKSKWDNKTSVVIPDEEIFYLVGFLSSAPSLSGHGSIAHAMSLNSQIVEFCEEADIGMKQYLAHYTTQEQWKTHFGARWETFERRKHRYDPLAILAPGQRIFPKASLPLSL

SEQ ID NO: 2402 - protein, 384 aa, Rickettsia sp. Chad
DSEFAELKIRGKIFKLPILKASIGEDVIDISRVSAEADCFTYDPGFMSTASCQSTITYIDGDKGILRHRGYDIKDLAEKSDFLEVAYLLIYGELPSGEQYNNFTKQVAHHSLVNERLHYLFQTFCSSSHPMAIMLAAVGSLSAFYPDLLNFKEADYELTAIRMIAKIPTIAAMSYKYSIGQPFIYPDNSLDFTENFLHMMFATPCTKYTVNPIIKNALNKIFILHADHEQNASTSTVRIAGSSGANPFACISTGIASLWGPAHGGANEAVINMLKEIGSSEYIPKYIAKAKDKNDPFRLMGFGHRVYKNYDPRAAVLKETCKEVLKALGQLDNNPLLQIAIELEAIALKDEYFVERKLYPNVDFYSGIIYKAMGIPSQMFTVLL

SEQ ID NO: 2403 - protein, 177 aa, Magnetospirillum magnetotacticum MS-1
MVPRHRCLWGPAHGGANEAALKMLMEIGHPENVSKYVAKAKDKNDPFRLMGFGHRVYKNYDPRARIMQKTTHEVLNELGLKDDLLEVAVQLEKIALEDEYFIEKKLYPNIDFYSGITLKALGFPTSMFTVLFAVARTVGWIAQWAEMIEDPSQKIGRPRQLYVGPDRRDYVAIGQRS

SEQ ID NO: 2404 - protein, 416 aa, Claviceps purpurea
MTDIPGRRAFKCFNQEFVVDERYTVTKELGQGAYGIVCAAVNNQTKESVAVKKVTNVFSKKILAKRALREIKLLQHFRGHRNITCLYDMDIPRPDVFNETYLYEELMECDLAAIIRSGQPLTDAHFQSFIYQILSGLKYIHSANVLHRDLKPGNLLVNADCELKICDFGLARGFSADPEQNAGYMTEYVATRWYRAPEIMLSFQSYTKAIDVWSVGCILAELLGSRPFFKGRDYVDQLNQILHVLGTPNEETLSRIGSPRAQEYVRNLPVMPKKNFATLFPQANPHALDLLDKMLAFDPSSRISVEQALEHPYLQVWHDPADEPNCPTIFNFDFEVLDDVGEMRKVILDEVIRFRQMVRTASSAEPTTGQAQTAAAGQVPMPQAGGQWKAEDPRPQENTPQGNGLEQDLQAGLDAA

SEQ ID NO: 2405 - protein, 112 aa, Bartonella sp. St2936co
GPAHGGANEACLKMLQEIGSVKRIPEFIARAKDKNDPFRLMGFGHRVYKNYDPRAKIMQQTCHEVLKELNIQDDPLLDIAIELENIALNDEYFVEKRLYPNVDFYSGITLKA

SEQ ID NO: 2406 - protein, 317 aa, Burkholderia fungorum LB400
MEPELKALIEQLSQAGRRPFWQCTVDDARNAPTLVKRLFPDAPSVERTQDIRISSTRGHAFPARLYVPRDRPCGLIVYLHGGGWVVGSVDDYHPLTATITARSGFAVLSVDYRLAPEHAFPIPLEDARAALEWASSGSAAVAIGADVNCLIVMGDSAGANLATVAARLHNEKNIDRRVDGQVLVYPVTGHDFKTASYDEFAEGNLLTRNDMQWFWDHYCPERAARANPLASPLEAEDLSMSPPALVMTAGRDPLRDEGEAYGARLRKAGVDVAVVRCDGLVHGFLAMIHQVPGAARAFDRIVDYITRLGEAVPEARR

SEQ ID NO: 2407 - protein, 124 aa, Glycine max
MSSEAETQQPPAAPPVAPALSAADTKPGTTGSGAGSGGPGGLTSAAPAGGDKKVIATKVLGTVKWFNVRNGYGFINRNDTKEDVFVHQTAIKKNNPRKYLRSVGDGETVEFDVVEGEKGAEAAN

SEQ ID NO: 2408 - protein, 484 aa, Agrobacterium tumefaciens
MIKLKNAALLRDACLVNGRWLKAADGKTIAVENPANSMIIGHVPSLSADEVEAAVESANKAFSEWSRRAAKDRAAILRRWFDLMVANADDLGALMTAEQGKPFAEARGEALYAASFVEWFAEEAKRVYGDTIPSPTTDKRITILKQPIGVCAAITPWNFPAAMITRKAAPALAAGCTMIVKPAEQTPLTALALGVLAEEAGVPAGVFQVVTGAARDIGKVFTESDTVRKISFTGSTEVGRLLMAQSAPTIKKLSLELGGNAPFIVFDDADLDAAVEGAIVSKYRNAGQTCVCSNRIYVQDGVYDAFAEKLVKRVESLSVGEGTEPGVLIGPLIDQDAVAKVEDHVADALGKGAKIVTGGKRHALGGTFYEPTVLTGATQAMKVAREETFGPVAPLFRFGTEDEAVAMANDTEFGLAAYFYTENVRRTWRVAEALEYGMVGHNTGLISNEVAPFGGVKQSGLGREGSHYGIDEYLEIKYLCSAIG

SEQ ID NO: 2409 - protein, 373 aa, Sulfolobus tokodaii str. 7
MEIKKGLEDVYVKETEITYIDGELGRLYYRGYSIYDLAEFSNFEEVSYLILYGKLPNREELNWFQEKLREERYLPDFIIKFLREVRKDAQPMDILRTAVSLLGIEDSKNDERTDIKGIKLISKFPTIVANYARLRKGLDIIEPDPKLSHSENFLYMLYGDRPNEIKSKAMDVTLILHIDHEMNASTFASLVVASTFSDLYSSIVAGISALKGPLHGGANYEALKMFKEIGSPEKVNDYILNRLSNKQRIMGFGHRVYKTYDPRARILKQYAKLLAEKEGGEIYTLYQIAEKVEEIGIKYLGPKGIYPNVDFFSSIVFYSLGFEPDFFPAVFASARVVGWVAHIMEYIKDNKIIRPKAYYKGEIGKKYIPIDSR

SEQ ID NO: 2410 - protein, 312 aa, Triticum aestivum
  misc_feature (80)..(80): Xaa can be any naturally occurring amino acid
ISKDRKATSRRSNPSGRRRGEGASRLACGRVGLSARHAAPMPPPRRAAGDTSAFFVATLVLWAVSVGFEIGARGRRELAXPVAAGCAFFQAANTAAVSRDPLFVNTAVSLLHSSLTSASVIFVLLCQWRTKGLENMFQHEELVGSSWIGAYSALCFSCGYFAYDQLDMLRYRLYSGWIPGILMHHLILLICFTLALYRNVTINYLILTLLCEMHSIFLHVRKLRRMAGFRDFNRKLVKLEWVLNWTTFVTARVICHILITYRLITDAHKFDKGIELPLALSGMAGMNVLNVSLGLDLFKAFARERNQQTHQD

SEQ ID NO: 2411 - protein, 322 aa, Pediococcus pentosaceus ATCC 25745
MKRIGIMTSGGDAPGMNLAIRAVARKALSSGLEAYGINYGFAGLVAGDIHEFKAADLDDMVSQGGTMLYSARYPEFAQEESQLKGIEQLKKFGIDALVVIGGDGSYHGALRLTEHGYNTIGLPGTIDNDIPFTDFTIGFDTALNTAVDAIDKIRDTAKSHQRVFAVQVMGRNAADIALWAGVASGADAVIAPGFDYDVEAIANKLKKNRANGKDYGIIVIAEGDANSDAAPEFIDQLKQYGDFDARATVIGHVQRGGVPSAKDRVLASKMGAYAVELLLEGKGGLAVGILENKVQAHNMLDLFDAKHQADDSLYQLSEDLSF

SEQ ID NO: 2412 - protein, 294 aa, Schizosaccharomyces pombe
MPFIKAVKSSPYFSRYQTKYRRRREGKTDYYARKRLIAQAKNKYNAPKYRLVVRFSNRFVTCQIVSSRVNGDYVLAHAHSSELPRYGIKWGLANWTAAYATGLLVARRALAKVGLADKYEGVTEPEGEFELTEAIEDGPRPFKVFLDVGLKRTSTGSRVFGAMKGASDGGLFIPHSPNRFPGFDIETEELDDETLRKYIYGGHVAEYMEMLIDDDEERYQKQFSGLIADGIESDQLEDIYAEAYAKIREDPSFQKSGKDAAAFKAESLKHTQRKLTAEERKERFNAKVIEAGRA

SEQ ID NO: 2413 - protein, 342 aa, Pyrobaculum aerophilum str. IM2
MRIFKTPGPIKYINCLLTAAMYFPGLEGVVVKETKICHIDLENSKIYYRGYDLEELAQYSTFEEVAYLLWFGKLPAGAELERFKAELMMYRKPPEHVDEAVKIAPKNAEPIDVLRTAVSAMALGEDLSDRSPEAELVRGLKITAAMPYIVASFDRLRRGSQPLHPGEAKSHAEYFLWALRGERPGEREVRALDVMLIIYAEHSMNNSAFTAVTVASTLSDMYAAITAAIASLKGPLHGGANVDAAKMLEEIGDAKRVESWVDQQLSRGRRIPGFGHRLYKKGPDPRLRVLRKLARDLASEKGDFKWVELAERLEEYVTAHLSQKGIYPNTDLYAAVIFKYLG

SEQ ID NO: 2414 - protein, 203 aa, Triticum aestivum
  misc_feature (120)..(120): Xaa can be any naturally occurring amino acid
  misc_feature (153)..(153): Xaa can be any naturally occurring amino acid
MFIKRTSSTRRHTPPHLPPDSGGSSEMSDTDEHHFESKADSGASKTYPQQAGAIRKGGHIVIKARPCKVVEVSTSKTGKHGHAKCHFVAIDIFNGKKLEDIVPSSHNCDVPHVDRQDYQXLIDITDDGYVSLLTESGNTKDDLKLPTDDVLLXKIKTGFADGKDLDPVCGCPPWVKEQICAVEGNGGGKLAAVRGLLPAILGI

SEQ ID NO: 2415 - protein, 386 aa, Aspergillus flavus
MTGLDMEIIFAKIKEEYARTDDVGKRKIQGHIRELQVGFYSDWDVVMRLSSGPLQVALAKVGIDLGIFRSLKKSDTPITLAEFVKKTGASPRLLGRILRTQAAFGLIKETGPQEYTSSAFTDVFANPAAAGAVVQLFDISGPCTQILPDFLAERHYQDITSNKDCVFQKAFDSDLTMFEWMPQHPKHMESLGHLMALERPVSWVDHFPVLEELGDFPAPDKVLMVDIGGGFGQQSKALRAKFPNIPGRVIVQDIPQTLANAQPAAGVEFMEHNFFEPQPIRNAKFYYLRHVFHDWPDEQCVLILKQIIPVMGPESQILIDEMVIPSTGVPWQAAFTDLLMMNSLGGVERTRAEWDDLMKQAGLEIIQSKVYDSKEQTILVAVPRRT

SEQ ID NO: 2416 - protein, 428 aa, Bacillus thuringiensis serovar konkukian str. 97-27
MNYLFKNGRYMNEEGKIVATDLLVQDGKIAKVAENITADNAEVIDVNGKLIAPGLVDVHVHLREPGGEHKETIETGTLAAAKGGFTTICAMPNTRPVPDCREHMEDLQNRIKEKAHVNVLPYGAITVRQAGSEMTDFETLKELGAFAFTDDGVGVQDASMMLAAMKRAAKLNMAVVAHCEENTLINKGCVHEGKFSEKHGLNGIPSVCESVHIARDILLAEAADCHYHVCHVSTKGSVRVIRDAKRAGIKVTAEVTPHHLVLCEDDIPSADPNFKMNPPLRGKEDHAALIEGLLDGTIDMIATDHAPHTAEEKAQGIERAPFGITGFETAFPLLYTNLVKKGIITLEQLIQFLTEKPADTFGLEAGRLKEGRTADITIIDLEQEEEIDPTTFLSKGKNTPFVGWKCQGWPVMTIVGGKIAWQKESALV

SEQ ID NO: 2417 - protein, 506 aa, Ralstonia solanacearum
MRYAHPGTPGAVVSFQSRYGNYIGGRFVPPVKGQYFTNTTPVTGEAIAEFPRSTAEDIDRALDAAHAAADAWGRTSAQDRSLILLKIADRIEQNLERLAVTETWDNGKPIRETLNADIPLAADHFRYFAGCIRAQEGAAAEINEHTVAYHIHEPLGVVGQIIPWNFPLLMAAWKLAPALAAGNCIVLKPAEQTPLGICVLLELIGDLLPPGVLNVVHGFGKEAGEALATSKRIAKIAFTGSTPVGSHILKCAAENIIPSTVELGGKSPNIYFEDIMQAESSFIEKAAEGLVLGFFNQGEVCTCPSRALVQESIYGSFMDAVMAKVAAIKRGDPLDTETMVGAQASEQQFNKIRTYLEIAREEGAECLAGGEAEAMSGKLANGYYIKPTLLKGHNNMRVFQEEIFGPVIAVTTFQDEAQAIQIANDTEYGLGAGVWTRDINRAYRVGRAIKAGRVWTNCYHLYPAHAAFGGYKKSGVGRETHKMMLDHYQQTKNLLVSYDTRPLGFF

SEQ ID NO: 2418 - protein, 319 aa, Burkholderia cepacia R18194
MGGLTVRVAAKREEAVGICSFELVSTDGQPMPAFSAGSHIDVAVPGGPTRQYSLCNAPEEGHRYQISILRDPNSRGGSAGMHDRVQVGDALAISVPKNNFPLAHDATRSLLMAGGIGVTPILCMAERLAAIGAPFEMHYCSRSRARTAFLDRISRATYARHVQFHFDDQPDTPAFDIAARLARPESGTHLYVCGPTGFMDAVLGAARAAGWPEAQLHYEFFAAGERVAADSDRFEVEVASSGQVVTVEEDESIVQALARVGIEIETSCEQGVCRTCETRVLAGEPDHRDVCLTPAERADNDRLMPCCSRSKSARLVLDL

SEQ ID NO: 2419 - protein, 104 aa, uncultured Rickettsia sp.
MLKEIGSSEYIPRYIAKAKDKNDPFRLMGFGHRVYKNYDPRAAVLKETCKEVLKELGQLDNNPLLQIAIELEAIALKDEYFIERKLYPNVDFYSGIIYKAMGIP

SEQ ID NO: 2420 - protein, 459 aa, Mesorhizobium loti MAFF303099
MTYQNYSLKQLQQIDAAHHLHPFTDHKELREAGSRIITHANGPFIYDSEGTELLDGMAGLWCVNIGYGRDELAEAAYAQMKELPYYNSFFKCSTPTPVLLSKKLAEIAPKNVNQVFYGSSGSEANDTALRLVRHYWVIEGKPEKNRVISRKMAYHGSTIAGTSLGGMDAMHKQLNGAVPNIVHVMMPYAYELALPGESDHDFGLRAAKSVEDAILEAGVDKVAAFIGEPVMGAGGVKIPPASYWPEVQRICRKYDVLLMLDEVITGYGRTGEWFAAQTFGIEPDTITTAKALTSGYQPLSALLVGDRITSTLVEKGGEFNHGYTYSGHPVACAVALKNLEIIEQEGLVDRVRNDTGPYFAKALQECIAGHDLVGEVRSIGLMGAIEIVKDKATKERFLPSGSAAVTVRDHAIANGMMLRATGDTMILSPPLIWTRDTIDMACERIGKALDLAQADLRKR

SEQ ID NO: 2421 - protein, 418 aa, Solanum tuberosum subsp. andigena
MVRNRREELYVTVPSLFRCPISMDVMKSPVSLCTGVTYDRSSIQTWLSQGHNTCPATMQILPSTDFIPNLTLRRLINVWIQHQPSSSPGYTTPSSSSVTKSEVVEIVKNLNGEVDRLSSLAKIVEFVKCSGENRRFFVNSSDAIVSVVGVLVDCDVGEVCEAVVAVLDLVVSENGVKEQLNKEILKSDRKFLPKFLLILRKGKLSSRIQTARILEFIALDADSQRKMIEEQGLLYELHVFTSTETNRFAIEAGLSTLIAVSTTRPAKKELVRFGIVQTIGKILSGSETARAVVEKSLKLLETVATCTEGRAAIVKGEECMSAIVTRLMKSSKAATEHGVTVLWSVCCLFRDTAARDVVGKANGLTKVLLVMQSDCSAAVRQMCGELVKALRVVNNKHKNYSKSCLASYDTKTTHIMPY

SEQ ID NO: 2422 - protein, 260 aa, Oryza sativa (japonica cultivar-group)
MTAANLDSEMGLIGEMMVQYPYVTIDVEFAGVVHHPPYTGSRPTPDEIYAALKSNVDEVPAVQIGITLSDAEGNLPTRSSSSPEQEIAWEVVFSDFDAGRDPHVVDSVEFLKNQGIDFDLARQIGVTSTAFGEKLLAILPPPSRRGELTWSAFGGAYDMGYLLKMLTGGQPLPETRQQFMQLVKSRLGGGRIFDSKYLVEHDRQDLRNAGLRHTADVLGVRQQEGVKMLAGHKSVVAAAIFATIRSQGVHLLHGVIDGIL

SEQ ID NO: 2423 - protein, 139 aa, Triticum aestivum
  misc_feature (57)..(57): Xaa can be any naturally occurring amino acid
  misc_feature (70)..(70): Xaa can be any naturally occurring amino acid
  misc_feature (72)..(72): Xaa can be any naturally occurring amino acid
  misc_feature (90)..(90): Xaa can be any naturally occurring amino acid
  misc_feature (92)..(92): Xaa can be any naturally occurring amino acid
  misc_feature (96)..(96): Xaa can be any naturally occurring amino acid
  misc_feature (103)..(103): Xaa can be any naturally occurring amino acid
  misc_feature (107)..(107): Xaa can be any naturally occurring amino acid
  misc_feature (109)..(109): Xaa can be any naturally occurring amino acid
  misc_feature (116)..(116): Xaa can be any naturally occurring amino acid
MAPTVMASSATSVAPFQGLKSTAGLPVSRRSNGASLGSVSNGGRIRCMQVWPIEGIXKFETLSYLPPLSXEXLLKQVDYLIRSKWVPCLXFXKVGXQPSVEQXASPXVXRMARYWXMLGSPNVSGWRNAQHKGSTGDGG

SEQ ID NO: 2424 - protein, 136 aa, Glycine max
  misc_feature (121)..(121): Xaa can be any naturally occurring amino acid
ASSLISSPAATTVNRAGAGLVAPFTGLKSMAGFPTRKTNNDITSIASNGGRVRCMQVWPPIGKKKFETLSYLPYLDDAQLAKEVEYRVKKRLMPYLEFEVKHDCVYREHNRSPRCYNRLYXTMIKLAMFSCTEACQ

SEQ ID NO: 2425 - protein, 112 aa, Brassica napus
SQHHSWTNKKIMDTTRDNRKDMSFRGSAQAPMMSKQEYIRTSSQSSKPRKLVTASYFSLESVVVLVGLTASLLILPLILPPLPPPPFMLLLIPIGDYGSWLMGLGFLWPSFF

SEQ ID NO: 2426 - protein, 506 aa, Bacillus halodurans C-125
MVYKRPNEEGAVVSFKKRYDNYVNGEWTPPVKGQYFENVTPVTGEVFCEVARSTAEDIDLALDAAHAAKEQWGKTSPAERANLLNKIADRMEENLEKLAVAETWENGKPVRETLNADIPLAIDHFRYFAGAIRAQEGTLSQIDNDTVAYHFHEPLGVVGQIIPWNFPILMATWKLAPALAAGNCVILKPAEQTPASIFVLLELIEDLLPKGVVNIVNGFGVEAGKPLASSSRVAKVAFTGETTTGRLIMQYASENLIPVTLELGGKSPNIFFDDVMAKDDAFLNKAIEGFVLFALNQGEVCTCPSRALIQESIYDTFMERALARVQAIKQGNPLDPNTMIGAQASQEQLEKILSYLAIGKEEGAEVLAGGERNHLPGELANGYYVSPTVFKGTNDMRVFQEEIFGPVVSVTTFKDAEEALAIANDTLYGLGAGVWTRDMNKAYRFGREIQAGRVWTNCYHAYPAHAAFGGYKKSGIGRETHLMMLSHYQQTKNLLVSYSEDALGFF

SEQ ID NO: 2427 - protein, 453 aa, Oryza sativa (japonica cultivar-group)
MGGEEGMAAGRKKRVGRYEVGRTIGQGTFAKVKFAVDADTGAAVAMKVLDKDTILNHRMLHQIKREISIMKIVRHPNIVRLNEVLAGKTKIYIILELITGGELFDKIARQGKLRENEARKYFQQLIDAINYCHSKGVYHRDLKPENLLLDSRGNLKVSDFGLSTLAQKGVGLLHTTCGTPNYVAPEVLSNNGYDGSAADVWSCGVILYVLMAGYLPFEEDDLPTLYDKITAGQFSCPYWFSPGATSLIHRILDPNPKTRITIEQIREDTWFKKTYVAIKRGEDENVDLDDVQAVFDNIEDKYVSEQVTHNDGGPLVMNAFEMITLSQGLDLSALFDRQQEFVKRQTRFVSRKPAKTIVATIEVVAETMGLKVHSQNYKLRLEGVSSNRMSPFAVVLQVFEVAPSLFMVDVRKVAGDTLEYHRFYKNLCNKMESIIWRPIEVSAKSALLRTATC

SEQ ID NO: 2428 - protein, 1166 aa, Capsella rubella
MKQKWLFVLILCFFTALGIHGKRLINSDFDETALLMAFKQFSVKSDPNNVLGNWIYESGRGSCSWRGVSCSDDGRIVGLDLRNGGVTGTLNLANLTALPNLQNLYLQGNYFSSSSGGDSSSGSYCYLQVLDLSSNLISDYSLVDYVFSKCSNLVSVNFSNNKLVGKLGFAPSSLKSLTTVDFSYNILSEKIPESFISEFPASLKYLDLTHNNFSGDFSDLSFGMCGNLSFFSLSQNNISGVKFPISLPNCRFLETLNISRNNLAGKIPGGEYWGSFQNLKQLSLAHNRFSGEIPPELSLLCKTLETLDLSGNALSGELPSQFTACVWLQNLNIGNNYLSGDFLSTVVSKITRITYLYVAFNNISGSVPISLTNCTNLRVLDLSSNGFTGNVPSGLCSQQSSPVLEKLLIANNYLSGTVPVELGKCKSLKTIDLSFNELTGPIPKDVWMLPNLSDLVMWANNLTGSIPEGVCVKGGKLETIILNNNLLTGSIPQSISRCTNMIWISLSSNRLTGKIPTGIGNLSKLAILQLGNNSLSGNVPRQLGNCKSLIWLDLNSNNLTGDLPGELASQAGLVMPGSVSGKQFAFVRNEGGTDCRGAGGLVEFEGIRAERLERFPMVHSCPATRIYSGMTMYTFSANGSMIYFDISYNAVSGLIPPGYGNMGYLQVLNLGHNRITGNIPDSLGGLKAIGVLDLSHNDLQGYLPGSLGSLSFLSDLDVSNNNLTGPIPFGGQLTTFPVSRYANNSGLCGVPLRPCGSAPRRPITSSVHAKKQTLATAVIAGIAFSFMCLVMLFMALYRVRKVQKKELKREKYIESLPTSGSCSWKLSSVPEPLSINVATFEKPLRKLTFAHLLEATNGFSAETMVGSGGFGEVYKAQLRDGSVVAIKKLIRITGQGDREFMAEMETIGKIKHRNLVPLLGYCKVGEERLLVYEYMKWGSLETVLHEKSSKKGGIFLNWTARKKIAIGAARGLAFLHHSCIPHIIHRDMKSSNVLLDEDFEARVSDFGMARLVSALDTHLSVSTLAGTPGYVPPEYYQSFRCTAKGDVYSYGVILLELLSGKKPIDPGEFGEDNNLVGWAKQLYREKSGTEILDPELVTEKSGDAELFHYLKIASQCLDDRPFKRPTMIQVMAMFKELKADTEEDESLDEFSLKETPLVEESRDKEP

SEQ ID NO: 2429 - protein, 415 aa, Arabidopsis thaliana
MSPAIKAPLLPNQEPSSSSSENHGSFAGAVFNISTSIVGAGIMAIPAAFKVLAGFLMKSSLAGESTTYAGVMKESFGKSGAVAVTVVTMVVTFGSMIIFSIIIGDVISGNEKDGIIHLGLLQEWFGSHWWNTRFFERLAFSSAISFLLALLFVVISSVLAIIALVQGKTKPPRLFPELNDGGLSFFSLFTASPVIVTAFTFHFNGKKPRTKNFMVIAVHPVAFELKDPLNVLSATRISVILCATIYSATGLFCYLLFGDSTMTDVLMNFDQSTSSSVGSLLNDIVRLSYAIHLMLVFPLLNFSLRANLDELLFPMKLSLVEDNKRFFALTFPLLISCFLGAIAIPDIWYFFQFLGSTSTVSIAFIFPAAIVLRNVNGFSTLREKIVASVMLVLAVATSIIAISTNIYTFTATEET

SEQ ID NO: 2430 - protein, 165 aa, Triticum aestivum
MAQESLRLVCPPVSAHEGRLPRQYTLEGQGAKKDISPPLEWYGVPDGTRSLAVVVQDVDADERVPWTHWVVVNISPEEKGLPEGFSGAGGNANAGGGDGGVQEGVNDWKQPGWRGPVPDSHGHRIQFRLYALDDLLSLGNKVTVDKVMEAIEGHVLGEAEITAVF

SEQ ID NO: 2431 - protein, 322 aa, Ustilago maydis 521
MSKVTASGIISGNISTQRIKLNNGQEIPQVALGVYKAPNDGSTENACKWAFDAGYRHIDSAARYMNEESVGRALAEWTKENNVPRSEIFITSKLWDADHDKAAAAIEDSLKKLNVDYMDMYLMHSPGTMGAEKRLEAWKALEEAVDAGKIKTIGVSNFDVEELDHLLANCRIKPAVNQIESHPFFAHEELREACISRGIHIQAYSPMAQGQALDRPEIKTIASKHGKTPAQILLKWGLTHGNIILPKSLTKHRIESNAQLFDFELDSDDMDVLDNLDEGMKVGKLGPAGTSQPASPGGTRPGSRRSSGSGGLSGNKLQMSSS

SEQ ID NO: 2432 - protein, 487 aa, Oryza sativa (japonica cultivar-group)
MDPNSLKTGGLLLPTIERQCASPPSVIVIGGGISGVAAARALSNASFEVTVLESRDRVGGRVHTDYSFGCPIDMGASWLHGVCNENSLAPLIGYLGLKLYRTSGDNSVLYDHDLESYALFDKAGHQVSKETVAKVEETFERILDETVKVRDEQEHDMPLLQAISLVLERHPHLKLQGIDDQVLQWCVCRLEAWFAADADEISLKNWDQEHVLTGGHGLMVNGYYPIIQALAQGLDIRLNQRVTKIARQFNGVTVTTEDGTSYSADACIITVPLGVLKANIIKFEPELPSWKSSAIADLGVGIENKIAMHFDTVFWPNVEVLGMVGPTPKACGYFLNLHKATGNPVLVYMAAGRFAQEVEKLSDKEAVDLVMSHLKKMLPDATEPTKYLVSRWGSDPNSLGSYSCDLVGKPADVSARFAAPVENLYFAGEAASADHSGSVHGAYSSGIAAADECRKRILMQKGIPDLVQVKAYEEMAGVIAPLQICRT

SEQ ID NO: 2433 - protein, 309 aa, Brassica napus
  misc_feature (253)..(253): Xaa can be any naturally occurring amino acid
  misc_feature (261)..(261): Xaa can be any naturally occurring amino acid
MDLDSMDCASTIDVTDDEEIHQDRHSYASVSKHHSNNSNANAASGLLPTTTSVHELLECPVCTNSMYPPIHQCHNGHTLCSLVKNRVHNRCPTCRQELGDIRCLALEKVAESLELPCKYMSLGCPEIFPYYSKLKHETVCNFRPYNCPYAGSECSVMGDIPFLVAHLRDDHKVDMHSGCTFNHRYVKSNPREVENATWMLTVFHCFGQYFCLHFEAFQLGMAPVYMAFLRFMGDETEAWNYNYSLEAGGFCRXLIWEGTPXSVRDSHRKVRDSHDGLIIQRNMALFFSGGDRKELKLLFTGGIWKELFL

SEQ ID NO: 2434 - protein, 318 aa, Pachysolen tannophilus
MTLQYYTLNNGRKIPAIGMGCWKLENAADMVYAAIKEGYRLFDCACDYGNEKEVGEGINRAIKDGLVKRKDLFITSKLWNNFHAKENVKKALMKSLSDFNLDYFDLYLMHFPISFKFVPFEEKYPPGFYCGDGDKFIYEDVPIIETWRAMENLVDEGLVKSIGVSNVSGGLLEDLIKAARIKPASLQIEHHPYLQQNKLVEYAQLKGIVVTGYSNFGPLSFLELGNETAKKTQPLYENKTITTIAAKHGKTPFQVLLRWVNQRGIAIIPKSTFPNTLAVNLHVDEFDLTKEDFEEIAKLDRHLRFNDPWTWDKIPTFV

SEQ ID NO: 2435 - protein, 337 aa, Bartonella schoenbuchensis
STASCESKITYIDGDEGVLLYHGYSIDQLAENGDFLEVCYLLLYGELPTKQEKDDFDRRIMHHTMVHEQFSRFFHGFRRDSHPMAVMVACLGAMSAFYHDSIDITDAKQRMIASIRLIAKVPTLAAMAYKYSIGQPFVYPRNDLGYAANFLHMCFSVPCEEYKVNPVLARAMDRIFTLHADHEQNASTSTVRLAGSSGANPFACIAAGVACLWGPAHGGANEACLKMLQEIGSIEKIPEFIARAKDKNDPFRLMGFGHRVYKNYDPRAKLMQKTCHEVLKELNIKDDPLLDIAMELEKIALSDEYFIEKKLYPNVDFYSGITLKALGFPTEMFTVLL

SEQ ID NO: 2436 - protein, 280 aa, Streptococcus agalactiae 2603V/R
METYTLSNTLNIPKIGFGTWQLTEGEEAYKAVTHALKVGYTHIDTAQIYGNEHSVGRAIRDSGLARESIFLTTKIWNDKHDYHLAKASIDESLQKLGVDYIDLLLIHWPNPKALRENDAWKAGNAGTWKAMEEAYKEGKVKAIGVSNFMKHHLEALFETAEIKPMVNQIILAPGCAQEDLVRFCKGNDILLEAYSPFGTGAIFENESIKAIAEKYGKSVAQVALRWSLDNGFLPLPKSATPKNIEANLDIFDFQLNEDDIATLIQLDSGIKPKDPDNVSF

SEQ ID NO: 2437 - protein, 295 aa, Oryza sativa (japonica cultivar-group)
MSATQPVSEVLIRRVTADNLAVEMLTIRSHLPYFPYITIHADYPVDNAAARHGRRRRRRRGGGRGNKRESEADERCYRLAKSRVDELDVLQLGITLCDHHGRLPATAIACPGGAAVAVEMAWQVGFSDFDVSQSAVDALRAAGVDLEHLRARGVPAAVFGQALRVFDIVSAANLGRLTWVAFGGLYDFGFLLKMLDGGRPLPETAEGFASRLRGHLGVVYDAKYVAARLPMDGVELRGGLVRVARVLGAPAAAVEEPRQAGEKSLVASQVFIRMTGLFFAYHDVAVHAGKIDGLE

SEQ ID NO: 2438 - protein, 503 aa, Schizosaccharomyces pombe
MSTKLVDHVEITVPTGKTYIQPVGLFINNQHVDSVHGGRVKVYSPSTEKLICEVADADEEDVDIAVKVARAAFQTDAPWRKFSSAQRGRCLSRLADCIEQNLEYLASIETLDNGKSITLARGDVQAAADCFRYYGGWADKDYGQTIETDIKRFAYTRHEPIGVCGQIIPWNFPFLMCAWKIAPAVACGNTIILKTAELTPLSALCLTKFVPECGFPPGVINVLSGDGRRCGNAISSHMDIDKVAFTGSTGVGRMVMRAAASSNLKKVTLELGGKSPNIVFNDADLDSAAVWTNYGIFYNSGQVCCAGSRVYVQEDVYDEFIKRMVAKAKTLKVGDPFAEDTFQGAQVSKQQYERIVSYIESGIAHGAKLEIGGKRHGNLGYFVEPTILSNVTEDMAVGKEEIFGPVLAVIKFKTIEEAIRRGNNSTYGLAAGVHTNNITNAIKVSNALEAGTVWVNCYNLLHHQIPFGGYKESGIGRELGSYGLTNYTQTKAVHINLGMDSPI

SEQ ID NO: 2439 - protein, 368 aa, Malus x domestica
MGKGGQSCNGMVRQAKPVEQENMAAWLVDVNTIKILPFKLPSIGPNDVRIRIKAVGICGSDVHYLKTMKCADFEVKEPMVIGHECAGIVDKVGSEVKHLVPGDRVAVEPGISCARCQQCKGGRYNLCPDMKFFATPPVHGSLANQIVHPADLCFKLPENVSLEEGAMCEPLSVGVHACRRANVGPETTVLIIGAGPIGLVSVLTARAFGAPRIVIVDMDDKRLAMAKSLGADEAVKVSTKMEDLDDEVAEIKKAMISEVDVTFDCVGFNKTMSTGLNATRPGGKVCLVGMGHGVMTVPLTPAAAREVDVVGVFRYQNTWPLCLEFLRSGKIDVKPLITHRFGFTEKEVEEAFATSARGGNAIKVMFKL

SEQ ID NO: 2440 - protein, 305 aa, Streptomyces griseus
MATQALGTALRLGVFDRIGTGELRAEALAGSLGTHPRATLRLLRALAGLQLLSEPEPGAFRTTAAGNVLRADAPGTMVAMARMFTDPVMLRGWDLLDESVRTGETTFDTVFGTDFFGHLREHPELSAAFNEAMSQGTRLTAETVPHHYDFGRFQRLVDIGGGDGTLLASILRAHQEPRGVLFDTAEGLAQAPRRLAREGLDGRVTLETGDFFASAPAGGDLYLLNSIIHDWDDAVRGHLRHIRDVIPDHGSLLIVEPVLPATVPADRPDNVYLSDLNMLVNVGGRERTADDFAALCTAGGFACGA

SEQ ID NO: 2441 - protein, 441 aa, Streptomyces netropsis
MSHSVTLPSTKDIIELERRHRLPGGQSMTDLAGIVVDRAVNAEVWDRDGKRYIDFFTGVGVSNIGHSHPAFLEELTTQLSRCAVGTFYTDVRSRYFALLAAQLPEQLGEIHMFSTGSEAVEAAVKLARAATGKHEIVSFWGGFHGKTQGALSLHGGPRKHRSGPFPPGSHQVPYADCHHCPLQLEHPECGQRCVDLAEQSIENGSVGDLAAVIVEPVQGTNGNIIPPEGYLRTLRQLADRHGALLILDEVITGFGRTGALFAFEHDPGIAPDVVVLGKAMASGVPASAIVSRSGLVEGTSFAVPSAAASTFGGNPLASAASLATLRVLLDERLPERSHELGKSVSDRLSAWREEFPFVGNADNIGLMIGVELVDPATRLPLPKGITRRLFQELMARGVLAMAYDSRIRLYPPLSIPTHHLEEGLAAFEGAFRAMAPAISRL

SEQ ID NO: 2442 - protein, 342 aa, Bartonella schoenbuchensis
DPGFTSTASCESKITYIDGDEGVLLYHGYSIDQLAENGDFLEVCYLLLYGELPTKQEKDDFDRRIMHHTMVHEQFSRFFHGFRRDSHPMAVMVACLGAMSAFYHDSIDITDAKQRMIASIRLIAKVPTLAAMAYKYSIGQPFVYPRNDLSYAANFLHMCFSVPCEEYKVNPVLARAMDRIFTLHADHEQNASTSTVRLAGSSGANPFACIAAGVACLWGPAHGGANEACLKMLQEIGSIEKIPEFIARAKDKNDPFRLMGFGHRVYKNYDPRAKLMQKTCHEVLKELNIKDDPLLDIAMELEKIALSDEYFIEKKLYPNVDFYSGITLKALGFPTEMFTVLL

SEQ ID NO: 2443 - protein, 502 aa, Burkholderia cepacia R18194
MLVDELHSRKNEVIDPSALRARLRDGALLETRAWLASGWQEGTDGRSFPVTNPATGDILARVASLGAAEVEQAIESSALAQQGWQKRTSHERAKLLRAWFDLILANADDLALIMTSEQGKPLAEARGEITYAASFVEWFAEEAKRVYGDVMPHPQGDKRILVIRQPIGVCAAITPWNFPAAMITRKVAPALAAGCSIIVRPADLTPLTALALAVLAERAGIPAGVLQVVCGPSREIGAVLTASPVVRKLSFTGSTEVGRVLMSQSSGTIKRLSLELGGNAPFIVFDDADLDAAIEGAMASKYRNSGQTCVCANRFLVQAGIHDRFVEALTRRVQALKVGNGIEPGVQQGPLIQKSACDHLNQLIDDAVSKGARIVTGGKGHPLGGTFFEPTVIADATPAMRLAREELFGPVGPVFRFDDEAEAIAMANDTEYGLAAYLYTRDNSRIWRVGEALEYGMVGLNTGVISNEVAPFGGVKQSGLGREGSRYGIEEYLEIKYMCSQV

SEQ ID NO: 2444 - protein, 341 aa, Bartonella schoenbuchensis
DPGFTSTASCESKITYIDGDEGVLLYHGYSIDQLAENGDFLEVCYLLLYGELPTKQEKDDFDRRIMHHTMVHEQFSRFFHGFRRDSHPMAVMVACLGAMSAFYHDSIDITDAKQRMIASIRLIAKVPTLAAMAYKYSIGQPFVYPRNDLSYAANFLHMCFSVPCEEYKVNPVLARAMDRIFTLHADHEQNASTSTVRLAGSSGANPFACIAAGVACLWGPAHGGANEACLKMLQEIGSIEKIPEFIARAKDKNDPFRLMGFGHRVYKNYDPRAKLMQKTCHEVLKELNIKDDPLLDIAMELEKIALSDEYFIEKKLYPNVDFYSGITLKALGFPTEMFTVL

SEQ ID NO: 2445 - protein, 324 aa, Burkholderia cepacia R18194
MHWLPLTEVADDARDAVRAFRELGGRHYGSFSVDQSRVNFVRACELNGLTGDEAVVHEDIDVPVAGGSIRVRLYRPPAGASADGNPLVVFIHGGGWVIGSVDTHDGICRHLARHGGCAVASVEYRLSPEHRWPVPLEDCEQALDYLTANAAALSINASRVILAGDSAGGNMATLIANAASVAGPAIIGQVLFYPVTDLTASLPSYRRIQGGFPLVAESMLWFREHYVPDGTPFDLPRLSPLLHAEGRRQPPMFMATVGLDPLCDEGIAYASCAARAGSQVEHHHLPGHHHGIVTAARAIPAARYLLDRAASFVRRLAEKDGCDA

SEQ ID NO: 2446 - protein, 181 aa, Crocosphaera watsonii WH 8501
MEQRGVTVWFTGLSGAGKTTITQALEKKLREAGYPLEILDGDIVRTNLTKGLGFSKEDRDTNIRRIGFVSQLLTRHGVIVLVSAISPYREIREEVKGKIGDFVEVFVNAPLNVCEDRDVKGLYQRARAGEIKSFTGIDDPYEPPLNPEVECRTDLETLEESVNKVWQKLEEMGYLAKPVAV

SEQ ID NO: 2447 - protein, 145 aa, uncultured Rickettsia sp.
ANEAVINMLKEIGSSENIPKYIAKAKDKNDPFRLIGFGHRVYKNYDPRAAVLKETCKEVLKELGQLENNPLLQIAIELEAIALKDEYFIERKLYPNVDFYSGIIYKAMGIPSQMFTVLFAIARTIGWMAQWKEMHEDPEQKISRP

SEQ ID NO: 2448 - protein, 283 aa, Burkholderia cepacia R18194
MQHLARAVRAPEAVVDVHGVEDLTVPGATGSLRARLYRPTQERNLPTVVYLHGGGFVIGDLDTHDNICRELARGANAVVVSVDYRLAPEHPYPAAADDAIAATKWVIANAGELGGSDVVAVAGDSAGGNLAAVVTQQLHADGISLSAQFLIYPAVAQDRAGFPSFKENGEGYFLDLETIAWFERHYVLDGTDREDPRLAPIRAKDLAGLPPAVILTAEFDPLRDEGEAYGRLLHASGVKVDTIRCDGMIHGFFDMGAISPGAQAWIEKGIASFRKVLGGAQHH

SEQ ID NO: 2449 - protein, 75 aa, Zea mays
  misc_feature (24)..(24): Xaa can be any naturally occurring amino acid
DVHYLREMRISHLVVKEPMVIGHXCAGLVEEVGAGVTHLFDGDRLALEPGVSCWRCRHCQGGRYNLCEDMIFFST

SEQ ID NO: 2450 - protein, 136 aa, uncultured Rickettsia sp.
ANEAVINMLKEIGSSENIPKYIAKAKDKNDPFRLIGFGHRVYKNYDPRAAVLKETCKEVLKELGQLENNPLLQIAIELEAIALKDEYFIERKLYPNVDFYSGIIYKAMGIPSQMFTVLFAIARTIGWMAQWKEMHE

SEQ ID NO: 2451 - protein, 134 aa, uncultured Rickettsia sp.
ANEAVINMLKEIGSSENIPKYIAKAKDKDDPFRLMGFGHRVYKNYDPRAAVLKETCKEVLKELGQLENNPLLQIAIELEASALKDEYFIERKLYPNVDFYSGIIYKAMGIPSQMFTVLFAIARTVGWMAQWKEM

SEQ ID NO: 2452 - protein, 125 aa, Betula pendula
LKQEPGTSEETEQFACTRYKAEYPIFQKIRCNGPDTAPLYKFLKASKTGFLGSRIKWNFSKVAFPCNQFLKQEPGTSEETEQFACTRYKAEYPIFQKIRCNGPDTAPLYKFLKASKTGFLGSRIK

SEQ ID NO: 2453 - protein, 297 aa, Glycine max
MVSSNCYYLALVCCCVLLLLNPTVGEQDEQNLVLQYHKGALLKGRITVNLLWYGSFTPIQRSTIVDFIKSLSSSPGAPLPSVAWWWKTTEKYNGGSTTLVVGKQILQQTYSLGKYLNGTQLLYLSSRFNDLNAINVVLTSNDVGVDGFCRSRCGTHGSINGKARIPYMWVGNSEAQCPGQCAWPFHQPAYGPQTPPLVAPNADVGVDGMVINIATLLAGTVTNPFNEGFYQGPPTAPLEAVSACTGIFGSGAYPGYPGRVLLDKTTGASYNAYGGNGRKYLLPAMWDPQTSACKTQV

SEQ ID NO: 2454 - protein, 53 aa, Brassica napus
MSALFNFHSFLTVVLLVICTCTYLKMQFPAILEQMTGFRGFFWKAARIGERLS

SEQ ID NO: 2455 - protein, 202 aa, Brassica napus
  misc_feature (186)..(186): Xaa can be any naturally occurring amino acid
MDNYDGTNLAEMRPKRRAGRKVFNETRHPVFRGIRRRNGDKWVCEVREPTHQQRIWLGTYPTADMAARAHDVAALALRGRSACLNFADSAWRLPVPESNHPDVIRRVAAEAAEMFRPTEYGSEITVLPSYGSEVYMGSGSGSEERNVYGYVEEEEEVSTTMMRLATEPLMSPPRSYMEGVTPNGYXKEEMSYEDMSLWSYRY

SEQ ID NO: 2456 - protein, 162 aa, Brassica napus
GHWNVTDVCNGLLGGFAAITGGCSVVEPWAAIICGFVAALVLLGCNKLAEKLKYDDPLEAAQLHGGCGAWGLIFTALFAREKYLNQIYGEKPGRPHGLFMGGGGKLLGAQLIQILVITGWVSATMGTLFFILKKMKLLRISAEDEMAGMDTTRHGGSAYMYY

SEQ ID NO: 2457 - protein, 355 aa, Gibberella fujikuroi
MSRSNPPNAAGSRKISFNVSEQYDIQDVVGEGAYGVVCSAIHKPSGQKVAIKKITPFDHSMFCLRTLREMKLLRYFNHENIISILDIQKPRNYESFNEVYLIQELMETDMHRVIRTQDLSDDHCQYFIYQTLRALKAMHSANVLHRDLKPSNLLLNANCDLKVCDFGLARSAASQEDNSGFMTEYVATRWYRAPEIMLTFKEYTKAIDVWSVGCILAEMLSGKPLFPGKDYHHQLTLILDVLGTPTMEDYYGIKSRRAREYIRSLPFKKKVPFRTLFPQDLGSALDLLEKLLAFNPVKRITVEEALKHPYLEPYHDPEDEPTAPPIPEEFFDFDKHKDNLSKEQLKQLIYQEIMR

SEQ ID NO: 2458 - protein, 83 aa, Triticum aestivum
RRAAIPFVPACVAVRGTRSNPCRCKVVGPTLGFVAFVVTGVVEWPLGAAVYLFRRRKGRRIMGHPARVVYPRVTTAIPISSSS

SEQ ID NO: 2459 - protein, 428 aa, Gibberella zeae PH-1
MAPVATGETAPAHLPVGSPKPLSISASVLHGPRDLRMETRIIEAPAAGELQIAVKATGICGSDVSYYKKFANGDLCACHPLSLGHESSGEVVAIGPQVNGFKLGDRVALEVGVACGNCGTCRKGRYNLCKKLRFRSSAKTYPHYQGTLQERINHPAVWCHKLPDNVSYEAAALLEPLSVAIHAVNRARPEPGSTAIVIGAGTVGLLTAAMARQSGCTSVTITDIDAGRVNYAVSQGFATHGFVTPISRLNSSNYSSGISTPATGALTPASTFSTASRFDGAKSLAADILASSNSPGSFILEEDEDGVDVTFECTGKEVCMHTSLYTTKAGGKVIMVGMGTPIQTLPLSVAHLREIDILGVFRYSNTYPTGIRLLCSQAANPSGCGLPSLDGMVTHRFKGLDKAQAAFELATRTSDDEGNLVLKIVIEA

SEQ ID NO: 2460 - protein, 240 aa, Medicago sativa
RGKIQIKRIENTTNRQVIFSKRRNGLLKKAKELAILCDAEVGVMIFSSTAKLYDFASTSLRSVIGRYNKSKEEHNQLGSTASEIKFGQREAAVLRQQLHNLQESHRQIMGEELSGLTVKELQGLENQLEISLRGVRMKKEQLFMDEIQELNRKGDIIHQENVELYRKVYGTKDKNGTNRVLSLTNGVGIGDDSNRTCESPAQPATETRTTTALMHSLEISVLTCKQGKWTQILISYMNGI

SEQ ID NO: 2461 - protein, 200 aa, Vicia faba
MATIGHNNLNAKLVLLGDMGAGKSSLVLRFVKGQFLEFQESTIGAAFFSQTLAVNDATVKFEIWDTAGQERYHSLAPMYYRGAAAAIIVYDITSSDSFTRAKKWVQELQKQGNPNMVMALTGNKSDLEDKRKVTAEEARVYAEENGLFFMETSAKSAANVNDVFYEIAKRLPRAQPAQNPAGMVLVDRPTEGSRAASCCS

SEQ ID NO: 2462 - protein, 173 aa, Methanococcoides burtonii DSM 6242
MATGPRYKVAFRRRREGRTDYHQRLRLLLSREDRVVVRKSARHMQIQLVAPDANGDVTLSSAISKELAKYGYEGSTGNTTAAYLTGLLFGYKTLAEGYESGVLDIGIQASSAGSRVYAALKGVVDSGLDVPHNSSVFPSDERIRGEHVAEYMEGSNLPEVFDAVKEKILAEFS

SEQ ID NO: 2463 - protein, 492 aa, Oryza sativa (japonica cultivar-group)
MDQPSNGFAAGGLFLRHIDGQNASPPSVIVIGGGISGIAAARALSNASFKVTLLESRDRLGGRVHTDYSFGCPIDMGASWLHGVCNENSLAPLIRLLGLRLYRTSGDNSVLYDHDLESYALFDKDGRQVPQEIVTKVGETFEKILKETVKVRAEHEDDMPLIQAISIVLDRNPHLKLDGLQYEVLQWCICRLEAWFATDVDNISLKNWDQEHVLTGGHGLMVHGYDPVIKALAQDLDIHLNHRVTKIIQRYNKTIVCVEDGTSFVADAAIITVPLGVLKANIIKFEPELPDWKLSSISDLGIGIENKIALRFNSVFWPNVEVLGRVAPTSNACGYFLNLHKATGHPVLVCMVAGRFAYEFEKLSDEESVNFVMSQLKKMLPGATEPVQYLVSRWGTDPNSLGSYSCDLVGKPADLYERFCAPVGNLFFAGEAACIDHSGSVHGAYSSGIVAAEDCRRHLSTQLGISDLFQVGKIIMREEMTEVMVPFQISRL

SEQ ID NO: 2464 - protein, 181 aa, Rumex obtusifolius
MASSIMSSATVARPSAAQATVIAPFTGLKNIATFPTTRKSSDLSFPSNGGKVRCMQVWPPEGKIKFETLSYLPPLSEADLLAQINYLLINGWVPCLEFDVGPGAVYREHHHSPGYYDGRYWTMWKLPMFGCTDATQVVAELEEAKKAYPHAFVRIIGFDNVRQVQCVSFIAYKPPRAEGTY

SEQ ID NO: 2465 - protein, 198 aa, Triticum aestivum
TGGPFGTMKNPGEQSHAANAGLDIAVRLLDPIKDQLPILSYADFYQLAGVVAVEVTGGPEVPFHPGRQDKPEPPPEGRLPDATQGSDHLRQVFSAQMGLSDKDIVALSGGHTLGRCHKERSGFEGAWTSNPLIFDNSYFTELVSGEKEGLLQLPSDKALMADPAFRPLVEKYAADEDAFFADYAEAHLKLSELGFAEA

SEQ ID NO: 2466 - protein, 144 aa, Thinopyrum elongatum
MANSVSGVAVNEECVKVFQELRAERKHRFVVYKMDDDEDAQQVVVDKVGALDATFDDLAAAMPADDCRYAVYDLDFVSEDSAGDTPRSKIFFIHWSPEAADARSKMVYASSTEGLKKELDGVQIDVQATDASELTLDILKDYTT

SEQ ID NO: 2467 - protein, 122 aa, Atropa belladonna
MIQPQTHLNVADNSGARELMCIRIIGASNRRYAHIGDVIVAVIKEAVPNMPLERSEIVRAVIVRTCKELKRDNGMIIRYDDNAAVVIDQEGNPKGTRIFGAIARELRELNFTKIVSLAPEVL

SEQ ID NO: 2468 - protein, 344 aa, Bartonella schoenbuchensis
DPGFTSTASCESKITYIDGDKGVLLYHGYSIDQLAENGDFLEVCYLLLYGELPTQQEKADFDRRIMHHTMVHEQFSRFFHGFRRDSHPMAVMVACLGAMSAFYHDSIDITDAKQRMIASIRLIAKVPTLAAMAYKYSIGQPFVYPRNDLGYAANFLHMCFSVPCEEYKVNPVLARAMDRIFTLHADHEQNASTSTVRLAGSSGANPFACIAAGVACLWGPAHGGANEACLKMLQEIGSIEKIPEFIARAKDKNDPFRLMGFGHRVYKNYDPRAKLMQKTCHEVLKELNIKDDPLLDIAMELEKIALSDEYFIEKKLYPNVDFYSGITLKALGFPTEMFTVLFHL

SEQ ID NO: 2469 - protein, 359 aa, Hortaea werneckii
MAEFVRAQIFGTTFEITSRYTDLQPVGMGAFGLVCSAKDQLTSQAVAVKKIMKPFSTPVLSKRTYRELKLLKHLRHENIICLSDIFISPLEDMYVVTELLGTDLHRLLTSRPLEKQFIQYFLYQILRGLKYVHSAGVVHRDLKPSNILINENCDLKICDFGLARIQDPQMTGYVSTRYYRAPEIMLTWQKYDVEVDIWSAGCIFAEMLEGKPLFPGKDHVNQFSIITELLGTPPDDVIATICSENTLRFVQSLPKRERQPLKNKFKNADPQAIELLERMLVFDPRKRVKAGEALADPYLAPYHDPTDEPEAQEKFDWSFNDADLPVDTWKIMMYSEILDFHNVDANAEQAAHNNDTVAG

SEQ ID NO: 2470 - protein, 128 aa, uncultured bacterium
MPQLGLGVWKASNEEVISAIHKALEVGYRSIDTAAAYKNEEGVGKALRDSGLPREALFITTKLWNDDQKRPREALLESMEKLQLDYLDLYLMHWPVPAIDHYVEAWENMIDLQKQGLIKSIGVCNFQI

SEQ ID NO: 2471 - protein, 466 aa, Escherichia coli O157:H7 EDL933
MDQKLLTDFRSELLDSRFGAKAISTIAESKRFPLHEMRDDVAFQIINDELYLDGNARQNLATFCQTWDDENVHKLMDLSINKNWIDKEEYPQSAAIDLRCVNMVADLWHAPAPKNGQAVGTNTIGSSEACMLGGMAMKWRWRKRMEAAGKPTDKPNLVCGPVQICWHKFARYWDVELREIPMRPGQLFMDPKRMIEACDENTIGVVPTFGVTYTGNYEFPQPLHDALDKFQADTGIDIDMHIDAASGGFLAPFVAPDIVWDFRLPRVKSISASGHKFGLAPLGCGWVIWRDEEALPQELVFNVDYLGGQIGTFAINFSRPAGQVIAQYYEFLRLGREGYTKVQNASYQVAAYLADEIAKLGPYEFICTGRPDEGIPAVCFKLKEGEDPGYTLYDLSERLRLRGWQVPAFTLGGEATDIVVMRIMCRRGFEMDFAELLLEDYKASLKYLSDHPKLQGIAQQNSFKHT

SEQ ID NO: 2472 - protein, 506 aa, Vibrio vulnificus YJ016
MIYAQPGSDNAVVNFKSHYDNYIGGEWVKPVSGEYFDNISPVNGQAYCKVARSSAADINLALDAAHSVRYQWAKTSVTERANILLKIADRIEAHLEELAVAETWENGKPVRETLAADLPLVVDHFRYFAGCIRAQEGSAAELDANTASYHFPEPIGVVGQIIPWNFPMLMAAWKLAPALAAGCCVVLKPAEQTPTSILVLMEKIGDLIPAGVVNVVNGFGAEAGQALATSNRIAKLAFTGSTEVGNHILKCAAESLIPSTVELGGKSPNIYFPDVFDHEDAYLDKCIEGTLLAFFNQGEVCTCPSRVLVHESIYDQFIAKVAERAKSIKQGNPLDTDTQVGAQASQEQFDKILSYLEIGRQEGAKVVFGGEIAKQEDDLATGYYIQPTLLQGHNKMRVFQEEIFGPVIAVTTFKDEAEALAIANDTEYGLGAGVWTRDQNLAYRMGRNIEAGRIWINCYHAYPAHAAFGGYKKSGIGRETHKMMLNHYQNTKNLLISYDVNPLGFF

SEQ ID NO: 2473 - protein, 75 aa, Triticum aestivum
VIRRVYQLTGIADERYVTVVAQSGYNKDVLKLSTEDVLPGQIKQGFADGKDVILSGMSSKGEEHICGKMEIAGGK

SEQ ID NO: 2474 - protein, 284 aa, Malus x domestica
ILPFKLPAIGPNDVQIRIKAVGICGSDVHYLKTMKCADFEVKEPMVIGHECAGIVDKVGSEVKHLVPGDRVAVEPGISCAHCQQCKGGRYNLCPDMKFFATPPVHGALANQIVHPADLCFKLPENVSLEEGAMCEPLSVGVHACRRANVGPETTVLIIGAGPIGLVSVLAARAFGAPRIVIVDMDDKRLAMAKSLGADDTVKVSTKMEDLDDEVAEIKKAMISEVDVTFDCVGFNKTMATGLNATRPGGKVCLVGMGHGLMTVPLTPAAAREVDVVGVFRYKNT

SEQ ID NO: 2475 - protein, 246 aa, Triticum aestivum
MARGREGEVRNLVLGKYELGRMLGQGSFAKVYYGRDLRDGQSVAIKVIDKAHLRQTDGMVEQLRREISIMRMVRHPNVVGIREVLASRQRVFVVMEYARGGELFAKVARGRLTEDAARKYFQQLVAAVAFCHSRGVAHRDLKPENLLLDEEGRLKVTDFGLAALPEQLRHDGLLHTQCGTPAYVAPEVLRKRGYDGARADMWSCGVVLYVLLCGFLPFQHDNYVKMYQKIFKGEYQMPPWVSGEAR

SEQ ID NO: 2476 - protein, 314 aa, Aspergillus nomius
METPFAAPWQQFVEDLGQTPCLPGKDLKSVLTGWGQLAGTLATRYGFPPPDESVTTEDVQLDGLWLRCYTPPNATGQGPVGLYFHGGGWVMGGVKEEDGFCRIISRQCQMRLVSVEYRKAPETRYPGALNDGVRAALWALSRYGNHPLVLMGTSAGGNLAFGTALRLIDQDMAGKVGGVVALAPITVHPDAVPDHLKEQYTAYEENAELTVNSRAAMQVFFDCYNAPVDDVYTSCLLHPRLLALPKVYIAELGLDTLRDDARLMKGALDTAKVPVMYDAYPGYPHCSFMFPFQSLGEHQKAFLEAVAKAVRWMS

SEQ ID NO: 2477 - protein, 357 aa, Triticum aestivum
  misc_feature (19)..(19): Xaa can be any naturally occurring amino acid
  misc_feature (52)..(52): Xaa can be any naturally occurring amino acid
MKTLLILTILAMAITISTXANMQVDPSGQVQWPQQQLVPQPQQPLSQQPQQXLPQPQQTFPHQPQQQVPQPQQPQQPFLQPQQAFPQQPQQPFPQTQQPQQPFPQQPQQPFPQTQQPQQPFPQQPQQPFPQQSQQPFPQTQQQPQPFPQQPQQPFPQTQQPQQPFPQFQQPHQPFPQPQQQFPQPQQPQQSFPQQQRPFIQPSLQQRLNPCKNILLQQCKPASLVSSLWSIIWPQSDCQVMQQQCCQELAQIPQQLQCAAIHSVVHSIIVQQQQQQQQQQQQQGMHILLPLSQQQQLGQGTLVQGQGIIQPQQLAQLEAIRSLVLQTLPTMCNVYVPPECSIIRAPFASIVAGIGGQ

SEQ ID NO: 2478 - protein, 239 aa, Triticum aestivum
RAGLFINNEFVKAVDGKTFEVINPSTEEVICNVAEATEKDVDIAVAAARKAFNGPWRKETPENRGKLLVKLADLFEKNADLLASVEALDNGKAFSMARNVDIPAAAGCLRYYGGWADKIEGKVVDTAPDSFNYIRKEPIGVCGQIIPWNFPILMWSWKIGPAIATGNTVVIKTAEQTPLSAYVACKLIQEAGFPPGVINVITGFGKVAGAAISAHMDVDKVAFTGSTVVGRQIMKAAAG

SEQ ID NO: 2479 - protein, 204 aa, Xylella fastidiosa Dixon
MHLISNDFKNGQPIPVECAAGQTDGFAPNRNPHLAWDDVPENTRSFALLCIDPDVPSIPETIGRTDMEIPVTQPRIDFVHWVMTDISTNLRMIAHGSCSDGFVVGGKTMPPGPAGTHQGLNDYTKFFANTPEMAGDYYGYDGPYPPFNDLRIHRYLFRLFALDLEHLPLPKRFDGPTLLRTIQGHVLTEATLYGTYTLNPKAQE

SEQ ID NO: 2480 - protein, 106 aa, uncultured Rickettsia sp.
MLKETGSSENIPKYIAKAKDKNDPFRLIGFGHRVYKNYDPRAAVLKETCKEVLKELGQLENNPLLQIAIELEAIALKDEYFIERKLYPNVDFYSGIIYKAMGIPSQ

SEQ ID NO: 2481 - protein, 174 aa, Schizosaccharomyces pombe
MGQSQSQIFEDLISNSSFSNEEIERIRKRFIKIDANQSGSIDRNEFLSIPSVASNPLASRLFSVVDEDGGGDVDFQEFINSLSVFSVHGNKEEKLKFAFKIYDIDRDGYISNGELYLVLKMMVGTNLREDQLQQIVDKTIMEVDKDRDGKISFEEFKDIVSGSNVTSSMTLDSF

SEQ ID NO: 2482 - protein, 486 aa, Burkholderia cepacia R18194
MPIFEAEHLRKAFIGGRWVAPANGGVEHDIINPATGEVSGVLLFSDEADVNLAAEAARDAFAAFSNTPLVERLKLLERVIGAYTERLQDMADAITLEMGAPMDAISRPLQAALGLWHLHTTLEVAKQYPFERTQGTSRIVKEPVGVCGLITPWNWPMNQVMCKVAPALVAGCTIVLKPSQNAPYSAIVLAEILEKAGVPPGVFNLVQGAGQRLGRAIASSPLFDMVSLTGSTSAGVEVAQAAATTIKRVTLELGGKSANIILDSENFQQGVTHGVLQMMANSGQTCTAPSRMLVPAHRLEEAEQIAVAACGQVVVGDPRDPGTTMGPMANQRQHQKVQEMIRVGIDEGAMLLSGGLGNPSGLERGYYVKPTVFSRVNNRMKIATEEIFGPVLVIIPYRDESDAVTIANDSPYGLSGYVYGDSIEQAERVARKLRTGMVHLNGAAVDIAAPFGGYKQSGNGREWGYAGIEEFLETKSMFGATPGAVS

SEQ ID NO: 2483 - protein, 341 aa, Thermobifida fusca
MRVGVLTGGGDCPGLNAVIRAVVRKGIKEYGYEFVGFRDGWRGPLEGDTMPLDIEAVRGILPRGGTILGSSRTNLMKIEGGVERVKDNMAALGVDALVAIGGEDTLGVARQLHDHGVNVVGVPKTIDNDLNATDYTFGFDTAVNIATEAIDRLHTTAESHHRALVVEVMGRHAGWIALHAGMAAGANVILIPERPFDIDEVVAYIESRFKTNYAPIIVVAEGAHPKEGQLTLASAERDSFGHVRLGGIGQRLAEEIEARTGKEARSVVLGHVQRGGTPSAFDRVLATRLGLHAITAVHDKDFGKMVALRGTEIVRVDLSEATDQLKTVPVERYEEAEVFFG

SEQ ID NO: 2484 - protein, 106 aa, uncultured Rickettsia sp.
MLKEIGSSENIPKYIAKAKDKNDPFRLMGFGHRVYKNYDPRAAVLKETCKEVLKELEQLENNPLLQIAIELEAIALKDEYFIERKLYPNVDFYSGIIYQAMGIPSQ

SEQ ID NO: 2485 - protein, 500 aa, Arabidopsis thaliana
MVLSKTASKSDDSIHSTFASRYVRNSISRFEIPKNSIPKEAAYQIINDELKFDGNPRLNLASFVTTWMEPECDKLMMESINKNNVEMDQYPVTTDLQNRCVNMIARLFNAPLGDGEAAIGVGTVGSSEAVMLAGLAFKRQWQNKRKALGLPYDRPNIVTGANIQVCLEKFARYFEVELKEVKLREGYYVMDPDKAVEMVDENTICVVAILGSTLTGEFEDVKLLNDLLVEKNKKTGWDTPIHVDAASGGFIAPFLYPDLEWDFRLPLVKSINVSGHKYGLVYAGIGWVVWRTKTDLPDELIFHINYLGADQPTFTLNFSKGSSQVIAQYYQLIRLGFEGYRNVMDNCRENMMVLRQGLEKTGRFNIVSKENGVPLVAFSLKDSSRHNEFEVAEMLRRFGWIVPAYTMPADAQHVTVLRVVIREDFSRTLAERLVADFEKVLHELDTLPARVHAKMASGKVNGVKKTPEETQREVTAYWKKFVDTKTDKNGVPLVASITNQ

SEQ ID NO: 2486 - protein, 386 aa, Aspergillus nomius
MTGLDMESIFAKIKEEYARTDDVGKRQIQGHIRELQVGFYSDWDVVMRLSSGPLQVALAKVGIDLGIFRDLKESKTPITLAEFVKKTGASPRLLGRILRTQAAFGLIKETGPQEYTSSAFTDVFAKVDAAGAVAQLFDISGPCTQILPDFLAERDYRDITSNKDCVFQKAFNSDLTMFEWMPQHPKHMESLGHLMALERPVSWVDHFPVLEKLGDFPGPDKVLMVDIGGGFGQQSKALRAKFPNLPGRVIVQDIPQTLANAQPAAGVEFMEHSFFEPQPIQNAKFYYLRHVFHDWPDEQCVQILKQIIPAMGPDSQILIDEMVIPSTGVPWQAAFTDLLMMNSLGGVERTRAEWDNLLEQAGLEIIQSKVYDSKDQSILVAVPKRP

SEQ ID NO: 2487 - protein, 133 aa, uncultured Rickettsia sp.
ANEAVINMLKEIGSSENIPKYIAKAKDKNDPFRLMGFGHRVYKNYDPRAAVLKETCKEVLKELEQLENNPLLQIAIELEAIALKDEYFIERKLYPNVDFYSGIIYKAMGIPSQMFTVLFAIARTVGWMAQWKE

SEQ ID NO: 2488 - protein, 476 aa, Pseudomonas putida KT2440
MTTSHYIAGHWVEGQGSDCISVNDPALGQPFAELMAASVSQVDQAVAAARSALPAWKSTCASERAAFLRGFAEQLGQRREALVTVQMRNNGKPRHEAEIDLDDAIATFGYYAELAEQLPSKNRTVPLAAPGFTARTRLEPVGVVGLIVPWNFPLVTSAWKLAPALAAGCTVVLKPSEVTPLIEQAYGQIADALGLPAGVLNIVNGKAETGAALSNHNGLDKLSFTGSNSVGSQVMRSASAQCRPVTLELGGKSAIVVFDDCDVDQAVEWIVAGISWNAGQMCSATSRLLVQDGIADALLPRLQAALENLRVGNPLTEEVDMGPLTSQAQWLKVASYFATAREEGLQCLAGGHALDREGWFVSPTLYTDVPKDSRLWTEEIFGPVLCARRFATEEQAIAEANDSRFGLVATVCSADLERAERVADALEVGHVWINSVQAVFVETSWGGTKGSGIGRELGPWGLSAYQSIKHVTRCLG

SEQ ID NO: 2489 - protein, 69 aa, Zea mays
MCGILAVLGCAYEAKGSSNRSRVLDLSRWMEHRGCDCIGIRHVSNCYISHHRLPIIDATSGDILVYNED

SEQ ID NO: 2490 - protein, 282 aa, Rhodobacter sphaeroides 2.4.1
MHLGCPHHWRFGAEGESEAEFCARLLREAEETILAEGPETVAAFIGEPVMGAGGVIVPPDGYWSGIEALCRKYDILLVSDEVINGFGRTGARWGCEKFGFTPDILVTSKQLTSSYMPLAAVLMTDKVYQTIADHTETLGTLGHGFTGSGHPVATAVGLENLTVIEERDLMGNAARLERPFQDGLRAFRDNPLVGEVRGTGLIAAIEMVADRATKRSFEPLGKVGARAAAFAAEEGLLCRALGDTLALCPPLIVTEADVGRILERMGRALDRTADWARAEGLI

SEQ ID NO: 2491 - protein, 355 aa, Phaseolus vulgaris
FTVYGEHWRTMRTIMNLPFFTKKGVHNYSTMWEEEMELVVRDLKVNEHVRSEGIVIRKRLQLMLYNIMYRMMFDAKFESQEDPLFIQATRFNSERSRLAQSFEYNYGDFIPLLRPFLRGYLNKCKDLQSRRLAFFNTHYVQKRRQIMAANGEKHKISCAIDHIIDAQMKGEISEENVIYIVENINVAAIETTLWSMEWAIAELVNHPSVQSKIRDEISEVLKGEPVTESNLHELPYLQATVKETLRLHTPILLLVPHMNLEEAKLGGYTVPKESKVVVNAWWLANNPSWWKNPEEFRPERFLEEECATDAVAGGKVDFRFVPFGVGRRSCPGIILALPILGLVIAKMVSNFELSA

SEQ ID NO: 2492 - protein, 692 aa, Glycine max
MPALACCVDAAAPPGYAFAGDISFPAPVALTGVPPATTDDSNNNRWSPSLSAALYNVDGWGGPYFAVNTAGNISVRPHGSDTLSHQEIDLLKIVKKASDPKSLGGLSLQLPLIARFPDVLKNRLESLQFGCSIMQIQSGGYESHYQGVYPVKCNQDRFVVEDIVKFGSPFRFGLEAGSKPELLLAMSCLCKGNPDALLICNGFKDAEYISLALVANKLALNTVIVVEQEEEVDLIVELSKKLCIKPVIGLRAKLRTKHSGHFGGTSGEKGKFGLTTAQILRVVKNLDLAGMLDCLQLLHFHIGSQIPSTALLADGVGEAAQIYCELVRLGANMRVIDIGGGLGIDYDGSKSCDSDISVEYSLEDYAVAVVHAVQCVCDRRSVKHPVICSESGRAIVSHHSVLIFEAVGTSSTTGGGASPALSAQYLAEELSEDYRNLSELAFRGEYETCLVYTEEMKERCVEQFKQGTVCMEQLAAVEGLCELARKAVGAGESVRRYHVNLSVFTSVPDAWGIEQVFPIIPIHRLDEKPSVRGILSDLTCDSDGKIDKFINGESSLPLHEMEGGRTYYLGMFLGGAYEEALGGVHNLFGGPSVVRVSQSDGPHSFAVTRAVPGPSCGDVLRVMQHQPELMFETLKHRAQEYVSHDNAAALLAAGLARTFDRMPYLLSLSSFVADDVAAAVPAAQDLGEQWSY

SEQ ID NO: 2493 - protein, 353 aa, Photorhabdus luminescens subsp. laumondii TTO1
MKALKFNRVWDVQIQDVEPLRCAEPDDVVVDIAVCGVCGTDVGIITGSYPVAIPGTTLGHETTGVITQIGKSVTRFNVGDRVVINPTYSCGHCRMCQTGSPNHCEKKLGTEAGVSYDGAFAEQYLAKESSLIKLDDHVSMEEASLTEPLSCTLTGVDKLGITHTNIRAAVAGAGPMGMLYIWALHARGVKAFMVEKNESRIQFAKENLPPECELYTDFDEALIQKYGDKSALIDLCVDTTGQLTEYVFEHLAPGGKLLNVALKDKHANLDILKIADKSLSVIGSIDSLNNSFERAYTMIRDGVIPAGRLVSQVFDFNDYLQAFLTVGCDIANKSQKPLFTPNCKVLIRISDLK

SEQ ID NO: 2494 - protein, 142 aa, Gloeobacter violaceus PCC 7421
MLMEVTAMALQVKLLEQSFEGVKPNAHAFAASFYDNLFSDFPQTQALFAHSDMQAQQQKLLASLVLVVENLRQPQVLSTALQDLGNRHAGYGIVPEHYPMVGTSLLKTFETYLGDAWTPEVKQAWVDAYGAITGLMLTGAES

SEQ ID NO: 2495 - protein, 78 aa, Triticum aestivum
MKEGTANCVDILIAIILPPLGVFLKFGCKVESGLPLAHFLAYLPGIIYAIYAITKGLARSSWGASAGPPLFSTVKYYY

SEQ ID NO: 2496 - protein, 259 aa, Euphorbia esula
MDSSKDRETFVYLAKLAEQAERYDEMVESMKKVANLDVELTVEERNLLSVGYKNVVGSRRASWRILSSIEQKEESKGNEINAKRIKEYRNKVESELSTICSDIMTVIDEHLIPSCNAGESTVFYYKMKGDYYRYLAEFKAGNDKKEAADQSLKAYQTASTTAETDLPPTHPIRLGLALNFSVFYYEIMNSPERACHLAKQAFDEAISELDTLSEESYKDSTLIMQLLRDNLTLWTSDIPEDGDQKMETSGKASGGEDAE

SEQ ID NO: 2497 - protein, 314 aa, Triticum aestivum
  misc_feature (166)..(166): Xaa can be any naturally occurring amino acid
MGAGEKTAAGMPRIGMGTAVQGPKPDPIRRAVLRAIEIGYRHFDTAAHYETEAPIGEAAAEAVRSGAVASRDELFITSKLWCSDAHRDRVVPALRQSLRNLQMEYVDLYLVHWPVSMKPGRFKAPFTAEDFVPFDMRAVWEAMEECHRLGLAKAISVANFSCKKLXTLLSFATIPPTVNQVEVNPVWQQRKLREFCRGKGIQLCAYSPLGAKGTHWGSDAVMDAGVLQEIAASRGKSVAQVCLRWVYEQGDCLIVKSFDEARMRENLDVDGWELTEEERRRIAEIPQRKINLGKRYVSEHGPYKSLEELWDGEI

SEQ ID NO: 2498 - protein, 461 aa, Azoarcus sp. EbN1
MDRLQKAEVEDFKAHFQGEVLLPDDAAYDEVRQIWNAMMDRRPGLIARCVSPEDVVQAVRLARKHNLLVSIRGGGHNIAGNAVCDDGLMIDLSLMKKVQVDGNAHRASVEPGCTLADFDAVAQAHGLATPLGINSTTGVAGLTLGGGFGWLSRKHGMTVDNLLSADVVTADGNQVHASETENEDLFWGLRGGGGNFGIVTSFEFQLHPVGPDVLSGLIVFPFDQAKSVLTQFARFTETISDDLTVWMVTRKAPPLPFLPEDVHGKEIVVLALCYAGDPVEGEKLIEPLRGFGTMLGEHIGVQPYTAWQQAFDPLLARGARNYWKSHNFSQLSAGAIDAIIEYAGRLPSPQCEIFIGTIGGQTARVAPDAMAYSARDANYVMNVHARWESAAEDERCIAWARDFFASSQPFASGGAYINFLTQDETDRIAFAYGATYDRLVELKKKYDPTNLFRMNQNIKPV

SEQ ID NO: 2499 - protein, 108 aa, Glycine max
MHTLCVSRDFFLNSGSSDSRPRRSLFFPSLKMGFWTLLEGFLLFANALAILNEDRFLARRGWTLAEMTGPQRNSLKGQVIGLIYACQFLRLPLILFNVITIIVKLFSG

SEQ ID NO: 2500 - protein, 153 aa, Triticum aestivum
  misc_feature (116)..(116): Xaa can be any naturally occurring amino acid
PSRQHSNQNNPANSSHEHLQRQYTLEGQAAKKDISPPLEWYGVPDGTRSLAVVVQDVDADERVPWTHWVVVNISPEEKGLPEGFSGAGGNANAGGGDGGVQEGVNDWKQPGWRGPXLYALDDLLSLGNKVTVDKVMEAIEGHVLGEAEITAVF

SEQ ID NO: 2501 - protein, 491 aa, Listeria monocytogenes str. 1/2a F6854
MVFLSIKETALPKVQTKLFINGKWTDGDNKETKDIVNPANGDVIAKIAQAGPSETKKAIKAAKDAFPDWAKMELADRVKLLHKIADLMEEKADTLAKIMTLEQGKPLKESKGEVLTGVENFRFAAEEARRLYGETIPAPNNHAFIVKKQPIGVVAAITPWNFPGGMVTRKLAPALATGNTIVLKPSGDTPLSALAIFEIFEEAGLPKGVANIVMGSSKEIGETLTDSDDVRKLTFTGSTKVGQTLFKQSADTLKKISLELGGHAPFIVFDDANLDAAVNDLVAAKFRNNGQVCVSPNRIFVAKEIKEKFTKALVAKVEQLKVGNGLDNVNVGPLIREDAIDKIDKQLKNATDKGAKVLTGGGRLTGSDYDNGNFYKPTVLDNVTREMDIFYEETFGPVIPLITFETEDEAIEMANDSEFGLASYFYTKDLARVEKVGAALEYGMVGANEIAISNPETPFGGVKHSGFGRENGHYGMEEYIQVKFINLKYRD

SEQ ID NO: 2502 - protein, 249 aa, Zea mays
MFGYQKGLDVEAGTSGAAATGGARQLYPGMQESPELRWALIRKIYVILSLQLLLTAVVAAVVVKVRAIPHFFTTTSAGLGLYIFLIILPFIVLCPLYFYHEKHPVNLILLGLFTVAISFAVGMTCAFTSGKVILESAILTTVVVLSLTAYTFWAVNRGKDFSFLGPFLFAAIIVLLVFALIQILFPLGKLSQMIYGGLASLIFSGYIVYDTNNIIRRYTYDQYVWAAVSLYLDVINLFLSLMTLFRAAD

SEQ ID NO: 2503 - protein, 176 aa, Brassica napus
  misc_feature (26)..(26): Xaa can be any naturally occurring amino acid
  misc_feature (37)..(37): Xaa can be any naturally occurring amino acid
AAVSSCSFHQFITFGFACTPLYFVWXKVIGMHDTKSXCLRALARCPVGRGGWFLAIIFPFFGPINSAVGALLVSFTVYIIPSLAHMLTYRSASARQNAAEKPPFFLPSWTAMYVLNAFVVIWVLIVGFGFGGWASVTNFVRQVDTFGLFAKCYQCKPPVPAAAAAHAPVAALHHRL

SEQ ID NO: 2504 - protein, 225 aa, Oryza sativa (japonica cultivar-group)
MDSLYDISCFAAGLAGNIFALALFLSPVTTFKRILKAKSTERFDGLPYLFSLLNCLICLWYGLPWVADGRLLVATVNGIGAVFQLAYICLFIFYADSRKTRMKIIGLLVLVVCGFALVSHASVFFFDQPLRQQFVGAVSMASLISMFASPLAVMGVVIRSESVEFMPFYLSLSTFLMSASFAFSLMGLDLSWEQCSWRSTLTTAENGEARIHLHRCCSHDQNRSE

SEQ ID NO: 2505 - protein, 74 aa, Brassica napus
MASNMEVFCEILIAILLPPLGVCLKRGCCTVEFLICLVLTILGYIPGIIYALYVIVFQNREGETPDYSTPLNSA

SEQ ID NO: 2506 - protein, 163 aa, Candida albicans SC5314
MSEEKVRVQETEEERQERLAKQEEIDGRSVYVGNVDYQSTPEQLEEFFHGVGVIERVTILFDRFSGLPKGYAYIEFEQTESVQKAIDELHGKEFRGRELRVTAKRTNLPGFRRGRGRGGFRARGRGRGGFRGRGRGRGGFNSRGTRNGDSEQADGDAENEETD

SEQ ID NO: 2507 - protein, 423 aa, Pseudomonas syringae pv. tomato str. DC3000
MKLSILGARVIDPVSGLDQTTDLHIEAGKLVAIGAAPAGFEPTQVIDATGLVAAPGLVDLNVSLREPGYSRKGSIASETRAAVAGGVTSLCCPPQTKPVLDTSAVAELILDRAREAGFSKVFPVGALSKGLEGEQLAELIALRDAGCVAFGNGLSSFSNTRTLCRALEYAATFDLTVIFNSQDRDLAEGGLAHDGPTAAFLGLAGIPETAETVALARDLLLVEQSGVRAHFSQLTSARGAALIAQAQARGLPVTADVALYQLILTDEALIDFSSLYHVQPPLRTRADRDGLREAVRSGVIQAISSHHQPHERDAKLAPFGATEPGISSVELLLPLAMTLVDDGLLDLPTLLARLSSGPADALRLPAGKLSAGAPADIVLFDPTASTVAGETWLSKGDNCPFIGHCLPGSVRYTLVDGRISYSR

SEQ ID NO: 2508 - protein, 393 aa, Pseudomonas aeruginosa PAO1
MLSNAQRALIKATVPLLETGGEALITHFYRTMLGEYPEVRPLFNQAHQASGDQPRALANGVLMYARHIDQLQELGPLVAKVVNKHVSLQVLPEHYPIVGTCLLRAIREVLGEQIATDEVLEAWGAAYQQLADLLIEAEESVYAASAQADGGWRGVRRFRVARKQAESEEITSFYLEPVDGQPLLAFQPGQYIGLRLDIDGEEVRRNYSLSAASNGREYRISVKREAGGRVSNYLHDRVAEGDELDLFPPAGDFVLRDSDKPLVLITAGVGITPALAMLQEALPQARPIRFIHCARHGGVHAFRDWIEDVSAQHEQVEHFFCYSEPRAGDSADAEGLLSREKLADWLPQERDLDAYFLGPRPFMAQVKRHLADLGVPSQQCHYEFFGPAAALDA

SEQ ID NO: 2509 - protein, 139 aa, Helianthus annuus
MANAASGMAVHDECKLKFMDLKAKRTHRFIIYKIEEKQKQVMVEKVGEPAQTYDEFAACLPENECRYAVFDYDFLTPEGVQKSRIFFIAWSPDTARVRNKMIYASSKDRFKRELDGIQVELQATDASEMGLDVIQSRAN

SEQ ID NO: 2510 - protein, 422 aa, Aspergillus nomius
MALPDKAALVGLANALSEQVKRYLAIPDETELPKGDKHCIEGVKSSSSAEHAQAWEIVRTCDRIGSLIHGPVPWLLSNALSHLDSACLAAATQLNLQDVIVDGASSTSLDTIVAATGVSKDLLRRILRGCAQRFIFEEVAPDQYAHTDASKMLRVKGIHALVGFSCDEVMRSGACFSDFLQQTKGNPPSWNVPSPFSLAFDPAKGLFDYYSTVDEVRGRRFDLGMGGTEATKPLVEEMFDFSSLSEGSTIVDVGGGRGHLSRRVSQKHPHLKFIVQDLPAVIHGVEDTEKVTMMEHDIRHPNPVRGADVYLLRSILHDYPDAACVEILSNIVSAMDPTKSRILLDEMIVPDLLAQDSQRFMNQIDMTVVLTLNGKERSVKEWDSLITTVDGKLETEKTWWRKGEEGSHWGVQQLRLHGSSAD

SEQ ID NO: 2511 - protein, 588 aa, Triticum aestivum
  misc_feature (159)..(159): Xaa can be any naturally occurring amino acid
  misc_feature (214)..(214): Xaa can be any naturally occurring amino acid
  misc_feature (227)..(227): Xaa can be any naturally occurring amino acid
MTFHAAQRSLQLRYATTPPASSLRAILKKAKGSGELRLRARSRSVAGRDQLLRAHGPNEGLRRWGVGLGAGHRRGLLAQAVMALDRREATPTHDLPSYPVPPHRFLAMMHLQESTARLFPNLLIEDVEEGLPVVYPPVVGEACQKHGSIYRPPAGALHXSLKDTGSVLGVPSSWPEPRLRVSGVTDGVPGVGLEDVDCQGRATEVRLLTPWSFXSQVATKFCGKLRXDVGTNNEKLLNDEYYIGLRQRRATGEEYHELLQEFMNAVKQNYGEKVLVQFEDFANHNAFDLLAKYSKSHLVFNDDIQGTASVVLAGLLAALKMIGGGLVDQTYLFLGAGEAGTGIAELIALEMSKHTELPVDDCRKKIWLVDSKGLLVESRKESLQHFKKPFAHEHEELKTLLEAVQSIKPTVLIGTSGVGKTFTQEVIEAMASFNEKPVIFSLSNPTSHSECTAEEAYTWSKGTAVFASGSPFDPVEYEGKTYVPGQSNNAYVFPGFGLGVVISGAIRVHDDMLLAASEALAEEATQENFDKGLIFPPFTNIRKISASIAAKVAAKAYDLGLASRLPRPDDLVKYAESCMYTPLYRSYR

SEQ ID NO: 2512 - protein, 291 aa, Oryza sativa (japonica cultivar-group)
MAASSSSSMASSQPRMMEQSLFYTQPPARAVHTRKVTAVNLHREMSLIRSLMPTFPFVAVDTQFPGVVHPHPRGAGVTADDRYAAVRANADELCLLQLGITLSAADGRLPVDGALVEFMWDFDFAGFDARYHRHAPESVQFLRAQGFDFEAARLAGVPALAFAAELAASGILGLRGVTWVAFGGMYDVAFLLRLATGGAPLPATRLGFLAQVGAVFGTQVFDAKHMASLLHMHGGLAAVGGMLRLPPQLPRRHMAGQNSVMAIQLFMELRRRFNDLGGSLHSCSLKIEGLT

SEQ ID NO: 2513 - protein, 346 aa, Zea mays
  misc_feature (265)..(265): Xaa can be any naturally occurring amino acid
  misc_feature (268)..(268): Xaa can be any naturally occurring amino acid
  misc_feature (270)..(270): Xaa can be any naturally occurring amino acid
  misc_feature (272)..(274): Xaa can be any naturally occurring amino acid
  misc_feature (276)..(276): Xaa can be any naturally occurring amino acid
  misc_feature (281)..(281): Xaa can be any naturally occurring amino acid
  misc_feature (284)..(284): Xaa can be any naturally occurring amino acid
  misc_feature (305)..(305): Xaa can be any naturally occurring amino acid
  misc_feature (324)..(324): Xaa can be any naturally occurring amino acid
QTGRGEIVECSPSKEADLFNAVLGGLGQFGIITRARILLQEAPEKVTWVRAFYDDLGAFTRDQELLVSIPDSVDYVEGFMVLNERSLHSSSIAFPASVDFSPDFGTRSSPRIYYCVEFAVHHHHGYQQQSQAAVEAISRRMSHMASQLYSVEVSYLDFLNRVRMEEVSLRSAGMWEEVHHPWLNMFVPKAGVAGFRDLLMDNVSPDSFQGLILIYPLLRDKWDTNTSVVIPDSGPTADDPVMYVVGILRSANPGPEEDGDGCSHXCLXEXLXXXRXIADAXEAXLGAKQYLPHHPTPARWQQHLXRRWERFADRKARFDPLRIXGPGQGIFPRTAQDAAAAAAYGS

SEQ ID NO: 2514 - protein, 133 aa, uncultured Rickettsia sp.
ANEAVINMLKEIGSSENIPKYIAKAKDKNDPFRLIGFGHRVYKNYDPRAAVLKETCKEVLKELGQLENNPLLQIAIELEAIALKDEYFIERKLYPNVDFYSGIIYKAMGIPSQMFTVLFAIARTIGWRAQWKE

SEQ ID NO: 2515 - protein, 274 aa, Thermotoga maritima MSB8
MLYKELGRTGEEIPALGLGTWGIGGFETPDYSRDEEMVELLKTAIKMGYTHIDTAEYYGGGHTEELIGKAIKDFRREDLFIVSKVWPTHLRRDDLLRSLENTLKRLDTDYVDLYLIHWPNPEIPLEETLSAMAEGVRQGLIRYIGVSNFDRRLLEEAISKSQEPIVCDQVKYNIEDRDPERDGLLEFCQKNGVTLVAYSPLRRTLLSEKTKRTLEEIAKNHGATIYQIMLAWLLAKPNVVAIPKAGRVEHLRENLKATEIKLSEEEMKLLDSLG

SEQ ID NO: 2516 - protein, 509 aa, Rhodococcus ruber
MTGTLSRDSGTTNQVDERLGAAAREFLGRPHQLFIDGQWVDAADGRTFGTYDPATGAEITQVAHGGPEDVDRAVAAARRAFDDGDWATMKPNKREQILWRIGDLLDARGEMLGQIEALDNGKSAAIATAVDVTFAADVFRYYAGWCTKIEGTTVDVSMPFAGDKQFHAYTQRVPVGVCGQIIPWNFPLLMAAWKLAPALATGNTLVLKPAEQTPLTALLLGEIMAEAGVPDGVVNIITGFGDAGAAISAHDDVDKVAFTGSTEVGKLIVDAAKGNLKKVSLELGGKSANIVFADCDFDAAVAGSVAAWMFNHGQACTAGTRLYVEDSIYEKFTQAVADAAAQATIGHGLDPATELGPLVDQDQFDKVSYYLRAGIEDGGRALTGGGRHGDTGYFIQPTVFVDVEPDHRVVTDEIFGPVVAALRFSDMDDAVRQANDSIYGLAAGVWTKDISKAHKVASRLHAGSVWVNQYNGFDTAMPFGGFKQSGWGRELGKGALDLYTQTRSVNIQL

SEQ ID NO: 2517 - protein, 371 aa, Listeria monocytogenes str. 4b H7858
MEYKKALAFIKSNSILEQEEGTEVIFKQAQETVRGNLDPFLLKDLKQHLGGTNDAIKEAPQEIQMPDFSNLEIATAAALQMRATMGSPNIDLSNGVTTEYRVVEGDYGDIPVRIYRHEEATKPVPAFIFYHGGGFVGGTPAVVENFCKGIAEKLPAVVINVDYHLAPEFPAPAAPKDCYRALEWVVEQSDELGIDASKIGVSGDSAGGTLAAAVSYMDYEAETNYVGFQALLYPALTLVDEDNDKYQWDISKFGASEETLPLVAPGIIGMNSSGELLRTAYVRDENPASPIYSPLSAVDKSIYPPTLIASAEFDALRAFADIFAKELRASGVQTKVIVYQGMCHAFIDKYGIFPQAEDVADEIVQMMKEIF

SEQ ID NO: 2518 - protein, 439 aa, Pyrococcus furiosus DSM 3638
MIKIYTLGGYEEVGKNMTAVEYEGEIVIIDMGIRLDRVLIHEDVEFQKMSSKELRKLGAIPDDRPIRDKKVVAIALSHGHLDHIGAVGKLAPHYPDVPIYGTPYTIRLAKSEIKGEEYFEVTNPLYETNYGEIVQVSENLAIEFVQITHSIPHSSIVVIHTPEGAVVYACDYKFDNNHPYGEKPDYKRLKELGKEGVKVLIAESTRVAEETKTPSEAVAKMLLEDFFLYEGMEADGLIATTFASHITRLQALIEIANKMGRQAVFIGRSLAKYTGIAKQLGLIKMKGSRVLRSPNAISKVLKEVSQARENYLLVVTGHQGEPGAILTRMANGELYDIGPRDTVVFSAGVIPNPLNIAQRYALETKLRMKGVRMIKNLHVSGHASKEDHRYLIRMLNPENIVPAHGEFRMLTHYAELAEEEGYMIGKDVFISRNGHAITI

SEQ ID NO: 2519 - protein, 131 aa, Chlorella vulgaris
MSTKTNEILDILKSITLLEAAELVSQIEETFGVDASAPVGGGFMAAPGGAGTAAAEIVEEKTTFDVIIEDVASDKRVPVLKVVRNLTSLDLKEAKEAITSLPKVIQQGVSKDDAEASKKQLEDAGAKVKIS

SEQ ID NO: 2520 - protein, 168 aa, Zea mays
MAAASSATSVHDFTVKDSSGKDVDLSVYRGKVLLIVNVASQCGLTNSNYTQQAQLYDKYKNQGFEILAFPCNQFGGQEPGTNEEIAQFACTRFKAEYPIFDKVDVNGNNAAPIYKFLKSSKGGLFGDSIKWNFSKFLVDKEGRVVDRYAPTTSPLSIEKDIKKLLGSS

SEQ ID NO: 2521 - protein, 138 aa, uncultured Rickettsia sp.
ANEAVINMLKEIGSSENIPKYIAKAKDKNDPFRLMGFGHRVYKNYDPRAAVLKETCKEVLKELEQLENNPLLQIAIELEAIALKDEYFIERKLYPNVDFYSGIIYKAMGIPSQMFTVLFAIARTVGWMAQWKEMHEDP

SEQ ID NO: 2522 - protein, 662 aa, Zea mays
MISARTAAASPASLWKQGGRSEGGGSCDGCRTYRNTLRRAAAAKVRALPSRAVEAVKMGSAAEMEQEEAEVAAAAAGVVVEDHYGEDSATEELPILPWAFSVARYVSFSWLKKYAEESYFYISGYTLLRDPHHNKGLAFMEKERDAHHLRGLLPPAVVPQELQIKKIMHNLRQYQVPLQRYMAMMDLQERNERLFYKLLIDNVEELLPVVYTPTVGEACQKYGSIFRQPQGLYVSLRDKGKVLEVLRNWPHRNIQVICVTDGEAILGLGDLGSQGMGIPVGKLALYTALGGVRPSACLPITIDVGTNNEKLLNDEFYIGLRQKRATGEEYHELMEEFMAAVKQIYGEKVLIQFEDFANHNAFNLLAKYSKSHLVFNDDIQGTASVVLAGLLAALKVVGRTLAEHTYLFLGAGEAGTGIAELIALEISKQTSAPIEECRKKIWLVDSKGLIVDSRKNSVQSFKKPWAHEHEPLTTLYDAVQSIKPTVLIGTSGVGRTFTKEVVEAMASFNERPIIFSLSNPTSHSECTAEEAYNWTQVVIFASGSPFDPVEYDGKVFVPGQSNNAYIFPGFGLGLVISGAIRVHEDMLLAASEALAAQATQENFDKGSIFPPFTNIRKISARIARAVAAKAYELGLATRLPPPRDLVKYAQSCMYTPVYRNYR

SEQ ID NO: 2523 - protein, 345 aa, Pyrococcus horikoshii
MYKVAVIKGDGIGPEVIDAAIRVVKSVTDKIKFYEFEGGLSVFKKYGVPIREEDLEEIRKMDAILFGATTTPFDVPRYKSLIITLRKELDLYANLRIIPNFKLRKEIIIVRENSEGLYSGEGAYDSNKVVDFRIITRKGAERIAKFAVKLAKDRSTFLTFVHKANILESDRFFRKIVLDIARKEDVKVREEIVDSFTIKLVKDPWNLGIILSENMFGDILSDLATIHAGSIGIVPSGNYGEDIALFEPIHGSAPDIAGKGIANPIGAILSAAMMLDYLGLDGSIIWKAVGRYVRRGNLTPDMEGRATTLEVTNGIISEIYRLDEYEIDEVWRDEVRLGRILLEIS

SEQ ID NO: 2524 - protein, 192 aa, Methanothermobacter thermautotrophicus str. Delta H
MAHGPRYKLAFRRRREGKTDYRARYKMVETGKSRLVVRITTYHVIAQIINVGMNGDETLVSAHSKQLQKMGWLGGTSNTAAAYLTGYLCGKRALKEGIEEAVLDIGLRPAIRGSKVFAALKGAVDAGLNVPHGESVLPDESRIRGEHIMEYAESLDEEELRKRFSKYLERGLSPVDLPEHFDEIKKRIDEEV

SEQ ID NO: 2525 - protein, 335 aa, Streptococcus pneumoniae R6
MKRIAVLTSGGDAPGMNAAIRAVVRQAISEGMEVFGIYDGYAGMVAGEIHPLDAASVGDIISRGGTFLHSARYPEFAQLEGQLKGIEQLKKHGIEGVVVIGGDGSYHGAMRLTEHGFPAIGLPGTIDNDIVGTDFTIGFDTAVTTAMDAIDKIRDTSSSHRRTFVIEVMGRNAGDIALWAGIATGADEIIIPEAGFKMEDIVASIKAGYECGKKHNIIVLAEGVMSAAEFGQKLKEAGDISDLRVTELGHIQRGGSPTPRDRVLASRMGAHAVKLLKEGIGGVAVGIRNEKMVENPILGTAEEGALFSLTAEGKIVVNNPHEADIELSSLNKSLS

SEQ ID NO: 2526 - protein, 156 aa, Euphorbia esula
HEDHFESKADAGASKTYPQQAGTIRKNGYIVIKNRPCKVVEVSTSKTGKHGHAKCHFVGIDIFNGKKLEDIVPSSHNCDVPHVTRTDYQLIDISEDGFVSLLTENGNTKDDLRLPTDESLLSQIKDGFGDGKDLVVTVMSSMGEEQICALKDIGPK

SEQ ID NO: 2527 - protein, 234 aa, Zea mays
  misc_feature (81)..(81): Xaa can be any naturally occurring amino acid
SDSDHCHSARYYLKDAVLDGGIPFNKAYGMTAFEYHGTDPRFNRVFNEGMKNHSVIITKKLLDFYTGFEGVSTLVDVGGGXVGATLHAITSRHPHISGVNFDLPHVISEAPPFPGVRHVGGDMFASVPAGDAILMKWILHEWSDAHCATLLKNCYDALPENGKVIVVECVLPVNTEATPKAQGVFHVDMIMLAHNPGGKERYEREFRELAKGAGFSGFKATYIYANAWAIEFIK

SEQ ID NO: 2528 - protein, 475 aa, Rickettsia rickettsii
MNLLKNITGKNYINGEFIEFGKQISVINPATLKEIATVPNLGLSEINSAINNTVTSFALWSQSSFEARIAILRRWYNLVIENIEELSHILTLEQGKVLAESKKEILYGASFIDWYTYAIHNIHSTIKPGNSNTHKIVTQYEPVGPSAAITPWNFPNAMIARKVVPAIAAGCSVILKPSSLTPLSALVLAKFASDAGLPSGVFNVITGSSDIIGKAFCEDFRLRKLSFTGATNVGKILYQNAANTLKRLSLELGGNAPFIITADNNLEKVVSDLVIAKTRNSGQSCTSPNRIFIEESIYEKFIEILKAKFTKLKAGDGFDKESDVGPLINSAAIEKIQKLLADAQSKGAKLICGGKTVDNFIEPTIIIDCLDNMDIFRIEIFGPVVACYKFKDLDEVIEHANNTEYGLQGYVYSNNISVAQMIASKLDFGMVSINDPLPANAKAPFAGRKASGFGVEGSFEGIFEYLNTKYINLQN

SEQ ID NO: 2529 - protein, 489 aa, Halomonas elongata
MTAQSAQPLYIGGRPVDATSGETFTVTNPYDGSLLATIGQASQADVDSAVQAAQRGQREWAAMTGMERSRILLRAVALLRERNDELAELETRNTGKPISETASVDIVTGADALEYYAGLAPAIEGSQIPLRDTRLVYTRREPLGVIGAIGAWNYPIQIACWKAAPALAAGNAIVFKPSEVTPLTALKLAEIFTEAGLPDGVFNVVQGDGRVGAMLTEHEGIAKVSFTGEVGTGKKVMAAAGGSTLKDVTMELGGKSPLIVFADADLDRAADAAMMANFYSSGQICTNGTRVFVERSAKEAFEAKLVERVARIKAGDPMDPSVNFGPLVSFEHQEKVLSYIALGKEQGARVLAGGDAWNSGEWAKGAWAAPTVFTDCTDEMRVVKEEIFGPVMSVLAFDDEEEVIRRANNTKYGLAAGVFSESLNRAHRVIHQLEAGICWINTWGESPSEMPVGGYKESGIGRENGVETLNHYTQTKSVQIEMGPFESVF

SEQ ID NO: 2530 - protein, 51 aa, Phaseolus vulgaris
MKQFRVLTCQTVADMIKGKTPEEIRKTFNIKNDFTPEEEEEVRRENQWAFE

SEQ ID NO: 2531 - protein, 171 aa, Zea mays
  misc_feature (37)..(37): Xaa can be any naturally occurring amino acid
MAATAMMASSDTAGAAFQGLKCTVSLPIVRRSFRSLXGNVSNGGRIRCMQVWPAYGNKKFETLSYLPPLSTDDLLKQVDYLLRNGWIPCLEFSKVGFVYRENSTSPCYYDGRYWTMWKLPMFGCNDATQVYKELQEAIKSYPDAFHRVIGFDNIKQTQCVSFIAYKPPGSD

SEQ ID NO: 2532 - protein, 182 aa, Betula pendula
MACSMISSATVAAVSRASPAQSSMVAPFTCLKSTSAFPVTQKTNNDITSIASNGGRVQCMQVWPPLGLKKFETLSYLPPLSSEQLAKEVDYLLRKNLIPCLEFELEHGFVYREHNRSPGYYDGRYWTMWKLPMFGCNDSSQVLKELEECKKAYPSAFIRIIGFDNKRQVQIISFIAYKPPGV

SEQ ID NO: 2533 - protein, 434 aa, Salmonella enterica subsp. enterica serovar Typhi Ty2
MKTRTQQIEELQKEWTQPRWEGITRPYSAEEVVKLRGSVNPECTLAQLGAAKMWRLLHGEAKKGYINSLGALTGGQALQQAKAGIEAIYLSGWQVVADANLASSMYPDQSLYPANSVPAVVDRINNTFRRADQIQWASGIEPNDPRYVDYFLPIVADAEAGFGGVLNAFELMKSMIEAGAAAVHFEDQLASVKKCGHMGGKVLVPTQEAIQKLVAARLAADVMGVPTLVIARTDADAADLITSDCDPYDSGFITGERTSEGFYRTHAGIEQAISRGLAYAPYADLVWCETSTPDLELARRFADAIHAKYPGKLLAYNCSPSFNWQKNLDDKTIASFQQQLSDMGYKYQFITLAGIHSMWFNMFDLAHAYAQGEGMKHYVEKVQQPEFAAAKDGYTFVSHQQEVGTGYFDKVTTIIQGGASSVTALTGSTEESQF

SEQ ID NO: 2534 - protein, 187 aa, Triticum aestivum
  misc_feature (19)..(19): Xaa can be any naturally occurring amino acid
  misc_feature (30)..(30): Xaa can be any naturally occurring amino acid
  misc_feature (68)..(68): Xaa can be any naturally occurring amino acid
  misc_feature (104)..(104): Xaa can be any naturally occurring amino acid
  misc_feature (139)..(139): Xaa can be any naturally occurring amino acid
  misc_feature (148)..(148): Xaa can be any naturally occurring amino acid
  misc_feature (156)..(156): Xaa can be any naturally occurring amino acid
  misc_feature (184)..(184): Xaa can be any naturally occurring amino acid
MKTLLILTILAMAITIGTXANIQVDPSGQXVNWLQQQLVPQLQQPLSQQPQQTFPQPQQTFPHQPQQXQVPQPQQPQQPFLQPQQPFPQQPQQPFPQTQQPQAXPFPMQPQQPFPQTQQPQQPFPQQPQQPFPQTQQPXQPFPQLQQXQNLFPSPXQQLPAAQQPEQSFPQQQRSFIQPSLQQXVEP

SEQ ID NO: 2535 - protein, 414 aa, Escherichia coli
SKVVVPAQGKKITLQNGKLNVPENPIIPYIEGDGIGVDVTPAMLKVVDAAVEKAYKGERKISWMEIYTGEKSTQVYGQDVWLPAETLDLIREYRVAIKGPLTTPVGGGIRSLNVALRQELDLYICLRPVRYYQGTPSPVKHPELTDMVIFRENSEDIYAGIEWKADSADAEKVIKFLREEMGVKKIRFPEHCGIGIKPCSEEGTKRLVRAAIEYAIANDRDSVTLVHKGNIMKFTEGAFKDWGYQLAREEFGGELIDGGPWLKVKNPNTGKEIVIKDVIADAFLQQILLRPAEYDVIACMNLNGDYISDALAAQVGGIGIAPGANIGDECALFEATHGTAPKYAGQDKVNPGSIILSAEMMLRHMGWTEAADLIVKGMEGAINAKTVTYDFERLMDGAKLLKCSEFGDAIIENM

SEQ ID NO: 2536 - protein, 116 aa, Glycine max
  misc_feature (19)..(19): Xaa can be any naturally occurring amino acid
FELADVAPISTYVDSGERXYFVADERGYDHWLCITADEFLFTSKGRILDNRLKLITVVRDSQYSKSGVTAKTNDGCINHTNPVMLPASIAVLQSDLLALHPPSPVRPFFFVQLSLA

SEQ ID NO: 2537 - protein, 331 aa, Methylobacillus flagellatus KT
MNILDPIMHTLMPETDQYSGMEPKTRAFLEELAASDSKPVEALSPEEARKVLSDLQAGVDVELGGVTVEEREIAIEGHSIHLFIVKPADIAISPPVVMFFHGGGWVLGDFPTHQRLVHDLCVASNCAVVFVDYSRSPEVKYPTAIIECYLATKWVAQNGAEIGVDPARLAVAGNSAGGNMAAVVCMMAKEKREPFIKHQTLFWPVTDARFNTDSYQQFDEGYFLTRNMMKWFWDNYLENKDARKEIYASPLNASLEHLADLPPALIQTAEFDVLRDEGEAYAHLLMDAGVSVTCTRYLGAIHDFGLLNPLAKTPQAYASIMQAAGEIRKHI

SEQ ID NO: 2538 - protein, 192 aa, Ralstonia solanacearum
MTPAPSTLWLTGLSAAGKTTLAHALAEALTAAGAACQVLDGDVVRQALSRDLGFSRADRSQNIRRVADRCRQLNDAGSWAIAAVISPYRADREQARRTVGEPRFFEIHLATPLTVCERRDPKGLYRRARAGEIAHFTGISDAYEVPQHPDLRFDTATRSVAECVDATMALLAAVSGNVMTLSSESVSNAGSI

SEQ ID NO: 2539 - protein, 251 aa, Fucus vesiculosus
MASRDDLVYMAKLAEQAERFDEMVDHMKAVAQQPKELSVEERNLLSVAYKNVIGSRRASWRVISSIEGKDTVSDQLPLIRDYKSKIETELTDICADILKIIEAELIPNSTSEEGKVFYYKMKGDYHRYLAEFQSADERKTSASDALDAYQLASDHANQDLPPTHPIRLGLALNFSVFYYEILNSPDRACGLAKAAFDDAIAELDTLSEESYKDSTLIIMQLLRDNLTLWTSDQGEAEEAPGNADGTVVEDL

SEQ ID NO: 2540 - protein, 151 aa, Brassica napus
  misc_feature (9)..(9): Xaa can be any naturally occurring amino acid
  misc_feature (11)..(11): Xaa can be any naturally occurring amino acid
  misc_feature (18)..(18): Xaa can be any naturally occurring amino acid
  misc_feature (21)..(21): Xaa can be any naturally occurring amino acid
  misc_feature (29)..(29): Xaa can be any naturally occurring amino acid
  misc_feature (34)..(35): Xaa can be any naturally occurring amino acid
  misc_feature (38)..(40): Xaa can be any naturally occurring amino acid
  misc_feature (47)..(49): Xaa can be any naturally occurring amino acid
  misc_feature (53)..(53): Xaa can be any naturally occurring amino acid
  misc_feature (57)..(59): Xaa can be any naturally occurring amino acid
  misc_feature (67)..(68): Xaa can be any naturally occurring amino acid
  misc_feature (79)..(79): Xaa can be any naturally occurring amino acid
  misc_feature (82)..(82): Xaa can be any naturally occurring amino acid
  misc_feature (91)..(91): Xaa can be any naturally occurring amino acid
  misc_feature (96)..(96): Xaa can be any naturally occurring amino acid
  misc_feature (99)..(99): Xaa can be any naturally occurring amino acid
  misc_feature (101)..(101): Xaa can be any naturally occurring amino acid
  misc_feature (103)..(103): Xaa can be any naturally occurring amino acid
  misc_feature (105)..(106): Xaa can be any naturally occurring amino acid
  misc_feature (119)..(119): Xaa can be any naturally occurring amino acid
  misc_feature (121)..(121): Xaa can be any naturally occurring amino acid
  misc_feature (123)..(123): Xaa can be any naturally occurring amino acid
  misc_feature (127)..(127): Xaa can be any naturally occurring amino acid
  misc_feature (135)..(135): Xaa can be any naturally occurring amino acid
  misc_feature (142)..(142): Xaa can be any naturally occurring amino acid
  misc_feature (144)..(144): Xaa can be any naturally occurring amino acid
MASSMLSSXAXVTSPAQXTMXAPFTGLKXSAAFXXTRXXXNDITSFXXXGGRXSCMXXXPPVGKKKXXTLSYLPDLTEXELXKEVDYLLRXKWIPXVEXEXEXGXXYREHGSTPGYYDXRXWXMGKXPLFGCTDXAQVLKEXQXCKTEYPN

SEQ ID NO: 2541 - protein, 314 aa, Aspergillus flavus
MGTPFAAPWHQFVEDLGQTPCLPGKDLDSILAGWGQLAGTLATRYGFPPPDESVTTEDVQLDGLWLRCYTPPNATGQEPVGLYFHGGGWVMGGVNEEDGFCRVISRQCQMRLVSVEYRKAPETRYPGALNDGVSAALWALSRYENQPLILMGTSAGGNLAFGTALRLIDQDMADKVSGVVALAPITVHPDAVPEHLKEQYTAYEENAELTVNSRAAMQVFFDCYKAPVDDVYTSCLLHPRLLALPKVYIAELGLDTLRDDARLMKGALDTAKVPVMYDAYPGYPHCSFMFPFKSLGEHQRTFFGGVAKAVRWMS

SEQ ID NO: 2542 - protein, 429 aa, Mycobacterium tuberculosis
MASVVGTPKSAEQIQQEWDTNPRWKDVTRTYSAEDVVALQGSVVEEHTLARRGAEVLWEQLHDLEWVNALGALTGNMAVQQVRAGLKAIYLSGWQVAGDANLSGHTYPDQSLYPANSVPQVVRRINNALQRADQIAKIEGDTSVENWLAPIVADGEAGFGGALNVYELQKALIAAGVAGSHWEDQLASEKKSGHLGGKVLIPTQQHIRTLTSARLAADVADVPTVVIARTDAEAATLITSDVDERDQPFITGERTREGFYRTKNGIEPCIARAKAYAPFADLIWMETGTPDLEAARQFSEAVKAEYPDQMLAYNCSPSFNWKKHLDDATIAKFQKELAAMGFKFQFITLAGFHALNYSMFDLAYGYAQNQMSAYVELQEREFAAEERGYTATKHQREVGAGYFDRIATTVDPNSSTTALTGSTEEGQFH

SEQ ID NO: 2543 - protein, 386 aa, Aspergillus flavus
MTGLDMETIFAKIKEEYARTDDVGKRKIQGHIRELQVGFYSDWDVVMRLSSGPLQVALAKVGIDLGIFRSLKESDTPIALAEFVKKTGASPRLLGRILRTQAAFGLIKETGPQEYTSSAFTDVFANPAAAGAVVQLFDISGPCTQILPDFLAERHYQDITSNKDCVFQKAFDSDLTMFEWMPQHPKHMESLGHLMALERPVSWVDHFPVLEELGDFPAPDKVLMVDIGGGFGQQSKALRAKFPNIPGRVIVQDIPQTLANAQPAAGVEFMEHNFFESQPIRNAKFYYLRHVFHDWPDEQCVLILKQIIPVMGPESEILIDEMVIPSTGVPWQAAFTDLLMMNSLGGVERTRAEWDDLMKQAGLEIIQSKVYDSKEQTILVAVPRRT

SEQ ID NO: 2544 - protein, 285 aa, Triticum aestivum
MKTLFILTILAMATTIATANMQVDPSGQVQWPQQQPFRQPQQPFYQQPQQTFPQPQQAFPHQPQQQFPQPQQPPQQFPQPQQPQQPFPQPQQAQLPFPQQPQQPFPQPQQPQQPFPQSQQPQQPFPQPQQPQQSFPQQQQPLIQPYLQQQMNPCKNYLLQQCNPVSLVSSLVSMILPRSDCQVMQQQCCQQLAQIPRQLQCAAIHSVVHSIVMQQEQQQGIQILRPLFQLVQGQGIIQPQQPAQYEVIRSLVLRTLPNMCNVYVRPDCSTINAPFASIVAGISGQ

SEQ ID NO: 2545 - protein, 301 aa, Hordeum vulgare
MATKARKVEVRDASRAEGKGDAADVHVLREAMRADGKGDHDTAGGANRADGHGDAGGRVGDSRGVDGKDSLKMVALQAPVTVERPVRGDLEEHVPKPYLARALAAPDMYHPEGTTTDDHQHHNMSVLQQHVAFFDRDNNGIIYPWETYDGCRAVGFNVFMSAFIAFLVNLVMSYPTLPGWLPNPLFPIYVHNIHKSKHGSDSGTYDKEGRFMPVNFENIFSKYARTYPDRLSYREMWRMTEGCREVFDFFGWVAMKLEWSILYALARDDEGYLSREAIRRMYDGSLFEYMERQRMEHVKMS

SEQ ID NO: 2546 - protein, 134 aa, uncultured Rickettsia sp.
ANEAVINMLKEIGSSENIPKYIAKAKDKNDPFRLIGFGHRVYKNYDPRAAVLKETCKEVLKELGQLENNPLLQIAIELEAIALKDEYFIERKLYPNVDFYSGIIYKAMGIPSQMFTVLFAIARTIGWMAQWKEM

SEQ ID NO: 2547 - protein, 145 aa, Triticum aestivum
  misc_feature (134)..(134): Xaa can be any naturally occurring amino acid
YAAAVVAAVGRVCDRKGVQHPVICSESGRALVSHHSVLIFEAFSATAPASNMMDPATAYLLDELTDDCRSDYRNLMASAVRGDFDTCGLYADQLKRRCAEQFKEGVLGLEHLAAVDGLCEIVARGMGAAEGPRXVHINLSVFTSL

SEQ ID NO: 2548 - protein, 429 aa, Mycobacterium tuberculosis
MASVVGTPKSAEQIQQEWDTNPRWKDVTRTYSAEDVVALQGSVVEEHTLARRGAEVLWEQLHDLEWVNALGALTGNMAVQQVRAGLKAIYLSGWQVAGDANLSGHTYPDQSLYPANSVPQVVRRINNALQRADQIAKIEGDTSVENWLAPIVADGEAGFGGALNVYELQKALIAAGVAGSHWEDQLASEKKCGHLGGKVLIPTQQHIRTLTSARLAADVADVPTVVIARTDAEAATLITSDVDERDQPFITGERTREGFYRTKNGIEPCIARAKAYAPFADLIWMETGTPDLEAARQFSEAVKAEYPDQMLAYNCSPSFNWKKHLDDATIAKFQKELAAMGFKFQFITLAGFHALNYSMFDLAYGYAQNQMSAYVELQEREFAAEERGYTATKHQREVGAGYFDRIATTVDPNSSTTALTGSTEEGQFH

SEQ ID NO: 2549 - protein, 398 aa, Methanosarcina mazei Go1
MNEQGLSEREIFSYLENAKSEDTDYYRVFSSMCTRPHKIAIEANRLFIEANLGDLGLFAGAHKLEQEVVRMLGNLLHASSIDVPSGGLCQSSVCGYLTTGGTESNIQAVRGMKNLVTAGKKEFKGTPNIVIPASAHFSFDKVADMMGIEVRRASLDSEFRVDMASVEKLINENTIGLVGIAGNTEFGQIDPIDKLSEVALENELFLHVDAAFGGFVIPFLEKPQPFDFKVPGVTSIAIDPHKMGLSTIPSGALLFRSPSFLDSLKVSTPYLTTKSQFTLTGTRSGASAAATCAVMKYLGYEGYRKNVQYCMELTSKIVEEARKLGFEPLIEPVMNVVALKVPNPDLVRERLLKKFGWNVSITRTPRALRLVLMPHNSPEDIELFLEDLKKVTAEIKSP

SEQ ID NO: 2550 - protein, 227 aa, Eucalyptus grandis
MAREKIQIKKITNATARQVTFSKRRRGLFKKAEELSVLCDADVALIVFSSSGKLFEYCSSSMKEILERHHSHSENLGKLDQPSLKLQLVENGDYSRLSKEVAEKGHQLRQMRGEELQGLNIDELQQLEKSLEAGLNRVIEKKGEKIMKEITDLQQKGAKLMEETKRLKQQVTEISGRKTTATDSETIINEEGLSSESITNVCSSSSGPPQEDDSSDISLKLGLPYNG

SEQ ID NO: 2551 - protein, 246 aa, Hordeum vulgare
MAGEDATRAATEEELSSVAEAAPVTAQRPVRSDLEKYIPKPYLARALVAPDVYHPQGSKERGHEHRHRSVLQQHVAFFDMDGDGVIYPWETYQGLRALGFNMIVSFVIVIIIHATLSYTTLPSWVPSLLFPFYIDNIHRAKHGSDTATYDTEGRYMPVNFENIFSKNARSSPDKLTFREIWTMTDDQRQANDPFGWVASKAEWILLYMLAKDEEGNLPREAIRRCFDGSLFEFIADERRQAHGKQY

SEQ ID NO: 2552 - protein, 285 aa, Thermosynechococcus elongatus BP-1
MSPIIQWYPGHIAKAERALKEQLKQVDVIFEVRDARIPLASCHPQIRQWASGKQRLLVLNGMDRISDRDRQQWLTWFETQGETVFFTNAQRGEGIRRLEQAAVRAGAAINQRRQQRGMQVRAVRAVVLGFPNVGKSALINRLLQQRVVESAARPGVTRQLRWVRLSPVLELLDAPGVLPMNFKNQEAAVKLAICDDIGQAAYDPCRVAPMLVEIMQQLGYAERLRDRYGLALTDTGETYLYDLAARRYHGDLERAARQLLQDYRRGYLGAIALEHPPQSRNSTIP

SEQ ID NO: 2553 - protein, 294 aa, Arabidopsis thaliana
MGEVWRWNKEVEMDSIRDCLKHFSSIAIDTEFPGCLKETPMDASEEIRYRDMKFNVDNTHLIQLGFTLFDRRGITKTWEINLSDFNEHKCFKNDKSIAFLKSNGLNLDKIGEEGIGIEEFFRDFSQILKEKDGKITWVNFQGSYDNAYLVKGLTGGKPLPETKEEFHETVEQLLGKFVFDVKKIAESCSGLSSRFGLQRIADVLQMKRVGKAHHAGSDSELTARVFTKLTFDLLNSRKQCVRRVDHQQYQLEQQQLMMTRCYIPIPIPIPRPRSVMFAAHHPNPYFGGGYFGMP

SEQ ID NO: 2554 - protein, 264 aa, Oryza sativa (japonica cultivar-group)
MDAAAAAGGEMSRQKATASAPPPPELDMVARAVQRLVARNDAVEALSGGGEAAAGLGAGMAAFEAARGAPAPRIGVAQYLERVHRYAGLEPECYVVAYAYVDMAAHRRPAAAVASRNVHRLLLACLLVASKVLDDFHHNNAFFARVGGVSNAEMNRLELELLAVLDFEVMLSHRVYELYREHLEKEARRDGGGGDMLAGASAAAAAKAGRMAAVSPSKLLERAAVNGAAQHDDWRSLGTAAAAEAANGVRRHRSSSSSRYSFDC

SEQ ID NO: 2555 - protein, 143 aa, Triticum aestivum
  misc_feature (38)..(38): Xaa can be any naturally occurring amino acid
  misc_feature (97)..(97): Xaa can be any naturally occurring amino acid
  misc_feature (102)..(102): Xaa can be any naturally occurring amino acid
  misc_feature (113)..(113): Xaa can be any naturally occurring amino acid
  misc_feature (121)..(122): Xaa can be any naturally occurring amino acid
  misc_feature (140)..(140): Xaa can be any naturally occurring amino acid
MSDTDEHHFESKADSGASKTYPQQAGAIRKGGHIVIKXRPCKVVEVSTSKDWGSMGHAKVSLWLPFDIFKWEKKLEDIVPSSHNCDSPMFDRQDYQXLIDIXDDGMSTFSLEXGNTKGDLXXPLDDVLLGQVQDGFADGXDCL

SEQ ID NO: 2556 - protein, 389 aa, Gloeobacter violaceus PCC 7421
MTGSLLDQLRQMTIVVADTGDIQAIEQFTPRDATTNPSLITAAAQMPQYQQIVDDTLKQARAELGPEAKAAAVATLAFDRLAVAFGLKILAIVPGRVSTEVDARLSYDTEATIEKGRSLIAQYEAAGISRERVLIKIASTWEGIRAAEILEDEGIHCNLTLLFGVHQAIACAEAGVTLISPFVGRILDWYKKETGRDYEPHEDPGVVSVTTIYNYYKKFGYQTQVMGASFRNIGEIVELAGCDLLTISPKLLEQLQATDAELVRKLDPDQAAGLEIEKIDMDQATFEKRHAEDRMASEKLDEGIKGFTNALVALEKLLADRLARLEGEVALNQAFESIFRTFDLDGDGFITREEWMGTDAVFDAIDLNHDGKITAEELGAGIGAVSKLA

SEQ ID NO: 2557 - protein, 116 aa, Brassica napus
STHASVHGVYDLAYLLKVLIIQDLPEKPKGFDELIRLYFPRFCDIKHLMKFCIGLSGGLNKLAELLGVERLGISHQAGSDSLLTSRIFMILQDSFFNGSVEKYSGVLFGFSVENDH

SEQ ID NO: 2558 - protein, 363 aa, Aspergillus niger
MPAYNIVVFAGDHWGPEVTAEAIKVLRVIEKSRDDITLNLQDHLLGGASIDATANPLTDEALAAAKNADAVLLGAIGGPKWGTGAVRPEQGLLNVRKEMGTFGNLRPCNFAAPSLVEHSPLKASVCEGVDFNIIRELTGGIYFGDRKKMTAAATMDTEPYSRAEIERITPRAHLALQHNPPLPVWSLDKANVLATSRLWRKTVTEIMAKEFPQLKIEHQLIDSAAMIMVKNPRQLNGIIVTSNLFGDIISDEASVIPGSLGLLPSASLSGIPDGKGRVNGIYEPIHGSAPDIAGKGIVNPVAAILSVAMMMQYSFGRFDEARAIEAAVRNVLESGVRTGDIGGKATTSEVGDAVAAELEKLLK

SEQ ID NO: 2559 - protein, 155 aa, Brassica napus
MTSASELFSTRRSRPGRSDPDLESDPSLYRHHHHRRHGLHHHNHRHDSDGCDSPRPRLQRFCHHLGLPERRPARDVQGTPQYLESESYSLGILNGSERLPGSVLLARARLVQRLRGVSLSTNRSVQMESSFQVSYECNKKPHGLTQGAIDGLHRA

SEQ ID NO: 2560 - protein, 371 aa, Aspergillus niger
MSGTRAYNILVLPGDGIGPEVMAEAIKVLRTFNSSSMQFHLQEELIGGISIDTHGHSVTQPVKDAAVAADAVLFAAVGGSKVDHIRRGLDGPEGGLLQVRKAMDIYANLRPCSVDVPSREIARDFSPFRQEVIEGVDFVVVRENCGGAYFGKKVEEENYAMDEWGYSTTEIQRIARLAAELALRHDPPWPVISLDKANVLASSRLWRRVVENTISVEYPQVKLVHQLADSASLIMATDPRVLNGVILADNTFGDMLSDQAGSLIGTLGVLPSASLDGLPHPGKQEKVRGLYEPTHGSAPTIAGKNIANPTAMILCVSLMFRYSFNMENEARQIEDAVRAVLDRGLRTPDLGGNSSTQEFGDAVVAALQGKY

SEQ ID NO: 2561 - protein, 401 aa, Vibrio vulnificus YJ016
MKPSDDKRSAREQSQTEKEFKMPSSLTKKGELGGAGLRGQSAGSTALCTVGKTGTGLTYRGYDITDLANHAQFEEVAHLLLRGHLPTQQELDAYKTRLIGLRGLPAELKQALELIPASAHPMDVMRTGCSVLGNLEQETDFSQQLDATERMLALFPAIICYWYRFSHDGVRINTQDQSQDCIGGYFLKMLTGKEPSELHKQVMHCSLILYAEHEFNASTFAARVCASTLSDIHSCVTAAIGTLRGPLHGGANEAAMEMIENWQTPEEAESNILRMLANKEKIMGFGHAIYRESDPRNALIKRWSKALSEAVGDTHLYAVSERVEAVMKREKDLFCNADFFHASAYHFMDIPTKLFTPIFVMSRLTGWTAHVFEQRANNRIIRPSADYIGPDHQDWVPIEQR

SEQ ID NO: 2562 - protein, 233 aa, Musa acuminata
RIENKINRQVTFSKRRNGLLKKAYELSVLCDAEVALIIFSSRGKLYEFGSVRMSKTLERYQHWCYASQDPNVVNRDNAQNWCQEMSKLKAKFESLQRSQRHLLGEDLGPLSVKELQQLERQLESALSQARQRKSQLILEQMEELRKKERHLGEINKQLRDQIEVEGATLKAFQGSWCSDAMIGSNAFAAQPSHSAGMDREPMLRIGYHQFVPADAAIPRNPIGENNFMLEWVP

SEQ ID NO: 2563 - protein, 433 aa, Oryza sativa (japonica cultivar-group)
MCCVSPSPSASATSSRRGQIIAPDSPPSLRSYSDDSPPSTRAPAVHPEVEFEAKPAKRARVVPGGGGGGGGADAAAGDGRDRISDLPDAVLLSILSFLPFRDAGRTAVLSRRWRKLFDESLLDFNACQPFPPEEGRGCEWVIRSITDILAARPDVRIRSFRFVMYGQGFADHLADVDRWFRTLAHRGVRQLDVDMLYTVPAPLLPGSILEFSSLEILRVFNCNFLDLSLPVLRLPVLRTLDLSNVSMSQGFLQAMMSNCPSLECTKLKNITGLDKICVRSRNLVRLFGDFSYLKELVVEDAPNLEELVGIGLPLAAAKVKIVFAPKLRPDSRSICRPVDVEEWDTITSVQCIEHSMNKLVFEDFGGEDCQWRFLTFLLGMARALKDIDFHCSESKDWASLKLCETESSSIVQSSTKNKWRCSFVDCGLIRSVV

SEQ ID NO: 2564 - protein, 396 aa, Shigella flexneri 2a str. 301
MLDAQTIATVKATIPLLVETGPKLTAHFYDRMFTHNPELKEIFNMSNQRNGDQREALFNAIAAYASNIENLPALLPAVEKIAQKHTSFQIKPEQYNIVGEHLLATLDEMFSPGQEVLDAWGKAYGVLANVFINREAEIYNENASKAGGWEGTRDFRIVAKTPRSALITSFELEPVDGGAVAEYRPGQYLGVWLKPEGFPHQEIRQYSLTRKPDGKGYRIAVKREEGGQVSNWLHNHANVGDVVKLVAPAGDFFMAVADDTPVTLISTGVGQTPMLAMLDTLAKAGHTAQVNWFHAAENGEVHAFADEVKELGQSLPRFTAHTWYRQPSEADRAKGQFDSEGLMDLSKLEGAFSDPTMQFYLCGPVGFMQFTAKQLVDLGVKQENIHYECFGPHKVL

SEQ ID NO: 2565 - protein, 426 aa, Mycoplasma penetrans HF-2
MLLKNCSILKNNKLIKSDILIKNNRIIKIAKKIENKNNEEEIDIKSNLVIPGLIDVHVHFREPGFIHKETIKTGSMSAAKGGFTTVMTMPNLNPVPHNLENLNVQLDLIKRHSVIRCIPYGSISVDENGEQLSDVENLSKYVFGFSDDGKGIQNNNLMYQAMLLAKKHNKPICAHCEDNSLANKGVINEGVASEKLNLKGINPLAETIQIARDLVLAKATKCHYHVCHVSTKESLELIKEAKKKKINVTCEVTPHHLLSIDQDILNDNGKWKMNPPLRSIQDQKALIKAVKNKLIDIIATDHAPHSKQEKNCSFNDAAFGIIGSEFAFSLLYTKFVKTKVFSLQLLVDLFTKNVAKIFKLPYGVLEENKIADLAVFDLNKSFEIKEDEILSKSKNTPYLNQKVYGVSLLTISNGKIVYLNEKELSV

SEQ ID NO: 2566 - protein, 488 aa, Bacillus halodurans
MAHTVSEQRIHEVGSMKRDHYRMVINGERVDSDETFETFNPAKGEILATVAKASREHAEKAVQAARHAFDHGKWRKYPVGKRARVLNQIAAIMRERFQELVEIEVLNSGKAISAAQPQINQAIEDFEFYAGAIVGHRGTVNNVPNGFLNYTQKEPVGVCAQIIPWNYPLMMAAWKVAPALAAGCSVVVKPASLTPITAILLNEICHEAGVPEGVVNTVAGAGSVVGDYLVGHEDVNKVAFTGSTPIGKDIMEKASHTLKRVTLELGGKSPNLVFADADMEAAVAGSLFGIYFNTGQSCEARSRLFVHEEIYDEFIEEFITRAKKLQLGDPFDKGTHVGSIISRDQLEIIDSYVRSAEEEGATIALGGKERRVEGFENGHWYEPTVITNVTPDMKAVQEEIFGPVVVVETFQDEREVIKRANDTKFGLGSAIWTKDQGRATRVAHQLEAGIVMVNCPFSAFPGTPFGGYKESGFGRELCVETLDLYIGR

SEQ ID NO: 2567 - protein, 368 aa, Nostoc sp. GSV224
MPLAAVMTAPNQPVEVQQLPDPILEKGGIILETLYSEVCGTDVHLLHGRLEGVPYPIIPGHFSVGRVVETGGAVSDVNGKLIQPGAIATFLDVHETCYNCWYCLVAKASTRCPQRKVYGVTYSAKDGLLGGWSELIYLKPGVKVLTLPEEVSPKQFIAGGCALPTALHAIDRAQIQIGDVVVVQGCGPVGLSAAILALLSGAGKVIVIDKFESRLVVAKSFGVDETLAIKADDPRQHIERVLELTNGHGADVTIEATGIPIAVKEGLNMTRNGGRYVIVGHYTNTGEILINPHLEINLKHIDIRGTWGIDFSHFYRMIELLKRHSDSSKNIAWSSIISRSYTLKEINQALADVEQGSVLKAVIQPNLS

SEQ ID NO: 2568 - protein, 235 aa, Musa acuminata
RIENKINRQVTFAKRRNGLLKKAYELSVLCDAEVALIVFSNRGKLYEFCSSSSMLRTLERYQKCNYGAPETNIISRETQSSQQEYLKLKARVDGLQRSQRNLLGEDLGPLNIKELEQLERQLDASLRQIRSTRTQYMLDQLGDLQRLGTNAMWSLIKPWKIRLEESSEADQQQLWDPNTHAVAYGRQQPQPQGDGFFQFIDCEPTLQIGYHPDQMAIAAAAAAAPGPSYMPGWLA

SEQ ID NO: 2569 - protein, 440 aa, Triticum aestivum
  misc_feature (128)..(128): Xaa can be any naturally occurring amino acid
  misc_feature (200)..(200): Xaa can be any naturally occurring amino acid
  misc_feature (311)..(311): Xaa can be any naturally occurring amino acid
MSNYHDDHVEDMEDDYDMDDPAEDMVDAHHERGLRDSDSEDDEYAHSNDKIPDTSAADARKGKDIQGIPWERLAITRENYRQTRLEQYKNYENIPNSGEAAAKECKPTVKGGMYYEFRQNTRSVKSTXILHFQLRNLVWATSKHDVYLMSHYSVLHWSALSGVDTELMNVQGHVAPREKHPGSLLEGFSQTQVSTLAVKXDNLLVAGGFQGELICKHLDREGISFCCRTTYDDNAITNAVEIFNTASGAVHFMASNNDSGVRDYDMERFQLCKHFQFDWPVNHTSLSPDGKLVVIVGDDPNDLLIDANSGXKTLHSMKGHHDFSFASAWSPDGRTFATGTNDKTGRIWEARNLSKAVHVLKGNLGAISSFRFTSDGQFLSMAEPVDFVERLQEKANSNTSSERYFVGASARTYMSPSSDGRIEDMWDRTYGSLLQFGRPV

SEQ ID NO: 2570 - protein, 390 aa, Nostoc punctiforme PCC 73102
MSKQLGQKIAPTPISNDINVVDLIDQYFTAYNSARLREICQLLSRDVLTEGVTVGVSLSGAMTPAGFGVSALAPLIRNGFIDWMISTGANLYHDMHYGLGFELFAGNPFLDDVKLRQEGTIRIYDIIFGYDVLLETDAFIRKILQGEAFQKRMGTAEFHYLLGKYVREVEKQLGVQHSCLLATAYEYGVPIYTSSPGDSSIGMNVAALALEGSQLVLDPSIDVNETAAIAYNARESGGKSAAVILGGGSPKNFLLQTQPQLHEVLGLEERGHDYFVQFTDARPDTGGLSGATPSEAVSWGKIDPEELPNTIVCYTDSTIALPLVTAYVLNKCQPRPLKRIYDKREAILDKLQKDYLAAKTQPSDQVPAAVAESAQKQTATYPCGRLIPNT

SEQ ID NO: 2571 - protein, 238 aa, Oryza sativa
MCGIKQEMSGESSGSPCSSASAERQHQTVWTAPPKRPAGRTKFRETRHPVFRGVRRRGNAGRWVCEVRVPGRRGCRLWLGTFDTAEGAARAHDAAMLAINAGGGGGGGACCLNFADSAWLLAVPRSYRTLADVRHAVAEAVEDFFRRRLADDALSATSSSSTTPSTPRTDDEEESAATDGDESSSPASDLAFELDVLSDMGWDLYYASLAQGMLMEPPSAALGDDGDAILADVPLWSY

SEQ ID NO: 2572 - protein, 99 aa, Glycine max
  misc_feature (51)..(51): Xaa can be any naturally occurring amino acid
ASSMISSPAVTTVNLAGAGMVAPFTGLKSLAGLPTKKTYYDITSLAYTGGXLHCMHVWPPVGRKKFDTLFYLPDLDYAQLAYVLKYLLANGWIPCYEFE

SEQ ID NO: 2573 - protein, 378 aa, Aspergillus nidulans FGSC A4
MPSSQPASSHITTAPPKAVKPLASKSKPLEPKAPESKPSDSNVPEPVEPEAKAPETKSFKEALVNGAGDGDKQTDSSNSTSPSSFQSDSIRDSSPNTSRSNSSSSSQPTKEETDKDTEKNIKERNKQEQEKDTTTIPIVSKHCAVTSKRLPATNVSIEKSGVARCNVVDGATSDTSIKDFHEYTPMQQHILFWDRDRDGQIYPYDTYRGFRDLGFNILFSFLAVLIINLNFSYPTRLAHSFLPDPRFRVYVDSIYKAKHGSDSGSFDAEGRFIPQHFEDMFAKYDGDQDGALTFGELFNMMHGNRCAADPFGWGAAFFEWVTTWLLIQKDGKVYKDDLLGVYDGSLFWKIAKARKSPQGWSQGFGLGGDGFLGGVKVI

SEQ ID NO: 2574 - protein, 348 aa, Tropheryma whipplei str. Twist
MEDLYGILGVDHNASVDEIRRAYRRLARELHPDINPDSADRFKAVTHAYNILSDPEQRQRYDRHVSGGFSSDFNLSDLFQSFFDTSAEFQRGSDLLVNIDIDLKTAIYGGSQVVKIDSLVVCDVCNGTRSEPGYKAEVCFDCNGSGVVRGEVRTTLGNLITQNTCSKCRGNGERIDHPCRRCYGNGSRSAPRDITINIPPGVETGMRIKIPNMGNAGGAMPGDLYVDCKVKEHPYFLRDGQDLYCRLDISLVDALLGTKVKIDSLDGELAVVIPALSQNRDVIRIANKGAVTLRGGKGDLCIVLNVLLMQKLDPEHRALLKKIMPNPPKPKLAKRTSGFFSWLKNKFT

SEQ ID NO: 2575 - protein, 114 aa, Triticum aestivum
MERRAARGTSDHRRRMQMPPAPVGQKQQQPQRRGGPKSCQRTPPPPGCFTIQLLMVFLWVAASLAFLPLVLPPLPPPPLSLLLVPVCLLAVLAALAFVPLDAHNNVVVGGSSCL

SEQ ID NO: 2576 - protein, 315 aa, Actinobacillus pleuropneumoniae serovar 1 str. 4074
MLGNEKEPAAARRYTARGNLVAVISNGTAVLGLGNIGALASKPVMEGKGVLFKKFAGVDVFDIEINEHDPDKLVDIIASLEPTFGGINLEDIKAPECFYIEKKLRERMGIPVFHDDQHGTAIIVGAAAVNGLQIVGKDIGEVRLVVNGAGASAIACTNLLRSLGFKKENITMCDSKGVIYQGRGDNMDETKQFYAIEDNGWRTLADAVAGADVFLGCSKAGALTQDMIKTMAKDPLILALANPVPETTPHEAKAVRADAIVCTGRSDYPNQVNNVLCFPYLFRGALDVGATTINEEMKMAAAHAIADLAKEPVPF

SEQ ID NO: 2577 - protein, 102 aa, Glycine max
  misc_feature (98)..(98): Xaa can be any naturally occurring amino acid
QVGGEIFDLKKLVLPPLAANGKKEESIGAPIDTYPAFPGWYADVSWPGEAHPFKLEKILFHGKSEFQELLVFESSKQGKVAILDGHIQLTENDEFAYXEMLT

SEQ ID NO: 2578 - protein, 469 aa, Nicotiana tabacum
MVFYRGVSLLSKLRSRAVQQTNLSNSVRWLQVQTSSGLDLRSELQELIPEQQDRLKKLKSEHGKVQLGNITVDMVLGGMRGMTGLLWETSLLDPDEGIRFRGLSIYECQKVLPAAKPGGEPLPEGLLWLLLTGKVPSKEQVDSLSQELRSRATVPDHVYKTIDALPVTAHPMTQFATGVMALQVQSEFQKAYEKGIHKSKLWEPTYEDSMSLIAQVPLVAAYVYRRMYKNGNTIPKDDSLDYGANFAHMLGFSSSDMHELMKLYVTIHSDHEGGNVSAHTGHLVASALSDPYLSFAAALNGLAGPLHGLANQEVLLWIKSVVEECGENISKEQLKDYAWKTLKSGKVVPGFGHGVLRKTDPRYTCQREFALKHLPEDPLFQLVAKLYEVFLQFLQNLAKLNPWPNVDAHSGVLLNYYGLTEARYYTVLFGVSRALGICSQLIWDRALGLPLERPKSVTMEWLENHCKKA

SEQ ID NO: 2579 - protein, 171 aa, Glycine max
MADGPASPGGGSHESGDHSPRSNVREQDRYLPIANISRIMKKALPANGKIAKDAKETVQECVSEFISFITSEASDKCQREKRKTINGDDLLWAMATLGFEDYMDPLKIYLTRYREMEGDTKGSAKGGDSSAKRDVQPSPNAQLAHQGSFSQNVTYPNSQGRHMMVPMQGPE

SEQ ID NO: 2580 - protein, 371 aa, Malus x domestica
MGKGGMSDGDHADRCCGEAINGDVQQENMAAWLLGVKNLKIQPYKLPNLGPHDVRVRLKAVGICGSDVHHFKNMRCVDFIVKEPMVIGHECAGIIEEVGSEVEDLVPGDRVALEPGISCKRCNLCKQGRYNLCRKMKFFGSPPNNGCLANQVVHPGDLCFKLPDNVSLEEGAMCEPLSVGIHACRRANVCQETNVLVVGAGPIGLVTLLAARAFGAPRIVIADVNDERLLIAKSLGADAVVKVSTNIEDVAEEVAKIQKVLENGVDVTFDCAGFNKTITTALSATRPGGKVCLVGMGQREMTLPLATREIDVIGIFRYQNTWPLCLEFLRSGKIDVKPLITHRFGFSQKEVEEAFETSARGGNAIKVMFNL

SEQ ID NO: 2581 - protein, 480 aa, Pseudomonas putida KT2440
MHLTWLRSDLRIDDNTALSASTERGPTIALWLVSPGQWQAHDDADCKVDFWLRNLHDLRQSLEKLNIPLLIRTIDTWDQAPQAVLDICRQHQVQSVHWNEEYGINEQRRDDATRAMLEKSAIQAHSHLDQLFFRPGTVLTRSGDYFQVFSQFKKTCLEHLHRSLPALARRVKRQAPLNIGSDPIPQHVEGFGKTTPALRDHWPAGEAEAQSRLSRFLDETIDDYHHLRDLPAKPGTSQLSPYLAAGVISPRQCLHGALAGNRGEFDSGSTGVQTWINELLWREFYKHILSGYPQVSRHRAFRAQTEALPWRDAPADLAAWEQGRTGFPIIDAAMRQLLHTGWMHNRLRMVVAMFLSKNLLIDWRKGERHFMRHLIDGDLAANNGGWQWSASTGTDAVPYFRIFNPVSQSQRFDPQGRFIRHWVPELQELDEKAIHQPIKSTDLFGNTSYLSPIVDLSSSRQRALEAFKGLPRRQNQGITS

SEQ ID NO: 2582 - protein, 356 aa, Gibberella zeae PH-1
MSFRTLRIGLIPGDGIGKEVIPAGRRILEALPSSLGLKFDFVNLKAGFETFEQTGAALPDKTVEVLKNECDGALFGAVSSPTQAVKGYSSPIVALRKRLDLYANVRPVKTVMTAAKPIDMVIVRENTEDLYVKQEKTYDTPEGKVAEAIKRISEKASFRIAAMAGDIALRRQKIRDAGASSIHKSPLVTITHKSNVLSQTDGLFRATSKRALADPKFSSVAVEEQIVDSMVYKLFRQPEDYDVIVAPNLYGDILSDGAAALVGSLGLVPSANVGEGFAIGEPCHGSAPDIQGQNIANPIATLRSTALMLEFLNEEEAAAKIYAAVDGNLEDGKLLSPDLGGKATTEEVVADILRRL

SEQ ID NO: 2583 - protein, 368 aa, Malus x domestica
MGKGGQSCNGMVRQAKPVEQENMAAWLVDVNTIKILPFKLPSIGPNDVRIRIKAVGICGSDVHYLKTMKCADFEVKEPMVIGHECAGIVDKVGSEVKHLVPGDRVAVEPGISCARCQQCKGGRYNLCPDMKFFATPPVHGSLANQIVHPADLCFKLPENVSLEEGAMCEPLSVGVHACRRANVGPETTVLIIGAGPIGLVSVLAARAFGAPRIVIVDMDDKRLAMAKSLGADEAVKVSTKMEDLDDEVAEIKEAMISEVDVTFDCVGFNKTMSTGLNATRPGGKVCLVGMGHGVMTVPLTPAAAREVDVVGVFRYQNTWPLCLEFLRSGKIDVKPLITHRFGFTEKEVEEAFATSARGGNAIKVMFKL

SEQ ID NO: 2584 - protein, 396 aa, Gibberella zeae PH-1
MCSLAASQPLTNSSNSTTQEHKINNFLDHAQTLQAPLPNPSLQVTADHNLKRVDAPVYAPQAGEVLLHIKATGICGSDVHFWKTGRIGSLVFEGDCIIGHEAAGVVIQVGEDVDNFKPGDRVAVEPGVPCGHCFLCKDGRYNLCEDVQFSGVYPYAGTLQRYKVHPSKWLHKLPDNVSFAEGALLEPLSVVLHGINSAPITLGTPVVICGAGPIGLLALASARASGAHPLVITDVEPKRLAFAKEMVPTVKTYQVDTTKSNEENGKNVRRLFGETEYVQPRVVFECTGIESSVCSAAFMVRRGGVLMVVGVGRSIMNNLPFMHLSLAEIQIRFINRYKDTWPAGIACLEGGLVDAKKLVTHVFPLEQALEGLTLSSDPKNGCIKVQIVDDTETTFF

SEQ ID NO: 2585 - protein, 170 aa, Triticum aestivum
  misc_feature (140)..(140): Xaa can be any naturally occurring amino acid
AARDPIGITSFYQGRSSTLPGAIFFASELKCLSSVCDEIIAFPPGHVYDSKTNETTRYFKPSWWDPHRQPAAPVDYRLLRTTLEKSVKKRLMAEVPFGVLLSGGLDSSLIASIAQRETLRLKAASLEQSSKLFDSKGTVXKQCRGKGKQLVGIDEDNNLSTLANYSAKPF

SEQ ID NO: 2586 - protein, 493 aa, Aquifex aeolicus VF5
MSVSTALKLCIFFTGFAGIVAEYSLATLATYLLGNAVLQWSVVISIFLLSMGLGSHASRYIPDDKTPLAFVLAELFLSLLVPFSVPIAYHFANNFLHLQTVIYGLSFVIGSLIGLEIPLAVRINNMYEELKVNISSVLEKDYLGSVPAGLLYAYLFLPKLGLPLTAILAGFFNLISAFLLVKVLKPKKFLKFLAIFTFFLLATYAVGHKRITLYEEQKFYGEEIIHFEQTPYQKIVLTRFGKHYSLYLDGHLQFSTLDEKRYHETLVHVPASFLKRYEKALILGGGDGLALRELRKYPFGEIHLVDLDPKMIEFSKKNLVMRKINENSFYDTRLKVFSEDAFNFVKKTKEKYDFVIVDLIDPRTPSSARVYSLEFYMSLKNKLKEDGIFITQAGDTFYKREVFCSILKTIKKAGFYAYPLVVYIPTFGEWGMVIGSKEPLNFENFELKEKTEFLNRERALAFYTLGKSLECPNVEVNTLLKPVLIYYYYKIQN

SEQ ID NO: 2587 - protein, 161 aa, Zea mays
  misc_feature (73)..(73): Xaa can be any naturally occurring amino acid
  misc_feature (76)..(76): Xaa can be any naturally occurring amino acid
  misc_feature (115)..(115): Xaa can be any naturally occurring amino acid
  misc_feature (134)..(134): Xaa can be any naturally occurring amino acid
  misc_feature (154)..(154): Xaa can be any naturally occurring amino acid
MTMMINPDVDLIDRGGSVVVREVWAYNLVSEFHLISAVVEDFPYISMDTEFPGVIFKAEPAILRRGNPGYLYXLLXIHVDVLSLIQVGITLSPTRRNPPDLGGGVDGSRFIWEFXFRDFDVDRDAHAGESIELXRRHGIDFERPAARGEIGEVXKLMMSSG

SEQ ID NO: 2588 - protein, 394 aa, Zea mays
CSLEKPLLSHLRFFPWVVDEVHFKVWRQGRTGYPLVDAGMRELWATGWVHDRIRVVVSSFFVKVLQLPWRWGMKYFWDTLLDADLESDALGWQYISGSLPDGRELDRIDNPQFEGYKFDPHGEYVRRWLPELARLPTEWIHHPWDAPESVLQAAGVELGSNYPRPIVELDAANSRLQGALSEMWELEAASCAAIENGMEEGLGDSTDEPPIDFPQELRMEVDRQPAQPAIIHTPVVAGWRREDQRVPSMTSSLIRAETELTADFGNTSEDSRPEVPSNIHLQARAEREETVDGATGNTVRVNGNQQQQNLQNNMHRVLGIAPSISEASSSWTGREGGLVPVWSPPAASVHSDPYTADEADISSRSYLDRHQQSNTMMNWSQLSQSLTTGWEVDN

SEQ ID NO: 2589 - protein, 357 aa, Phanerochaete chrysosporium
AVCPDGTRVSHAACCAFIPLAQDLQETIFQNECGEDAHEVIRLTFHDAIAISRSQGPKAGGGADGSMLLFPTVEPNFSANNGIDDSVNNLIPFMQKHNTISAADLVQFAGAVALSNCPGAPRLEFLAGRPNKTIAAVDGLIPEPQDSVTKILQRFEDAGGFTPFEVVSLLASHSVARADKVDQTIDAAPFDSTPFTFDTQVFLEVLLKGVGFPGSANNTGEVASPLPLGSGSDTGEMRLQSDFALAHDPRTACIWQGFVNEQAFMAASFRAAMSKLAVLGHNRNSLIDCSDVVPVPKPATGQPAMFPASTGPQDLELSCPSERFPTLTTQPGASQSLIAHCPDGSMSCPGVQFNGPA

SEQ ID NO: 2590 - protein, 218 aa, Glycine max
QSIPLSPPTKYSLQHFKKPWAHEHEPVRNLVDAVNKIKPTVLIGTSGQGRTFTKEVIEAMASINERPIILSLSNPTSQSECTAEEAYKWSQGRAIFASGSPFPPVEYEGKVFVPGQANNAYIFPGFGLGLIMSGTIRVHDDLLLAASEALAAQVSQENFDKGLIYPPFTNIRKISAHIAANVAAKAYELGLATRLPQPKDLVKFAESCMYTPSYRSYR

SEQ ID NO: 2591 - protein, 214 aa, Zea mays
MAATRASPVLLLLLTVQLSLLFRLPDSPSTLALALAAEPEQQNAKQHRQPALLVQSTCNSTSFYDLCIAALAADPASSTADVPGLGAIAVSAAANNASGTAAFLGNASDAAATPQADRALLRACAGKYAAARDALVQARASLAEQAYDYAFVHVSAAGEYPAVCRTLFRRRQQQQRGASRSAYPAELAKREEALRRLCTIALDIISLLQNQETY

SEQ ID NO: 2592 - protein, 266 aa, Mycoplasma penetrans HF-2
MKKRIGYGSFEVNDVPTLKKCIKQAVLSGYDFVDTAYYYQNEEAIGKAIKELREEGFDKPILVQTKIWPEHYGNVRDAVLLSCQKLQTNKLDMCLLHRRHFNLNMDLSAWEQLIECQKEGLVGEIGVSNFDRDALEIMRQRTGVYPLSNQIELSVNNLREDRVVYNHSKGIEVQAWSPLGDLENNLKNPVLIEMAKKYNTDVAGVLIAYVGSLNCSIIVKTSNPDRVVSNYKAFQIILEESDVEKLKKLNTYKIKYSESFIYDIDN

SEQ ID NO: 2593 - protein, 228 aa, Haloarcula marismortui ATCC 43049
MKQGGSDAAKQAAGESAAEAVEDATVVGLGTGSTAAYAIRAIGQAVDAGLDVVGVPTSFQSRQLARDCGIPLADLDDVSVDLAIDGADEVASGNLIKGGGAAHAREKIVDASADRFLVVADPTKEAAVLSYPVPVEVLPMARSTVVTAVEELGGDPTLRRAERKDGPVVTDNGNLVLDCDFNSIHDPAALASDLAALPGVVEHGLFVGMADEIHVGTADGVTVRTLSK

SEQ ID NO: 2594 - protein, 125 aa, Synechococcus sp. PCC 7002
MAGSEVKADYWINEYITPWDIYSHGITKILAYKQTQFQEMAIVESGAYGKALVLDGKWQSCTGDEFLYHEPLVHPAMIAHGAPKKVLILGAGEGATVREVLRWQSVEKVMMVDIDGEVVEACKEF

SEQ ID NO: 2595 - protein, 339 aa, Pisum sativum
MVQEKKLVDEVSGWLRIYDDGSVDRTWTGPPEVNFMIEPVAPHEEFIDGVATRDVTMSTTTNDNFIHRARLYLPEKTPTENEKLPILIHFHGGGFCITEPDCFMYYKVYTRFVKSTRSICVSPFLRRAPEHRLPAAIEDGFATLRWLQSVAKGDAHDPWLEKHGDFNRVFLIGDSSGGNLVHEVSARASSTDLRPVRLAGAIPIHPGYVRSERSRSENEMPQSPFLTLDMLDKFLSLSLPIGSNKDHPITCPMGEAAPPLAGFKLPPFLLCVAEKDLLRDPQMEYYEAMKKDNKEVDLFVSKNMTHSFYLNKIAVDMDPTVSAELNALMARVKDFIEKH

SEQ ID NO: 2596 - protein, 331 aa, Listeria monocytogenes str. 4b H7858
MMTISQVKQTAKESLRGNWGIAIGIFVLAWLIETVGGGLIGWIPVIGWIAIFLLTGPLYTGVAWVYLAISRREQPDVAYMFSGFKQFGRTVLAYLLISIFTFLWSLLLIVPGIIKTYSYSQTFFILRDNPNISALDAITESRHMMNGHKGRLFGLSLTFLLWYLIPLAVAIAGTVIVAGGMATTSYTADPAEVLSALAAGATFGGLVLILASWLITLGISLYVYPYLITSIAVFYDDLYAATEGTFTEETVIVEEEVNPFGTTEADPFAEDTHPEGFGPEATKEPETPVVPEAPEAPETPETPEVPETPEAPETPEAPETPEAPKDNNEPK

SEQ ID NO: 2597 - protein, 492 aa, Pseudomonas putida
MKQYKNFINGRFVESDKRFAGINPATGVRFADVHEATREMVDEAVSAGHRAVRGWGSASVSDRADMLYRIADEIDRRADDFLTAEVSDTGKPVSLASKLDIPRGAANFRIFADILKTAPLDTFRTDLPGGSHAINYAVRKPLGVVGIISPWNLPLLLFSWKVAPALACGNAVVAKPSEETPGTATLLAEVMQTVGLPAGAFNLVHGFGPNSAGEFITTHPGINAITFTGESKTGTAIMHAAAEGVKPVSFELGGKNAAIIFADCDFDKTVAGMTRAAFLNSGQVCLCSERIFVERPIYDRFVKALAERAKQIKLGDPTDEATCMGPVISAAHRDKVLSYYALAREEGAEFITGGGTPSFGNQLDGGFWVEPTLLAGLPDDARCVTEEIFGPIGHVTPFDSEAEVIQRANATPYGLAATIWTSNVNKAHRVAQSMNVGVAWVNAWFLRDLRTPFGGSGLSGIGREGGLHSLNFYSELTNVCIHVDAPDGSHDR

SEQ ID NO: 2598 - protein, 123 aa, Glycine max
  misc_feature (23)..(23): Xaa can be any naturally occurring amino acid
  misc_feature (45)..(45): Xaa can be any naturally occurring amino acid
  misc_feature (48)..(48): Xaa can be any naturally occurring amino acid
  misc_feature (67)..(67): Xaa can be any naturally occurring amino acid
  misc_feature (81)..(81): Xaa can be any naturally occurring amino acid
  misc_feature (87)..(87): Xaa can be any naturally occurring amino acid
  misc_feature (100)..(100): Xaa can be any naturally occurring amino acid
EARVSLLGTEFIKVATNIDPDCXMIINEKGRNAKCAMRKAFVDEXKSXLPKHILYKEHQQITDRDGXVETDSLKAHAEKPXPDRMIXNAANIFPFNTPTXRETYHYTMIIDRFFPQKSPRLTV

SEQ ID NO: 2599 - protein, 371 aa, Triticum aestivum
DAWANGSQVPQEFVEKIGKVFEAILERSGKLREEMKEDISIAKAIAIVLERNPHLRQEGIAHDVLQWYLCRMEGWFATDADAISLQCWDQEVLLPGGHGLMVRGYRPVINTLAKGLDIRLGHRVVEIVRHWNRVEVTVSNGKTFVADAAVITVPLGVLKSNTIKFEPRLPEWKEEAIRELSVGVENKIVLHFSEVFWPNVEFLGVVSSTTYGCSYFLNLHKATGHAVLVYMPAGRLACDIEKMSDEAAAQFAFSQLKKILPNAAEPLNYLVSHWGSDENTLGSYTFDGVGKPRDLYEKLRIPVDNLFFAGEATSVQYTGTVHGAFSTGEMAAEECRMRVLEKFRELDMLEMCHPMAEQTATVSVPLLISRL

SEQ ID NO: 2600 - protein, 402 aa, Bacillus thuringiensis serovar konkukian str. 97-27
MLSEKTIEIVKSTVPLLQEKGVEITTRFYEILFSEHPELLNIFNHTNQKKGRQQQALANAVYAAATYIDNLEAIIPVVKQIGHKHRSLGIKAEHYPIVGTCLLRAIKEVAGAPDEVLNAWGEAYGVIADAFISIEAEMYEEAAHKEGGWKDFRNFVVVKKVKESDVITSFYLKPEDGGKVSSFIPGQYVTVQINIEGETYTHNRQYSLSDAPGKEYYRISVKKEKGVDTPDGKVSNYLHDHVKEGDMLPVSAPAGDFVLNMDSTLPVVLISGGVGITPMMSMLNTLIEQDSKRNVCFVHAAINSNTHAMKEHVEAVDNEYEQVKAYTCYSAPTEKDLEMKNFDKEGFVEREWLQTIIPTTEAEFYFCGPVPFMKHINAVLTDLGVKQEHIHYEFFGPAASLQ

SEQ ID NO: 2601 - protein, 311 aa, uncultured bacterium
MQLDPQMKAILDQAAAAGAQPFHTMTPAQARAAIDTMFQAFRGQPKEVAQSEDRKVPGPAGDIPIRIYTPAGSGPFGALVYFHGGGWVIGNIETHDVTCRDLAHGTPCVTVSVDYRLAPEHKFPAGPEDCYAATKWVSDNARSLNVDPNRIAVGGDSAGGNLAAAIALMARDRGGPKLAYQLLIYPAIDSADETPSHREFTKDGYILSRADMEWFWGHYLADKDRANPYACPSRAKSLAGLPPAFVLTAEFDPLRDEGEAYGQELRKAGVAVTAKRYDGVCHGFVSMASLLDAGKRAVAECCKELRGAIGR

SEQ ID NO: 2602 - protein, 498 aa, Magnaporthe grisea 70-15
MSTMALHRTASTKSDTTMACPNGLVKNLPLGGNTKCSACGSHRAEKRRASSTSSVSTTPTSPSFSEADWSPLHNSSQEPQPEYTKVANSLMRAITDYVGHLQNENLPMPSLEPAADAHGVLKHPEGVAARNAVVELAQRIVAMTMDPDMNLLISSLQFHFCSSLKVAIDLKVHEHVPRRGSITSSELAAKVGADESILVRIMRALILKHVFCSPTPGTYAHTAMSWCMMKSPDAIDLLGHRLDESFRASSRQADALALVNYREPDEADVKGFSMAFGTTENFWEVLGHEGEEERAQRFNRAMRAVSLNTLDVIPRMYPFDRIRGDGLLVDVGGGLGQVARAIMGAHRGAGLRSCIVQDAHAGDDAKKQPDVMEANRKLGVELQKHNFFDPQPVKGASVYFLRHIFHDWPDRACVKILKQTVEAMGKDSTLLICDQVVDDEASPQATLYDIDMWSLFGGKERNRSEWEALFRSADERLYIKKVWTTAEAPTTMLEVCLS

SEQ ID NO: 2603 - protein, 376 aa, Candida albicans SC5314
MLAARSSIRRCFSTSSTTLKSLKIGLIPGDGIGREVIPAGKAVLENLPAKHDLQFEFVNLDAGFELFKKTGTALPDETVDVLKKECDGALFGAVSSPTTKVAGYSSPIVALRKKLGLYANVRPVKSVEGIGRPVDMVIVRENTEDLYIKEERVYKKEDGTKVAEAIKRITETASTRIAKMAYEIALQREAVRKGTSGKQLHEKPSVTVTHKSNVLSQSDGLFRETCRAVYDANANEYGGIEYKEQIVDSMVYRMFREPEIFDVVVAPNLYGDILSDGAAALVGSLGVVPSANVGDNFAIGEPCHGSAPDIEGKGISNPVATIRSTALMLEFMGYPEAAATIYQAVDANLAEDKIKTPDLGGNSTTQEVIDDIIRRF

SEQ ID NO: 2604 - protein, 309 aa, Triticum aestivum
PRVRTPLSALYVASLLHEAGLPDGVLNVVPGPRPPAGAALCSHMGVDKLAFTGSTGTGKIILELAARSNLKPVTLELGGKSPFIVMDDADVDQAVELAHRALFFNQGQCCCAGSRTFVHESVYDEFVEKSKARAQRRVVGDPFKKGVEQGPQIDGQQFKKILGYVKSGVDSGATLVTGGDRVGSSGFYIQPTVFADVEDEMKIAQEEIFGPIQSILKFREVGEVVMRANATHYGLAAGVFTRSLDTANAVARALRAGTVWVNCYDVFDAAIPFGGYKMNGVGREKGAYSLGNYLQTKAVVAPLRDPAWL

SEQ ID NO: 2605 - protein, 450 aa, Methanothermobacter thermautotrophicus str. Delta H
MSVEVIAIGGYEEVGKNMSAVKVGDDVVIFDMGIHLDRVHIHEDTDIARMHSLDLIERGVIPDDTLMKDVDGKVRAIVFTHGHLDHIGAVAKLAHRYQAPIIATPYTIALIERTIKAERKFNVLNTLQVLNAGEKCQISPGITLEFIQSTHSIPQSVIAALHTPEGIIVYALDFKFDDHQKISPPPDYHRLRELGRKGVLAMIVETTRANEKQEVKTHSEKVARIVLEDIMKNPLEEKTGMIVTTFSSHMERIQAISDIASKSDRQMLLLGRSMERYCGLAEAMGILKLPENASIYGSPKAVNRALARAEAKREDYLLITTGHQGEPDALLPRIANAKTQFRIQRGDNVVISAPVIPNPMNVANRNLMERRLASSGARIYTNAHVSGHAGREDHRDFIRMLNPMHIIPAHGDLSMLSAYAEIAEEEGYKLGNDIHILRNGQAQVFNGGIR

SEQ ID NO: 2606 - protein, 145 aa, Zea mays
  misc_feature (84)..(84): Xaa can be any naturally occurring amino acid
AGSGPYPPPPAFRLQTEDLRYHHQLSRHIAQLGRIEAMASRLLAAASSSSASSSPLARLISSRRMAGAADHHGSTKVNMWQEPXNPGNWKEEHFVLASLAMWGAIIYGGLKAFGGKKEVKTRGRASGSTGTLNCIQALFSYRNLF

SEQ ID NO: 2607 - protein, 445 aa, Arabidopsis thaliana
MEEERRVLFGKYEMGRLLGKGTFAKVYYGKEIIGGECVAIKVINKDQVMKRPGMMEQIKREISIMKLVRHPNIVELKEVMATKTKIFFVMEFVKGGELFCKISKGKLHEDAARRYFQQLISAVDYCHSRGVSHRDLKPENLLLDENGDLKISDFGLSALPEQILQDGLLHTQCGTPAYVAPEVLKKKGYDGAKADIWSCGVVLYVLLAGCLPFQDENLMNMYRKIFRADFEFPPWFSPEARRLISKLLVVDPDRRISIPAIMRTPWLRKNFTPPLAFKIDEPICSQSSKNNEEEEEDGDCENQTEPISPKFFNAFEFISSMSSGFDLSSLFESKRKVQSVFTSRSSATEVMEKIETVTKEMNMKVKRTKDFKVKMEGKTEGRKGRLSMTAEVFEVAPEISVVEFCKSAGDTLEYDRLYEEEVRPALNDIVWSWHGDNNNTSSEDC

SEQ ID NO: 2608 - protein, 222 aa, Vibrio parahaemolyticus RIMD 2210633
MNSPMFTRSTSVPNTLETNKVLKNTYFLLSMTLMTSAIAAVATMAMQISPIMAIVMQLAAIGILFFVMPKAINSSSGIVWTFVFTTLMGGALGPMLNYYASIPNGPTIIAQALGLTGMVFLGLSAYTISSKKDFSFMRNFLMAGLIIVIVAALINIFVGSTMAHLVISSVSALVFSGFILFDTSRIVRGEETNYISATISMYLNILNLFTSLLSILGIMNDD

SEQ ID NO: 2609 - protein, 471 aa, Novosphingobium aromaticivorans DSM 12444
MERAAMNALSPTLTNRSLVDIDRDHLIHSVTSFRGHEQHGAIVLESGDGMWLTDAEGNRILDAFAGLWCVNVGYGQESIVEAAAAQMRKLPYATGYFHFASEPAIRLAGELTAAAPSGLDHVFFTQGGSDAVDSAIRYIVHYWNAAGKPSKKHFIALEWGYHGSSSLGAGLTALGNFHRNFDLPRPWQHHIASPYPYRHPQGDDDAAVIASTVAALEAKVAELGADNVAAFCCEPIQGSGGVIVPPRGWLKALREACTRLGILMLVDEVITGFGRTGPLFACEEEGVSPDFMTTAKGLTAGYIPMGAMFMADHVYQTIADAAPAALPIGHGQTYSGHPVAAAVGLEVLRLYREGGLLENGRKTGERFAWHMERIRAHPLVGDVRYRGLLGAIELTPDKATKAIFDASLDIGGRLSKLTYANGVIVRCFGNAVLGFAPALCCTLEEMDMIFERVERSLDQLLDQPDIRALVV

SEQ ID NO: 2610 - protein, 426 aa, Helicobacter pylori J99
MSVTLINNENNARYEFETIECTRGPKAVDFSKLFETTGFFSYDPGYSSTAGCQSKISYINGKKGELYYRGHRIEDLVAKYKYVDVCRLLLTGELPKNQDESLEFELELRHRSFVHESLLNMFSAFPSNAHPMAKLSSGVSILSTLYSTHQNMHTEEDYQTMARRIVAKIPTLAAICYRNEVGAPIIYPDIARSYVENILFMLRGYPYSRLKHTTQGEVGITPLEVEAFDKILTLHADHGQNASSTTVRNVASTGVHPYAAISAGISALWGHLHGGANEKVLLQLEEIGDVKNVDKYIARVKDKNDNFKLMGFGHRVYKSYDPRAKILKGLKDELHQKGVKMDERLSEIAAKVEEIALKDEYFIERNLYPNVDFYSGTILRALKIPVRFFTPVFVIGRTVGWCAQLLEHVKSPQARITRPRQVYVGD

SEQ ID NO: 2611 - protein, 57 aa, Triticum aestivum
  misc_feature (32)..(32): Xaa can be any naturally occurring amino acid
  misc_feature (41)..(41): Xaa can be any naturally occurring amino acid
  misc_feature (43)..(44): Xaa can be any naturally occurring amino acid
MADEGTANCIDIILAIILPPLGVFFKFACGSXFWICLLLTXSXXLPGIIYAVWVITK

SEQ ID NO: 2612 - protein, 425 aa, Helicobacter pylori J99
MAYNPKILQKPKEGEEITIKDGKLHVPNYPIIPFIEGDGIGSDITPAMIKVVDSAVQKAYKGEKKIAWYEVFVGEKCYQKFKDHKELSPEEQWLLPDTIEAINHYKVSIKGPLTTPIGEGFRSLNVALRQKMDLYVCLRPVRWYGSPSPVKEPQKVDMVIFRENSEDIYAGIEWQEGSAEAKKLIHFLQNELKVEKIRFPESSGVGIKPISKEGTERLVRKAIEYAIDNDKPSVTFVHKGNIMKYTEGAFMKWGYALAQKEFNAQVIDKGPWCSLKNPKTGKEIIIKDMIADAFLQQILLRPSEYSVIATMNLNGDYISDALAAMVGGIGIAPGANLNDTVGMFEATHGTAPKYAGLDKVNPGSIILSAEMMLRHMGWVEAADLIVSAMEKAIKSKKVTYDFARLMDGAKEVKCSEFASVMIENM

SEQ ID NO: 2613 - protein, 490 aa, Novosphingobium aromaticivorans DSM 12444
MTAFDPDSIRPALAANFIGGEAVVGRGRSFEVLRPSDGQLLGELRAADEQQLCAAVENAAMAQKASGWGAMEPRGRMKLLRRWADLIEADAETLVPLEAVGSSRTLAEVRAWDLPYTAECIRFFAEFADKHGGEIAATTPDKLGFTLTEPYGVIGAIAPWNLPLVMAAWKLGPALAAGNAVVLKPSELTPFSVVRLAELAVAAGIPAGVFNVVQGGGGDIGDALVRHERIAKVSFTGSTRTGQAIMAACAMTGPKPSTLELGGKSPQIVFADADLAKASALVARAITLNSGQVCVAGSRLLVHEKARDEVVERLTTAFEAHRLGTTWDAATTMGPIISEGQLATIDGIVQRARAAGAEAVTGGARAVSPQSGSYYQPTLLAGMSDDNEAVQGEIFGPVLTVQSFADEDEAFALANGTRYGLAAGVHTTDISRALRAVRALEAGTVWVNRYGRSDDFILPTGGFKQSGVGKDLGREAYLGSCKVKTALIQI

SEQ ID NO: 2614 - protein, 257 aa, Vicia faba
MASSKETFVYTAKLAEQAERYEEMVEAMKNVAKLDVELTVEERNLLSVAYKNVVGGRRASWRILSSIEQREETKGNEVNVNRIKEYRKKVESELSDICTDIMAVIDEHLIPNSSGESNVFYYKMKGDYYRYLAEFKSGDDRKEAADQSLKAYQEASTAAETELPPTHPVRLGLALNFSVFYYEILNSPERACHLAKQAFDVAIAELDSLNEESYKDSTLIMQLLRDNLTLWTSDIPEEGVEEQKAESARAPVGDNAE

SEQ ID NO: 2615 - protein, 319 aa, Geobacillus stearothermophilus
MKRIGVLTSGGDSPGMNAAIRSVVRKAIYHGVEVYGVYHGYAGLIAGNIKKLEVGDVGDIIHRGGTILYTARCPEFKTEEGQKKGIEQLKKHGIQGLVVIGGDGSYQGAKKLTEHGFPCVGVPGTIDNDIPGTDFTIGFDTALNTVIDAIDKIRDTATSHERTYVIEVMGRHAGDIALWSGLAGGAETILIPEADYDMNDVIARLKRGHERGKKHSIIIVAEGVGSGVDFGRQIQEATGFETRVTVLGHVQRGGSPTAFDRVLASRLGARAVELLLEGKGGRCVGIQNNQLVDHDIAEALANKHTIDQRMYALSKELSI

SEQ ID NO: 2616 - protein, 504 aa, Glycine max
  misc_feature (343)..(343): Xaa can be any naturally occurring amino acid
MSALSNSSSSHGNSFLKMPAIKFTKLFINGDFVDSISGRTFETIDPRKEEVIARVSEGDKEDIDIAVKAARQAFDSGPWPRLPGSERAKIMMKWADLVDENIEELAALDTIDAGKLYYINKVAEIPSATNALRYYAGAADKIHGDVLKMNGDFHAYTLLEPIGVVGHIIPWNAPSLSFFIKVSPSLAAGCTMVLKPAEQTPLSALFYAHLAKLAGIPDGVLNIVPVFGPTAGAAISSHMDIDAVSFTGSIEVGREVLQAAAWSNLKPVSLELGGKSPLIIFNDADIDKASELALFGIMSNKGEICVAGSRVFVQEEIYDEFEKKLVEKAKSWVVGDPFDPKSXQGPQADRNQLEKILSYIEHGKREGATLLTGGNTVGNKGYYIEPTIFSNVKEDMLIARDEIFGPVLALMKFKTMEEAIKSANNTKYGLAAGIVTKNLDTANTMSRSIRAGIVWINCYFTVGSDVPFGGYKMSGFGRDLGLQALHKYLQVKSVVTPIHNSPWL

SEQ ID NO: 2617 - protein, 112 aa, Bartonella quintana
ANEACLKMLQKIGSVERIPEFIARAKDKNDPFRLMGFGHRVYKNYDPRAKIMQQTCHEVLKELNIQDDPLLDIAIALENTALNDEYFIEKKLYPNVDFYSGITLKALGFPTE

SEQ ID NO: 2618 - protein, 222 aa, Vibrio vulnificus YJ016
MNSPMFTRTSSMESTLQTNKVLKNTYFLLSMTLVTSAIAAVATMAIGISPMMALVMQVAAIGILFFALPRSINSSMGIVWTFVFTTLMGGALGPMLTYYASIPSGPTIIAQALGLTGMVFLGLSAYTITSKKDFSFMRNFLMAGLIIVIVAAIINIFVGSTLGQLVISSVSALVFSGFILFDTSRIVRGEETNYVSATISMYLNILNLFTSLLSILGIMNDD

SEQ ID NO: 2619 - protein, 364 aa, Zea mays
MGSTAGDVAAVVDEEACMYAMQLASSSILPMTLKNAIELGLLEVLQKEAGGGKAALAPEEVVARMPAAPGDPAAAAAMVDRMLRLLASYDVVRCQMEDRDGRYERRYSAAPVCKWLTPNEDGVSMAALALMNQDKVLMESWYYLKDAVLDGGIPFNKAYGMTAFEYHGTDSRFNRVFNEGMKNHSVIITKKLLDFYTGFEGVSTLVDVGGGVGATLHAITSRHPHISGVNFDLPHVISEAPPFPGVRHVGGDMFASVPAGDAILMKWILHDWSDAHCATLLKNCYDALPENGKVIVVECVLPVNTEATPKAQGVFHVDMIMLAHNPGGKERYEREFRELAKGAGFSGFKATYIYANAWAIEFIK

SEQ ID NO: 2620 - protein, 105 aa, Hordeum vulgare
QPQQSYPVQPQQPFPQPQPVPQQRPQQASPLQPQQPFPQGSEQIIPQQPFPLQPQPFPQQPQQPLPQPQQPFRQQAELIIPQQPQQPLPLQPHQPYTQQTIWSMV

SEQ ID NO: 2621 - protein, 456 aa, Zea mays
  misc_feature (116)..(116): Xaa can be any naturally occurring amino acid
MNLELHHLTRSRSHPRVLARSSCGGEMRRQIPPVSCLVLLAVAFALLAEASAASPAHSSVAVNVTGVLSAFPDLSDFTRLLASSPVLAELAGRSSLTLLAVPNGNLPQSPSAFAAXSGADLADVLRYHVLLEYLSHADLRRLPASGKLVTTLFQTTGRATADLGAVNVTTAGASRLTVIRSPAPFPGSNATVLGAITAVPYNLSVLAVSGLIAPSGFDLAASESQPPAAVNITRVLADARAFNVAASMLEASGVAAEFEDDERGAGITVFAPTDDAFAGLPAGDRLQSLPADRKAVVLRFHVLHSYYPLGSLESIVNPVQPTLATEFSNAGRFTLNITRANGSVAIDTGVVQATITRTVFDQNPVAVFAVSKVLLPKEMFTRTAAASIVATTASASSPPPAATAPEASESARTPPTKLSSPPALRGGGQDYATAPAPARGIEWWCIALVYLLPHLV

SEQ ID NO: 2622 - protein, 453 aa, Arabidopsis thaliana
MSGSRRKATPASRTRVGNYEMGRTLGEGSFAKVKYAKNTVTGDQAAIKILDREKVFRHKMVEQLKREISTMKLIKHPNVVEIIEVMASKTKIYIVLELVNGGELFDKIAQQGRLKEDEARRYFQQLINAVDYCHSRGVYHRDLKPENLILDANGVLKVSDFGLSAFSRQVREDGLLHTACGTPNYVAPEVLSDKGYDGAAADVWSCGVILFVLMAGYLPFDEPNLMTLYKRVRICKAEFSCPPWFSQGAKRVIKRILEPNPITRISIAELLEDEWFKKGYKPPSFDQDDEDITIDDVDAAFSNSKECLVTEKKEKPVSMNAFELISSSSEFSLENLFEKQAQLVKKETRFTSQRSASEIMSKMEETAKPLGFNVRKDNYKIKMKGDKSGRKGQLSVATEVFEVAPSLHVVELRKTGGDTLEFHKVCDSFYKNFSSGLKDVVWNTDAAAEEQKQ

SEQ ID NO: 2623 - protein, 257 aa, Zea mays
  misc_feature (251)..(251): Xaa can be any naturally occurring amino acid
MDRAGALAVVDGRTGKRHEVKVSEDGTVRATDFKKITTGKDDKGLKIYDPGYLNTAPVRSSICYIDGDEGILRYRGYPIEELAESSSFVEVAYLLMYGNLPTQSQLAGWEFAISQHSAVPQGLLDIIQSMPHDAHPMGVLASAMSTLSVFHPDANPALQGQDLYKSKQVRDKQIVRVLGKAPTIAAAAYLRLAGRPPVLPLNTLSYSENFLYMLDSLGDRTYKPNPRLARALDILFILHAEHEMNCSTAAXRHLASR

SEQ ID NO: 2624 - protein, 246 aa, Zea mays
  misc_feature (235)..(235): Xaa can be any naturally occurring amino acid
MCGILAVLGCADDTQGKRVRVLELSRRLKHRGPDWSGMHQVGDCYLSHQRLAIIDPASGDQPLYNEDKSIVVTVNGEIYNHEQLRAQLSSHTFRTGSDCEVIAHLYEEHGENFIDMLDGVFSFVLLDTRDNSFIAARDAIGVTPLYIGWGIDGSVWISSEMKGLNDDCEHFEIFPPGHLYSSKQGGFKRWYNPPWFSEVIPSVPYDPLALRKAFEKAVIKRLMTDVPFGGLLSGXLDSSLGAAVTV

SEQ ID NO: 2625 - protein, 156 aa, Glycine max
MEPMDIVGKAKEDASLPKATMTKIIKEMLPPDVRVARDAQDLLIECCVEFINLVSSESNEVCNKEERRTIAPEHVLKALGVLGFGEYIEEVYAAYEQHKLETMQDSLKGAKWSNRAEMTEEEALAEQQRMFAEARARMNGGAIQSKEPEADQSLES

SEQ ID NO: 2626 - protein, 337 aa, Oryza sativa (japonica cultivar-group)
MAASDVHHGGATPAAAATAVPCVTLNSGHAMPVLGFGTGSSTPPADLAATIAHAVRLGYRHLDTAAVYGTEGAVGAAVAEAVRCGAVASRGELFVTTKLSMADAHPPRVVAALRESLSRLGLDYVDLFLIHWPVAIGKKDAAGELTWDDLSRGLVPFDMEGVWRGMEECHRLGLARSIGVSNFSAAKMSRLLALAAVPPAVNQVEMNVGWRQEKVREVCGEGGVVVAAYSPLGAHGAHWGSDAVMNSGVLHDVAAARCKTIAQVALRWLYEQGVCMVARSFNEGRMKQNMDIFDWELSDQDKAMIAGVPQRRACHGNYFVSPDGPYKSLHDLWDGEI

SEQ ID NO: 2627 - protein, 339 aa, Pseudomonas putida KT2440
MNIVHKALTTSLLALSVSSAFAAGSPGVEQHTQAFLEALEKGGGKPLEQLTPNDARAVLTGAQASVKVDLSGVEVKERTIQANGQSIKLQVVRPTNVKGDLPVFMFFHGGGWVLGDFPTHQRLIRDLVVGSGAVAVYVDYTPSPEAHYPTAINQAYAATRWVAEHGKEIGVDGKRLAVAGNSVGGNMAAVVALKAKEAGTPALRFQLLLWPVTDASFETASYKQFAEGHFLTTGMMKWFWNNYTVDAKARAQIYASPLRASAEQLKGLPPALVQTAEFDVLRDEGEAYARKLNAAGVTVTSVRYNGMIHDYGLLNPLSQVPAVKAALRQAGNELKVHLQ

SEQ ID NO: 2628 - protein, 1050 aa, Neurospora crassa
MSEPEPRRSVRATKGQHKALEQLDQIDIPKKRGKKAAKKAVPEPEEPEEEIIRCVCGATEQDEDSGEPWIACDMCGAWQHNICMGMSQYSEDLPKEYFCELCKPENHQELLNGMKNGERPWEARRKAFEEEKAEKRRRGNKKKSKRVSDHKEESAQVSQKPKPSPVPEPKKDAKTAAGQKRKTTEPVPEKEPKQKVRKVTETQAPSLPSYKAPDDIAGKISELPELRQGAAKLLSKSLVHSIGVAEKKGVSIPSEGVSASAERLAIQIERAVHDSHQPTAYSGQMRTLSYNLKTNQDLTTGLLGGTLTPTMLASMTTEELATKELQKETAEMKARAEKQSIMITEDVPRIRKTHKGEEVIGDESFNLSTDVSSAPVRRPPQDTAEPPKKRVKEEGPERAAQGTASKRASRDLTVDTQKSPSTGNFDINKVFSSVRSPTQSHHRRPSAMSTSTGPGVDADVDRLLDDGTQSPPYSPKEEILDPDVVWKGNLVMNTIADFQVTAKHIGGAKLKESIGLEWDKLMPKTLTVCGRIDEQQAIVYLCSLRYSLPTDVVVVNLQPTSAASKPQFQRLVDYFVSKKRYGVIGDRGVANVRDTYLVPVLPGTGQYPEFMLNLADNHIPETRTEPMLLAVFVYRNDPDTIMRLHGTNDYNQVVANQSTKVHTSFANTPAPSSPALANLPPGHRPSLSTPAFSPTSPQGTFPNYPTPRHSSTPSQVPPQQQPQPTPPAQQHSVSQIQHPAVDQVQKQGEAIAREVLGSLITSPTVAFLLPQAHKMSRKEWEVIKKIYERDPKARDDLPYLSNVLERESTNAQAKAAQAQQQSQQHPVHQQHQNQQQQMHHQPHHQQHHPQHQVQQQQQQQQQQHLPQHPPQHQPHHQAHFQPQPQHQQQHQAHHPPHHQPQHQSQQQAHHQPHPPPPQHHQQPQQQQQHPPKHQAQHPPQHQPQHQAPAQQPQAAYPPQPASHHPQPPQHQQHQPPQPQHAQPHPQAQPQQAHPQHHQQYFTPPVRTTPIPPPPIPPVTSGSGGPIKQTPIPPPPIPHQAATAATGPPSA

SEQ ID NO: 2629 - protein, 268 aa, Vitis vinifera
MSPTCLLVLLLGMVVLTSTPSLAHYPKPPPFQKPPPEHKPPGEKPSPEHKPPTKPPKGEKPLPEHKPPTPIGKPPKGEKPPPEHKPPTPIGKPPKGKKPLPEHKPPTPIGKPPKGEKPPPEHKPPTPIGKPPKGEKPLPEHKPPTPIGKPPKGEKPPPEHKPPTPISKPPKGEKPLPEHKPPTPIGKPTKGEKPLPEHKPPTPIGKPPKGEKPPSPFGKPPTGEKPPHYGHTPGHPPAHSYKPPQKIKPPPTPPHKPPHKPPSPTYPN

SEQ ID NO: 2630 - protein, 330 aa, Listeria monocytogenes str. 4b H7858
MELRDVEEPQVYGDKVKIKVAFTGICGSDIHTFKGEYKNPTTPVTLGHEFSGVVVEVGPDVTSIKVGDRVTSETTFETCGECIYCKERDYNLCSNRRGIGTQANGSFAEFVLSREESCHVLDERISLEAAALTEPLACCVHSALEKTTIRPDDTVLVFGPGPIGLLLAQVVKAQGATVIMAGITKDSDRLRLAKELGMDRIVDTLKEDLAEVVLGMTDGYGAERVFDCSGAVPAVNQGLPLTKKKGDFVQVGLFAEKKNAIDEESIIQREIAYIGSRSQKPSSWILALDLLANGKINTDKMITKVYGLDDWREAFEAVMAGNEIKVLVKS

SEQ ID NO: 2631 - protein, 246 aa, Triticum aestivum
  misc_feature (33)..(33): Xaa can be any naturally occurring amino acid
  misc_feature (40)..(40): Xaa can be any naturally occurring amino acid
  misc_feature (73)..(73): Xaa can be any naturally occurring amino acid
QQLALQPLQQFAKIQQPQQSFPQQPHRPHPFPXQLKQVIXQYPQQPFLLQPHQPFPQQPEQIIFQQPQQLFPXSQQPFLQQPQQPFPLQPQQPFPQQPAQIIAQQPQQPSPLQPQQSFLRQPQQPFPQPQQVVQINPQQPQQPFSQSRQPFPQQPQQPFPLQPQQPFPQQSAQIIPQQPQQPFPLQPQQSFLRQSQQPFLQQPQQPSPQPQQVVQIIPQQPQQPFPLLANQPQQPYPQQQPSGVMV

SEQ ID NO: 2632 - protein, 168 aa, Aquifex aeolicus VF5
MNKKGKVVITYGTFDLFHIGHLNLLKRAKALGDFLIVGVSTDEFNAIKGKKSVYPYEHRAEIVRSIKYVDLVIPERNWEQKIEDIKKYNVDVFVMGDDWKGKFDYLKEYCEVVYLPRTEGISTTELKEALVKLSNILEEDILRVLDIVVRGRICIEEILKNKNLKNGE

SEQ ID NO: 2633 - protein, 337 aa, Sinorhizobium meliloti 1021
MKAVRLYDIRDLRVEEVAELAAPPPGFVNLEVRAAGICGSDLHNYRTGQWISRRPSTAGHEFCGRVTAIGEGVSHLVRGDVVSADSRMWCGTCPACASGRSNVCETLGFLGEVCDGGFAEAVQLPSRLVFRHDPKLSPHVAAMAEPLAVALHAVRRLAVPDGAPVLVMGCGTIGGLSALLLSRLHQGPLLLTDLNADKAALVAEVTGGVVVALDGAAIEEALPGTRLRHALDATGSIQAIARALDILSGGGALALVGIGHGKLDLDPNILVEREISLVGCHAFAGELPEAIELLADLAPALQRFIEVLPTLDDVPEAYERLLRGESNALKTIIEVAG

SEQ ID NO: 2634 - protein, 160 aa, Bradyrhizobium japonicum USDA 110
MRRMMAAFVALALLASPAVHAVQPDEIMSDPAKETRARDLSRELRCMVCQNQSIDDSDAPLARDLRLLVRERIAAGDSNSQVLDFLVARYGEFVLLKPRFERQTLLLWLLGPLLLTGGGLALWLQIRRRSRSGADLPAPPLTPDEEARLAALMSDEAKSS

SEQ ID NO: 2635 - protein, 191 aa, Pneumocystis carinii
MQTIKCVVVGDGAVGKTCLLISYTTNKFPSEYVPTVFDNYAVTVMIGEEPYTLGLFDTAGQEDYDRLRPLSYPQTDVFLICFSVTSPASFENVREKWHPEVRHHCPGTPCLIVGTQIDLRDDPMIVEKLSRQRQTPITKELGEKLSKELGAVKYVECSALTQKGLKNVFDEAIVCALEPPVTKKKTKCLIL

SEQ ID NO: 2636 - protein, 337 aa, Triticum aestivum
MKTLLILTIIAVALTTTTANIQVDPSGQVQWPQQQQPFPQPQQPFSQQPQQIFPQPQQTFPHQPQQAFPQPQQTFPHQPQQQFPQPQQPQQPFPQQPQQQFPQPQQPQQPFPQQPQQQFPQPQQPQQPFPQPQQPQLPFPQQPQQPFPQPQQPQQPFPQLQQPQQPLPQPQQPQQPFPQQQQPLIQPYLQQQMNPCKNYLLQQCNPVSLVSSLVSMILPRSDCKVMRQQCCQQLARIPQQLQCAAIHGIVHSIIMQQEQQQQQQQQQQQQQGIQIMRPLFQLVQGQGIIQPQQPAQLEVIRSLVLGTLPTMCNVFVPPECSTTKAPFASIVADIGGQ

SEQ ID NO: 2637 - protein, 279 aa, Streptococcus pyogenes MGAS315
MVTTVKMTSGYEIPVLGFGTYQAADGEEAYQSTLAAIKADYRHIDTAAIYKNEESVGRAIKDSGVLREDLFITTKLWNDAHSYEGAKDALAASLDRLGLDYVDLYLIHWPNPKALRNTWKEANAQAWQYMEEAVEAGLIKSIGVSNFMVHHLEALQETAKITPAINQIRLAPGCYQKEVVDYCKANEILLEAWSPLGQGEIFDNETMQQLANKYDKTVAQVALAWSLAEGFIPLPKSVHDERIKENMAIFDVSLTPEDKKTIRYLSGMSAISNPDTTSF

SEQ ID NO: 2638 - protein, 325 aa, Vitis vinifera
GGGNFGVARLVSDKRTRELFAVKFIERGQKIDEHVQREIMNHRSLMHPNIVRFKEVLLTPTHLAIVMEYAAGGELFGRICNAGRFSEDEARFFFQQLISGVSYCHSMRICHRDLKLENTLLDGSTAPRVKICDFGYSKSSVLHSQPKSTVGTPAYIAPEVLSRKEYDGKLSDVWSCGVTLYVMLVGAYPFEDPDDPRNFRKTIGRILSVHYSIPDYVRVSIECRHLLSRVFVANPDKRITIPEIKTHPWFLKNLPIEMMDGGSWQKNDVNNPSQSVEEILSIIQEARKTTGVRKAGGPFMEGSMDLDDIDADEDIETSGDFVCPL

SEQ ID NO: 2639 - protein, 103 aa, Brassica napus
  misc_feature (12)..(12): Xaa can be any naturally occurring amino acid
  misc_feature (15)..(15): Xaa can be any naturally occurring amino acid
  misc_feature (22)..(22): Xaa can be any naturally occurring amino acid
  misc_feature (29)..(29): Xaa can be any naturally occurring amino acid
  misc_feature (34)..(34): Xaa can be any naturally occurring amino acid
  misc_feature (39)..(39): Xaa can be any naturally occurring amino acid
  misc_feature (49)..(49): Xaa can be any naturally occurring amino acid
  misc_feature (54)..(54): Xaa can be any naturally occurring amino acid
  misc_feature (58)..(58): Xaa can be any naturally occurring amino acid
  misc_feature (61)..(61): Xaa can be any naturally occurring amino acid
  misc_feature (69)..(69): Xaa can be any naturally occurring amino acid
  misc_feature (74)..(74): Xaa can be any naturally occurring amino acid
MASSMLSSAAVXTSXPAQVTMXAPFTGLXKTSAXFPVTXKANNDITSIXSNGGXVSCXKVXPPVGKKKXETPPXPPLTTRSLNCVEAHYLPLIFAISATPLSR

SEQ ID NO: 2640 - protein, 358 aa, Azoarcus sp. EbN1
MSKFHDMRVASVRPETRDAIVVTFDVPPSLADSFHYAPGQHLTLRTEIGGEDVRRSYSICSGADERALRIAIKRVHGGLFSNWANDFMKPGVSVEVMPPSGHFGVAPDPQHHRNYAAFAAGSGITPILSQIKTILAAEQGSRFTLVYGNRSSSSVMFREELADLKDQYGERLNLVHVLSREQQDIELFNGRIDRERCDALLTRWIDAKRIDVAFICGPMDMMEAVSASLQAHGVAKSAIKMELFATSLPKGPRPVHSHPVKGTEDCEVTVIQDGRVRQFTMPKNRDSVLDAGLGQGIEMPYSCKGGVCSTCRCKVIDGEVDHDTNFALEDYEIARGFRLSCQSYPVTDKLVLDFDQET

SEQ ID NO: 2641 - protein, 201 aa, Pisum sativum
MSNEYDYLFKLLIIGDSSVGKSCLLLRFADDSYVDSYISTIGVDFKIRTVELEGKTVKLQIWDTAGQERFRTITSSYYRGAHGIIIVYDVTDMESFNNVKQWLHEIDRYANDSVCKLLVGNKCDLTENKVVQTQTAKAFADELGIPFLETSAKDSINVEQAFLTMAAEIKKKMGSQPSGSKSAESVQMKGQPIPQNNNCCG

SEQ ID NO: 2642 - protein, 448 aa, Clostridium perfringens str. 13
MEKVDFSKLTGDLVTRENIEYEKSIESWNRAIKKYPLGIVFCNNIDDVKNALEWAKENNIPFRIRVGRHNYEGYSIENDILVIDLSKMNNIIIDEENMKVTIEGGVKNEEIYEALGVLGYPFPGGGCPTVGVVGFALGGGWGYSSRLLGLGCDNLLEVKFINSKGKIVIANEYDNSDLFWAAKGCGGGNFGVVVSMTFKIPQKIEMATLIDIDYPNAEKEELVYVIRTLQKKFKNLDRRMNLKTAIYNSKYKGIGVKITGLFYGHKEEANEILLPFKLPTRVNFNLSYMRVLEANRKIEYSHPPYEKYKSTGRFVFRDYDNSEIEKLIDIVSNRAEGAYYTAISFYGLGGAVKDVHKNSSAFYYRDARFIMGIQSVWEDDIFAEENIKWIKNNFKYIESITTGSFINFPFKDLKDYEEEYYGENKDKLREIRKKYDENRFFAFEQGIK

SEQ ID NO: 2643 - protein, 496 aa, Nicotiana tabacum
MVLSKTASESDVSIHSTFASRYVRTSLPRFKMPENSIPKEAAYQIINDELMLDGNPRLNLASFVTTWMEPECNTLMMDSINKNYVDMDEYPVTTELQNRCVNMIAHLFNAPLGDGETAVGVGTVGSSEAIMLAGLAFKRKWQNKMKAQGKPFDKPNIVTGANVQVCWEKFARYFEVELKEVKLSDGYYVMDPEKAVEMVDENTICVAAILGSTLNGEFEDVKRLNDLLIEKNKETGWDTPIHVDAASGGFIAPFLYPELEWDFRLPLVKSINVSGHKYGLVYAGIGWAIWRNKEDLPDELIFHINYLGADQPTFTLNFSKGSSQVIAQYYQLIRLGFEGYKNVMENCQENARVLREGIEKSGRFNIISKEIGVPLVAFSLKDNSQHNEFEISETLRRFGWIVPAYTMPPNAQHVTVLRVVIREDFSRTLAERLVIDIEKVLHELDTLPARVNAKLAVAEANGSGVHKKTDREVQLEITTAWKKFVADKKKKTNGVC

SEQ ID NO: 2644 - protein, 487 aa, Rhizobium sp. NGR234
MQRFQCYIDGEFADGEGRFESVDPATGAAWAEMPEAREADVDRAVEAAHKALDAGPWSKLTATLRGKLLYRLADLVAENAQRLAELETRDTGKIIRETSAQIAYVAEYYRYYAGIADKIEGSYLPIDKPDMEVWLRREPIGVVAMVVPWNSQLFLSAVKIGPALAAGCTMVVKASEDGPAPLLQFARLVHEAGFPAGVVNIITGFGPACGAALSRHPKVDHIAFTGGPETARHVVRNSAENLASTSLELGGKSPFIVFADADLESAANAQVAGIFAATGQSCVAGSRLIVEKSVKDRFLEILKRKAEAICIGSPLDMATEVGPLATERQRAHIQALLGRSLAAGARLVTGGTAPDGAGFFYQPTILDCDGNSTPALEEEFFGPVLSVVSFETEAEALALANATRYGLAAGLFTRDLTRAHRLMKGIRTGIVWVNTYRAVSPIAPFGGFGLSGHGREGGMEAALDFTRTKTVWLRTSDDPIPDPFVMR

SEQ ID NO: 2645 - protein, 377 aa, Sulfolobus solfataricus P2
MSVVSKGLENVIIKVTNLTFIDGEKGILRYRGYNIEDLVNYGSYEETIYLMLYGKLPTKKELNDLKAKLNEEYEVPQEVLDTIYLMPKEADAIGLLEVGTAALASIDKNFKWKENDKEKAISIIAKMATLVANVYRRKEGNKPRIPEPSDSFAKSFLLASFAREPTTDEINAMDKALILYTDHEVPASTTAALVAASTLSDMYSSLTAALAALKGPLHGGAAEEAFKQFIEIGDPNRVQNWFNDKVVNQKNRLMGFGHRVYKTYDPRAKIFKKLALTLIERNADARRYFEIAQKLEELGIKQFSSKGIYPNTDFYSGIVFYALGFPVYMFTALFALSRTLGWLAHIIEYVEEQHRLIRPRALYVGPEYQEYVSIDKR

SEQ ID NO: 2646 - protein, 246 aa, Zea mays
MAKNYPTVSAEYSEAVDKARRKLRALIAEKSCAPLMLRLAWHSAGTFDVSSRTGGPFGTMKHQSELAHGANAGLDIAVRLLEPIKEEFPILSYADFYQLAGVVAVEVTGGPEIPFHPGREDKPQPPPEGRLPDATKGSDHLRQVFGKQMGLSDQDIVALSGGHTLGRCHKERSGFEGAWTTNPLVFDNSYFKELLSGDKEGLLQLPSDKALLSDPVFRPLVEKYAADEKAFFDDYKEAHLKLSELG

SEQ ID NO: 2647 - protein, 469 aa, Zea mays
GTSPATSTTSLQAVDTFSGIRGSMSNYYDDYDDIDEMEDDYDMDDPIDDMVDEQQGIRDSDAEDNDYGQPNDKIPDTSSADARKGRDIQGIPWEQINITRKKYRQSRLEQYKNYENVPNSGEEAMKDCKPTEKGGIYYEFRRNTRSVKSTILHFQLRNLVWATSKHDIYLVSHYSIRHWSALSGVDTELINVQGHVAPREKHAGSLLEGFYQTQVSTLTVKDNLLVAGGFQGELICKHLDQEGISFCCRTTYDDNAITNAVEIFNTSSGAVHFMASNNDSGVRYYDMERFQLFKHFQFEWPVNHASLSPDRKVVVIVGDDPDGLLIDANSGKTVHSIKGHRDYSFASAWSPDGRTFATGNQDKTCRIWDVRNLSKSVHVLRGNLGAIRSIRFTSDGQFMSMAEPADFVHIYDVKSDYNKRQELDFFGEISGTSFSPDTDTLFVGVWDRMYGSLLQFGRLYNYSYLDSLF

SEQ ID NO: 2648 - protein, 154 aa, Magnetospirillum magnetotacticum MS-1
MKRLLVLLFVLATPALAVNPDEMLKDPAQEHRARELGKDLRCLVCQNQSIDDSDADLAKDLRVIVRERIAKGDSDDQVKSFVVDRYGDYVLLKPPFKATTLALWLGPLALFAGALWAVLAFYRRRPAEKAAPPPPPLSAEESRRLDKLLKETER

SEQ ID NO: 2649 - protein, 75 aa, Brassica napus
MPSKCEILCEILIAILLPPLGVCLRRGCCTVEFLICLVLTLLGYVPGIIYALYVIVFQNRDEYFDEARRPLYYSA

SEQ ID NO: 2650 - protein, 458 aa, Streptococcus agalactiae NEM316
MAYKTIYPYTNEVLHEFDNISDSDLEQSLDIAHALYKTWRKEDNVEERQNQLHKVADLLRKDRDKYAEVMTKDMGKLFTEAQGEVDLCADIADYYADNGQKFLKPVPLESPNGEAYYLKQAVGVLLAVEPWNFPFYQIMRVFAPNFIVGNTMLLKHASICPASAQAFEDLVREAGAPEGAFKNIFASYDQVSNLISDPRVAGVCLTGSERGGASIAAEAGKNLKKSSMELGGNDAFLILDDADFDLLSKTIFFARLYNAGQVCTSSKRFIVMADKYDEFVNMVVETFKSAKWGDPMDSETTLAPLSSAGAKDDVLKQIKLAVDHGAEVVFGNDTIDHPGNFVMPTVLTNITKANPIYNQEIFGPVASIYKVDTEEEAIALANDSSYGLGSTVFSSDPEHAKKVAAQIETGMTFINSGWTSLPELPFGGIKNSGYGRELSQLGFDAFVNEHLVFTPNSD

SEQ ID NO: 2651 - protein, 289 aa, Saccharomyces cerevisiae
GAMPPIFLPPPNYLFVRDVWKSNLYSEFAVIRQLVSQYNHVSISTEFVGTLARPIGTFRSKVDYHYQTMRANVDFLNPIQLGLSLSDANGNKPDNGPSTWQFNFEFDPKKEIMSTESLELLRKSGINFEKHENLGIDVFEFSQLLMDSGLMMDDSVTWITYHAAYDLGFLINILMNDSMPNNKEDFEWWVHQYMPNFYDLNLVYKIIQEFKNPQLQQSSQQQQQQQYSLTTLADELGLPRFSIFTTTGGQSLLMLLSFCQLSKLSMHKFPNGTDFAKYQGVIYGIDGDQ

SEQ ID NO: 2652 - protein, 175 aa, Triticum aestivum
  misc_feature (24)..(24): Xaa can be any naturally occurring amino acid
MAPAVMASSATTVAPFQGLKSTAXGLPVGRRSSGSLSSVSNGGRIRCMQVWPIEGIKKFETLSYLPPLSTEALLKQVDYLIRSKWVPCLEFSKVGFVFREHNSSPGYYDGRYWTMWKLPMFGCTDATQVLNEVEEVKKEYPDAYVRVIGFDNLRQVQCVSFIAFRPPGCEESGKA

SEQ ID NO: 2653 - protein, 219 aa, Triticum aestivum
  misc_feature (103)..(103): Xaa can be any naturally occurring amino acid
RVPREWTAQVEPGVHITFVSIPGGAGNDLKRIRFSREMFNKWEAQRWWGENYDRVVELYNVQTFRGRARWCCRRRPRRRRAGSGPSPGPRHTRRRATRPRPCXDPSDHVWAHHFNMLNSAAGAGASSMPSSAGAPAPYDPSRATTSSLDEASVSVSNASDLEAAEWVEQDEPGVHITIRELGDGTRELRRVRFSRERFGEERAKVWWEQNRDRIHTQYL

SEQ ID NO: 2654 - protein, 510 aa, Allium cepa
MPIPVLLLLTIFLALLLYLFFFVAKKHEGKRVPGPKGWPILGNLPQLGAKPHQSLCELSRTYGPLFGLRFGYVDVVVAASADVAEQFLRVHDVNFSNRPPNSGAEHIAYNYQDLVFAPYGPRWRMLRKLCALHLFSPKALEDLSPVRSLEVATLANTLYLRAQSDQPTVNLAQMLTTCTTNALSKAMMGRRVFVNETTDTETSKFKDMVLEIMSLAGVFNVGDFVPWLRPFDLQRVVRKMKDVHARFDSFLDKVIAEHRMVDNAHDLLSLLIRSKDDVDNDGVKLTNTDIKALLLNLFTAGTDTSSSTVEWALSEMIRHPDALKRAQRELDEVVGRDRLVSETDIRSLPYIQAIVKETFRLHPSTPLSLPRISSEACTVNGYLIPKNTTLLVNVWAISRDPGVWKEPLEFRPERFLGGGGYETVDLKGNDFELIPFGAGRRVCAGLSLGLRMVQFLTATLVHGFDWKLVDGQSAEKLDMEEAYGLPLQRAVPLMVRPVPRLDEKAYHVVV

SEQ ID NO: 2655 - protein, 478 aa, Klebsiella pneumoniae
MTAPVQHPMYIDGQFVSGRGDGWIDVLNPATEALLSRIPDGTAEEARLAIDAAERAQPGWEALPAIERAGWLRKIAAGIRQRADEIAGLIVAEGGKIQQLAAVEVAFTADYLDYMAEWARRYEGEIVQSDRPGENILVFKRALGVTTGILPWNFPFFLIARKLAPALITGNTIVIKPSEFTPNNAIAFAEIVHQVGLPKGVFNLVLGRGETVGQELAGNPKVAMVSMTGSVAAGEKIMAAAAKNITKVCLELGGKAPAIVMDDADLELAVKAVVDSRVINTGQVCNCVERVYVQQGIYDRFVNRLGEAMKAVQFGDPATRDDIAMGPLINAAARDQVAGKVRSGGAGGAGGAGGQPLEGKGYFYPPTLLLDVRQEMDIIHEETFGPVLPVVAFSTLDEALATANDSDYGLTSSIYTRDLNVAMKAIKGLKFGETYINRENFEAMQGFHAGWRKSGIGGADGRHGLNEYLQTQVVYLQA

SEQ ID NO: 2656 - protein, 490 aa, Pseudomonas syringae pv. tomato str. DC3000
MARFELQKLYIDGGYVDASNTETFDSINPANGEVLAKIQRASKEDVERAVVAAEKGQKIWAAMTAVERSRILRRAVDILRERNDELAALETLDTGKAISETRYVDIVTGADVLEYYAGLVPAIEGEQIPLRDSSFVYTRREPLGVVAGIGAWNYPIQIALWKSAPALAAGNAMIFKPSEVTSLTTLKLAEIYTEAGVPNGVFNVLTGSGREVGTWITEHPRIEKVSFTGGTDTGKKVMASASSSSLKEVTMELGGKSPLIVFDDADLDRAADIAMMANFYSSGQVCTNGTRVFVPNALKGEFEAKILERVKRIRPGNPEDENINFGPLVSFEHMESVLGYIAKGKEQGARLLCGGDRLTGGVFDKGAFVAATVFTDCTDEMTIVREEIFGPVMSILGYDTEDEVVRRANDTDFGLAAGIVTRDLNRAHRVIHLLEAGICWINAWGESAAQMPVGGYKQSGVGRENGISSLAQYTRIKSVQIELGDYASVF

SEQ ID NO: 2657 - protein, 451 aa, Arabidopsis thaliana
MSGSRRKATPASRTRVGNYEMGRTLGEGSFAKVKYAKNTVTGDQAAIKILDREKVFRHKMVEQLKREISTMKLIKHPNVVEIIEVMASKTKIYIVLELVNGGELFDKIAQQGRLKEDEARRYFQQLINAVDYCHSRGVYHRDLKPENLILDANGVLKVSDFGLSAFSRQVREDGLLHTACGTPNYVAPEVLSDKGYDGAAADVWSCGVILFVLMAGYLPFDEPNLMTLYKRICKAEFSCPPWFSQGAKRVIKRILEPNPITRISIAELLEDEWFKKGYKPPSFDQDDEDITIDDVDAAFSNSKECLVTEKKEKPVSMNAFELISSSSEFSLENLFEKQAQLVKKETRFTSQRSASEIMSKMEETAKPLGFNVRKDNYKIKMKGDKSGRKGQLSVATEVFEVAPSLHVVELRKTGGDTLEFHKVCDSFYKNFSSGLKDVVWNTDAAAEEQKQ

SEQ ID NO: 2658 - protein, 252 aa, Rickettsia sp. DmS1
LLCLRLSSLSAFYPDLLNFKEADYEHIAIRMIAEIPTIAAMSYKYSIGQPFIYPDNSLDFTKNFLHMMFAMPCTKYKVNPIIKNALNKIFILHADHEQNASTSTVRIAGSSGANPFACISTGIASLWGPAHGGANEAVINMLKEIGSSEYIPKYIAKAKDKNDPFRLMGFGHRVYKNYDPRTAVLKEMCKVLKELGQLDNNPLLQIAIELEAIALKDEYFIERKLYPNVDFYSGIIYKAMGIPSQMFTVLFA

SEQ ID NO: 2659 - protein, 512 aa, Aspergillus nidulans FGSC A4
MGQSHSKGNSGAGDSLQSYPSFSKSDTKESLRSFRGSIRSKIRSSDSPRASTSALNQSDDKSDAGSMKSVGSRRSSTNLSRPASADSSAASPTDAPDPPPSPTMSSSLKRGHQDVAAMKQSGEVDHVSDAPPSAAPPPGSQAKVGESILIKREDTSNPILDFIMKTPLHSDASSSSPGMGMGALKSIDLDDMITRLLDAGYSTKVTKTVCLKNAEITAICTAARELFLSQPALLELSAPVKIVGDVHGQYTDLIRLFEMCGFPPVSNYLFLGDYVDRGKQSLETILLLLCYKLKFPENFFLLRGNHECANVTRVYGFYDECKRRCNIKIWKTFVDTFNCLPIAATVAGKIFCVHGGLSPSLSHMDDIRNIARPTDVPDYGLLNDLLWSDPADMDEDWEPNERGVSYCFNKNVIMNFLQRHDFDLVCRAHMVVEDGYEFYQDRILVTVFSAPNYCGEFDNWGAVMSVSGELLCSFELLKPLDSAALKSHIKKGRKERNSLINSPPAVVSAQSF

SEQ ID NO: 2660 - protein, 468 aa, Vibrio vulnificus YJ016
MNQFGMTIDGQTVQGEMPSSIVLNPANEQEVFTAPVASIAQLNKAVESAKAAYPLWSALSQAQRDGYINKIADVIEQNASELADIIVKEQGKPTQLAQMEVGGAVAWTRHSASIAIPVEVYEDSENKRIEGRRKSIGVVGSITPWNWPLMIAIWHIIPALRMGNTVVLKPSELTPINTLKLGQLLQDVLPVGVLNVVSGSGDVGRAMSEHRDINKLVFTGSTLTGQNIMQAAATNLKRLTLELGGNDAGIVLPGANLDAIAEGLFATAFINMGQTCAALKRLYVHESQHDELCQKLADIAEKQVVGEGSADGVTFGPVQNSQQLEKVIALVEEAKQQGATIYAGGARLDKPGYFFPPTIVGDAQSGMRVVEEEQFGPVLPVIKYSTVADAVAAANNVGVGLGGSVWGDVEQASELASKLECGSVWINGHAEVLPHAPFGGCKMSGFGVEFGLEGLLENSLLQVVNINK

SEQ ID NO: 2661 - protein, 124 aa, Triticum aestivum
  misc_feature (26)..(26): Xaa can be any naturally occurring amino acid
  misc_feature (34)..(34): Xaa can be any naturally occurring amino acid
  misc_feature (101)..(101): Xaa can be any naturally occurring amino acid
MAPTVMSSTSVAPFQGLKSTAGLPVXSRRSNGAXSLGSVSNGGRIRCMQVWPIEGIKKFETLSYLPTLSTEALLKQVDYLIRSKWVPCLEFSKVGFIFREXHNASPGYYDRYLDNVESCPMFRH

SEQ ID NO: 2662 - protein, 253 aa, Rickettsia slovaca
YMLAAVGSLSAFYPDLLNFKEADYELTAIRMIAKIPTIAAMSYKYSIGQPFIYPDNSLDFTENFLHMMFATPCTKYTVNPIIKNALNKIFILHADHEQNASTSTVRIAGSSGANPFACISTGIASLWGPAHGGANEAVINMLKEIGSSEYIPKYIAKAKDKNDPFRLMGFGHRVYKNYDPRAAVLKETCKEVLKELGQLDNNPLLQIAIELEAIALKDEYFIERKLYPNVDFYSGIIYKAMGIPSQMFTVLFA

SEQ ID NO: 2663 - protein, 1121 aa, Ustilago maydis 521
MSHSQSLHSLAPRAEQSNGVIPAVLTEQLNANGSTDLKKVAITIVAFVALSLFTLIAFQILRPNNKIVYAPKYKYAEEGKAPPKASEGFFGWIPPILKYKEHDLLPLIGLDGVTFLRFVRMMRWMLTTLALLMSVVLMPVDIAYNVRNGGSNLVTNRLNYLNMSNVHGTYMWAHVGMSYVGTIVALSFIWYHYREMVRLRWSYFRSEEYQTSFHARTLMITDVTKRYQADNALGAVLSELKMPYPTTEVHIGRRVGLLPDLIEKHSDLVRELEHVLAKYLKNPNNLPSKRPTKTIGGFMGIGGEKLDAIDYLTEQINRVEAAVMHQRETIQQKKPEMYGFASLAAVPYAHAAAKVLQNKKPRGMRITLAPPPTGIIWQNLVKSRASRAKSSFFGFLMLLVLFFMNIFPLIIVSLLSNMARLTSISWLRWLKDWQTASSFTFAAVSGLGAPIIMGIASFFFPIAMRKIAKYRGVQTRYRLDRLLVGQYFGFLVISQFLFFSLIGVVLSLVSQLVVEINHDSALAIIKKLGRNAAYATKQQYLNQSNYWLTWLPLRGYLAVFDLAQVIKLLLVWIQKVFLGRTPRDVREYTKPPVFDYWIYYSNFLFMSAVAMIYAPLAPLVVVFSAIVFWASSFIYKYQLMYVFVTKHETGGMLWRPTINRLLICIGFMQVILILAVVLDTLNYYQAIAALPPILMLIAFKIYCRRTFDSRFDWYIPNEAEIAASKIHAGDARHNRLQRRFGHPSLHSKLFTPMVHAKVKHLLPQVYKGRLDTGVAMVDGRKVETEQVAGGLKIAAIEEDQLEYDPSKDSDARSVMSGTTLGGMSMAGIGATTPGSITGGPRGDYFKDQYANYMAAGPMHGGEEFEMSNVGARDSRDNLLEKHQNSLYNESLDGTLAGTTYGGKSSPEAGLGAHGQYNGYSAATTPGLESGIAQQASYVDPYSQAGGVYAPRIGGNHRAQGSQTSLGSYGNLLYGSNAAAAPTGYGSPGSQAAYGSGARGNGGVAHTASPGATQQISPGTVIAPTATQYQASGYTASPPNRQPPQQYMGAPPSRQASADYPYQPSAGYTHPQAQQAPMYSQQQSRQQPYPYGQHPSGGNHYAPSHGSQPGSGYQQDAYGYQR

SEQ ID NO: 2664 - protein, 166 aa, Glycine max
MATSSAKSVHDFTVKDAKGNDINLGDYKGKVLIIVNVASQCGLTNSNYTELSQLYEKYKQKGLEILAFPCNQFGAQEPGSNEQIQEFVCTRFKAEFPVFDKVDVNGDKAAPLYKYLKSSKGGLFGDGIKWNFSKFLVDKEGNVVDRYAPTTSPLSIEKDLLKLLDA

SEQ ID NO: 2665 - protein, 457 aa, Rhodococcus sp. DK17
MSYYATTSPLTGQRVQEFPRATDHEISDALTSSDAAYRQWRTSSLEERADVLRALAKLWHERADELAPILTLEMGKPIPQARGEVALCANIFEYYAEHGPTFMEDEVLEIAGGGEAIVRTEPIGPLVGIMPWNFPYYQVVRFAAPNIMLGNTLLLKHSRNCPQSALAIETLFVEAGLPEGVYVNVFADNAQVARMVADPRVRGVSLTGSERAGSAVGEIAGRHMKKFVLELGGSDPFIVLDDTDLDTTVAAAVNNRMANAGQACTASKRLIVLDDVYDRFLDKFTEAMRNIVPGDPTDPATTFGPLSSRSCVDEIAEQVDDALAKGAKLLTGGCRGEGPGAFYEATVLAGVTPQMRVYSEELFGPVAVVYKVATEAEAIALANESPFGLAAAIFTSDRNQARRVAEDLEVGMAWINGTSKSAPDLPFGGVKRSGVGRELGRYGFNEFANKKLVRTVR

SEQ ID NO: 2666 - protein, 229 aa, Candida albicans SC5314
MVKSNVESAWETMEDTFSEIQNKFHQIYKPIDTGKPDEDDETTKKESLDITDDSTLSVSPITQLLYLARSKFYDLTPLDNQKSPFPFKNLRGKVVLIVNVASRCGFSFQYNGLEQLNKRFANDDFVLLGVPCNQFLWQEPGTNDQIVTKCKKKYDVSFQILDKINVNGEQADPVYKFLKAQKEGLWGTNRVKWNFEKFLIDKNGRVVERYSTFTRPVAIIPKIEQLLES

SEQ ID NO: 2667 - protein, 488 aa, Streptomyces avermitilis MA-4680
MPDLFIDGEWVRGATGTTREVVNPFDATVVRSVDEGDATDVDRAVTAARRAFHAADWAAAPTQRRADVLFRVAEYLLRDIEEIARDETLNTGKTLAEARIDVKDVSNAFRYFAEMAGKDAGRVVDAGPDVLSRVVHEPVGVCALIAPWNYPLLQASWKVAPALAAGNTFVLKPSEITPLTTIAMMRLIEEAGAPPGVANLVLGAGATVGSAMTVHPEVDLVSFTGGLGTGRRIMESAAREVKNIALELGGKNPNVVFDDADFEAAVDHTLDASFLHSGQVCSAGSRLLVQDSWHDRFVRELADRASRIRLGNGLDPHTESGPLSSAEHRAKVEKYIDLGRSEGARLVTGGRRPDDPDLAHGFFLLPTIFDDCDRSMRIVQEEVFGPVVTVETFRTEDEAVELANDTRYGLAAGVWTGEASRAQRVAARLRHGTVWINDFHPYLPQAEWGGYGQSGVGRELGPTGLREYQEIKHIYQNLSPGPSGWFKG

SEQ ID NO: 2668 - protein, 343 aa, Chrysosplenium americanum
MLFAMQLASASVLPMVLKSAIELDLLEIIASQDTCMSPTEIASHLPTTNPHAPTMIDRILRLLSSYSIVTCSVRSVDDQRVYSPAPVCKYLTKNQDGVSIAALCVAAQDKVLMECWYHMKDAVLDGGIPFNKAYGMPIFDYFAKDLGSNKVFNKGMSDFSSMIIKKILETYKGFQGLTSLVDVGGGTGATLTKILSKYPTIRGINFDLPHVIQDAPEYPGIEHVGGDMFVSVPKGDAIFMKWICHDWNEEQCLKLLKNCYDALPNNGKVIVAEYILPVVPDSSLASKLSVTADVMIVTQNSGGKERTEKEFEALAKAAGFQGFQVFCNAFTIYIIEFSKNISN

SEQ ID NO: 2669 - protein, 170 aa, Gossypium hirsutum
MASQSSKPQSIYDFTVKDAKGNDVDLSIYKGKVLIIVNVASQCGLTNSNYTDLTEIYKKYKDQGLEILAFPCNQFGGQEPGSIEESIQNMVCTRFKAEYPIFDKVDVNGDNAAPLYKFLKSSKGGFFGDSIKWNFSKFLVDKEGNVVDRYSPTTTPASMEKDIKKLLGVA

SEQ ID NO: 2670 - protein, 388 aa, Zea mays
  misc_feature (294)..(294): Xaa can be any naturally occurring amino acid
MEAGGAGSGLNGAVQAKGTGADGGSAKPLPPCCVKARAAAPESEARCHATVVSGWFTEPRSRCGKASKVQYYNNPMWPGEANSLKVEKILYQGKSPYQEVLVFESSTYGKVLVLDGIVQLTDKDECAYQEMITHLPLCSIPSPKKVLVIGGGDGGVLREVSRHSSVESIDICEIDQLVIDVCKDFFPHLSVGFQDPRVQLHVGDAVEFLRNAPEGTYDAIIVDSSDPIGPAQELVEKPFFDTIARALRPGGVLCNQAESMWLHTHLVQDMLSICRETFKGSVRYAWTSVPTYPXSGVIGFLLCAKEGPLVNFLTPINPIEKLEGATKAGREIRFYNSEMHRAAFVLPTFARRELEAYCVSTETEQAEETPAAPLKLTLASRSEIFATS

SEQ ID NO: 2671 - protein, 362 aa, Saccharum officinarum
MGSTAEDVAAVADEEACMYAMQLASASILPMTLKNALELGLLEVLQAEAPAGKALAPEEVVARLPVAPTNPDAADMVDRMLRLLASYDVVKCQMEDKDGKYERRYSAAPVGKWLTPNEDGVSMAALTLMNQDKVLMESWYYLKDAVLDGGIPFNKAYGMTAFEYHGTDPRFNRVFNEGMKNHSVIITKKLLEFYTGFEGVSTLVDVGGGIGATLHAITSHHPQIKGINFDLPHVISEAPPFPGVQHVGGDMFKSVPAGDAILMKWILHDWSDAHCATLLKNCYDALPENGKVIIVECVLPVNTEAVPKAQGVFHVDMIMLAHNPGGRERYEREFHDLAKGAGFSGFKATYIYANAWAIEFIK

SEQ ID NO: 2672 - protein, 180 aa, Glycine max
MQHRKLTSGRPSGTDGSDYSYRMVVDSRYQLVAKGKKYLSLHFITEAVLLLIGATLAYLPGIEADAPNTVAYSSVIVSVVSLIIGNIGRRRSRSGLLRFYAVVSSIVMLLLIASLATQHLLLKAIQDSKLWRTGKYDVNDLSHFQIGLLLYMVTLSVLKLCTVNAVVSLLFNMAPPKKTS

SEQ ID NO: 2673 - protein, 113 aa, Triticum aestivum
MLEWFADIRLINGEAIHASPRKTGAIILGGGLPKHHICNANMFRNGADYAVYINTAQEFDGSDSGAHPDEAVSWGKIKGSAKPVKVHCDATIAFPLLVAATFARRSRSANSTN

SEQ ID NO: 2674 - protein, 430 aa, Bifidobacterium longum DJO10A
MATAQLDVDSNKFNLPVVKASAGPDGIVVSKLRNDGWVTLDPGFLTTAQCESKITYIDGKHSILRYCGYPIEQLCENSDFLEVAWLLRHGELPSRAEYEQFCADINHKTMVGEDFRTFMGSFPRSAHPMSVLASAINALATFYPDTTDISDTDQLDEAAKIIMAKARTIVSYIFRRRRDEPMLYPDYARGYVDDFLRMCFAVPYEPFESDPLYVHALGRLLIIHADHEQNCSTSVVRIAGSAHANLYSAVAAGVNALSGPLHGGANEAVLRQLKAIRDSGKSVAEFVRDAKENGQKISGLGHRVYKSYDPRAAIARKYLEKIMEREDTQKLPSDERALFAVATELEDIALNDEYFVSRNLYPNVDFYTGLIYRAIGFDPAMFTTLFALGRIPGWIAQYREMLADPNTKIGRPRQVYTGPVERDFVPMDER

SEQ ID NO: 2675 - protein, 125 aa, Glycine max
  misc_feature (99)..(99): Xaa can be any naturally occurring amino acid
ASSLISSPAVISVNPAGAGMVAPLTGLKCMAGFPTRKTNNDLPFIATNGGRVECMRVWPPVGKKKFETLSYLPYLDDARLAKEIKFLLRKGWIPCLEFXMEHCFSYREHSQSPGYYDGTYWTMRN

SEQ ID NO: 2676 - protein, 192 aa, Zea mays
IGYLEAGRKNALPANAKISKDAKETVQECVSEFISFITGEASDKCQREKRKTINGDDLLWAMTTLGFEDYVEPLKHYLHKFREIEGERAAASAGASGSQQQQGELPRGAANAAGYAGYGAPGSGGMMMMMMGQPMYGGSQPQQQPPQPQPPQQQQQQHQQHHMAMGGRGGFGQQGGGGGSSSSSGLGRQDRA

SEQ ID NO: 2677 - protein, 170 aa, Mesembryanthemum crystallinum
MASQSTDQPKSIHDFIVKDARGNDVDLSIYKGKVLLIVNVASQCGLTNSNYPELTKLYEQYKDKGLEILAFPCNQFGNQEPGDNEQIMEFACTRFKAEFPIFDKVDVNGSNAAPVYKYLKSSKGGLFGDGIKWNFTKFLVDRDGKVVDRYAPTTSPASIEKDIKKLIGTS

SEQ ID NO: 2678 - protein, 398 aa, Zea mays
  misc_feature (84)..(84): Xaa can be any naturally occurring amino acid
MSAAATKVKRRVGKYELGRTIGEGTFAKVRFAKNTETGEPVAVKILDKEKVLRHKMAEQIKREISTMKLIKHPNVVRIYEVMGXSKTKVYIVLEYVTGGELFDTIANQGRMREGEARSYFQQLINAVDYCHSRGVYHRDLKPENLLLDSYGNLNVSDFGLSALSQQIKDDGLLHTTCGTPNYVAPEVLEDQGYDGAMADLWSCGVILFVLLAGYLPFEDSNLMTLYKKISNAEYTFPPWTSFPAKRLLTRILDPNPMTENSCDFRITIPEILEDEWFKKGYKRPEFDEKYDTPLDDVDAVFNDSEEHHVTEKKEEEPVALNAFELISRSAGLNLGNLFDSEQEFKRETRFTSKCPPKEIIRKIEEAAKPLGFGVQKKNYKLRLEKVKAGSHGSTGCRP

SEQ ID NO: 2679 - protein, 253 aa, Triticum aestivum
SLRFHEECRKRKLKVSVVAVPKTIDNDILFMDKTFGFDTAVEEAQRAINSAYIEARSAYHGVGLVKLMGRSTGFIAMHASLSSGQIDVCLIPEVSFTLDGEHGVLAHLEHLLETKGFCVVCVAEGAGQDLLQKSNATDASGNVILSDFGVHMQQKIKKHFKDIGVLADVKYIDPTYMVRACRANASDAILCTVLGQNAVHGAFAGFSGITSGICNTHYAFLPITEVITTPKHVNPNSRMWHRCLTSTGQPDFH

SEQ ID NO: 2680 - protein, 442 aa, Haloarcula marismortui ATCC 43049
MSYTALQVDPNVLAEGVNLLWVLTVSFLIFFMHAGFAMLEAGQVRSKNVANQLTKNLLTWSVGVVVFFLIGSGISSLVGTGSFAPAFGAEAANDYVGWLFGAVFAMTAATIVSGAVAGRAKLRAYITYTFLLAAVIYPVVTGLTWAGAHISLGGVVFKDFAGGMIVHGMGGIAGLTAAYVLGPRMGRYNEDGSANVIPGHSMTFAVLGTLILAFGWYGFNVGTAASVFVVEDGALALGAFATVGRVAMTTTVAMAMGAIGAALVAWLKTGKVDTLYVANGLLAGLVGITAIPDTTTWWGALIVGLLAGGQLPIVFSFMENRMKIDDVCAVFPVHGSAGVLGTIMYPLVATSGTVGSIGSALAVQVVGVAVIAGWTIVTTGLIWYGLKAAGQARVTPEHEQEGLDVSEHGVETYPEFGGGEGVVADGGKVNTNVRTDGGSKDD

SEQ ID NO: 2681 - protein, 150 aa, Brassica napus
VDPRVRGIDVVRFGELMMSSGIVLNDSISWITFHGGYDFGYLVKLLTCKELPLRQADFFKMLFVYFPTVYDIKYLMTFCNGLFGGLNRLAELMGVERVGICHQAGSDSLLTLGSFRKLKERYFPGSTDKYTGVLYGLGVEDSATSTAIAN

SEQ ID NO: 2682 - protein, 342 aa, Streptomyces avermitilis MA-4680
MKALVKEKAEPGLWLMDVPEPEIGPGDVLIKVLRTGICGTDLHIRSWDGWAQQAVRTPLVLGHEFVGEVVETGRDVVDIKAGDRVSGEGHLVCGKCRNCQAGRRHLCRATVGLGVGRDGAFAEYVALPAANVWVHRVPVDLDVAAIFDPFGNAVHTALSFPLVGEDVLITGAGPIGLMAAAVARHAGARNVMITDVSEERLELARKIGVSLALNVADTTIADGQRALGLREGFDIGLEMSGRPEAMRDMIANMTHGGRIAMLGLPSQEFPVDWARIVTSMITIKGIYGREMFETWYAMSVLLEGGLDLAPVITGRYGYRDYEAAFADAASGRGGKVILDWTL

SEQ ID NO: 2683 - protein, 312 aa, Chromobacterium violaceum ATCC 12472
MAIQWFPGHMNKARKDVSERLKDIDVVIEMLDARLPASSANPMLARMAKGKPRLMLLNKQDLADPAVTEQWLAWYRAKKQTEALGMDAGERAPAQRLIAACRALAPNRGGLEKPLRVLICGIPNVGKSTLINSMSSRKIAKTGNMPGVTKNEQRIILADDFELYDTPGMLWPKIEVEEGGYNLAASGAVGRNAMDEEEVALELLKYLLVHYRAELAARYKLDEEELDGAQDWQALERIGKRRGAVLSGGRINMQKAAEIVLTDFRDGQTGRITLERPEEWAKWEKRAKEIAAQRAAEREAREQEKASRKGSR

SEQ ID NO: 2684 - protein, 179 aa, Vibrio vulnificus YJ016
MKYSSIALLLLSSVAASTSYAGDFSLTSHDIMEGQRMAKTFEFKGFGCSGDNLSPQLSWQNAPKGTKSFAITAYDPDAPTGSGWWHWSAIDIPANVSELPRGVDLKKVGATEIRNDYGAKGFGGVCPPEGDGMHRYQFTVWALPEAKLDLDSNSSPALVGFMLNAMALDKATLTATYVR

SEQ ID NO: 2685 - protein, 489 aa, Glycine max
SSTQQILLFLTKLLSKNSSGDSISTMSNSEHNIITGHAGYVLEDVPHLSDYIPHLTTYPNPLQDNPSYSVVKEHSVDVDDTIAQKAIVHKNSPRETHFRRAGPRQKVYFESEDVYACIVTCGGLCPGVNTVIREIVCGLYHMYGVHKVLGIEGGYRGFYSCNTIPLTPKVVNDIHKRGGTILGTSQGEGGNDTLKIVDSIQDRGINQVYILGGDGTQRGASVIFEEIRRRGLKVSVVGIPESVDNDIPVIDKSFGFDTAVEEAQRAINAAHVEAESTENGIGVVKLMGRHSGFISMYATLASRDVDCCLIPESPFYLEGPGGLFEFIRKRLAENGHMVIVISEGAGHELISESLSATNKQEASGNKLLQDVGLWLSQKIKDHFTKSQKMDITLKYIDPTYMIRAVPSIASDNVHCTLLAQSAVHGAMAGYTGFAVGTVNGKHAYIPFYRINEIEKKVVITDRMWARLLSSTNQPSFLNPKDITTHQTGN

SEQ ID NO: 2686 - protein, 506 aa, Vibrio vulnificus YJ016
MTQQLEQNLATAQKYLARFRDNTLGHFINGEWTLGSKGETFDNLTPTDNTSLGKVVKGTAEDVDAACEAAQQAFTAWAEMSGAERKKILHKLADKIEQRAEEIALVESMDCGQPLRFMRQAAIRGAANFRFFADKSPEAKNGLSLHQDTHTNYTIRTPIGPVGVITPWNTPFMLSTWKIAPALAAGCTVVHKPAEFSPLTAAILAECAKEAGLPDGVWNMVNGFGEVAGKTLTEHKAIKAVAFVGETVTGSMIQAQGAPTLKRVHFELGGKNPVIVFDDADFERALDAVVFMIYSLNGQRCTSSSRLLIQNGIKPKFIEALKQRVESLQVGHPLDPETEVGPLVHQSHYNKVMSYMTAAEEDGATIAVGGRKLPEKGAGNYLTPTLFTDADNTMRIAREEIFGPVLTCIGFDSEEEALEIANDTDYGLSGYIWTSNTGRAMRMATKVEAGMIWVNSENNRNLPSPFGGVKMSGIGRDGGDWSFDFYMETKNVCIAHDLHRVPTLGK

SEQ ID NO: 2687 - protein, 494 aa, Bacillus thuringiensis serovar konkukian str. 97-27
MLTKNIELKPKVKAFLNEEIKMFINGEFVPSISGKTFETYNPATEDVLAVVYEAQEEDIDVAVKAARSAFESGPWVEMTTAERAHLIYKLADLIEEHGEELAQLEALDNGKPYQVALDDDIAATVENYRYYAGWATKIIGQTIPISKDYLNYTRHEPVGVVGQIIPWNFPLVMSSWKMGAALATGCTIVLKPAEQTPLSLLYTAKLFKEAGFPNGVVNFVPGFGPEAGSAIVNHHDIDKVAFTGSTVTGKYIMRQSAETIKHVTLELGGKSPNIILEDADLKEAINGAFQGIMYNHGQNCSAGSRVFVHRKHYETVVNELVKMANNVKLGAGMEKETEMGPLVSKKQQERVLHYIEQGKAEGATVAAGGERAFEKGYFVQPTVFTDVTDDMTIVKEEIFGPVVVVLPFDSTEEVIERANRSSYGLAAGVWTQNIKTGHQVANKLKAGTVWINDYNLENAAAPFGGFKQSGIGRELGSYALDNYTEVKSVWVNIK

SEQ ID NO: 2688 - protein, 343 aa, Arabidopsis thaliana
MEGDVGIGLVCQNTMDGKASNGNGLEKTVPSCCLKAMACVPEDDAKCHSTVVSGWFSEPHPRSGEAHSLKVEKVLFKDKSDFQEVLVFESATYGKVLVLDGIVQLTEKDECAYQEMIAHLPLCSISSPKNVLVVGGGDGGVLREISRHSSVEVIDICEIDKMVIDVSKKFFPELAVGFDDPRVQLHIGDAAEFLRKSPEGKYDAIIVDSSDPVGPALALVEKPFFETLARALKPGGVLCNMAESMWLHTHLIEDMISICRQTFKSVHYAWSSVPTYPSGVIGFVLCSTEGPAVDFKNPINPIEKLDGAMTHKRELKFYNSDMHRAAFALPTFLRREVASLLAS

SEQ ID NO: 2689 - protein, 120 aa, Glycine max
TDTTVNQDDTGKIAPFTDLKSMAGFPTTKTNNDITSIASNGGRAQCMYVLPPVAKKKFETLSYLPKLDDAQLANEGEYHLRNGWIPCLEFEMEHGFVYREHNRSPGYYYGRYRTMRKQPM

SEQ ID NO: 2690 - protein, 527 aa, Zea mays
  misc_feature (150)..(150): Xaa can be any naturally occurring amino acid
MATSRPLALALLLCALSACSHAAISYPPSAMSTAAPANNGFLSCLIKSVPPRLLHGKSSRAYGSIWESTVRNVKFVSDKTVKPVYIITPTEAAHIQATVACGRKHGLRVRVRSGGHDYEGLSYRSAKPETFAVVDLSMMRQVRIDGQGRXTAWVDSGAQLGELYYAVAKMTPSLGFPAGVCATIGVGGHFSGGGFGMLLRKYGTAGDNVIDAKVVDANGTLLDRKSMGEDYFWAIRGGGGESFGIMVSWQVQLVPTPPPTTVPTRPRGVKDGAIDLINKWQQVAPSLPDDLMIRIMAMEQDAMFEALYLGTCKDLLPLMASRFPELGVKQEDCNEMPWIQSVAFIPMGKSATVMDLLNRTSNIKAFGKYKSDYVKDPIPRDVWEKIYTWLAKPGAGVMIMDPYGARISSIPQDATPFPHRQGVLFNIQYVSYWFGEGDGAAPTQWSRDMYAFMEPYLSKNPRQAYANYRDLDLGVNEVVGDVSTYDSGRVWGEKYYNGNFERLARTKAKVDPCDYFRNEQSIPPLLK

SEQ ID NO: 2691 - protein, 327 aa, Bordetella bronchiseptica RB50
MSAQIRLMPSQLEALRRHTVVVADTGDFEAMRALRPTDATTNPSLILKAVQQEAYRPLLVQTARAHQGASPAEITDRLLVAFGRQILDIVPGRVSTEVDARLSFDTRATVERARGLIALYQAAGVPRERVLIKIASTWEGIQAARVLQAEGIRCNLTLLFCLPQAAACADAGVQLISPFVGRIYDWHKKNAGAEWVEDARRGANDPGVQSVSRIYRYYKRFGIETEIMGASFRNVDQILALAGCDLLTISPELLTRLSQTEGEVPAALSPQAGHDDADAVRLDGGEVAFRTQLNEDAMASEKLSEGIRLFVADARKLDALIESHGAA

SEQ ID NO: 2692 - protein, 506 aa, Magnetospirillum magnetotacticum MS-1
MLYASPNTSGAKVQYKAKYDNFIGGKWVAPVKGEYFDVITPINGKAYTKAARSGAEDIELALDAAHAAADAWGKTPPAERANILLKIADRLEANLELLAYAETVDNGKPIRETLAADIPLSVDHFRYFAGCLRAQEGGMSDIDENTVAYHFHEPLGVVGQIIPWNFPILMAAWKLAPALGAGNCVVLKPAESTPISILILAELIADLLPPGVLNIVNGYGREAGMPLASSKRIAKIAFTGSTSTGRVIAQAAANNLIPATLELGGKSPNIFFPDVAQADDGFFDKAIEGLVLFAFNQGEVCTCPSRALIHESIYDKFMDRVLGRVAAIKQGSPLDTDTMIGAQASKEQMTKIMSYLDLGKQEGAQLLIGGERAYLGGELNDGYYIQPTLFKGHNKMRIFQEEIFGPVLAVTTFKDEAHALELANDTLYGLGAGVWSRNGNVAYRMGRAIKAGRVWTNCYHAYPAHAAFGGYKESGIGRETHKVMLDHYQQTKNLLVSYSESKLGFF

SEQ ID NO: 2693 - protein, 449 aa, Bacillus thuringiensis serovar konkukian str. 97-27
MKTKQTDELLAKDEQYVWHGMRPFSPNSTMVGAKAEGCWVEDIQGKRYLDGMSGLWCVNSGYGRKELAEAAYKQLQTLSYFPMSQSHEPAIKLAEKLNEWLGGEYVIFFSNSGSEANETAFKIARQYYTQKGEPHRYKFMSRYRGYHGNTMATMAATGQAQRRYQYEPFASGFLHVTPPDCYRMPGIERENIYDVECVKEVDRVMTWELSETIAAFIMEPIITGGGILMPPQDYMKAVHETCQKHGALLISDEVICGFGRTGKAFGFMNYDVKPDIITMAKGITSAYLPLSATAVKKEIYEAFKGKGEYEFFRHINTFGGNPAACALALKNLEIMENENLIERSAQMGSLLLEQLKEEIGEHPLVGDIRGKGLLVGIELVNDKETKEPIDNDKIASVVNACKEKGLIIGRNGMTTAGYNNVLTLAPPLVISSEEIAFVIGTLKTAMERI

SEQ ID NO: 2694 - protein, 190 aa, Brassica napus
  misc_feature (41)..(41): Xaa can be any naturally occurring amino acid
  misc_feature (52)..(52): Xaa can be any naturally occurring amino acid
  misc_feature (99)..(99): Xaa can be any naturally occurring amino acid
  misc_feature (154)..(154): Xaa can be any naturally occurring amino acid
WLPLCFPAAAVVTSPAQATMVAPFTGLKSSAAFPVTRQSKXNDITSIASNGXGELAGMKVWPPVGKKKFETLSYLPDPYRKLNGGKEVDYLLRNKWIPXCLNSSWEAPGFVYPWSTESTPGILTMGRYWDNVGSFPCSGCTGLCSKWLKEVQEXKRSTPNAFIRIIGFDNNRQVQCISFIAYKPPSFTGA

SEQ ID NO: 2695 - protein, 160 aa, Pseudomonas putida KT2440
MSAFHDLKLEALNGGELPLAPFKGQVVLVVNVASKCGLTPQYKALENLYQIYKDKGFNVLGLPCNQFAGQEPGSEKEIQDFCSLNYGVSFPLGSKLEVNGPQRHSLYRLLAGEGAEFPGDITWNFEKFLVGKDGRVLARFSPRTAPDDPAVVQAIEKALA

SEQ ID NO: 2696 - protein, 490 aa, Hordeum vulgare
MVVTVAATGPDTAETLHSTTFASRYVRDQLPRYRMPENSIPKEAAYQIISDELMLDGNPRLNLASFVTTWMEPECGKLIMDSVNKNYVDMDEYPVTTELQDRCVNMIAHLFNAPIGEDETAIGVSTVGSSEAIMLAGLAFKRKWANKMKEQGKPCDKPNIVTGANVQVCWEKFARYFEVELKEVKLTEGYYVMDPKKAVEMVDENTICVAAILGSTLTGEYEDVKLLNDLLVEKNKETGWNVPIHVDAASGGFIAPFLQPELEWDFRLPLVKSINVSGHKYGLVYPGVGWVIWRSKDDLPEELIFHINYLGADQPTFTLNFSKGQQIIAQYYQLIRLGFEGYKHIMENCKLNAAVLKEGIDATGRFDVLSKADGVPLVAIRLKDSTNFSVFDISENLRRFGWIVPAYTMPADAEHVAVLRIVIREDFNRSLAQRLLADINKIIGELDAHAVHAIKLSTAAAGGDGASKSAVDAATEAFKDLAGKKKAGVC

SEQ ID NO: 2697 - protein, 150 aa, Triticum aestivum
ILALSNPTSQSECTAEQAYTWSQGRAIFGSGSPFDPVKYNDKLFVPAQANNAYIFPGFGLGVVISGAVRVSDDMVLAAAEGLAEQVTPEHIEKGLIYPPFSIIRKISANIAARVAAKAYDLGMASQLPRPKDLVKYAESCMYSPVYRTYR

SEQ ID NO: 2698 - protein, 443 aa, Triticum aestivum
FVDEDDTVPQKVVVQKNSRRGVHFRRAGPRQRVNFESDEVKACIVSCGGLCPGLNTVIRELVCGLAHMYNVNNIFGIQNGYKGFYSSNYVAITPKTVNDIHKRGGTVLGTSRGGHDTKKIVDNIQDRGINQVYIIGGDGTQKGAYEIYKEIRKRGLKVAVAGVPKTIDNDIAIIDKSFGFDSAVEEAQRAINSAHVEACSAENGIGLVKLMGRYSGFIAMYATLASRDVDCCLIPESPFYMDGEGGLLQYVERRLKENKHMVIVVAEGAGQDIIAKSIPASDQLDASGNKLLLDIGLWLTHKIKDHFKSKKMEMTIKYIDPTYMIRAIPSNAADNVYCTLLAHSAIHGAMAGYSFTVGMVNGRHAYIPFYRVTSTRNKVKITDRMWARLLSSTNQPSFLRQKDIDEAREADRLTNKPPLPPVANQNVAKAFDQSASASSNGEI

SEQ ID NO: 2699 - protein, 503 aa, Glycine max
  misc_feature (118)..(118): Xaa can be any naturally occurring amino acid
MSIPIPHRQLFIDGDWKVPVLKNRIPIINPSTQHIIGDIPAATKEDVDLAVAAAKAALSRNKGADWASASGSVRARYLRAIAAKITEKKPELAKLEAIDCGKPLDEAAWDIDDVAGCXEFYADLAEKLDAQQKAHVSLPMDTFKSYVLKEPIGVVALITPWNYPLLMATWKVAPALAAGCAAILKPSELASVTCLELAEICKEVGLPPGVLNILTGLGPEAGAPLAAHPDVDKIAFTGSSATGSKIMTAAAQLIKPVSLELGGKSPIIVFEDVDLDKAAEWTIFGCFWTNGQICSATSRLIVHESIATEFLNRIVKWVKNIKISDPLEEGCRLGPIVSEGQYEKILKFISNAKSEGATILTGGSRPEHLKKGFFVEPTVITDVTTSMQIWREEVFGPVLCVKTFSTEEEAIDLANDTVYGLGSAVISNDLERCERITKAFKAGIVWINCSQPCFTQAPWGGIKRSGFGRELGEWGLDNYLSVKQVTQYISDEPWGWYQSPSRL

SEQ ID NO: 2700 - protein, 384 aa, Mycobacterium tuberculosis CDC1551
MRAVVIDGAGSVRVNTQPDPALPGPDGVVVAVTAAGICGSDLHFYEGEYPFTEPVALGHEAVGTIVEAGPQVRTVGVGDLVMVSSVAGCGVCPGCETHDPVMCFSGPMIFGAGVLGGAQADLLAVPAADFQVLKIPEGITTEQALLLTDNLATGWAAAQRADISFGSAVAVIGLGAVGLCALRSAFIHGAATVFAVDRVKGRLQRAATWGATPIPSPAAETILAATRGRGADSVIDAVGTDASMSDALNAVRPGGTVSVVGVHDLQPFPLPALTCLLRSITLRMTMAPVQRTWPELIPLLQSGRLDVDGIFTTTLPLDEAAKGYATARARSGEELRFCLRPDSRDVLGAHETVDLYVHVRRCQSVADLQLEGAADGVDGPSMLN

SEQ ID NO: 2701 - protein, 210 aa, Triticum aestivum
TLPDWSTRTLTWTEAVKKLARVPPPEQAIYLHTTAVAPTVMASSGTSVAPFQGLKSTAGLPVSRRSNGASLGSVSNGGRIRCMQVWPIEGIKKCDTLSYLPPLSTEALLKQVDYLIRSKWVPCLEFSKVGFIFREHNASPGYYDGRNWTMWKLPMFGCTDAIQVINEVDEVKKEYPDAYVRIIGFDNMRQVQCVSFIAFKPPGCDESGKA

SEQ ID NO: 2702 - protein, 493 aa, Vicia faba
MSNSNNPPPPKPTWVLPYITENIRELYTLGRKLGQGQFGTTYLCTHNPTGKTYACKSIPKKKLLCKEDYDDVWREIQIMHHLSEHPNVVRIHGTYEDSVSVHLVMELCEGGELFDRIVNKGHYSEREAAKLIRTIVEVVENCHSLGVMHRDLKPENFLFDTVEEDAVLKTTDFGLSAFYKPGEIFSDVVGSPYYVAPEVLHKHYGPEADVWSAGVILYILLSGVPPFWAETEIGIFKQILQGRLDFQSEPWPGISDSAKDLIRKMLDRNPKTRFTAHQVLCHPWIVDDSIAPDKPLDSAVLSRLKQFSAMNKLKKMALRVIAERLSEEEIGGLKELFKMLDADSSGTITLDELKEGLKRVGSELMESEIKDLMDAADIDNNGTLDYGEFIAATVHLNKLEREENLLSAFSYFDKDGSGYITIDEIHVACKEFGLDDIHIDEMVKEIDQDNDGQIDYGEFAAMMRKGNGGMGRRTMTSRLNFRNALGIIGNESN

SEQ ID NO: 2703 - protein, 131 aa, Triticum aestivum
MSYYDRRGESSVLEAFTLSPLPYPVILILMMVTLLLGASWFFSYEDFMEEASEQFSWFLLGVPIALVLLIRWISSVDTFEGYFGFYPTESRWRGYPAAPSEGSSPWGVAMVVVLLLLLASFHSTFQDMWKP

SEQ ID NO: 2704 - protein, 494 aa, Novosphingobium aromaticivorans DSM 12444
MTSTSSSPVTETILNFIDGSYRKGSEGKSFPNVNPATGTAIGVVHEASQADVADAVAAAKAALTGPWGKMTTAERVKLIAAVATEIERRADDFLAAEVADTGKPRHVASHIDIPRGAANFRMFADVVSTMPGESFNTSTPDGGQALNYTVRKPKGVVAVVCPWNFPLLLMTWKVGPALACGNTVVVKPSEETPRTAALLGEVMNAVGMPKGVYNVVHGFGPGSAGEFLTSNPDVDAITFTGETGTGQAIMQKAAIGVRDISFELGGKNPAIVFADADLDKAVEGLSRSVFLNTGQVCLGTERVYVERPIFDAFVARMAAAAQGFKPGVTGDRAYLGPLISAEHREKVLGYYRRAVEDGATVVTGGGVPEISGAEAGGFFVEPTLWIDVAHGDTVMREEIFGPCCGIVPFDSEDEVIALANDTVYGLCASIWTENMSRGHRVAAAMDVGVCWVNSWFLRDLRTAFGGSGHSGIGREGGVHSLEFYTEITNICVKL

SEQ ID NO: 2705 - protein, 315 aa, Glycine max
TRLIDCVSFCHNKGVFHRDLKLENVLVDAKGNIKITDFNLSALPQHFREDGLLHTTCGSPNYVAPEILANKGYDGATSDIWSCGVILYVILTGYLPFDDRNLAVLYQKIFKGEVQIPRWLSPGSQNIIKRMLDANPKTRITMAMIKEDGWSKEGYTPANPEDEEESVYIDDEDFSIHDVSHEADQGCPRSPTLINAFQLISMSSSLDLSGLFEQEDVSERKIRFTSIHSPKDLVERLEDIVTEMGFRVQKKNGMLKVVQEIKTQKCLGNLSVAAEVFEISPSLYVVELSKSCGDASVYRQLCKKLSNDLGVHKKE

SEQ ID NO: 2706 - protein, 305 aa, Hordeum vulgare subsp. vulgare
MKILIILTILAMATTFATSEMQVNPSVQVQPTQQQPYPESQQPFISQSQQQFPQPQQPFPQQPQQPFPQSQQQCLQQPQHQFPQPTQQFPQRPLLPFTHPFLTFPDQLLPQPPHQSFPQPPQSYPQPPLQPFPQPPQQKYPEQPQQPFPWQQPTIQLYLQQQLNPCKEFLLQQCRPVSLLSYIWSKIVQQSSCRVMQQQCCLQLAQIPEQYKCTAIDSIVHAIFMQQGQRQGVQIVQQQPQPQQVGQCVLVQGQGVVQPQQLAQMEAIRTLVLQSVPSMCNFNVPPNCSTIKAPFVGVVTGVGGQ

SEQ ID NO: 2707 - protein, 276 aa, Bacillus subtilis subsp. subtilis str. 168
MPTSLKDTVKLHNGVEMPWFGLGVFKVENGNEATESVKAAIKNGYRSIDTAAIYKNEEGVGIGIKESGVAREELFITSKVWNEDQGYETTLAAFEKSLERLQLDYLDLYLIHWPGKDKYKDTWRALEKLYKDGKIRAIGVSNFQVHHLEELLKDAEIKPMVNQVEFHPRLTQKELRDYCKGQGIQLEAWSPLMQGQLLDNEVLTQIAEKHNKSVAQVILRWDLQHGVVTIPKSIKEHRIIENADIFDFELSQEDMDKIDALNKDERVGPNPDELLF

SEQ ID NO: 2708 - protein, 196 aa, Hyacinthus orientalis
PTPGSTRCSTRGCATTPTVVTKKILDTYKGFGDLATLVDVGGGVGGTINMIVKKHPHIKGTNFDLPHVISEAELIAGVEHVGGDMFESVPGGDAIFMKWILHDWSDEHCLKLLKNCWRALPDNGKVILMESILPVYPEPTAAAQGVIHVDMIMLAHNPGGKERTEQEFESLAKDAGFAGSKVVCGYANSWVIEFHK

SEQ ID NO: 2709 - protein, 155 aa, Triticum aestivum
  misc_feature (110)..(110): Xaa can be any naturally occurring amino acid
  misc_feature (113)..(113): Xaa can be any naturally occurring amino acid
  misc_feature (115)..(115): Xaa can be any naturally occurring amino acid
  misc_feature (122)..(122): Xaa can be any naturally occurring amino acid
  misc_feature (134)..(134): Xaa can be any naturally occurring amino acid
  misc_feature (139)..(140): Xaa can be any naturally occurring amino acid
SLDRQVLLKKLRDVLDTLKGRVAGRNRDDADEAISLVEALAVQLTQREGELIYEKAEVKKLASFLKQATEDARKVAEEERALALAEIEKSRAAIEKVEKALQEQDSASSXREXEXIEELMKXIREARRIKMLHXPCKVXXMQFELGTAVHLSKKH

SEQ ID NO: 2710 - protein, 483 aa, Vibrio vulnificus YJ016
MNLNYPELFQQRCYIDGQWVAESGQTQAVTNPSTGKVIGEIPVFGEQQAKECITAAQAAFELWKKTTADYRADVLRRWYELMMVNIDDLAAILTLEQGKPFTEAKGEITYAASFVQWYSEEARRAYGEIIPSHRENGKIVVTKEPIGVVAAITPWNFPAAMITRKAAPAFAAGCSMVLKPAQETPFTALALAKLAEDAGLPKGLFNVITGDSRSIGGVFTSDKRVRKVSFTGSTNVGKILMNKSASTIKKLALELGGNAPFIVFEDADIDAAVEGAMIAKFRNAGQTCVCANRLFVHHAVYDEFAEKLANRVKQLKVGDGFADGVAIGPLINSSSVAKVQEHVDDAVAKGAKVLCGGLLNDEQLFVAPYVLTDMSDDMLVAEEETFGPVAPLFRFKDEAEVLERANDTESGLAGYFYTRSLGRAWRVADALEVGMVGINEGLISTAAAPFGGIKESGLGREGSRHGMDEYMEMKYMLMGGLDS

SEQ ID NO: 2711 - protein, 1239 aa, Ustilago maydis 521
MSSSQRPVVQPIPPFKGAPLQATDVQNRRPTAAEAYVALANRKAGANVVSTRATGCENHRPSQHQPTSHHASQRQQPAPAADRRVQQSQPSERPKPASRLEREKKRHHNDPKNIGHWRLDKLIGQGASGRVRLAIHDQTGQKAAVKIIPRTLINASRMSLRDADVKANKMILGIEREIVIMKLIEHPNLLGLWDVYETSKDLFLIMEYVAGGELFDHLVAQGKLSPRDARGYFRQIIFGMDYCHRFNICHRDLKPENLLLDETKKIVKVADFGMAALQPTEKMLETSCGSPHYASPEIVSGKRYKGTASDIWSCGIILFALLCGRLPFDDPNIQQLLGKVRAGKFIMPEWLEPASKDLIWRMLEVDPEKRIKMADIMRHPWFTNNGTESSVNPVSTSLDSLQMEELTLDTIDIDILGNLKTLWFELSEQDIIKELLAPGPSWQKTFYTLLVAHRENHSADDEDDMNDDILDEQIVTASAVPAHALLSTTSAAKTLEKPRPRRTSDAAGATSAPASPRLESVEMDRRHSTPEKGSVYHTTSRRPDNVTPPKVASPHVRPANPSPRLRPSPLDSPASTLDSAFVSASKLKVASPTKPRALGSSHGADKSGYVLPQISLQTASPQRNERPAVDLQRRNTSPTKPNTVGVTAPLSARIALANMYDAPTLSHTATASCGSTSSTASSTVSVSAARNRANRGSGSEMMPPLALPGRASSRPVSPTKSTFGAQATLPPQTAPQPAPPRPSTSRAYTTQPTPCIQVPQVGDATMQRFFQEIADELASIRATGEKPDALQSKLDQLKNSMAWQQQQQQQQLQSQPMAVTASAPSARTRNSEMNQFEDAEDDVSEGESMRSVSQASSHQQTYTPSTPMTPLSPVELIAPLALTDKSGAGARSSVASSSASASARNSVRSARSGTEASSSGTTSRPTSVFSNISTGSTGLGRKRSLLGLRRADKHAQQQHATATEANTIRSIAYESTPTPTALASVFAAPASGRFVPNGGATTASSVRMQRLNPGLGLDIGASSAAGIISPPSTPQSPNTATLSPAPAASASAIASASAPGKKDSWFAGLFNWKPATFTLMSSENFSETLTECIRRLQSYGVRVAMDDSSDVHHTTLKCSINEYRESNGVVTAAKPLRFRVDVHILAVGSPATNSAYMGGGLGLSLHGGAVGTNVNATSIMTHGLPSPALSTYSRASTPGGVTFATSVLVVQEKGALSTFKLIHARLRREWMLDLGSAII

SEQ ID NO: 2712 - protein, 414 aa, Physcomitrella patens
MVLEATMVCMDNSEWMRNGDYSPTRFQAQADAINLICGAKTQSNPENTVGVLTMAGKGPRVLITPTNDLGKILQALHGLEVGGEMRMTSGVQVAQLALKHRQNKHQRQRIVLFAGSPVLADKAVLEGMGKKLKKNNVALDIVSFGEDDGEKVEKLEALLNAVNNGDNSHIVHIPGGERVLSDVLISSSIFTGDGEGGSGFAAAAAASAAAAAVGGGGGAYDFGVDPNLDPELALALRVSMEEERARQEAAMKRSAEDSTAKGQQAGESSSAPDVAMSDVGLVDTTDKSKDMMIDDDTALLQQAIAMSMAQAAQAAAAAGGGPATTDTSMEESGGDDQDLAYALQMSMQQAAAAASAAQGSADVNQVLGDQSFVSSVLSSLPGVDPNDPNVRDVLASLQTDEGKNDDQATKDKSK

SEQ ID NO: 2713 - protein, 463 aa, Zea mays
MARSGREADPGEEERKLVLGKYELGRLLGQGTFAKVYYARDLSAGAGTGHSCSVAIKVIDKARLRRTEGMVEQLRREISIMRMVRHPNVVGIREVLASRSRVFVVMEYARGGELFAKVARGRLPEDHARRYFQQLVAAVGFCHRRGVAHRDLKPENLLLDEAGRLKVTDFGLAALPEQLRHDGLLHTQCGTPAYVAPEVLRKRGYDGARADLWSCGVVLYVLLCGFLPFQHDNYVKLYQKIFKADYQVPPWVSGDARRLIARLLVVDPAKRASIAEIMCTPWFRKGFVPPVLSPPVTPKKQQLDEGAALFDNDDDDDNSNHSGATSPRSCNAFQLISSMSSGFDLSGLFESEQKTATVFTARAPAATVVEKLESVARALGFEVTRGKGWKVRMEAKAEGTNGRLAATAEVLEVAVDVAVVEFVHDAGDALDFNKFCAVDVRPGLTEIVWAWQGDSPAAAVGTA

SEQ ID NO: 2714 - protein, 621 aa, Zea mays
  misc_feature (172)..(172): Xaa can be any naturally occurring amino acid
MATMKLGSKPEIFVLQDLTWRCTIELESDVVVEVGEMSFYLHKFPLLSRSGVLQRMISEYQAPADGGGMCTLQLDDIPGGAKAFELAAKFCYDVKIELNALNVVCLRCAAEYLRMTDDYAEGNLITQAECFLVDVLANWKDSIKALETCEGVLPTAEDLHLVSRCITALASXADTPSCRASGPAAAGMDWWHEDGSFLSLPMFKRLIQAMEAKGMRDESIAGAIMFYAGRFLPGLKRNTSFSNALASYGADGSGGAGGGMSSRNITPRAASVSAPSEGDQRYFLEEIVALLPTKKGVASTKFLLGMLRTAMLLHASPLCRENLERRIGAQLEDASLDDLLVPNLGYHVETTLYDIDCVQRILDYFMSSTDGIGTGYTSPALAEEGGGSLGIPQGATPSSSLSPITMVAKLMDGFLAEVAPDTNLKLPKFQALAAVVPDYARPVDDGIYRAIDIYLKSHPWLSESEREQLCRLLNCQKLSLEACTHAAQNERLPLRVVVQVLFFEQLRLRTSIAGWFFVSDNAAGGDGARPHAGGAIVPKGTAAIAGCPQADADSDVEGDAPDGKETITDVKARVSDLEKECKSMKQEIRRLGKPRRSWSLLTRKCGFGAKVQQAQTAMSGK

SEQ ID NO: 2715 - protein, 120 aa, Zea mays
  misc_feature (20)..(20): Xaa can be any naturally occurring amino acid
NPLLPIYIERIHRDKHGSEXATYDTEGRFMPVNLENMFTKYALTKPDNLSLKELWQMTEGNRAAFDYLGWMASKLEWLLLYYVAKDKQGFLSKEAVRGCFDGSLFKNISKMYKDSDRKSK

SEQ ID NO: 2716 - protein, 89 aa, Zea mays
YEEHGEEFVDMLDGVFSFVLLDTRHGDRAGSSFFMAARDAIGVTPLYIGWGVDGSVWISSEMKALHDECEHFEIFPPGHLYSSNTGGFS

SEQ ID NO: 2717 - protein, 155 aa, Brassica napus
  misc_feature (152)..(152): Xaa can be any naturally occurring amino acid
MSDEEHHFESSDAGASKTYPQQAGNIRKGGYIVIKGRPCKVVEVSTSKTGKHGHAKCHFVAIDIFTSKKLEDIVPSSHNCDVPHVNRVDYQLIDISEDGFVSLLTDNGSTKDDLKLPTDEALLTQLKSGFEEGKDIVVSVMSAMGEEQMCAXKEV

SEQ ID NO: 2718 - protein, 386 aa, Vicia faba
GGELFDRIIQRGHYSEKAAAQLARVIIGIVEACHSLGVMHRDLKPENFLFVNQKEDSPLKTIDFGLSIFFKPGGIYSDVVGSPYYVAPEVLLKQYGCEVDVWSAGVIIYILLSGVPPFWDESEQGIFEQVLQGDLDFSSGPWPSISKSAKDLVRKMLNRDPGKRLTAHEALCHPWVCVDGVAPDKPLDSAVLSRLKQFSAMNKLKKMALRVIAENLSEEEISGLKELFKMIDTDNTGQITFEKLKAGLKMFGANLNEFEIFDLLNAADVDNSGTIDYREFIAATLHLNKVGREDNLVTAFSYFDKDGSGYITQDEIQKVCKEFGMEDVHLEEMIQEADQNNDGQIDYSEFVAMMLRGNADLGNSGSKCRSTSFNIGLRKIEAQSVC

SEQ ID NO: 2719 - protein, 471 aa, Methanopyrus kandleri AV19
MEYGCLIGGEWLEGDREIVVENPYDGSEVGRVLAPEVDVEALLKDAREGQRRWRERPTYEVREALAEAAHLLKKHEDELAELIALEGGKPIRDARYEVYRTREVLRLSAAEAERLYGETLPGDAQRGRTAELILTVREPVGVVLSITPYNFPLLLPTHKLGPALAARCSVVHKPATVTPLSSLRLAEILLDAGVEPLALQVVVGPGAELGEELARADFDALSFTGSRSVGEHLREISPIPRITLELGGNDPVIVDETADVEAAAEAAVRGACYHAGQVCIAVERAIVVEDVYEEFLEAAVEVAESLKVGDPLDEDTDVGPLIDDGAVEKVRRHVEDAVERGAEILTGGEPEGRLFPPTVLADVPEDALVAREETFGPVLPVIRAKDFEEAIRIANSTDYGLHAAVFTERLDRAVKATRKLEAGGVIVNESTIYRADYMPFGGVKASGVGREGVPQAVREFTEEKTVVIGRR

SEQ ID NO: 2720 - protein, 330 aa, Ustilago maydis 521
MSKLGDYAAVKKDILAVLKQPEYDDGSAGPVLVRLAWHASGTYCARTDTGGSNGAGMRYEAEGGDPANAGLQHARVFLEPIKEKHSWITYADLWTLAGVVAIEAMGGPSIQWKPGRTDFADDSRLPPRGRLPDGAQGADHLRFIFNRMGFNDQEIVALSGAHNLGRCHSDRSGFEGPWVNSPTRFSNQYYKLLLKLKWQPKKWDGPFQYVAKAPGADDDDEQLMMLPTDYALIQDEKMRPWVEKYAEDRDAFFNDFAKVFAKLIELGVYRDESGIARADKMKQFKGEYKSAPQKSPVPGAPGAGKDGEANPLARQNERAHGQAQHALAKL

SEQ ID NO: 2721 - protein, 413 aa, Wolbachia pipientis
MDKKALLELSNGSKIDLPVLSGTVGPDVLNIKDLYKKTGLFTYDPGFVSTASCSSTITFIDGDEGVLKYRGHNIADLAENNNFTAVIYLLLYGKLPSSEQHKKFLLKIQESSKVSEQVTNVIKAFPKTAHPMSILVACFANLSASYHEMHGKNVNGEDLDFGISAIAKVPAIVAMIYRHINNQEFINANNKLSYSENFLNMIFGSAVNNTLFVKALDKIFTLHADHEQNASTAAVRLVGSAGSNLFASLSAGVATLWGPAHGGANEAVINMLKEIEQSGDVDRFIEKAKDDKDPFKLMGFGHRVYKNYDPRALILKDACHEILSKLEQNNELLEIAKKLEEIALKDEYFITRKLYPNVDFYSGIIMNAIGIPSSMFTPIFALARTTGWVAQWYEMINDKETKICRPRQLYLGK

SEQ ID NO: 2722 - protein, 333 aa, Triticum aestivum
AYRQDQIVSVWLLQSTTFFSIWIKQHLQSIVHIFYSEGTDHSYSWYLQLRNLVWATSKHDVYMAQNNSVMHWSSLLQRGTEVLHVAGQVVPKQKAHGARTLSRVQISSMALKDNLMVAGGFRGELIFKYVDKPGPGVVFCTNVADNKNSVTNAVDVYESPSGATRATAANNDCTVKFLDAERCSLLSRFNFPWSVNEIATLKGHLDYSFSSAWHPGGNVLATGNQDKTCRLWDTRNLSAPFAVLGGRIGAVRGLRFSSDGRFLAAAEAADFVHVYDARAGYGAAQEIGLFGEIAGVAFSPDAGALFVGVADRAYGSLLEFGRRGRHAYLDSYL

SEQ ID NO: 2723 - protein, 498 aa, Bifidobacterium longum NCC2705
MSITLRNIKVWNTGEVIDLVVPGTAAAYFADTSVVADGADIDATGLTVAPGFEDPHVHFRDPGQTYKESMVSGCRASASGGYTNVLIMPNTLPALDGQTVSGPEATGAKEVLDAGFDNVIDFLQQYDTAHDVQLPVRYDLCVCASKDRAGHEASDVADWLKYVPGFEDDAKTPAMLTHPITAISDDGSAVTPEILDQVLENVKASDLYLIEHCEHHDTGAVNEGPVSRELGVPGIPEDTELKIVARDIEAARRTGVHVHFQHVSTAISFEAIRRAKAEGLPITCETAPHYLALSDEALLKYGTLAKMNPPLRSEADRKATIAAIADGTVDLLATDHAPHTLAEKELGFLEAPNGIIGLECAYGVCHKVLVDGGFISDERLIELMSVGPAELMGHVPTDVAALVEDYAEPAPTGDDPDGVIAGESDAQPQREGVNRLLDLSRVDDADNVDLVVLNAAEEWTVDPEQFHSKARNTPFGGWQVTGRPLATIIGSQLMFSRL

SEQ ID NO: 2724 - protein, 304 aa, Zea mays
MCSSRALWPVHCCRFKAEGSLSSLESGRGLGAFLYRPDPSFIRVVTVRPRSPRRSPKSQPRFLWSARASMASPSPAVSSLETEAPQATVTRERRLNPDLQEHLPKPYLARAMVAVDPDHPTGTEGRDPRGMSVLQQHVAFFDRNGDGVVYPWETFKGMRAIGCGFFTSLVISFLINLVMSYPTQPGWLPSLLLSVHVKNIHKAKHGSDSETYDTEGRFDPSKFDAIFSKYGRTHPDALTKDEMNSMLKANRNIYDFLGWIAAIGEWHLLYSVAKDKDGLLQRETVRGLFDASLFERLQDSKKSS

SEQ ID NO: 2725 - protein, 1209 aa, Magnetococcus sp. MC-1
MIVTCENCDARFDVDPQLLGSKGRKLKCSQCHHIFFQAPPEPKSAQPPASEQPGLEDESTAQDNDTESRDYAEFAFEESPLEEVDLDEIEKLTAQATLDMALEATRDKRQEPSFDEDTQVDEDAVIEPSLEEVDVDQMIQAATALPTEPEAASEAEEELEAEEELEAEEEPEAEEEPEAEEEPEAEEEPEAEEELEAEEEPEAEEEPEAEEESEAEEESEAEEEPEAEEESEVEEAPEVEEELELEEEAEEEPEAEEEAAPEAEEEAAPEVEEEPEVEEELELEEEAEEESEAEEESEAEEEAAPEAEEEAAPEAEEEAAPEAEEEAAPEAEEEAAPEVEEEPEVEEELELEEEAEEAPEAEEAPEIEEELEAEEELEAEEELEAEEELEAEEELEAEEELEAEEELEAEEELEAEEELEAEEELEAEEELEAEEELEAEEELEAEEELEAEEELEAEEEPEAEEAPEIEEELEAEEESEAEEVPEIEEELEAEEEPEVEEEPEVEEEPEVEEEPEVEEEPEVEEEPEVEEEPEVEEEPEVEEEPEVEEELELEEEAEEAPEVEEELELEEEAEEEAAPEVEEEPEAEEESEAEEEAAPEVEEELELEEEAEEEPEAEEELEAEEEPEAEEEPEAEEEPEAEEEPEAEEEPEAEEEPEAEEEPEAEEEPEAEEEPEAEDAFALDVDEQVPAADFADDGDFLSESALQEEQDKLLDVDDFNAATMVEPASLVEEDELDLAEVMENAERTADEAFNPSAMAEPDLLESELQLEDVEAEVVEEGGAELTLEGEEQAAFADLLTEEDDLSALADDALDLDDDDDVTVLADPPAMDLEGLVDAVESDHEVAFEDESVEAFAPLGDDLPNDLDDLTELVNEPGGELMLDDDLAALAPSPVMQERLVPADGMDELSALASDDQDEINLDLPESNDLSLGDLGEAESWSPDDELLEPEDETILAVPDSDETIEELDFPEPDIPQPKEEIIELDYGQQEEEPFDLSSSPDDEDEDLEWANTATPAKEKGGLGGLLGWGVAAMMLLAVIGAWFGKDYLSRGGATNRVDDFTLDGVEVKWRESDHGVLLIVEGSMTNQMNRRSARRPMMARVTLLDENNRNLNSVSVIPERIIPERAMNLNPNNMARIITKQGDIETRFNKMNPKQPVKFQAIFMDPPMEAVRYRIDFDATPEAEWEKQKKARSQAIKNREGTTTFMGNF

SEQ ID NO: 2726 - protein, 137 aa, Thermus thermophilus HB27
MMRFDPFKELEELQERLVRAFGAPQQGPRVYAPPVDVWEDEEGLHLLVYLPGVEPEKVEVVAEEGVLSVKAERPFERKENAAYHRLEGTYGTFVRSFNVPSTYDLSKVQARFRHGVLHLLVPRAEATKPKKIQVQVE

SEQ ID NO: 2727 - protein, 202 aa, Petunia x hybrida
MSNEYDYLFKLLLIGDSSVGKSCLLLRFADDSYVDSYISTIGVDFKIRTVELDGKTIKLQIWDTAGQERFRTITSSYYRGAHGIIIVYDVTEMESFNNVKQWLSEIDRYANESVCKLLVGNKCDLVENKVVDTQTGKALADELGIPFLETSAKDSINVEQAFLTMAGEIKKKMGNQPAGAKKTGSTVQIKGQPIEQKSNCCG

SEQ ID NO: 2728 - protein, 256 aa, Zea mays
  misc_feature (67)..(67): Xaa can be any naturally occurring amino acid
YILFIINLVFNSCSFTFISHCSSTDPCSLFFRVVEIVRHRNRVEVTVSSGQTFVADAAVVTVPLGVXGVENKIVLHFGQVFWPNVEFIGVVSSSTYGCSYFLNLHKATGHPVLVYMPAGRLARDIEKMSDEAAARFAFSQLKKILPNAAEPMNYLVSHWGSDENTLGSYTFDGVNKPRDLYEKLRIPVDNLFFAGEATSVKYTGTVHGAFSTGVMAAEECKMRVLERFRELDMLEMCHPAMGDESPVSVPLLISRL

SEQ ID NO: 2729 - protein, 293 aa, Triticum aestivum
  misc_feature (126)..(126): Xaa can be any naturally occurring amino acid
PLSPAGSRRLPAAGTPVTTLFQTTARASAELGAVNVTAAGPGLGVVRSPAPFPGSNATVLGSVTSVPYNLSVLAVDGLIAPSGVAEEFEGDERGAGITVFVPTDDAFASLPAGDRLQSLPADRKAXVLRFHVLHSYYPLGSLESIVNPLQPTLATEYASQAGRFTLNITRSNGSVAIDTGVVQATITRTVFDQNPVAVFAVSKVLLPKEMFTRADSAAVVAAALAPPPATSNSMPPEPPESARTPPTKLSSPPALRGVTRNDTAVSPPPSSSAKAAAIGWWCIALLYLLLPLV

SEQ ID NO: 2730 - protein, 486 aa, Chromobacterium violaceum ATCC 12472
MLNLQDPSLLRQQCYLGGEWLDADGGQHIAVHNPATGEKIGQVPKMGAAEAERAVAAAARAFPAWKAKSAKERAAILRRWFDLIIAHQQDLAIILTSEQGKPLAEAKGEIAYGASYIEWYAEEAKRVYGDIVPGPAGDRRVLVTKEPIGVTAAITPWNFPSAMITRKAAPALAAGCTMVVRPASQTPLSALALAELAERAGIPAGVFSVITGGSSEIGAVLTGSDTVKKFSFTGSTEVGRKLIAQCAGTVKKVSMELGGNAPFIVFDDADLDAAVEGALISKYRNAGQTCVCANRIYVQDGVYDAFAEKFAAAVATLKVGNGLEAGVSQGPLIDHNAVAKVEEHIADALAKGGRLIAGGKRHALGHTFFEPTLIADVTRDMKVAREETFGPLAPLFRFKTEEEAIRLANDTEFGLASYFYARDVGRIFRVAEGLEYGMVAVNSGLLSNEAAPFGGVKQSGLGREGSKYGIEDYLEIKYVLLGGLDR

SEQ ID NO: 2731 - protein, 124 aa, Nicotiana tabacum
IKLAHSKMAKVALLVVVCMAAVAVMLTPHADADISCGQVVASLSPCISYVRQGGAIPAPCCSGINSLNNQATSTPDRQTACNCIKSAAAGISGINFSLAGSLPSKCGVNLPYKISPSIDCSTVQ

SEQ ID NO: 2732 - protein, 122 aa, Spinacia oleracea
MIQPQTHLNVADNSGARELMCIRIIGASNRRYARIGDVIVAVIKEAIPNTPLERSEVIRAVVVRTCKELKRDNGMIIRYDDNAAVVIIDQEGNPKGTRIFGAIARELRQKFAKIVSLAPEVL

SEQ ID NO: 2733 - protein, 250 aa, Candida albicans SC5314
MPKPAGPELAPVATEFPVMLPLDPEPSPEPEPTPAPEPEPEPELVPLDEPEPPEGLVLLDEPRPPTKLPAPEVSCPAAAVSAPRAAAPAAVSAPRAAPAAPEVAVLAAPAAPEVAVFAAPTAPEVAVSAAPAAPEVAVLAAPAAPEVAVSAAPAAPEATVFAIPAAPEVAVSAAPAAPEATVLAAPTAPDVTAAAAPPAAEAASASISFFSILWKGEMLSAVAIGIIDVDKTNVETLISIYKCCCLNLIN

SEQ ID NO: 2734 - protein, 309 aa, Bacillus cereus ATCC 10987
LFFVYNIEMLYMNRGRDVMSKFTVASNGSLETTLRGVEVLSTPLLNKGVAFTQEEREELGLKGLLPPAVLTLEEQARRAYEQFCSQPDDLLKNVYLTALHDRNEVLFYRILTDHLREMLPIVYTPTVGVAIQRYSHEYRKPRGVYLSINDPSGIEEAFANIGATAENIDLVVVTDGEGILGIGDWGVGGINIAIGKLAVYTAAVGIDPSRVLPVILDVGTNREELLNNPFYIGNRHPRITGEAYDEFIDTFVRAVNKQFPKALLHWEDFSSRNARKILDKYRHDICTFNDDIQGTGAVSLAAVLSAVKA

SEQ ID NO: 2735 - protein, 327 aa, Bacteroides thetaiotaomicron VPI-5482
MDNKYIGILTSGGDASGMNAAIRAVTRAAIFNGFKVKGIYRGYEGLIAGEVKELTTEDVSSIIQRGGTILKTARSETFTTPEGRKKAYKVIQKENINALIIIGGDGSLTGARIFAEEYDVTCIGLPGTIDNDLYGTDFTIGYDTALNTIVECVDKIRDTATSHDRIFFVEVMGRDAGFLAQNSAIASGAEAAIIPEDRTDVDQLETFIGRGFRKTKNSSIVIVTESPENKNGGAIYYADRVKKEYPGYDVRVSILGHLQRGGAPSANDRILASRLGEAAIQALMEGQRNVMIGIRNNEIVYVPFVQAIKKDKPIDKSLIRVLNELSI

SEQ ID NO: 2736 - protein, 275 aa, Triticum aestivum
  misc_feature (44)..(44): Xaa can be any naturally occurring amino acid
MEAETAAKRARENEGAAAADGAGEQAGISAVIPGWFSEISPMWXYQEMITHLPLCSIKDPKKVLVIGGGDGGVLREVSRHSSVEQIDICEIDKMVVDVSKQFFPHLALGFEDPRVSLHIGDGVAFLKNAPEGTYDAVIVDSSDPVGPAQELFEKPFFESVSRALRPGGVVCTQAESIWLHMHIIEDIVTNCRQVFKGSVNYAWTTVPTYPSGVIGFMLCSTEGPSVDFQHPVFSIEEDEYSTKSKGPLKFYNSEFHTASFCLPSFARRVIEAKAN

SEQ ID NO: 2737 - protein, 174 aa, Triticum aestivum
  misc_feature (141)..(141): Xaa can be any naturally occurring amino acid
  misc_feature (145)..(145): Xaa can be any naturally occurring amino acid
  misc_feature (159)..(159): Xaa can be any naturally occurring amino acid
MAPAVMASSATTVAPFQGLKSTAGLPVSCRSGSTGLSSVSNGGRIRCMQVWPIEGIKKFETLSYLPPLSTEALLKQVDYLIRSKWVPCLEFSKVGFVFREHNSSPGYYDGRYWDNVGKLPMFGCTDAHSAQRGGGVKKEYXDAYXRVIGFDNIASECVXLNAFRHKAARNPGKA

SEQ ID NO: 2738 - protein, 335 aa, Xylella fastidiosa 9a5c
MTQTITVIRGDGIGPEIMDATLLVLNTLQANLNYEFADAGLNALEKHGDLLPEATLNSISKNKVALKSPLTTPVGEGFSSINVALRRKFDLYANVRPAKSFPNTKSRFSDNVDLITVRENTEGAYLSEGQTISPDGEVATSSARVTRKGSERIVRYAFDLARTTGRKKVTAVHKANIIKSTSGLFLKTARDVASQYPEIDFQEMIVDNACMQLVMRPEQFDIIVTTNLFGDILSDLCAGLVGGLGLAPGANIGNEQAIFEAVHGSAPDIAGQGKANPCALLLGAVQMLDHIGQPQNAERLRNAIVATLNAKDSLTPDLGGNGNTMEFAKAIASRL

SEQ ID NO: 2739 - protein, 172 aa, Triticum aestivum
  misc_feature (111)..(111): Xaa can be any naturally occurring amino acid
MGAAESSSKLASSVHGFSVKDARGNDVELSRYKGKVLLIVNVASQCGLTNSNYTELGSLHKKYGEKGFEILAFPCNQFVGQEPGTNEQIAEFACTRFKADFPVFGKVDVNXGGKAAPLYKFLKSERGGLFGERIKWNFTKFLVDKDGHVVSRYAPTSSPLSIENDIQKLLEA

SEQ ID NO: 2740 - protein, 150 aa, Triticum aestivum
  misc_feature (42)..(44): Xaa can be any naturally occurring amino acid
  misc_feature (79)..(79): Xaa can be any naturally occurring amino acid
  misc_feature (89)..(89): Xaa can be any naturally occurring amino acid
  misc_feature (110)..(110): Xaa can be any naturally occurring amino acid
  misc_feature (119)..(119): Xaa can be any naturally occurring amino acid
  misc_feature (121)..(121): Xaa can be any naturally occurring amino acid
  misc_feature (128)..(128): Xaa can be any naturally occurring amino acid
  misc_feature (132)..(132): Xaa can be any naturally occurring amino acid
MAHAAAAAAVPLRRPLLLFLRPARLLSFVAPRSSSVRAYRAXXXAPSPPSPPNDEGPGTNGERRAQAATKKKREGRRAXVEVGHGSRQXSPPQLKRIVRAASLERQVVDXLMLGEEFGXDXAKGRRRXFNYXGNRHVRRFPRKVTGVPLD

SEQ ID NO: 2741 - protein, 415 aa, Spinacia oleracea
MASFTTTTAAAASRLLPSSSSSISRLSLSSSSSSSSSLKCLRSSPLVSHLFLRQRGGSAYVTKTRFSTKCYASDPAQLKNAREDIKELLQSKFCHPIMVRLGWHDAGTYNKDIKEWPQRGGANGSLSFDVELKHGANAGLVNALKLLQPIKDKYSGVTYADLFQLASATAIEEAGGPTIPMKYGRVDATGPEQCPEEGRLPDAGPPSPAQHLRDVFYRMGLDDKDIVALSGAHTLGRSRPERSGWGKPETKYTKDGPGAPGGQSWTAEWLKFDNSYFKDIKEKRDADLLVLPTDAALFEDPSFKVYAEKYAADQEAFFKDYAEAHAKLSNQGAKFDPAEGITLNGTPAGAAPEKFVAAKYSSNKRSELSDSMKEKIRAEYEGFGGSPNKPLPTNYFLNIMIVIGVLAVLSYLAGN

SEQ ID NO: 2742 - protein, 258 aa, Zea mays
MGEEAVDDYELHMVCYGGGGGGSEDERVMEWESGLPGADELTPLSQPLVPAGLAAAFRIPPEAGRTLLDVHRASAATVSRLRRAPPPSSSGSGGSSSFAPFHPAARGDEGADSSAAGGGAAATTNGNNNMSSSSKRPRLVWTPQLHKRFVDVVAHLGMKNAVPKTIMQLMNVEGLTRENVASHLQKYRLYVKRMQGLSDEGPSPSDHIFASTPVPQSLVHEVPMYGTMASGGQAYHNHNGMGGGGYQYQYHHYHHAHK

SEQ ID NO: 2743 - protein, 136 aa, Thermococcus kodakaraensis
MGDKTKVQVSKLKPGRYIIIDGEPCRIVNVTVSSPGKHGSAKARIEAVGIFDGKVRSIVKPTSAEVDVPIIDKRVGQIIAITPDTVQLMDMETYETFDVPIEGGVDDEVKGQLTEGITVEYWETLGRIQIKKIRGE

SEQ ID NO: 2744 - protein, 137 aa, Triticum aestivum
PHPWLNVLVPRSRIADFDSAVFKGILQGTDIAGPLVVYPLNKSKWDDGMSAVTPAEEVFYAVSLLFSSVANDLKRLEAQNQKILRFCDLAGIGYKEYLAHYTAHGDWVRHFGGKWQRFVEMKDKYDPKRLLSPGQDI

SEQ ID NO: 2745 - protein, 442 aa, Glycine max
  misc_feature (80)..(80): Xaa can be any naturally occurring amino acid
MKVAKGRILVGKYELGKTIGEGSFAKVKFARNVQNGNYVAIKILDRKHVLRLNMMEQLMKEISTMKLINHPNVVRILEDXVLASKTKIYIVLEFVDGGELFDKIAANGRLKEDEARNYFQQLINAGDYCHSRGVYHRDLQPENLLLDSNAILKVTDFGLSTYAQQEDELLRTACGTPNYVAPEVLNDRGYVGSTSDIWSCGVILFVLMAGYLPFDEPNHATLYQKIGRAQFTCPSWFSPEAKKLLKRILDPNPLTRIKIPELLEDEWFKKGYKPTTFVEEEDVNVDDVAAAFNDSKENLVTERKEKPVSMNAFELISRSQSFNLENLFEKQTQGIVKRETHFTSQRPANEIMSKIEEAAKPLGFNVHKRNYKMKLQGDKSGRKGHLSVATEVFEVAPSLHMVELRKTGGDTLEFHKFYKSFSSSSGLQDIVWHSEGKKNMKN

SEQ ID NO: 2746 - protein, 534 aa, Glycine max
MGLFSSTKLLPIVVLFSLLFTSYATNSAENNFVHCLVNHSEPSHPISAAIFTQNSSSFSSVLQAYIRNLRFNTSTTRKPFLIVTPFHVSHVQASIVCAKKHNLLMKIRSGGHDYEGVSYVASQPFFILDMFNLRSIEIDMESETAWVEAGAMLGEVYYRIAEKSKTHGFPAGVCPTVGVGGHISGGGYGNLMRKYGTSVDNVVDAQIVDARGRLLNRRTMGEDLFWAVRGGGGGSFGVVLAYKIKLVRVPEKVTVFQVGRTLEQNATDIVYNWQHVAPSIDNDLFIRLILEVVNGTQTATKTVRATFIALFLGDSKSLVSLMDEKFPQLGLKQFDCIETTWLRSVLFWDNIDIATPVEILLERQPQSFKYLKRKSDYVKKPISKEGWEGIWNKMIELEKAIMYFNPYGGRMAEIPSTASPFPHRAGNLWKIQYQANWNKPGKEVADHYINLPRKLPKFMTPFVSKNPREAFYNYKDLDLGINPNGKNSYAEGRVYGVEYFKDNFDRLVQIKTKVDPHNFFRNEQSIPTLSYRKG

SEQ ID NO: 2747 - protein, 302 aa, Pinus pinaster
MERFANDVDEHSLKETELRLGLPGVCESDTGPGQTRNGKRGFSEVMDSTKASSFNDNKWIFPSVKCQPATSAITETAEACKGSQPGLFSATPSQKIMMQGGCGAPQSWAGDNGLSRSTAPKDELHPKTPRDGPTEKTNGASQSQAATDPAMAPAPKAQVVGWPPIRSFRKNTLAANSKPNDEGSSSNALYVKVSMDGAPYLRKVDLKMYSTYHELSSALEKMFSCFNMGQCGAPGLSESKLIDLLNGSEYVPTYEDKDGDWMLVGDVPWEMFVDSCKRLRITKASEAIGLAPRAMEKSRSKN

SEQ ID NO: 2748 - protein, 334 aa, Triticum aestivum
  misc_feature (237)..(237): Xaa can be any naturally occurring amino acid
MGSTAADMAASADEEACMYALQLVSSSILPMTLKNAIELGLLETLVAAGGKLLTPAEVAAKLPSTANPAAADMVDRMLRLLASYNVVSCTMEEGKDGRLSRRYSAAPVCKFLTPNEDGVSMAALALMNQDKVLMESWDYLKDAGLDGGVVSTMAYGMSAFEYHGTDPRFNRVFNEGMKNHSIIITKKLLESYKGFKGLGTLVDVGGGIGATVGAITAHYPTVKGINFDLPHVISEAXILHDWSDEHCATLLKNCYDALPAHGKVVLVECILPVNPEATPEAQGGFHLDMIMLAHNPGGRERYEREFEALAKGAGFGAIKTTYIYANIWVIEFTK

SEQ ID NO: 2749 - protein, 323 aa, Fragaria x ananassa
MTATQIPEVVLESSNGRRTMPVLGFGTASNNLQPEVLIEAVLEAIKLGYRHFDTASIYGSEQTLGVAIAQALKLGLVASRDELFITSKLWPNDGHPNLVIPALKKSLQNLELEYLDLYLIHWPISAKPGKLSHALEEKDQMPMDFKGVWADMEEAQRLGLTKSIGISNFSTKKTQNLLSFATIPPSVNQVEMSPFWQQKKLRDFCKASGIVVTAFSPLGAIGTSWGTNHVLESKVLNEIAEAHGKTVAQVCIRWVYQVGATLAVKSYNKERLKQNVQVFDWELTEEDLEKINQIPQRKMMPREELVTATGPYKSLDDLWDGEY

SEQ ID NO: 2750 - protein, 329 aa, Acinetobacter sp. ADP1
MTQSALDQLKKLTTVVADSSDIEAIRKFLPLDATTNPSLITAAASIPENKALIEDAFNQAHQEGYENDLLIERTIDILTVKFGVEILKLIQGRVSTEVDASLSYNTEATIEKARELSKLYKEYGIDQSRILIKIASTWQGIQAAKVLEAEGIPCNLTLLFGLHQAQACADAKVTLISPFVGRILDWYKKAENVDHYPIEKDPGVVSVKKIFTYYKQQGTPTQVMGASFRSIDQVLGLAGSDLLTISPALLSELEQDHRTVEATLTIEEAKQAEIIHRAAQTEQSFKDELEHDLMAFQLLQSGIDGFIKAREQLSTLLRQSYGIDAEIQP

SEQ ID NO: 2751 - protein, 496 aa, Gibberella zeae PH-1
MVLSQKQGRRETLTVVDNRTNQSYEIPITHNSIPATEFKKIKAEAGNDRPEDETNQGLRVYDPAYMNTAVVQSKITYINGLDGVLRYRGYPIEQLVEKSDFLESAYLLIYGELPTKSEYDLWHGEVMHHTYIHSDIENMFKSFRYDSHPMSMLTAAFATLGAFAPEANPSLAGQKLYTNAASGNLEALQMLDKQILRILGKAPTLAAASYRMRQGRPFNRPAQDLGYTGNFLYLLDHLSETDYKPHPVLARALDKLFIIHADHEVNCSTATVMQVGSSLVDPYSVVAAGCAALYGPSHGGASESAIRMLIEIGSPENVPAFMQAVEKRERVLVGFGHRVYKNVDPRSTAIRKLAEEVFEVTGRNKLLDTALTLADYARKSEFMRSRNLYPNVDFYSGLIYQAMGFPLDFYPVLFAVPRCVGWLAHWRQMMLNSAGVKIWRPRQLYIGEGEREYVEAKDRKAKADATVFDAPVKVGHGGNSQRTLLATSSKELKTIQ

SEQ ID NO: 2752 - protein, 105 aa, Zea mays
RGDNRCVNESIAMASRLVAAAASSSSLSSASPLARLISRRGLAGAADGHGSAKVPLWKDPLSPSKWKEEHFVLASLSMWGVIFYGGYKLFSGKKEAKTEAASPQA

SEQ ID NO: 2753 - protein, 287 aa, Vitis vinifera
MSPTCLLVLLLGMVVLTSTPSLAHYPKPPPFQKPPPEHKPPGEKPSPEHKPPTKPPKGEKPLPEHKPLTPIGKPPKGEKPPPEHKPPTPIDKPPKGKKPLPEHKPPTPIGKPPKGEKPPPEHKPPTPIGKPSKGEKPLPEHKPPTPIGKLPKGEKPPPEHKPPTPISKPPKGEKPLPEHKPPTPIGKPPKGEKPLPEHKPPTPIGKPPKGEKPLPEHKPPTPIGKPPKGEKPPSPFGKPPTGEKPPHYGHTPGHPPAHSYKPPQKIKPPPTPPHKPPHKPPSPTYPN

SEQ ID NO: 2754 - protein, 274 aa, Enterococcus faecalis V583
MTLDKTKKLANGNEMPRLGLGVWRVEDGSEATNSVKWALEVGYRLIDTAAVYKNEVGVGEGIRQSGIPREEIFVTTKLWNEDQGYENAIKAFDKSLEKLGLDYVDLYLIHWPVAGKYKESWKALEEIYASGRAKAIGVSNFHQHHLEDLLTEANVVPMVDQIELHPTLTQEPLRKYLAENKIAVEAWSPLGQGNLLSEPVLVKIGEKYGKSAAQVIIRWHLQNDIIVIPKSVHEKRIQENFAVFDFELTPEEITAINQLNKDHRFGADPDNFDF

SEQ ID NO: 2755 - protein, 250 aa, Zea mays
MAKNYPTVSAEYSEAVEKARRKLRALIAEKSCAPLMLRLAWHSAGTFDVSSRTGGPFGTMKHQSELAHGANAGLDIAVRLLEPIKEEFPILSYADFYQLAGVVAVEVTGGPEIPFHPGREDKPQPPPEGRLPDATKGSDHLRQVFGKQMGLSDQDIVALSGGHTLGRCHKERSGFEGAWTTNPLVFDNSYFKELLSGDKEGLLQLPSDKALLSDPVFRPLVEKYAVDEKAFFDDYKEAHLKLSELGFADA

SEQ ID NO: 2756 - protein, 180 aa, Helianthus annuus
MATQTVFDFPDDVLQQPPMPADNAFSDKDVKGQDVELSKYKGKVLLIVNVASQCGFTNSNYPELTTLYQKYKDQGFEILAFPCNQFGGQEPGSNEEIQVFACTRFKAEYPVFSKVNVNGKEADPLYKFLKSSKGGFLGDSIKWNFTKFLVDREGKVVDRYAPTTSPLSIEKDIKKLLNVA

SEQ ID NO: 2757 - protein, 410 aa, Glycine max
  misc_feature (32)..(32): Xaa can be any naturally occurring amino acid
  misc_feature (81)..(81): Xaa can be any naturally occurring amino acid
  misc_feature (87)..(87): Xaa can be any naturally occurring amino acid
  misc_feature (105)..(105): Xaa can be any naturally occurring amino acid
EELLPIVYTPVVGEACQKYGSIFKRPQGLFIXLKEKGKVLEVLKNWPERSIQVIVVTDGERILGLGDLGCHGMGIPVGKLXLYTALXGGVRPSACLPITIDVGTXNEKLLNDEFYIGLRQKRATGQEYSELLHEFMTAVKQNYGEKVLVQFEDFANHNAFELLAKYGTTHLVFNDDIQGTASVVLAGVVAALKLIGGTLPEHTFLFLGAGEAGTGIAELIALEMSKQVIKPTVLIGSSGVGRTFTKEVVEAMTSNNDKPLILALSNPTSQSECTAEEAYQWSEGRAIFASGSPFDPVEYKGKVYASGQANNAYIFPGFGLGLVISGAIRVHDDMLLAASESLAKQVSEENYKNGLIYPPFSNIRRISANIAANVAAKAYELGLATRLPRPQNLVKCAESCMYTPVYRNYR

SEQ ID NO: 2758 - protein, 500 aa, Oryza sativa (japonica cultivar-group)
MDRARLAVLSAHLASPAAACGEADAAGPLERSAASAGARGGALAVVDGRTGKRYEVKVSDEGTVRATDFKKITTGKDDKGLKIYDPGYLNTAPVRSSICYIDGDEGILRYRGYPIEELAESSSFVEVAYLLMYGSLPTQSQLAGWEFAISQHSAVPQGLLDIIQAMPHDAHPMGALASAMSTLSVFHPDANPALRGQDLYKSKQVRDKQIVRVLGKAPTIAAAAYLRLAGRPPILPTNSLSYSENFLYMLDSLGDKEYKPNPRLARVLDILFILHAEHEMNCSTAAARHLASSGVDVFTALSGAVGALYGPLHGGANEAVLKMLNEIGSVENIPDFIEGVKNRKRKMSGFGHRVYKNYDPRAKVIRKLAEEVFSIVGRDPLIEVAVALEKAALSDDYFVKRKLYPNVDFYSGLIYRAMGFPTEFFPVLFAIPRMAGWLAHWKESLDDPDTKIMRPQQVYTGVWLRHYTPVRERVPASQGEQLGQIATSNATRRRRAGSAL

SEQ ID NO: 2759 - protein, 482 aa, Glycine max
MLPQKQGEETMMSNLNETTIERGEEREEENVGGGSHSSLKSILWHGGSAYDAWFSCASNQVAQVLLTLPYSFSQLGMLSGIIFQVFYGIMGSWTAYLISILYIEYRTRKEKESVSFKNHVIQWFEVLEGLLGPYWKAIGLAFNCTFLLFGSVIQLIACASNIYLINDHLDKRTWTYIFGACCATTVFVPSFHNYRIWSFLGLGMTTYTAWYMTIAAIAHGQVENVTHTGPKKLVLYFTGATNILYTFGGHAVTVEIMHAMWKPQKFKYIYLYATLYVFTLTLPSAVAVYWAFGDKLLDHSNAFSLLPRSGWRDAGVILMLIHQFITFGFACTPLYFVWEKVIGMHDTKSICLRALARLPVVIPIWFLAIIFPFFGPINSAVGALLVSFTVYVIPACAHMLTYKSASARQNAAEKLPFFIPNWTAMYVVNAFVVVWVLVVGFGFGGWASMTNFIKQVDTFGLFAKCYQCPPKVPASNNTMLHH

SEQ ID NO: 2760 - protein, 608 aa, Glycine max
  misc_feature (236)..(236): Xaa can be any naturally occurring amino acid
  misc_feature (251)..(251): Xaa can be any naturally occurring amino acid
  misc_feature (291)..(291): Xaa can be any naturally occurring amino acid
ILNYSIWVANRTIVWFRRDLRIEDNPALGVVNFKFLYTRSNISSPNEEGKFYPGRVSRWWLKQSLAHLDQSLKSLGSRLVLIKTHSTVRALVDFVQAIQATKVVFNHLYDPVSLVRDHNIKEKLVEQGISVQSYNGDLLYEPWEVNSESGRAFTTFNAFWKKCLHMQMDIVSVVPPWQLIPAEGKIEECSLEELGLENESEKPSNALLGRAWSPGWRNADKALREFVELHLLHYSXWTTEGNCAGEQSCKXYLHFVGLSEYSRYLCFNFRFTHEKALLGHLRFFPWIYSLXNPDPDIFKTWRQGRTGFPLVDAGMRELWATGWIHNRIRVIVSSFAVKMLLLPWKWGMKYFWDTLLDADLESDILGWQYISGGLPDGHELERLDNPEIQGAKFDPEGEYVRQWLPELARMPTEWIHHPWDAPLTVLRAAGVELGQNYPKPIIDIDLARERLTEAIFKMWESEAAAKAAGSEPRDEVVVDNSHTLENLDTQKVVVLGKAPCATISANDQKVPALQDSKNEPPTRKRPKHMIEEGQNQDHSQNHNKDTGLSSIDQDICSTADSSSCKKQCASTSSYSFSVPQQCSSSSNLKWPWQEKIDMEQSSSKDGAM

SEQ ID NO: 2761 - protein, 400 aa, Arxula adeninivorans
  misc_feature (380)..(380): Xaa can be any naturally occurring amino acid
MADFIRTQIFGTCFEITSRYVDLNPVGMGAFGLVCSARDQLTNQNVAIKKIMKPFSTPVLAKRTYRELKLLKHLRHENLITLSDIFISPLEDIYFVTELLGTDLHRLLTSRPLEHQFIQYFLYQILRGLKYVHSAGVVHRDLKPSNILINENCDLKICDFGLARIQDPQMTGYVSTRYYRAPEIMLTWQKYDVEVDIWSAGCIFAEMLRGKPLFPGKDHVHQFSIITELLGNPPDDVIETIGSENTLNFVKSLPKRERIPLSQKFPNADPDAVDLLEKMLVFDPRKRINAADALAHPYLAPYHEPSDEPVASEKFDWSFNDADLPVDTWKVMMYSEILDFHNVDSSAVEQQQQQPQPPQPQLQQQQQPPQQPQQPQQPQXAQQPVQPVQGDYVPQVAPRS

SEQ ID NO: 2762 - protein, 506 aa, Shewanella oneidensis MR-1
MIYAQPGTAGALVNFKEKYANFIGGKWVAPVNGKYFDNRSPVNGQNFCKIPRSDAQDIELALDAAHAAKDAWGKTSVTERSNILLRIADRVEQNLEYLAVAETWENGKAVRETLNADLPLFVDHFRYFAGCIRAQEGSAADIDGNTVSYHFPEPLGVVGQIIPWNFPLLMAAWKIAPALAAGNCVVLKPAEQTPVSILVLLELIEDLLPPGVLNVVNGFGAEAGQALATSKRIAKLAFTGSTEVGFHILKCAAESLIPSTVELGGKSPNLYFADVMDQEDEYLDKAVEGMLLAFFNQGEVCTCPSRVLIQESIYDRFIEKVLARAQTIKQGNPLDTATQVGAQASQEQFDKILSYLAIGKDEGAQVLLGGSLCQLEGEQSKGYYISPTIMKGHNKMRIFQEEIFGPVISVTTFKDEAEALAIANDTEYGLGAGVWTRDMNRAQRMGRGIQAGRVWINCYHAYPAHAAFGGYKKSGIGRETHKMMLNHYQNTKNLLVSYDINPLGFF

SEQ ID NO: 2763 - protein, 458 aa, Thermus sp.
  misc_feature (149)..(149): Xaa can be any naturally occurring amino acid
PLLIKNGEIITADSRYKADIYAEGETITRIGQNLEAPPGTEVIDATGKYVFPGFIDPHVHIYLPFMATFAKDTHETGSKAALMGGTTTYIEMCCPSRNDDALEGYQLWKSKAEGNSYCDYTFHMAVSKFDEKTEGQLREIVADGISSFXIFLSYKNFFGVDDGEMYQTLRLAKELGVIVTAHCENAELVGRLQQKLLSEGKTGPEWHEPSRPEAVEAEGTARFATFLETTGATGYVVHLSCKPALDAAMAAKARGVPIYIESVIPHFLLDKTYAERGGVEAMKYIMSPPLRDKRNQKVLWDALAQGFIDTVGTDHCPFDTEQKLLGKEAFTAIPNGIPAIEDRVNLLYTYGVSRGRLDIHRFVDAASTKAAKLFGLFPRKGTIAVGSDADLVVYDPQYRGTISVKTQHVNNDYNGFEGFEIDGRPSVVTVRGKVAVRDGQFVGEKGWGKLLRREPMYF

SEQ ID NO: 2764 - protein, 353 aa, Candida sp. HA167
MSTPENLSFVLQKPFDVKFEDRPIPKLSDPYSVKIQVKKTGICGSDVHYFTHGAIGDFVVKAPMVLGHESSGVVLEVGSEVKSLKVGDRVAMEPGVPSRHSDEYKSGRYNLCPHMAFAATPPYDGTLCKYYILPEDFCVKLPEHVSLEEGALVEPLSVAVHSSKLGNIKPGSHVAIYGAGPVGLLVAAVASAFGAESVTIIDLVESRLNLAKELGATATVQVDFKDTPKESAAKVVAANNGIAPDVVIDASGAEASINSAINAIRPGGTYVQVGMGKPDVSFPIATLIGKELTVKGSFRYGYGDYPLAVSLLASGKVNVKKLITHEVKFEDAAEAFQLVRDGKAIKCIINGPE

SEQ ID NO: 2765 - protein, 451 aa, Alnus glutinosa
MTSLQYFSLNRPVFPATHLHRPGIRHLQVSACANVEVQAPSSVKKQGVSKEVMEAAGRVLVGTYARVPVVLSRGKGCKLYDPEGREYLDLSAGIAVNVLGHADSDWLRAVTEQAATLTHVSNVFYSIPQVELAKRLVASSFADRVFFSNSGTEANEAAIKFARKFQRFTRPDEKQPATEFVSFSNSFHGRTMGSLALTSKENYRSPFEPVMPGVTFLEYGNIEAATQLIQRRKIAAVFVEPIQGEGGVYSATKEFLYALRKACDDSGTLLVFDEVQCGLGRTGYLWAHEIYDVFPDIMTLAKPLAGGLPIGAVLVTERVASAITYGDHGTTFAGGPLVCKAALTVLDKILRPGFLASVSKKGHYFKEMLINKLGGNSHVREVRGVGLIVGIELDVSASPLVNACLNSGLLVLTAGKGNVVRIVPPLIITEQELEKAAEILLQCLPALDRHG

SEQ ID NO: 2766 - protein, 262 aa, Brassica napus
  misc_feature (106)..(106): Xaa can be any naturally occurring amino acid
RPTRPELTRTIVGVVEACHSLGVMHRDLKPENFLFVSKHEDSLLKTIDFGLSMFFKPDDVFTDVVGSPYYVAPEVLRKQHGPEADVWSAGVIVYILLSGVPPFWAXVLHGDLDFSSDPWPSISESAKDLVRKMLVRDPKKRLTAHQVLCHPWVQVDGVAPDKPLDSAVLSRMKQFSAMNKFKKMALRVIAESLSEEEIAGLKEMFNMIDADQSGQITFEELKAGLKRVGANLKESEILDLMQAADVDNSGTIDYQEFIARTL

SEQ ID NO: 2767 - protein, 459 aa, Magnetospirillum magnetotacticum MS-1
MPTRASNRTITEKDVDSVLHPYTNLKRHPEVGPLVITRGKGVRVYDEAGKDYIEGLAGLWCTSLGWGEERLVEAAARQMRTLPFYHLFSHKTHDVGVELCARLLEMAPVPMSKVFLAGSGSEANDTAIKLIHYRSNALGLPHKKKIIAREKAYHGVTVATASLTGLVNNQRSFDLPIPGVLRAGCPHHYRFARQGESEEDFSSRLAAELEALILAEGPDTVAAFFAEPVMGAGGVIVPPAGYFPKIQAVLDRYDILLVVDEVICGFGRTGKMFGTETFGIRPDMMTLAKGLSSGYAPISALMVNERVYGPVAEESGRIGVFGHGYTYGGHPVSAAVALETLNIYAERDILAHIAKVGPVLQEGLGSFRDHPLVGEARGIGLIGALELVADKTSRAPFPPERTMGAKVVARAQDKGVILRAMGDAIAFAPPLIITEAEIGDMLRRFKAALDEAHGALGLG

SEQ ID NO: 2768 - protein, 137 aa, Hordeum vulgare
PHPWLNVLVPRSGIADFDRAVFRGILQGTDIAGPLVVYPLNKSKWDDGMSAVTPAEEVFYAVSMLFSSVANDLRRLEAQNQKILRFCDLAGIGYKEYLAHYTAHGDWVRHFGGKWKHFVEMKDKYDPKKLLSPGQDI

SEQ ID NO: 2769 - protein, 305 aa, Zea mays
  misc_feature (144)..(144): Xaa can be any naturally occurring amino acid
  misc_feature (177)..(182): Xaa can be any naturally occurring amino acid
  misc_feature (185)..(185): Xaa can be any naturally occurring amino acid
MAGLSLEHPWAFAFGLLGNVISFMTFLAPIPTFYRIYKSKSTEGFQSVPYVVALFSAMLWIFYALIKSNETFLITINAAGCVIETIYIVMYFVYAPKKAKLFTAKIMAPPQWRRLWGHPSCSPFSLFKGSKRVVLLGWICVGFXSVSVFVAPLSIMRRVIQTKSVEYMPFSLSLSLXXXXXXVWXLYGLLIKDKYVALPNIWGFTFGVVQMVLYVLYMNKTPVAATAEGKDAGKLSSAADEHVLVNIAKLSPALPERSSGVHPVTQMAGVPVRSCAAEATAPAMLPNRDVVDVFVSRHSPAVHVA

SEQ ID NO: 2770 - protein, 495 aa, Rhizobium etli
MAISSTLLGRLKDQTLVREQMLVGGKWSSEGVNGTRINVLNPSTMDVLASLPSAGLAEVRASIDAAKAAQKKWAKVSAKERSLIMRKFYEEVVANAEDLAVILTSEMGKPLAEARGEIAYGASYIEWFGEEAKRVYGDTIPGHQADKRLLVIKQPVGVVAAIAPWNFPSAMVCRKIAPALASGCAIVFKPAAETPLSALALAILAERAGIPDGLFSVLPTDNARMFGEEVCSNPVVKKLTFTGSTEVGRILMAQGAQKIMKLSLELGGNAPFIVFDDADLDQAVEGAMLSKFRNAGQTCVCANRIYVQSGIHDRFVEKLAMRVSALQVLDGFESGATIGPLINDEAVAKLYGHIDDAVTKGATVVVGGDRDARGGTFVQPTLLSGATKDMKVAREETFAPLAPVFKFDTVEEVIELANDTEFGLAAYFFANDLRNVWKVTEALEYGMVGVNTGLISTELAPFGGVKQSGFGREGSKYGMDDFLSMKYVCMGGIGA

SEQ ID NO: 2771 - protein, 213 aa, Glycine max
MGCFHSKSARQFPAQENTVNLAAETAFTVSEVEALFELFRSISSSVVDDGLISKEEFQLAIFKNKKKDNLFANRIFDLFDVKKKGVIDFEDFVRSLNVFHPNASLEDKIAFSFRLYDLHNTGFIERPEVKQMLIALLFESDMKLADDVIETILDKTFVEADLNQDGKIDTEEWETFVKKNPSLLKIMTLPYLRDITTSFPSFIFNSNVDEITA

SEQ ID NO: 2772 - protein, 498 aa, Schizosaccharomyces pombe
MSTSSKLSTNIKDLSLFDLEEFPARSYIGGKWVTAASGKTFDVENPGLNETLAPVTDMSVEETRKAIKVAHEAFLSYRNSDIKERYAILRRWYDLIMENADDLATMMTLENGKALGDAKGEVVYAAKFIDWFAGEALRISGDSSMSSNPQNRIITIKQPVGVVGIITPWNFPAAMITRKVGAALAAGCTVVIRPAAETPFTALALAKLAERAGVPAGVLNMVTANSPSEHGIELTTNPLIRKVSFTGSTNVGKILAKQSSSTLKKLSLELGGNAPFIVFEDADLEKAADALMACKFRGSGQTCVCANRIYVHSSVYDAFVDLVTERVSKFKLGYGLDAGVTHGPLISEKAISKVKQHVEDAVQKGGVVVTGGKVASNLGPMYFEPTVIINAKQGMLISEEETFGPVGALFKFDTEDEVVAWANDSPVGLAGYLFSKDISRVFRVGEALQVGMVGCNTGLVSDVLSPFGGVKESGFGREGSKYGISEYLDIKSLTISTL

SEQ ID NO: 2773 - protein, 117 aa, Zea mays
MTASQSSMSGGGEPGMRTVVWFRRDLRVEDNPALSAAARTGGEVVPAYVWSPEEDGPYYPGRVSRWWLSQSLKHLDASLRRLGAGRLVTRRSSDAVVALVDLVRSTGATHLFFNRLY

SEQ ID NO: 2774 - protein, 357 aa, Gibberella zeae PH-1
MNYPHPYSKAAELDKRIQIPRPCYDSALAPMLDYASLPEEFSLDLMRGVAAGVEECPHGSHTFNAETVLKDQPHLTHAEHVVAGPDNNDVILSVFTPKEPAKVPRPALYHIHGGGMVSGDRFSALTQVIDLLSGIDCVVVSVEHRLAPETRAPGPAEDCYAGLVWVSKNAENLGIDPAAIVVFGVSGGGALAAATCLMARDRKSPAVPIKAQMLYSPLLDDRCESVADKQFEYGNPAPTTWLRAIWDHILGDERGSENVTPYQAPSRETNLSNLPPAYIDAGECEVFRDVAVAYASTMWRCGSTCELHIWPGAFHGFDMMDDPQIPLINIANKAKANWFKRVLTTDTKPLPAPISHA

SEQ ID NO: 2775 - protein, 375 aa, Gibberella zeae PH-1
MSPSAVEGNGVVDVKTTLKPNVGVYTNPNHDLWVAPAEPSAEAVKSGSDLKQGEVSVAIRSTGICGSDVHFWHAGCIGPMIVEGDHILGHESAGEVIAVHPSVSHLKVGDRVAIEPNIPCGTCEPCLTGRYNGCETVQFLSTPPVPGMLRRYINHPAVWCHKIGNMSYENGALLEPLSVALAGMQRAEVRLGDPVLICGAGPIGLITLQCCAAAGASPIVITDISESRLAFAKELCPRVITHKVERLSAEDSAKAIVKSFGGVEPTVAMECTGVESSIAAAVWSVKFGGKVFIIGVGKNEINIPFMRASVREVDIQLQYRYCNTWPRAIRLVENNVVDLSKLVTHKFKLEDAIKAFETSADPKTGAIKVMIQSLE

SEQ ID NO: 2776 - protein, 288 aa, Magnaporthe grisea 70-15
MASSLTLQSTFKLPSGHEMPLLGFGLWQTPPDEAERCCNDALRLGYRHIDSAASYRNEGGCGKAIRTSSIPRSDIFFTSKVRIITYDGAKEQVAKTLAETGLDYIDLMLLHCPYGGSENRKGAWKALVEAVEAGKVRSIGVSNYGVHHLDELEKHMAELEAERPGAGGVLSVGQYEIHPWCARDDVVGWLQKRGVAVEAYSPLVRGERWGEPVLKKLADKYGKTEAQVLIRWSLDQGFVPLPKSVNEDRIKANTDVYDFQLTAEEVKELKTDEYKPVCWDPVTSGLDN

SEQ ID NO: 2777 - protein, 507 aa, Glycine max
  misc_feature (180)..(180): Xaa can be any naturally occurring amino acid
  misc_feature (213)..(213): Xaa can be any naturally occurring amino acid
  misc_feature (240)..(240): Xaa can be any naturally occurring amino acid
  misc_feature (354)..(354): Xaa can be any naturally occurring amino acid
  misc_feature (432)..(432): Xaa can be any naturally occurring amino acid
MVLSKTASESDVSVHSTFASRYVRTSLPRFKMAEESIPKEAAYQIINDELMLDGNPRLNLASFVTTWMEPECDKLIMAAINKNYVDMDEYPVTTELQNRCVNMIAHLFNAPLEETEAAVGVGTVGSSEAIMLAGLAFKRKWQNRRKQEGKPYDKPNIVTGANVQVCWEKFARYFEVELKXEVKLRDDYYVMDPEKAVELVDENTICVAAILGXSTLNGEFEDVKRLNDLLIEKNKITGWXTPIHVDAASGGFIAPFIYPELEWDFRLQLVKSINVSGHKYGLVYAGIGWVIWRSKQDLPEELIFHINYLGADQPTFTLNFSKGSSQVIAQYYQLIRLGFEGYRNVMENCRDNMXLVLKEGLEKTGRFSIVSKDNGVPLVAFTLKDHTHFDEFQISDFLRRFGWIVPAYTMPPDAQHVTVLRVVIREDFSRTXLAERLVSDVEKVLHELDSLPARVISSTTVTLSAEENGKVVVAKKNPMETQREITAIWKKFVLERKKNNDKMNGVC

SEQ ID NO: 2778 - protein, 213 aa, Zea mays
MGCFHSTAKRQHPGYEDPVHLASQTAFSVSEVEALFELFKSISGSVIDDGLINKEEFQLALFKNQRKENLFANRIFDLFDVKKRGVIDFGDFVRALNVFHPNIPMEEKVDFSFKLYDMDGTGFIERKEVKQMLIALLGESEMRLSDEIIETILDKTFSDADANQDGKIDRTEWENFVTRNPSLMKIMTLPYLKDITTTFPSFVFNSEVDDLVT

SEQ ID NO: 2779 - protein, 451 aa, Oryza sativa (japonica cultivar-group)
MPPAGDDESPAATGDGYSKKVLQGRYELGRVLGQGASSKVYRARDARTGAHVAVKAIRKQQQPHHHPSCRSPEAAAAARRCVEVEREVAALRRVRGHPHVVALLDVLATRSTVYLVLELASGGSVLSALDSRGGGHYDEPAARRLFAQLASAVAHAHSLGVFHRDIKPENLLLDERGDLRLTDFGLSAFADADQHLGATDGLAATHCGSPAYVAPEILLKRRYDASKADVWSCGVVLFVLTAGYLPFNDGNLMAMYRKICAAKFRCPKWCSQELRSLIGRMLDPEPDTRIKIGEIFDHPWLQQDGSSSSFGMIQAASSHSKPEVEKWEAELEQAMELNAFDIIGFASGCDLSGLIGPLPDRVRFVLPGGDSKSVLDKVEKLGREEGLVVRRKEEEWCGGVHVEATSGKFTAYVRVNLLPKKILMIEAERVIGSEIPKFWHQLQIGNLLVRK

SEQ ID NO: 2780 - protein, 488 aa, Listeria monocytogenes EGD-e
MSIKETALPKVQTKLFINGKWTDGDNKETKDIVNPANGDVIAKIAQAGPSETKKAIKAAKDAFPDWAKMELADRVKLLHKIADLMEEKADTLAKIMTLEQGKPLKESKGEVLTGVENFRFAAEEARRLYGETIPAPNNHAFIVKKQPIGVVAAITPWNFPGGMVTRKLAPALATGNTIVLKPSGDTPLSALAIFEIFEEAGLPKGVANIVMGSSKEIGETLTDSDDVRKLTFTGSTKVGQTLFKQSADTLKKISLELGGHAPFIVFDDANLDAAVNDLVAAKFRNNGQVCVSPNRIFVAKEIKEKFTKALVAKVEQLKVGNGLDDVNVGPLIREDAIDKIDKQLKNATEKGAKVLTGGGRLTGSDYDKGNFYKPTVLDNVTRKMDIFYEETFGPVIPLITFETEDEAIEMANDSEFGLASYFYTKDLARVEKVGAALEYGMVGANEIAISNPETPFGGVKHSGFGRENGHYGMEEYIQVKFINLKYRD

SEQ ID NO: 2781 - protein, 57 aa, Triticum aestivum
  misc_feature (48)..(48): Xaa can be any naturally occurring amino acid
MPFTASDICKILLAIILPPLGVFLERGCNADFLIDILLTVLGHIPGIXHALYIIFQF

SEQ ID NO: 2782 - protein, 52 aa, Glycine max
  misc_feature (34)..(34): Xaa can be any naturally occurring amino acid
  misc_feature (43)..(43): Xaa can be any naturally occurring amino acid
MDYAAKHVTEKMMLNAGDIYPHNTSDANEAYYYXMVFEKVFRXNSAKLTVPG

SEQ ID NO: 2783 - protein, 215 aa, Triticum aestivum
  misc_feature (78)..(78): Xaa can be any naturally occurring amino acid
  misc_feature (169)..(169): Xaa can be any naturally occurring amino acid
MAPAVMASSATTVAPFQGLKSTAGLPVSRRSCSAGLSSVSNGGRIRCMQVWPIEGIKKFETLSYLPPLSTEALLKQVXDYLIRSKWVPCLEFSKVGFVFREHNSSPGYYDGRYWTMWKLPMFGCTDATQVLNEVEEVKKEYPDAYVRVIGFDNMRQVQCVSFIAFRPPXCEESGQGLKVQVEVIDIHVMLVKFVGGSAFSVLLLLLICEYMSICM

SEQ ID NO: 2784 - protein, 160 aa, Zea mays
MDARMFGLENPLVAALHHLLDVPDGDAGAGGDKAGGGATRTYVRDARAMAATPADVKELAGAYAFVVDMPGLSTGDIRVQVEDERVLVISGERRREEREDAKYLRMERRMGKFMRKFVLPDNADVDKVAAVCRDGVLTVTVEKLPPPEPKKPKTIEIKVA

SEQ ID NO: 2785 - protein, 140 aa, Glycine max
  misc_feature (22)..(22): Xaa can be any naturally occurring amino acid
  misc_feature (43)..(43): Xaa can be any naturally occurring amino acid
  misc_feature (56)..(56): Xaa can be any naturally occurring amino acid
  misc_feature (61)..(61): Xaa can be any naturally occurring amino acid
  misc_feature (97)..(97): Xaa can be any naturally occurring amino acid
QQRDVAHTVGPAHHECICTVSXGIGAIEHVLYHSVTYEVTTIXASSPRFLMSRKTXSLGVXWVIFAEGLDQIFGGYMYLYEAPHKALFHQMTIGMVXALAKHDCLRDNRSTSAWGLEARVPMLVKQCVRVAMIFGPEYNM

SEQ ID NO: 2786 - protein, 280 aa, Triticum aestivum
MKTFLIFVLLAMAMKIATAARELNPSNKELQSPQQSFSYQQQPFPQQPYPQQPYPSQQPYPSQQPFPTPQQQFPEQSQQPFTQPQQPTPIQPQQPFPQQPQQPQQPFPQPQQPFPWQPQQPFPQTQQSFPLQPQQPFPQQPQQPFPQPQLPFPQQSEQIIPQQLQQPFPLQPQQPFPQQPQQPFPQPQQPIPVQPQQSFPQQSQQSQQPFAQPQQLFPELQQPIPQQPQQPFPLQPQQPFPQQPQQPFPQQPQQSFPQQPQQPYPQQQPYGSSLTSIGGQ

SEQ ID NO: 2787 - protein, 384 aa, Rhodococcus sp. DK17
MSNATQTDPASRTTGTATAMVLEGFGRAMAPRTFPRVDPDAGAVVVDVTHAGICGTDIHLQQGRLAIPVPVILGHEAVGRVHALGEGVTTDARGEELRVGDAVSWASNIPCGHCYYCEDQQEPSLCETRKVYGINQSSADWPHLSGGWSEQIYLQPGSTIVRIPSSVTPQQVIALGCAGPTAVHAVNRIAKPDAGNVVVVQGSGPVGLACAMYATLAGAAKVIIVGGPANRLEVARTAGIGDIHIDIFAETDRAARLDRILAETTGGRGADVVIEAAGVPTAVSEGIDIARRGGKYLVVGQYTDHGTTPINPHYITKKQLQVLGSWAFSPHNHLEYVESLPRLAARFDLASMVTEYPLGKAEEAMGDMRDGRSLKSVLVTGGQS

SEQ ID NO: 2788 - protein, 256 aa, Triticum aestivum
MLLPTRRLPAAPSRPSVHPYISPARPSLRFRRQHGRAATARATSATPPVFGDTLLGLYEKERLGLSRYADEESREDVFWETLDADLQYWTRSLRPVQWYPGHIAKTEKELKGQLKLMDVVIEVRDARIPLATTHPKMDSWLGNRRRIIVMNREDMVSADDRNAWATYFSSQGIKVIYSNGQLGMGTMKLGRMAKSAASTVNTRRREKGLLPRPVTQLICFASCLFFLYTCKLFVLKLFHKKRYTVQLGYDVIEVMF

SEQ ID NO: 2789 - protein, 147 aa, Triticum aestivum
AEINFGGETAIAKTAGLVDPDAGLVDYVETLVRKPETEFNVVVLQLNGIDQPKEAVHVLNVGRLRMRLSKGKTVVAKEFYSSSMQLCGVRGGGEAASQAMFWRPRSDLSFAVAFETARERNTAIMLARRFAIDCNIILAGPGDKTPW

SEQ ID NO: 2790 - protein, 201 aa, Nicotiana tabacum
PNYTGPTTGCPREPWHDLHSRIEGPAAYDVLTNFEERWLKASKRHGLQKMKASQDDALLQLDRIPDILKIADVPCLGEDDADTWHVQIFRSIDSNSVKGFPKDPKEATNKNLVCGKNVLIDMSIHTAYVKAIRAAQHFIYIENQYFLGSSYNWNNYQDLGANNLIPMEIALKIANKIRANERFSVYIIVPMWPEGVPTSTA

SEQ ID NO: 2791 - protein, 133 aa, Zea mays
PASSPTRLDDVQLAFCLLSEVRLGNSDGYQHGQCWRDVYDAICQARRLIYIIGWSMFHTIHLVRDGHDDMALGDLLRRKSQEGVQVLLLVWDDPTSRRLLGIKMEGYMGTRDEETRRFFKHSSVQILLCPLSA

SEQ ID NO: 2792 - protein, 560 aa, Triticum aestivum
MAAAAVASNGGAAPVPGRLASVYSEVQTSRIAHALPLPSVLRSHFTLADGPASTAAGSPDEIAKLFPCLYGQPSAAVVPSAEPVETKPLKIGVVLSGGQAPGGHNVICGIFDYLQERAKGSTMYGFKGGPAGVMKGKYVELTTDFVYPYRNQGGFDMICSGRDKIETPEQFQQAEDTVNRLDLDGLVVIGGDDSNTNACLLGEYFRGRNLKTRVIGCPKTIDGDLKCKEVPTSFGFDTACKIYSEMIGNVMTDARSTGKYYHFVRLMGRAASHITLECALQTHPNVALIGEEVAEKKETLKNVTDYITDVVCKRAELGYNYGVVLIPEGLIDFIPEIQKLIAELNEILAHDVVDEAGAWKSKLEPASRELFDFLPKTIQEQLLLERDPHGNVQVAKIETEKMLIAMVETELEKRRAAGKYSAHFRGQSHFFGYEGRCGLPTNFDSSYCYALGYGAGALLQFGKTGLISSVGNLAAPVEEWTVGGTALTALMDVERRHGKNKPVIKKAMVELDAAPFKKFASLRDEWASKNRYISPGPIQFSGPGSDASNHTLMLELGAEI

SEQ ID NO: 2793 - protein, 211 aa, Zea mays
  misc_feature (126)..(126): Xaa can be any naturally occurring amino acid
MASDRVLGTVKWFNGTKGFGFITPDDGSEDLFVHQSSIKSDGYRSLNDGDAVEYTVGSGNDGRAKALDVTAPGGGPLAGGERPDGGNGGGRGGYGGGDRGYGGGGDRGYGGGGDRGYGGGDRGYGXGGGDRGYGGGGDRGYGGGGGYGGGYGGGGGGGGRGCFKCGEEGHMARDCSQGGGYGGGGGGGRGSECYNCGQEGHISRDCPNKRR

SEQ ID NO: 2794 - protein, 446 aa, Methanosarcina mazei Go1
MKAVVYRGPNQVSVEEVEDPKIEHPADAIIRLTSSGICGSDLHMYEGRTVEKPGKVLGHEPLGVIEEVGDAVTSFKKGDRVVVTFNIACGHCLNCIRGFTSACLTVNPESAGGAFGYAKMGPYRGAQAEFLRVPFADLNCTKLPGSPGDKWEDDFIMLSDVFPTGFFATQLAMVMPGFPVAVFGAGPVGLLSAYSAILQGAAQVFVVDYIPERLKLAKSIGAIPVDFTLSDPVAMIEALRSQHSRVDTVLPGEEKLQGIMSSIENLAKSIGANLELARSDPVTMIQMLRAGNPAIVQSLIPGEEKMKGVMSGIDAVGYQARDRQDPSRENPTQVISDLVRLINPTGHLGVIGVYVADDPGAYNERAKKGEYILPFGQLWEKGISVGTGQTPVKKLQPMLRDMIIAGVAKPSFIVSHKISIEEAPDAYREFAKRSEGFTKVTIQFEK

SEQ ID NO: 2795 - protein, 334 aa, Streptomyces globisporus
MLGDEDGKAAELWSMANLGTPMAVRVAATLRIADHITAGAHTAGEIAEAAAVHEESLDRLLRYLTVRGLLDRDGLGRYTLTPLGRPLCEDHPAGVRAWFDMEGAGRGELSFVDLLHSVRTGKAAFPLRYGRPFWEDLAEDPRRAESFNRLLGQDVATRAPAVVAGFDWASTGHVIDLGGGDGSLLTALLTACPSLRGTVLDLPEAVQRAKESFAVSGLDDRANAVAGSFFDALPAGAGAYVLSLVLHDWDDEASVAILRRCAEAAGQTGSVFVIESTGSAGDAPHTGMDLRMLCIYGAKERRVEEFEELAGRAGLRVVAVHPAGPSAIIQMSAV

SEQ ID NO: 2796 - protein, 55 aa, Brassica napus
  misc_feature (10)..(10): Xaa can be any naturally occurring amino acid
  misc_feature (42)..(42): Xaa can be any naturally occurring amino acid
MSTATFVEIXLAILLPPLGVFLKFGLKVEFWICLILTLFGYXPGILYALYIITKD

SEQ ID NO: 2797 - protein, 253 aa, Brassica napus
METEREKQVYSAKLSEQTERYDEMVEAMKKVAQMDVELTVEERNLVSVGYKNVIGARRASWRILSSIEQKEESKGNEENVKRIQNYRKRVEEELAKVCNDILSVIDKHLIPSSTAVESTVFFYKMKGDYYRYLAEFSSGAERKEAADQSLEAYKAAVAAAETGLAPTHPVRLGLALNFSVFYYEILNSPESACQLAKQAFDDAIAELDSLNEESYKDSTLIMQLLRDNLTLWTSDLPEEGEEKSKGDEPKEEN

SEQ ID NO: 2798 - protein, 178 aa, Glycine max
  misc_feature (93)..(93): Xaa can be any naturally occurring amino acid
  misc_feature (122)..(122): Xaa can be any naturally occurring amino acid
  misc_feature (125)..(125): Xaa can be any naturally occurring amino acid
  misc_feature (144)..(144): Xaa can be any naturally occurring amino acid
  misc_feature (165)..(165): Xaa can be any naturally occurring amino acid
  misc_feature (174)..(174): Xaa can be any naturally occurring amino acid
  misc_feature (177)..(177): Xaa can be any naturally occurring amino acid
MASSMISSPAVTTVNRAGAGMVAPFTGLKSMAGFPTKKTNNDITSIASNGGRVQCMQVWPPIGKKKFNTLSYLPDLNNTQLAKEVEYLLKKRXIPYLQFDLNHNFIYHNHNESPRYYNKLYXTIXNLPIFNYTNTSHVCKDLQXTKTTYPSNCIPIIRFYNSHQXQYINFISYXPAXF

SEQ ID NO: 2799 - protein, 480 aa, Pseudomonas putida KT2440
MQLKDAQLFRQQAYINGEWLDADNGQTIKVTNPATGEVIGTVPKMGTAETRRAIEAADKALPAWRALTAKERSAKLRRWFELMIENQDDLARLMTTEQGKPLAEAKGEIAYAASFIEWFAEEAKRIYGDTIPGHQPDKRLIVIKQPIGVTAAITPWNFPAAMITRKAGPALAAGCTMVLKPASQTPYSALALVELAHRAGIPAGVLSVVTGSAGEVGGELTGNSLVRKLSFTGSTEIGRQLMEECAKDIKKVSLELGGNAPFIVFDDADLDKAVEGAIISKYRNNGQTCVCANRIYVQDGVYDAFAEKLAAAVAKLKIGNGLEEGTTTGPLIDGKAVAKVQEHIEDAVSKGAKVLSGGKLIEGNFFEPTILVDVPKTAAVAKEETFGPLAPLFRFKDEAEVIAMSNDTEFGLASYFYARDMSRVFRVAEALEYGMVGINTGLISNEVAPFGGIKASGLGREGSKYGIEDYLEIKYLCISV

SEQ ID NO: 2800 - protein, 133 aa, Crocosphaera watsonii WH 8501
MSAATDEILEKLKSLTLLEASELVKQIEEAFGVSASAPSGGMMMMAPGGAAPGGAAAEAEEEKTEFDVVLEEVPGDKKIAILKVVRAITGLGLKEAKDMVESAPKPIKEGTGKDDAEEIKKKLEEAGAKVSVK

SEQ ID NO: 2801 - protein, 157 aa, Chloroflexus aurantiacus
MNIYQFTVRTIDGEQQSLAVYRNKVLLIVNVASHCGLTPQYGDLESLYRRYKDRGFVVLGFPSNQFNQEPDDEATIKSFCARTYAVTFPLFAKVEVNGPNTHPLFAYLKAQQPGLSPDGEIKWNFTKFLVNRNGTVVRRYAPTDTVGAIERELVELL

SEQ ID NO: 2802 - protein, 283 aa, Zea mays
MPMYSKSELIHVPPPPCSRPRYVMAPPLVFTSIGASMNAAVRDVWASNFDEELSNLSAVLPRYPCVCLDTEFPGAVHDSDMPRYMRGPRESYELVKRNVGIALSGPAGRFPIAWQFNIRGFDPALHPHAPASIAMLREQGMDFAMLNEFGIDPEDFAAGFRRSGLACGRLTWTAFSGSYDFGYLAKALTGGQPLPDTLDGFLALVRRLFGHSVFDVKHLARCCAMRGGLEQVATALGVKRAAGRAHCAGSDSLLTTDVLLLMMHRFFRNVDVLAHAGTIVDLT

SEQ ID NO: 2803 - protein, 250 aa, Ipomoea batatas
MGKCYPTVSEEYKKAIEKLRRKLRGFIADKNCAPLMLPLAWHSAGTYDVSSKTGGPFGTMRLKAEQAHGANNGLDIAVRLLEPFKEQFPIVSYADFYQLAGVVAVEITGGPDVPFHPGREDKTEPPVEGRLPDATQGNDHLRDVFVKQMGLSDKDIVALSGGHTLGRCHKERSGFEGPWTTNPLIFDNSYFTELLSGEKEGLLQLPTDKALLNDSVFRPLVEKYAADEDAFFADYPEAHLKLSELGYAEA

SEQ ID NO: 2804 - protein, 199 aa, Triticum aestivum
MEGVGARLGRSSARYGPAMTFTGPVRKWRKEWVTISAATATATSAAASSTGTGSRGNNLILFKWTPLNGANERDEEQTAPAKTATRRRLYVPVSVVQDQRQESAKSDDENKANDGEPSSTETEQSIGKTNMDDILMDESQASDEVRDSGNFVGGTDLNLNLGPKDPDGEDEGDTGEQHEVRTEHRLKRKSVTPDLEMRM

SEQ ID NO: 2805 - protein, 332 aa, Nostoc sp. PCC 7120
MTKNLLEQLREMTVVVADTGDIQAIEKFTPRDATTNPSLITAAAKMPEYQEIVDQTLLQAKKDAGAGASKGQIVSLAFDRLAVSFGLKILQIIPGRVSTEVDARLSYDTEATITKARELIAQYKAAGIGPERVLIKIASTWEGIKAAEILEKEGIHCNLTLLFGLHQAIACAEAGITLISPFVGRILDWYKKETGRDSYPSAEDPGVLSVTTIYNYYKKFGYKTEVMGASFRNIGEITELAGSDLLTISPGLLGELQATIGELPRKLDPAKAATLDIDKISIDKATFDKMHAADRMAYDKLDEGIKGFTKALEELETLLAERLARLEVVASH

SEQ ID NO: 2806 - protein, 143 aa, Zea mays
MAMAYKMATEGMNVKEECQRWFMEMKWKKVHRFVVYKIDERSRAVLVDKVGGPGEGYEELVAALPGDDCRYAVFDFDFVTVDNCQKSKIFFIAWSPAASRIRAKILYATSKQGLRRLLDGVHYEVQATDPSEIGFDVIRGRAQ

SEQ ID NO: 2807 - protein, 374 aa, Thermoproteus tenax
MQYSPGLEGIIVKESKICLIDVENSKIYYRGYDIEELADKSTFEETAYLLIYGQLPRASELDAFKERLASLRRPPEHVVKLLGLLPKSAEPIDVLRTAVSAMGMGRNLSDRSPEAELERGLEVIASMPFIAANWDRTRRGLEIADPQAEGHAEYFLRALKGDASPRQIKAMDVMLIIYAEHGMNNSAFTAVTVASTLSDMYSVISAAIASLKGPLHGGANIDAAKMIEEVGEPGRVQRWVDEALAAGKRIPGFGHRLYKRGPDPRLRVLRRLARELAEEAGDYKYYEIAERLEEYVHSRLSHKGIYANTDLYAAVIFKYLGLPTDLNLPAFAMSRAAGWVAHAVEYRRNNRLIRPTERYIGPVGLRYIPLEARG

SEQ ID NO: 2808 - protein, 326 aa, Aspergillus nidulans FGSC A4
MALKRTFKLNTGYEIPAVGLGTWQSKPSEVEEAVTAALNIGYRHIDAAAVYGNERDVGNGIKASGVPRGEIFLTSKLWNTHHDPENVEAAVDRSLSDLQTDYLDLYLIHWPVAFRYSTTTIQPVDEKTGLIDVIDVPIKDTWAAMEALVAKGKVRSIGVSNFNRRRIEELLKTAKIPPAVNQIEAHPYLQQRELLEWSKEKGILITGYSPLGNNIYNIPRTVDDPLVIEVAKFLNRTPAQVLISWAVQRGTAVLPKSVTPERIKSNFRDFILPEDAFQAIQSLERHQRMNFPARLGVDIFDEVGEESARRSALEWAEGQRLSKSQA

SEQ ID NO: 2809 - protein, 442 aa, Cupriavidus necator
MPQRHLPESRRPAMNRRQSQPFRTGDVMYQHIKVPAGEKITVNQDFSLNVPDNPIIPYIEGDGTGLDITPVMIKVVDAAVAKAYCGKRKIAWMEIYAGEKSTKVYGLDVWLPDETLEVLKDYVVSIKGPLTTPVGGGIRSLNVALRQTGPDVCLRPVRYFKGVPSRCVSSEKTDMVIFRENSEDIYAGIEWAAESEHAKKLIKFLQDEMGVKKIRFPRTSGIGIKPVSREGTERLVRKAIQYAIDNDKPSVTLVHKGNIMKFTEGGFRDWGYELAHKEFGAELVDGGPWCKFKNPKTGKDIVIKDAIADAFLQQILLRPAEYSVIATLNLNGDYVSDALAAQVGGIGIAPGANMSDSVAMFEATHGTAPKYAGKDYVNPGSEILSAEMMLRHMGWTEAADLIISSMEQSILSKKVTYDFARLLEGATQVSCSGFGQVMIDNM

SEQ ID NO: 2810 - protein, 105 aa, Glycine max
FAELMMSSGLICNNSMSWVTFHSTYNFSYLVKILTHRNLPTRLEKFLKTIKVFCRDNVYNIKHIIRFYNTLYNKLNHIAQSLNLKHTRKNYHHTKSDSLLTVHAF

SEQ ID NO: 2811 - protein, 367 aa, Zea mays
  misc_feature (171)..(171): Xaa can be any naturally occurring amino acid
  misc_feature (185)..(185): Xaa can be any naturally occurring amino acid
  misc_feature (268)..(268): Xaa can be any naturally occurring amino acid
MAATVRRAASSVLSRFLLTKPSPASAAGNKSALLGSGAAALHRFSTAPASAAAAAEEPIQPAVEVKHTQLLINGNFVDAASGKTFPTLDPRTGEVIARVAEGDSEDIDRAVAAARRAFDEGPWPRMTAYERCRVLLRFADLIERHAEEVAALETWDNGKTLAQAAGAEVPXVARCVRYYAGWADXHGLVAPADGAHHVQVLHEPVGVAGQIIPWNFPLLMFAWKVGPALACGNTVVLKTAEQTPLSALYVANLLHEAGLPEGVLNVVXPVQTILKFSGVEEVIRRANATPYGLAAGVFTRSLDAANTLSRALRAGTVWVNCYDVFDATIPFGGYKMSGVGREKGIYALRNYLQTKAVVTPIKNPAWL

SEQ ID NO: 2812 - protein, 288 aa, Gibberella zeae PH-1
MVLEAVMVVVDNSESSRNGDYQPTRFDSQVDAVNITFQSITQGNPESSVGLMSMGGKGPEVLVTLTTEQGKILEGLHRTKKKIGGSSHLKTGIQVATLALKHRQNRSQRQRIIVFVCSPVEESEKELTTLAKKMKKANISVDFVLFGDLDDDSTKNKLQLFIDTVKTNEGCHLVVIPPSSKLLSDQLVSSPILLGENAGGSGGAGGAGGGNDEFEFGFDPAMEPELALALRMSMEEEKARQEKAAREEEEAAKKASLGDVKEEDEGQGSSSKDQDKDKKGDGDKMDIS

SEQ ID NO: 2813 - protein, 266 aa, Triticum aestivum
  misc_feature (196)..(196): Xaa can be any naturally occurring amino acid
MGSNEGGGCDGKPVVVVPEIKYTKLFINGEFVDAASGKTFETRDPRTGDVLAHIAEADKADVDLAVEAAREAFEHGKWPRMSGYERSRAMNKLADLMEQHIEELAALDGADAGKLLLWGKFIDIPSAVQMLRYYAGAADKIHGESLRVSGKYQGYTLKEPIGVVGIIIPWNFPSLMFFLKISPALAAGCTVVVKPXPSQTPLSALYYAHLAKLAGIPDGVINVVPGFSPTAGAAIASHMDVDSVAFTGSGEVRRLIMEASARSNLK

SEQ ID NO: 2814 - protein, 292 aa, Arabidopsis thaliana; identical to SEQ ID NO: 375

SEQ ID NO: 2815 - protein, 238 aa, Glycine max
  misc_feature (191)..(191): Xaa can be any naturally occurring amino acid
AGIPGSTPRPETDEFIYHECLVHPALLHNPSPKNVFIMGGGEGSTARELLRHKTINKVVMCDIDEEVVNFCKSYLVVNKEAFRDQRLEVVINDARAELETRDESYDVIIGDLADPIDGGPCYKLYTKSFYELIVKPRLKQGGIFVTQAGPAGIFSHTEVFSCIYNTLRQVFKYVVPYSAHIPSYADILEWXQASDSPLDLSAEELDLRMRHRIKGENGYLDGKTFTSASTLSKTVRNS

SEQ ID NO: 2816 - protein, 132 aa, Thermosynechococcus elongatus BP-1
MSAATDEILEKLKSLTLLEAAELVKQIEETFGVSAAAPVGGMMVAAPVAGAAAAPAEEVEEKTAFDVILEEVPADKKIAVLKVVRSLTGLGLKEAKEVVESTPKPVKEGASKEDAEAAKKELEEAGAKVSIK

SEQ ID NO: 2817 - protein, 358 aa, Thermosynechococcus elongatus BP-1
MSHAVTLIRGDGIGPEVAAAARTAIDATGVKIDWVVVDAGVAMMERYGTPLPEEVIDAIKSTKTAIKGPITTPVGTGFRSVNVEIRKRLNLYANLRPAKSIVGVKSYFQNIDLVIVRENTEDLYAGIEFAYTSPEAAKARAFLSDLSGKPIREDAAIGVKPISVLGSDRILEFAFKYAKANGRKKVTAVHKANIMKFTDGLFLERAREIASRYPDIVFEDRIVDNMCMQLMQKPELYDVMVMPNLYGDILSDLCAGMIGGLGVAPGANIGDECAVFEAIHGSAPKYAGQNKANPTALILSGVLMLQHLGEMEAAQRLQAAVEKVIAEGRFVTYDLAAPGKEPVGTQEMAAAIAEYAAP

SEQ ID NO: 2818 - protein, 430 aa, Oceanobacillus iheyensis HTE831
MKTILLNANRLLPSNELEKVEVLIEDNKIIKIASQIPDKVENYIDIEGKLLLPGLIDVHIHLREPGGEHKETIKTGTMAAARGGYTTVCAMPNTNPVPDHPEALTSLLSKIADDAHIRVLPYASITKSLKGEERTDIQSLIDAGAFAFTDDGVGIQTADQMYQAMKDAARHNTTIVAHCEDNSLVYGGVLHEGEVSERLSLPGIPSLSESVQIARDVLLAEATGCHYHVCHVSTKESVRVIRDAKKAGIHVTAEVSPHHLLLNETDIPDDNADWKMNPPLRSTEDQQALFDGLMDGTIDLIATDHAPHATEEKAVGFKEAPFGIVGLETAFPLLYTHLVLKGKMTLYQLVERMTEKPAATFQLPYGKLEEDSVADITVIDLEKEETIHRETFYSKGKNTPFDNWKVKGIPVLTMVNGVVVYEEAKQHEEA

SEQ ID NO: 2819 - protein, 396 aa, Oryza sativa (japonica cultivar-group)
MASAAGGASGKDWFDCLPDDLVHHVLSFLPALDAVRTSVLSRRWRDFWVSMPRLNVDVGDFRDDGQFENFTVHALPLLDSSVPLRSLRLRSSLHYLSALWVNHAVKRKVAVLEYSGRAELCSSVDASLSLASSYLTKVVLKHFDFDYGQFWPLIDACPALENLELLDVWTFYSVTISSSSLKHLRIVSCLFYNGFRINAPNLLTMCLDDVNVNGPLGHDSLVLENLSSLMTASVSVYHCFYPKHYVKTELHFFHGLSHARNLKLIAPLYEALFEEGLPTCPVFNNLKCLVLGDWCMAFDLYPLRCILRQSPMLEELCVELGEEECENCKNRKPAFSYGEISPFWCDRLKTIKIKCTEHDERFVALLQLFCKILVCIEEVDIDRQWVSAQPPDSSEL

SEQ ID NO: 2820 - protein, 70 aa, Glycine max
MSALFNFHSFLTVILLGICACTYFKMQFPAILDQKTGFRGFFWKAARIGERLSPWVAAGCFMMGVSIIFF

SEQ ID NO: 2821 - protein, 343 aa, Chrysosplenium americanum
MLFAMQLACASVLPMVLKSAIELDLLEIIRGQDTCMSPTEIASHLPTTNPDAPAMVDRILRLLSCYSVVTCSVRSVDDQRVYGLAPVCKYLTKNQDGVSIAALCLMNQDKVLMESWYHLKDAVLDGGIPFNKAYGMSSFEYHGTDPRFNKVFNRGMSDHSTITMKKVFQTYQGFQGLTSLVDVGGGTGATLTMILSKYPTIRCINFDLPHVIEDAPEYPGIEHVGGDMFVSVPKGDAIFMKWICHDWSDEHCLKLLKNCYDALPNNGKVILAECILPEVPDSSLATKGVVHIDVITVAHNPGGKERTEKEFEALAKAAGFQGFQVFCNAFNTYIIEFSKKICN

SEQ ID NO: 2822 - protein, 140 aa, Nicotiana tabacum
KEEFHKETCRKIKALHQYDCLRANKSTSAWGLEARVPFLDKEFINVAMSIDPEWKLIKPEQRRIEKWALRRAFDDEEHPYLPKHILYRQKEQFSDGVGYSWIDGLKAHAEQHVTNRMMLNASHIFPHNTPITKEAYYYSM

SEQ ID NO: 2823 - protein, 114 aa, Triticum aestivum
FSWADAWADAWDLCITAGALVLRFQRRLKTAERVMGTVKRFNFTKGFGFIFAEDGSQDLFVHQDSIKADGYRSLNENDVLEFEVITGDDGRTKVFDVTAPGGGALAGGSRPGHR

SEQ ID NO: 2824 - protein, 359 aa, Zea mays
  misc_feature (68)..(68): Xaa can be any naturally occurring amino acid
MSHGNGMLNSVKVERWPAAVAANGQPRPMDVLHDGSSPPFLTKTYDMVDDPTTNAVVSWSAANNSFVXWDPHIFGTVLLPRYFKHNNFSSFVRQLNTYGFRKVDPDRWEFANEEFLRGQRHLLKNIRRRKPPHSSPNQQSLGSYLEVGHFGYEEEIDQLKRDKQLLMAEVVKLRQEHQNTRSDLQAMEEKLQDTEQKQQQMMAFMARVMQNPDFMRQLISQREMRKELEDAISKKRRRRIDQGHEAGSMGTGSSLEQGPQGVFEPQEPVESVANGVPSDLESSSVEAKGLEVRQGVSSGGSEHLNGRPSGELNDDFWEDLLHEGGLGADAGNAVGQDDMNMDMDPDVSLPQLKQHGPRH

SEQ ID NO: 2825 - protein, 180 aa, Spinacia oleracea
MASSVLSSARVATVSRTPAQASMVAPFTGLKSTVGFPATKKNDDITSLASNGGRVQCMKVWPTQNMKRYETLSYLPPLTTDQLARQVDYLLNNKWVPCLEFETDHGFVYREHHNSPGYYDGRYWTMWKLPMFGCTDPAQVLNELEECKKEYPNAFIRIIGFDSNRQVQCVSFIAYKPAGY

SEQ ID NO: 2826 - protein, 350 aa, Thermococcus kodakaraensis
MAEKMQAIMKTKPAYGAELVEVDVPKPGPGEVLIKVLATSICGTDLHIYEWNEWAQSRIKPPQIMGHEVAGEVVEVGPGVEDLQVGDYISVETHIVCGKCYACKHNRYHVCQNTKIFGVDMDGVFAHYAIVPAKNAWKNPKDMPPEYAALQEPLGNAVDTVLAGPIAGRSTLITGAGPLGLLGIAVAKASGAYPVIVSEPSEFRRKLAKKVGADYVVNPFEEDPVKFVMDITDGAGVEVFLEFSGAPKALEQGLKAVTPGGRVSLLGLFPREVTIDFNNLIIFKALEVHGITGRHLWETWYTVSSLIQSGKLNLDPIITHKYKGFDKFEEAFELMRAGKTGKVVFFPHKG

SEQ ID NO: 2827 - protein, 219 aa, Lactococcus lactis
GGLYAPFVEPELEWDFRLKNVISINTSGHKYGLVYPGVGWVLWRDKKYLPEELIFKVSYLGGELPTMAINFSHSASQLIGQYYNFVRYGFDGYKAIHERTHKVAMFLAKEIEKTGMFEIMNDGSQLPIVCYKLKEDSNRGWNLYDLADRLLMKGWQVPAYPLPKNLENEIIQRLVIRADFGMNMAFNYVQDMQEAIEALNKAHILYHEEPENKTYGFTH

SEQ ID NO: 2828 - protein, 113 aa, Glycine max
MTMGLKFFTCLVLTVCIAASVDAALTCGTVTSSLAPCATYLSKGGAVVPGPCCAGVKKLNDMAQTTPDRQQACKCLKAAAKSINPSLASGLPGKCSVSIPYPISMSTNCDNVK

SEQ ID NO: 2829 - protein, 503 aa, Acinetobacter sp. ADP1
MRYIDPNQPGSKVQFKAQYENFIGGQWVPPVKGEYFGNSSPVDGKVFTQIPRSSVEDIELALDAAHKAKADWNKASPTVRSNVLLKIADRLEENLELLAVAETWENGKPIRETLAADIPLAIDHFRYFAGCIRAQEGGISEIDEDTIAYHFHEPLGVVGQIIPWNFPILMAAWKLAPALAAGNCIVLKPAEQTPSSILVLAELIQDLLPPGVLNIVNGYGAEVGRPLATNPRISKIAFTGSTKVGQMIMQYATENIIPVTLELGGKSPNIFFEDILDKEDDYLEKTLEGFAMFALNQGEVCTCPSRALVQESIADKFLEMAVERVKRIKTGHPLDTETMIGAQASKQQFDKILGCIDTGRNEGAQLLTGGDARHDVDGGFYIEPTIFKGNNSMKIFQEEIFGPVLSVTTFKDFDDAMRIANDTIYGLGAGVWSRSAHTSYRAGRAIEAGRVWTNCYHLYPAHAAFGGYKQSGIGRENHRMMLDHYQQTKNLLVSYSTKPMGFF

SEQ ID NO: 2830 - protein, 163 aa, Lactococcus lactis
GGLYAPFVEPELEWDFRLKNVISINTSGHKYGLVYPGVGWVLWRDKKYLPEELIFKVSYLGGELPTMAINFSHSASQLIGQYYNFVRYGFDGYKAIHERTHKVAMYLAEEIEKTGMFEIMNDGSQLPIVCYKLKENSNLGWNLYDLADRLFNEGMASACLSTS

SEQ ID NO: 2831 - protein, 444 aa, Bradyrhizobium japonicum USDA 110
MTQRFDVILRGGTVVNQDGEGLRDIGIASGRIAEIGALSQASAAEVIDCKGLHILPGVMDTQVHFREPGLDQKEDLETGSRSAVMGGVTAVFEMPNTSPLTVTEASFTDKVKRARHRMHCDFAFFIGGTRENVQDLPVLERAPGCAGVKVFIGSSTGALLVEDDESLRRIFQVIRRRAAFHAEDEYRLNERKPLRIEGDPRSHPVWRDETAALMATQRLVKLAHETGKRIHVLHISTKEEIEFLRDHKDVASCEATPHHLTLVAPECYERLGTLAQMNPPVRGADHRAGIWRGIEQGIIDVLGSDHAPHTLEEKQKTYPASPSGMTGVQTLVPLMLDHVNAGRLSLARFVDLTSAGPARLYNMACKGRIAAGYDADFTVVDLKRSETITNKWVASKAGWTPYDGVRVTGWPVGTFIRGRRVMWQGELVTPSQGEPVRFLETLKA

SEQ ID NO: 2832 - protein, 158 aa, Brucella suis 1330
MKKNNLFRALLISATFALQATAALAVNPDEVLSDPKLEKRAREISAELRCMVCQNESIDDSNAELARDLRILVRERLTKGDTDGQVIDFVVDRYGEFVLLKPRFNAQTALLWGFPVIILLIGVGALLVAFRRRRAAGTAPQPLSESEKAELSRLLDGK

SEQ ID NO: 2833 - protein, 113 aa, Bartonella sp. Tm916nv
ANEACLKMLQEIGSVKRIPEFIARAKDKNDPFRLMGFGHRVYKNYDPRAKIMQQTCHEVLKELNIQDDPLLDIAIELENIALNDEYFVEKRLYPNVDFYSGITLKALGFPTEM

SEQ ID NO: 2834 - protein, 75 aa, Glycine max
MLEFNCMQHILYRQREQLGEGIGYGWIDGLKTHAEKHATDLMLLIAAYMFPFNTPTSREAYYYRMKLERNFRQVH

SEQ ID NO: 2835 - protein, 452 aa, Burkholderia cepacia R1808
MTDTISASQHEDTNLRTDAAWLDAHWMPFTANRQFKSDPRMIVSAKDAYYTDAEGRKIFDGLSGLWCTGLGHGRTEITEAVSRQIAQLDYAPAFQFGHPKSFELANKIKELTPAGLDYVFFTGSGSEAADTSLKMARAYWRAKGKGTKTRLIGREKGYHGVNFGGISVGGIGANRKLFGQGIDADFLPHTQLAENKFSRGMPDNGADLADRLLDLITLHDASNIAAVIVEPFSGSAGVVIPPKGYLKRLRDICTAHDILLIFDEVITGFGRSGAMTGADAFGVTPDIMNFAKQVTNGTQPLGGVIATKEIYDTFMAAGGPDYMLEFPHGYTYSAHPVACAAGVAALDLLVKEDAVARVRDLAPHFEAAVHGLKGQRHIADIRNYGLAAGLTIAALPGEPARRPYEIAMRCWAKGFYVRYGGDTIQLAPPFIAEKREIDNLVNALSDALNEVD

SEQ ID NO: 2836 - protein, 317 aa, Methanosarcina acetivorans C2A
MDFEASARDLTTPVKGAKIVPNMSVDELVREYAGCAFGAGRLAEAVDIYYEMLASEKTTKFFGLAGAMTPAGMRGIIADLIRDGHIDVLVTTGANMVHDTVEALGLHHYKGSDCANDIQLRHECIDRIYDVYLPDQHFTDLEEFLQSVYAGLPQEKLSIRQVLTEIGKNLDDDSSILKTAAEMGVPVYCPALQDSVIGLQAWLYKEGNLLHVDAFADMHEFMEICYEAESAGAMLLGGGVPKNYILQSMLVTPKSFDYAIQLTMDRPETGGLSGATLDEAQSWGKVGEDAKSVTVYADATITLPLIVSAVRTRLSKR

SEQ ID NO: 2837 - protein, 280 aa, Pleurotus djamor
MERYNTRTASNFPGLVFDCAEEAQSGYKHIDTAYNYHTEKYVGNAVRESGIPREELFITTKLPWHHYARVAESFQESLDALGLGYIDLYLIHWPQPILYDPNDPLPKNPDGTPKTTNYPFTKIWADMERLLDTGKVRAIGVSNFSIKNLEILLESAKVVPAVNQVELHPYLAQPELVDYCKQKGIAITAYTPTGYQTVRDDPVIVELASKYRVSPAQVILAWHMSRGVIVTPKSANAERQRENINVSFLHFPINSFDVLFLASTAATCPGACRSSAYISS

SEQ ID NO: 2838 - protein, 306 aa, Pleurotus djamor
MSAYPPIVLNTGARMPALALGGWAGLTEEERTQAKEWFLTALKSGYRHIDTAQIYYTEKSVGNAIRESGIPREELFITTKLPWNHHSRVAESFQKSLENLGTEYIDLYLVHFPQRVFYDETTDFPRNPDGSIKVVNSPTLNDVWADVETLLDTGKVKAIGVSNYSIKTLEELLKTAKVVPAVNQVELHPFLAQSKLLAYCKEKGIAVTAYTPTGYQTVLTDPTIVELAGKYGVSPAQIVLAWHLSRGVAAAPKSANESRQKENLNLPFLQPEDVAKISALDRGQRIANKADERGQVWGLTLEELGW

SEQ ID NO: 2839 - protein, 164 aa, Triticum aestivum
  misc_feature (72)..(72): Xaa can be any naturally occurring amino acid
  misc_feature (107)..(107): Xaa can be any naturally occurring amino acid
  misc_feature (110)..(110): Xaa can be any naturally occurring amino acid
  misc_feature (117)..(117): Xaa can be any naturally occurring amino acid
  misc_feature (124)..(124): Xaa can be any naturally occurring amino acid
APVRSSICYIDGDEGILRYRGYPIEEVAESSSFVEVAYLLMYGNLPTQSQLAGWEFAISQHSAVPQGLLGYXINQMPHDAHPMGVLANAMSTLSCPSNPRCKPCSLXGQXLFNPKQXRDNKLYXSLGKAPAITTAAYLRQQEGCLLPFKLPNPEFLMLTGVTRI

SEQ ID NO: 2840 - protein, 496 aa, Thermus thermophilus HB27
MPLITTETGKKMHVLEDGRKLITVIPGDGVGPECVEATLKVLEAAKAPLAYEVREAGASVFRRGIASGVPQETIESIRKTRVVLKGPLETPVGYGEKSANVTLRKLFETYANVRPVREFPNVPTPYAGRGIDLVVVRENVEDLYAGIEHMQTPSVAQTLKLISWKGSEKIVRFAFELARAEGRKKVHCATKSNIMKLAEGTLKRAFEQVAQEYPDIEAVHIIVDNAAHQLVKRPEQFEVIVTTNMNGDILSDLTSGLIGGLGFAPSANIGNEVAIFEAVHGSAPKYAGKNVINPTAVLLSAVMMLRYLEEFATADLIENALLYTLEEGRVLTGDVVGYDRGAKTTEYTEAIIQNLGKTPRKTQVRGYKPFRLPQVDGAIAPIVPRSRRVVGVDVFVETNLLPEALGKALEDLAAGTPFRLKMISNRGTQVYPPTGGLTDLVDHYRCRFLYTGEGEAKDPEILDLVSRVASRFRWMHLEKLQEFDGEPGFTKAQGED

SEQ ID NO: 2841 - protein, 504 aa, Cryptococcus neoformans var. grubii
MDAKKATIAIIALAAAATAYKVMSTTQEKKNTEGVCPATGQKRAGSTGCPFSSGLPLPDPGHRCDPNSIQEEYKVPEVPPLTEAQKDIIKSTAPILEQHGVTITTHFYKNMIRAHPELRDVFSESAQKLGHQPAALAAAVYAYACNIHDLTPILPVVERIAHKHTSLHITANQYGIVGKHLIQAIVDILGDAVTPEVGDAWYNGYWNLAHVFIKRERQLYDSAIEAGGWEGWRQFKVAKRVKESNEITSFYLKPVEGSGAPLPKFRPGQYTAVQIDIPGLGYKQARQYSLSDAPNGEYFRISVKREDGVPVPTLSNPEVPFHPGWMSNVLHKDYQEGSIVNVASPFGDFYYAPSDSSPTAPLVLLSAGVGQTPVMAMLNAQLAKNNEPNSPIKPITYVTVARSPKVRAFKDHVKKLSDVHENVKSRIFYSRPTDDVVEGQDYDFKGRMDLEKIKEDLYLGDKTAEYYICGPSKFMLNTRDKLQSLGVDPSRIHYELFEAGNLSA

SEQ ID NO: 2842 - protein, 461 aa, Rubrobacter xylanophilus DSM 9941
MVDPATGEEVDSVPVCGEAEVDAAVRGAAGAFPGWSGTPASRRGELLARAAEAVLGARDELAGLLTAEQGKPLREARLEIRRFVHTLEHYAGLAKNIRGGYVPDLDEGAYGLILRRPVGVVGAIVPWNFPTTLLANKLGPALVAGNVVVAKPAETTPLTTLRIAEIMHGAGLPAGVFNVVTGDGPTTGQALAGHPSVRKVAFTGSTPVGKKLAALAAGDLKRVTLELGGSDPMIVCDDADLDRAASAASVGRFFNCGQACLAVKRLYVFESVAEEFVEKLVGKAKRLRVGPGRAEGTIIGPLHTPEGRELLEGQVRDAVESGARVLAGGRRPEGEVFERGNFYEPTLLLEPSHESRVATEEVFGPALPIWRVGDLEEAIERANGSIYGLGSSVWTADLDRATEAAERIEAGYTWINSPQVIYDELPFGGWKQSGYGKEHGMEAIEYYTETKSVVVRRAYQG

SEQ ID NO: 2843 - protein, 116 aa, Schizosaccharomyces pombe
MSADGLDYTNLLPIANVARIMKSALPENAKISKEAKDCVQDCVSEFISFVTGEASEQCTQEKRKTITGEDVLLALNTLGFENYAEVLKISLTKYREQQARSASMKETKQSRSEEPQ

SEQ ID NO: 2844 - protein, 249 aa, Glycine max
MPTHHASAAIFGIIGNMISVMVYLAPVPTFYQIYKKKCTDGFHSLPYLLSLMSSMLWLYYAFLKIHDGVVPLITINSIGCVIELIYILTYIKYAHKDARNLTYTLFAAMNIAFLTLVLSSHFALHGSHRVKVIGWICDAVSLSVFASPLSIMAKVIRTKSVQFMPFYLSFFLTLNAITWFVYGLSIQDKCIYVPNVGGFGLGLVQMVLYGIYRNGGESEKEQALAEGAINIVVVNPLGPAEVFNRRGSG

SEQ ID NO: 2845 - protein, 341 aa, Oryza glaberrima
MDHRELWPYGLRVLVIDDDCSYLSVMEDLLLKCSYKVTTYKNVREAVPFILDNPQIVDLVISDAFFPTEDGLLILQEVTSKFGIPTVIMASSGDTNTVMKYVANGASDFLLKPVRIEELSNIWQHIFRKQMQDHKNNNMVGNLEKPGHPPSILAMARATPATTKSTATEALLAPLENEVRDDMVNYNGEITDIRDLRKSRLTWTTQLHRQFIAAVNHLGEDKAVPKKILGIMKVKHLTREQVASHLQKYRMQLKKSIPTTSKHGATLSSTALDKTQDHPSRSQYFNQDGCMEIMDYSLPRDDLSSGSECMLEEQNDYSSEGFQDFRWDSDKQEYGPCFWNF

SEQ ID NO: 2846 - protein, 71 aa, Triticum aestivum
MASRSCTFLEILLAIILPPLGVFLHYGCCSMEFCICLLLTILGYIPGIIYAVYVLVALGSEERDRDYDTLA

SEQ ID NO: 2847 - protein, 346 aa, Rhodococcus ruber
MKALQYTEIGSEPVVVDVPTPAPGPGEILLKVTAAGLCHSDIFVMDMPAEQYIYGLPLTLGHEGVGTVAELGAGVTGFETGDAVAVYGPWGCGACHACARGRENYCTRAAELGITPPGLGSPGSMAEYMIVDSARHLVPIGDLDPVAAVPLTDAGLTPYHAISRVLPLLGPGSTAVVIGVGGLGHVGIQILRAVSAARVIAVDLDDDRLALAREVGADAAVKSGAGAADAIRELTGGEGATAVFDFVGAQSTIDTAQQVVAIDGHISVVGIHAGAHAKVGFFMIPFGASVVTPYWGTRSELMDVVDLARAGRLDIHTETFTLDEGPTAYRRLREGSIRGRGVVVPG

SEQ ID NO: 2848 - protein, 74 aa, Triticum aestivum
MAFVPICVQCGTRSNPCRCKVVGPTLGFVALVVAGVVEWPLGAAVYLFRHRKGRRIMGHPATVVYPRVTGAIPI

SEQ ID NO: 2849 - protein, 359 aa, Glycine max
MLTCIARPKKLVGDSAASEDPSSRGVKSLTGQLKEMALKASGAYKQCGGPCATAPPSRVSRGGGTELDSESSSSSSSRRRWGKELEARLKGISSGEGTPSSSGRRVVLLLEDDEEPKEWVAQVEPGVLITFVSLPRGGNHLKRIRFSREIFNKWQAQRWWAENYDKVMELYNVQRLNRQAFPLPTPPRSEDESSKRESIEDFPVTPPLSRERPPCNLFRAGGGGMGMGYSSSDSFDHHSMQSSRHYYDPNDVNSTPKASSTISAAAKTDISSSMDVDASIRSSSSREADRSGDLSISNASDLDTEWVEQDEPGVYITIRALPGGKKELRRVRFSREKFGEMHARLWWEENRARIHEQYL

SEQ ID NO: 2850 - protein, 112 aa, Bartonella sp. Tm1794nv
NEACLKMLQEMGSVKRIPEFIARAKDKNDPFRLMGFGHRVYKNYDPRAKIMQQTCHEVLKELNIQDDPLLDIAIELENIALNDEYFVEKRLYPNVDFYSGITLKALGFPTEM

SEQ ID NO: 2851 - protein, 117 aa, Phaseolus vulgaris
MATLNSACVVAVLCLVVLTAPTAHAAISCGQVTSSLASCIPFLTKGGAVPASCCSGVRSLNAAAKTTPDRQVCNCLKSAAGAIPGFNANNAGILPGKCGVSIHYNISTSTNCATIKF

SEQ ID NO: 2852 - protein, 420 aa, Schizosaccharomyces pombe
MSGYSPLSSGPADVHIGKAGFFSSVINLANTILGAGILSLPNAFTKTGLLFGCLTIVFSAFASFLGLYFVSQCAARLPRGKASFAAVAKHTFPSLAVVFDASIAVKCFGVAVSYLVIVGDLMPQIAPSLGLSSPMFLRRQTWIVFALFVLTPLSFLKRLDSLRHTSVISLIALCYLVFIVLYHFIIGDTVKGEIRYFVPESGFGYLSVLPVFVFGFTCHQNAFSVINEVRNFSQGFVNFTMFTAIISSTLLYLLVAITGYLSFGSLASGNIIAMYDNTSIWIIGGKLAIVVLVLFSYPLQCHPCRNSVYQAIRRSYSAHDMSDGYHAVITLCILLFTHSLALLLSSLEMVLAFVGSTGSTFISFILPGSLYYFFSHKVASPGNSSPLQLRISRAFAAGLAIYGTVVMILCLNINIAKLSH

SEQ ID NO: 2853 - protein, 169 aa, Synechocystis sp. PCC 6803
MTAQANNTIYGFSANALDGSPVALRDFEGKVLLIVNTASQCGFTPQYQGLQALYNRFGDRGFTVLGFPCNQFGQQEPGGSGEIKNFCETRYGVTFPLFEKVEVNGPNAHPLFKFLTAASPGMAIPFLGGAEDIKWNFTKFLVDRQGKVVKRYGSIAKPDEIAADIEKLL

SEQ ID NO: 2854 - protein, 456 aa, Oryza sativa (japonica cultivar-group)
MTPPASTGKCTGAAAGEVEEPLLPEFSGGGHGASVSGAVFNVSTSIIGAGIMSIPAAMRVLGVLPALLLIATVAALSDASVEFMLRYTGWDSGPPSYAGIMGDAFGRAGAKALNVCIAFTTTGTLVVYLIIIGDVLSGSAGAGDEHAGVLQELFGAQWWTARELVILVTAIVVLLPLVLRRRVDSLKFTSAVSILLAVVFMFISLGIAVYALFTGTAKMPRMLPDFSRLSSPFELFTAVPIVVVAFTFHFNVHPIRTELSKTSDMKAAVRISLVLCAAIYAAVGFFGFLLFGDATMADVLANFDRSSGAGVPQALNDAARLSYALHLVLVFPLLHFSLRVNVDELLFPGRRPLATDTRRFVALTAVLMAVLYALAIAIPSIWTLFEYSGSTFAVCISLIFPGAIVLRDAHGIAKTKDKALAATMIALAVITSSIAIASNVMSSISGKVEGGHAAGR

SEQ ID NO: 2855 - protein, 423 aa, Lactococcus lactis subsp. lactis
MTLLIKNGRLVDPKSNRDEVLDILIENDKIVKIGLNLSVENAEIVDARGLVVAPGLIDVHVHFREPGQTHKETIHSGAKSAAAGGFTRVVMMANTKPILSTPKVLTETLEIADKEDIKIDAVGSITQDFDGEHLTDFDELIKAGAIGFSDDGIPLTDAGVLRKALQKAKLTDSLISIHEEDPNLIGTLGVNDGEVAHKCGFTGAPTVSEYSMMARDSMIAYETGARLHIQHLSAGESVEVVRFAKNLGAKITAEVTPQHFSITEQMIFEQGTNAKLNPPLRSTTDIGKIIEGLKDGTIDVIATDHAPHTREEKNVSLDKAPSGMIGLETSLQLGLTNLVAKGHLTLSELLTKMTVNPAKLYNFDAGYLAENGPADLVIFDAENDYQVGETFDSKATNSPFIKQKVQGQVKYTICDGKIVYQAK

SEQ ID NO: 2856 - protein, 452 aa, Glycine max
MEECHTVFGKYEMGRLLGKGTFAKVYYGKQISTGESVAIKVINKEQVRKEGMMEQIKREISVMRLVRHPNVVEIKEVMATKTKIFFVMEYVRGGELFAKISKGKLKEDLARKYFQQLISAVDYCHSRGVSHRDLKPENLLLDEDENLKISDFGLSALPEQLRYDGLLHTQCGTPAYVAPEVLRKKGYDGSKADIWSCGVVLYVLLAGFLPFQHENLMTMYNKVLRAEFEFPPWFSPDSKRLISKILVADPSKRTAISAIARVSWFRKGFSSLSAPDLCQLEKQEDAVTVTVTEEENNSKVPKFFNAFEFISSMSSGFDLSGLFESKRKTATVFTSKCSAAAIVAKIAAAARGLSFRVAEVKDFKIRLQGAAEGRKGRLAVTAEVFEVAPEVAVVEFSKSAGDTLEYAKFCEEDVRPALKDIVWTWQGDATCAANFPACHGEECQKQVVVSTI

SEQ ID NO: 2857 - protein, 201 aa, Aspergillus awamori
MNPEYDYLFKLLLIGDSGVGKSCLLLRFADDTYTESYISTIGVDFKIRTIELDGKTMKLQIWDTAGQERFRTITSSYYRGAHGICVVYDVTDMDSFNNVKQWLQEIDRYATEGVNKLLVGNKSDMEDKKVVEYTVAKEFADSLGIPFLETSAKNASNVEQAFLTMARQIKERMGTATVNNKPTVQVGQGQGVQSGSAGGCC

SEQ ID NO: 2858 - protein, 316 aa, Petunia x hybrida
MEQENHNNNNCTNDKESACISSVLPGWFSEISPLWPGEAHSLKVEKILFQGKSDYQNVMVFQSSTYGKVLVLDGVIQLTERDECAYQEMITHLPLCSIPNPKKVLVIGGGDGGVLREVSRHSSIEQIDICEIDKMVVEVSKQFFPDVAVGYEDPRVNLHIGDGVAFLKAVPAGTYDAVIVDSSDPIGPAQELFEKPFFETVARALRPGGVVSTQAESIWLHMDIIENIVTNCRQIFKGSVNYAWTTVPTYPSGMIGFMLCSTEGLEVDFKNPVNLIENDEIHSKTLPPLKFYNFEIHKASFALPSFAKRVIESKGN

SEQ ID NO: 2859 - protein, 180 aa, Mesembryanthemum crystallinum
MASMMSNAAVVGRTTPAQASMVAPFTGLKSVSAFPVTKKSNDITSIASNGGRVQCMQVWPPLGKKKFETLSYLPPLSEESLMKEVQYLLNNGWVPCLEFEPTHGFVYREHGNTPGYYDGRYWTMWKLPMFGCTDPSQVVAELEEAKKAYPEAFIRIIGFDNVRQVQCISFIAYKPASYDA

SEQ ID NO: 2860 - protein, 193 aa, Ustilago maydis 521
MQTIKCVVVGDGAVGKTCLLISYTTNAFPGEYIPTVFDNYSANVMVDGKPVSLGLWDTAGQEDYDRLRPLSYPQTDVFLVCFSLVSPPSFENVRTKWWPEVSHHAPNIPTILVGTKLDLREDPETIAKLRDRRMQPITYAQGNQMARDIHATKYLECSALTQKGLKGVFDEAIRSVLAPAPVKSKKKNNCMIL

SEQ ID NO: 2861 - protein, 553 aa, Zea mays
  misc_feature (16)..(16): Xaa can be any naturally occurring amino acid
  misc_feature (55)..(55): Xaa can be any naturally occurring amino acid
  misc_feature (84)..(84): Xaa can be any naturally occurring amino acid
MARRAASSLVSRCLPXRGPLAGAAAPLPPSALRRTVPADGMHRLLPGVLQRFSTXAAAVEEPITPSVHVNYTKLLINGNFVDSXASGKTFPTLDPRTGEVIAHVAEGDAEDINRAVAAARKAFDEGPWPKMTAYERSRILLRFADLIEKHNDELAALETWDNGKPYEQAAQIEVPMVARLMRYYAGWADKIHGLIVPADGPHHVQILHEPIGVAGQIIPWNFPLLMFAWKVGPALACGNTLVLKTAEQTPLSALYISKLLHEAGLPEGVVNVVSGFGPTAGAALASHMDVDKIAFTGSTDTGKIILELAAKSNLKTVTLELGGKSPFIIMDDADVDHAVELAHFALFFNQGQCCCAGSRTFVHERVYDEFVEKAKARALKRVVGDPFRKGVEQGPQIDDEQFNKILRYIRYGVDGGATLVTGGDRLGDKGFYIQPTIFSDVQDGMKIAQEEIFGPVQSILKFKDLNEVIKRANASQYGLAAGVFTNSLDTANTLTRALRAGTVWVNCFDVFDAAIPFGGYKMSGIGREKGVDSLKNYLQVKAVVTPIKNAAWL

SEQ ID NO: 2862 - protein, 183 aa, Mesembryanthemum crystallinum
MASSLMSNAATTMAAATTTAQANMVAPFNGLKSVSAFPVTRKNNDITSVASNGGRVQCMQVWPPLGKKKFETLSYLPPLSEESLIKEVQYLLNNGWVPCLEFEPTHGFVYREHGNTPGYYDGRYWTMWKLPMFGCTDPSQVVAELEEAKKAYPEAFIRIIGFDNVRQVQCISFIAYKPASYDA

SEQ ID NO: 2863 - protein, 293 aa, Glycine max
  misc_feature (52)..(52): Xaa can be any naturally occurring amino acid
  misc_feature (65)..(65): Xaa can be any naturally occurring amino acid
  misc_feature (71)..(71): Xaa can be any naturally occurring amino acid
  misc_feature (102)..(102): Xaa can be any naturally occurring amino acid
  misc_feature (165)..(165): Xaa can be any naturally occurring amino acid
MVLIRLWFVLLGFFGGFGSAAEQRRWTLNDFDIEKPLGRGKFGHVYLAREKXDNHIVALKVLFKXQLQQSXVVHQLRREVEIQSHLRHPHILRLDGYFYDQXYAPKGDLYKELQKCKYFSERRVTTYVASLARALIYCHGKHVIHRDIKPENLLIEWIYVIFTNXKKKKKNFGWSVHTFNRRRTMCGTLDYLPPEMVESVEHDASVDIWSLGVLCYEFLYGVPPFEAKEHSDTYRRIIQVDLKFPPKPIVSSAAKDLISQMLVKDSSQRLPLHKLLEHPWIVQNAEPSGVYRS

SEQ ID NO: 2864 - protein, 239 aa, Triticum aestivum
YNGVKVTTEDGTSYFADACIISVPLGVLKANVIKFEPELPSWKSSAIADLGVGVENKIAMHFDRVFWPNVEVLGMVGPTPKACGYFLNLHKATGNPVLVYMAAGRFAQEVEKLSDKEAVSLVVSHLKKMLPDASEPTQYLVSRWGSDPNSLGSYSCDLVGKPADVCARFSAPVDNLYFAGEAASAEHSGSVHGAYSSGIAAAEECRKRLLTLKGIPDLVQVAAWEEMAGAVAPLQICRT

SEQ ID NO: 2865 - protein, 273 aa, Ustilago maydis 521
MSSNDPAAPPSYTAPAPKGYQAVPQHDSPSYGAAETSTTPRNVDEEGDPDDFKFGVTVEQSSPEIRAMFLRKVYTVLFFQILGTTAIAAIMTTRGIAGWVQQNQWAFIVPLVGSLVTMGFLYFKRHSHPTNMILLGLFTVLESLSLGTVITYVDQKIVLQAMIITAFTFFGLTLFTLQSKWDFGSMGGWLFGALMVLVGVGFVGVFLPYNQTFDLIMAVAGCVVFSLYIVYDTWLIQRRLSAEEWVLANISLYLDIVNLFINILRILNNQSRD

SEQ ID NO: 2866 - protein, 237 aa, Saururus chinensis
MGRGRVQLKRIENKINRQVTFSKRRTGLLKKAHEISVLCDAEVALIVFSTKGKLYDYSTNAGMARILERYERYCYAEREVAVTSPDSEGSWWLEYGKLKARIEAQQRIQRQLMGEDLDALTPKELQQLENQLESALKHVKSRKNQVIYDSMVELRRKEKLLRDENTMMEKKIQEKKKERVQQAQWEQQIQSQNSPSFLPTLNIGYHQGTATETGEKEEAHPGHNTVMLAWLLRSSNN

SEQ ID NO: 2867 - protein, 490 aa, Arabidopsis thaliana
MESRKNSDRQMRRANCFSAGERMKTRSPSVIVIGGGFGGISAARTLQDASFQVMVLESRDRIGGRVHTDYSFGFPVDLGASWLHGVCKENPLAPVIGRLGLPLYRTSGDNSVLYDHDLESYALFDMDGNQVPQELVTQIGVTFERILEEINKVRDEQDADISISQAFSIVFSRKPELRLEGLAHNVLQWYVCRMEGWFAADAETISAKCWDQEELLPGGHGLMVRGYRPVINTLAKGLDIRVGHRVTKIVRRYNGVKVTTENGQTFVADAAVIAVPLGVLKSGTIKFEPKLPEWKQEAINDLGVGIENKIILHFEKVFWPKVEFLGVVAETSYGCSYFLNLHKATGHPVLVYMPAGQLAKDIEKMSDEAAANFAVLQLQRILPDALPPVQYLVSRWGSDVNSMGSYSYDIVGKPHDLYERLRVPVDNLFFAGEATSSSFPGSVHGAYSTGLMAAEDCRMRVLERYGELDLFQPVMGEEGPASVPLLISRL

SEQ ID NO: 2868 - protein, 196 aa, Triticum aestivum
AGRLREDVARRYFRQLISAVDFCHGRGVYHRDLKPENLLLDEAGNLKVADFGLSALAGHARPDGLLHTACGTPAYVAPEVLGGNGYDGAKADIWSCGVILYVLLVGALPFQDENLMSMYRKMQRGGFLCPSWVSKDARKLIGRLLDPNPSSRITIASLVESPWFKKTSPIPSPLLEPVPPSTPPLLPLSVTVAIRP

SEQ ID NO: 2869 - protein, 301 aa, Asarum caudigerum
AGLSSPPRERKRVRENLIFSLAFKFARFQNFRFSFSFAGGFIFFEFSSLFFFGLQEMGRGRVQLKRIENKINRQVTFSKRRTGLLKKAHEISVLCDADVALIVFSAKGKLYEYATNSSMETILERYERYSFAERELVADPESEGGWCLEYGKLKARVDALQKSHKHIMGEDLDSLSIKELQHLEQQLDVALKHIRSRKNQVMLDTISELQRKEKMLLEQNKALQKTMREKENAMVRQAQWEQDNQPQASRPSFMLSRPLPTLHIGSNYHQTRNTETEKQGDRPHSRSNSGIPAWMLSHMND

SEQ ID NO: 2870 - protein, 193 aa, Zea mays
MASPAGGESPAKPVLLHGDLDLWILEARLLPNMDMFSEHVRRCFAACRPPSSCGTKHPPPAAAGRRHHHHHRNIITSDPYVTLSVSGAVVARTAVIPNSQDPVWEERLAVPLAHRAADLEFQVKDNDTFGAQLIGTVAVPADRVVSGDEVEDWFPVIGTNGKPYKPDTALRLRFQFQPIADNPAYRHGIPGDP

SEQ ID NO: 2871 - protein, 284 aa, Arabidopsis thaliana
MALADSSCAGLETTESRLSCFFNKAIVNVGGDLVKLVPGRVSTEVDARLAYDTNGIIRKVHDLLRLYNEIDVPHDRLLFKIPATWQGIEAARLLESEGIQTHMTFVYSFAQAAAASQAGASVIQIFVGRLRDWARNHSGDTEIESAIKSGEDPGLALVKRSYNYIHKYGYKSKLMAAAVRNKQDLFSLLGVDYVIAPLKVLQSLKDSPAIPDDEKYSFVRKLTPETATHYHFTNKELVKWDQLSLASSMGPASVELLSAGVEGYANQAKRVEELFGKIWPPPNV

SEQ ID NO: 2872 - protein, 160 aa, Medicago sativa
MDFRLMGLMLQCYTALHQMMDLSDENVEKSSSHNAPTRSYVRDAKAMAATPADVKENPNSYVFVIDMPGLKSGDIKVQVEDDNVLVISGERKREEEKEGGAKYLRMERRVGKFMRKFVLPENPNTDAVSPVCQDGVLTVTVQKLPPPRPKKPRTIEVQIA

SEQ ID NO: 2873 - protein, 250 aa, Zea mays
MTSASELFSTRRSRPGRSDPALESDTSSYRHHSHHHHRRHGVHHHNQRHDSDGCDPLRRPTPRIRRFFHHPIQERSRPIRDVQGTSQYLNTDSTDTETQSSSFVNLNGSERLPGAVLLARDRLFERLRGVSLSSNSRSNRVSLDDQRESSFHSIDGDPIFQLAGLQVTYECNKKPQGLTQDAINCLHRQTFSSAEVKSEMRDCSICLESFTKGDMLISLPCTHSFHSSCLNPWLRACGDCPCCRRAIAKE

SEQ ID NO: 2874 - protein, 247 aa, Chlamydomonas reinhardtii
MAEANSRELALYSAKIAEQSERYQDMVEEMKKVAVLANEQELSVEERNLLSVSYKNLVGSRRASWRILQSIEQSEQAKGNEKRVGMIKRYRAVVEGELDKICHEILDLLDKYLVPSASTTEAAVFYLKMKADYHRYLSEYKTDEAKAAAAELTLAAYKVAQEKADELPTTNPIRLGLALNFSVFYYEVMNQPALACSLAKKAFDEAISDLDSLGEDSYKDSALIMQLLRDNLTLWTSEMQDDDKNRA

SEQ ID NO: 2875 - protein, 347 aa, Thermococcus kodakaraensis
MYRVAVIPGDGIGPEVIDGAVRVLKAVTGRVRFEYYEGGVDVFQECGSPIREEDLEEIRRSDAVLFGATTTPFDLPGYRSLILTLRKELGLYANLRIIPDLRTGREIVIVRENSEGLYFGIGAVVNGRAVDVRLITREGAERIARFAVEQAKARGSFITFVHKANVLTGDKFFRRIVREVAGEEGVEVRDAIIDSFTIKLVRNPWEHGVILSENLFGDILSDLATVHAGSIGIVPSGNYGDGIALFEPVHGSAPDIAGKGIANPIGAILSGAMLLDYLGLDGSLIRAAVRGYVVNGELTPDMGGRARTEDVVRGIIGEIEDLLSMDEVWRDEIRLSRLESDISRMAG

SEQ ID NO: 2876 - protein, 221 aa, Arabidopsis thaliana
MDSLATDPAFIDSDVYLRLGLIIEGKRLKKPPTVLSRLSSSLERSLLLNHDDKILLGSPDSVTVFDGRSPPEISIAHYLDRIFKYSCCSPSCFVIAHIYIDHFLHKTRALLKPLNVHRLIITTVMLAAKVFDDRYFNNAYYARVGGVTTRELNRLEMELLFTLDFKLQVDPQTFHTHCCQLEKQNSDGFQIEWPIKEACRANKETWQKRTPDSLCSQTTAR

SEQ ID NO: 2877 - protein, 462 aa, Glycine max
MTSRSGQGSGGGGSSRTRVGKYELGRTLGEGNFAKVKFARHVETRENVAIKILDKEKLLKHKMIAQIKREISTMKLIRHPNVIRMYEVMASKTKIYIVLEFVTGGELFDKIARSGRLKEDEARKYFQQLICAVDYCHSRGVFHRDLKPENLLLDANGVLKVSDFGLSALPQQVREDGLLHTTCGTPNYVAPEVINNKCYGGAKADLWSCGVILFVLMAGYLPFEETNLSALYKKIFKAEFTCPPWFSSSAKKLINKILDPNPATRITFAEVIENDWFKKGYKPPVFEQANVSLDDLDSIFSDSTDSQNLVVERREEGPMAPVAPVTMNAFELISKSQGLNLSSLFEKQMGLVKRETRFTSKCSADEIISKIEKAAGPLGFDVKKNNCKLKIQGEKTGRKGHLSVATEILEVAPSLYMVELRKSEGDTLEFHKFYKNLATGLKDIVWKAEPIDEEKDGANPSK

SEQ ID NO: 2878 - protein, 214 aa, Clostridium tetani
MKFFIDTANVEEIKKVAKWGVLDGVTTNPTLIAREGRDLKEVIEEICSIVDGPISAEVISLESEKMVEEAKELIKIHKNIVIKVPMCEEGLKAVSELTKLGIKTNVTLIFSAQQALLAAKAGATYVSPFLGRIDDIGSFGIQLVEDIVTIFTNFGIESEIICASIRTPIHVLECARVGGDIATVPYKVFAQMLKHPLTDRGIEQFLEDYKSMNK

SEQ ID NO: 2879 - protein, 1142 aa, Saccharomyces cerevisiae
MAINGNSIPAIKDNTIGPWKLGETLGLGSTGKVQLARNGSTGQEAAVKVISKAVFNTGNVSGTSIVGSTTPDALPYGIEREIIIMKLLNHPNVLRLYDVWETNTDLYLVLEYAEKGELFNLLVERGPLPEHEAIRFFRQIIIGVSYCHALGIVHRDLKPENLLLDHKYNIKIADFGMAALETEGKLLETSCGSPHYAAPEIVSGIPYQGFASDVWSCGVILFALLTGRLPFDEEDGNIRTLLLKVQKGEFEMPSDDEISREAQDLIRKILTVDPERRIKTRDILKHPLLQKYPSIRDSKSIRGLPREDTYLTPLSESNSSIDATILQNLVILWHGRDPEGIKEKLREPGANAEKTLYALLYRFKCDTQKELIKQQQVKKRQSISSVSVSPSKKVSTTPQRRRNRESLISVTSSRKKPISFNKFTASSASSSNLTTPGSSKRLSKNFSSKKKLSTIVNQSSPTPASRNKRASVINVEKNQKRASIFSTTKKNKRSSRSIKRMSLIPSMKRESVTTKLMSTYAKLAEDDDWEYIEKETKRTSSNFATLIDEIFEYEKYEQIRKEKEELERKVREAKAREELERRRRKQEEKERARKLLEKEDLKRKQEELKKQIEIDISDLEQELSKHKEEKLDGNIRSISAPMENEEKNINHLEVDIDNILRRRNFSLQTRPVSRLDPGIMFSSPTEEVSPVEPKRTENERLTTEKKILETIRRSKFLGSSFNIDKELKLSKMEYPSIIAPQRLSEERVVSDSNDGYESLILPKDGNGVSQLKDSTATTAPVSDGRLRKISEIRVPQFTRKSRHFSESNKRLSVLSMYSTKESFTNLVDILKNGNLDVNNQQSQRIPTPRSADDSEFLFETVNEEAEYTGNSSNDERLYDVGDSTIKDKSALKLNFADRFNGSNEAKQTDNLHLPILPPLNGDNELRKQNSQEGDQAHPKIKSMIPESGSSSHTEKEEENEEKEEKKPEQHKQEEDQEKREKVVDDMEPPLNKSVQKIREKNAGSQAKDHSKDHLKEHKQDKNTAIGNGSFFRKFSKSSDKTMELYAKISAKQLFNGLEKLLRGWTQYGLKNIKSHPNNLTLTGKLSSDNIFSLRSTLFEVNIYPRGKMSVVQFKKVSGSFKAVKKLVNEVENVLNKEGVLQK

SEQ ID NO: 2880 - protein, 160 aa, Zea mays
MSDSEEHHFESNADAGASKTYPQQAGTVRKNGFIVIKNRPCKVVEVSTSKTGKHGHAKCHFVAIDIFNGKKLEDIVPSSHNCDIPHVNRTEYQLIDISEDGFVSLLTSDGNTKDDLRLPTDETLVAQIKEGFESGKDLVVTVQSAMGEEQICALKDVGPK

SEQ ID NO: 2881 - protein, 161 aa, Bacillus sp. KSM-K16
MSVYDFSVKTSNGQDVSLSAYKGNVLLIVNTATKCGFASQFAGLEKLYNDYKEKGFYVLGFPSNQFLNQEPVADEDMEQVCKINFGVTFPLFAKTDVKGKHANPLFNYLKAAKKGMLSEEIKWNFTKFLVNRKGEVIKRYAPATKPETIEADVIEELKADA

SEQ ID NO: 2882 - protein, 491 aa, Azotobacter vinelandii
MGLFSVVVLGKEKQPTALVVGGGLAGLAAAWELQRDGWQVTLLEARSGVGGRSGLAGGEWIGSAKAQPLLNDYLARLKLKTQPAPEAVRGTGYLIDGAYFSAAELASRQPATAEGLKRYEQAIGALAASIKDPLDPASDRKLFALDQGNAARWLDELNLPITARQLVNQRIRSHYDEPSRLSLLYLAQQTRVYHGIDAGELRVARLPGGSQVLAQALAKELKTVKTGVRVSAISQDRAGVTAKVGDVGYSADYLVLAVPLRALGQIQFSPALPERHRGALQSTNYGWRDQLLLKFKSPVWESKARLSGNIYSNQGLGMLWVEPATKGGANVLINLSGDNARLLKAFGDRQVADQLLIRLHEHYPKARGAFAGYEIRRYSGDNGLGGAYLAYGPGQISRYWRLWEQPLERVAFAGEHTDPLYPGTLEGALRSGRRAAEQLRELHAGRPVPAPRITRLDQPAPPPAGAALVAGQPAENERGTGFFSRLTRLFR

SEQ ID NO: 2883 - protein, 448 aa, Zea mays
  misc_feature (401)..(401): Xaa can be any naturally occurring amino acid
MSAAATKVKRRVGKYELGRTIGEGTFAKVRFAKNTETGEPVAVKILDKEKVLRHKMAEQIKREISTMKLIKHPNVVRIYEVMGSKTKVYIVLEYVTGGELFDTIANQGRMREGEARSYFQQLINAVDYCHSRGVYHRDLKPENLLLDSYGNLNVSDFGLSALSQQIKDDGLLHTTCGTPNYVAPEVLEDQGYDGAMADLWSCGVILFVLLAGYLPFEDSNLMTLYKKISNAEYTFPPWTSFPAKRLLTRILDPNPMTENSCDFRITIPEILEDEWFKKGYKRPEFDEKYDTPLDDVDAVFNDSEEHHVTEKKEEEPVALNAFELISRSAGLNLGNLFDSEQEFKRETRFTSKCPPKEIIRKIEEAAKPLGFGVQKKNYKLRLEKVKAGRKGNLNVATEILXVAPSLHMVQVRKAKGDTLEFQKFYKNLSKTLKDVVWKSEDLQMRAAS

SEQ ID NO: 2884 - protein, 468 aa, Azotobacter vinelandii
MSLNADWMQRDLAVLWHPCTQMKDHERLPLIPIRRGEGVWLEDFDGKRYLDAVGSWWVNVFGHANPRINARIREQLESLEHVMLAGFSHQPAIELSERLVAITPAGLSRVFYADNGSSGIEVALKMSFHYWRNCGRTGKKRFVTLTNSYHGETVAAMSVGDVALFTDTYKALLLDTIKVPSPDCYLRPEGMSWEAHSRAMFAHMERTLAEHRDEIAAVIVEPLIQGAGGMRMYHPVYLELLREACDRYEVHLIHDEIAVGFGRTGTLFACEQAGIVPDFLVLSKALTGGYLPMAAVLTTDTVYRAFYDDYASLRAFLHSHTYTGNPLACAAALATLDIFEQDNVIERNKALAARMARATEHLKDHPHVAEVRQTGMALAIEMVAEKAGKVAYPWQERRGLKVYEHALSRGALLRPLGSVVYFLPPYVITPEQIDFLAEVASEGIDLATRDAVGVALPTGGPQTFHDPG

SEQ ID NO: 2885 - protein, 483 aa, Bacillus cereus ATCC 14579
MDKKATFVSIDKKAMYINGEWITLQEQIEVNNPATKEIFATVPKGGVTEAKQAVDAAHEAFKTWSKLTAADRATKLKKWFTLIDENKEEIAAIMTKEQGKPFAEALGEVNYANSFVEWYAEEGKRVYGEMIPAAHPNKRILVMKQPVGVMAAITPWNFPAAMITRKVAPALAAGCTAVVKPASQTPLTALKLAELAHEADIPKGVINIITGSAKAIADTWMEDGRVRKVSFTGSTEIGKELMASAAQTMKKVSLELGGHAPFIVMNDADLDKAVEAVIGSKFRNAGQTCICTNRVFVQEEVYEVFVEKFQKAVGQLKVGDGFGDGTTVGPLIDENAVSKVQEHIEDAIQKGGTVLYGGQKVAELEGHFIQPTVIGLANDTMLCMNEETFGPVAPVAKFKTVDEVIERANNTPYGLAAYIFTKDISQAFQISEALEYGIIGLNDGLPSVAQAPFGGFKESGIGREGGHFGIEEYLEIKYISLGL

SEQ ID NO: 2886 - protein, 250 aa, Brassica napus
MTKNYPAVSEEYQKAIEKCKRKLRGLIAEKNCAPIMVRLAWHSAGTFDCASRTGGPFGTMRFDDELAHGANNGLHIALRLLEPIREQFPTISHADFHQLAGVVAVEVTGGPEIPFHPGREDKPQPPPEGRLPDATKGCDHLRQVFLKQMGLTDQDIVALSGAHTLGRCHKDRSGFEGAWTSNPLIFDNSYFKELLSGEKEGLLQLPSDKALLDDPVFRPLVEKYAADEEAFFADYAEAHLKLSELGFADA

SEQ ID NO: 2887 - protein, 218 aa, Listeria innocua Clip11262
MKFFLDTASVSEIKRISELGLVDGVTTNPTIIAKEGRPFEEVIKEICSIVDGPVSAEVIGLEADKMVEEARILAKWAPNVVVKIPMTEEGLKAVHTLTAEGIKTNVTLIFTVSQGLMAAKAGATYISPFLGRLDDIGTDGMILIKNLKKVLDNYGLKAEIISASIRHIGHLEEAAEAGAHIATIPGSLFPKLWSHPLTDKGIEGFLKDWEAFSQKEGN

SEQ ID NO: 2888 - protein, 124 aa, Borrelia burgdorferi
MALNKEDILTWLEGAKTMEVVDLVTAIEEKFGVTAAVAAGVGGAVSAGSADSEEQTEFDVILMSFGDSKINVIKEVRAITGLGLGEAKALVEAAPKAIKEGLSKSDAEELKKKLEAVGAKVEVK

SEQ ID NO: 2889 - protein, 120 aa, Glycine max
MAPTVMMASSATAVAPFQGLKSAASLPVARRSTRSLGNVSNGGRIRCMQVWPAYGNKKFETLSYLPPLSTDDLLKQVDYLLRNGWIPCLEFSKLGFVYRENSTSPCYYDGRYWTMWKLPM

SEQ ID NO: 2890 - protein, 115 aa, Triticum aestivum
QGLKSTACLPVSRRSNGASLGSVSNGGRIRCMHVWPIEGIKKYETLSYLPPVSTEALLKAVDYLIRSKWEHSLEISRVGFILREHNASSGYYDGRYWTMWKLTMLGCTDATQVIN

SEQ ID NO: 2891 - protein, 354 aa, Agaricus bisporus
MAFKILLSLILALNAVQFIAAVPTRRAQCADGTTVSNEACCVLLPIIADIQPNLFENECGEEVHETLRASFHDAIGFSRAAGGGGADGSLVTFGDVETTFAANAGIDEIVETLRPFINSHNISAGDFIQFATVVGLTNCPGAPRIPFFLGRPDATAASPDGLVPEPFDSVTKILERFDDAGFTPTEVVALLASHTVAASDTIEPGLEGVPFDSTPGEFDRQFFIETMLKGTSFPGTGGNQGEALSPLPGELRLESDGLLARDERTACDWQLFATDQQKMASAFSDAMVKLSLVGQDKSQLIDCSDVIPRTIPLTNEPYFPADLTKDDLEQTCPDEFPDYPSNPSVTSVAPVPTS

SEQ ID NO: 2892 - protein, 503 aa, Mesorhizobium sp. BNC1
MALKQETLEILSRLGVAAELLTGGDLVVRSPVTGEEIAALRTVSAAEANAAIEKADVAFREWRMVPAPKRGELVRLLGEELRAAKADLGRLVSIEVGKIPSEGLGEVQEMIDICDFAVGLSRQLYGLTIATERPGHRMMETWHPLGVVGVISAFNFPVAVWSWNAALALVCGDAVVWKPSEKTPLTALACRAIFEKAAARAGGVPEGLLAVLVGARDVGEALVDHPKVPLVSATGSTRMGRDVGPRLAKRFARAILELGGNNAGIVCPTADLDMALRAIAFGAMGTAGQRCTTLRRLFVHESVYGQLVPRLRKAYESVSVGSPLTTNALVGPLIDKAAYDGMLKALEAARALGGKVVGGQRVENGHADAYYVRPALVEMPEQAGPVLEETFAPILYVMKYSDFNEALRLHNAVGAGLSSSIFTRDIQESERFLSVEGSDCGIANVNIGTSGAEIGGAFGGEKETGGGRESGSDAWKAYMRRATNTVNYSTALPLAQGVSFDIE

SEQ ID NO: 2893 - protein, 309 aa, Triticum aestivum
SPSSTTSSSTEAESRHKSSSKNSHGKKKAKVDWTPELHRRFVQAVEQLGIDKAVPSRILEIMGINSLTRHNIASHLQKYRSHRKHMIAREAEAASWTQRRQMYAAGGPAAAVKRQDSNMWTGPTIGFAPPHPPPPPPPPSPAAMQHYARPLHVWGHPTMDSPRMPMWPRHPMPRAPMPAWAPPPPPPSDPAFWHHPYMRGPAAYMPTHGTPCMAMPMTPKFPAAPVPVAMPCPVYAPPSTPSALASKNQQESQLQLQAQPSNESIDAAIGDVLSKPWLPLPLGLKPPSLGSVMGELERQGVANVPQACG

SEQ ID NO: 2894 - protein, 181 aa, Lycopersicon esculentum
MASSIVSSAAAATRSNVAQASMVAPFTGLKSAASFPVTKKNNNVDITSLASNGGRVRCMQVWPPINMKKYETLSYLPDFSDEQLLSEIEYLLKNGWVPCLEFETERGFVYRENNSSPGYYDGRYWTMWKLPMFGCTDATQVLAEVQEAKKAYPQAWVRIIGFDNVRQVQCISFIAYKPEGF

SEQ ID NO: 2895 - protein, 251 aa, Zea mays
MRKKLGTRFPAARIKKIMQADEDVGKIALAVPVLVSRALELFLQDLIDRTYEITLQSGAKTLNSFHLKQCVKRYSSFDFLTEVVSKVPDLGGADSCGDERVLPRRRKSNGSDPENDESRSSKMAIRNANTSPRGRGRGRGRGRGRPPTKRKEVGYVQFEDESSMFAEQGETLPGEGTVPEINSGNEITPQSTQPPPTAPAQATNSKVEEASTDHQSDWPMPDATGNIGVGPSGFGHLTVQVDEDEDYDNED

SEQ ID NO: 2896 - protein, 456 aa, Issatchenkia orientalis
MSLRNFARSATRAYSTAEPTLKERFAELLPGWQAEVKELKSKHGKTVIGEVLLEQAYGGMRGIKGLVWEGSVLDPVEGIRFRGKTIPDIQKELPKAEGSSEPLPEALFWLLLTGEVPTLAQTKAFSAELASRSALPKHVEDLLDTCPTTLHPMAQFSIAINALESESKFAKAYADGVNKKEYWKYTYEDSIDLLAKLPNVAAKIYRNVFKDGKVAPVNASLDYSHNFANMLGFGDNKEFVELMRLYLSIHSDHEGGNVSAHTTHLVGSALSSPYLSLAAGMNGLAGPLHGRANQEVLEWLVGMKKELGDDIFNKEKIEEYLWKTLNAGRVVPGYGHAVLRKTDPRYTAQREFALKHMPDYDMFKLVSNIYEVAPKVLAEQGKTKNPWPNVDSHSGILLQYYGLTQESYYTVLFGVARAFGVLPQLIIDRGLGMAIERPKSFSTQKYKELVENLNKA

SEQ ID NO: 2897 - protein, 286 aa, Glycine max
MHTLLRSTLRTKTASSLAYAAVSRSAQENLLQAPLLSRSNSTEASLAKDTSSNDVKNGQGFKGHSMLAPFTAGWQTTDLHPLVIEKSEGSYVYDINGKKYLDALAGLWATSLGGSEPRLVDAAIAQLKKLPFYHSFWNRTTLPSLDLAKELLEMFTARKMGKAFFVNSGSEANDTQVKLVWYYNNALGRPDKKKFIARAKSYHGSTLIAASLSGLPALHQKFDLPAPFVLHTDCPHYWRYHLPGETEEEFSTRLAKNLEQLILKEGPETVIHSNACKVHEHLFQWF

SEQ ID NO: 2898 - protein, 423 aa, Pseudomonas fluorescens
MKLSILGARVIDQPAGLDQVTDIHIDACKIVALGAAPAGFVAVETLDAQGLVAAPGLVDLNVALREPGYSRKGSIVSETRAAAAGGVTSLCCPPQTKPVLDTSAVAELILDRAREAGNTKVFPIGALSKGLDGEQLAELIALRDAGCVAFGNGLNSFRNTRTLCRALEYAATFGLTVIFNSQDHDLAEGGLAHEGPTASFLGLPGIPETAETVALARDLLLVEQSGVRAHFSQLTSARGAALIAQAQARGLPVTADVALYQLILTDEALIDFNSVYHVQPPLRTRADRDGLREAVKSGVISAISSHHQPHERDAKLAPFGATEPGISSVELLLPLALTLVEDGLLDLPTLLARLSAGPAQALQLPAGKLAVGAAADLVLFDPAASTVAGEAWRSKGDNCPFLGHSLPGVVRYTLMDGRITHQA

SEQ ID NO: 2899 - protein, 426 aa, Methanopyrus kandleri AV19
MLALRVLLKGKILIGGRVREREVLAEDGWIVKIGKRLNEEADLTLELGKRELAVPAPIDLHVHCRDPHPDYPFGFKTETRRFLLGGVATVVDMPNTRPAPTTPETYYEKEELARENAEIEVIVAGGVRDSQCTKELVEAGAYVLGEVFLATSTDAPAVPWSTLPEIFRELSPDGPLTIFHPELDELVAERPARNLYEHLKNRPPEAETTAVGLLAGLKVRYPSRIHLSHVTLPESVKIAKGADITVDVTPHHLFFDVLRVDPEDPVFKVNPPLRGRHHRLGLLRAVRRGDVDVLASDHAPHILEDEFEDVPSGVTGGEIILPAALTLHRRFGLSLRDAVAMITCRPAKLLGRDDLGEVAVGKRARITVVRMREFVVRAEEFGEEDRKFPYDGMRMFGEPVKLIDGTKVYDLKESRREGKPVILEGE

SEQ ID NO: 2900 - protein, 323 aa, Magnaporthe grisea 70-15
MPATLANKTFKLNNGVEIPAVGFGTFAAEGQPGQTYAATKAALEAGYRHLDCAWFYQNEDEIGNAIADFLKENPSVKREDLFICTKVWNHMHAPEDVKWSLDNSLKALRLDYVDLFLVHWPIAAERTEDRQVKLGPDGKYVINHELTENPEPTWRAMEELYEAKKARAIGVSNWTIDGLKKLFAVAKVKPAVNQIEIHPYLPNEELVRFCLDNDVLPSAYSPLGSQDQVPTTGERVRDDPGLNAVANRSNMTLAQALLGWGVKRGYVVLPKSSTPSRIKSNIEVPDLSEADYQDLWKVANGRKPTRFVDMKDTFGYDLWKESQ

SEQ ID NO: 2901 - protein, 470 aa, Mesorhizobium sp. BNC1
MLIGGEWTKGSGEPKEVINPATEEVIAMLPSATEADLDRALQSAQRGFREWQELSAEQRCDIIMRGCRILRERAAEIAPLITIEQGKPVEEARLEIIRAASIIEWDANEGRRAYGTIVPSDPGFNRYGIKLAIGPVAAFTPWNFPISSPGRKLGGALGAGCSVIIKSSEETPAATCALVQCLLDGGLPPEVINIVSGKSSMISAYLIASPVIRAITFTGSTPVGKHLAKLAAEAMKPVVMELGGHSPVIVFDDVDADKIARQAVAAKFRNAGQICTAPTRFIIQEKAHDAFVESFVKAASAIKVGNGLEADTQMGPLANSRRLRALEELVADARAKGATVATGGKRIGNRGYLFEPTVLTDVPDDADVVNVEPFGPIAPVVRFREFEEAIEIANRLPYGLCSYAFTNSQAYSHELAHRVESGIMSLNHFGTSQADTPFGGVKESGYGREGGYETLDAFMITKFVSQQITA

SEQ ID NO: 2902 - protein, 389 aa, Enterococcus faecalis V583
MSTKDVKELAIEQAKKFGGKLEVCPKVPIETKADLGIAYTPGVAAVSSAIHEKKERAYELTTKKNTVAVISDGSAVLGLGNIGPEAAMPVMEGKAALFKRFAGVDSIPLVLDTQDTEEIIQTVKFLAPTFGGINLEDISAPRCFEIEQRLIDELDIPVFHDDQHGTAIVVLAALYNSLKLINKKIEDIHVVINGGGSAGLSITRKFLAAGVKHIIIVDRAGILSETDTALPPHHAEIAKLTNREHRTGDLATALEGADVFVGVSAPGVLKPEWIQQMNEQPVIFAMANPVPEIFPDEALAAGAYIVGTGRSDFPNQINNVLAFPGIFRGALDARAKKITIEMQIAAAKGIAKLIPDNELTPTNIIPDPFQEGVAKVVAESVRNAVKETN

SEQ ID NO: 2903 - protein, 359 aa, Burkholderia cepacia R18194
MEIDTPRVGPGDVRIAVAYCGICGSDLHEYADGPHAIPVDTPHPLSRRTAPLTLGHEFCGTVVEVGEGVTALRAGDRVAVEPEYRCSQCAYCRSGSYNLCVSMGFAGLMGDGGMADFAVVPAYMLHRLPDGVSLEQAAVMEPAAVALHALRRGELRLGETCAVFGLGPIGLLLIMLAKLQGATTIVAVDVSPERLAAATRFGATHTFDARALGASALQDAIRAATGGLGVDASFEAAGLQTTFESAMHALRKGGRIVMVGLMPHAGFDAFRAVNDELTFTASVGYRHAYEDLLRIVASGALDLTSIVTRTVSLEDAVADGFDALLADRAQIKILVSPAQRPPRRAHTIGSIEHESSVGV

SEQ ID NO: 2904 - protein, 430 aa, Lactobacillus plantarum
MTTLIKNAQVWQAGQLQTTDILIAEGRIKAIGHQLHDQFGPADHVICADHHFVSPGFVDVHVHLRDPGQTAKETIATGTLAAAHGGFTTVGAMPNVDPVPDTPERVATMVARNQQEAHVHVAQYASITTGRTSEQLVDFAGIKAAGAFAVSNDGSGVQTAGTMFAAMQGAAKVGLPLAAHVEDDSLYHHGVMNAGPVADRLGLPGINNVSEAAQVARDVMLAEASGVHYHVCHVSTAESLRVIRNAKAAGINVTCEVSPHHLLLCDEDITMDNPMLKMNPPLRSAKDRAALVAGLLDGTIDMIATDHAPHTDAEKQGSMKTAAFGITGIETAFATLYTALVKTRLLTLGRLIELMSTRPTELFGLNTAGRLVVGAPADLTIIDLDHQYEIEAATMLSKGHNSPFIGWPVYGNVLMTLVDGKLAYGKETQA

SEQ ID NO: 2905 - protein, 85 aa, Glycine max
  misc_feature (37)..(37): Xaa can be any naturally occurring amino acid
  misc_feature (52)..(52): Xaa can be any naturally occurring amino acid
MASSMISSPAVTTVNRAGAGMAAPFTGLKSMAGFPSXKTNDDSTSIATNGGXVQCIHVWPPIGNTKFETPSDLPDLDDAQVAKEI

SEQ ID NO: 2906 - protein, 755 aa, Zea mays
  misc_feature (190)..(190): Xaa can be any naturally occurring amino acid
MRWWKRSSSPSCPASSSSASTPASPARASTPRLIGGWGSGPSSRRDGSGASNDPQPRLIRARRMRYVVDDLEVGVSALGVDSPARRDAAAGFALETVSSAPISWSPSNMEVAPARSSSTPVLLPHPLPLPGEGESPCRGPGRPLPPPVPRMLDGEGKGPAADAPGVLETGSQRMTPLLARRVAVQTLPKXHEHNDFRLNGTTCCQRRKAFKEKFQDKNCDETLNFRLNIPAKSAPSSGFSSPVQSPRRLSNVDFSSAAISIQDTNVWSARSLWSSDAMGSSPPCDSPDKFAGGQERSPLSSPLRSPVLKSRNPSAPPSPMHPKLFPENHVSRPDGNGSASFHPLPLPPASVSPKQTNASHQLVPKAEMPSVAGQWQKGKLLGSGTFGCVYEATNRHTGALCAMKEVNIIPDDAKSVESLKQLEQEIKFLSQFKHENIVQYYGSETIEDRFYIYLEYVHPGSIHKYVHQHCGSLTEAVIRNFTRHILKGLAFLHSQKIMHRDIKGANLLVDINGVVKLADFGMAKHLSTAAPNLSLKGTPYWMAPEVVRATLDKSAGYDLAVDIWSLGCTIIEMFTGKPPWSGLEGPAAMFKVLRTDPPIPDNLSPEGKDFLRCCFKRNPTERPTANKLLEHPFIQTLNHYSPHSVVHSFSGIKSPDTVHSSARDKVPWKSDSYMRGKHANGETSSARSSESLAYRLMTPLPNLGTNSLSPPPLSSASSSGSAAHTPNSMHFSVPYHQPSPLPKPNGKEAINLVSH

SEQ ID NO: 2907 - protein, 124 aa, Borrelia burgdorferi
MALNKEDILTWLEGAKTMEVVDLVTAIEEKFGVTAAVAAGVGGAVSVGSADSEEQTEFDVILMSFGDSKINVIKEVRAITGLGLGEAKALVEAAPKAIKEGLSKSDAEELKKKLEAVGAKVEVK

SEQ ID NO: 2908 - protein, 458 aa, Lycopersicon esculentum
MAKTNGFMGHDMLAPFTAAWMIDMGPLVIDKAEGSYVYGVNGKKYLDSLSGLWCTVLGGSEPRLIEAASKQLNKSAFYHSFWNRTTKPSLDLAKELINMFTANKMGKVFFTSSGSEANDTQVKLVWYYNNAIGRPNKKKIISRKNAYHGSTYMTAGLSGLPSLHLKFDLPPPYILHTDCPHYWNYHLPGETEEEYSTRLANNLENLILKEGPETVAAFIAEPVMGGAGVIIPPATYFEKIQAVLKKYDILFIADEVICGFGRLGTMFGCDKYNIKPDLVSIAKALSGGYIPIGAVLVSEEISKVIMSQSNQLGVFCHGFTYSGHPVACAVALEALKIYKEKNITEVVNKLSPKLQEGLKAFIDSPIIGEIRGTGLVLSTEFVDNKSPNDPFPPEWGVGTYFGSQCQKHGMLVSFSGDHVNMAPPFTLSLEELDEMISIYGKALKDTEKRVEELKSQKK

SEQ ID NO: 2909 - protein, 639 aa, Zea mays
MDKNYGELYNILGWGEEYFAVNTEGHLSVKPFGRWTEPGQEIDVHSVIVEALATQPNDSTSKSQFPMILRFPDVLKNRIETLHNAFNSAMESTGYTSRYQGVFPIKVNQNKHVVQDMVRFGQQWNYGLEAGSKPELLIAMSCLPVTEAEPKPYLICNGYKDADYIALALSARAMGLNPIIVLEMEEELAIVLDQYKKLQQKLPDDDAVRKKFEPVIGIRAKLLTKLPGHFGSTAGKHGKFGMLADQIYEVAETLGKEGKLHWLQLLHFHIGSMIPTTGKVYDAVSEAAGIYCNLVNEHGAKWLATLDCGGGLGVDYDGTRSGDSDMSVAYGIQEYASAVVQAVRLKCDYNGVAHPVVCTESGRAMASHHSMIILETLSAIPEPQDEDTSEQLLNRIQDLSYKQPRAPVGGATAAVYSHAADLKKHGIEMYKLGKKLGKRVVADANTVYNYHMNLSVFSLLPDFWGIGQLFPMMPVSRLNEEPTLKGTLVDITCDSDGKIENFISRENTLPLHLFEPSLGGYYVAVLVSGAYQEAIAGKHNLFSGPTLVRVNSSTTKDGGFEIERVDLGPAADEIIGSMRYSVEEDIITVIEKKAKGTEEEERVWAWEMVEPLMTKALTTMPYLNEYKVPEPEPEPEPIP

SEQ ID NO: 2910 - protein, 171 aa, Zea mays
MYPYTFRAAASSSSSGTALGFALGRIGGTTRSGGVAAPGLVVPAAGVARGRSVSSTPAGSAPVPGDQGVGMDQPKQQQQPKVPPRDAAGGENKRDDMHKHTRDVMTHSFGEGYSTRSDEEGFGGVYGGNDPVEHPGAEIHPSHSEYDTSQGSEVKEKEKARHLKDEKHATA

SEQ ID NO: 2911 - protein, 483 aa, Brucella melitensis 16M
MDMQEELMYPNLTLIVGGEERNKGSAGTLCLTDPADGRELTIAPRAGRAEALQAAAAEKGFAEWSALSALERSKIMRRAADIMRERADAAARIMSMEQGKPLSEARGEWLGSADLLDWFAEEGRRVYGRIVPSRAPNIQIQVLKHPIGPVAAFTPWNFPAWNTMQKVAPALGAGCSVVIKPASDTPGTAWLIGKCLLEAGLPPKAVSVIWGTTSELSDALIKAPEIRKVSLTGSTRVGRIVAAQAGEYLKKVTMELGGHGPVIVAADADLDHLIPLAVQWKFRNCGQVCVSPTRFIVEASIHDEFIRRFSEKARELKVGKGVEEGAQMGPLTSQNQLETVLSMVEDALTKGAKIETGGNRIGDTGNFYEPTILSGMTAEMLAMNEEPFGPLALVMRVHSLDEAIAESNRLPVGLGAYLFTSSMTTAHRVQNHLQAGMLGVNHFALALPETPFGGVRDSGFGSEGGLEGIEAYLTTMTVTTMMV

SEQ ID NO: 2912 - protein, 287 aa, Triticum aestivum
  misc_feature (116)..(116): Xaa can be any naturally occurring amino acid
MSAPPPPASSDDDGKPADEEGVEIREVWANNLEAEFAVIRDVVDDYPYIAMDTEFPGIVCRPLGSFRSNDEYNYATLKANVDMLSLIQLGLTLSDENGALPARGTGGRPCAWQFNXRGFDPRSDPANADSIDLLRNSGIDFDRFTTEGADTGHFAELLMSSGVVLNDAVYWVTFHAGYDFGYLLKILTCNSLPDTQAGFFKLMKIYFPTVYDIKHLMKFCNSLHGGLNKLAELLDVERVGESHQAGSDSLVTSCAFWKLKDSFFAGSTEKYAGVLYGLNAENGVSAH

SEQ ID NO: 2913 - protein, 484 aa, Rubrivivax gelatinosus PM1
MKQFLNFIDGEFVATDKTFANRAPVDNRVLGLVHEAGRAEVDAAVAAARGALKGEWGRMPVAKRVELLYAVADEINRRFDDFLAAEIADTGKPLSLASHIDIPRGAANFKVFADIIKNVPAETFEMATPDGGQALNYAVRTPVGVVGVVCPWNLPLLLMTWKVGPALACGNTVVVKPSEETPATATLLGEVMQKVGMPKGVYNVVHGFGPDSAGAFLTQHPDVDAITFTGETRTGEAIMAAAAKGVRPVSFELGGKNAGIVFADADFDKAVAGITRSAFENCGQVCLGTERVYVQRPIFEKFVQALKAKAEALKIGPSEEPGVGLGPLISAEHRDKVLSYYRKAVEQGATVVTGGGVPKMSGALAEGHWVQPTIWTGLPESAAVIREEIFGPCCHIAPFDTEEEAIALANATDYGLATTVWTQNLGTAHRVARQVEVGICWINSWFLRDLRTAFGGAKASGIGREGGVHSLEFYTELRNVCVKL

SEQ ID NO: 2914 - protein, 456 aa, Zea mays
  misc_feature (322)..(322): Xaa can be any naturally occurring amino acid
  misc_feature (358)..(358): Xaa can be any naturally occurring amino acid
SFNLILEGSITKSHRNLDLVTISAGAKGPRQPWHDLHCRIDGPAAYDVLTNFEQRWRKATKWRDRFRRVSHWKDDALIKLERISWILSPSPNVPNNHPSLWVSKEEDHENWHVQVFPRVRSGSLKGFPSDCKAASKLNLVCRKNLVIDKSIHTAYVRAIRSAQHFIYIENQYFLGSSYAWPSYVNSGADNLVPIELALKIASKIKAGERFAVYVVIPMWPEGVPTAASVQEILFFQAQTMEMMYKIIADELKATDNKDMHPEDYLNFFCLGNREEPPSNGSPESEKSTDKSAAALASKYRRFMIYVHAKGMIVDDEYVILGXQTSTRDPWLVLEILRSQWVHTSLIMHGLQRMDILTXQVYGYRTSLWAEHLGTVDDRFKDPSSLECVRFVNQIAVENWQRFTAEEMSTLQGHLLKYPVKVEADGKISPLSDQECFPDVGGKILGAPTSLPDSLTM

SEQ ID NO: 2915 - protein, 99 aa, Triticum aestivum
  misc_feature (66)..(66): Xaa can be any naturally occurring amino acid
  misc_feature (80)..(80): Xaa can be any naturally occurring amino acid
  misc_feature (84)..(84): Xaa can be any naturally occurring amino acid
HLHPCKKLEDIVPSSHNCDVPHVNRTEYQLIDISEDGFVSLLTDNGNTKDDLKLPTDETLLGQIKXMGFAEGKGPWVVVXSCPXMGEGRIIARPDIGHK

SEQ ID NO: 2916 - protein, 175 aa, Triticum aestivum
MAPTVMASSVTSVAPFQGLKSTAGLPVSRRSNGASLGSVSNGGRIRCLQVWPIDGIKKVEILSYLPPLSTEALLKQVDYLIRSKWVPCLEYSKVGFIFREHNASPGYYDGRYWTMWKLPMFGCTDATQVINEVEEVNKEYPDAYVRIIGFDNMRQVQCVSFIAFKPPGCEESGKA

SEQ ID NO: 2917 - protein, 393 aa, Burkholderia sp. TH2
MLSAEHRAIVKATVPLLESGGEALTTHFYKTMLAEYPSVRPLFNQAHQQSGDQPRALANAVLMYARHIDQLEQLGGLVSQIVNKHVALNILPEHYPIVGACLLRAIREVLGAEIATDAVIEAWGAAYQQLADLLIGLEENVYVEKETATGGWRGTRAFVVARKVKESDEITSFYLRPADGGELLEFHPGQYIGLKLIVDGEEIRRNYSLSAAANGREYRISVKREPNGKASNYLHDSVNEGATLDLLTPSGDFTLEHNDKPLVLISGGVGITPTLAMLNAALQTSRPIHFIHATRHGGVHAFRDHIDELAARHPQLKRFYVYEKPRHDDEAHHAEGYIDEARLIEWLPATRDVDVYFLGPKSFMQAVKRHLKTIGVPEKQSRYEFFGPASALD

SEQ ID NO: 2918 - protein, 330 aa, Yersinia pestis KIM
MPKVHAQTMRNDNMTDKLTSLRQITTVVADTGDIAAMKLYQPQDATTNPSIILNAAQIPEYRKLIDEAIAWAREQSSDHAQQIVDATDKLAVNIGLEILKLIPGRISTEVDARLSYDTVASVAKAKRLIKLYNEAGISNDRILIKLASTWQGIRAAEQLEKEGINCNLTLLFSFAQARACAEAGVFLISPFVGRILDWYKANGDQKEFAPSEDPGVVSVTEIYQYYKKHGYKTVVMGASFRNLGEIIELAGCDRLTIAPSLLKELAESEGPVERKLAYTGEIQAKPAPLTEAEFYWQHNQDPMAVDKLADGIRKFAIDQGKLEKMISDLL

SEQ ID NO: 2919 - protein, 174 aa, Triticum aestivum
  misc_feature (121)..(121): Xaa can be any naturally occurring amino acid
MRTAAAAPLLSAAGEIPPVAPAGSQWASWEVDDWEFADWRSESASEADVAVVGGPRLVFAPPSREEAEEATAELREAIDRVYFKETPVEVVKEHDQELSKLGADALIPAMPGHVVQAFTLXHSSLEAQSVVASLASDKNVWDPVLKNERVMEFSKSPQQTLVNIFLRAPTLLTQ

SEQ ID NO: 2920 - protein, 384 aa, Zea mays
DSVLFDHDLESYALYDTNGREVPQELVEKIGKVFETILEETGKLREGTNEDMSIAKAIAIVMDRNPQLRQEGIAHEVLQWYLCRMEGWFATDADSISLQGWDQEVLLPGGHGLMVRGYRPVINTLAKGLDIRLNHKVVEIVRHRNRVEVTVSSGQTFVADAAVVTVPLGVLKAKTIRFEPRLPEWKEEAIRELTVGVENKIVLHFGQVFWPNVEFIGVVSSSTYGCSYFLNLHKATGHPVLVYMPAGRLARDIEKMSDEAAAQFAFSQLKKILPNAAEPINYLVSRWGSDENTLGSYTFDGVNKPRDLYEKLRIPVDNLFFAGEATSVKYTGTVHGAFSTGVMAAEECKMRVLERFRELDMLEMCHPAMGEDSPVSVPLLISRL

SEQ ID NO: 2921 - protein, 198 aa, Pyrococcus horikoshii OT3
MALITRKSFILVGVPPIMKSLIPIVLATLVILGMGCIGGGEEKMSLKVSSVFGNNEFIPAKYTCEGVDINPPLKIEGLSDNVKSLVIIVDDPDAPMGTFTHWIAWNIPPVTEIPEGIPKQGEVDKPIHIIQGRNDFGRIGYNGPCPPRGHGVHHYHFKVYALDTTLNLKPGASRKELEKAMEGHVIQYGELVGLYERK

SEQ ID NO: 2922 - protein, 213 aa, Triticum aestivum
MGVEVCVKAAVGHPDTLGDCPFSQRVLLTLEEKKVPYEMKLIDVQNKPDWFLKISPEGKVPVFNGGDGKWIPDSDVITQVIEEKYPTPSLVTPPEYASVGSKIFSCFITFLKSKDPNDGSEKALLTELQALEEHLKAHGPFINGQNISAADLSLAPKLYHLQVALEHFKGWKIPEDLTNVHAYTEALFSRESFIKTKAAKEHLIAGWAPKVNA

SEQ ID NO: 2923 - protein, 193 aa, Capsicum chinense
MDGLYWIKSTQDEWVRKYSDLSNVYLFGSSCGGNIAYHAGLRVAAGAYKELEPVKIKGLILHQPYFSGKNRTESEEKLKDDQLLPLHAIDKMFDLSLPKGTLDHDHEYSNPFLNGGSKHLDDVIAQGWKILVTGVSGDPLVDNARNFANFMEEKGIKTFKLFGDGYHAIEGFEPSKAAALIGAPKDFICATTN

SEQ ID NO: 2924 - protein, 494 aa, Bordetella bronchiseptica RB50
MTIGARLQHVIDGGPWPSIHCNGRVGSLIGGDIVPGNGAMIEVLDASTGEPLFRYLDGSDGLVRRAAESAAAAQVRWAVMPADGRAAVLLAVSAAIRANLARLAELEAVTAARPIRDCRAQVDRVADMFQYYAGWCDKFYGDVIPVPNQYLNYTMREPIGVLLHIVPWNSPLFMAAWHLAPSLATGNAVLLKPSELTPLSAIALVRIAESAGLPTGLVAVLAGLGHTMGNAAIEHPLVRKIGFVGSPETGAKVAGAAARVVKPCVLELGGKSANIVFPDADLDQLCEATVKSMFIGAGQTCVAPSRLIVHRSLEQQVVERLLDAASTLEMGLPELDSTAIGPIHNRRQFDHVNRMIEQGRRDGARCRQAGNAVPQRGLYVPPTIFTGVARDGALARQEVFGPVMACLPFDTEQEAIDLANDTEFGLAGAVWTHDVKRAHRVAAAINAGTVWINTYKSTDIRSPFGGIGLSGYGRSSGHEALQEYTRLKSIWVAT

SEQ ID NO: 2925 - protein, 261 aa, Persea americana
QVHPNSYALVVSTENMTLNWYSGNNRAMLVTNCLFRMGGAAILLSNRWSDRRRSKYQLVHTVRTHIGADDRAFNCVSQEEDEAGKVGVSLSKDLMVIAGEALKSNITTLGPMVLPMSEQLLFFATLAARKVFKMKIKPYIPDFKLAFEHFCIHAGGRAVLDELQKNLELSDWQMEPSRMTLYRFGNTSSSSLWYELGYSEAKGRVMKGDRMWQIAFGSGFKCNSAVWRALRSVNPAKEKSPWMDDIDSFPVHVPKVTTIQS

SEQ ID NO: 2926 - protein, 443 aa, Ralstonia eutropha JMP134
MDAAKTVIPDLDALWMPFTANRQYKAAPRLLASASGMYYTTHDGRQILDGCAGLWCVAAGHCRKEIAEAVARQAATLDYAPPFQMGHPLSFEAATKVAAIMPQGLDRIFFTNSGSESVDTALKIALAYHRARGEGQRTRFIGRERGYHGVGFGGMAVGGIGPNRKAFSANLMPGTDHLPATLNIAEAAFSKGQPTWGAHLADELERIVALHDPSTIAAVIVEPLAGSAGVLVPPVGYLDKLREITTKHGILLIFDEVITAFGRLGTATAAERFKVTPDLITMAKAINNAAVPMGAVAVRREVHDTVVNSAAPGAIELAHGYTYSGHPLAAAAAIATLDLYQRENLFGRAAELSPVFEAAVHSVRSAPHVKDIRNLGMVAGIELEPRPGQPGARAYEAFLKCLERGVLVRYTGDILAFSPPLIISEAQIAELFDTVKQALQEVQ

SEQ ID NO: 2927 - protein, 381 aa, Zea mays
  misc_feature (47)..(47): Xaa can be any naturally occurring amino acid
AGRNKYDAEEAISLVEALAVQLTQREGELIYEKAEVKKLANFLKQAXLKNARKVAEEERALALAEIEKARAAIEKVEKAWRVLSLAEPPCGIIPPARHDLSSREKSEIEELRKEVREARRIKMLHQPSKVMDMEFELQALRTLISEKTQLCNQLKKELAMIKRLEDDSSGLFELEGSNTLGSQLCIIPRVDGASNITNCPIQWYRVISGGTRELISGATKFMYAPEPFDVGRLLQAEIVLNADKIIVQTDGPVDNAAGLERYVDSLMKRTDIEFNVVVTQMNGKDYSSNSVHVFHIGKLRIKLRKGWSTKARESYSTTMKLCGSRGGGNAAARAVFWHPRKGSSYTLAFETDRDRNAAIMIARKFASNCNIALAGPGDQGT

SEQ ID NO: 2928 - protein, 362 aa, Saccharomyces cerevisiae
MTTAVRLLPSLGRTAHKRSLYLFSAAAAAAAAAATFAYSQSHKRSSSSPGGGSNHGWNNWGKPAALASTTPLVHVASVEKGRSYEDFQKVYNAIALKLREDDEYDNYIGYGPVLVRLAWHISGTWDKHDNTGGSYGGTYRFKKEFNDPSNAGLQNGFKFLEPIHKEFPWISSGDLFSLGGVTAVQEMQGPKIPWRCGRVDTPEDTTPDNGRLPDADKDAGYVRTFFQRLNMNDREVVALMGAHALGKTHLKNSGYEGPWGAANNVFTNEFYLNLLNEDWKLEKNDANNEQWDSKSGYMMLPTDYSLIQDPKYLSIVKEYANDQDKFFKDFSKAFEKLLENGITFPKDAPSPFIFKTLEEQGL

SEQ ID NO: 2929 - protein, 156 aa, Corynebacterium diphtheriae NCTC 13129
MSILDTEVTLINGEKASMDQWAGHCLLIVNTASECGYTPQLETLEELYEDYAMRGFFVIGVPCNQFGEEEPGKDAQVARRYEEKFGVRFPLLAKSDVNGPNTIELYKKLKGDGPDIEWNFEKFIVAPSGEVVGRFAPSLDPDDMKIINVLEEYLPI

SEQ ID NO: 2930 - protein, 424 aa, Saccharomyces cerevisiae
MANPTTGKSSIRAKLSNSSLSNLFKKNKNKRQREETEEQDNEDKDESKNQDENKDTQLTPRKRRRLTKEFEEKEARYTNELPKELRKYRPGKGFRFNLPPTDRPIIYADGVFDLFHLGHMKQLEQCKKAFPNVTLIVGVPSDKITHKLKGLTVLTDKQRCETLTHCRWVDEVVPNAPWCVTPEFLLEHKIDHVAHDDIPYVSADSDDIYKPIKEMGKFLTTQRTNGVSTSDIITKIIRDYDKYLMRNFARGATRQELNVSWLKKNELEFKKHINEFRSYFKKNQTNLNNASRDLYFEVREILLKKTLGKKLYSKLIGNELKKQNQRQRKQNFLDDPFTRKLIREASPATEFANEFTGENSTAKSPDDNGNLFSQEDDEDTNSNNTNTNSDSDSNTNSTPPSEDDDDNDRLTLENLTQKKKQSAN

SEQ ID NO: 2931 - protein, 476 aa, Bacillus cereus ATCC 14579
MQNKIIVMFQKDFRLYDNPALFEAVQSGEVLPVYIQDETFSIGSASKWWLHHAVIDVKKQLEALGSTLIIRKGRTEEEILSLIEQLDITAVYWNICYDPDRLQSNQKMKMMLEDKGIICKEFNSHLLLEPWIIKKKDNTEYKVFTPFYNAFQKQVIPKPFSRVQSIKWGNSLPASLSVSELQLLPIIPWTSHMEVIWDPTEEGAYKTFKKFFSSKLVSYSEGRDFPGQNVHSMLAPYLSFGQISVKLMFHYLINKSTERQCSLFEKQVNSFIRQLIWREFSYYLLYHYPFTVYKPLNKSFENFPWDKEEELLRVWQKGKTGYPFIDAGMRELWQTGFMHNRARMAVASFLVKHLLIPWQEGAKWFMDTLLDADIANNTMGWQWVAGSGADASPYFRIFNPITQGEKFDKNGEYIRRWVPELRDIPNKYIHKPWEAPEHILQKSNIKLGDTYPFPIVDHKAARERALCAYKSMKEFV

SEQ ID NO: 2932 - protein, 158 aa, Guillardia theta
MDQEQYNIINDNGASETTPIKAGNCKKGGLLVIKGNPCKIIDISTSKTGKHGHAKAIITAVDIFTGKKYQESAPTSHNLDQPNLTKTEYQLIHIEEDGFVSLMDEDGNIREDLSLDLKNDEIHVKIKNEFDQSKEIVVTVMKCLQKEKIISFKENNKI

SEQ ID NO: 2933 - protein, 433 aa, Neisseria meningitidis Z2491
MPSEHQHISSLLDFDRTHLLHPYTSMTDPLPVYPVKRAEGVFIELADGTRLIDGMSSWWCAIHGYNHPVLNQVVETQIKQMAHVMFGGLTHESAVELGKLLVGILPQGLDRIFYADSGSVSVEVALKMAVQYRQARGLMAKQNIATVRRGYHGDTWNAMSVCDPETGMHHIFGSTLPQRYFVDNPKSRFDDEWDGADLQPVRALFEAHHADIAAFILEPVVQGAGGMYFYHPQYLRGLRDLCDEFDIVLIFDEIATGFGRTGKMFACEHAEVVPDIMCIGKGLSGGYMTLAAAITSQKVTETISRGEAGVFMHGPTFMANPLACAVACASVKLLLSQDWQANIRRIESILKGRLKAAWDIRGVKDVRVLGAIGVIELDKGVDMARFQADCVAQGIWVRPFGRLVYLMPPYIISDGLLTELADKTVQILKEHSK

SEQ ID NO: 2934 - protein, 333 aa, Saccharomyces bayanus
MSEHEDKKQKVGGSSLDQLKNAGTHVVADSGDFESISKYEPQDSTTNPSLILAASKLEKYEKLIDAAVEFGRKHGKTDHEKVENAMDKILVEFGSQILKIVPGRVSTEVDARLSFDKKATVKKALHIIKLYKDMGVPKERVLIKIASTWEGIQAAKELEAKHGIHCNMTLLFSFTQAVACAEANVTLISPFVGRIMDFYKERSGEDYTGETDPGVLSVRKIYSYYKRHGYKTEVMAASFRNLDELKALAGIDDMTLPLNLLQQLHESTDPIENKLNAETAKQEGVEKVSFINDEPHFRYVFNEDQMATEKLSDGIRKFSVDIEALYELVEKKM

SEQ ID NO: 2935 - protein, 335 aa, Saccharomyces bayanus
MSEPAQKKQKVANNSLEQLKAAGTVVVADTGDFNSIAKFQPQDSTTNPSLILAAAKQPAHAKLIDVAVAYGKKHGKTTAEQVESAVDRLLVEFGKEILKIVPGRVSTEVDARLSFDTQATIDKARHIIKLYEQEGVSRERVLIKIASTWEGIQAAKELEEKDGIHCNLTLLFSFGQAVACAEAQVTLISPFVGRILDWYKASTGKEYAGETDPGVVSVKSIYNYYKKYGYKTIVMGASFRSTDEIKNLAGVDYLTISPQLLDTLMNSTEPFPRVLDPATAKKEAGDKISYINDEPKFRFDLNEDAMATEKLSEGIRKFSADIVTLFDLIEKKVTA

SEQ ID NO: 2936 - protein, 117 aa, Zea mays
  misc_feature (71)..(71): Xaa can be any naturally occurring amino acid
SVLPAPDGPYAPVPPNGVNACPGAAHASAHASAHASSLSSAVPPRSPNLSPRPLPVPHHGHGSAKVPLWKXPLSPSKWKEEHFVLASLSMWGALFYGGFKFFGGKKEDKIEVASGQT

SEQ ID NO: 2937 - protein, 285 aa, Oceanobacillus iheyensis HTE831
MAIQWFPGHMAKAKREVEEKLKLVDFVIELVDARAPLSSQNPMLKQVLNNKPKLIVLMKKDLADQEVTKRWVDKFNEDGTQAIDVNVNHKGDIQKVIQQAKLLGQDKMEKLKRKGIQPRPARAMIVGIPNVGKSTLINRLANKKIAKTGDRPGITKQQLWIKVKKDFELLDTPGILWPKFEEEVVGYRLAAIGTIKDQLLPLPDVTAFIIRYMSEHYPNQLKDRYQLEEIEDMVEVFESIGRIRGALESGGQVNYDKVADIVIRDLRVGRLGTITLEQPEDSSNS

SEQ ID NO: 2938 - protein, 109 aa, Brassica napus
MSGVWVFKNGVIRLVENPNQSGGVTHGRRNVLVYLPTGEVVSSYSSLEQILMSLGWERYFSGDSDLIQYHKRSSIDLISLPRDFSKFNSVYMYDIVIKNPNTFHVREFH

SEQ ID NO: 2939 - protein, 483 aa, Pseudomonas stutzeri
MNTKLFINNVWVNSSDQQTFERKHPVSGEVMTECANSTVMDALKAAQAAQEAFQTWKTVGPSERRRLLLRVAEVMESKTPEFIEVMAKEVGASALWAGFNVQMSANVFREAASLATQIQGETIPTDKSDTLSMTLRQPVGPILSIVPWNGTAVLAARAIAYPLVCGNAVVFKGSEFSPATHALITQRVQEAGLPAGVLNYLNSSPDRSPEIADALISAKEIRRINFTGSTRVGSIIAQKAAQHLKRCLLELGGKSPLIVLDDADIDAAVKAAVFGSFLVQGQICMSTERLVVDEKIADEFAAKFAEKAKRLSAGDPCVTGDCIIGPMVSPNSGERINGLFKDAIDKGATVACGGMAQGAVMPATILDHVKSNMRIYDEETFGPITVVIRCSGEAEAIRIASDSAYGLSSGVFGRDINRALRVGMSIEYGSVHINGSTVQSEAQAPYGGTKNTGYGRFDGRAVIDEFTELKWLTIEPFEQQYPF

SEQ ID NO: 2940 - protein, 370 aa, Clarkia breweri
MGSTGNAETQLTPTHVSDEEANLFAMQLASASVLPMVLKAAIELDVLEIMAKSIPHGSGAYISPAEIAAQLPTTNPDAPVMLDRVLRLLASYSVVTCSLRELPDGKVERLYGLAPVCKFLTKNEDGVSLAPLCLMNQDKVLMESWYYLKDAILDGGIPFNKAYGMTAFEYHGTDPRFNKVFNRGMSDHSTITMKKIFEMYTGFEALNTIVDVGGGTGAVLSMIVAKYPSIKGINFDLPHVIEDAPIYPGVEHVGGDMFVSVPKGDAIFMKWICHDWSDEHCLKFLKNCYAALPEHGKVIVAECILPLSPDPSLATKGVIHIDAIMLAHNPGGKERTEKEFEALAIGAGFKGFKVACCAFNTYVMEFLKTA

SEQ ID NO: 2941 - protein, 437 aa, Glycine max
MKVAKGRILVGKYELGKTIGEGSFAKVKFARNVQNGNYVAIKILDRKHVLRLNMMEQLMKEISTMKLINHPNVVRILEVLASKTKIYIVLEFVDGGELFDKIAANGRLKEDEARNYFQQLINAVDYCHSRGVYHRDLKPENLLDSNGVLKVSDFGLSTYSQKEDELLHTACGTPNYVAPEVLNDRGYVGSTSDIWSCGVILFVLMAGYLPFDEPTHMALYKKIGRAEFSCPSWFSPQAKKLLKHILDPNPLTRIKIPELLEDEWFKKGYKPTSFTEEEDLNVDDVVVAFNESNENLVTERKEKPVSMNAFELICRSQSFNLDSLFEKQTGQVKQETSFTSQCPANEIMFKIEEAAKPLGFNVYKRNYKMKLQGDKSGRKGHLSVATEVFEVAPSVHMVELRKTGGDTLEFHKFYKIFSSGLQDIVWHDTEGKKNMKN

SEQ ID NO: 2942 - protein, 168 aa, Triticum aestivum
  misc_feature (158)..(158): Xaa can be any naturally occurring amino acid
MAAASSATSVHDFTVKDASGKDVDLSVYKGKVLLIVNVASQCGLTNSNYTELSQLYPKYKDQGFEILAFPCNQFGGQEPGTNDEIVQFACTRFKAEYPIFDKVDVNGSNVSPLYKFLKSSKGGLFGDSIKWNFSKFLVDKEGHVVDRYAPTTSPLSIXKDIKKLLGSS

SEQ ID NO: 2943 - protein, 499 aa, Mesorhizobium sp. BNC1
MKSLEGSRQELFIGGRFRAPSSGRFIPSFDPTTGEVWYEFAEADAADVDAAVTSATKAFHNPAWRRMTQTDRGKLIRRLAELVLEHADELALMETRDNGKLIKEMMAQMRAMPDSYIYFAGMADKLQGDTIPVNKLDSLNYSQREPLGVVGMITPWNSPLMLLTGTLAPCLAIGNTVVVKPSEHATASTLALAELVVEAGIPEGVVNVVTGTGAVTGEALTRHPGLAKIVFTGSTATGRRIAANAAENLIPCQMELGGKSPHVVFSDVDIERAVNGVVSGIFAAAGQTCVAGSRCFVEANIYDRFLEALVERTRHIRVGHPMEESTDVGPLAMKSQLEKIEGYVASGARDGAKIAVGGRRPKDGDLARGWYFEPTVMADARNDMKFMRDELFAPVVGVMPFRDEAEMITLANDTEYGLASGIWTRDIDRAMRFASQIDAGTVWINTYRSAAYMSANGGFKNSGYGRRGGFDVMREFSRSKNVLIDYSGAMQDPFVIRLK

SEQ ID NO: 2944 - protein, 439 aa, Pyrococcus horikoshii OT3
MIREKALEFHKNNFPGNGKIEVIPKVSLESREELTLAYTPGVAEPCKEIARDPGKVYEYTSKGNLVAVVSDGSRILGLGNIGPLAGLPVMEGKALLFKRFGGVDAFPIMIKEQEPNKFIDIVKAIAPTFGGINLEDIASPKCFYILERLREELDIPVFHDDQQGTAAVVLAGLLNALKVVGKKISEITLALFGAGAAGFATLRILTEAGVKPENVRVVELVNGKPRILTSDLDLEKLFPYRGWLLKKTNGENIEGGPQEALKDADVLISFTRPGPGVIKPQWIEKMNEDAIVFPLANPVPEILPEEAKKAGARIVATGRSDYPNQINNLLGFPGIFRGALDVRARTITDSMIIAAAKAIASIVEEPSEENIIPSPLNPIVYAREARAVAEEAMKEGVARTKVKGEWVEEHTIRLIEFYENVIAPINKKRREYSKAITRA

SEQ ID NO: 2945 - protein, 484 aa, Burkholderia cepacia R18194
MTAEYTLQHRIAGEACDAAQGEWFEKFEPCTGHLLARVAAGTGADVDRAVRAARAEFDGGHWSRLPGAARAKLLHRLADLLEHDAERFVELLVREQGRPALEVRMMDLPMSIDTLRYFAGWADKLEGRQIPTGGFMGRPTVNYTVREAVGVAGLIVPWNAPLMIACWKLAPALAAGCTVVIKPSEDAPLAVGALADLAAQAGFPPGVVNLVHGIGASVGAALVNHPGVDKISFTGSTEVGRTIAREAGARFKRLTLELGGKAPQIIFDDANLEQAIAGVAMGLFVNQGQTCAAGTRVLVQRRHYDDVVGALAHAARSVKVGTPFDPDTQMGALISARHADRVKTHIAAALRDGATMVAGDEPVPSQGFFVRPTVFANVDPAMRIARDEVFGPVGTIIPFDTEDEAVALANDTVYALSASLWTRDLTTAHRTAARLRVGAVAVNAWSPLDARLPWGGFKESGVGRDLSQSGLDAYLEEKVVTIAM

SEQ ID NO: 2946 - protein, 362 aa, Rickettsia sp. RDa420
WQDVIDISKVYSEADCFTYDPGFMSTASCRSTITYIDGDQGILRHRGYDIKDLAEKSDFLEVAYLLIYGELPNSKQYNDFTKKVAHHALVNERLHYLFQTFCSSSHPMAIMLAAVGSLSAFYPDLLNFFKEADYELTAIRMIAKIPTIAAMSYKYSIGQPFVYPDNSIDFTENFLHMMFATPCEKYKVNPVIKNALNKIFILHADHEQNASTSTVRIAGSSGANPFACVSTGIASLWGPAHGGANEAVINMLKEIGSVENIPKYIAKAKDKNDNFRLMGFGHRVYKNYDPRAAVLKETCKEVLKELGQLDNNPLLQIAIELEAIALKDEYFIERKLYPNVDFYSGIIYKAMGIPPQMFTVLF

SEQ ID NO: 2947 - protein, 537 aa, Glycine max
  misc_feature (127)..(127): Xaa can be any naturally occurring amino acid
TRPQKFGWVSLVSHLRLSVLLLSVSLGNSASLQENFVQCLNLNSDRTFPFNPLIYTPKSPSFTSVLDSSGKNQRLLVPSTPKPKFIFTPTRDSHVQAAVICSKKLGIHLRVRSGGHDFEGVSYVSEXESPFIVVDLIKLRDINVDIKSNTAWVQAGATTGELYYRIYEKSSLHGFPAGICTSLGIGGHITGGAYGSMMRKYGLGVDNVLDAKIVDANGRILDREAMGEDLFWAIRGGGGGSFGILLWWKIKLVPVPPTVTVFTVKKTLEQGATKILHRWQEVAPYIDENLFIRVIIQPSSDARNKTQRTIATSYNALFLGGARTLLQVMKTSFPELGLTIKDCLETSWIKSVLYIAGFPSDTPPEVLLKGKSTFKFFFKGKSDFVREPIPETGLEGLWQRLLVEDSPLMIWNPYGGRMSQFSESDTPFPYRNGTLYKIQYLSLWQEGDKNAAKHIDWIRKLYNYMGPYVSSLPREAYVNYRDLDLGINTKNSTSYIQASAWGYRYYKNNFDRLVKIKTKVDPQNVFRHEQSIPPLPK

SEQ ID NO: 2948 - protein, 235 aa, Zea mays
  misc_feature (200)..(200): Xaa can be any naturally occurring amino acid
MKTSVVVAALAAVLFAAQSYASLAGASGPRVIIVGAGMSGISAGKTLWEAGVRDLLILEATGRVGGRMHKHNFGGINVEIGANWVEGLGGDQLNPIWPLVNSTLKLRNFYSDFDSVVGNVYKENGGGLYDEEYVQKRMDRAYEVEELGANLTKKMHPSGRDDISVLAMQRLFNHQPNGPTTPVDMALDYFIYDYEFAEPXRVTSLQNTQPTPTNADFGEDNYFAADQRGYESIIH

SEQ ID NO: 2949 - protein, 369 aa, Rickettsia sp. RDla440
DSEFAELKIRGKIFKLPILKASIGEDVIDISRVSAEADCFTYDPGFMSTASCQSTITYIDGDKGILRHRGYDIKDLAEKSDFLEVAYLLIYGELPSGEQYNNFTKQVAHHSLVNERLHYLFQTFCSSSHPMAIMLAAVGSLSAFYPDLLNFKEADYELTAIRMIAKIPTIAAMSYKYSIGQPFIYPDNSLDFTENFLHMMFATPCTKYKVNPIIKNALNKIFILHADHEQNASTSTVRIAGSSGANPFACISTGIASLWGPAHGGANEAVINMLKEIGSFEYIPKYIAKAKDKNDPFRLMGFGHRVYKNYDPRAAVLKETCKEVLKELGQLDNNPLLQIAIELEAIALKDEYFIERKLYPNVDFYSGII

SEQ ID NO: 2950 - protein, 313 aa, Neisseria meningitidis Z2491
MAIQWFPGHMNKAKKAIAERAKSVDMVIEMLDARMPASSENPLLAQLSKGKPKLKILNKQDLADPERTKIWLEHYNSRPDTCAIALDSSETGAHGKITQACRAMIPHRQGIDKPLRVLICGIPNVGKSTLINGMIGKKSAKTGNEPGITKAEQRLFLADDFWLYDTPGMLWPKIIVEESGYNLAAGGSVGRNALDEEEVALELLDYLRRHYLPMLQERYQADKDPSSHWDENVWLEWIAKKRGAVLSGGRINYQKAAENILTDFREGKIGRITLETPNQWETWLKKARQKEAELKAIREARKAERKGQKPSEA

SEQ ID NO: 2951 - protein, 378 aa, Leuconostoc mesenteroides
MVNMDEVLSIHQAHTGVLDIESCFDITTPTDLSEAYTPGVAGLAKLIAKDTSKKRDYTMSGKLIPVITDGSAVLGLGNIGPAAGLPIVEGKALIYKNFANVDALPMALNQMSVDQFVDTVKAIAPSFAGIHLEDISAPKVFEIERRLSNELDIPVYHDDQTGTAIVVLAGIMNAAKVVGKNVHDLKIVVNGIGRCTAGVATTKILIAAGICNITLVDINGVINLGDANSNSYQQELVREVTQVDGKTLDDVIANQDVFIGLSDANVLSGKQVARMNENPIIFALANPVPEISPDDAKKAGAAVIATGSSQWPNQVNNVLVFPGLFKGLLESGIKHVDMALQLNVAHALANMISEPDATHIVPAVFDDDVGELGRNSSS

SEQ ID NO: 2952 - protein, 345 aa, Bacillus sp. KSM-K16
MRAIEVRKPGDIHVVEVQKPELETDKDVLVKVQAVGICGSDMHIYHGSNPFTVYPRIIGHEVGGIVEEVGSGVHGLRRGDRVALEPISSCGVCYACKKGRPNVCAKLEVFGVHRDGGMREWMVAPEANWHKVNGDLPFEAAALVEPMTIGAQAAYRGNIEPGDTVFIMGAGPTGIACLIMAKQKGATVFISDLQANRLDYAKQVGADFTIHLPHEKPEAVLFEKTDGEFANVVIDAVGTSTTFAEAVKLASVAGTVVTLGFNETPSDIPSLLLTKKELTVAGSRLQTNQFPDVIRQVNEQKVDPASIISHRFDFDEVKKAIELLEKEPAHVRKAVLIFEREDESK

SEQ ID NO: 2953 - protein, 377 aa, Zea mays
IGYLEAGQVHEVMATRSKIYLALELVRGGELFARIVRAGRVKEDVARRYFRQLIHAVDFCHARGVYHRDLKLENLLLDDAGNLKVVDFGLSALADHARSDGLLHTLCGTPGYVAPEVFRNKGYDGAKADIWSCGVILYVLLAGSLPFPDDNVAAMFRKMSRGDYRCPPWLSTEARRLIPKLLDPDPDTRITIAQLVETPWFNKPSVSRSVRAAAGATEPPAEPASSAKDGGDKDEPPETMNAFHLISLSAGFDLSPLFDVEGGPARGPREGGMRFATREPASGVVSRLEEVAARGGGRMRVTKSGARGVRLEGAERGGRKGRLAVAADIFCVAPSVLVVDVKKDGGDSLEYRSFCSEELRPALKDIVWAADPQPAVV

SEQ ID NO: 2954 - protein, 510 aa, Callistephus chinensis
MSILSLLVYFCISLLVIIALVNMFITRHTNRLPPGPAPWPVVGNLPHLGAIPHHTLAALATKYGPLVYLRLGFVHVVVASSPSVAAQFLKVHDLKFASRPPNSGAKHIAYNYQDMVFAPYGPQWTMFRKICKDHLFSSKALDDFRHVRQEEVAILARGLAGAGRSKVNLGQQLNMCTANTLARMMLDKRVFGNESGGDDPKANEFKEMATELMFLAGQFNIGDYIPVLDWLDLQGIVKKMKKLHTRFDKFLDVILDEHKVIASGHIDMLSTLISLKDDTSVDGRKPSDIEIKALLLELFVAGTDTSSNTVEWAIAELIRQPHLLKRAQEEMDSVVGQNRLVTEMDLSQLTFLQAIVKEAFRLHPSTPLSLPRIASESCEVDGYYIPKGSTLLVNIWAIGRHPEVWTDPLEFRPTRFLPGGEKPGIVVKVNDFEVLPFGAGRRICAGMSLALRTVQLLMGTLVQAFDWELANGIKPEKLNMDEAFGLSVQRAEPLVVHPRPRLPPHVYKSG

SEQ ID NO: 2955 - protein, 215 aa, Clostridium perfringens
MKIFIDTANVEEIRKASKLGVLAGVTTNPSLIAKEGRDIKEVIEEICSIVDGPISAEVMALECDEMVREGRELAKIHKNIVIKIPMCEEGLKAVKVLASEGIRTNVTLIFSPLQALLAARAGASFVSPFLGRLDDIGNPGIEIVTQIAEMFALHGIDTEIISASVRNPMHVLDSAMAGSHIATIPYNVILQMVKHPLTDAGMKKFIEDYNKAFNK

SEQ ID NO: 2956 - protein, 221 aa, Triticum aestivum
MTRASTLDFRRKTQGQNNWSGPLRPVNVIRNKFPTYKNGSNGIVIKFADEPETPSLKESVAKETADLLDRRQRLSVRELAMKFEKGLSTATLLSNEVKCKQVALLERDILLKNLKSVLESLRGQVAGKYKDEFEESVSMVDILAVQLSKRENELRQQKTEVTRIATSLKLASEDARRIVDEERTNARAEIENARAAVQRVQKVLQEKENSSQRIGKQVDID

SEQ ID NO: 2957 - protein, 117 aa, Glycine max
  misc_feature (73)..(73): Xaa can be any naturally occurring amino acid
MAAENVVEFTDLPVKRPREEEEGTNGVSNDAVSALPNDPQYPGISAVIPGEAHSLKMEKILFQGKSDYQNVMXFQSSTYGKVLVLDGVIQLTERDECAYQEMITHLPLCSIPNPKKV

SEQ ID NO: 2958 - protein, 511 aa, Lycianthes rantonnei
MVLLLISELCASAIIFIIVHIIISKLIATGWGRRQRLPPGPMGWPVIGALPLLGTMPHVALAKMAKKYGPIMYLKVGTCGMVVASTPNAAKAFLKTLDINFSNRPPNAGATHLAYDAQDMVFAHYGPRWKLLRKLSNLHMLGGKALEDWANVRANELGHMLKSMFDASRVGGRVVVADMLTFAMANMIGQVILSKRVFVEKGAEVNKFKDMVVELMTVAGYFNIGDFIPQLAWMDLQGIEKGMKCLHKKFDDLLTKMFDEHKATTNERKGKPDFLDVVMANRDNSEGERLSTNNIKALLLNLFTAGTDTSSSAIEWALAEMMKNPQILKKVQQEMDQIIGKNRRLIESDIPNLPYLRAVCKETFRKHPSTPLNLPRISNEPCMVDGYYIPKNIRLSVNIWAIGRDPDVWENPLEFNPERFLSGKNVKIDPRGNDFELIPFGAGRRICAGTRMGIVMVEYILGTLVHSFDWKFSNDVKEINMEESFGLALQKAVPLEAMVTPRLPFDVYYTN

SEQ ID NO: 2959 - protein, 80 aa, Glycine max
MLEFNFMQHILYRQKEQFSDGVGYGWIDGLKAHAEKHVTDRMMLNAANIFPFNTPTTKEAYYYRMIFERFFPQVNLINHA

SEQ ID NO: 2960 - protein, 419 aa, Pseudomonas syringae pv. phaseolicola
MRAISNTPRLYWPPYTPMKMDDCRPSIVRGEGVYLYDDTGRRYIDGISGSYNHCLGHSHFGLIEAVKEQVDTLVHACNISSNTVLPEALAERISGKLVKARLVHTFLVMSGSEGVEAALKMAWQYQINRGCPQRTKVVAIDGAYHGCTLGAMIATRREFINEGAAPLLAAHAIAMPIPSGLEDISHWRALLAEQETTIAAIVIEPVMAMAGTRQFPDGFLRELSALAKKYDIPFICDEVYCGVGRTGAFCESINQGASPDIVILSKCLGGGFPITAVVTTADMTDSFAAQSMPLFRHGHTQSGNLLGCRAALFILDYLDSHRSYEVVAAGGSRLLQGIRENLQTTNSIVSVQGKGLMLSITFETSQACTRAQLAVRRQGVIVGAADRHLKLAPSFLISEPEADELTDRLVSSIRSVSQQ

SEQ ID NO: 2961 - protein, 390 aa, Chlorobium tepidum TLS
MHIGVLTGGGDAPGINACIKTIVTISTEKGYRVTGIRRGWNGLLAFDPDDPASRTEHIVDLDSELVRRIDRTGGTLLHTSRINPGNLKKKEIPPFLRNSPHLLRTGLHHSGNFDLTDHVLRSIDALGLDVIIVIGGDDTIGYADHLAKAAVKVIGVPKTMDNDVYGSDYCIGFGTAVTRSVQYIHQLRTSSGSHERITIVELFGRSTGETCLVSAYLAGVDRALIPEVPFDPETLADYVIQDKAANPSQYAMIAISEGARMIGSKMIEYCGRRYDEDGHEPAGIGQLTRETISMLTGQDVICQQLGYLMRSGIPDALDLMVGFNFAQLAVELIAEGTFGVMVALQKGIYTCLPLAEVSSNTKQVDISELYDPRYYRPKMRSVMGKPMFLY

SEQ ID NO: 2962 - protein, 242 aa, Nicotiana tabacum
MGRGKVQLRRIENKINRQVTFSKRRGGLAKKAHEISVLCDAEVALIVFSHKGKIFEYSSDSCMEQILERYERYSYAERRLLSSNSESSVQENWSLEYAKLKAKIDLLQRNHKHYMGEDLDSLNLKDLQNLEQQLDTSLKLIRSRKNQLMHESISMLQKKEKAIQEENNMLSKKIKEKDKTVGKQAEWHQQNQVPNSASFLLQPHPCLNIGGNYQEEAEEARRNELDLNLDSLYPCHMGCFAT

SEQ ID NO: 2963 - protein, 422 aa, Pyrococcus abyssi GE5
MDPLKFHKGGKIGVISKVPLKTREHLSLAYTPGVAEPCKAIAKDPEKVYEYTSKGNSVAVVSDGSRILGLGNIGPLAGLPVMEGKALLFKRFGGIDAFPIMIGEQDPDKFIEVVKAISPTFGGINLEDIASPKCFYILDKLREELDIPVFHDDQQGTAAVVLAGLINALEVVGKRLDEISVALFGAGAAGFATLRILVKAGVKPGNVRVVELVNGKPMVLTKDLDLEKLFPYRGWLLEKTNDEGIEGGPEEALKGADVLISFTRPGPGVIKPEWIREMSDDPIVFPLANPVPEILPDEAKKAGARIVATGRSDYPNQINNLLGFPGIFRGALDVRARSITDDMIIEAAKAIASVVEEPSEENIIPSPFNPIVYAKEARAVAEEAMKEGVARVKVKGEEIEERTLKLISLWDDILGEVADKLS

SEQ ID NO: 2964 - protein, 245 aa, Nicotiana sylvestris
MGRGRVQLKRIENKINRQVTFSKRASGLLKKAHEISVLCDAEVGLIVFSTKGKLFEYSTDSCMERILERYERYSYAERQLTATDDETPGSWTLEHAKLKARLEVLQRNQRHYAGEDLDSLSMKELQNLEHQLDSALKHIRSRKNQLMHESISELQKKDKALQEQNNNLSKQVKEREKELAQQTQWEQQSHDHLNSSSFVLTQPLSSLHLGEAYPTAGDNGEVEGSSRQQQQNTVMPPWMLRHLNG

SEQ ID NO: 2965 - protein, 242 aa, Nicotiana sylvestris
MGRGKVQLRRIENKINRQVTFSKRRGGLVKKALEISVLCDAEVALIVFSHKGKIFEYSSDSCMEQILERYERYSYTERRLLASNSESSVQENWSLEYAKLKAKIDLQQRNHKHYMGEDLDSLSLKDLQNLEQQLDTSLKLIRSRKNQLMHESISMLQKKEKAIQEENNMLSKKIKEKDNTVGQQVEWHQQNQVPTSASFLLQPHPCLNIGGNYQEEREERRRNELDLNLDSLYPCHMGCFAT

SEQ ID NO: 2966 - protein, 165 aa, Glycine max
  misc_feature (56)..(56): Xaa can be any naturally occurring amino acid
  misc_feature (64)..(64): Xaa can be any naturally occurring amino acid
MAERFEEALGTSSVITEGTHVGALNSLRPGIFGKLQQMMLKEKETDMDFWKKLQAXLGQIWLCXFTYNVKIISRYRDGKLTVCHCSFSKSTENFLLQDNSKGMGCGGRKSSQSTIIFSPRVCNNVDLEVGNLIQIHPPWKEAQVGNDNIIVCTYFSEILFQFDSL

SEQ ID NO: 2967 - protein, 119 aa, Rickettsia canadensis
GGANEAVINMLKEIGSSENIPKYIAKAKDKDDPFRLMGFGHRVYKNYDPRAAVLKETCNEVLKELGQLENNPLLQIAIELEAIALKDEYFIERKLYPNVDFYSGIIYKAMGIPSQMFTV

SEQ ID NO: 2968 - protein, 499 aa, Rubrivivax gelatinosus PM1
MTTATIDWHARSAALTLDGRAVIGGERHPARAGESFDCISPIDGRVLGRVARGQSADIDDAVASARAAFDDGRWSRRPPAARKRVLQAFAEKILSAKEELALLETLDMGKPIQYSLSVDVPSTARCIAWYAEAIDKVYDEIAPTGPGALALIRREAMGVIGAIVPWNYPMIMAAWKLGPALAAGNSVVLKPSEKSPLTALRLAELALAAGLPPGVFNVVPGYGHEAGEALALHPQVDAIGFTGSTRVGRKMLEYAGRSNLKRVYNELGGKSAFLVFPDFDDLDRCAATVAGSMFFNQGESCNAPSRLLVHESIADDFARRVAAEAPQYRPADPLDAKTVMGALVDDGQLRTVMGYIDAGRSEGATVLAGGTQARTDSGGYYVEPTVFDGVRNDMKIAREEIFGPVLSIIRFKDEAEAIRLANDSPYGLQASVWSSHIDRAHRVAASLRAGTVHVNQYDEDDITVPFGGFKQSGNGRDKSLHAFDKYTELKTTWLRINAA

SEQ ID NO: 2969 - protein, 507 aa, Streptomyces coelicolor A3(2)
MTRYAAPGTEGAIVSYQSRYDHFIGGEYVPPARGQYFENPSPVNGLPFTEIARGTADDVERALDAAHEAAPGWGRTSVTERSDILLKIADRMEANLERLAVAESWENGKPVRETLAADIPLAIDHFRYFAGAVRAQEGSLGEIDDDTVAYHFHEPLGVVAQIIPWNFPILMATWKLAPALAAGNAVVLKPAEQTPASIHYWLSLVADLLPPGVLNVVNGFGVEAGKPLASSPRVAKVAFTGETTTGRLIMQYASENIKPVTLELGGKSPNIFFEDVWARDDDFRDKALEGFTMFALNQGEVCTCPSRALVQRGVYAEFMEAAVARTELIKPGHPLDTDTMIGAQASNDQLEKILSYLDIGRQEGAKVLTGGERIEHDGELKGGYYVQPTIFEGHNRMRIFQEEIFGPVVSVTSFDDFDDAVKTANDTLYGLGAGVWTRDMNTAYRAGRAIQAGRVWTNCYHAYPAHAAFGGYKQSGIGRENHKMMLEHYQQTKNILCSYSPKKLGFF

SEQ ID NO: 2970 - protein, 117 aa, male-killing Rickettsia from Adalia bipunctata
HGGANEAVINMLKEIGSSENIPKYIAKAKDKNDPFRLMGFGHRVYKNYDLRAAVLKETCKEVLKELGQLDGNPLIQIAIELEAIALKDEYFIERKLYPNVDFYSGIIYKAMGIPSQM

SEQ ID NO: 2971 - protein, 472 aa, Daucus carota
MVFFRSVSLLNKLRSRAVQQSNLSNTVRWFQVQTSASDLDLRSQLKELIPEQQERIKKLKAEHGKVQLGNITVDMVLGGMRGMTGLLWETSLLDPEEGIRFRGLSIPECQKLLPGAKPGGEPLPEGLLWLLLTGKVPTKEQVDALSAELRSRAAVPEHVYKTIDALPVTAHPMTQFATGVMALQVQSEFQKAYEKGIHKTKYWEPTYEDSITLIAQLPVVAAYIYRRMYKNGQSISTDDSLDYGANFAHMLGYDSPSMQELMRLYVTIHTDHEGGNVSAHTGHLVASALSDPYLSFAAALNGLAGPLHGLANQEVLLWIKSVVSECGENVTKEQLKDYIWKTLNSGKVVPGYGHGVLRNTDPRYICQREFALKHLPDDPLFQLVSNLFEVVPPILTELGKVKNPWPNVDAHSGVLLNHYGLTEARYYTVLFGVSRAIGICSQLVWDRALGLPLERPKSVTMEWLENHCKKSS

SEQ ID NO: 2972 - protein, 486 aa, Pseudomonas stutzeri
MKEIKHFINGAFVDSASGRTFEDINPVNGQVIGRVHEAGRAEVDAAVRAARAALKGPWGKMTVAERAEILHRVADGVTARFDEFLEAECLDTGKPKSLASHIDIPRGAANFKVFADLIKNVPTEAFEMATPDGAGALNYGVRRPKGVIGVISPWNLPLLLMTWKVGPALACGNCVVVKPSEETPLTATLLGEVMQAAGVPAGVYNVVHGFGGDSAGAFLTEHPDVDAYTFTGETGTGETIMRAAAKGVRQVSLELGGKNAGIVFADCDLDKAIEGTLRSAFANCGQVCLGTERVYVERPIFDAFVARLKAGAEALKIGEPNDPEANFGPLISHKHREKVLSYYQQAVDDGATVVTGGGVPEMPAHLAGGAWVQPTIWTGLTDDSAVVTEEIFGPCCHIRPFDSEEEAIELANSLPYGLASAIWTENASRAHRVAGQIEAGIVWVNSWFLRDLRTAFGGSKQSGIGREGGVHSLEFYTELKNICVKL

SEQ ID NO: 2973 - protein, 277 aa, Lotus corniculatus var. japonicus
MCEALKSQYQLCEEIGRGRFGTIFRCFHPISTDTFAVKLIDKSLLADSTDRHCLENEPKYMSLLSPHPNILQIFDVFEDDDVLSMVIELCQPLTLLDRIVAANGTSIPEVEAAGLMKQLLEAVAHCHRLGVAHRDVKPDNVLFGGGGDLKLADFGSAEWFGDGRRMSGVVGTPYYVAPEVLMGREYGEKVDVWSCGVILYIMLSGTPPFYGDSAAEIFEAVIRGNLRFPSRIFRNVSPAAKDLLRKMICRDPSNRISAEQALRHPWFLSAGDTVNVT

SEQ ID NO: 2974 - protein, 119 aa, Rickettsia conorii
AHGGANEAVINMLKEIGSSEYIPKYIAKAKDKNDPFRLMGFGHRVYKNYDPRAAVLKETCKEVLKELGQLDNNPFLQIAIELEAIALKDEYFIERKLYPNVDFYSGIIYKAMGIPSQMF

SEQ ID NO: 2975 - protein, 198 aa, Zea mays
  misc_feature (169)..(169): Xaa can be any naturally occurring amino acid
MATSFQGTTTKCTACDKTVYLVDKLTADNRIYHKACFRCHHCKGTLKLANYNSFEGVLYCRPHFDQLFKRTGSLDKSFEGTPKVVKPERNVGNENATKVSSAFAGTREKCVGCSKTVYPTERVTVNNTMYHKSCFKCCHGGCTISPSNYIAHEGKLYCKHHHIQLIKEXRGTSASLRMTTRRHHRLGHWRRMNKSIDH

SEQ ID NO: 2976 - protein, 330 aa, Glycine max
MGEQLRQANPPVKTSEYDEERVMEWEAGLPTANDLTPLSQPLIPPELASAFSILPEPHRTLLDVNRASRNTLSTLRGGGGSVHQAFSSSNNNHNYDGDGDGGVEEEEEEDDDRDGSGPDSRKQRKIDCGAAEEADSAVQTETSAERTAVKRPRLVWTPQLHKRFVDVVAHLGIKNAVPKTIMQLMNVEGLTRENVASHLQKYRLYLKRMQGLSNEGPSASDQLFASTPVPQSLHDSAPPSNHSNGHGHGHGHSNGRGHGHGHGHGHLSVPMMSMPYPPPLMSMPYPPPMMSGMPHGHMGIPMPNSSATSAYHPYNMLHQRDWPHLAPNDK

SEQ ID NO: 2977 - protein, 444 aa, Arabidopsis thaliana
MVRRQEEEKKAEKGMRLGKYELGRTLGEGNFGKVKFAKDTVSGHSFAVKIIDKSRIADLNFSLQIKREIRTLKMLKHPHIVRLHEVLASKTKINMVMELVTGGELFDRIVSNGKLTETDGRKMFQQLIDGISYCHSKGVFHRDLKLENVLLDAKGHIKITDFGLSALPQHFRDDGLLHTTCGSPNYVAPEVLANRGYDGAASDIWSCGVILYVILTGCLPFDDRNLAVLYQKICKGDPPIPRWLSPGARTMIKRMLDPNPVTRITVVGIKASEWFKLEYIPSIPDDDDEEEVDTDDDAFSIQELGSEEGKGSDSPTIINAFQLIGMSSFLDLSGFFEQENVSERRIRFTSNSSAKDLLEKIETAVTEMGFSVQKKHAKLRVKQEERNQKGQVGLSVTAEVFEIKPSLNVVELRKSYGDSCLYRQLYERLLKDVGTSSPEQEIVT

SEQ ID NO: 2978 - protein, 116 aa, Glycine max
  misc_feature (25)..(26): Xaa can be any naturally occurring amino acid
ESGRAIVSHHSVLIFEAVGTSSTTXXGASPALSAQYLAEELSEDYRNLSELAFRGEYETCLVYTEEMKERCVEQFKQGTVFPIIPIHRLDEKPSVRGILSDLTCDSDGKIDKFING

SEQ ID NO: 2979 - protein, 485 aa, Bacteroides thetaiotaomicron VPI-5482
MDKTYKRHSFTKLWIATAMFIFCCFATSAFAQEAVDADTFMTTTETITEVKTTPEIAETATASAETTPDTIGELALGLNTVWMLLAAMLVFFMQPGFALVEAGFTRVKNTANILMKNFVDFMFGSLLYWFIGFGLMFGAGGLIGMPHFFDLSFLDSDLPREGFLVFQTVFCATAATIVSGAMAERTKFSMYLVYTIFISVLIYPISGHWTWGGGWLMNGEEGSFMMNLFGTTFHDFAGSTIVHSVGGWIALVGAAILGPRIGKYGKDGKSRAIPGHNLTVAALGVFILWFGWFGFNPGSQLAASTEADAMAISHVFLTTNLAACAGGFFALAMSWMKYGKPSLSLTLNGVLAGLVGITAGCDAVAPSGAVLIGAICGVVMIFAVDFIDKVLKIDDPVGASSVHGVCGFLGTVLTGLFSTSEGLFYGHGAGFLGAQLFGAVVVGVWAAGMGFIIFKVLDKIHGLRVPARVEEEGLDIYEHGESAYN

SEQ ID NO: 2980 - protein, 236 aa, Rickettsia conorii str. Malish 7
MIDYTKTLTAASKHKTFDEGLRQYMLKVYNYMALALLLTGVAAVTTISVEPIYNLMFQTGFGTIIMFAPLGIALYFFMGFGQMNLPTAQILFWVYAGLTGMSLAYLALIYTGASIARTFFICSSVFGAMSLYGYSTSRDLTSMGSFFAMGLIGLIIASLVNLFLKSSALSFATSLIGIVIFMGLIAWDTQKIKSMYYMAGNDEVGQKLSIMAAFTLYLDFINLFLYLMRFLGNRRD

SEQ ID NO: 2981 - protein, 304 aa, Guillardia theta
MNENTKFLEEVIKKLTQSKKIKNIFLTEKEIGKLCYLSRKVFNNENSMLYLNSPIKICGDIHGQFYDLLRLFEFNGYPPTEKYLFLGDYVDRGKQSIEVISLLFAFKVRYPTKIFILRGNHESSKINRIYGFYDECKKKYNIKIWKIINETFNYLPLAAIIEKKIFCIHGGLSPFLNSIKQIEDIARPVEIPEKGLLCDLLWSDPNEDKQGWNLSDRGISYTYGDNIVKEFIEKFDFDLICRAHQVVDKGYKFFSNRMLVTIFSAPNYCGEFSNAGAVMNVDKLLVCSFQILKPYFGKKINSSK

SEQ ID NO: 2982 - protein, 495 aa, Neurospora crassa
MLTPTTLLLLSPLLYLLTLLFRTALYRLRARSLGCSPVAVYPHKDPILGLDLFRESLRAMNTHALLPLWDARFKRYGNTHYTLTLGKWVLMTNEPENVKVILGTKMAEWPIDGPRLHASVAVLGKKSIFTTNGAQWREARGMIRPSFVRDQVADLHCFAKHVGNFLNAIPKDGSTFDMQELLLSMTMDSSTDFLLGCSTNSLLQPSPEAKQFLEDFEYTSREAAKKSRLGTLLNWLPNGEFQATVTRVREYVRAYIRKSQAEKTDKKERDYVFLHEILKSGADEEHAIDQVLSVIIAGRDTTAAAMTACFYYLARNPEAVKKLRKEIFDMEDEMPTWEQLKNMKYLNMIIKEGLRLFPPASTNSRAPIKDTVLPRGGGPDGKQPILVPKGQVVRWSLYSLHRRKDIWGEDAHEFRPERWDENLRVGWEYIPFSGGPRICLGQQFALTQIEYALFKFFRAFKSIEPRDDNGPLLLRTNLTVTFAKGCLVSATPDSN

SEQ ID NO: 2983 - protein, 509 aa, Bordetella bronchiseptica RB50
MTTVHSATPEETRRLLQQLGVDPARYDGGTLEVRSPIDGQAIARLPELTAEQARARVADARQAFLAWRKVPAPRRGELVRLLGEELRAAKAELGRLVSIETGKILSEGEGEVQEMIDICDFATGLSRQLYGLTIATERAEHRMMETWHPAGPVAIISAFNFPVAVWAWNAAIALVCGDSLLWKPSEKAPLTALATQALLERALARFGDAPAHLSQVLIGGREVGEALVDDPRIPIVSATGSTAMGRKVGPKVAERFGRSILELGGNNAAIICPSANLDLALRGIAFSAMGTAGQRCTSLRRIFVHEQIADDLVARLKQVYESVAIGDPRDSGTLIGPLRDQAAFDAMQRSLADARAAGGRVTGGAREPVGGHDQAYYARPALVEMPAQSEVVERETFAPILYVMRYRDLDEAIALQNDVPQGLSSSIFTNDLREAERFVSAEGSDCGIANVNIGPSGAEIGGAFGGEKETGGGREAGSDSWKAYMRRTTNTVNYGNALPLAQGVKFDVA

SEQ ID NO: 2984 - protein, 297 aa, Brassica napus
MGVMVNHHLLAIIFGILGNAISFLVFLAPVPTFYRIYKNKSTESFQSLPYQVSLFSCMLWLYYALTKQDAFLLITINSFGCVVETIYIAMFFTYATKEKKMAAIKLFLTMNVAFFSLIIMVTHFAVKRPSLQVSVIGWICVAISVSVFAAPLMIVARVIKTKSVEFMPFTLSFFLTISAVMWFAYGAFLHDICIAIPNVVGFILGLVQMVLYGVYRNSGEKLDIGKRNNSSSEQLKTIVVMSPLGLSEMHPVDVTVTEPVIPLSYTVHHEDPSKITKEEEPSTEAGQSHVETAPSRI

SEQ ID NO: 2985 - protein, 342 aa, Burkholderia cepacia R18194
MKALAKLERGPGLTLTRVKRPEVGHNDVLIKIRRTAICGTDIHIWKWDDWAQKTIPVPMHVGHEYVGEIVEMGQEVRGFAIGDRVSGEGHITCGFCRNCRAGRRHLCRNTVGVGVNREGAFAEYLAIPAFNAFKIPPEISDDLASIFDPFGNATHTALSFNLVGEDVLITGAGPIGIMAVAIAKHVGARNVVITDINDYRLELARKMGATRAVNVARESLRDVMSDLHMTEGFDVGLEMSGVPSAFTSMLEAMNHGGKVALLGIPPAQTAIDWNQVIFKGLEIKGIYGREMFETWYKMVAMLQSGLDLSPIITHRFAADDYEKGFAAMLSGESGKVILDWTA

SEQ ID NO: 2986 - protein, 444 aa, Brucella suis 1330
MAATFDTILKGATIVNHDGIGQRDIGIRNGRIAAIGSLAGNSAGEVIDCTGLHILPGVVDSQVHFREPGLEHKEDLETGSLAAVLGGVTAVFEMPNTKPLTTSAEMLEDKIRRGRHRMHCDFAFWVGGTRDNAKDVAELERLPGAAGIKVFMGSSTGDLLVEDDDGVRSILRNTRRRAAFHSEDEFRLKEREGLRVEGDPSSHPVWRDEIAALQCTQRLVRIARETGARIHVLHISTAEEIDFLKDYKDVATCEATPHHLTLSADDYKALGNLIQMNPPVRDKRHREGVWKGIDQGIVDVLGSDHAPHTLEEKQKSYPASPSGMTGVQTLVPIMLDHVNAGKLSLERFVDLSSHGPNRIFGMARKGRIAVGYDADLTIVDMKRRETITHEQAGSKAGWTPYHGKTVTGWPVGTFVRGIKVMWEAEIVNPHKGEPVEFLEALPRR

SEQ ID NO: 2987 - protein, 201 aa, Glycine max
  misc_feature (164)..(164): Xaa can be any naturally occurring amino acid
MSGRVSGKVKWFNDQKGFGFISPDDGSDDLFVHQSQIKSDGFRSLAEGESVEFAIESESDGRAKAVDVTGPDGASVQGTRRGGDGGRSYGGGRGGGGGGYGGGGGYGGGGGYGGGGGYGGGGRGGGGGACYNCGESGHLARDCSGGGGGDRYGGGGGGGRYGGXGGGGRYGGGGGGGGGGGSCYSCGESGHFARDCPSSAR

SEQ ID NO: 2988 - protein, 126 aa, Rickettsia prowazekii
GPAHGGANEAVINMLKEIGSSENIPKYVAKAKDKNDPFRLMGFGHRVYKSYDPRAAVLKETCKEVLNELGQLDNNPLLQIAIELEALALKDEYFIERKLYPNVDFYSGIIYKAMGIPSQMFTVLFA

SEQ ID NO: 2989 - protein, 296 aa, Bacillus cereus ATCC 14579
MVIQWFPGHMAKARRQVTEKLKLIDVVIELVDARLPLSSRNPMIDEIITHKPRLVVLNKADMADDRLTKQWIAYFKEKGHMAISINAQAGQGMKEIAAACKVLVKEKFDKMVAKGIRPRAIRALIVGIPNVGKSTLINKLAKKNIAKTGDRPGVTTAQQWIKVGKEMELLDTPGILWPKFEDQLVGLRLATTGAIKDSILNLQDVAVYALRFMEKHYPERLKERYNLNEIPEDIVELFDAIGKNRGCLMGGGMIDYDKTSELVLRELRGGKLGKMTFETPEEFGEQVEDVEKIEEV

SEQ ID NO: 2990 - protein, 459 aa, Rubrivivax gelatinosus PM1
MSRTTQDWQAADAAHFLHPFTDFDALAKKGSRIIERAENIYLWDSEGHKILDAMSGLWCVNVGYGRQELIDAATAQLKQLPFYNAFFQTATPPAIELAELLSEVTPPQFRHVFFSGSGSEGNDTVVRMVRRYWDVLGQPERKVIISRNNAYHGSTMAGASLGGMSGMHAQGGLPIPDITHIEQPYWYELGRPQGLSRDDFGRLAASWLEKKILEVGPERVAAFIGEPVQGAGGVIIPPATYWPAIQAICDKYGILLVSDEVICGFGRTGRWWGCETMGTRPDLMTFAKGVTSGYIPLGGVMVGERVARVLIEQGGEFNHGYTYSGHPVACAVALANIRLIQRERLVDRVRDDLGPYLAQHFEALKAHPLVGDAETCGLMGAVVLARDKASGTPFASDLEVGMVCRGHCFGNGLIMRAVGDRMIIAPPLVMTRDQIDEMMVLIKRCLDLTWADVKARGWV

SEQ ID NO: 2991 - protein, 119 aa, Rickettsia typhi
GGANEAVINMLKEIGSSENIPKYVAKAKDKNDPFRLMGFGHRVYKSYDPRAAVLKETCKEVLNELGQLENNPLLQIAIELEALALKDEYFIERKLYPNVDFYSGIIYKAMGIPSQMFTV

SEQ ID NO: 2992 - protein, 287 aa, Neurospora crassa
MSGPKYTPAPQEDPDAHLYYPQPPPSYQATAESSAANAVLGDQARLFSGAPRSSQDDDHDIPDDFKFGGSVAEATVEIRHQFIRKVYTILTVQLIATGAVSALSFLSDGYRNWIQSHPAMIWVSFAGALVFMLLTFWKRQSYPTNLLFLSGFTLLEAYTISVCVSFFDSTTVLLAVVITAGIFVFLTAFACQTKYDFTSWMPYLGGALWGLIITGFIYAFLPHTSTSELVYGGVAALVFSGYILVDTQLVMRKYHVEEEIAAAISLYLDILNLFLAILRILNSQSDN

SEQ ID NO: 2993 - protein, 531 aa, Zea mays
  misc_feature (452)..(452): Xaa can be any naturally occurring amino acid
MEAVGVTPAPVAAPEKKKLLDLKDPFPAAANGGTKASPASKWAMKKKLVGGDAGYVLEDVPHLTDYMPQLPTYPNPLQDNPAYSVVKQYFVNPDDTVTQKIVVHKTSARGTHFRRAGPRQRVYFQSDEVNAAIVTCGGLCPGLNTVIRELVCGLYDMYGVSSVVGIEGGYKGFYSKNTVALTPKSVNDIHKRGGTVLGTSRGGHDTAKIVDCLQDRGINQVYIIGGDGTQKGASVIYEEVRRRGLKCSVVGVPKTIDNDIAVIDKSFGFDTAVEEAQRAINAAHVEAESAENGIGVVKLMGRNSGFIAMYATLASRDVDCCLIPESPFYLEGKGGLLEFVERRLKDNGHMVIVVAEGAGQDLIARSMNFVDTQDASGNKLLLDVGLWLSQKIKDHFKKKPSFPITLKYIDPTYMIRAVRSNASDNVYCTLLAHSALHGAMAGYTGFTVAPVXGRHAYIPFYRITEKQNKVVITDRMWARVLCSTNQPCFLSHEDVENMKHDDDEHHHMHNTQLLEGGSSPVSKCNGSAAAV

SEQ ID NO: 2994 - protein, 177 aa, Campylobacter jejuni
MKHNLTIWLTGLAGSGKSYIAQALYRKLKEKYDNVIYLDGDELRELLGYFSYDKKGRMDVSFKRSDFARFLSNQGMIVIVSAISMWNEIYEYNRKYLKNYFEIYIKCEFEELKRRDKKNLYTQALKGEISNVVGVDIPYDEPKADLVIDNTQMTALDDKVCLILTALSQNLDNSKRE

SEQ ID NO: 2995 - protein, 116 aa, Triticum aestivum
PTVMASSATSVAPFQGLKSTAGLPVSRRSNGASLGSVSNGGRIRCMQVWPIEGIKKFETLSYLPPLSTEALLKQVDYLIRSKWVPCLEFSKVGFIFREHNASPGYYDGRYWTMWNC

SEQ ID NO: 2996 - protein, 506 aa, Rhodospirillum rubrum
MLYAAPGTADAIFAFKPRYDNFIDGTWQPPVRGEYFDNVTPITGKVFCKAARSTEEDITLALDAAHAAADRWGRTTAAERALILNRIADRLQDNLETLAYVESIDNGKPIRETLAADIPLAIDHFRYFAACIRAQEGSLSQIDETTIAYHFNEPLGVVGQIIPWNFPILMATWKLAPALAAGNCIVLKPAEQTPISILVLTELIADLLPPGVLNVVNGFGLEAGKPLASSKRIAKIAFTGETATGRLIMQYASQNLIPVTLELGGKSPNVFFDDIASADDSFFDKAVEGFVMFALNQGEICTCPSRALIHESLYDRFIERALARVAVIKQGSPLDTETMIGAQASTEQMDKILSYMDIGREEGATVLAGGARAELGGELDGGYYVQPTVFKGNNSMRIFQEEIFGPVVAVTTFKDEDEALHLANDTHYGLGSGVWTRDGNRAFRFGRGIKAGRVWTNCYHLYPAHAAFGGYKQSGIGRENHHMMLDHYQQTKNLLVSYDPKAMGFF

SEQ ID NO: 2997 - protein, 213 aa, Oryza sativa (japonica cultivar-group)
MGVEVCVKAAVGHPDTLGDCPFSQRVLLTLEEKKVPYEMKLIDVQNNPDWFLKISPEGKVPVFNGGDGKWIPDSDVITQVIEEKYPTPSLVTPPEYASVGSKIFSCFTTFLKSKDPNDGSEKALLTELQALEEHLKAHGPFINGQNISAADLSLAPKLYHLQVALEHFKGWKIPEDLTNVHAYTEALFSRESFIKTKAAKEHLIAGWAPKVNA

SEQ ID NO: 2998 - protein, 505 aa, Oryza sativa (japonica cultivar-group)
METIQEGDVVPGSPPPPVASAAASSGAAGDHRTYSNPAFQGWVGLRAWLGIGIGIGIGMVSGSIEEAWYDSFAMSESDGEDDFHSVQDDAFSLNGFENDAALSTRDANGGSFNGSSHSSEQHYRKPRSSELSRGNLENGVRSSVSHEDVASVSAEDSAHGGGGRILDDCGLLPNNCLPCIASAVGVNEKKRPLSTSPTHSMKMPSLKLSFKKKSGEAHPSSTLLSTKDFLERPLAGSQVQLCLLEKKILNSWSHIDPGTFRVRGSNYFRDKKKELAPNYAAYYPFGVDVYLSPQKLNHISRYVQLPDVQISSKLPPLLVVNVQVPLYPASLFQNEIDGEGMSFVLYFRLSDAYSKELPPSFIENIRKLVDDHVEKVKAFPMETTIPFRERLKILGRVANLEDLPLSAAERKLMHAYNEKPVLSRPQHEFYLGDNYFEVDIDMHRFSYISRKGFETFLDRLKICMLDVGLTIQGNKAEELPEQILCCVRLNGIDYTQYKPLMTHGA

SEQ ID NO: 2999 - protein, 488 aa, Listeria innocua Clip11262
MADVRKLKNYINGEWVESKADKYEDVINPATGEVLCQVPISTRAELDQAAVIAEQAFEKWSQVAVPRRARVLFSFQQLLIQHKEELARLITLENGKNLSEARGEVQRGIENVEFAAGAPTLMMGDSLASIATDVEAANYRYPVGVVGGIAPFNFPMMVPCWMFPMAIALGNSFILKPSERTPLLMEKLVELFSEAGLPKGVFNVVYGAHDVVNGILENETIKAVSFVGSKPVGEYVYKTGSANLKRVQALTGAKNHTIVLNDADLEDTVTNVISAAFGSAGERCMACAVVTVEEGIADDFLAALRTAAQNVKIGNGLDDGVFLGPVIREENQKRTIAYIEKGVEEGAKLTVDGRETGLSEGYFVGPTILEDVTTDMTIWKDEIFAPVLSVIRVKNLQEAVRVANQSEFANGACIFTNNAKAIRYFREKIDAGMLGVNLGVPAPMAFFPFSGWKSSFYGTLHANGKDSVDFYTHKKVVTARYSLKGYEE

SEQ ID NO: 3000 - protein, 350 aa, Coffea canephora
MAEEEACLFAMSLASASVLPMVLKSAIELDLLELIAKAGPGAYVSPSELAAQLPTHNPEAPIMLDRILRLLATYSVLDCKLNNLADGGVERLYGLAPVCKFLTKNADGVSMAPLLLMNQDKVLMESWYHLKDAVLDGGIPFNKAYGMTAFEYHGTDPRFNKVFNQGMSNHSTITMKKILEVYRGFEGLKTVVDVGGGTGATLNMIISKYPTIKGINFELPHVVEDAPSHPGVEHVGGDMFVSVPKGDAIFMKWICHDWSDDHCRKLLRNCYQALPDNGKVILAECVLPEAPDTSLATQNVVHVDVVMLAHNPGGKERTEKEFEALAKGAGFKEFRKVCSAVNTWIMELCK

SEQ ID NO: 3001 - protein, 80 aa, Triticum aestivum
MAPTVMGSKDTYDAPFQGLKSTDGLPVRRRSNGASLGSVSNGGRIRCMQVWPMEGIKKFETLSYLTPLSTEALLKQVEYL

SEQ ID NO: 3002 - protein, 350 aa, Coffea canephora
MAEEEACLFAMSLASASVLPMVLKSAIELDLLELIAKAGPGAYVSPSELAAQLPTHNPEAPIMLDRILRLLATYSVLDCKLNNLADGGVERLYGLAPVCKFLTKNADGVSMAPLLLMNQDKVLMESWYHLKDAVLDGGIPFNKAYGMTAFEYHGTDPRFNKVFNQGMSNHSTITMKKILEVYRGFEGLKTVVDVGGGTGATLNMIISKYPTIKGINFELPHVVEDAPSHSGVEHVGGDMFVSVPKGDAIFMKWICHDWSDDHCRKLLKNCYQALPDNGKVILAECVLPEAPDTSLATQNVVHVDVVMLAHNPGGKERTEKEFEALAKGAGFKEFRKVCSAVNTWIMELCK

SEQ ID NO: 3003 - protein, 121 aa, Brassica napus
  misc_feature (107)..(107): Xaa can be any naturally occurring amino acid
  misc_feature (118)..(118): Xaa can be any naturally occurring amino acid
GRVGFEQRWNRQGGRDILVKIRDLDDIIIPPSPVLFSEDHDSWNVQLFRSIDGGAAAAFPDSPEAAAEAGLVSGKDNIIDRSIQDAYIHAIRRAKDFIYIENQYFLXSSFAWSADGIXPDE

SEQ ID NO: 3004 - protein, 163 aa, Brassica napus
  misc_feature (127)..(127): Xaa can be any naturally occurring amino acid
MVGAKPVKMVENGSDGTSLLNGRYEIGRLLGHGTFAKVYHARNVTTGKSVALKVVAKEKVAKAGMEEQIKREISVMKMVKHPNIVELHEVMASKTKIYFAMELVRGGELFAKVAKGRLREDAARVYXKQLISAVDFCHSRGVTTRDLKPENLLLDEQGNLKIT

SEQ ID NO: 3005 - protein, 188 aa, Saccharum hybrid cultivar
SSVVTAAAAIQADPAEKPRAPKAQVVGWPPVRSFRKNIMSVQSDKGAGGSKDADKSSPPPAAAAAVGGAAFVKVSLDGAPYLRKVDLKMYKMYKSYQELSKALEKMFSSTIGSCGSQGMNGMNESKLVDLLNGSEYVPTYEDKEGDWMLVGDVPWEMFVESCKRLRIMKGSEAIGLAPRAMEKCKNRS

SEQ ID NO: 3006 - protein, 279 aa, Pyrococcus abyssi GE5
MEFIEWYPRGYGVAFKVKEKIFEGHSKFQKIEVYETEGFGRLLALDGTVQLVTEGEESYHESLVHPVMLAHPNPRRVLVIGGGDGGTIREVLRHEEVEEAIMVEIDEEVIEVAIKFIGIDGGLLDKMMKGECKRAKLIIGDGVEFIKENSGFDVVIVDSTDPVGPAKMLFSREFYERAYEALNDPGIYVTQAGSVYLFTDELVTAYENMSRVFDKVYAYSFPVIGYASPWAFLVGIKGDLDFRKIDLERAKKLNLKYYDPENHETIFQMPRYVREMLKP

SEQ ID NO: 3007 - protein, 396 aa, Escherichia coli CFT073
MLDAQTIATVKATIPLLVETGPKLTAHFYDRMFTHNPELKEIFNMSNQRNGDQREALFNAIAAYASNIENLPALLPAVEKIAQKHTSFQIKPEQYNIVGEHLLATLDEMFSPGQEVLDAWGKAYGVLANVFINREAEIYNENASKAGGWEGTRDFRIVAKTPRSALITSFELEPVDGGAVAEYRPGQYLGVWLKPEGFPHQEIRQYSLTRKPDGKGYRIAVKREEGGQVSNWLHNHANVGDVVKLVAPAGDFFMAVADDTPVTLISAGVGQTPMLAMLDTLAKAGHTAQVNWFHAAENGDVHAFADEVKELGLSLPRFTAHTWYRQPNEADRAKGQFDSEGLMDLSKLEGAFSDPTMQFYLCGPVGFMQFAAKQLVDLGVKQENIHYECFGPHKVL

SEQ ID NO: 3008 - protein, 114 aa, Triticum aestivum
  misc_feature (74)..(74): Xaa can be any naturally occurring amino acid
  misc_feature (84)..(84): Xaa can be any naturally occurring amino acid
  misc_feature (91)..(91): Xaa can be any naturally occurring amino acid
  misc_feature (108)..(108): Xaa can be any naturally occurring amino acid
MSDTDEHHFESKADSGASKTYPQQAGAIRKGGHIVIKARPCKVVEVSTSKTGKHGHAKCHFVAIDIFNGKNLRXYVPSSHNCDXPHVDRQXYQLIDITDDGIHLLTEXGNTKDD

SEQ ID NO: 3009 - protein, 372 aa, Bacillus cereus ATCC 10987
MKAEEKFSPGLDGIVAAETKISFLDTVKGEIVIQGYDLIELSKTKEYLDIVHLLLEEHLPNEDEKAKLEKKLKEEYAVPEGVFNVLKALPKETHPMDGLRTGVSALAGYDNDIENRSLEVNKSRGYKLLSKVPNIVANSYHILNNEEPIEPLKELSYSANFFYMLTGKKPTELEEKIFDRSLVLYSEHEMPNSTFTARVIASTQSDLYGALTGAVASLKGSLHGGANEAVMYMLLEAGNVEKFEELLQKKLYNKEKIMGFGHRVYMKKMDPRALMMKEALKQLCDVKGDYTLYEMCEAGEKIMEKEKGIYPNLDYYAAPVYWMLGIPIQLYTPIFFSSRTVGLCAHVIEQHANNRLFRPRVNYIGERHVLSK

SEQ ID NO: 3010 - protein, 157 aa, Candida albicans
MAEEDTFETADAGAALTFPMQCSALRKNGHVVIKNRPCKIVDMSTSKTGKHGHAKVHLVAIDIFTGKKLEDLSPSTHNMEVPNVSRQEFQLLDIDDGYLSLMTADGDTKDDVKVPEGELGDKLQSEFDEGKDLIVTIISAMGEEAAISYKEAPKGSA

SEQ ID NO: 3011 - protein, 62 aa, Zea mays
ACLQNTQPTPTNADFGEDNYFVADQRGYESIIHSIGSSYLSTDGNGKLKDRRILLNKVLADM

SEQ ID NO: 3012 - protein, 507 aa, Zea mays
MASNGCNGNGNGKAAPAGVVVPEIKFTKLFINGEFVDAASGKTFDTRDPRTGDVLAHVAEADKADVDLAVKSARDAFEHGKWPRMSGYERGRIMSKLADLVEQHTEELAALDGADAGKLLLLGKIIDIPAATQMLRYYAGAADKIHGDVLRVSGRYQGYTLKEPIGVVGVIIPWNFPTMMFFLKVSPALAAGCTVVVKPAEQTPLSALYYAHLAKMAGVPDGVINVVPGFGPTAGAALASHMDVDSVAFTGSTEVGRLIMESAARSNLKTVSLELGGKSPLIIFDDADVDMAVNLSRLAVFFNKGEVCVAGSRVYVQEGIYDEFVKKAVEAARSWKVGDPFDVTSNMGPQVDKDQFERVLKYIEHGKSEGATLLTGGKPAADKGYYIEPTIFVDVTEDMKIAQEEIFGPVMSLMKFKTVDEVIEKANCTRYGLAAGIVTKSLDVANRVSRSVRAGTVWVNCYFAFDPDAPFGGYKMSGFGRDQGLAAMDKYLQVKSVITALPDSPWY

SEQ ID NO: 3013 - protein, 275 aa, Escherichia coli CFT073
MANPTVIKLQDGNVMPQLGLGVWQASNEEVITAIQKALEVGYRSIDTAAAYKNEEGVGKALKNASVNREELFITTKLWNDDHKHPREALLDSLKKLQLDYIDLYLMHWPVPAIDHYVEAWKGMIELQKEGLIKSIGVCNFQIHHLQRLIDETGVTPVINQIELHPLMQQRQLHAWNATHKIQTESWSPLAQGGKGVFDQKVIRDLADKYGKTPAQIVIRWHLDSGLVVIPKSVTPSRIVENFDVWDFRLDKDELGEIAKLDQGKRLGPDPDQFGG

SEQ ID NO: 3014 - protein, 435 aa, Rubrivivax gelatinosus PM1
MTTDLDAYWMPFTANRQFKKAPRLLSKASGMHFWTPEGREVLDGIAGLWCVNAGHARPKIVEAIRAQALELDFAPPFNMAHPKAFELAERLVQLTPAGLNKVFYTNSGSESVETALKMAIAYHRARGEGSRTRLIGRERGYHGVNFGGISVGGMVANRKMFGSMLTGVDHIRHTHDPARNAFSIGQPQHGAELADDLERLVALHDASTIAAVIVEPVAGSTGVLLPPQGYLERLRAICDKHGILLIFDEVITGFGRTGAPFAAQRFGVTPDLMTVAKGLTNGCVPMGAVFAKQHIHDVFMNGPEHLIEFFHGYTYSGHPLACAAALGTLDTYAEEGLLTRASEMEAYFADALHSLKGLPHVIDIRNIGLVGGIELAPIDGSPGKRAFDIFLECWERGVLIRTTGDTVALSPPLIISKTHVDQIVGTLADALKRAG

SEQ ID NO: 3015 - protein, 327 aa, Synechocystis sp. PCC 6803
MQSFNRINSMKYFPLSNGEQIPALGLGTWKSSPQVVGQAVEQALDLGYRHLDCAAIYGNEAEIGATLANAFTKGVVKREELWITSKLWSNAHHPDAVLPALEKTLQDLGLDYLDLYLIHWPVVIQPDVGFPESGDQLLPFTPASLEGTWQALEKAVDLGLCHHIGVSNFSLKKLEMVLSMARIPPAVNQVELHPYLQQSDLLTFANSQNILLTAYSPLGSGDRPAAFQQAAEPKLLTDPVINGIAAEQGCSAAQVLLAWAIQRGTVTIPKSVNPERLEQNLRAADITLTDSEMAKIALLDRHYRYVSGDFWTMPGSPYTLQNLWDEI

SEQ ID NO: 3016 - protein, 292 aa, Photorhabdus luminescens subsp. laumondii TTO1
MDNQPIIRLADGNHMPQLGLGSWASDDQQIAETIHAALDIGYRAIDTAAIYNNEKGVGNALQETDIPREDIFVTTKLWNDRHLDARAALTESLEKLQLDYVDLYLIHWPAPPQDQYVGAWQQLIELQKEGLIRSIGVSNFQPEHIQRLINETGVHPVINQIELHPLLQQRQLHAWNATHNIVTESWSPLAQGGENVFDNQLVQHLTQKYGKTPAQVVIRWHIDNGMIVIPKSTTLSRIKENFDVFDFKLEKEDLTAMTTLDIGKRLGPTPEIFVDFSEFIQLLEQNSANNQC

SEQ ID NO: 3017 - protein, 396 aa, Triticum aestivum
MALSISAPTSSPFLPAPRQVGRWSSSPSSAKPAVFSLRRPVVVARAAAGNAPSSPAGAVVTELDVVSSFSEIVPDTVVFDDFEKFAPTAATVSSSLLLGIAGLPDTKFKSAIDTALVDGECNTMEKPGDRMSCYLTKALGNVGAELAHQVPGRVSTEIDARLAYDTQGIVQRVHELLQIYNEHDIPSERLLFKIPATWQGIEASRLLESEGTQTHLTFVYSFAQAAAAAQAGASVVQIFVGRIRDWAKNHSGDPEIDEALKKGEDAGLALVKKAYVYIHKNGYKTKLMAAAVRNKQDVFSLLGIDYIIAPLKILQSLDESVTDSDEKYGYVQRLTPSLDKMYNFSQEELVKWDQLSLAAAMGPAAEELLASGLEGYANQARRVEELFAKIWPPPNV

SEQ ID NO: 3018 - protein, 192 aa, Glycine max
  misc_feature (72)..(72): Xaa can be any naturally occurring amino acid
MADSDNDSGGAHNGGKGSEMSPREQDRFLPIANVSRIMKKALPANAKISKDAKETVQEVRVKVSSAFITGEXADKCQREKRKTINGDDLLWAMTTLGFEDYVEPLKGYLQRFREMEGEKTVAARDKDAPPLTNATNSAYESANYAAAAAVPGGIMMHQGHVYGSAGFHQVAGGAIKGGPVYPGPGSNAGRPR

SEQ ID NO: 3019 - protein, 310 aa, Anabaena variabilis ATCC 29413
MDELGHPPISELKPEASRFFYQEAIKLYHLTNEEGVTIEDRWIKRLEDISIPIRVYTPRDEVDNINSIQEKSTLYPILVYFQGGGWIFGNLDSADAPCSFLCKHINCIVVSVQYRQAPEYKCPIPVIDALEAIKWVHKNSQSLGGDAQKIAVGGESAGANLAAVAAIKLRDEGNISLEAQLLITPVTQYGFNTQSYQAGYTKGLSLETMKWFWNHYLENDLQGEEYYASPLKVQDARNLPPCLIVTAEHDPLRDDGLLYAQYLQSFQVKVKILHYESFIHSFIRMIRVIEDTRQALYEIAINFREMLYFY

SEQ ID NO: 3020 - protein, 502 aa, Novosphingobium aromaticivorans DSM 12444
MASSEGQLSKLGEAARTFLATRPGLLIAGRNTPAASGARRDVLDPSTGLVVTDVAEGGAADVDAAVAAARATFQSAEWRDMRPLARERLLHRLADLIERDADILAELEVIDTGKILPMARHGDLVIALDSLRYMAGWTTKIEGTTIDPSFSYIPPIRFSARTVRQPVGVVGQIIPWNFPLVMAIWKIAPALAAGCTVVLKPAEDTPLTALYLGRLIAEAGFPAGAVNIVTGGREVGMAIVEHPGIDKIAFTGSTAAGQDIQRRAAATMKRLSLELGGKSPVVILEDCPVPMAVEGAAGAIFFNHGQVCTAGSRLLVHRSIYEDVVQGLAHAANGMVLGEGMDPAGQMGPLISARQRDRVAGYVQGALDQGARLLAGGEAPDRDGFFYRPTVLADGTPSMTIFQEEVFGPVVIAMPFDTEEEALALANDSCFALGASVWTQNLAAANRFAGALRSGNVWINAHNILDPAVPFGGWKMSGYGRELGHSAVELYTEAKSITMPLL

SEQ ID NO: 3021 - protein, 477 aa, Rubrivivax gelatinosus PM1
MRDYLKFYIDGHWVDPVKAKSLDVVNPATEASAGRISMGTAADVDRAVKAARKAFASYSQTSVAERASLLERIIVEYKKRYADMAAAITEEMGAPVALSKDAQAAMGIAHLQIALDVLKNYKFQELRDTTLMVKEPIGVCGFITPWNWPVNQIACKVAPALAVGCTMVLKPSEIAPFSAYLWTEILHAAGVPAGVFNLVNGDGPTVGAALSSHPDVDMVSFTGSTRAGVEVARNAAPTVKRVHQELGGKSPNIILPDADFKHAITAGVQGVMLNSGQSCNAPTRMLVPNARLDEALAIAKEAAEATTVGDPASGAALGPVISATQWDKIQTLIHKGIEEGATVVAGGPGKPKGLETGYYVKPTVLGHVNNQMTVAREEIFGPVLTILGYDTVDQAVEIGNDTPYGLAAYVSGTDPEATRKVASRLRAGQVNINSVPLDFKAPFGGFKQSGNGREWGDHAFGEFLEVKAVLGYAPKAA

SEQ ID NO: 3022 - protein, 280 aa, Glycine max
MGVFSENPNPDPVVIRQVWASNLESEFQLIRELIDHYPFISMDTEFPGVVFRPHLDPTKPYNHRNNNRNRHSDHYRLLKSNVDALNLIQVGLTLTDAAGNLPDLAGNRSIWEFNFRDFDVARDAYALDSIDLLRRQGIDFARNATDGVDSTRFAELMMSSGLVCNDSVSWVTFHSAYDFGYLVKILTRRNLPTRLEEFLKTVKVFFGDNVYDVKHMMRFCDTLYGGLDRVARTLNVERAVGKCHQAGSDSLLTWHAFQKIVDIYFVKDEHRKHAGVLFGL

SEQ ID NO: 3023 - protein, 438 aa, Rubrivivax gelatinosus PM1
MSQPTREQQIAALEKDWAENPRWKGLKRGYSAADVVRLRGSLQPEYTIAKRGAEKLWAQCNGASKKGYVNAFGAITAGQAMQQAKAGVEAVYLSGWQVAADGNTSETMYPDQSLYAYDSVPTMVRRINNTFKRADEIQWSRGTGPGDKDFIDYFLPIVADAEAGFGGVLNAFELMKNMIAAGAAGVHFEDQLAAVKKCGHMGGKVLVPTQEACEKLIAARFAADVMGVSTIVLARTDAEAANLITSDHDANDKPFLTGERTQEGFYRVKNGLEQAISRGVAYAAYADLVWCETGTPDLGFAREFAQAVHAKHPGKLLSYNCSPSFNWKKNLDDKTIAVFQEKLSELGYKYQFITLAGIHINWYNTFQFAQAYAKGEGMKHYVEMVQEPEFKAREQGYTFVSHQQEVGAGYFDDVTTVIQGGSSSVKALTGSTEEEQFH

SEQ ID NO: 3024 - protein, 334 aa, Clostridium acetobutylicum ATCC 824
MKKNHTITLIPGDGIGPEVTGAAKKVIEAAGVSITWDIVEAGAKVMDEYGTPLPEYVLESIKKNKIALKGPITTPVGSGFRSVNVALRQTFNLYANVRPIKTYEGIPTRYKDVDLIIVRENTEDLYAGIEHKIGDYAAESIKIITREASERIADFAFDMAVKQNRKKVTAVHKANIMKFSDGLFLDCARKVAEGYKEKEFEDMIVDAMSMKLVQNPEKYDVLVMPNLYGDILSDMAAGLVGGLGVAPGANIGKEISIFESIHGSAPDIAGKNIANPTAAILSGVMMLRYIGELEAADKIDNAIKVVLKEGTKVTSDLGGNATTDEFANEVIKNI

SEQ ID NO: 3025 - protein, 1351 aa, Salmonella typhimurium LT2
MSQEYTEDKDVTLTKLSSGRRLLEALLILIALFAVWLMAALLSFNPSDPSWSQTAWHEPIHNLGGAPGAWLADTLFFIFGVMAYTIPVIIVGGCWFAWRHQSTDDYIDYFAVSLRLIGVLALILTSCGLAAINADDIWYFASGGVIGSLLSTTLQPLLHSSGGTIMLLCIWAAGLTLFTGWSWVSIAEKLGGWLLNILTFASNRTRRDDTWVDDEEYDDEYDEETDGVQRESRRARILRGALARRKRLAEKFSNPRGRQTDAALFSGKRMDDDEDIQYSARGVAADPDDVLFSGNRATQPEYDEYDPLLNGHSVTEPVAAAAAATAVTQTWAASADPIMQTPPMPGAEPVVAQPTVEWQPVPGPQTGEPVIAPAPEGYQPHPQYAQPQEAQSAPWQQPVPVASAPQYAATPATAAEYDSLAPQETQPQWQPEPTHQPTPVYQPEPIAAEPSHMPPPVIEQPVATEPEPDTEETRPARPPLYYFEEVEEKRAREREQLAAWYQPIPEPVKENVPVKPTVSVAPSIPPVEAVAAAASLDAGIKSGALAAGAAAAAPAFSLATGGAPRPQVKEGIGPQLPRPNRVRVPTRRELASYGIKLPSQRIAEEKAREAERNQYETGAQLTDEEIDAMHQDELARQFAQSQQHRYGETYQHDTQQAEDDDTAAEAELARQFAASQQQRYSGEQPAGAQPFSLDDLDFSPMKVLVDEGPHEPLFTPGVMPESTPVQQPVAPQPQPQYQQPQQPVAPQPQYQQPQQPVAPQPQYQQPQQPVAPQPQYQQPQQPVAPQPQYQQPQQPVAPQPQYQQPQQPVAPQPQYQQPQQPVAPQPQYQQPQQPTAPQDSLIHPLLMRNGDSRPLQRPTTPLPSLDLLTPPPSEVEPVDTFALEQMARLVEARLADFRIKADVVNYSPGPVITRFELNLAPGVKAARISNLSRDLARSLSTVAVRVVEVIPGKPYVGLELPNKKRQTVYLREVLDNAKFRENPSPLTVVLGKDIAGDPVVADLAKMPHLLVAGTTGSGKSVGVNAMILSMLYKAQPEDVRFIMIDPKMLELSVYEGIPHLLTEVVTDMKDAANALRWSVNEMERRYKLMSALGVRNLAGYNEKIAEAARMGRPIPDPYWKPGDSMDVQHPVLEKLPYIVVLVDEFADLMMTVGKKVEELIARLAQKARAAGIHLVLATQRPSVDVITGLIKANIPTRIAFTVSSKIDSRTILDQGGAESLLGMGDMLYSGPNSTMPVRVHGAFVRDQEVHAVVQDWKARGRPQYVDGITSDSESEGGGGGFDGGEELDALFDQAVNFVTQKRKASISGVQRQFRIGYNRAARIIEQMEAQGIVSAQGHNGNREVLAPPPFE

SEQ ID NO: 3026 - protein, 304 aa, Brucella melitensis 16M
MCWHKFARYWDVEIREIPMEPGRLFMGPEQMLEAVDENTIGVVPTFGVTYTGNYEFPEPLQDALDKLQKTKGLDIDIHVDAASGGFLAPFCAPDIPWDFRLPRVKSISASGHKYGLAPLGCGWVVWRDKEALPEELIFNVDYLGGQVGTFAINFSRPAGQVISQYYEFMRLGREGYTKVQQAAYRVAQYIAREIEPLGPYEFICAGEEKGGIPAVCFRIREGEDPGYSLYDLSERLRLTGWQVPAFALSGKASDITVMRVMCRRGFEMDLAALFIRDFKAGIEFFKSHPSPKITPSMGTGFHHT

SEQ ID NO: 3027 - protein, 80 aa, Glycine max
  misc_feature (53)..(53): Xaa can be any naturally occurring amino acid
  misc_feature (67)..(67): Xaa can be any naturally occurring amino acid
  misc_feature (72)..(72): Xaa can be any naturally occurring amino acid
NTTSSNRNASFTSLKSIAGYPTIKTNKHITFIASNGGRMQCMHVWPQFGKKKXENIYYLPDLEDAHXANEVXYLLTKGWI

SEQ ID NO: 3028 - protein, 167 aa, Brucella melitensis 16M
MKITLEVIMTGSNYPARDLIASVFGTEALQEIAASRGFREKEMQANAVYQIIHDELFLDGNARQNLATFCQTWDDDYVHKLMDLSINKNWIDKEEYPQSAAIDLRCVNMVADLWNAPKFADNATGTNTIGSSEACMLGGMAMKWRWRKKMQEMGKPTDKPNFVCGPV

SEQ ID NO: 3029 - protein, 178 aa, Zantedeschia aethiopica
MASSMMVSTAAVSRTSPAQSNMVVPFAGLHSSAAFPVTRKFADSSKLPSNGLRVRCMQVWPPEGKKKFETLSYLPPLTREQLGQEVDYLIRNGWIPCIEFCKVGFVYREYHNSPGYYDGRYWTMWKLPMFGCTDSSQVLKEVDECSKAYPDYFNRIIGFDNTRQVQCISFLTYKPEGN

SEQ ID NO: 3030 - protein, 478 aa, Mycobacterium avium subsp. paratuberculosis str. k10
MREYLKFYIDGQWVDPVRPNTFDVENPATEQVCGKISLGSAADVDVAVGAARRAFGRWSQSSREDRLDLLQAILAEYQKRADDLAAAVTEEIGAPPSLAAGPQVFLGIGHLTTAIEVLKNFPFTEQRGATLIAREPIGVCGLITPWNWPINQVAVKVYPALATGCTVVLKPSEVAPFSSYIFAEILAAAGVPAGVFNLVNGDGPGVGAALASHPDIDLVSFTGSTRAGVEVARNAAPTVKRVTQELGGKSPNIVLDDGGFADAVRAGVANMMPNSGQSCNAPSRMLVPASRMAEAISIAREVAEQVQVGDPDDATAIGPVASRAQFEKVQRLIQQGIDEGATVVAGGPGRPAGLDQGYYVKPTVFADVTNDMTIAREEIFGPVLCILGYDDLDHAVRLANDTDYGLAGYVSGADLDTAREVAGKIRAGWVTINHAFDLNAPFGGYKRSGNGREWSDFGFHEYLEVKSILGYAPAQGDQ

SEQ ID NO: 3031 - protein, 119 aa, Bacteroides thetaiotaomicron VPI-5482
MVKANATAPAINVFETEKEYKVELAAPGMTKEDFNVRIDEDNNLVISMEKKTENKEEKKEGRYLRREFSYSKFQQTMILPDNVDKEKISAAVENGVLSVQLPKISEEEVKKAEKQIEVK

SEQ ID NO: 3032 - protein, 447 aa, Glycine max
  misc_feature (18)..(18): Xaa can be any naturally occurring amino acid
VLASLHHLSNYMTNLTTXLNRLQDFPCYSVLEEHSVDVHDTIAVVVHKNSPRETHFRRAGPRQKVYFESEDVYACIVTCGGLCPGVNTVIREIVCGLYHMYGVHKVLGIEGGYRGFYSCNTIPLTPKVVNDIHKRGGTILGTSQGEGGNDTLKIVDSIQDRGINQVYILGGDGTQRGASVIFEEIRRRGLKVSVVGIPESVDNDIPVIDKSFGFDTAVEEAQRAINAAHVEAESTENGIGVVKLMGRHSGFISMYATLASRDVDCCLIPESPFYLEGPGGLFEFIRKRLAENGHMVIVISEGAGHELISESLSATNKQEASGNKLLQDVGLWLSQKIKDHFTKSQKMDITLKYIDPTYMIRAVPSIASDNVHCTLLAQSAVHGAMAGYTGFAVGTVNGKHAYIPFYRINEIEKKVVITDRMWARLLSSTNQPSFLNPKDITTHQTGN

SEQ ID NO: 3033 - protein, 298 aa, Triticum aestivum
NPFPPPVPTLLCLNINIVSEAAMKRSVRTIDDFVYTVIDKKIEQMGRDGQEFAKKQDILSRFLLEREKDPGCFDNKYLRDIILNFMIAGRDTTAGTLSWFLYVMCRDQRIQDKIAREVREATTGDRQNVGGLQEFTACLTEDAISSMHYLHAALTETLRLYPAVPTDVKCCFSDDTLPDGHAVRRGDMVNYQPYAMGRMKFLWGDDAEEFRPDRWLDDDGVFVPESPYKFTAFQAGPRICLGKEFAYRQMKIFAAVLVYLFRFETWEHDSRVGHRPMLTLKMDGPLYVRASPRRSTGN

SEQ ID NO: 3034 - protein, 250 aa, Zea mays
MYFRPPPKGPEWYASDAETGQAARPLYPMMLEDPRLRWAFIRKVYSILSIQMLLTVAVAAVVVFVRPVALFFVSTPGGFGLYIFLLILPFIVLCPLYYYYQHHPVNLLLLGLFTVAISFAVGLTCAFTKGEVILESAVLTAAVVLSLTAYTFWAAKRGHDFSFLGPFLFAAVMILMLFALIQLFFPLGRISLMIYGGLAALVFCGYIIYDTDNLIKRYSYDEYVWAAVALYLDVINLFLSLLTLFRAADS

SEQ ID NO: 3035 - protein, 441 aa, Mycobacterium smegmatis
MCMLKQSQPTRRPTRPQRTFTYPGGKLELPILKATEGTDSVALGKFLAETNLTTFDSGFMNTASTKSAITYIDGEQGILRYRGIPIEQLAEKSTFIEVSYLLIYGELPTPTQLEEFTTKIQRHTLLHEDLKRFFDGFPRNAHPMPVLSSAVNALSAYYQDSLDPKDDEQVELSTIRLLAKLPTIAAYAYKKSAGQPFLYPDNSLSLVENFLRMTFGFPAEPYEVNPDVAKALDMLFILHADHEQNCSTSTVRLVGSSQANLFTSISGGINALWGPLHGGANQAVLEMLDAIKADGGDTKKFMERVKNKEAGVKLMGFGHRVYKNYDPRAAIVKKTADQILETLGVQDDLLEIAKGLEEVALNDDYFIERKLYPNVDFYTGVIYRAMGFPTRMFTVLFALGRLPGWIAHWREMHEDPTTKIGRPRQLYTGYTERDYVPMSDR

SEQ ID NO: 3036 - protein, 431 aa, Mycobacterium smegmatis
MWLRRDLRLGDLPALQAARGTDDSSVLLCFVVDPRLARSSGERRLAFLFDSLRELDDKLDGRLLVVRGRPDEEIPRLARAVDAEAVHISADFTPFGRRRDEAVAEALGEVPLEATGSPYLVSPGRITKDDGEPYKVFTPFFRRWRDHGWRRPAESSVPSSAVVDPADIANSGRIAVPTAPVKLSFPAGEDAARQRWAEFVDADLADYDEIRDDPAADATSRMSAYLKYGNIHPRTLAVDLGKGKGAQAYLRELAFRDFYADVLWHWPHSLWHNWNRRFDAIELDTDDAAYERFEVWKAGRTGFPLVDAGMRQLNETGWMHNRVRMITASFLVKDLHLPWWWGAEYFLEQLVDGDMASNNHGWQWAAGTGTDAAPYFRVFNPQTQAKKFDPKGEYVRRWVGDVEADDYPGPIVDHSAERAEALRRYGEIGEA

SEQ ID NO: 3037 - protein, 148 aa, Pseudomonas syringae pv. syringae
DVIDVRGLTATGRFTFDPGFMSTASCDSKITYIDGDNGILLHRGYPIEQLAEQSDYLETCYLLLNGELPTVEQKAQFVAVVKNHTMVHEQLKTFFNGFRRDAHPMAVMCGVVGALSAFYHDSLDINNPQHREISAVRLVAKMPTLAAM

SEQ ID NO: 3038 - protein, 56 aa, Zea mays
MSDGTATCIDIILAIILPPLGVFFKFGCGVEFWICLILTFFGYLPGIIYAVWAITK

SEQ ID NO: 3039 - protein, 181 aa, Pringlea antiscorbutica
PGTRGILSDLTCDSDGKIDKFIGGESSLPLHELDSNGGGGRYFLGMFLGGAYEEALGGVHNLFGGPSVVRVSQSDGPHSFAVTRAVPGQSSADVLRAMQHEPEIMFQTLKHRAAELMHTKGGEEEEDDDEFNNAAACLDRSFHNMPYLANEPASLSNSLSAAINNLGFYYCDEDGFDYLSA

SEQ ID NO: 3040 - protein, 479 aa, Burkholderia cepacia R1808
MEQAKHFIAGEWTLPAQLEPIAVVDPSDGRPFATIARGTAPDIERAVAAARDAFAGPWGAASAAERGRVLMRLSARVTDCIEELATIEARDTGKPLKQARADAAALARYFEFYAGAADKLHGETLPYQAGYTVLTVREPHGVTGHIVPWNYPMQIFGRSVGAALAAGNACVVKPAEDACLSVLRVAELAIEAGLPAGALNVVTGYGHEAGAALARHPGIDHISFTGSPATGKLVAQMAAENHVPVTLELGGKSPQIVFADADLDAALPVLVSAIVQNGGQTCSAGSRVLIEHAAYEPLVERLATAFNALRVGPSRADLDCGPLINAKQQQRVWDFLSDAQHDGIPMAAQGQVVADAPESGFYQAPALLRDVPPSHRLAQEEVFGPVLAAMRFVDEEEAVALANGTPYGLVAGIWTRDGARQLRLARRVRAGQVFINNYGAGGGVELPFGGVGHSGHGREKGFEALYGFTALKTIAIRHG

SEQ ID NO: 3041 - protein, 268 aa, Archaeoglobus fulgidus DSM 4304
MDLLELIDDAAAMMPKERMVVVEEDVITVVGDVHADIEALRKIEREIEGLAIFLGDYADRGDYPVECYEKVLRLFLEGKALLLRGNHESTGVYPHQLPYQLREKFGERGEEVYESLIRMWNKMPLSAIVEGEIWMAHGGVPTKQCRIHAEGISRKEIERPDDITALEIMWNDPWEREECGENYNRGVMYFFGKKNSEMLLKELGVKVIIRAHEPQKVLKAEQDGRVVTIGSCALPYSISEFALLKIDFSRGFKNGVDLIRKFGSIYNV

SEQ ID NO: 3042 - protein, 557 aa, Glycine max
EAEVAEVQAWWNSERFRLTKRPYTARDVVSLRGNLRQTYASNEMAKKLWCLLKNHQANGTASRTFGALDPVQVTQMAKHLDTIYVSGWQCSATHTTSNEPGPDLADYPYDTVPNKVEHLFFAQQYHDRKQREERMRMSREERARTPYVDYLRPIIADGDTGFGGTTATVKLCKLFVERGAAGIHIEDQSSVTKKCGHMAGKVLVAISEHINRLVAARLQFDVMGVETVLVARTDAEAANLIQSNIDTRDHQFILGVTNPNLKGKSLATLMQQGMAAGKSGAELQALEDEWLSKAQLKTLSEAVVEAIERQNIGEEEKRRKLNEWMHHSSYERCLSNEEGREIAEKLGVRNLFWDWDLPRTREGFYRFKGSVIASVVRGWAFSPHADVIWMETASPNVIECTQFSEGVRSKHPQMMLGYNLSPSFNWDASGMSDEQMRDFIPKIAKLGYVWQFITVGGLHSNALITSTFARDFANRGMLAYVERIQREERNNGVDTLAHQKWAGANYYDRYLKTVQGGVASTAAMGKGVTEEQFKESWTRPGAVEIDRGSIVVAKARM

SEQ ID NO: 3043 - protein, 110 aa, Quercus suber
SLDIWDPFEGFSAVASVPPSARETTAFATARIDWKETPEAHIFKADLPGLKKEEVKVEVEDGNVLQISGERSKEHEEKNDKWHRVERSCGKFMRRFRLPENAKVDQVKAN

SEQ ID NO: 3044 - protein, 347 aa, Escherichia coli K12
MKNSKAILQVPGTMKIISAEIPVPKEDEVLIKVEYVGICGSDVHGFESGPFIPPKDPNQEIGLGHECAGTVVAVGSRVRKFKPGDRVNIEPGVPCGHCRYCLEGKYNICPDVDFMATQPNYRGALTHYLCHPESFTYKLPDNMDTMEGALVEPAAVGMHAAMLADVKPGKKIIILGAGCIGLMTLQACKCLGATEIAVVDVLEKRLAMAEQLGATVVINGAKEDTIARCQQFTEDMGADIVFETAGSAVTVKQAPYLVMRGGKIMIVGTVPGDSAINFLKINREVTIQTVFRYANRYPVTIEAISSGRFDVKSMVTHIYDYRDVQQAFEESVNNKRDIIKGVIKISD

SEQ ID NO: 3045 - protein, 262 aa, Schizosaccharomyces pombe
MSIVNILSVNVLNNPAKFSDPYKFEITFECLEPLKSDLEWKLTYVGSATSQSYDQILDTLLVGPIPIGINKFVFEADPPNIDLLPQLSDVLGVTVILLSCAYEDNEFVRVGYYVNNEMEGLNLQEMDDAEIKKVKVDISKVWRSILAEKPRVTRFNIQWDNPDFDDAPPVQPDADEEEEEEEADEMEEEFDEEGEGDEEEEEEDDGDGDGEGDGDGEGENDGKGSEEEEEEEIDIEEEEEESALANASAAEEKPEEKPETSQ

SEQ ID NO: 3046 - protein, 489 aa, Bordetella pertussis Tohama I
MTQLTQPLSRAELLRDACYIDGKWVGAGNGPSIPVDNPSTGKTIISVPKLGRKEAEQAIDAAEAALPAWSARTGKERAAILLKWAQLMMENQQDLAVIMTSEQGKPVPEAAGEIAYAASFLEWFAEEAKRIDGDILQSPKGGQRLMVLKQPIGVTAAITPWNFPAAMITRKVGPALAAGCTMVVKPAQQTPLTALALAVLAVLAGVPAGVFQVVTGSSREIGAALCESEVVRKLSFTGSTEVGRTLMEQCAPTIKKLSLELGGNAPFIVFDDADLDRAIDGILASKYRNAGQTCVCANRIYVQAGVYEEVAKRLVEKVNAMKVGDGFEQGVTQGPLIDTAAVAKVQEHIADATAHGAKVIAGGEPHALGGSFFQPTVVRDVTQSMRFAVEETFGPVAPLFKFDSEDEVIGMANNTIFGLAAYFYTRDYARIWRVSEALEYGIVGINTGIISNEVGPFGGVKQSGLGREGSKYGIEDYLELKYLCVDLGA

SEQ ID NO: 3047 - protein, 444 aa, Bacillus cereus ATCC 14579
MKQTKLTGRIVVPTDPDYDVARMNLNLSIPKLPCIIVFCQNNKDVCNALKWARERHIPFRLRSGRHSYENFSLLNRGLIIDVSEMHRITVNTEKLTATIEAGANLGTVYKELWNYGVTIPAGTSASVGVVGLALGGGIGMLSRLFGLTCDQLMEVEMVQACGKFGAKLIRANEQENSNLFWACRGGGGGSFGIVTSLTFRVHPIKNVSIFSITWEWEDFIAAFQAWQNWAPYIDERLTSSIELFAKQRNKIEAQGEFVGSPSELHSLLSPLLETGSPSLFIEEVPYIKAVEFFNGGNIPENFKRSGSYVYKPIPLKGIQIMQSFLSHAPNKDASIWHQSLIGAVENISPNETAYFHRKAIIAQEYITSWKCDDEENRNIRWVKGLRESLDPYTLGDYVNWPDIDIKNWQTSYYGSNFHRLRKVKTMYDPCDVFHFQQSIPPFHT

SEQ ID NO: 3048 - protein, 454 aa, Arabidopsis thaliana
MVIKGMRVGKYELGRTLGEGNSAKVKFAIDTLTGESFAIKIIEKSCITRLNVSFQIKREIRTLKVLKHPNIVRLHEVIILLVLASKTKIYMVLECVTGGDLFDRIVRFLLAPVTVLLVSKRLVSKGKLSETQGRKMFQQLIDGVSYCHNKGVFHRDLKLENVLLDAKGHIKITDFGLSALSQHYREDGLLHTTCGSPNYVAPEVLANEGYDGAASDIWSCGVILYVILTGCLPFDDANLAVICRKIFKGDPPIPRWISLGAKTMIKRMLDPNPVTRVTIAGIKAHDWFKHDYTPSNYDDDDDVYLIQEDVFMMKEYEEEKSPDSPTIINAFQLIGMSSFLDLSGFFETEKLSERQIRFTSNSLAKDLLENIETIFTEMGFCLQKKHAKLKAIKEESTQKRQCGLSVTAEVFEISPSLNVVELRKSHGDSSLYKQLYERLLNELGSSSQVQELLA

SEQ ID NO: 3049 - protein, 440 aa, Sorghum bicolor
MSTTKVKRRVGKYELGRTIGEGTFAKVRFARDTVTGEAVAIKILDKDKVLKHKMVEQIKREISTMKLIKHPNVVRIYEVMGSKTKIYIVLEFATGGELFQRIVNHGRMREDEARRYFQQLINAVDYCHSRGVYHRDLKPENLLLDSYGNLKVSDFGLSALSQQMKDDGLLHTTCGTPNYVAPEVLEDQGYDGAMADLWSCGVILFVLLAGYLPFEDSNLMTLYKKISNAEFTFPPWTSFPAKRLLTRILDPNPMTRITIPEILEDEWFKKGYKRPEFDEKYDTTLDDVDAVFNDSEEHHVTEKKEEEPVALNAFELISMSAGLNLGNLFDSEQEFKRETRFTSKCPPKEIVRKIEEAAKPLGFDVQKKNYKLRLEKVKAGRKGNLNVATEILQVAPSLHMVEVRKAKGDTLEFHKFYKNLSKTLKDVVWKSDDTQMLHAA

SEQ ID NO: 3050 - protein, 342 aa, Zea mays
  misc_feature (186)..(186): Xaa can be any naturally occurring amino acid
MDPNGLKTGGLLLPTIERRCTSPPSVIVIGGGISGVAAARALSNSSFKVTVLESRDRIGGRIHTDNSFGCPIDMGASWLHGVCNENPLAPLISYLGLRLYRTSDDNSVLYDHDLESYALFDKDGNQVPKETVDKVGETFERILEETVKVRDEQEHDMPLLQAISIVFERHPHLKLEGLDDQVLQWXCVCRLDPRVRADADEISLKNWDQERVLTGGHGLMVNGYYPVIEALAQGLDIRLNQRVTEITRQHNGVKGTTEDGTSYLADACIISVPLGVLKANVIKFEPELPQWKSSAIADLGVGTENKIAMHFDRVFWPNVEVLGMVGPTPKACGYFLILHKAT

SEQ ID NO: 3051 - protein, 440 aa, Sorghum bicolor
MSATKVKRRVGKYELGRTIGEGTFAKVRFAKNTETGEPVAIKILDKEKVLRHKMVEQIKREISTMKLIKHPNVVRIYEVMGSKTKIYIVLEYVTGGELFDTIANHGRMREDEARRYFQQLINAVDYCHSRGVYHRDLKPENLLLDSYGNLKVSDFGLSALSQQIKDDGLLHTTCGTPNYVAPEVLEDQGYDGAMADLWSCGVILFVLLAGYLPFEDSNLMTLYKKISNAEYTFPPWTSFPAKRLLTRFLDPNPMTRITIPEILEDEWFKKGYKRPEFDEKYDTPLDDVDAVFNDSEEHHVTEKKEEEPVVLNAFELISRSAGLNLGNLFDSEQEFKRETRFTSKCPPKEIVRKIEEAAKPLGFGVQKKNYKLRLEKVKAGRKGNLNVATEILQVAPSLHMVEVRKAKGDTLEFQKFYKNLSKTLKDVVWKSEDLQMQPAS

SEQ ID NO: 3052 - protein, 315 aa, Triticum aestivum
  misc_feature (172)..(174): Xaa can be any naturally occurring amino acid
  misc_feature (248)..(248): Xaa can be any naturally occurring amino acid
LQYEVLQWCICRLEAWFATDVDNISLKNWDQEHVLTGGHGLMVNGYDPVIKALSRDLDVHLNHRVTKIIQRYNKVIVCVEDGTSFVADAAIITVPLGVLKANIIKFEPELPYWKLSAISDLGVGLENKIALRFNTVFWPNVEVLGRVAQTSNACGYFLNLHKATGHPVLVCXXXAGRFAYEMEKLSDEESVNFVMSQLRRMLPGATEPVQYLVSRWGTDPNSLGSYSCDLVGKPADLYERFCAPGGQXLSFAGEAACIDHSGSVHGAYSSGIDAAEDCRRRLSTQLGISDLFQVGKIVMREEMTEVMVPLQISRL

SEQ ID NO: 3053 - protein, 442 aa, Ralstonia eutropha JMP134
MTAADVQAAIAAADRALPAWRATSSRERSRLLRRWFDLCMAHQEDLATILTLEQGKPLKESRGEIAYGSGFIEWFSEEARRIYGDVIPAPSSDRRIIVIKQPVGVVAAITPWNFPNAMITRKAGAALAAGCTIVIKPASATPFSALALAALAKEAGIPDGVLNVVTGSASVVGGELTSSPVVRKLSFTGSTDVGKTLLEQCAGTVKKVSMELGGNAPFLIFDDADLDAAVAGVMASKFRNAGQTCVCANRIFVQDGVYDAFAEKLRIAVEAQVVGDGMAPGVDLGPLIDDAAIEKVREHIYDAVSLGAQVFTGGRAHALGGRFFKPTILTDVSPKAKLMNEETFGPLAPLIRFKTEEEAVAMANDTPFGLAAYFYTTNYARSWRVAEALECGIVGLNEGLISTEVAPFGGVKESGVGREGSKYGIEDYVEVKYICAGGLALR

SEQ ID NO: 3054 - protein, 148 aa, Triticum aestivum
HLMFLSARNESSESEDIQELINSSLKCNASTPADDMESGRGGAGAAGSTSSSPSPPVVLPSEQKARYSREEDPGRCSCSDSFFGKYFSFLLLMFVTASLVILPLVLPPLPPPPSMLMLVPVAMLLMLLVLAFMPTSGGRGATGPTAYL

SEQ ID NO: 3055 - protein, 267 aa, Yersinia pestis KIM
MSIPVFGLGTFRLQDQIVIDSVSQALTLGYRAIDTAQIYENEAPVGQAIQESGINRDELFITTKIWIANLSKDKLIPSLRESIQKLKTDYVDLTLIHWPSPNDEVSVAEFMSELLKAKGLGLTRQIGISNFTIDLMKQAIAAVGAEEIATNQIELSPLLQNRNVVDFAKQNGIAVTSYMTLAYGKALAEPVIKTIAEQHGATPAQVILSWAMQLGYGVIPSSTKAANLASNLLAQKLCLNAADMALIATLDRNERLVSPDGLAPKWD

SEQ ID NO: 3056 - protein, 591 aa, Zea mays
MCGILAVLGVAEVSLAKRSRIIELSRRLRHRGPDWSGLHCHEDCYLAHQRLAIIDPTSGDQPLYNEDKTVVVTVNGEIYNHEELKAKLKTHEFQTGSDCEVIAHLYEEYGEEFVDMLDGMFSFVLLDTRDKSFIAARDAIGICPLYMGWGLDGSVWFSSEMKALSDDCERFITFPPGHLYSSKTGGLRRWYNPPWFSETVPSTPYNALFLREMFEKAVIKRLMTDVPFGVLLSGGLDSSLVASVASRHLNETKVDRQWGNKLHTFCIGLKGSPDLKAAREVADYLSTVHHEFHFTVQEGIDALEEVIYHIETYDVTTIRASTPMFLMSRKIKSLGVKMVISGEGSDEIFGGYLYFHKAPNKKEFHEETCRKIKALHLYDCLRANKATSAWGVEARVPFLDKSFISVAMDIDPEWKMIKRDLGRIEKWVIRNAFDDDERPYLPKHILYRQKEQFSDGVGYSWIDGLKDHASQHVSDSMMMNAGFVYPENTPTTKEGYYYRMIFEKFFPKPAARSTVPGGPSVACSTAKAVEWDASWSKNLDPSGRAALGVHDAAYEDTAGKTPASADPVSDKGLRPAIGESLGTPVASATAV

SEQ ID NO: 3057 - protein, 122 aa, Citrullus lanatus var. lanatus
LSRLPGGPEVPFHPGREDKPEPPPEGRLPDATKGSDHLRDVFYTMGLSDQDIVALSGGHTLGRAHKERSGFEGPWTSNPLIFDNSYFTELLSGEKEGLLQLASDKALLSDPVFRPLVEKYAR

SEQ ID NO: 3058 - protein, 403 aa, Streptomyces coelicolor A3(2)
MLSSQSAQIVRDTLPTVGASLGTITDLFYRRMFEERPELLRDLFNRANQASGVQREALAGAVAAFATALVKHPDERPDAVLGRIANKHASLGITSDQYTLVGRHLLAAVAEVLGDAVTPAVAAAWDEVYWLMANALIAMEARLYARSDVEDGSVWQSMEIVERHEETPDTASFVLRPADGSPTRPFVPGQYVSVRAELPDGAHQIRQYSLSSAPGGGTWRFTVKRERSLDGQVPDGEVSTWLHTHARPGDVLRVSLPFGDLLLPEGDGPLLLASAGIGVTPMLAMLEHLATAAPDRPVTVVHADRSPALHAHRLELTALVERLPHASLHLWYEDTADHPDASADHVNEGWADLTGLSPVPGTTAFLCGPLSFMKAVRTDLLAHGLSPRAIHYEVFGPDLWLSK

SEQ ID NO: 3059 - protein, 121 aa, Zea mays
  misc_feature (42)..(42): Xaa can be any naturally occurring amino acid
  misc_feature (65)..(65): Xaa can be any naturally occurring amino acid
  misc_feature (84)..(84): Xaa can be any naturally occurring amino acid
MSASQSSMSGAGEPGARAVVWFRWDLRVEDNPALAAAARAAXGEVVPAYVWAPEEDGAYYPRRLXPRWWLSQSLKHLDASLRRXGAARLVTRRSNDAGAALLDLVRCTGATHLFFNTSTVR

SEQ ID NO: 3060 - protein, 258 aa, Oryza sativa
MRKKLGTRFPAARIKKIMQADEDVGKIALAVPVLVSRALELFLQDLIDRTYEITLQSGAKTLNSFHLKQCVRRYSSFDFLTEVVNKVPDLGGADSCGDDRALPRRRKALPNGSDPENEESRSSKMAVRSANISPRGRGRGRGRGRGRPPTKRKEVGYVQFEDESSMFADQGEALPGEETVPETIHGTESVPPSTHPPAEAPSAAEIPAPNPKVEEAKNDDHQPDWPMPDAIGNIGVGPSGFGHLTVQVDEDEDYDNED

SEQ ID NO: 3061 - protein, 339 aa, Salmonella typhimurium LT2
MKSIVIEKPNTLTIETRALPQPAPGEVRIKVKLAGICGSDSHIYRGHNPFAKYPRVIGHEFFGVIDAVGDNVNHDRIGERVSVDPVISCGHCYPCSVGKPNVCTSLVVLGVHRDGGFSEYAVAPARNAHRIPDNIADHHAVMVEPFTIAANVTGQVNPTEQDVALIYGAGPMGLTTVQALKGVYQVKTVIVVDRIEERLAMAKQSGADWTLNNGQHSLAEFLQQKALKPTLIVDAACHPAILQEAITLASPAARIVLMGFSSDPCEIVQQGITGKELAIYSSRLNANKFPVVIDWLNKGLIDPDKLITHTFDYQHVTDAIELFEKDQRQCCKVLLTFAK

SEQ ID NO: 3062 - protein, 373 aa, Candida maltosa
MSVKTKTITILPGDHVGTEIVNEAIKVLEAIEAATPYQKIHFDFKHHLIGGAAIDATGVPLPDDALESAKKSDAVLLGAVGGPKWWTGALRPEQGLLKIRKELNLYANIRPCNFASDSLLELSPLRPEVVKGTNLIIVRELVGGIYFGDREEQEESEDKQTAWDTEKYTVDEVTRITRMAAFMPLQDNPPLPIWSLDKANVLASSRLWRRTVDKVISEEFPTLSVQHQLIDSAAMILIQNPTKLNGIIITSNMFGDIISDEASVIPGSLGLLPSASLASLPDTNTAFGLYEPCHGSAPDLPANKVNPIATILSAASMLRLSLDCVKEAEALEEAVKQVLDKGIRTADLRGTRSTTEVGDAIVEAVTKILKEKA

SEQ ID NO: 3063 - protein, 608 aa, Glycine max
MDTKIGSLDAPKPNSNDVVSCNLTSSAAIQPCLPATVINGAGCSDSTLGGHLARRLVEIGVTDVFSVPGDFNLTLLDHLIAEPALHLVGCCNELNAGYAADGYARARGVGACVVTFTVGGLSVLNAIAGAYSENLPLICIVGGPNSNDYGTSRILHHTIGLPDFSQELRCFQTITCFQAVVNNLEDAHELIDTAISTALKESKPVYISISCNLPGIPHPTFSRDPVRFSLSPRLSNKMGLEAAVEAAAEFLNKAVKPVLVGGPKLRVATASDAFVELADACGYALAVMPSAKGQVPEHHPHFIGTYWGAVSTAFCAEIVESADAYLFAGPIFNDYSSVGYSLLLKKEKAIIVQPDRVVIANGPAFGCVLMKDFLKALAKRLKHNNTAYENYHRIFVPDGHPLKAAPREPLRVNVLFQHIQNMLSGETAVIAETGDSWFNCQKLKLPKACGYEFQMQYGSIGWSVGATLGYAQAVPEKRVIACIGDGSFQVTAQDVSTMLRCGQKTIIFLINNGGYTIEVEIHDGPYNVIKNWNYTGLIDAIHNGEGKCWTAKVFCEEELVEAIATATGPKKDSLCFIEVIVHKDDTSKELLEWGSRVSAANSRPPNPQ

SEQ ID NO: 3064 - protein, 358 aa, Escherichia coli K12
MKALARFGKAFGGYKMIDVPQPMCGPEDVVIEIKAAAICGADMKHYNVDSGSDEFNSIRGHEFAGCIAQVGEKVKDWKVGQRVVSDNSGHVCGVCPACEQGDFLCCTEKVNLGLDNNTWGGGFSKYCLVPGEILKIHRHALWEIPDGVDYEDAAVLDPICNAYKSIAQQSKFLPGQDVVVIGTGPLGLFSVQMARIMGAVNIVVVGLQEDVAVRFPVAKELGATAVVNGSTEDVVARCQQICGKDNLGLVIECSGANIALKQAIEMLRPNGEVVRVGMGFKPLDFSINDITAWNKSIIGHMAYDSTSWRNAIRLLASGAIKVKPMITHRIGLSQWREGFDAMVDKTAIKVIMTYDFDE

SEQ ID NO: 3065 - protein, 497 aa, Aspergillus nidulans FGSC A4
MTPSLQRQLFYDGKPQHASSGRTFQSINPADATLLAEIPVASQSDIDAAITAAERAFPSWAQTPPIARARILQKAAALLRERNDEIARVETLDSGKAYSETSTVDVVTGADVLEYYANLVGGGGLNGETTQLREEAWVYSKKAPLGVCVGIGAWNYPIQIALWKSAPCLAAGNTMVYKPSEFTSLHGQTLAEIYKEAGLPDGVFNVVYGAGDVGSYLTSHPTVAKVSFTGQVSTGMKVSGAAAGNMKYVTMELGGKSPLLILPDADLENAVDGAMMANFYSTGQVCTNGTRVFIPKSMKKDFESRLVEKMQYIRPGPLFDENTNFGPLSSAVHQEKVTAYIRHGIEQDKATLLYGGLGKPSLPKDLEAGFWVRPTIFTDCTDDMRIVKEEIFGPVMSILTYDSVEEAVKRANTTELGLAAGVFTKDLNLAHRIIDQLEAGITWVNTWGESPAEMAVGGWKKSGLGVENGRRGIEAWVRNKSTLVDMGNAVATVFAKL

SEQ ID NO: 3066 - protein, 292 aa, Helicobacter hepaticus ATCC 51449
MAKNNKTQVILNEFFTLNNGNKIPKLGLGTWRIDDNVVEAAVREAFKVGYRHIDTAQAYGNERGVGEAVRKSKIKREELFITSKIRAEYKDYKSASASIDTSLKTMKLDFIDLMLIHSPQPWNSFRKGDYFKENVEVYNALEDAQKAGKVRSIGVSNFLQKDLENILKNCKTKPAANQILCHIGNTPFTLLDYCKKQNILAEAYSPIAHGELLKDPRVIELAKKYNVSPAQICIRYTLELGLVSLPKSKTPKYIAENAQVDFTFSKADLQTLKKLTFKDYGEHSYFPVFGGK

SEQ ID NO: 3067 - protein, 250 aa, Lycopersicon esculentum
MGKSYPTVSAEYLKAVDKCKRKLRALIAEKNCAPIMLRLAWHSAGTYDVCSKTGGPFGTMRFKAEQAHGANNGLDIALRLLEPIREQFPTLSHADFHQLAGVVAVEVTGGPDVPFHPGREDKPEPPVEGRLPDATKGCDHLRDVFVKQMGLSDKDIVALSGAHTLGRCHKERSGFEGPWTANPLIFDNSYFTELLSGEKEGLLQLPSDKALLSDPAFRPLVEKYAADEDAFFADYAKAHLTLSELGFAEA

SEQ ID NO: 3068 - protein, 368 aa, Oryza sativa (japonica cultivar-group)
MGSTAADMAAAADEEACMYALQLASSSILPMTLKNAIELGLLETLQSAAVAGGGGKAALLTPAEVADKLPSKANPAAADMVDRMLRLLASYNVVRCEMEEGADGKLSRRYAAAPVCKWLTPNEDGVSMAALALMNQDKVLMESWYYLKDAVLDGGIPFNKAYGMTAFEYHGTDARFNRVFNEGMKNHSVIITKKLLDLYTGFDAASTVVDVGGGVGATVAAVVSRHPHIRGINYDLPHVISEAPPFPGVEHVGGDMFASVPRGGDAILMKWILHDWSDEHCARLLKNCYDALPEHGKVVVVECVLPESSDATAREQGVFHVDMIMLAHNPGGKERYEREFRELARAAGFTGFKATYIYANAWAIEFTK

SEQ ID NO: 3069 - protein, 126 aa, Zea mays
MTRVIHDSGDDMQKEALDLVSSDVNFPKGHFPDYRIGPNNQIIDPEETHEAVPLKEIVAKETAQLLEQHKRLSVRDLKEKFEKGLSGASKLSEEVDFFPETALQQPIVEKKMYKHMGSEMQSLWAA

SEQ ID NO: 3070 - protein, 401 aa, Chloroflexus aurantiacus
MQAVIAVLPGDGIGPEVVAEGVKVLQAIARRFGHQFTFHEALIGGCAIDATGEPLPAATITLCQSADAVLLGAVGGPKWDDPQARVRPEQGLLGIRKALGLFANLRPVRIYPQLINASPIRPERLQGVDLIVVRELTGGIYFGEKRRERTADGEWASDLCIYTEEEIVRVVRVAARLARQRRGKVTLVDKANVLETSRLWRSITTRLMQTEFPDLQFETMLVDACAMHLIRRPADFDVIVTENMFGDILTDEASMLAGSMGMLPSASLADGRLGLYEPIHGSAPDIAGQGKANPLATILSVAMLLRYSLDLTAKRLCRSGSGSGSTANVTAFAFRTAGSAEPRIRILDALMADATRPSHHLTEGPRNCCGPPENWQSATFSKNSAPQFGKRPICDHKNGGD

SEQ ID NO: 3071 - protein, 95 aa, Brassica napus
MTMDDATPSQRRSSGSSSNDAAAPLLPKSQGEEVAAYDEFNGASFSGAVFNLSTTIIGAGIMALPATMKILGLVLGIAMIVVMAFLTDASIEFLL

SEQ ID NO: 3072 - protein, 132 aa, Chloroflexus aurantiacus
MSKIDSIIEMIEGLNVLELVELKKKMEEKWGVTAAAPVMAMGAAMPVAAAGDGAAAAAPVEEKTEFDVILKEAGPNKIQVIKVVRELTSLGLKEAKDLVEGAPKPVREGVSKEEAEAAKAKLTEAGAVVEIK

SEQ ID NO: 3073 - protein, 339 aa, Ralstonia metallidurans CH34
MPEGIRVMDATARRFGIDFQWDHFDFSSYAYYERHGKMLPDDWFDTLVKYDAIYFGAVGWPAKIADHVSLWGSLLQFRRSFDQYVNLRPVRLMPGIKSPLADRKPGDIDFYVVRENTEGEYSSIGGRMFPGTEREIVMQETVMSRHGVDRILKFAFELAQKRPKKHLTSATKSNGISITMPYWDERVEAMAANYPGMKVDKYHIDILTAHFVQHPDWFDVVVASNLFGDILSDLGPACTGTIGVAPSGNINPDKVYPSLFEPVHGSAPDIAGQGIANPIGQIWCGAMMLEHLGHAEAGAAVLAAIEQVLAAGPGHAPLTRDIGGTASTADLGQAIAEAL

SEQ ID NO: 3074 - protein, 322 aa, Parachlamydia sp. UWE25
MEKNKLDQLKSMTTIVIDTGDIEAIKEYSPTDATTNPSLILSAVEKPAYKPLMEEAYHYSQKAKSSGEQISLFLDKLFVNVGCEILKLIPGRVSTEVDARLSFDVEGSIQKAQSLIALYKEMGIEKERILIKLASTWEGGLAAKQLEKMGIHCNMTLLFSMPQAIHCAEAQATLISPFVGRILDWYKKHDNVPGYAPAEDPGVKSVTTIYHYFKKFSYKTQIMGASFRNKEEILELAGCDLLTISPHFLQELHDASGNVEQKLDAAKSKQLNIEPIKMNEKAFRLALNDDAMATEKLSEGIRNFAKDAQKLEKMLRTTYKIG

SEQ ID NO: 3075 - protein, 197 aa, Nicotiana tabacum
MSASRFIKCVTVGDGAVGKTCLLISYTSNTFPTDYVPTVFDNFSANVVVNGSTVNLGLWDTAGQEDYNRLRPLSYRGADVFILAFSLISKASYENVSKKWIPELKHYAPGVPIVLVGTKLDLRDDKQFFIDHPGAVPITTAQGEELRKTIGAPAYIECSSKTQQNVKAVFDAAIKVVLQPPKTKKKKGKSQKSCSIL

SEQ ID NO: 3076 - protein, 158 aa, Glycine max
MDMRLMDLDSPFFNTLHRIMDLTEDAEKNLNAPTRTYVRDAKAMAATPADVKEYPNSYVFVIDMPGLKSGDIKVQVEDDNVLLISGERKREEEKEKEGGKYLRMERRLGKLMRKFTLPENANTDAISAVCQDGVLTVTVNKLPPPQPKKPKTIEVNIA

SEQ ID NO: 3077 - protein, 373 aa, Candida maltosa
MSVKTKTITILPGDHVGTEIVNEAIKVLEAIEAATPYQKIHFDFKHHLIGGSAIDATGVPLPDDALESAKNSDAVLLGAVGGPKWGTGALRPEQGLLKIRKELNLYANIRPCNFASDSLLELSPLRPEVVKGTNLIIVRELVGGIYFGDREEQEESEDKQTAWDTEKYTVDEVTRITRIAAFMALQHNPPLPIWSLDKANVLASSRLWRRTVDKVISEEFPTLSVQHQLIDSAAMILIQNPTKLNGIIITSNMFGDIISDEASVIPGSLGLLPSASLASLPDTNTVFGLYEPCHGSAPDLPANKVNPIATILSAASMLRLSLDCVKEAEALEEAVKQVLDKGIRTADLRGTSSTTEVGDAIVEAVTKILKEKA

SEQ ID NO: 3078 - protein, 449 aa, Bacillus cereus ATCC 10987
MKTKQTDELLAKDEQYVWHGMRPFSPNSTMVGAKAEGCWVEDIQGKRYLDGMSGLWCVNSGYGRKELAEAAYKQLQTLSYFPMSQSHEPAIKLAEKLNEWLGGEYVIFFSNSGSEANETAFKIARQYYAQKGEPHRYKFMSRYRGYHGNTMATMAATGQAQRRYQYEPFASGFLHVTPPDCYRMPGIERENIYDVECVKEVDRVMTWELSETIAAFIMEPIITGGGILMPPQDYMKAVHETCQKHGALLISDEVICGFGRTGKAFGFMNYDVKPDIITMAKGITSAYLPLSATAVKKEIYEAFKGKGEYEFFRHINTFGGNPAACALALKNLEIMENENLIERSAQMGSLLLEQLKEEIGEHPLVGDIRGKGLLVGIELVNDKETKEPIDNDKIASVVNACKEKGLIIGRNGMTTAGYNNVLTLAPPLVISSEEIAFVVGTLKTAMERI

SEQ ID NO: 3079 - protein, 142 aa, Triticum aestivum
  misc_feature (28)..(28): Xaa can be any naturally occurring amino acid
  misc_feature (44)..(45): Xaa can be any naturally occurring amino acid
  misc_feature (109)..(109): Xaa can be any naturally occurring amino acid
RGFAFVQDVSYAGFLDRVRDGELKLPRXSGLWDVPHPWLNLFLXXRSRVLDFAAGVFHGILRRDSTTGAMGPVLVYPMNRNRWDADTSAVLPGEEDGVLHRGDLRSSVXASTDGGRQLLRRLEEQNEEILRFCEEAGIPCVQ

SEQ ID NO: 3080 - protein, 564 aa, Zea mays
MAAAAVTSNGGAVAANGPAPGRLASVYSEVQTSRLLHTLPLPSVLRSNFSVVDGPASSAAGNPDEIAKLFPNLFGQPSASLVPSAEPAATRPLKVGVVLSGGQAPGGHNVICGIFDYLQERAKGSTLLGFKGGPAGIMKCKYVELTSDFVYPYRNQGGFDMICSGRDKIETPEQFKQAEDTANKLDLDGLVVIGGDDSNTNACLLGEYFRSRNLKTRVIGCPKTIDGDLKCKEVPTSFGFDTACKIYSEMIGNVMTDARSTGKYYHFVRLMGRAASHITLECALQTHPNAALIGEEVAAKKETLKNVTNYITDIICKRADLGYNYGVILIPEGLIDFIPEVQKLIAELNEILAHDVVDEAGAWKSKLQAESRELFEFLPKTIQEQLMLERDPHGNVQVAKIETEKMLISMVETELEKRKAEGRYSAHFRGQAHFFGYEGRCGLPTNFDSNYCYALGYGAGALLQSGKTGLISSVGNLAAPVEEWTVGGTALTSLMDVERRHGKFKPVIKKAMVELDAAPFKKYASMRDEWALKNRYISPGPIQFSGPGSNDSNHTLMLELGAAL

SEQ ID NO: 3081 - protein, 112 aa, Glycine max
  misc_feature (18)..(18): Xaa can be any naturally occurring amino acid
  misc_feature (26)..(26): Xaa can be any naturally occurring amino acid
  misc_feature (86)..(86): Xaa can be any naturally occurring amino acid
TTVNRAGAGMADPLTALXSMAVCPTXNTIIDFTSFASNAGRAQYMQMWPPVGYKKFETLSYLPDLDDAHLGKDGEYLLRTGWSPRXEFELEHGFLCREHNRAPEYYDGRYWT

SEQ ID NO: 3082 - protein, 148 aa, Pseudomonas syringae pv. syringae
DVIDVRGLTATGRFTFDPGFMSTASCDSKITYIDGDNGILLHRGYPIEQLAEQSDYLETCYLLLNGELPTAQQKAQFVAVVKNHTMVHEQLKTFFNGFRRDAHPMAVMCGVVGALSAFYHDSLDINNPQHREISAVRLVAKMPTLAAM

SEQ ID NO: 3083 - protein, 167 aa, Citrus sinensis
MASQSKTSVHDFTVKDAKGQDVDLSIYKGKLLLIVNVASQCGLTNSNYTELSQLYDKYKNQGLEILAFPCNQFGAQEPGDNEQIQEFACTRFKAEFPIFDKVDVNGDNAAPLYKHLKSSKGGLFGDSIKWNFSKFLVDKEGNVVERYAPTTSPLSIEKDIKKLLETA

SEQ ID NO: 3084 - protein, 155 aa, Treponema denticola ATCC 35405
  misc_feature (35)..(35): Xaa can be any naturally occurring amino acid
MGIYNYTVKDSLGNDFSFNDYKDYVILIVNTACEXGLTPHFQGLEALYKEYRDKKFLVAAFPCNQFGGQDPGTNEEIRNFAQSKYGVSFPIMAKIEVNGENTEPIFSFLKKASNGEDIKWNFAKFLVDKTGERVTAYAPTVAPEDLKKDIEKLLN

SEQ ID NO: 3085 - protein, 110 aa, Zea mays
DLLQQALAMSMEGGASGSAAVTDSAMAEAGAVDPDLALALQMSVQDANMSSDTDMSKVFEDRTFVSSILNSLPGVDPNDPSVKDLLASLHSQGEQEKKEDTSDKTEDEKN

SEQ ID NO: 3086 - protein, 427 aa, Zea mays
EFPGRPTRPGDLSRCPWDELIFEDESERGSNALLARAWSPGWQNADKALTAFLDGPLVDYSANHKKADSASTSLLSPYLHFGELSVRKVFHLVRMKQLMWSNDGDRAGEESCTLFLRAIGLREYSRYLTFNHPCSLEKPLLSHLRFFPWVVDEVHFKVWRQGRTGYPLVDAGMRELWATGWVHDRIRVVVSSFFVKVLQLPWRWGMKYFWDTLLDADLESDALGWQYISGSLPDGRELDRIDNPQFEGYKFDPHGEYVRRWLPELARLPTEWIHHPWDAPESVLQAAGVELGSNYPRPIVELDAANSRLQGALSEMWELEAASRAAIENGMEEGLGDSTDEPPIDFPQELRMEVDRQPAQPAIIHTSVVAGWRREDQRVPSMTSSLIRAETELTADFGNTSEDSRPEVPSNIHLQAFRGWCSRSRAA

SEQ ID NO: 3087 - protein, 220 aa, Bacillus thuringiensis serovar konkukian str. 97-27
MDLKQIAGEYAATFVKDGMKVGLGTGSTAYWTIQKLGQRVKEGLSIQAVPTSKETEALAQQLNIPLISLNDVQSLDLTIDGADEIDSNLQLIKGGGGALLREKIVASSSKELIIIVDESKVVTRLGTFPLPIEIIPFAWKQTESKIQSLGCQTTLRLKNNETFITDNNNMIVDCIFPNHIPTPSDLHKRLKMITGVVETGLFVNMTSKAIIGTKNGIQEL

SEQ ID NO: 3088 - protein, 476 aa, Bacillus cereus G9241
MQNKIIMMFQKDFRLYDNPALFEAAQSGEVVPVYVQDETFSIGSAAKWWLHHAIIDVQKQLKALGATFIIRKGKTQEEILSLIEQLDITAVYWNICYEPDRLQSNQKMKMMLEDKGIICKEFNSHLLLEPWIIKKKDNTEYKVFTPFYNAFQKQAIPKPTSKVQSIKWGSSLPASLSVSELHLLPTIPWTSHMESIWNPTEEGAYKTFKKFFSSKLTFYSEGRDFPNQNVHSMLAPYLSFGQISVKLMFHYLINKSTERQSSLFEKQVNSFIRQLIWREFSYYLLYHYPFTVYKPLNKNFEHFPWDKEEELLRVWQKGETGYPFIDAGMRELWQTGFMHNRARMAVASFLVKHLLIPWQEGAKWFMDTLLDADIANNTMGWQWVAGSGADASPYFRIFNPITQGEKFDKDGEYIRKWVPELRDIPNKYIHKPWEAPEPILQKANIQLGDTYPLPVVDHKAARERALCAYKSMKEFI

SEQ ID NO: 3089 - protein, 444 aa, Acinetobacter sp. ADP1
MPDIMIRNANMINEGQSKFCDVLIKNGRIAKIQSSISSINNAKEIEANGRWLLPGMIDDQVHFRDPGSPHKGCIASESAAATIGGITSYMDMPNTQPPTLDLDALQAKKTIASQTSIANYAFHFGVSADNLEIIKQLDPTLVSGVKVFMGASTGNMLVDDPKTLGLLFANVPTILLSHCESSPIISQNEKLFREKFGEDIDASCHPIIRNEECCYQSSKMAVELAKKFNTQLHVLHLTTARELALFEDKPLHEKRITAEVCIHHLHFDDRDYKQLNHLIKCNPSIKAVSDKEALIQAIANTNLLDIIGTDHAPHTLDEKQRSYFQAPAGLPLVQHALPALLELVADQKMTIENVVKKTSHQVADLFRIKERGYIREGYWADLVLIDKNPLIVAQQPNFMRCGWTPFIHQTFRHQVATTIVSGQIAWHNQQLFLNCKGHALEIDR

SEQ ID NO: 3090 - protein, 144 aa, Triticum aestivum
AGAAHEAIELELSSWPSSPSAGKSRRVTELVMALLARLCSCAEGRAAVVAHPAGIALVAKRALRVSAATDTSAVRVLAAVCGRAASPEVVREMARVGAVGKLCCVLQADCDRDVKETAKAVLRMHSGVWCGSPCVSAYLLSRYL

SEQ ID NO: 3091 - protein, 494 aa, Bacillus cereus G9241
MLTKNIELKPKVKAFLNEEIKMFINGEFVPSISGKTFETYNPATEDVLAVVCEAQEEDIDVAVKAARSAFESGPWAEMTTAERAHLIYKLADLIEEHGEELAQLEALDNGKPYQVALDDDIAATVENYRYYAGWATKIIGQTIPISKDYLNYTRHEPVGVVGQIIPWNFPLVMSSWKMGAALATGCTIVLKPAEQTPLSLLYTAKLFKEAGFPDGVVNFVPGFGPEAGAAIVNHHDIDKVAFTGSTVTGKYIMRQSAETIKHVTLELGGKSPNIILEDADLEEAINGAFQGIMYNHGQNCSAGSRVFVHRKHYETVVNELVKMANNVKLGAGMEKETEMGPLVSKKQQERVLHYIEQGKAEGATIAAGGERAFEKGYFVQPTVFIDVTDDMTIVKEEIFGPVVVVLPFDSTEEVIERANRSSYGLAAGVWTQNIKTGHQVANKLKAGTVWINDYNLENAAAPFGGFKQSGIGRELGSYALDNYTEVKSVWVNIK

SEQ ID NO: 3092 - protein, 482 aa, Bradyrhizobium japonicum USDA 110
MTAILKNFIGGEWVDGSGVTRNINPSNTNDLVGEYAKADKAQTEKAIAAAKAAFPGWAQSTPQVRYDALNKISLEILARKEELGRLLAREEGKTLPEGIGEVARAGQIFAFFAGEALRLIGEKGASVRPGLDVELTREPMGVVGMITPWNFPIAIPAWKIAPALCYGNTVVFKPAELVPGSAHALSEIITRSGIPAGVFNLVVGSGSVVGQTLLDHPDVAAISFTGSVQTGRKIAQACVLSNPMKKFQLEMGGKNPLVVLDDADLKTAVEVAVNGSYFSTGQRCTASSRLIVTEGIHDRFVAAMAERLKGLSVDDALKAGVHIGPVVDQSQLDQDLRYIKIGQDEGAKLAFGGELLQRETPGHYLQPALFTEANNNMRIAREEIFGPVAAVIRAKNYEEALAISNDTEFGLASGICTTSLKYASHYKRNSESGMVMVNLPTAGVDYHVPFGGRKGSSYGAREQGSYAREFYTTVKTAYTYPG

SEQ ID NO: 3093 - protein, 335 aa, Glycine max
EYYDLMHEFMTAVKQNYGEKVLVQFEDFANHNAFELLAKYGTTHLVFNDDIQGTASVVLAGVVAALKLIGGTLPEHTFLFLGAGEAGTGIAELIALEMSKQTKAPIEESRKKIWLVDSKGLIVSSRKNSLQHFKKPWAHEHEPVNSLLEAVKVIKPTVLIGSSGVGRTFTKEVVEAMTSNNDKPLILALSNPTSQSECTAEEAYQWSEGRAIFASGSPFDPVEYKGKVYASGQANNAYIFPGFGLGLVISGAIRVHDDMLLAASESLAKQVSEENYKNGLIYPPFSNIRRISANIAANVAAKAYELGLATRLPRPQNLVKCAESCMYTPVYRNYR

SEQ ID NO: 3094 - protein, 533 aa, Glycine max
MGNCCRSPAAVAREDVKSSFSNADHGKRGGGGSASAAAKQKAPITVLAGVPKENIEDRYLVDRELGRGEFGVTYLCIDRDTRELLACKSISKRKLRTAVDVEDVRREVAIMRHLPESPSIVSLREACEDDNAVHLVMELCEGGELFDRIVARGHYTERAAAAVTRTIVEVVQLCHKHGVIHRDLKPENFLFANKKENSPLKAIDFGLSIFFKPGERFSEIVGSPYYMAPEVLKRNYGPEIDIWSAGVILYILLCGVPPFWAESEQGVAQAILRGLIDFKREPWPSISESAKSLVRQMLEPDPKLRLTAKQVLEHPWIQNAKKAPNVPLGDVVKSRLKQFSMMNRFKRKALRVIADFLSNEEVEDIKDMFKKMDNDNDGIVSIEELKAGFRNFGSQLAESEVQLLIEAVDTNGKGTLDYGEFVAVSLHLKRMANDDHLHKAFSYFDKDGNGYIEPDELRNALMEDGAEDCTDVANDIFLEVDTDKDGRISYDEFVAMMKTGTDWRKASRHYSRGRFNSLSLKLMKDGSLNLGNE

SEQ ID NO: 3095 - protein, 380 aa, Populus alba x Populus tremula
MCGGAIISGFIAPTTTARSSRRLTSGFEWLEPKKPFNNKHLKPVVADPEDDFEADLQEFKDESDVDEDYDVFADAKPFAFSASASEPAKKRGLPRGSTAVKSAGFSGLAKNSAKRKRKNQFRGIRQRPWGKWAAEIRDPRKGVRVWLGTFNTAEEAARAYDSEARRIRGKKAKVNFPDEAPCASARHPIKENSQKRLTKANLSQDFSYLSNPETDYNNMGFVEEKPQVSQFGIMNSIPVNGDSGVTPLTPSDNASMYFNSDKGSNSFDCDFGWGEQGAEILSVLAATPEVDESVFVEANPKKLKSYTEYAVPVEERNGKSLSEELLAFDNQLMNLQMPDLVGNWEASLDSFLNGDTTQDGTNAVDLWSFEDFPSMVGGVY

SEQ ID NO: 3096 - protein, 588 aa, Zea mays
  misc_feature (558)..(558): Xaa can be any naturally occurring amino acid
  misc_feature (571)..(571): Xaa can be any naturally occurring amino acid
MCGILAVLGVVEVSLAKRSRIIELSRRLRHRGPDWSGLHCHEDCYLAHQRLAIIDPTSGDQPLYNEDKTVVVTVNGEIYNHEELKAKLKTHEFQTGSDCEVIAHLYEEYGEEFVDMLDGMFSFVLLDTRDKSFIAARDAIGICPLYMGWGLDGSVWFSSEMKALSDDCERFITFPPGHLYSSKTGGLRRWYNPPWFSETVPSTPYNALFLREMFEKAVIKRLMTDVPFGVLLSGGLDSSLVASVASRHLNETKVDRQWGNKLHTFCIGLKGSPDLKAAREVADYLSTVHHEFHFTVQEGIDALEEVIYHIETYDVTTIRASTPMFLMSRKIKSLGVKMVISGEGSDEIFGGYLYFHKAPNKKEFLEETCRKIKALHLYDCLRANKATSAWGVEARVPFLDKSFISVAMDIDPEWNMIKRDLGRIEKWVMRKAFDDDEHPYLPKHILYRQKEQFSDGVGYNWIDGLKSFTEQQVTDEMMNNAAQMFPYNTPVNKEAYYYRMIFERLFPQDSARETVPWGPSIACSTPAAIEWVEQWKASNDPSGRFISSHDSAATDHTXAVSRRWPTAAATXAANGTVNGKDVAVAIAV

SEQ ID NO: 3097 - protein, 531 aa, Zea mays
MEAVGVTPAPVAAPEKKKLLDLKDPFPAAANGGTKASPASKWAMKKKLVGGDAGYVLEDVPHLTDYMPQLPTYPNPLQDNPAYSVVKQYFVNPDDTVTQKIVVHKTSARGTHFRRAGPRQRVYFQSDEVNAAIVTCGGLCPGLNTVIRELVCGLYDMYGVSSVVGIEGGYKGFYSKNTVALTPKSVNDIHKRGGTVLGTSRGGHDTAKIVDCLQHDGINQVYIIGGDGTQKGASVIYEEVRRRGLKCSVVGVPKTIDNDIAVIDKSFGFDTAVEEAQRAINAAHVEAESAENGIGVVKLMGRNSGFIAMYATLASRDVDCCLIPESPFYLEGKGGLLEFVERRLKDNGHMVIVVAEGAGQDLIARSMNFVDTQDASGNKLLLDVGLWLSQKIKDHFKKKPSFPITLKYIDPTYMIRAVRSNASDNVYCTLLAHSALHGAMAGYTGFTVAPVNGRHAYIPFYRITEKQNKVVITDRMWARVLCSTNQPCFLSHEDVENMKHDDDEHHHMHNTQLLEGGSSPVSKCNGSAAAV

SEQ ID NO: 3098 - protein, 168 aa, Avena vaviloviana
VMASSATTVAPFQGLKSTAGLPVSRRSNAGLGSVSNGGRIRCMQVWPIEGIKKFETLSYLPPLSEEALLKQIDFLIRSKWVPCLEFSKVGFIFREHGSTPGYYDGRYWTMWKLPMFGCTDASQVIKEVEEVKKEYPDAYVRIIGFDNIRQVQCVSFIAFKPPGCEESG

SEQ ID NO: 3099 - protein, 430 aa, Methylobacillus flagellatus KT
MKPSKVTLTFDDGSAPIELPILPGKLGPSVIDIRSLSKHGYFTYDPGFLSTASCDSNITFIDGEEGLLFYRGYPIEQLAEHSDFMEVSYLLIYGELPNAEQKEKFTNTITRHSMVHDQLTHIFRGFRRDAHPMAVMVGVVGSMSAFYHEAIDVSDPRNREFAAHRLLAKVPTIAAWSYKYNVGQPFMYPKNRFNYAENFMHMMFATPCEDYEPNPVLAKAFERILILHADHEQNASTSTVRLAGSSGANPFACVAAGIASLWGPAHGGANEATLKMLEEIGDISRIGEYIKRAKDKTDSFRLMGFGHRVYRNMDPRAAIMRQTCHQVLDELGLNDDPMFKLALELEKIALEDEYFVSRRLYPNVDFYSGIVMRAMGIPNSMFTAIFALARTVGWVAQWNEMMSDPGSKIGRPRQLYTGPERRDFLPLDQR

SEQ ID NO: 3100 - protein, 198 aa, Zea mays
LQLGGDVSGGRLSVDASDIAEASRDFGGLSRAEPMAVFQPRAAGDVAGLVRAAFGSARGFRVSARGHGHSISGQAQAPGGVVVDMGHGAVARAPPVYSPALGRHYVDVWGGELWVDVLNWTLSHGGLAPRSWTDYLYLSVGGTLSNAGISGQAFHHGPQISNVYELDVVTGQFGIITRARIALERAPQRVRPERMAAA

SEQ ID NO: 3101 - protein, 410 aa, Rickettsia sp. IRS 4
DSEFAELKIRGKIFKLPILKASIGEDVIDISRVSAEADCFTYDPGFMSTASCQSTITYIDGDKGILRHRGYDIKDLAEKSDFLEVAYLLIYGELPSSEQYNNFTKQVAHHSLVNERLHYLFQTFCSSSHPMAIMLAAVGSLSAFYPDLLNFKEADYELTAIRMIAKIPTIAAMSYKYSIGQPFIYPDNSLDFTENFLHMMFTTHCTKYKVNPIIKNALNKIFILHADHEQNASTSTVRIAGSSGANPFACISTGIASLWGPAHGGANEAVINMLKEIGSSENIPKYIAKAKDKNDPFRLMGFGHRVYKNYDPRAAVLKETCKEVLKELEQLENNPLLQIAIELEAIALKDEYFIERKLYPNVDFYSGIIYKAMGIPSQMFTVLFAIARTVGWMAQWKEMHEDPEQKISRP

SEQ ID NO: 3102 - protein, 480 aa, Oryza sativa (japonica cultivar-group)
MVLSVRAVSGKSDLDFSDPSWKEKYQEDWNRRFSLPHITDIYDLKPRLTTFSLKKNRTDGGSLSADKWNGYVNKDDRALLKVIKYASPTSAGAECVDPDCSWVEHWIHRAGPRKEIYYEPAEVKAAIVTCGGLCPGLNDVIRQIVFTLEIYGVKNIVGIQFGYRGFFEKGLKEMPLSRKVVENINLSGGSFLGVSRGGAKTSEIVDSIQARRIDMLFVIGGNGSHAGANAIHEECRKRKLKVSVVAVPKTIDNDILFMDKTFGFDTAVEEAQRAINSAYIEARSAYHGIGLVKLMGRSSGFIAMQASLSSGQIDVCLIPEVSFTLDGEHGVMRHLEHLLEKKGFCVVCVAEGAGQDLLQKSNATDASGNVILSDFGVHMQQKIKSHFKDIGVPADVKYIDPTYMVRACRANASDAILCTVLGQNAVHGAFAGFSGITSGICNTHYAFLPITEVITKPKRVNPNSRMWHRCLTSTGQPDFH

SEQ ID NO: 3103 - protein, 501 aa, Asparagus officinalis
MTVSITAAVQLFLLLLLLLPLLFVHHKTKPKTKCRSPPGPPPLPVIGNLHQLSLLLHQSLYRLSKIHGPIFKLSLGRVPVLVISSPSLAKQVLKTHDLACCSRASTVSFKEYTYDGCDVAGAPYGDSWRNLRKIFVLKLLSSKKLTSFRLVQEEEIEGMISSIRTRSDTNATVNITEFVVRLANNITFRVAFGYRSEGEYGEKSRFQRLLESGNDTVASFYVGDYFPGLGWLDKMTGKLGKMKRNARDLDEFYQEVIDAHMKDGRKEDGKEDIVDVLLRLREEGQLTMDHIKGALMNIFVGGTDTSAASIAWAMAELARKPKVMKKAQEEVRKAASKKGKVEENDLAQLQYIKCVVNETLRLHLPLPLLVPRETIQHCEINGYDVSAKTRVLVNAWAIGRDEDAWENPEEFNPDRFVGSSLDYKGQDFQFIPFGAGRRICPGIQFGVETVELALANLLYAFNWELPPGVERENIDMHEAPGLVTRRATDLRLVATNYEEAN

SEQ ID NO: 3104 - protein, 250 aa, Brassica oleracea
MTKNYPAVSEEYQKAIEKCKRKLRGLIAEKNCAPIMVRLAWHSAGTFDCASRTGGPFGTMRFDDELAHGANNGLHIALRLLEPIREQFPTISHADFHQLAGVVAVEVTGGPEIPFHPGREDKPQPPPEGRLPDATKGCDHLRQVFLKQMGLTDQDIVALSGAHTLGRCHKDRSGFEGAWTSNPLIFDNSYFKELLSGEKEGLFQLPSDKALLDDPVFRPLVEKYAADEEAFFTDYAEAHLKLSELGFADA

SEQ ID NO: 3105 - protein, 462 aa, Salmonella typhimurium LT2
MTMMTATQALSVNPATGQTLAAMPWANAQEIEHALSLAASGFKKWKMTSVAQRAQTLRDIGQALRAHAEEMAQCITREMGKPIKQARAEVTKSAALCDWYAEHGPAMLNPEPTLVENQQAVIEYRPLGVILAIMPWNFPLWQVLRGAVPILLAGNSYLLKHAPNVTGCAQMIARILAEAGTPAGVYGWVNANNEGVSQMINDPRIAAVTVTGSVRAGAAIGAQAGAALKKCVLELGGSDPFIVLNDADLELAVKAAVAGRYQNTGQVCAAAKRFIVEEGIAQAFTDRFVAAAAALKMGDPLVEENDLGPMARFDLRDELHQQVQASVAEGARLLLGGEKIAGEGNYYAATVLADVTPDMTAFRQELFGPVAAITVAKDAAHALALANDSEFGLSATIFTADDTLAAEMAARLECGGVFINGYSASDARVAFGGVKKSGFGRELSHFGLHEFCNVQTVWKNRV

SEQ ID NO: 3106 - protein, 148 aa, Pseudomonas syringae pv. tomato
DVIDVRGLTATGRFTFDPGFMSTASCDSKITYIDGDNGILLHRGYPIEQLAEQSDYLETCYLLLNGELPTAEQKAQFVAVVKNHTMVHEQLKTFFNGFRRDAHPMAVMCGVVGALSAFYHDSLDINNPQHREISAVRLVAKMPTLAAM

SEQ ID NO: 3107 - protein, 157 aa, Schizosaccharomyces pombe
MAEEEHVDFEGGEAGASLTFPMQCSALRKNGHVVIKGRPCKIVDMSTSKTGKHGHAKVHIVALDIFNGRKYEDMSPSTHNMDVPVVKRDEYQLVNIDDGYLNLMTTDGTTKDDVRLPEGELGNEIEEGFDEGRDLIITVVSAMGEETALACRDAPSS

SEQ ID NO: 3108 - protein, 173 aa, Glycine max
MSDAPPSPTHESGGEQSPRGSSSGAREQDRYLPIANISRIMKKALPPNGKIAKDAKDTMQECVSEFISFITSEASEKCQKEKRKTINGDDLLWAMATLGFEDYIEPLKVYLARYREAEGDTKGSARSGDGSATPDQVGLAGQNSQLVHQGSLNYIGLQVQPQHLVMPSMQSHE

SEQ ID NO: 3109 - protein, 112 aa, Triticum aestivum
  misc_feature (21)..(22): Xaa can be any naturally occurring amino acid
  misc_feature (53)..(53): Xaa can be any naturally occurring amino acid
  misc_feature (65)..(65): Xaa can be any naturally occurring amino acid
  misc_feature (68)..(68): Xaa can be any naturally occurring amino acid
  misc_feature (70)..(70): Xaa can be any naturally occurring amino acid
  misc_feature (77)..(78): Xaa can be any naturally occurring amino acid
  misc_feature (81)..(81): Xaa can be any naturally occurring amino acid
  misc_feature (85)..(85): Xaa can be any naturally occurring amino acid
  misc_feature (88)..(88): Xaa can be any naturally occurring amino acid
  misc_feature (90)..(90): Xaa can be any naturally occurring amino acid
  misc_feature (92)..(92): Xaa can be any naturally occurring amino acid
  misc_feature (94)..(96): Xaa can be any naturally occurring amino acid
  misc_feature (101)..(101): Xaa can be any naturally occurring amino acid
  misc_feature (103)..(103): Xaa can be any naturally occurring amino acid
  misc_feature (105)..(107): Xaa can be any naturally occurring amino acid
  misc_feature (109)..(109): Xaa can be any naturally occurring amino acid
MAPTVMASSATSVAPFQGLKXXVGLPVSRRSNGASLGSVSNGGRIRCMQVWPXEGIMKFETLSYXPPXRXETLLKQXXYLXRSKXVPXLXFXSXXXFILRXLXEXXXYXESS

SEQ ID NO: 3110 - protein, 148 aa, Pseudomonas syringae pv. tomato
DVIDVRGLTATGRFTFDPGFMSTASCESKITYIDGDNGILLHRGYPIEQLAEQSDYLETCYLLLNGELPTAEQKAQFVAVVKNHTMVHEQLKTFFNGFRRDAHPMAVMCGVVGALSAFYHDSLDINNPQHREISAVRLVAKMPTLAAM

SEQ ID NO: 3111 - protein, 427 aa, Helicobacter hepaticus ATCC 51449
MASITLTNNETKESFEFELIECTRGPKAVDFSKLFERTNIFSYDPGYGSTAGCKSTISYINGKNGELLYKGLPIEKIVEKYQFTDVCKLLITGEVPKNETETKEFEIELVHRSFLNEGLINIFNAFPDSAHPMANLSASLSALSTFHFRHLDMGNEEERQVMARRAIAKIPTLAAFSYRHSLGIPYIYPDVARGYVENFLYMLRAYPGGKMKHTIKGEVEITPLEIEALDKIFTLHADHGQNASTTTVRNVASTGAHPYAALSAGVNALWGAAHGGANEKVLDMLNEIGDAKNVDKFINKAKDKNDPFRLMGFGHRVYKNYDPRAKILKKLKDDLDAKGIKMNTRLSDLAHKVEEVALSDSYFVERNLYPNVDFYSGIILSALKIPVSLFTPIFVIGRMPGWCAQLLEHVKDPTTRITRPRQVYIGE

SEQ ID NO: 3112 - protein, 505 aa, Pseudomonas syringae pv. syringae B728a
MSTARILELMRPYWGDRSVIASYVGGQFIEGHGAPVEVRNAHDDSLLLSFPDADESLVEVADKAARAAQQQWWALTAQARGRAMYQVGNLIRDELENLAQIESLTANKPIRDARVEVLKVAEMFEYYAGWADKLHGEIIPVPTTHLNYVTYEPLGTVLQITPWNAPIFTCGWQIAPAIAAGNAVILKPSELTPLSSLMVGVLIERAGVPKGLVNVIAGFGHSIGQAFIAKADIRKVVFVGSPATGRHIAVAAAQRCIPAVLELGGKSANIVFDDADLEVALRGAQAAIFSGAGQSCVSGSRLLVQESIFEKFTNALAVAATQFKVGDPSDPETQIGPINNAKQYNHVKNMVEQALKDGAKLVGEHADPIPEKPGYYINPTVLAGTNALYCAQEEIFGPVVVAIPFKDEEDAIRIANDSRFGLAGGVWTRDVGRAHRVARQVRAGTFWVNGYKTIHVSSPFGGYGESGYGRSSGLDALREYSEVKSVWVETAAKPAASFGYGASLE

SEQ ID NO: 3113 - protein, 321 aa, Candida boidinii
MSSPLLTLNNGLKMPQIGFGCWKVDNATCAETIYEAIKVGYRLFDGAMDYGNEKEVGEGVNKAIKDGLVKREELFIVSKLWNNFHHPDSVKLAIKKVLSDLNLEYIDLFYMHFPIAQKFVPIEKKYPPNFYCGDGNKWSFEDVPLLTTWRAMEELVEEGLVKSIGISNFVGALIQDLLRGCKIRPAVLEIEHHPYLVQPRLIEYAKTEGIHVTAYSSFGPQSFVELDHPKVKDCTTLFKHETITSIASAHDVPPAKVLLTWATQRGLAVIPKSNKKERLLGNLKINDFDLTEAELEKIEALDIGLRFNDPWTWGYNIPTFI

SEQ ID NO: 3114 - protein, 286 aa, Buchnera aphidicola str. Sg (Schizaphis graminum)
MINEKIWHEKLHRHVGQYFSIDKILYQKKNKYHDIIIFQNSIMGRIMAIDGVVQTTEKDEFIYHEMLTHVPIFYHGLIKNVLIVGGGDGGILREICRHKSIENITMVEIDLNIIDLCKQFFPKHNNNAYKDPRLKIVIDNGLNFVQKTKEKFDLIISDSTDPIGCGKDLFLSDFYFHCKNCLVKNGIFVGQNGVFFLQKNDINQSYKNLKKNFHDVSFYQATIPSYYGGTMMFSWGTDNIDFRQINIKNLEKRIKDKKLTFNYYNSNIHISSFYLPQYIINTLDKS

SEQ ID NO: 3115 - protein, 113 aa, Arabidopsis thaliana
MAFALRFFTCLVLTVCIVASVDAAISCGTVAGSLAPCATYLSKGGLVPPSCCAGVKTLNSMAKTTPDRQQACRCIQSTAKSISGLNPSLASGLPGKCGVSIPYPISMSTNCNK

SEQ ID NO: 3116 - protein, 541 aa, Glycine max
  misc_feature (139)..(139): Xaa can be any naturally occurring amino acid
  misc_feature (236)..(236): Xaa can be any naturally occurring amino acid
  misc_feature (315)..(315): Xaa can be any naturally occurring amino acid
  misc_feature (391)..(391): Xaa can be any naturally occurring amino acid
MAALNLCRMALRSSKLLSRPYHLLSVQLQMQMQPSSPPLTRKMSMDAQSVSFQLNSSGLLRTQGLIAGKWSDAYDGKTIKVYNPATGESIVDVACMGGRETNDAISAAYDAYGSWSKTTAAERSKFLRKWYDLRMVHYXELAQLITLEQGKPLKESVGEIVYGAGVIEFAAEGAKRIYRDIVPAPFSDLRLFVLKQHVWVVCASRPWNFPVSLISRNVHTVLACGCKVVISPSEHXSLSVFASVDMYIPAGMSHSVMNVVMENALNIRDAFLSSPFQRKITFTGSTAVGKKLMAGSAETVKKVSLELGGNAPCIXVFDDADLDVAVKGTLAAKFRNSGQTCVCANRIIVQEGIYEKFANALRDAVQNMKVGDGFSEALSLRPLINEAAVNXLRSLYIHDSLFITGGKVNSWGVKRHSLGLTFYEPTVISDVNSDMHISREEAFGPVAPLLRFKTEEEAIRIANDTNAGLGSYVFTNSIQRSWRVAEALEYGLVGVNEGVISTEVAPFGGFKQSGLGREGSKYGMDEYLEIKYVCFGNMNKE

SEQ ID NO: 3117 - protein, 298 aa, Schizosaccharomyces pombe
MSVQELSHPLIKDGWFREINNMWPGQAMTLKVKKVLYAGKSKYQDVLVFESETYGHVLVLDGAIQATERDEFSYQEMIAHLALNSHPNPKKVLVIGGGDGGVLREVVKHECVEEAILCDIDEDVIKVSKQYLPEMSAGFNHPKVKVHIGDGFKFLQDYQNTFDVIITDSSDPDGPAEALFQKPYFQLLSDALRGGGVITTQAECMWIHLGVISNVLTAVKTVFPNVRYAYTTIPTYPSGSIGFVVASKDASIDLSKPLRKWSPEEENKLCKYYNSEIHAASFVLPTFARDVVDKATSS

SEQ ID NO: 3118 - protein, 487 aa, Escherichia coli CFT073
MLPLRINPTFLLPSNKFKEFEMDQKLLTDFRSELLDSRFGAKAISTIAESKRFPLHEMRDDVAFQIINDELYLDGNARQNLATFCQTWDDENVHKLMDLSINKNWIDKEEYPQSAAIDLRCVNMVADLWHAPAPKNGQAVGTNTIGSSEACMLGGMAMKWRWRKRMEAAGKPTDKPNLVCGPVQICWHKFARYWDVELREIPMRPGQLFMDPKRMIEACDENTIGVVPTFGVTYTGNYEFPQPLHDALDKFQADTGIDIDMHIDAASGGFLAPFVAPDIVWDFRLPRVKSISASGHKFGLAPLGCGWVIWRDEEALPQELVFNVDYLGGQIGTFAINFSRPAGQVIAQYYEFLRLGREGYTKVQNASYQVAAYLADEIAKLGPYEFICTGRPDEGIPAVCFKLKDGEDPGYTLYDLSERLRLRGWQVPAFTLGGEATDIVVMRIMCRRGFEMDFAELLLEDYKASLKYLSDHPKLQGIAQQNSFKHT

SEQ ID NO: 3119 - protein, 228 aa, Brassica napus
  misc_feature (12)..(12): Xaa can be any naturally occurring amino acid
MALQDEQEHEVXGGDIPEEDEGEMETDEYQEHAGEEGAAAAEDEEELEPGSASRDLEDMKKRLKEIEEEASALREMQAKAENDMAAAQDPSSAISAAEKEEVDLRSIYVGNVDYACTPEEVQQHFQSFGTVNRVTILTVLSGQPGRPAGVAFVEVVAVQNSLVLNESELHGRQIKVSAKETNVPGMRQFRGRRPFRPMRGFMPGPPFYPPYAYGRVPRFRRPMRYRPY

SEQ ID NO: 3120 - protein, 154 aa, Zea mays
MDARMFGLETPRVAALHHLLDVPDGDKAGGGATRTYVRDARAMAATPADVKELAGAYAFVVDMPGLSTGDIRVQVEDERVLVISGERRREEREDAKYLRMERRMGKFMRKFVLPDNADVDKVAAVCRDGVLTVTVEKLPPPEPKKPKTIEIKVA

SEQ ID NO: 3121 - protein, 483 aa, Pseudomonas aeruginosa
MNTKLFINNVWINSSDQQTFERKHPVSGEVMTECANSTVMDALKAAQAAQEAFQTWKTVGPSERRRLLLRVAEVMESKTPEFIEVMAKEVGASALWAGFNVQMSANVFREAASLATQIQGETIPTDKSDTLSMTLRQPVGPILSIVPWNGTAVLAARAIAYPLVCGNAVVFKGSEFSPATHALITQCVQEAGLPAGVLNYLNSSPDRSPEIADALISAKEIRRINFTGSTRVGSIIAQKAAQHLKRCLLELGGKSPLIVLDDADIDAAVKAAVFGSFLFQGQICMSTERLIVDEKIADEFVAKFVEKTKRLSAGDPCVTGDCIIGPMVSPNSGERINGLFKDAIDKGAKVVCGGLAQGALMPATILDHVKSDMRIYDEETFGPITVVIRCKGEAEAVRIANDSVYGLSSGVFGRDINRALRVGMSIEYGSVHINGSTVQNEAQAPYGGTKNTGYGRFDGRAVIDEFTEIKWLTIEPFEQQYPF

SEQ ID NO: 3122 - protein, 360 aa, Hypocrea virens
MSRSNPPNNASASRKISFNVSEQYDIQDVVGEGAYGVVCSAIHKPSGQKVAIKKITPFDHSMFCLRTLREMKLLRYFNHENIISILDIQKPRSYDSFNEVYLIQELMETDMHRVIRTQDLSDDHCQYFIYQTLRALKAMHSANVLHRDLKPSNLLLNANCDLKVCDFGLARSAASQEDNSGFMTEYVAARWYRAPEIMLTFKEYTKAIDVWSVGCILAEMLSGKPLFPGKDLTFPDHHQLTLILDVLGTPTMEDYYGIKSRRAREYIRSLPFKKKVPFRTLFPKTSDLALDLLEKLLAFNPVKRITVEDALKHPYLEPYHDPDDEPTAPPIPEEFFDFDKHKDTLSKEQLKQLIYQEIMR

SEQ ID NO: 3123 - protein, 198 aa, Azotobacter vinelandii
MTKNLSWHASSVGKLQRAGGKRQKPCILWLTGLSAAGKSTIANLLEQELFLCGAHTYLLDGDNLRHGLNRDLGFADADRQENIRRAAEVAHLFVDAGIIVIAAFISPFRRDRELARRLVAPGEFLEIFVDTPLEECERRDPKGLYRRARCGLISHFTGIDSAYEVPLDPEMRLTTLGWTPAQNACAIVDYLREGGYLR

SEQ ID NO: 3124 - protein, 501 aa, Asparagus officinalis
MTVSITAAVQLFLLLLLLLQLLFVHHKTKPKTKCRSPPGPPPLPVIGNLHQLSLLLHQSLYRLSKIHGPIFKLSLGRVPVLVISSPSLAKQVLKTHDLAFCSRASTVSFKEYTYDGCDVAGAPYGDSWRNLRKIFVLNLLSSKKLTSFRLVQEEEIEGMISSIRTRSDTNATVNITEFVVRLANNITFRVAFGYRSEGEYGEKSRFQRLLESGNDTVASFYVGDYFPGLGWLDKITGKLGKMKRNARDLDEFYQEVIDAHMKDGRKEDGKEDIVDVLLRLREEGQLTMDHIKGALMNIFVGGTDTSAASIAWAMAELARKPKVMKKAQEEVRKAASKKGKVEENDLAQLQYIKCVVNETLRLHLPLPLLVPRETIQHCEINGYDVSAKTRVLVNAWAIGRDEDAWENPEEFNPDRFVGSSLDYKGQDFQFIPFGAGRRICPGIQFGVETVELALANLLYAFNWELPPGVERENIDMHEAPGLVTRRATDLRLVATNYEEAN

SEQ ID NO: 3125 - protein, 250 aa, Brassica oleracea
MTKSYPTVTEDYQNAIEKCKRKLRGLIAEKNCAPIMVRLAWHSAGTFDCASRTGGPFGTMRFDAEQGHGANSGIHIALRLLEPIREQFPTISFADFHQLAGVVAVEVTGGPEIPFHPGREDKPQPPPEGRLPDATKGCDHLRQVFTKQMGLSDKDIVALSGAHTLGRCHKDRSGFEGAWTSNPLIFDNSYFKELLSGEKEGLLQLVSDKALLDDPVFRPLVEKYADDEEAFFADYAEAHLKLSELGFADA

SEQ ID NO: 3126 - protein, 405 aa, Zea mays
  misc_feature (80)..(80): Xaa can be any naturally occurring amino acid
MLTCIACSKQLPGDAPPLREPSDDDDRANAGGGGESAATPGTRQAIRVLTAQIKDMALKASGAYRHCKPCAGSSSPAASXRQQPYYHGAYAESGSDRFHCAYQRAGSSAASTPGLRTGGAMSSGDITPSVSARTDFLADDEEGDDEEGTATGSSEEDEEKEWVAQVEPGVLITFLSLPRGGNGLKRIRFSREMFNKWQAQRWWTENYEKVMELYNVQKSNSQVDPLPSIPRSDSEISKDDTPATAPLNKGQLLRTSPRPLKGSEAIGYSSSDCPQHQSSHLRNVYRKDRYLGHQFCDPVELASTPELSSISGAKTETSIGASVRTSSSPEEVDGSGELSASVSNASDEEREWVEEDEPGVYITIRALPGSIRELRRVRFSRERFSEMHARLWWEENQARIYEQYL

SEQ ID NO: 3127 - protein, 151 aa, Brassica napus
  misc_feature (119)..(119): Xaa can be any naturally occurring amino acid
  misc_feature (142)..(142): Xaa can be any naturally occurring amino acid
  misc_feature (146)..(146): Xaa can be any naturally occurring amino acid
MFTCIACTKADGGEELGARGGTTPNTKESVKSLTTQIKDMAMKFSGAYKQCKPCTGSPRSPMKKGHRPFSDFDNASEGVPYPYMGGSAGSTPAWDFINSSHHPAGAKFTSIYGNDRESXSAQSCDVVLDDEGPKEWMAQVEXGVHXTFASL

SEQ ID NO: 3128 - protein, 408 aa, Photorhabdus luminescens subsp. laumondii TTO1
MDIIILGVVMFTLIVLVLTALILFAKSKLVNTGNIRVEVNGDPEKSFTAPAGDKLLNMLSSQGIFVSSACGGGGSCGQCRVKIKDGGGDILPTELSHISKREAKEGCRLACQVNVKQNLKIKLPEEIFGVKKWECEVISNDNKATFIKELKLKIPDGDVVPFRAGGYIQIEAQPHIARYEDYDVPKEYREDWDKFNLFRFVSEVKEPTVRAYSMANYPEEHGIIMLNVRIATPPPKNSEAPPGIMSSYIWSLKPGDKVTISGPFGEFFAKDTDAEMIFIGGGAGMAPMRSHIFDQLNRLNSKRKISFWYGARSKREMFYTEDFDQLAAENENFTWNVALSDALPEDNWDGYTGFIHNVLYENYLRDHPAPEDCEFYMCGPPVMNAAVIKMLKDLGVEDENIMLDDFGG

SEQ ID NO: 3129 - protein, 506 aa, Vibrio cholerae O1 biovar eltor str. N16961
MIYAQPGSDNAVITFKSHYDNFIGGQWVKPVSGEYFGNISPVNGQVYCQVARSTQADIDLALDAAHQVREAWAKTSVTERSNLLLKIADRIEANIEQLAVAECWENGKPVRETLAADLPLVVDHFRYFAGCIRAQEGSAAELDSHTASYHFPEPIGVVGQIIPWNFPMLMAAWKLAPALAAGCCVVLKPAEQTPTSILVLIEKIADLIPAGVLNVVNGFGSEAGQALATSQRIAKLAFTGSTQVGQHILKCAAQSLIPSTVELGGKSPNIYFPDIFDHEDTYLEKCIEGTLLGFFNQGEVCTCPSRVLVHESIYDRFVAKVAERAKGIKQGNPLDTATQVGAQASQEQFDKILSYLDIGRQEGAKVLFGGGVAKQEGELGQGYYIQPTLLQGHNKMRVFQEEIFGPVIAITSFKDEAEALALANDTEYGLGAGIWTRDQNLAYRMGRNIQAGRIWINCYHAYPAHAAFGGYKKSGIGRETHKMMLNHYQNTKNLLISYDVNPLGFF

SEQ ID NO: 3130 - protein, 486 aa, Pseudomonas sp. S-47
MKEIKHFISGAFVGSASGKLFDNVSPANGQVIGRVHEAGRAEVDAAVRAARAALKGPWGKMTVAERAEILHRVADGITARFGEFLEARMPGHRQAEVAGQPHRHSARRANFKVFADLLKNVANEAFEMATPDGAGALNYGVRRPKGVIGVISPWNLPLLLMTWKVGPALACGNCVVVKPSEETPLTATLLGEVMQAAGVPAGVYNVVHGFGGDSAGAFLTEHPDVDAYTFTGETGTGETIMRAAAKGVRQVSLELGGKNAGIVFADCDMDKAIEGTLRSAFANCGQVCLGTERVYVERPIFDAFVARLKAGAEALKIGEPNDPEANFGPLISHKPREKVPSYYQQAVDDGATVVTGGGVPEMPAHLAGGAWVQPTIWTGLADDSAVVTEEIFGPCCHIRPFDSEEEAIELANSLPYGLASAIWTENASRAHRVAGQIEAGIVWVNSWFLRDLRTAFGGSKQSGIGREGGVHSLEFYTELKNICVKL

SEQ ID NO: 3131 - protein, 304 aa, Oryza sativa (japonica cultivar-group)
MSLQGGFVKTQKTHAYFKRFQVKFKRRRQGKTDYRARIRLTNQDKNKYNTPKYRFVTNKDITAQIVYATIAGDIVMAAAYSHELPRYGLEVGLTNYAAAYCTGLLLARRVLTLRGLDQEYEGNVEATGEDYYVEPADERRPFRALLDVGLIRTTTGNRVFGALKGALDGGLDIPHSDKRFAGFKKDEKQLDSDIHRKYIYGGHVADYMRSMAEEEPEKFQAHFSEYLKKGIDADGMESLYKKVHAAIRADPTMAKSTKKEPATHKRYNLKKLTYEQRKASLVERLNALNSSAGADDDDEEEDDE

SEQ ID NO: 3132 - protein, 290 aa, Haemophilus influenzae 86-028NP
MIKKIAVLTSGGDAPGMNAAIRGVVRSALAEGLEVFGIYDGYQGLYNNKIKQLNRYSVSDVINRGGTFLGSARFPEFKDPNVRAKCAEILRSHGIDALVVIGGDGSYMGAKLLTEEHGFPCVGLPGTIDNDVAGTDYTIGYQTALQTAVDAIDRLRDTSSSHQRISIVEIMGRHCSDLTISAGIAGGCEYIVASEIEFNREQLIQQIERSIIRGKRHAIIAITELLTDVHSLAKKIEARVGHETSRNRFRAYSTWWFSLGFCRYSCLTYGRIRSRFIATRQRRLLRRYPK

SEQ ID NO: 3133 - protein, 456 aa, Pirellula sp. 1
MVVGQRERKRRCIRGEPLMNDTTWVLDGGRLIDPANGIDRIARLVLHEGKVHSIDTPDGDVPPDAGRLDVTGKIVAPGLVDLATELREPGSEEDETIQTGSNAALAGGYTTVLCCSSTKPLMDSAASVQLVRQIAQRVDGVRVLPIACLSKGRQAEQMAELGILAAAGAAGFSDTPRPMPNDALLKRALDYCRMFDLPIFDRPEVPELADGGVMHDGQIGLILGLKGLPTEAEDLAVARDVRLAEATKGRLHVGPVSTMGSIDMIGRVKSRGIHISASVCPHNLFGSDELLRSYDSRYKVHPPMRSPSHVEALRNAVAEGVIDAIESGHMPRAQEKKANDLDLAPFGASALETTLAAIATDLVETKILPWSRAIECLSTAPARIAGVKGGTLSVGANADVTVIDPLNAWSVEAKEFRSRCHSSPMTGRTLTARVTHTLVGGRLKFELHPTVASAAS

SEQ ID NO: 3134 - protein, 493 aa, Glycine max
MDPNHLFFTHFRDGAIASRIEGQHRGALPSVIVIGAGISGLAAARSLYDASFKVTVLESRDRLGGRIHTDFSFGCPVDMGASWLHGVCNENPLAPLIRGLGLSLYRTSGDNSVLYDHDLESYMLFNIDGKQVPQQMVIEVGDTFKKILEETGKVRDEHTEDISVSQAISIVLDKHPDLRQQGLAHEVLQWFICRMEAWFAADADMISLKTWDQEHVLSGGHGLMVQGYDPVIKVLAKDIDIRLNHRVKKISSGYNKVMVTVEDGRNFVADAAIITVPIGILKANLIEFEPKLPDWKVSAISDLGVGNENKIALRFDKVFWPNVELLGTVAPTSYTCGYFLNLHKATGHPVLVYMVAGRFAYDIEKLSDEAAANFVMQQLKKMFPNASKPVQYLVSRWGTDPNSLGCYSYDLVGKPTDVYDKLRAPLGNLFFGGEAVSLDNQGSVHGAYSAGVMAAENCESYMLEKLGHAEKLSLASVRHEMLETLIPLQISRM

SEQ ID NO: 3135 - protein, 280 aa, Oryza sativa (japonica cultivar-group)
MATPAAEKPDGVEIREVWEDNLEAEFAVIREIVDDFPYVAMDTEFPGVVCRPLGTFKSNADFNYATLKANVDMLKLIQLGLTFSNEHGGLPSLGPEGRPCVWQFNFRGFDPRTDVAAADSIDLLRRSGIDFTRHSADGADARRFAELLMSSGVVMNSEVRWVTFHSGYDFGYLLKLLTGTYLPDTITGFFDLIRIYFPVVYDIKHLMRFCNSLHGGLNKLAELLDVERVGICHQAGSDSLLTALSFKKLKEAYFNGLTEKYAGVLYGLGTEGGETSSAAH

SEQ ID NO: 3136 - protein, 301 aa, Oryza sativa (japonica cultivar-group)
MGGFVKTQKTNAYHKRFQVKFKRRRQGKTDYRARIRLTNQDKNKYNTPKYRFVTNKDITAQIVYATIAGDIVMAAAYSHELPRYGLEVGLTNYAAAYCTGLLLARRVLKLRGLDQEYEGNIEATGEDYYVEPADERRPFRALLDVGLIRTTTGNRVFGALKGALDGGLDIPHSDKRFAGFKKDEKQLDSDIHRKYIYGGHVADYMRSMAEEEPEKFQAHFSEYLKKGIDADGMEALYKKVHAAIRADPTMAKSTKKEPATHKRYNLKKLTYEQRKASLVERLNALNSSAGADDDDEEEDDE

SEQ ID NO: 3137 - protein, 434 aa, Salmonella typhimurium LT2
MKTRTQQIEELQKEWTQPRWEGITRPYSAEEVVKLRGSVNPECTLAQLGAAKMWRLLHGEAKKGYINSLGALTGGQALQQAKAGIEAIYLSGWQVAADANLASSMYPDQSLYPANSVPAVVDRINNTFRRADQIQWASGIEPNDPRYVDYFLPIVADAEAGFGGVLNAFELMKSMIEAGAAAVHFEDQLASVKKCGHMGGKVLVPTQEAIQKLVAARLAADVMGVPTLVIARTDADAADLITSDCDPYDSGFITGERTSEGFYRTHAGIEQAISRGLAYAPYADLVWCETSTPDLELARRFADAIHAKYPGKLLAYNCSPSFNWQKNLDDKTIASFQQQLSDMGYKYQFITLAGIHSMWFNMFDLAHAYAQGEGMKHYVEKVQQPEFAAAKDGYTFVSHQQEVGTGYFDKVTTIIQGGASSVTALTGSTEEAQF

SEQ ID NO: 3138 - protein, 326 aa, Triticum aestivum
  misc_feature (195)..(195): Xaa can be any naturally occurring amino acid
MASTTAVPEVALRSGGARPMPAIGMGTATFPVVPETTVKAVLEAVEVGYRHFDTAAMYATERPLGEALAEAVRRGLLASREEVFVTSKLWCTQCHPHLVLPSLRESLQNLQMEYVDLYLIHWPISLKPGPTVFPVKREDAVPFDFAGVWRAMEECHRLGLAKAIGVSNFTTSHLHKLLAAATVPPAVNQVEMNPXWQQRKLREYCAEKGIHVAAYSPLGGQNWSGDGNAVLDSEVLAEIAKARGKTVAQVALRWIYEQGVTPIVKSFSKERLKENLGIFDWGLTDDDLRKIGQIPQKKIVRAETVLFSAEGEFTSADLADMEIVEE

SEQ ID NO: 3139 - protein, 251 aa, unidentified bacterium
MNTGDLAWVLISAALVWLMTPGLALFYGGLGERRNLLHTMFVPILIIGIATMVWFTVGYSLAFGGAGDIIGNFKHLFLSGVSFTHSTKSLTIPDGAFALFQGMFPIITAAIITGSVIGRVRIKAMIVFITLWLIFIYTPLAHMVWGGGLLAKLGAIDFAGGTVVHISSGVTGLVLALMIGHRHNDKHVPVRPSYVLIGGALLWVGWFGFNSGSALAANGIAVLALVNTWLASAAGVLTWGLAEYKMHGPGI

SEQ ID NO: 3140 - protein, 332 aa, Brassica napus
MSPEEELQSNGSVASSTRNIVGVLKEHNYLGLSDCSSVGSSNLSGLADDDKATISLKATELTLGLPGSQSPARDTELNLLGPAKLDEKPFFPLLPSKDEMCSSSSHKNIASGNKRGFSDTMDKVPLYTEKNWMFPEAVVATQSVIKKEVAQNLPKGKLSTTNNSSSPPAAKAQIVGWPPVRSYRKNTLATTCKNSDEVDGKPGSGPLFVKVSMDGAPYLRKVDLRSYTNYGELSAALEKMFTTFTLGQCGTSGATGKDVRNETKLKDLLNGKDYVLTYEDKDGDWMLVGDFSWEIFIGVCKKLKIMKGCDAIGLAAAPAPAPRAMEKSKMRA

SEQ ID NO: 3141 - protein, 436 aa, Streptomyces clavuligerus
MTETGTETETAGAPAETAETLAERWATEPRWRDIERTYGAEEVIRLSGSVREEHTLARRGADRLWRQLHELDYVHALGALTGGQAVQQVRAGLQAIYLFGWQVAADANQAGHTYPDQSLYPANSVPQVVRRINNALLRADQIATAENAGDGTDWLAPIVADAEAGFGGPLNAFELTKAMIEAGAAGIHYEDQLASEKKCGHLGGKVLVPTAQHIRTLNAARLAADIADVPTVIIARTDALAASLITSDVDERDAEFLTGERTAEGFHRVRNGMAPVIARGLAYAPYADLLWMETGTPDLAQAREFAEAIHAQYPEQLLAYNCSPSFNWRAALDDDRIAKFQRELGAMGYRFQFITLAGFHSLNHAMFDLARGYAEHGMTAYVDLQEREFAAQADGFTAVRHQREVGTGYFDLVSTAVNPASSTTALSGSTEEEQFH

SEQ ID NO: 3142 - protein, 499 aa, Zea mays
YNLGVQMSADASAAMEKIRAAGLLKTQGLIAGQWVDAYDGKTIEVQNPATGEVLANVSFMGSRETSDAIASAHSTFYSWSKLTASERGKALRKWYDLIISHKEELALLMTLEQGKPMKEALGEVNYGASFIEYFAEEAKRIYGDIIPPTLSDRRLLVLKQPVGVVGAITPWNFPLAMITRKVGPALACGCTVVVKPSELTPLTSLAAADLALQAGIPAGALNVVMGNAPEIGDALLQSTQVRKITFTGSTAVGKKLMAESANTVKKVSLELGGNAPCIVFDDADIDVAVKGSLAAKFRNSGQTCVCANRILVQEGIYEKFASAFIKAVQSLKVGNGLEESTSQGPLINEAAVQKVEKFINDATSKGANVMLGGRRHSLGMSFYEPTVVGNVSNDMLLFREEVFGPVAPLIPFKTEEEAVHMANDTNAGLAAYIFTKSIPRSWRVSESLEYGLVGVNEGIISTEVAPFGGVKQSGLGREGSKYGVDEYLELKYICMGNLG

SEQ ID NO: 3143 - protein, 131 aa, Brassica napus
MVYIKNQKTRAYSKRFQVKFKRRRQGKTDYRARLRLTNQDKNKYNTPKYRFVVRFTNKDVTAQIVYATIAGDIVMAAAYSHELPRYGLEVGLTNYAAAYCTGLLLARRVLKNRDLDEEYEGYVEATGEDFS

SEQ ID NO: 3144 - protein, 292 aa, Glycine max
  misc_feature (186)..(186): Xaa can be any naturally occurring amino acid
  misc_feature (206)..(206): Xaa can be any naturally occurring amino acid
  misc_feature (276)..(276): Xaa can be any naturally occurring amino acid
  misc_feature (288)..(288): Xaa can be any naturally occurring amino acid
MESTLKALRDGESVLDLSPRSTVSGGVEDIYGEDRATEDQLVTPWIFSVASGYSLLRDPQYNKGLSFTEKERDAHYLRGLLPPTVSTQQLQEKKLMNSIRQYQVPLQKYVAMMDLQERNERLFYKLLIDNVEELLPVVYTPTVGEACQKYGSIFRRPQGLYISLKEKGKILEVLKNWPERSIQVIXVEPDGERIFGDLGILGCQGXGIPGGKLALYTALGGVRPSACLPITIDVGTNNEKLLNDEFYIGLRQRRATGQEYYDLMHEFMTAVKQNYXEKVLVQFEDFAXHNAF

SEQ ID NO: 3145 - protein, 240 aa, Populus alba x Populus tremula
MVPKFLFSASFVLFFLLHCPPALAQSPAAAPAPPGPINVTKVLEKGGQFSAFIRLLKATQEDVTLNGQLNNTNNAITIFAPSDNAFSSLKSGTLNSLSDQEKAELVQFHIIPQFLSSSQFQTVSNPLTTQAGSGGRLELNVTTTGNSVNITTGLTNTSVSGTIYTDNQLAVHQVDKVLLPLDIFTPKPPTPAPAPEKPKKRSKAAASPESPADTSGAVSFTVLNNVVFFGLCMVAAIYSL

SEQ ID NO: 3146 - protein, 279 aa, Borrelia burgdorferi B31
MANKINWFPGHMKRALDLIKNNLQKANIVLEILDARAPFSSKNPLTEKITKNQAKIILLHKSDVAQINEIIKWKKYFENLGNTVIISNIYKKGMRKQIIDIIKKLAIVKKIKNYKEKIKVLIIGVPNVGKSSIINLLSGKKSAKVANKPGYTKNIQIVKINEEINLFDMPGILWHNLVDQSIAKKLAILDMIKNEIVDNTDLALYLLEIMDQNNKNILLKKYEIYHKNSLDILQNFAKARKLIGKKNELNLEKASKILIKEFREGKFGKIILDKNYNAF

SEQ ID NO: 3147 - protein, 192 aa, Glycine max
  misc_feature (139)..(139): Xaa can be any naturally occurring amino acid
MEDGAGRGLECPKTMDGKASNGNGLEKEIPSCCLKAKASIPESEAKCHSTVVSGWFSASQTCSGKSGKAVYFNNPMWPGEAHSIKVEKILYKEKSEYQEVLVFEVWPLHLIMYYNFNVKGIDANPFILQSSTYGKVLVXLDGIVQLTEKDECAYQEMIAHLPLCSIQSPKTVKPFDLMIFVLSLYYDCRIKK

SEQ ID NO: 3148 - protein, 106 aa, uncultured Rickettsia sp.
MLKEIGSSENIPKYIAKAKDKNDPFRLMGFGHRVYKNYDPRAAVLKETCKEVLKELGQLENNPLLQIAIELEAIALKDEYFIERKLYPNVDFYSGIIYKAMGIPSQ

SEQ ID NO: 3149 - protein, 176 aa, Glycine max
  misc_feature (115)..(115): Xaa can be any naturally occurring amino acid
  misc_feature (125)..(125): Xaa can be any naturally occurring amino acid
MAHSMISFRAVTTVNRARADMVAPFTGLKSMAGFSTRKTNNVITSIASNRGRVQCMHVWPPVGKKKTETLFYLPDLDDAQLAKEVECPVRKGWIPCYELEFEHAFVYREHNKSPXYYNGHYWTMXKLPIFDCTNTAQVWKELQETKTAYPNDFIHIIGFDDVLQMQVINYITYKPA

SEQ ID NO: 3150 - protein, 479 aa, Mycobacterium tuberculosis H37Rv
MAREISRQTFLRGAAGALAAGAVFGSVRATADPAASGWEALSSALGGKVLQPDDGPQFATAKQVFNTNYNGYTPAVIVTPTSQLDVQKAMAFAAANNLKVAPRGGGHSYVGASTANGAMVLDLRQLPGDINYDATTGRVTVTPATGLYAMHQVLAAAGRGIPTGTCPTVGVAGHALGGGLGANSRHAGLLCDQLTSASVVLPSGQAVTASATDHPDLFWALRGGGGGNFGVTTSLTFATFPSGDLDVVNLNFPPQSFAQVLVGWQNWLRTADRGSWALADATVDPLGTHCRILATCPAGSGGSVAAAIVSAVGTQPTGTENHTFNYLDLVRYLAVGNLNPSPLGYVGGSDVFTTITPATAQGIASAVDAFPRGAGRMLAIMHALDGALATVSPGATAFPWRRQSALVQWYVETSGSPSEATSWLNTAHQAVRAYSVGGYVNYLEVNQPPARYFGPNLSRLSAVRQKYDPSRVMFSGLNF

SEQ ID NO: 3151 - protein, 192 aa, Agrobacterium tumefaciens str. C58
MADRMSSKTIVDVEDLSGDAVDLTEITGVVKWFDVAKGFGFIVPDNGTQDVLLHVSCLRRDGYQTILEGTRIVALIQRRDRGFQVFRILSMDQSTAVHPSQLPPVRTHVQVTPHSGLERAIVKWFNRTKGFGFLTRGEGTEDIFVHMETLRRFGLTELRPGQVVLVRYGDGDKGLMAAEIHPDNPVSIGMSH

SEQ ID NO: 3152 - protein, 335 aa, Capsicum chinense
MVHEKQVIDEVSGWLRVFDDGSVDRTWTGPPEVKFMSEPVKPHDDFIDGIAVKDVVADDKSGSRLRIYLPEQNGGSVDKLPVVVHFHGGGFCISQADWFMYYTVYTRLARVANAIIVSVFLPLAPEHSLPAACDSGFAALLYLRDLSRQKINEPWLSNFADFNRVFLIGDSSGGNIVHHVAARAGEEDLSPMKLAGAIPIHPGFVRSKRSKSELEQEQTPFLTLDMVDKFLGFALPMGSNKDHPITCPMGDAAPAVEELKLPPYLYCVADKDLIKDTEMEFYEALKKAKKDVELCISYGVGHSFYLNKIAVEMDPVTGSATEKLFEAIAEFINKH

SEQ ID NO: 3153 - protein, 498 aa, Oryza sativa (japonica cultivar-group)
MATCLDSLGPLLGGAANSTDAANYICNRFTDTSSAVDATYLLFSAYLVFAMQLGFAMLCAGSVRAKNSMNIMLTNVLDAAAGALFYYLFGFAFAFGTPSKGFIGKQFFGLKHMPQTGYDYDFFLFQWAFAIAAAGITSGSIAERTRFSAYLIYSAFLTGFVYPVVSHWFWSTDGWASAGRLTGPLLFKSGVIDFAGSGVVHLVGGIAGLWGAFIEGPRIGRFDAAGRTVAMKGHSASLVVLGTFLLWFGWFGFNPGSFTTISKIYGESGTIDGQWSAVGRTAVTTSLAGSVAALTTLYGKRWLTGHWNVTDVCNGLLGGFAAITAGCSVVDPWASVICGFVSAWVLIGCNKLSLILKFDDPLEATQLHAGCGAWGIIFTALFARREYVELIYGVPGRPYGLFMGGGGRLLAAHIVQILVIVGWVSATMGTLFYVLHRFGLLRVSPATEMEGMDPTCHGGFGYVDEDEGERRVRAKSAAETARVEPRKSPEQAAAGQFV

SEQ ID NO: 3154 - protein, 506 aa, Rhodospirillum rubrum
MLYAAPGTADAIFAFKPRYDNFIDGTWQPPVRGEYFDNVTPITGKVFCKAARSTEEDITLALDAAHAAADRWGRTTAAERALILNRIADRLQDNLETLAYVESIDNGKPIRETLAADIPLAIDHFRYFAACIRAQEGSLSQIDETTIAYHFNEPLGVVGQIIPWKFPILMATWKLAPALAAGNCIVLKPAEQTPISILVLTELIADLLPPGVLNVVNGFGLEAGKPLASSKRIAKIAFTGETATARLIMQYASQNLIPVTLELGGKSPNVFFDDIASADDSFFDKAVEGFVMFALNQGEICTCPSRALIHESLYDRFIERALARVAVIKQGSPLDTETMIGAQASTEQMDKILSYMDIGREEGATVLAGGARAELGGELDGGYYVQPTVFKGNNSMRIFQEEIFGPVVAVTTFKDEDEALHLANDTHYGLGSGVWTRDGNRAFRFGRGIKAGRVWTNCYHLYPAHAAFGGYKQSGIGRENHHMMLDHYQQTKNLLVSYDPKAMGFF

SEQ ID NO: 3155 - protein, 243 aa, Triticum aestivum
MGGGVMRTAAKVGLAGGAAAAAGRFRNVAPSFATAPAAEAAAAAPLLSAAGEIPAVAPAGSQWASWEVDDWEFADWRSESASEADVAVVGGPRLVFAPPSREEAEEATAELREAIDRVYFKETPVEVVKEHDQELSKLGADALIPAMPGHVVQAFTLLKSSPEAQSVVASLASDKNVWDAVLKNERVMEFYKSHQQTLVNTFPEGTDSTDSVESPEKFEEASPEYALPTGSPLSDFGANANKR

SEQ ID NO: 3156 - protein, 175 aa, Triticum aestivum
  misc_feature (165)..(165): Xaa can be any naturally occurring amino acid
MAPTVMASSATSVAPFQGLKSTAGLPVSRRSNGASLGSVSNGGRIRCMQVWPIEGIKKFETLSYLPPLSTEALLKQVDYLIRSKWVPCLEFSKVGFIFREHNASPGYYDGRYWTMWKLPMFGCTDATQVINEVEEVKKEYPDAYVRIIGFDNMRQVQCVSFIAFXPPGCEESGKG

SEQ ID NO: 3157 - protein, 75 aa, Glycine max
  misc_feature (37)..(37): Xaa can be any naturally occurring amino acid
  misc_feature (57)..(57): Xaa can be any naturally occurring amino acid
IYRIESYDVTSIPACIPMYLMSRLIKSLAFNWLISIXGSDKIFGRCVCFLNAPLKEXFHQETCRMIKALHKYDCL

SEQ ID NO: 3158 - protein, 162 aa, Triticum aestivum
MEGRMFGLETPLMTALQHLLDVPDGESGGAGNAGGEKQGPTRAYVRDARAMAATPADVKELPGAYAFVVDMPGLGSGDIKVQVEDERVLVISGERRREEKEDAKYLRMERRMGKLMRKFVLPENADMEKISAVCRDGVLTVTVEKLPPPEPKKPKTIQVQVA

SEQ ID NO: 3159 - protein, 358 aa, Saccharomyces cerevisiae [sequence omitted]

SEQ ID NO: 3160 - protein, 341 aa, Salmonella typhimurium LT2
MKVKAVFINKPGEVETRWVDYPHKKENEVLIKVDAAGICGSDIGAFRGTNPLVTYPRIIGHEVTGIVLQEGAGMPDNIKEGDRVIVDPYIYCGHCYPCSVGRTNCCENLNVIGVHVDGAMQEVVTHPAHLIHKIPDNVPSEMAPLAEPLTIALHALHRANVKAGEYVAIIGAGAIGLMAALSARHYKATPILIDIVEERLRYAQKLGVPYVLNAADDQVIDAIKNITHGTMAQVVIEASGANSAIRNTLDLASFAGRISFTGWPKQETSLPTNLITYKELDLRGSRTSAGEFDEALRMLSTLEINPQDVVSKVVNLDEIPDAVKELDRYPERYLKINAVFH

SEQ ID NO: 3161 - protein, 162 aa, Zea mays
MDAVMFGLETPLMAALQHLLDVPDGDAGAGGDNKTGGGATRTYVRDARAMAATPADVKELPGAYAFVVDMPGLGTGDIRVQVEDERVLVVSGERRREEREDDAKYLRMERRMGKFMRKFVLPDNADVDKVAAVCRDGVLTVTVEKLPPPEPKKPKTIEVKVA

SEQ ID NO: 3162 - protein, 332 aa, Arabidopsis thaliana
MSNVIGDRTEDGLSTAAAASGSTAVQSSPPTDRPVRVYADGIYDLFHFGHARSLEQAKLAFPNNTYLLVGCCNDETTHKYKGRTVMTAEERYESLRHCKWVDEVIPDAPWVVNQEFLDKHQIDYVAHDSLPYADSSGAGKDVYEFVKKVGRFKETQRTEGISTSDIIMRIVKDYNQYVMRNLDRGYSREDLGVSFVKEKRLRVNMRLKKLQERVKEQQERVGEKIQTVKMLRNEWVENADRWVAGFLEIFEEGCHKMGTAIVDSIQERLMRQKSAERLENGQDDDTDDQFYEEYFDHDMGSDDDEDEKFYDEEEVKEEETEKTVMTDAKDNK

SEQ ID NO: 3163 - protein, 197 aa, Zinnia elegans
MSASRFIKCVTVGDGAVGKTCLLISYTSNTFPTDYVPTVFDNFSANVVVNGSTVNLGLWDTAGQEDYNRLRPLSYRGADVFILAFSLISKASYENVSKKWIPELKHYAPGVPIVLVGTKLDLRDDKQFFVDHPGATPITTAQGEELKKTIGAPEYIECSSKTQLNVKQVFDAAIKVVLAPPKAKKKKGKAQKACSIL

SEQ ID NO: 3164 - protein, 105 aa, uncultured Rickettsia sp.
MLKEIGSSEYIPKYIAKAKDKNDPFRLMGFGHRVYKNYDPRAAVLKETCKEVLKELGQLDNNPLLQIAIELEAIALKDEYFIERKLYPNVDFYSGLSIKLWVYRQ

SEQ ID NO: 3165 - protein, 158 aa, Arabidopsis thaliana
MSDDEHHFESSDAGASKTYPQQAGNIRKGGHIVIKGRPCKVVEVSTSKTGKHGHAKCHFVAIDIFTSKKLEDIVPSSHNCDVPHVNRVDYQLIDISEDGFVSLLTDNGSTKDDLKLPTDEALLTQLKNGFEEGKDIVVSVMSAIGEEQMCALKEVGPK

SEQ ID NO: 3166 - protein, 498 aa, Bacillus sp. KSM-K16
MSQVPTGENSLKTRLVSFLNGGSKKLLINGEWVDAVSGQTFETMNPATGDTLAIVAEAGQEDIDSAVKAARKAFDEGPWSKMSAAERSRLIYKLADLIEEHKEELAQLETLDNGKPIRETANADVPLAIEHFRYFAGWATKIVGQTIPVQGNYFNYTRHEAIGVVGQIIPWNFPLLMAAWKLGAALATGCTVVLKPAEQTPLSALYLGELINEAGFPKGVVNIVPGFGHSAGTAIVNHPAVDKVAFTGSTNVGKLIMKQASESLKRVTLELGGKSPNIILPDADLSKAVPGSLMGIMFNQGQVCCAGSRLYVQKKQYDHVVADLVSLTKKINQGDGLLEHTTMGPLISTQQQKRVKNYIDRGVEEGAELLAGGTIPYDQGYFVSPTIFADVDHSMTIAKEEIFGPVVAAMPFESVDDLIGKANDSDYGLAAGVWTQDIKKAHYIAHRIKAGTIWVNCYNVFDAASPFGGYKQSGIGREMGSYALDNYTEVKSVWVNMD

SEQ ID NO: 3167 - protein, 506 aa, Halomonas salina
MIYANPGSPESVVSFDARYGNYIGGEFVPPVKGQYFDNVSPVNGKPFCEIPRSTAEDIDKALDAAHAAAPAWGKTSAAERGNILLRIADRIEQNLELLAVAETWDNGKAVRETLNADLPLAVDHFRYFAGCIRAQEGTAADIDANTVAYHFHEPLGVVGQIIPWNFPILMAVWKLAPALAAGNCVVLKPAEQTPASILKLMELVGDLLPPGVVNVVNGYGAEAGQALATSTRIAKIAFTGSTPVGSHILKCAAENIIPSTVELGGKSPNIYFADIMDAEPEFIDKAAEGLVLAFFNQGEVCTCPSRALIQEDIYDAFMAKVMEKVATITRGNPLDTDVKVGAQASQEQFDKIMSYMEVAREEGAEFLTGGDKEHFDPAYDSGYYIQPTLLKGHNKMRVFQEEIFGPVVAVTTFKDEEEALAIANDTEFGLGAGVWSRDINVAFRMGRGIQAGRVWTNCYHQYPAHAAFGGYKKSGVGRETHKVALEHYQQTKNLLVSYDTNPLGFF

SEQ ID NO: 3168 - protein, 477 aa, Methylocystis sp. SC2
MSVQATHSGSARIDPRYDHAALAAARESDRFSLHTKHLNEMWVRVLKTIGYDVGFTRGLGPYLWDRKGDRYLDLLSGWGVFALGRNHPAVRDALVSVLDGELANLVQLDVSVLAGVLAEKLLGYAPWLEKVFFANSGAEAVEAAIKFARAATGRPGILHCAHSFHGLTYGSLSMNGDDIFKKGFGPLLPNAREVAFDDLDALERALAGRDVAAYFVEPIQGKGVNIPQEGYLLGAQALCRKYGTLFVADEIQTGIGRTGRFFAIDHYPGVEPDMIVVAKALSGGHVPVGAVLTRKWIFDKVFDRMDRAVVHGSTFSKNDLAMAAGVATLDVLKNERVIENAAKTGDRLLASFQRMAGGYELVADVRGKGLMIGVEFGPPKSFKLKAAWNLLETVNSGLFCQLISIPLFRDHKVLTQVAGHGNHTIKLLPPLTISDEDCDWIEQSFDAVIADAHKAPSAVWSLGKTLAEHAIKARMSG

SEQ ID NO: 3169 - protein, 487 aa, Burkholderia cepacia R1808
MTIKHWIDGREVASRDTFTTLNPATGDVIADVASGGDAEVDAAVRAAKAAFPKWANTPARERAKLMCRLAELIEKHVPMLAALETQDTGLPIAQTSKQLIPRAAENFNFFAQVCVQMNGRTYPVDDQMLNYTLYQPVGVCALVSPWNVPFMTATWKTAPCLALGNTAVLKMSELSPLTADQLGRLALEAGIPPGVLNVVHGYGATAGDALVRHSDVRAVSFTGGTVTGKRIMERAGLKKYSMELGGKSPVLIFDDADFDRALDASLFTIFSINGERCTAGSRIFVQRTIYDRFVQAFAQRANRLVVGDPADPATQLGAMITRQHWEKVTGYIRLGEQEGARVVAGGAQAPAGLAAHLRNGNFVRPTVFADVDNRMRIAQEEIFGPVACLIPFDDEDDGLRLANETSYGLASYLWTQDVGKVHRLARGIEAGMVFVNSQNVRDLRQPFGGVKESGTGREGGEYSFEVFAEIKNVCISMGSHHIPRWGV

SEQ ID NO: 3170 - protein, 183 aa, Methylocystis sp. SC2
MTASATESDETGLELVEVAGRIKWFDVAKGYGFVVPDDGSDDILLHVTILRRSGMQTAFEGARVVCEAQKRVKGMQVFRVIAMDESTAVHPSQSCAGRTHVQIVPTSGYEIAIVKWFNRMKGFGFLTRGEGTEDIFLHMETVRRYGMTELKPGDSVLVRYGGGPKGLMAAEVRPLDAKSVPSH

SEQ ID NO: 3171 - protein, 588 aa, Zea mays
  misc_feature (188)..(188): Xaa can be any naturally occurring amino acid
  misc_feature (299)..(299): Xaa can be any naturally occurring amino acid
  misc_feature (559)..(559): Xaa can be any naturally occurring amino acid
  misc_feature (572)..(572): Xaa can be any naturally occurring amino acid
MCGILAVLGCSDWSQAKRARILACSRRQEHPGPDWSGLYQHEGNFLAQQRLAVVSPLSGDQPLFNEDRTVVVVANGEIYNHKNVRKQFTGTHNFSTGSDCEVIIPLYEKYGENFVDMLDGVFAFVLYDTRDRTYVAARDAIGVNPLYIGWGSDGSVWIASEMKALNEDCVRFEIFPPGHLYSSAGGGXRRWYTPHWFQEQVPRTPYQPLVLREAFEKAVIKRLMTDVPFGVLLSGGLDSSLVASVTKRHLVETEAAEKFGTELHSFVVGLEGSPDLKAAREVADYLGTIHHEFHFTVQXGIDAIEEVIYHDETYDVTTIRASTPMFLMARKIKSLGVKMVLSREGSHELLGGYLYFHFAPNKEEFHRETCRKVKALHQYDCLRANKATSAWGLEVRVPFLDKEFINVAMGMDPEWKMYDKNLGRIEKWVMRKAFDDDEHPYLPKHILYRQKEQFSDGVGYNWIDGLKSFTEQQVTDEMMNSAAQMFPYNTPVNKEAYYYRIIFERLFPQDSARETVPWGPSIACSTPAAIEWVEQWKASNDPSGRFISSHDSTAIDHTXAVSRRWPTAAATXANGTVNGKDVAVAIAV

SEQ ID NO: 3172 - protein, 440 aa, Bordetella parapertussis 12822
MSNRETEIRNLQKDWAENTRWQGIKRAYSAEDVIRLRGSVAVEHSLARRGATRLWDSLHSEPFVNSLGALTGNQAMQQVKAGLKAIYLSGWQVAGDANLAGEMYPDQSLYPANSVPQVVRRINNALARCDQIQWMEGKNPGDQDYIDYYAPIVADAEAGFGGVLNAFELMKAMIEAGAAGVHFEDQLASVKKCGHMGGKVLVPTREAVSKLVSARLAADVMGTPTILLARTDADAADLVTSDVDENDRPFITGERTVEGFFRTRAGLDQAISRGLAYAPYADLIWCETSTPNLEYARKFAEAVHRQFPGKLLAYNCSPSFNWKKNLDDGTIAKFQRELGAMGYKFQFITLAGFHALNYGMFELAHGYARRQMSAFVELQQKEFAAAELGFTAVKHQREVGTGYFDAVTQTIEGGQSSTTALTGSTEEAQFEHGGQAVKAA

SEQ ID NO: 3173 - protein, 106 aa, uncultured Rickettsia sp.
MLKEIGSSEYIPKYIAKAKDKNDPFRLMGFGHRVYKNYDPRAAVLKETCKEVLKELGQLDNNPLLQIAIELEAIALKDEYFIERKLYPNVDFYSGIIYNAMGIPTQ

SEQ ID NO: 3174 - protein, 463 aa, Pseudomonas putida KT2440
MDKQKQDLISQQDRGAVLHPFTQLKDFASGKAGDPTIIETAKGITITDATGREYIDGFAGLYCMNVGYGRTEVAEAISKQAHKLAYYHTYAAHTTEELARLSDRLVKMAPGKMSKVFYGMSGSDANETQAKLVWYYNNLRGKPNKKKIIARERGYHGCSVVSGSMTGMSFYHDHMDLPIAGILRTGAPHYYWGAEPGETELEFSARRARELEELILREGPDTIGAFIAEPVLGTGGITPPPEGYWAAVQPVLKKYDILLIADEVITGFGRTGAMFGCDKYGIEPDLITVAKGLTSAYAPLSASIVGEKVYKVMEEGADRVGAFSHGYTYSGHPIGVAAANAVLDIVEGENIPAHVDKVGQYFQKSMQETFSSLPIVGEVRGVGMMAAIEFVADPATKKRFDPALKVGARISKAARDRNLIARAMPHGEILGFAPPLVTTEQEVDRIISIAHEAVLSVLDELKV

SEQ ID NO: 3175 - protein, 106 aa, uncultured Rickettsia sp.
MLKEIGSSEYIPKYIAKAKDKNDPFRLMGFGHRVYKNYDPRAAVLKETCKEVLKELGQLDNNPLLQIAIELEAIALKDEYFIERKLYPNVDFYSGIIYKAMGIPSQ

SEQ ID NO: 3176 - protein, 490 aa, Pseudomonas putida KT2440
MKDLAPSALNKLRRNDLLETRAYIDGRWVTGEGSLDVTDPANDQVIAQVAHCDESWVDLAVEAASRAFDGWRNTLPTQRGAVLRKWAALMRENQEDLAVIMTCEQGKPLSESRGEINYGANFVEWFAAEGERCYGETIPSHLPNSQLVTKLQPIGVTVAITPWNFPSAMITRKAAAALAAGCPMIVKPAPETPLSALALARLAEEAGIPGGVFQVLTGDAPKMSARLLAASAVRAFSFTGSTEVGRILLRQSADTVKKVSLELGGHAPFIVFDDASIAEAVEGCIGAKFATSGQDCLGANRIYVHRNIYGQFVEEFTKATEKLRVGHGLEEGVDIGPMTRVTVANKCREQISNALSLGAKLTCGGIDNHLGSSFVLPTVLADVTDKMDIAFEETFGPVAAILPFDSEDEVVTRANNTEFGLAAYVYTNDLRRACRVSDRLEYGMVALNTPKFTGAPIPFGGWKQSGLGREGSKHGLAEYMELKYVCIGGL

SEQ ID NO: 3177 - protein, 192 aa, Zea mays
MSLCTIARRLCLSKPSSGSRLSAIWAHLYSTEAAKDMGAKKYKYPDVYDPYGPMPPPSEKVVELADRIAALPPEEIKQIAPALLLRLNQEPPQAVSGQGFGFGAQVGSGAGSGKAEEKKAEKTVFDVRLEKFDAAAKIKIIKEIRTFTDLGLKEAKELVEKAPVVLKQSLTKDEAEAIIGKIKAAGGVAVME

SEQ ID NO: 3178 - protein, 389 aa, Salmonella typhimurium LT2
MTDTTILQNNTHVIKPKKSVALSGVPAGNTALCTVGKSGNDLHYRGYDILDLAEHCEFEEVAHLLIHGKLPTRDELNAYKSKLKALRGLPANVRTVLEALPAASHPMDVMRTGVSALGCTLPEKEGHTVSGARDIADKLLASLSSILLYWYHYSHNGERIQPETDDDSIGGHFLHLLHGEKPTQSWEKAMHISLVLYAEHEFNASTFTSRVIAGTGSDVYSAIIGAIGALRGPKHGGANEVSLEIQQRYETPDEAEADIRKRVENKEVVIGFGHPVYTIADPRHQVIKRVAKQLSEEGGSLKMYHIADRLETVMWETKKMFPNLDWFSAVSYNMMGVPTEMFTPLFVIARVTGWAAHIIEQRQDNKIIRPSANYTGPEDRPFVSIDDRC

SEQ ID NO: 3179 - protein, 489 aa, Glycine max
  misc_feature (259)..(259): Xaa can be any naturally occurring amino acid
FEQQYDRFMNSFRSLENNTQGQPDKVVSLAKWRILNRLHDRNETLYYRVLIDNIKEFAPIIYTPTVGLVCQNYSGLFRRPRGMYFSAKDKGEMMSMIYNWPAHEVDMIVLTDGSRILGLGDLGVQGIGIPIGKLDVYVAAAGINPQRILPVMLDVGTNNQKLLEDRLYLGLRQPRLEGEEYLSIVDEFMEAVHARWPKAIVQFEDFQMKWAFETLKRYQKRFCMFNDDIQGTAGVALAGILGTVRAQGRPLTDFVNQKXIVVVGAGSAGLGVLKMAIQTVAKISGCSELAAKSQFYLIDKDGLVTTERNSLDPAAAPFAKNPRDIEGLTEEGLTEGASIIEVVKKIRPHVLLGLSGVGGIFNEEVLKAMRESVSTKPAIFAFYMYMGTAECTAIDAFKHAGENMVFASGSPFENVDLGNGIVGHVNQANNMYLFPGIGLGTLLSGAHLITDGMLQAAAEWYDVNLENCFFFINQKPLELALMEVWQDVF

SEQ ID NO: 3180 - protein, 505 aa, Vinca major
MAIVDFLAAFLIFILTQKLIQTLFRRTYRRKLPPGPKGWPVIGALPYLGTMPHTSLAYMAKKYGPVMYLKVGTNDMVVVSTPDAARAFLKTLDINFSNRPPNAGATHLAYGAQDMVFAHYGPKWKLLRKLSNLHMRGGKALEDWSNVRISELGHMLETMYESSKKGEAVVVAEMLTYAMANMIGQVILSRRVFVTKGSDSNEFKDMVVELMTSAGLFNIGDFIPSIAWMDLQGIEGGMKRLHKKFDVLLTKLLEEHKESSSKRKGKPDLLDYVLANRDNSEGERLTTTNIKALLLNLFSAGTDTSSSIIEWALSEMLRNPSILKRAQHEMVQVIGRNRRLVESDISRLPYLQAICKETFRKHPSTPLNLPRIATEACEVNGYYIPKGTRLSVNIWAIGRDPDVWENPLEFNPDRFLSGKNAKIDPRGNDFELIPFGAGRRICAGTRMGILLVEYILGTLVHSFDWNLPSSVTKLNMDESFGLALQKVVPLAALVTPRLPINAYSP

SEQ ID NO: 3181 - protein, 496 aa, Oryza sativa (japonica cultivar-group)
MATCADTLGPLLGTAAANATDYLCNQFADTTSAVDSTYLLFSAYLVFAMQLGFAMLCAGSVRAKNTMNIMLTNVLDAAAGALFYYLFGFAFAFGAPSNGFIGKHFFGLKQVPQVGFDYSFFLFQWAFAIAAAGITSGSIAERTQFVAYLIYSAFLTGFVYPVVSHWIWSADGWASASRTSGSLLFGSGVIDFAGSGVVHMVGGVAGLWGALIEGPRIGRFDHAGRSVALRGHSASLVVLGSFLLWFGWYGFNPGSFLTILKSYGPPGSIHGQWSAVGRTAVTTTLAGSTAALTTLFGKRLQTGHWNVIDVCNGLLGGFAAITAGCSVVDPWAAIICGFVSAWVLIGLNALAARLKFDDPLEAAQLHGGCGAWGVIFTALFARKEYVDQIFGQPGRPYGLFMGGGGRLLGAHIVVILVIAAWVSFTMAPLFLVLNKLGLLRISAEDEMAGMDQTRHGGFAYAYHDDDASGKPDRSVGGFMLKSAHGTQVAAEMGGHV

SEQ ID NO: 3182 - protein, 352 aa, Cochliobolus heterostrophus
MPPAGSGSSRKISFNVSEQYDIQDVVGEGAYGVVCSALHKPSGQKVAIKKITPFDHSMFCLRTLREMKLLRYFNHENIISILDIQKPRNYETFTEVYLIQELMETDMHRVIRTQELSDDHCQYFIYQTLRALKAMHSANVLHRDLKPSNLLLNANCDLKVCDFGLARSAASTEDNSGFMTEYVATRWYRAPEIMLTFKEYTKAIDVWSVGCILAEMLSGKPLFPGKDYHHQLTLILDVLGTPTMEDYYGIKSRRAREYIRSLPFKKKIPWKAIFPKTNDLALDLLERLLAFNPVKRISVEDALKHPYLEPYHDPDDEPGADPIPEEFFDFDKNKDNLTKEQLKLLIYQEIMR

SEQ ID NO: 3183 - protein, 357 aa, Leuconostoc mesenteroides subsp. mesenteroides ATCC 8293
MTSVKKIVVLKGDYIGPEIMTAGLAVLDAATKDTTFAYELIDAPFGGDGIDRAGDPLPQSTIDVSKQADAVLLSAIGGPKWDNAPRRPEQGLLEIRSKLNLFANIRPTKVTAAQIDRSPLKPEYVENTDFVIVRELTSGAYFGKPRKLEAHQAIDTMYYSEEEVTRIMHQGFKMAQKRNKHVTIVDKSNVLATSKFWRKIANEVGKSYQDVTIDYYYVDAMTMAIMAKPTTFDVVIIPNLFGDILSDEAAQITGSIGQIPSMSVGESGPNLYEPIHGSAPDIAGQGIANPISMVNTVAMMLTESFDEKRIADKITAAVDYIIENHCVTPDMGGTMTTDEVTQKMVDYIKNYESADIK

SEQ ID NO: 3184 - protein, 136 aa, Triticum aestivum
MSEAVGTPESSGAKEQERFLPIANIGRIMRRGVPENGKIAKDAKESIQECVSEFISFITSEASDKCMKEKRKTINGDDLIWSMGTLGFEDYVEPLKLYLKLYREMEGDTSKGSISEQAGKKEVALNGQPGSSFNGM

SEQ ID NO: 3185 - protein, 283 aa, Magnetospirillum magnetotacticum MS-1
MTVASQCWTSIHGVVMPRIIYGTAWKKEKTADLVELALGQGFRGIDTACQPKHYHEPGVGEGLAAALAKGLRRDEIYLQTKFTPLAGQDPQRIPYDPSACLSQQVAQSFERSCANLRTEFLDGLVLHSPLGNPADFREVWSAMEGIFESGGTRQLGISNCYDPEVLRHLCETSRVKPAIVQNRFYAATGFDRILRAYCRKNGILYQSFWTLTANPEILVDDRVKALMAKHGRTAPQIFFRYLSQQEIIPLTGTTSAVHMGQDLEIGDFELSDAECQTLAPLLN

SEQ ID NO: 3186 - protein, 257 aa, Glycine max
MGKSYPTVSADYQKAVEKAKKKLRGIIAEKRCAPLMLRLAWHSAGTFDKGTKTGGPFGTIKHPAELAHSANNGLDIAVRLLEPLKAEFPILSYADFYQLAGVVAVEVTGGPEVPFHPGREDKPEPPPEGRLPDATKGSDHLRDVFGKAMGLTDQDIVALSGGHTIGAAHKERSGFEGPWTSNPLIFDNSYFTELLSGEKEGLLQLPSDKALLSDPVFRPLVDKYAADEDAFFADYAEAHQKLSELGLLMPKQRLGDC

SEQ ID NO: 3187 - protein, 321 aa, Glycine max
  misc_feature (68)..(68): Xaa can be any naturally occurring amino acid
MEAKKIPEVILNSGQKMPVIGLGTASIPLPPHEALTSIPIVAFEVGYRHFDTASLYGSEESLGKAVAXALDLGLIKSRDKVFITSKLWTTDAHPDLVVPTLKTHCRKKLGLEYVDLYLIHWPLRMKPEAKGYHNILKENVLPSFDMKGIWEAMEECYRLGLAKSIGVSNFGIKKLSQLLENATIPPAVNQVEMSPAWQQGKLKEFCKQKGIHVSAWSPLGAYKSAQGTNAVMESPILKEIACERQKSMAQIALRWIYEQGAIAIVKSFNKERMKQNLDIFDWELSQEESQKFSQIPQRRMYRGITFVSENGPYKTLEELWD

SEQ ID NO: 3188 - protein, 150 aa, Hordeum vulgare subsp. vulgare
MSIVRRSNAFDPFADLWADPFDTFRSIVPAFSGNSETAAFANARVDWKETPEAHVFKADLPGVKKEEVKVEVEDGNVLVVSGERTKEKEDKNDKWHRVERSSGKFVRRFRLPEDAKVEEVKAGLENGVLTVTVPKTEVKKPEVKAIEISG

SEQ ID NO: 3189 - protein, 122 aa, Glycine max
LINCVSTFCFIVNQVDSRHSVVVPDSNIFYIIALLRFIPPPPKGPPTELLVEQNHEIIQLCYNRGFDFKLYLPHYQSQENWMRHYGDKWTRFVERKANFDPLAILAPGQKIFSRIPQTLSIT

SEQ ID NO: 3190 - protein, 250 aa, Glycine max
MGKSYPTVSADYQKAVEKAKKKLRGFIAEKRCAPLMLRLAWHSAGTYDVSSKTGGPFGTIKHPSELAHGANNGLDIAVRLLEPLKAEFPILSYADFYQLAGVVAVEVTGGPEVPFHPGREDKPEPPPEGRLPDATKGSDHLRDVFGKAMGLSDRDIVALSGGHTIGAAHKERSGFEGPWTSNPLIFDNSYFKELLSGEKEGLLQLPSDKALLSDPVFRPLVEKYASDEDAFFADYAEAHQKLSELGFAEA

SEQ ID NO: 3191 - protein, 267 aa, Brassica napus
  misc_feature (70)..(70): Xaa can be any naturally occurring amino acid
  misc_feature (244)..(244): Xaa can be any naturally occurring amino acid
RFGSTAGAAIASHMDIDKVSFTGSTDVGRKIMQAAATSNLKKVSLELGGKSPLLIFDDADVNKAAELALXLGCFYNKGEICVASSRVFVQEAIYDKVVAKMVEKVKDWTVGDPFDSTSRQGPQVDKNEGATLLTGGNAIGDKGYYIEPTIFADITEDMKIYKEEIFGPVMSLMKFKTMEEGIKCANNTKYGLAAGIVSQNVDVINTVSRSIKAGVIWVNCYFAFDLDSPYGGYKMSGNCRQQGXMDALDSYLQVKSIAMPLHNSPWM

SEQ ID NO: 3192 - protein, 318 aa, Zea mays
IPGMKYFWDTLLDADLESDALGWQYITGSLPDGRELDRIDNPQFEGYKFDPHGEYVRRWIPELARLPTEWIHHPWDAPVSVLQAAGIELGSNYPLPIVELDAAKGRLQAALSEMWQLEAASRATMNNGTEEGLGDSSEVLFPQELQMEVDRQPAPAEAAANVHVPVPMPARRRGDQMVPTMTTSSLNRAGTEVSADLVVANSEEEDTRAQVPFHAHLHPRAEAPPAARRTNNGARQHDVFQQPRNHRREALLAPSASEASSSWTGREGAVVPVWSPPAASGHSDAFAADEADVSSRSYLGRHPQSHRLMNWSQLSQSS

SEQ ID NO: 3193 - protein, 364 aa, Zea mays
MGSTAGDVAAVVDEEACMYAMQLASSSILPMTLKNAIELGLLEVLQKEAGGGKAALAPEEVVARMPAAPSDPAAAAAMVDRMLRLLASYDVVRCQMEDRDGRYERRYSAAPVCKWLTPNEDGVSMAALALMNQDKVLMESWYYLKDAVLDGGIPFNKAYGMTAFEYHGTDPRFNRVFNEGMKDHSVIITKKLLDFYTGFEGVSTLVDVGGGVGATLHAITSRHPHISGVNFDLPHVISEAPPFPGVRHVGGDMFASVPAGDAILMKWILHDWSDAHCATLLKNCYDALPENGKAIVVECVLPVNTEATPKAQGVFHVDMIMLAHNPGGKERYEREFRELAKGAGFSGFKATYIYANAWAIEFIK

SEQ ID NO: 3194 - protein, 280 aa, Streptococcus mutans UA159
MEAYTLINGVHIPKIGFGTWKLADGDEAYKSVSYALEVGYRHVDTAQYYGNEVSVGRAIADSPIKREELFITTKIWNDKHSYDEAKQSVEESLAKLKLNYLDLLLIHWPNPKALRENDAWKTRNADVWRAMEDLYQAGKVRAIGVSNFMIHHLEPLLEVATVKPMVNQVLLAPGCSQEELVAFCRQNEMILEAYSPLGTGSIFDNQTAQDLANKYNKTVAQIALRWSLQKGFLPLPKSATPKNILSNLAIFDFDLTEDDILKLDKIENVKSQGNPDETAF

SEQ ID NO: 3195 - protein, 168 aa, Xylella fastidiosa Dixon
MTSIYTFTFTRLDGRPQALADWRGQVLLLVNVASHCGFTPQYAGLEMLWQRYRDAGLIVIGFPCDQFAGQEPGDEAKIAEFCTLTYGVDFPMAAKIKVNGADAHPLWQWLKHRRRGLFGVAAIKWNFTKFLIGRNGQPIARYSPIKSPEQLEVHIVRALGEEGGGNTH

SEQ ID NO: 3196 - protein, 177 aa, Zea mays
  misc_feature (81)..(81): Xaa can be any naturally occurring amino acid
  misc_feature (136)..(136): Xaa can be any naturally occurring amino acid
MVLEATMICIDNSEWMRNGDYAPSRFQAQADAVNLICGAKTQSNPENTVGVMTMAGKGVRVLVTPTSDLGKILACMHGLEXVGAEANLGCGNPGAQLALKHRQNKRQQQRIIAFMGGLGEQQESFETLGKKLKKNXVALEILNFGGTPGEKPEKRKLGFGLLTPGKPPLCLSPPGEK

SEQ ID NO: 3197 - protein, 181 aa, Zea mays
MAYSMLSSAAVVTSPAQATMVAPFTGLKSSSAFPVTRKANNDITSIVSNGGRVSCMQVWPPIGKKKFETLSYLPDLTEVELGKEVDYLLRNKWIPCVEFELEHGFVYREHGSTPGYYDGRYWTMWKLPLFGCTDSAQVLKEVQECKTEYPNAFIRIIGFDNNRQVQCISFIAYKPPSFTGA

SEQ ID NO: 3198 - protein, 438 aa, Neurospora crassa
MSNNSAFTFSPPGPQHPIFSSASTPNIGTSASIDPRIPTVGSRARDLHYSIRDFLSTHPLLELGGQEHFSVERRRHQDVFGLHALPKDKIHPIDDVEFTAIRGPHGTIPVRILYPTSGKDNRNKGKAGALIYFHGGGYTVGSVDEFENGLRLIAEESGCQVYAVEYRLAPEFKYPVQLDEYSAVIDWVQGEGGKTRGVHPEKVVGGGDSAGGNMTAAICLRRMDEGRKPLAGQILLYPEARLPFDTPAATENNSDISPQDRYVSPGMQSVEDLRHQPPAAVFTSGYDPLRDVGCEYASKLSQAGVPTRWRHYDNLTHGWLQLTAWSEVAEQAVKDVAHQVKRLVFAATDTHTLKSPQGQLPVDRLNIQTWNCGHTKFAGSKPGWQHVYCLYLGHLVPPLHLGLDLYPKVILSVALEVSRIPPKLRQIKTSQQPIVLVV

SEQ ID NO: 3199 - protein, 92 aa, Glycine max
  misc_feature (52)..(52): Xaa can be any naturally occurring amino acid
  misc_feature (55)..(55): Xaa can be any naturally occurring amino acid
  misc_feature (65)..(65): Xaa can be any naturally occurring amino acid
VGFPTSKTYNDITSIVSNGGRLQCMHVWPPLGKKKSETLFYLPYLYDAQSAXKYXYLLKKGWIPXWEFQLDHSLVYHDHYRLPRYYDGRYWT

SEQ ID NO: 3200 - protein, 623 aa, Triticum aestivum
MANASSISRSLRRSLAPDDLHRLLLQRSRAFVTAECHRPVVLHKRGPDILHDPWFNRGTAFSMTERDRLGLRGLLPPSVVSSQQQIDRFMGDLKRLEQNARDGPSDTYQLAKWRILNRLHDRNETMYYKVLIDNIEEYAPIVYTPTVGAVCQNYSGLFRRPRGMYFSAEDRGEMMSMVYNWPADQVDMIVVTDGSRILGLGDLGVQGIGIAIGKLDLYVAAAGINPQRVLPVMIDVGTNNEKLLKDPLYLGLQEHRLEGEDYVEIIDEFMEAVFSRWPNVIVQFEDFQSKWAFRLLQRYRKTYRMFNDDVQGTAGVAIAGLLGAVRAQGRPMIDFPKQKIVVAGAGSAGIGVVNAASRTMARMLGNNEVAFESARSQFWIVDAHGLITEERVDIDPDARPFARRKSELTHQGLNEGASLIEVVKKVKPDVILGLSAVGGLFSKEVLEALKDSSSSRPAIFAMSNPTKNAECTPEEAFSIIGEKVVFSSGSPFDDVDLGDGKIGHSNQGNNMYLFPGIGLGTLLSGARIVSDGMLQAAAERLASYMKEEEVLQGIIYPPTSRIRDITKEVAAAVVREAVADDLAEGYRDMDARELARLSEEETVDYVKNNMWNPVYPTVVYKKD

SEQ ID NO: 3201 - protein, 58 aa, Zea mays
  misc_feature (15)..(15): Xaa can be any naturally occurring amino acid
MPQGTANCAHILIAXILPPLGALLIHGRGHQLWICLLLTFLDYIPGIIYAIYAITRNT

SEQ ID NO: 3202 - protein, 134 aa, uncultured Rickettsia sp.
ANEAVINMLKEIGSSENIPKYIAKAKDKNDPFRLMGFGHRVYKNYDPRAAVLKETCKEVLKELEQLENNPLLQIAIELEAIALKDEYFIERKLYPNVDFYSGIIYKAMGIPSQMFTVLFAIARTVGWMAQWKEM

SEQ ID NO: 3203 - protein, 106 aa, uncultured Rickettsia sp.
MLKEIGSSENIPKYIAKAKDKNDPFRLIGFGHRVYKNYDPRAAVLKETCKEVLKELGQLENNPLLQIAIELGAIALKDEYFIERKLYPNVDFYSGIIYKAMGIPSQ

SEQ ID NO: 3204 - protein, 145 aa, uncultured Rickettsia sp.
ANEAVINMLKEIGSSENIPKYIAKAKDKNDPFRLMGFGHRVYKNYDPRAAVLKETCKEVLKELEQLENNPLLQIAIELEAIALKDEYFIERKLYPNVDFYSGIIYKAMGIPSQMFTVLFAIARTVGWMAQWKEMHEDPEQKISRP

SEQ ID NO: 3205 - protein, 138 aa, uncultured Rickettsia sp.
ANEAVINMLKEIGSSENIPKYIAKAKDKNDPFRLIGFGHRVYKNYDPRAAVLKETCKEVLKELGQLENNPLLQIAIELEAIALKDEYFIERKLYPNVDFYSGIIYKAMGDTVANVHGTFCNSTNHRLDGTMERNARRP

SEQ ID NO: 3206 - protein, 158 aa, Arabidopsis thaliana
MSSNKILLTSSDGESFEIDEAVARKFLIIVHMMEDNCAGEAIPLENVTGDILSKIIEYAKMHVNEPSEEDEDEEAKKNLDSWDAKFMEKLDLETIFKIILAANYLNFEGLLGFASQTVADYIKDKTPEEVREIFNIENDFTPEEEEEIRKESAWTFNE

SEQ ID NO: 3207 - protein, 482 aa, Ralstonia eutropha JMP134
MHNLNTFYIGGEWVKPADGATLADLVNPATEAVIGTVAMGGAADVDRAVAAARDAFASWSRSSREERLALLRRISDGYKARIGEIAEAISTEIGAPIWLCREYQAPMGLVQIQAAIAALEAFEFVTVKGTTQVVREAVGVAALITPWNWPVNQIAAKVAPALAAGCTVVLKPSEIAPLDARIFAEIVQEACQATSTPAGVFNMLFGTGPTVGAALSRHPDVDMVSITGSTRAGVDVAMQAAPTVKRVAQELGGKSPNVILDDADLKAAVSQGVVSCMLNSGQTCTAPTRMLVPRAQYQMAIAIAQATVQALTVGDPSSPDSKLGPSSNRAQYERVQRMIEAGIQEGARVVAGGPGRPEGLAQGFYNRPTVFADVSNDMTIAREEIFGPVLSMIPYDNEAEAIRIANDTPYGLAAYVWSGNPARARRVAGELRAGSVQINGAKMDFAAPFGGYKTSGNGREFGAYGLAEFLEYKSVAGCTVDE

SEQ ID NO: 3208 - protein, 186 aa, Triticum aestivum
  misc_feature (49)..(49): Xaa can be any naturally occurring amino acid
  misc_feature (71)..(71): Xaa can be any naturally occurring amino acid
  misc_feature (81)..(81): Xaa can be any naturally occurring amino acid
  misc_feature (101)..(101): Xaa can be any naturally occurring amino acid
MAGVGRNMVAPLLVLNLIMYIVVIGFASWNLNHFINGLTNRPGVGGNGXATFYFLVFAILAGVVGAASKAXAACNHVRTWXRGDSLATSASSALVAWAITXALAFGLACKEIHIGGYRGWRLRVLEAFVIILMFTQLLYVLALHSGLFGNQFGNHAGAGGYGAEHGAYGAGDPHNKGMGTGGVARV

SEQ ID NO: 3209 - protein, 413 aa, Methylobacillus flagellatus KT
MSTKIKVPTTGEKISVNADNSLNVPDHPIIPFIEGDGIGVDITPPMRHVVDSAVAKAYGGKRAIAWMEVYAGEKAVKTYGDNTWLPDETLKAVKDYVISIKGPLTTPVGGGIRSLNVTLRQELDLYVCLRPIQYFQGVPSPVKHPEKTNMVIFRENTEDIYAGIEWAAGTDEVKKVVDFLSDMGVRKKIRFPEASAIGIKPVSIDGSKRLVRKAIQYAIDNNRKSVTIAHKGNIMKFTEGGFKTWGYEVAKEEFGAVEIDGGPWCKLPNGIIIKDCIADAFLQEILLHPADYDVVATLNLNGDYISDALAAQVGGIGIAPGANISDTVAMFEATHGTAPKIAGKDIANPSSLILSAEMMLRHLGWTEAADLVINGVAKAIQAKRVTHDFSSQMEGATQVGSAEFGAEIVKHMS

SEQ ID NO: 3210 - protein, 175 aa, Brassica napus
MGDSDKDSGGGQNGQSPLSPREQDRFLPIANVSRIMKKALPANAKISKDAKETMQECVSEFISFVTGEASDKCQKEKRKTINGDDLLWAMTTLGFEDYVEPLKVYLQRFREIEGERAGLGRPQTGGEGGEHQRDAGLGDGGGFYGGGGMQYHQHHQFLEQQDRVYGSTGGGGGDG

SEQ ID NO: 3211 - protein, 359 aa, Zea mays
MGSTAGDVAAVVDEEACMYAMQLASSSILPMTLKNAIELGLLEVLQKEAGGGKAALAPEEVVARMPAAPGDPAAAAAMVDRMLRLLASYDVVRCQMEDRDGRYERRYSAAPVCKWLTPNEDGVSMAALALMNQDKVLMESWYYLKDAVLDGGIPFNKAYGMTAFEYHGTDARFNRVFNEGMKNHSVIITKKLLDFYTGFEGVSTLVDVGGGVGATLHAITSRHPHISGVNFDLPHVISEAPPFPGVRHVGGDMFASVPAGDAILMKWILHDWSDAHCATLLKNCYDALPENGKVIVVECVLPVNTEATPKAQGVFHVDMIMLAHNPGGKERYEREFRELAKGAGFSGFKATYIYANAWA

SEQ ID NO: 3212 - protein, 192 aa, Xylella fastidiosa Ann-1
MNMLNVLRFPVLALALAFVSSGVLADVGSLLDLDYRPLAGKETVNLQRLYGGKVLLVVNTASKCGFTPQYEGLEALHQKLSPLGFAVLGFPSNDFKGQEPGDEQQIQEFCTLTYGVKFPMFQKVHVKGDEVTPLYQRLTQTTGVAPGWNFHKYLIARDGHVVAQFDSRTRPDDPILLEAIKRELAKSVQVVH

SEQ ID NO: 3213 - protein, 165 aa, Ralstonia solanacearum
MSDIYAFEADSLAGQRVPLSQYRGKVLLIVNTASQCGFTPQYAGLEAVYKRLNEKGLEVLGFPCNQFGKQEPGGAEEIGAFCEKNYGVSFPMFGKIEVNGSNAHPLYKWLTSEKPGVLGTEAIKWNFTKFLLRRDGTVYKRYAPLTKPEEMLGDIETLLAEPDPL

SEQ ID NO: 3214 - protein, 281 aa, Oryza sativa (japonica cultivar-group)
MYTGIQTRRIPVHVLPLPMSPPLELDYIGLSPPPPPPSSSSAAAARADDVDLKGTELRLGLPGSESPDRRPAAIAAAAATATTLELLPAKGAKRVFPDEAALTPPTAAAGKGKAAREGEEVGAEEEDKKVAAPPQPAAKAQVVGWPPIRSYRKNTMATNQIKSNKEDVDAKQGQGFLYVKVSMDGAPYLRKVDLKTYKNYKDMSLGLEKMFIGFSTGKEGAENQKDGEYVLTYEDKDGDWMLVGDVPWEMFTDSCRRLRIMKGSDAIGLAPRAGEKSKNRN

SEQ ID NO: 3215 - protein, 165 aa, Triticum aestivum
  misc_feature (20)..(20): Xaa can be any naturally occurring amino acid
  misc_feature (29)..(29): Xaa can be any naturally occurring amino acid
  misc_feature (57)..(57): Xaa can be any naturally occurring amino acid
  misc_feature (66)..(66): Xaa can be any naturally occurring amino acid
  misc_feature (88)..(88): Xaa can be any naturally occurring amino acid
  misc_feature (93)..(93): Xaa can be any naturally occurring amino acid
  misc_feature (101)..(101): Xaa can be any naturally occurring amino acid
VMASSATSVAPFQGLKSTAXLPVSRRSNXASLGSVSNGGRIRCMQVWPIEGIKKFEXTLSYLPPLXAREALLKQVDYLIRSKWVPCLXFTKVXGFIFREHXRISLGTTNGRYWAMWESCPMFGATDPNKRWIKQGEGGSRKGVTPGAVLSGNPSGSNQCGQGGVA

SEQ ID NO: 3216 - protein, 209 aa, Zea mays
  misc_feature (101)..(101): Xaa can be any naturally occurring amino acid
MSYYGDRRAESSIVEAFTLSPLPYPVILVLLMVTLLLGASWFFTYDDFIEEASQQLSWALLGVPIALVLLIRWISSVDSFEGYLGFYPEGEPLEGPLRAGXAEGSSPWGVALLVLLLLVLASFHSTIHDMWGAVNGCAPAPGSCLSARLVCLCSVDRSIDEVLMSFFFSSFCPLRAALAWYVVLHARTYGSMIPCTYLLGGCCGAGYRV

SEQ ID NO: 3217 - protein, 405 aa, Pseudomonas syringae pv. syringae B728a
MSVEHAAVQRADFDQVMVPNYAPAGFIPVRGAGSRVWDQAGRELVDFSGGIAVNVLGHCHPALVGALTEQANNLWHVSNVFTNEPTLRLAKKLVDATFAERVFFCNSGAEANEAAFKLARRVAHDQYGPEKYEIIAALNSFHGRTLFTVSVGGQPKYSDGFGPKITGISHVPYNDLDALKAAVTDKTCAVVLEPIQGEGGVLPGQLEYLQGARKLCDEHNALLVFDEVQSGMGRSGHLFAYMHYGVTPDILSSAKSIGGGFPLAAMLTTEKLARHFAVGVHGTTYGGNPLACAVGEAVIDVINTPEVLAGVQRKHQQFKTRLQSIGQQYGVFSEVRGLGLLIGCVLSDAWKGKAKDIFNAAEAQDLMILQAGPDVIRFAPSLVIEDADIEEGLNRFERAIAQLTS

SEQ ID NO: 3218 - protein, 277 aa, Bacillus thuringiensis serovar konkukian str. 97-27
MSLTSLKDYTTLHNGVKMPWFGLGVFKVEDGSQVIDSVKAAIKNGYRSIDTAAIYQNEEGVGQAIRESGVSREELFITSKVWNSDQGYETTLQAFETTLEKLGLEYLDLYLVHWPVKGKYTESWKALEKLYKDGRVRAIGVSNFHIHHLQDVFEIAEIKPMVNQVEYHPRLAQEELHAFCKEHNIQLEAWSPLMQGQLLDNPTLQDIAKKYNKSTAQIILRWDLHNEVVTIPKSIKEHRIIENANIFDFELSSDDMKAIQALNEDHRVGPDPDNFNF

SEQ ID NO: 3219 - protein, 157 aa, Triticum aestivum
  misc_feature (17)..(17): Xaa can be any naturally occurring amino acid
  misc_feature (32)..(32): Xaa can be any naturally occurring amino acid
  misc_feature (60)..(60): Xaa can be any naturally occurring amino acid
  misc_feature (103)..(103): Xaa can be any naturally occurring amino acid
CWGRSVGFEIGVRGRRXAGFAFFQAANTAVRXPLFVNTAFPLLHSPLTSASVIFRRTRAXEMFQHEELVGSSWIGAYSALCFSCGHVAYGQLDMLRYRLYSGXIPGILLHHLILLICFTLALYRNVTINYLILTLLCETTHENLCQVVGLTSMIKDV

SEQ ID NO: 3220 - protein, 537 aa, Zea mays
  misc_feature (152)..(152): Xaa can be any naturally occurring amino acid
MGNCCRSPAAVAREDVSSSHFPASNAKKKPHQARNGGGAGQKRLSVLGDEGCEVVGIDDKYVLDRELGRGEFGVTYLCMDRGTKELLACKSISKRKLRTAVDVEDVRREVAIMRHLPKSPSVVSLREACEDDGAVHLVMELCEGGELFDRIXVARGHYTERAAASVTRTILEVVQLCHRHGVIHRDLKPENFLFANKKENSPLKAIDFGLSIFFKPGEKFSEIVGSPYYMAPEVLKRNYGPEIDIWSAGVILYILLCGVPPFWAETEQGVAQAILRGNIDFKREPWPNVSDNAKDLVRHMLEPDPKLRLTAKQVLEHHWLQNAKKAPNVPLGDIVKSRLKQFSRMNRFKRRALRVIADHLSAEEVEDIKDMFKTMDTDNDGIVSYEELKTGIAKLGSHLAESEVQMLIEAVDTNGRGALDYGEFLAVSLHLQRMANDEHLRRAFLFFDKDGNGFIEPEELREALVDDGAADSMEEVVNDILQEVDTDKDGKISYEEFVAMMKTGTDWRKASRHYSRGRFNSLSMKLIKDGSVKLGVE

SEQ ID NO: 3221 - protein, 209 aa, Triticum aestivum
MEDEEHEVYGQEIPVDGEDVDMGAGGDDAAKLHELDEMKRRLKEMEEEAAALREMQAKVAKEMQGGDPNATTSEAKEEMDSRSVFVGNVDYACTPEEVQQHFNSCGTVNRVTILTDKFGQPKGFAYVEFVEAEAIQEAVKLSESELHGRQIKVAPKRTNVPGLKQPRGGRGFNPYGGHPYMRPYPPPFYNPYGGYGRAPRFRRPRRPLH

SEQ ID NO: 3222 - protein, 163 aa, Ralstonia eutropha JMP134
MRRPTLACCVLALSLRAIAAPLTDAELDARVHALSEQLRCLVCQNQTLADSNAELAVDLRRQIREQLRQGASDEAVKQYLVQRYGDFVLYKPPLKPLTWLLWFGPLLLLLVVLAALWRPRARRVAPAGPLDDAERRRLAELLDEPPPQRSPRSIDTLPPLSPP

SEQ ID NO: 3223 - protein, 496 aa, Streptomyces clavuligerus
MVTAAISGTDEIRARADEALTRCGVDLTAVKATPHGPHPLTGADLFGLRAHTPEDVDRAVEAAHTAFLTWRTTPAPVRGALVKRFGELLTEHKQDLADLVTIEAGKIRSEALGEVQEMIDICDFAVGLSRQLYGRTMPSERPGHRLMETWHPLGVVGVISAFNFPVAVWAWNAAVALVCGDTVVWKPSELTPLNRAACAALLDLAIADAGAPKGLNQVVVGAADVGERLVDSPRVPLVSATGSTRMGRAVGPRVAARFGRTILELGGNNAAVVTPSADLDLTVNAAVFAAAGTAGQRCTTLRRLIVHEDIADTVVERLTAAFERLPIGDPFQDTTLVGPLVNEAAFGRMREAVERATAEGGTLCAGGERQFPDAAPGAYYVRPALVRMPAQTAVVREETFAPILYVLTYRDLDEAIRLNNEVPQACRQGSRTDGAPADDPRCRARRRAGGANCPAVPGRSGTGAGAGGTADRVRTGGTSHRLVRHRRVPDPAVRTS

SEQ ID NO: 3224 - protein, 204 aa, Triticum aestivum
  misc_feature (65)..(65): Xaa can be any naturally occurring amino acid
  misc_feature (78)..(78): Xaa can be any naturally occurring amino acid
  misc_feature (116)..(116): Xaa can be any naturally occurring amino acid
  misc_feature (119)..(119): Xaa can be any naturally occurring amino acid
MAPTVMASSATSVAPFQGLKSTAGLPVSRRSNGASLGSVSNGGRIRCMQVWPIEGIKKFETLSYXPPLSTEALLKQVXYLDSAPKWVPCLRVQQGGFIFPLSTTHPLGYYDGRYWXTMXETAYFRCTDPPSVQRSGGVKKEYLDPYSASSVRQLRKSMRQIALSHGLQESARLNTHHTGNIKCNAVAPTFCGGSFTSLPKLSRK

SEQ ID NO: 3225 - protein, 134 aa, Glycine max
AGTGEVVNCSEEQNGELFHSVLGGLGQFGIITRARIFLEPAPAMVKWIRVLYADFTAFIRDQEKLIFAEKAFDYVEGFVIINRTGLLNNWSSSFNPQDPVQASEFKSDGRTLFCLELAKYYNLEETLLVNQVRD

SEQ ID NO: 3226 - protein, 429 aa, Xylella fastidiosa Ann-1
MSDLDKVTLNAGETSLVLPVLKPTLGNGCVDIAKLTKETGLFTYDSGFTATASCKSAITYIDGEKGVLLYRGYPIEQLAEHSSFLEVAYLLMNGELPRKDEFAKFDDEITHHTMMHESLKNFLGGFHYDAHPMAMLAASVASLSAFYHDTLDLNDLEQRRLAAIRLIAKVPTLAAAAHRYSIGWPIRYPRNNLGYVERFLHMMFEVPSEPLQLNPVVTKALDLLFILHADHEQNASTSTVRLVGSTGANPYASVAAGITALWGPAHGGANEAVLKMLEEIGDAKNVDLVIAKAKTKDKNSPFRLMGFGHRVYKHFDPRAKIIREMAHTVLGELGVNDPLLEVALKLEEAALKDDYFVQRKLYPNVDFYSGIIYKAINIPLEMFTVMFAIARTAGWVSHWLEQQVDPEMKISRPRQIYTGHRERDYKDAR

SEQ ID NO: 3227 - protein, 305 aa, Mycobacterium avium subsp. paratuberculosis str. k10
MTALDGAERLDPALRAVATTRTDFSPAAIELTRAPFNERRRLAAAQTDTAGVRIVDDDANGVGVRIYRGGPEPAPAVIYCHAGGFALGNLDTDHRQCVELARRGRCTVVSVDYRLAPEHPYPAALQDAGTVLRWVHAEAAALGVDPARLAVAGSSAGAALAACLAHPDGSLPAVVFQLLHQPVLDDRATGSKARFRTSPAFDGEAAELMWRYYLGPTVGSAAAVPARRPELAGLPPALITCAEIDPFRDEAIDYARRLLDAGVCTELHVFARACHGFDSLLPDWPGSQRLFALQGEVLSAALHRD

SEQ ID NO: 3228 - protein, 281 aa, Glycine max
MPLILAKSDSIQIREVWNDNLEEEFALIREIVDNYPYIAMDTEFPGIVLRPVGNFKNSYDYHYQTLKDNVDMLKLIQLGLTFSDEHGNLPMCGGDDEESDTCCCIWQFNFREFNVNEDVFANDSIELLRQSGIDFKRNNENGIDAHRFGELLMSSGIVLNDNIHWVTFHSGYDFGYLLKLLTCQDLPDTQVGFFNLINMYFPTVYDIKHLMKFCNSLHGGLNKLAELLEVERVGISHQAGSDSLLTSCTFRKLKDNFFSGSLEKYAGVLYGLGVENGQGSH

SEQ ID NO: 3229 - protein, 482 aa, Pseudomonas syringae pv. tomato str. DC3000
MQLIWLRSDLRVHDNTALTAAMQRGPTLAVYLLSPTQWRNHDDADCKVDFWLRNLVELEKALGKLNVPLLIREADTWDQAPEVLATLCKQFKVEGLHLNEEYGINETRRDQAVQQSMQADGVHFTSHLDQLLFKPGSILTKTGNYFQVFTQFKKVCYTRLHQAMPRTVHTPEAQQPLSIKSDAIPDQVKGFSTPSKTLRDLWPAGEVEASRRIEAFAGEQISYYKDERDFPARPGTSQLSAYLAAGVISPRQCLHAALASNQGEFETGDVGTVTWINELLWREFYKHTLVGYPRVSRHRAFRPETEALKWRDAPEELLAWQEARTGLPIIDAAMRQLLETGWMHNRLRMVVAMFLTKNLLIDWREGERFFMRHLIDGDLAANNGGWQWSSSTGTDSAPYFRIFNPLSQSERFDPEGVFIKRWLPELADLNKKQIHDPASVGGLFGVADYPKPIVDLSKSRARALAAFKALPTRQPAAGADNG

SEQ ID NO: 3230 - protein, 70 aa, Triticum aestivum
  misc_feature (18)..(18): Xaa can be any naturally occurring amino acid
  misc_feature (22)..(22): Xaa can be any naturally occurring amino acid
  misc_feature (26)..(26): Xaa can be any naturally occurring amino acid
  misc_feature (31)..(31): Xaa can be any naturally occurring amino acid
  misc_feature (42)..(42): Xaa can be any naturally occurring amino acid
GHATCHFLAIDIFNGKKXEDIXPSSXHNCDXPHVDRQDYQLXIDITDDGYVSLLTESGNTKDDLKLPTDD

SEQ ID NO: 3231 - protein, 190 aa, Glycine max
LTLIILIFIILPLSIPNSLSEIRMASQSNTKSVHDFTVKDARGNDVNLADYKGKVLLLVNVASQCGLTNSNYTELNQLYEKYKGKGLEILAFPCNQFGAQEPGTNEEIVEFACTRFKAEFPIFDKVDVNGDNAAPLYKFLKSSKGGLFGDSIKWNFSKFLVDKDGNVVDRYAPTTSPLSIEKDIKKLLDA

SEQ ID NO: 3232 - protein, 117 aa, Glycine max
  misc_feature (37)..(37): Xaa can be any naturally occurring amino acid
  misc_feature (80)..(80): Xaa can be any naturally occurring amino acid
MASSMIFSPADTTVNRAGAGMAGPFTGLKYMAGFPTXRKTNNDLTWIARHGGKRPCMHVWPTIGKKKFETLSYLPDLDDXPLAKEGQYPLKKGWDPLLGITLEHRFAYPEHKKAPGY

SEQ ID NO: 3233 - protein, 321 aa, Glycine max
  misc_feature (255)..(255): Xaa can be any naturally occurring amino acid
MSATNVPKVLLQLQPPSKSNPLCVPVIGLGTAAVHNDGDTVKAAVIEAIKLGYRHFDTAAQYGSEQALGEAIAEALRVGLIASRDELFITSKLWCCDNHPHLVLPALQNSLRSLKLDYLDLYLIHWPITAKPGMWEMPYSEESLVPFDLKSVWAAMEECHKLGLTKSIGVSNFSCKKLENLLSFATIPPSVNQVEMNIAWQQKNLRAYCKAKGIIVTAYSPLGAKGSKWDINQILDNELTKQIAQAHGKTAAQVXLEWLFEQGVTFIPKSYNKERLKENLEIFDWSLTKDDHEKINQVKQERMFKYGTAAFPLPDLFDGET

SEQ ID NO: 3234 - protein, 120 aa, Glycine max
MEPMDIVGKAKEDASLPKATMTKIIKEMLPPDVRVARDAQDLLIECCVEFINLVSSESNEVCNKEERRTIAPEHVLKALGVLGFGEYIEEVYAAYEQHKLETMVIMLMTNVHDIYYNLTA

SEQ ID NO: 3235 - protein, 82 aa, Brassica napus
  misc_feature (24)..(24): Xaa can be any naturally occurring amino acid
AIRLAQVPCARMPAYVCQRRGLAXAVNHLGSTKVDFWKEPTNSTNGKGEHFVLISHSGWGWLFYSGYKLFTGVKGVEEKPAQ

SEQ ID NO: 3236 - protein, 166 aa, Bordetella pertussis Tohama I
MNTMYDFSAPTITGAERALADFRGQVALVVNVASRCGFTPQYSGLEELYRSYRNEGFVVLGFPCNQFGRQEPGDEAAIAQFCETQYAISFPLFAKIDVNGAHAHPLYRWLKARKPGLLGTRAIKWNFTKFLVGRDGLPLRRYAPAHTPESLRHDIARACAAPGPTP

SEQ ID NO: 3237 - protein, 498 aa, Zea mays
MSTCAADLAPLLGPAAANATDYLCGQFADTASAVDATYLLFSAYLVFAMQLGFAMLCAGSVRAKNTMNIMLTNVLDAAAGALFYYLFGFAFAFGTPSNGFIGKQFFGLKHLPRTGFDYDFFLYQWAFAIAAAGITSGSIAERTQFVAYLIYSAFLTGFVYPVVSHWFWSADGWAGASRTSGPLLFGSGVIDFAGSGVVHMVGGIAGLWGALIEGPRIGRFDHAGRSVALKGHSASLVVLGTFLLWFGWYGFNPGSFTTILKSYGPAGTVHGQWSAVGRTAVTTTLAGSVAALTTLFGKRLQTGHWNVVDVCNGLLGGFAAITAGCSVVEPWAAVICGFVSAWVLIGANALAARFRFDDPLEAAQLHGGCGAWGVLFTGLFARRKYVEEIYGAGRPYGLFMGGGGKLLAAQIIQILVIAGWVSCTMGPLFYALKKLGLLRISADDEMSGMDLTRHGGFAYVYHDEDPGDKAGVGGFMLKSAQNRVEPAAAVAAATSSQV

SEQ ID NO: 3238 - protein, 473 aa, Arabidopsis thaliana
MSSSVPNSDRKIVTGPAGYILEDVPHFSDDFPDHPTYPNPLQDNAAYSVVKQYFVDEDDTVPQKIVVHPDSPRGTHFRRAGPRQRVYFESDDVLACIVTCGGLCPGLNTVIREIVCGLSYMYGVKRILGIDGGYRGFYARNTIHLDLKTVNDIHRSGGTILGTSRGGHNTTKIVDSIQDRGINQVYIIGGDGSQKGAAAIFEEIRKRKLKVAVAGIPKTIDNDIPIIDRSFGFDTAVEEAQRAINAAHVEATSFENGIGLVKLMGRYSGFIAMHATLASRDVDCCLIPESPFFLEGSGGLFEFIDKRLKESGHMVIVIAEGAGQDLLSESMKESTTLKDASGNKLLQDIGLWISQRIKDHFAKKMTLTLKYIDPTYMIRAVPSNASDNVCCTLLAQSAVHGVVAGYNGFTVGLVNGRHTYIPFNRITEKQNKVVITDRMWARLLSSTNQPSFMKQADKIHSNQLVGEPGTMKW

SEQ ID NO: 3239 - protein, 380 aa, Vibrio parahaemolyticus RIMD 2210633
MPQTVAKKAELGGAGLRGQSAGSTALCTVGKTGTGLTYRGYDITDLANNAQFEEVAHLLLRGHLPSQQELDAYKTHLLSLRGLPTELKQALELIPASAHPMDVMRTGCSVLGNLEQEMSFDEQLQATERMLALFPAIICYWYRFSHDGVRIDTEDQTEDCIGGYFLRLLTDKEPSVLHKQVMHCSLILYAEHEFNASTFAARVCASTLSDIHSCITAAIGTLRGPLHGGANEAAMEMIEDWQTPDEAEANIMQMLANKDKIMGFGHAIYRESDPRNALIKRWSEELSKHVGDTHLYAVSERVESVMKREKGLFCNADFFHASAYHFMDIPTKLFTPIFVMSRLTGWAAHVYEQRANNRIIRPSADYTGPDHQEWVPIENR

SEQ ID NO: 3240 - protein, 189 aa, Archaeoglobus fulgidus DSM 4304
MKLARGPRYKVPLRRRREGKTNYRKRLKLLLSRKPRLVVRITNRRVIAQIVEYAPEGDRVVVGVDSAMLREFGWKGDLNNTPAAYLTGILIAKKALQKGIGEAVLDIGLHTPTRGSRVFAVLRGAVEGGLEVPHSDEVLPDDSRIRGEHIAAYYEMNPERFGEYEKRGLKPSDLPAHVDEIKEKLMVIS

SEQ ID NO: 3241 - protein, 477 aa, Populus tremula x Populus tremuloides
MLSQKQAEEAIVPSYSETDLHEGKEEETEENHSLFSIKSALWHGGSVWDAWFSCASNQVAQVLLTLPYSFSQLGMLSGILFQIFYGIVGSWTAYLISVLYIEYRSRKEKENVNFKNHVIQWFEVLDGLLGPYWKAVGLAFNCTFLLFGSVIQLIACASNIYYINDHMDKRTWTYIFGACCATTVFIPSFHNYRIWSFLGLGMTTYTAWYMAIAALIHGQVGGVTHSAPTKLVLYFTGATNILYTFGGHAVTVEIMHAMWKPQKFKYIYLMATLYVFTLTIPSATAVYWAFGDLLLNHSNAFALLPRNGFRDAAVILMLIHQFITFGFACTPLYFVWEKVIGMHDTKSICLRALARLPVVIPIWFLAIIFPFFGPINSAVGALLVSFTVYIIPSLAHMLTYRKSSARQNAAEKPPFFLPSWTAMYVINTFVVVWVLVVGFGFGGWASVTNFVRQVDTFGLFAKCYQCKPAVAAPPRPH

SEQ ID NO: 3242 - protein, 817 aa, Zea mays
  misc_feature (44)..(44): Xaa can be any naturally occurring amino acid
  misc_feature (66)..(66): Xaa can be any naturally occurring amino acid
  misc_feature (141)..(141): Xaa can be any naturally occurring amino acid
  misc_feature (160)..(160): Xaa can be any naturally occurring amino acid
  misc_feature (704)..(704): Xaa can be any naturally occurring amino acid
  misc_feature (772)..(772): Xaa can be any naturally occurring amino acid
MAQILLHGTLHATIFEAESLSNPHRATGGAPKFIRKLVEGIEDXTVGVGKGATKIYATVDLEKGPXVGGPRMISNEPVNPRWYESFHIYCAHMAADVIFTVKIDNSIGASLIGRAYLPVQDLLGGEEIDKWLEICDENREXVGDSKIHVKLQYFDVGKDXRNWARGVRSTKYPGVPYTFFSQRQGCKVTLYQDAHVPDNFVPRIQLADGKNYEPHRCWEDIFDAISKAQHLIYITGWSVYTEITLVRDTNRPKPGGDVTLGELLKRKASEGVRVLMLVWDDRTSVGLLKKDGLMATHDEETANYFHGTDVNCVLCPRNPDDSGSFVQDLQISTMFTHHQKIVVVDHEMPNQGSQQRRIVSFIGGIDLCDGRYDTQYHSLFRTLDTVHHDDFHQPNFEGGSIKKGGPREPWHDIHSRLEGPIAWDVLYNFEQRWRKQGGKDLLVRLRDLPDIIIPPSPVMFPEDRETWNVQLFRSIDGGAAFGFPETPEEAARAGLVSGKDQIIDRSIQDAYVNAIRRAKNFIYIENQYFLGSSYGWKPEGIKPEEIGALHLIPKELSLKIVSKIEAGERFTVYVVVPMWPEGVPESASVQAILDWQRRTMEMMYTDIAQALEANGIEANPKDYLTFFCLGNREVKQEGEYEPEEHPEPDTDYIRAQEARRFMIYVHTKMMIVDDEYIIIGSANINQRSMDGARDSEIAMGAYQXPYHLATRQPARGQIHGFRMSLWYEHLGMLEDVFQRPESVECVQKVNEVAEKYWDLYSSDDLEQDLPGXHSLSYPIGVTADGSVTELPGMENFPDTRARVLGNKSDYLPPILTT

SEQ ID NO: 3243 - protein, 106 aa, uncultured Rickettsia sp.
MLKEIGSSEYIPRYIAKAKDKNDPFRLMGFGHRVYKNYDPRAAVLKETCKEVLKELGQLDNNPLLQIAIELEAIALKDEYFIERKLYPNVDFYSGIIYKAMGIPSQ

SEQ ID NO: 3244 - protein, 425 aa, Bacillus anthracis str. Ames 0581
MKNERIEKLQESWELDTRWKGITRPYSAEDVIRLRGSIDIEHTLARRGAEKLWASLHTEDYINALGALTGNQAMQQVKAGLKAIYLSGWQVAADANLSGHMYPDQSLYPANSVPAVVKRINQTLQRADQIQHMEGSGDTDYFVPIVADAEAGFGGQLNVFELMKGMIEAGASGVHFEDQLSSEKKCGHLGGKVLLPTQTAVRNLISARLAADVMGVPTIIVARTDADAADLITSDIDPVDKAFITGERTPEGFYRTKAGLDQAIARGLAYAPYADLVWCETSEPNLEDAKRFADAIHKEHPGKLLAYNCSPSFNWKQKLDEKTIASFQKEIASYGYKFQFVTLAGFHSLNYGMFELARGYKERGMAAYSELQQAEFAAEKHGYSATRHQREVGTGYFDEVAQVITGGTSSTTALKGSTEEAQFTK

SEQ ID NO: 3245 - protein, 428 aa, Pichia anomala
PGDFNLSLLDKIYEVEGLRWAGNANELNAAYAADGYSRVKGLSAIITTFGVGELSALNGIAGSYAEHVGVLHIVGVPSISSQAKQLLLHHTLGNGDFTVFHRMSSNISQTTAFIKDINSAPAEIDRCIREAYVFQRPVYLALPANLVDDLVSSDLLSTPIDLSLKPNDPESENEVVSTVLELIKKADNPVILVDACASRHSALAETKDLMDLTQFPTFVTPMGKGAVDEQHPRFGGVYVGTLSKPDVKAQVENADLILSVGALLSDFNTGSFSYSYKTKNIVEFHSDHIKIRNATFPGVQFQSVLQNLNSKIAPVVKGYKPYPVPSLKLTTSPASPETPLTQEWLWTKLSSWLREGDVVITETGTSAFGIVQTRFPSNTTGISQVLWGSIGYSVGAALGAVAGAEEVDKEKRVILFVGDGSLQLTVQE

SEQ ID NO: 3246 - protein, 237 aa, Prochlorococcus marinus subsp. marinus str. CCMP1375
MTDLQTQMKIAVAQEAIGEIKDGMILGLGSGSTAALMIKSLGEKLKEGSLKEIIGVPTSFQGEVLASQLGIPLRAFSAVSKIDLAIDGADEVDPNFQLIKGGGACHVQEKLVASIADRFVVVVDSTKIVEKLNLEFKLPVEVLPAAWKLVQKELNDLGAKSDLRMAEKKAGPIVTDQGNLVLDVQFADGISDPQNLEKQINNFPGVLENGLFVNLTDEVLVGEIKNGVSSVNRLKKA

SEQ ID NO: 3247 - protein, 364 aa, Picea abies
MGSASENSEMNTKIVNEDEWLLGMELGNFSCLPMGMKAAIELDVLQIIANAGNGVQLSPRQIVAHIPTTNPDAAITLDRILRVLASHSVLSCSVTTDENGKAERLYGLTPLCKYLVKNQDGVSLAPLVLMNQDKVLMDSWYYLKDAVLEGSQPFTKAHGMNAFEYPAKDQRFNRVFNRGMSEHSTMLMNKILDTYQGFKEVQELVDVGGGVGSTLNLIVSRYPHISGINFDMPHVVTDAPHYPAVKHVGGDMFDSVPTGQAIFMKWILHDWSDDHCRKLLKNCHKALPEKGKVIVVDTILPVAAETSPYARQGFHIDLLMLAYNPGGKERTEQEFQDLAKEAGFAGGVKPVCCANGMWVMEFHK

SEQ ID NO: 3248 - protein, 139 aa, Brassica napus
  misc_feature (43)..(43): Xaa can be any naturally occurring amino acid
  misc_feature (135)..(135): Xaa can be any naturally occurring amino acid
  misc_feature (137)..(137): Xaa can be any naturally occurring amino acid
MEISERVKARLAVLTAHIAVSDPVGSSQVLPAGEIERWWGSSXVEAHGSLKGSLTIVDERTGKKYQVPVSEDGTVKSVDLKKITTGKDDKGLKLYEPGYLNTAPVRSSISYIDGDEGILRYRGYPIEELAESSTXIXVS

SEQ ID NO: 3249 - protein, 332 aa, Triticum aestivum
  misc_feature (208)..(208): Xaa can be any naturally occurring amino acid
AYLGDIIEQVCTKKQAGTGPEFPGYLLDADLESDALGWQYISGSLPDSRELDHIDNPQLEGYKFDPHGEYVRRWLPELARLPTEWIHHPWDAPASVLQAAGVELGSNYPLPIVELDTAQVRLQEALSEMWQLEAASRAAMDTGMEEGLGDSSEVPPIEFPQDLQMEVHWEPARVAPNVLTTAQRRQDQMVPTVTMTTSLNRVETEISXADLGNSVDSRAEVPFRMHFEPRTEREEMIRSTGNAAGTNGIHHHNNFQQPQRRMRNIFAPSVSEASSSWTGRDGGVVPVWSPPAASGHSETYGADEADVSSRSYLDRHPQSHRIMNWHQLSQSL

SEQ ID NO: 3250 - protein, 100 aa, Triticum aestivum
MDPSKQQQQHKPHAPAGGQQGDDVHKTTTAHGDVMTHSFGEGYSTRSDEEGFGGVYGQNDPVLNPGTEVHPNHPEYDKSQGSEVKEKEKARHLKDDKHAT

SEQ ID NO: 3251 - protein, 358 aa, Zea mays
MGSTAGDVAAVVDEEACMYAMQLASSSILPMTLKNAIELGLLEVLQKEAGGGKAALAPEEVVARMPAAPSDPAAAAAMVDRMLRLLASYDVVRCQMEDRDGRYERRYSAAPVCKWLTPNEDGVSMAALALMNQDKVLMESWYYLKDAVLDGGIPFNKAYGMTAFEYHGTDPRFNRVFNEGMKNHSVIITKKLLDFYTGFEGVSTLVDVGGGVGATLHAITSRHPHISGVNFDLPHVISEAPPFPGVRHVGGDMFASVPAGDAILMKWILHDWSDAHCATLLKNCYDALPENGKVIVVECVLPVNTEATPKAQGVFHVDMIMLAHNPGGKERYEREFRELAKGAGFSGFKATYIYANAW

SEQ ID NO: 3252 - protein, 357 aa, Tropheryma whipplei str. Twist
MVRMKALVYHGPGKRSLDTVDDPTIKLGTDVILEMETTTICGSDLHILKGDVAAVKPGTVLGHEGIGKIVEVGKDVKSHSVGDRVIVSPMSSCGVCRFCRANNNGHCLGDSEGPGGWRLGGLINGVQAQFARIPLADNSLHKLPSGLDPKVGILVSDVLPTGHEVGAQAGQVTLGSVVAVIGCGPVGLGAIVTSLLYSPSKVIAVDADSNRLELARKLGATDTVRVNRERPLDAIEDVKKLTEGGFGVDVAIEAVGVPVTFSMALGIAAPGGRVANIGVHGAPVDFPLQDLWDKNIAVTLGIVSTHTIPLLLAALSEGKIDASQFVTHEFDLSDLERAYDVFSAAAQHNVVKVAIRA

SEQ ID NO: 3253 - protein, 102 aa, Glycine max
  misc_feature (80)..(80): Xaa can be any naturally occurring amino acid
SNISSTVHLQPAVLYDAGCTNLKSMAVFPTRKTNNYITSIASNCGRVQCMQVWPPIVKKNFETLSYLPDLYDAQFAYEVXYLLMKVCIPFLEFVLEHIFLFP

SEQ ID NO: 3254 - protein, 337 aa, Neurospora crassa
MSSSSKFRSSHHYHSQSVSSILGRHDSTSPGAELQRRPTTTSSYTSSGSASRRVPRDNGTRSSDGTVSTMMSTTSSTGRESAATTAMTEGPAYSKKVVVVGDGGCGKTCLLISYSQGYFPEKYVPTVFENYITYPTHPPTGKTVELALWDTAGQEEYDRLRPLSYPETDLIFVCFAIDCPNSLENVMDKWYPEVLHFCPYTPLILVGLKSDLRNKKTCIDMLKTQGLTPVTTEQGLAVAKKMGAQYMECSSKEMKGVEEIFEQAILTVVANDRKTLEQEAANGMLGVGAGSGSGKGSGISFSSGDKAGSGIGPVKAAGVGGTIVPKTRKKKRKCGMM

SEQ ID NO: 3255 - protein, 495 aa, Staphylococcus aureus subsp. aureus MRSA252
MAVNVRDYIAENYGLFINGEFVKGSSDETIEVTNPATGETLSHITRAKDKDVDHAVKVAQEAFESWSLTSKSERAQMLRDIGDKLMAQKDKIAMIETLNNGKPIRETTAIDIPFAARHFHYFASVIETEEGTVNDIDKDTMSIVRHEPIGVVGAVVAWNFPMLLAAWKIAPAIAAGNTIVIQPSSSTPLSLLEVAKIFQEVLPNGVVNILTGKGSESGNAIFNHDGVDKLSFTGSTDVGYQVAEAAAKHLVPATLELGGKSANIILDDANLDLAVEGIQLGILFNQGEVCSAGSRLLVHEKIYDQLVPRLQEAFSNIKVGDPQDEATQMGSQTGKDQLDKIQSYIDAAKESDAQILAGGHRLTENGLDKGFFFEPTLIAVPDNHHKLAQEEIFGPVLTVIKVKDDQEAIDIANDSEYGLAGGVFSQNITRALNIAKAVRTGRIWINTYNQVPEGAPFGGYKKSGIGRETYKGALSNYQQVKNIYIDTSNALKGLY

SEQ ID NO: 3256 - protein, 264 aa, Candida albicans SC5314
MPASREDSVYLAKLAEQAERYEEMVENMKAVASSGQELSVEERNLLSVAYKNVIGARRASWRIVSSIEQKEEAKGNESQVALIRDYRAKIEAELSKICEDILSVLSDHLITSAQTGESKVFYYKMKGDYHRYLAEFAIAEKRKEAADLSLEAYKAASDVAVTELPPTHPIRLGLALNFSVFYYEILNSPDRACHLAKQAFDDAVADLETLSEDSYKDSTLIMQLLRDNLTLWTDLSEAPAATEEQQQSSQAPAAQPTEGKADQE

SEQ ID NO: 3257 - protein, 181 aa, Brassica napus
MAYSMLSSAAVVTSPAQATMVAPFTGLKSSSAFPVTRKANNDITSIVSNGGRVSCMQVWPPVGKKKFETLSYLPDLTEVELGKEVDYLLRNKWIPCVEFELEHGFVYREHGSTPGYYDGRYWTMWKLPLFGCTDSAQVLKEVQECKTEYPNAFIRIIGFDNNRQVQCISFIAYKPPSFTGA

SEQ ID NO: 3258 - protein, 447 aa, Leptospira interrogans serovar Lai str. 56601
MKLSRSEFIKLGILTAAGISGLPGIKLSAQGTSSRKTVIVMGGGISGLYASYLLSKTGIKVQLIEATDRLGGRIRTVTDVSGNFLDLGAEWIQAEHRTAKSLIRELGLKTTDFEVQSDLFFGSYRKFGTWDISPKSQEILNKLVQMNSKINSTQQQELDRISFYNFLNYQGMSLEDLNILNFKYSLYYGDSLRSLSAQKVLSDLVNFPKYNTRVEGGMETLTRALVSSLENTEIIFSDPVVSVSQVEGKVIVTTVSGKKIEGNACISTLPANQLTTIQWDPELDKEKKLSALRIRYSRIYKTFLMLREAPWTRGSFSAYSDSVAGFIYDAGTKINSEDKILGMISTGDRYDVLASSTDAMKVEYIRLALESLGQGRELQVLRIQSSETSQSKFIPTGIATFPPGSYGSIISLLKPMDRIFFAGEHTAELNGTVEGALASAIRAVNQV

SEQ ID NO: 3259 - protein, 357 aa, Magnaporthe grisea
MAEFVRAQIFGTTFEITSRYSDLQPVGMGAFGLVCSARDQLTNQNVAIKKIMKPFSTPVLAKRTYRELKLLKHLKHENVISLSDIFISPLEDIYFVTELLGTDLHRLLTSRPLEKQFIQYFLYQIMRGLKYVHSAGVVHRDLKPSNILVNENCDLKICDFGLARIQDPQMTGYVSTRYYRAPEIMLTWQKYDVEVDIWSAGCIFAEMLEGKPLFPGKDHVNQFSIITELLGTPPDDVINTIASENTLRFVKSLPKRERQPLKNKFKNADPSAIDLLERMLVFDPKKRITATEALAHEYLTPYHDPTDEPIAEEKFDWSFNDADLPVDTWKIMMYSEILDYHNAEAGMQQMDDQFTGQ

SEQ ID NO: 3260 - protein, 502 aa, Pseudomonas sp. Y2
MTRSLTMNSSLSAIDGLRLPHQMLIGGQWVSAQSGKTLNVYNPATGDILTEVPDGDVEDVNAAVESAAGTLRSDTWRRMPPSARERILLRLADLLEVHGDELARLETLNNGKLLIYSKLMEVGASAQWLRYMAGWATKLTGSTLDLSLPLPPEVRSRASTQRVPVGVVAAIIPWNFPLLMAVWKIAPALACGNTVVLKPAEETPLTALRLAELAMEAGLPAGALNVVTGRGETAGDALVRHPKVAKVAFTGSTEVGRIIGSACGRSLKAVSLELGGKSPVIVLADCDPQEAAEGAAAAIFFNHGQVCTAGSRLYVHESIYEDVIQRLAVIGESIVVGSGLEQGVHMGPMVSKKHHENVLRHIRNGIEDGADLICGGTEAPCAQGFFVKPTIFANREKKDIRLLSQEVFGPVLVATPFSDIAEVVNEANRSVYGLGASIWTNDLSAALRINDELEAGTVWVNTHNMVDPNLPFGGFKDSGVGREHGAAAIEHYTTTRSLVIAY

SEQ ID NO: 3261 - protein, 121 aa, Bacillus halodurans C-125
MSKDQIIEAIKEMTVLELNDLVKAIEEEFGVTAAAPVAVAGGAAAEGGAAEKTEFDVVLESAGGSKINVIKVVREITGLGLKEAKALVDGAPAPIKEGVAKEEAEEMKAKLEEAGASVELK

SEQ ID NO: 3262 - protein, 102 aa, uncultured Rickettsia sp.
MLKEIGSSENIPKYIAKAKDKNDPFRLIGFGHRVYKNYDPRAAVLKETCKEVLKELGQLENNPLLQIAIELEAIALKDEYFIERKLYPNVDFYSGIIYKAMG

SEQ ID NO: 3263 - protein, 286 aa, Mycobacterium avium subsp. paratuberculosis str. k10
MTVIDEIYSSSSAIPTVALNDEAKKPVLGLGVAKLSDEETESSVLAALEAGCRLIDTAASYGNEAAVGRAIAASGIPREELFVTTKLGTSRQGFHSAQESCKESLDRLGLDYLDLYLIHWPAPTLGKYVESFEGMIEARERGHVRSIGVSNFTEDLLATVIEETNEVPAVNQVELHPRLNQAELRQVHAQHDVTTQSYSPLGVGRLIEEPTVTTIAAEYGRTPAQVLVRWNLQLDNVVVSRSSKPERVAENLDVFDFTLEPEHMEAIEGLHDGTRVLHDPMTFMGT

SEQ ID NO: 3264 - protein, 456 aa, Leuconostoc mesenteroides subsp. mesenteroides ATCC 8293
MTDSDNQQKWPALPATLSNIAVTKNSGKYESVSSNYFKVGHPRLVFMAENDEQVSHVVEYAGNVQRFVGHQIPFSVRSGGHGITNYSVNDGGIIIDLSQMNQVNILDEAKGLVKVQAGAVWGDVADKISKADLVLSSGDFGDTGVGGLATSGGLGLLVRKQGLTTDQILGATIITADGKKRNVNKEENSDLFWAIRGGGSQVGIVTEFIFQADKVEPAKSGQRVPIGLQKLSYNVFDLSHFLFAWHSWITTATEDMSSLLMLTKNDSNSSIISVQATNIWCGEKTDLCEKYFTDALNIAKVEKQDESNLSYHTLVQAPHLPHEGANNVYVKNVLLTKIDDHLLNALHTMLKSSAVMGIEVRAIDGPINQLSPDFDAWSFREATLFVAMWGDITQSGLLNQLFKPLQEHGCGVYGAYSSDTSKSETTKAWSRDTRERLQKVVKKYDSKHIINQSRYA

SEQ ID NO: 3265 - protein, 421 aa, Streptomyces coelicolor A3(2)
MRDHEPDHPADSERRLTTREAAELLGVKPETVYAYVSRGQLGSRRAPGSRGSTFDADEVRALARRNRRDGGINPAPAAGQELTVRTRLTLIENDRFSYRGVDAVELAARHTYEEVAEWLWTGELRPGAAFSAPESSVAVARRAVDALPEHAGPADRLRVAAIAAAVTDPLRFDLSEEAVLGTARVLIPTLVAALPPVLRDGHDRDPIARRLWTRLSGQEPDEPTLQALDTALGLLVDHDLAASTLAVRVAASARAHAYAAVSAGLGVIEGPLHGAAGGLAHRMLLEVLELGSAAPVVAEELRAGRRIPGLGHRLYPGEDPRARALFALLEDVPRAAPAIAAARDVQATAARHTPLHANVDLALAVLTVSSGMASTAAETIFAVARTAGWIAHALEEYGERPLRMRPSGLYSGPRPPRPLPE

SEQ ID NO: 3266 - protein, 451 aa, Bacillus halodurans C-125
MTSNDLLAKSKKHLWLPFTQMSDYEKDPLIIESGNGVYLKDIEGNTYLDGYSSLWLNVHGHRKKEIDEAIEKQLQLIAHSTLLGAANIPSIQLAEKLVELAPEAITRVFYSDSGAEAVEIAVKMAYQYWQNRGYENKKSFVTLSNGYHGDTVGTMSVGSIELYHKVYTSLLFDAIVIPFPASKEEQTESDLCRESLKQLRELFEAKHEEIAGITVEALIQGAGGMNLMPKGYLKGVEQLCKEFHILLIVDEVATGFGRTGKMFAVEHENVQPDIMTVAKGITGGYLPIAATLTQEHIYEAFYGEYTDLKTFFHGHSYTGNQLGCAAALANLEIFEKENIIQQVEEKALFLEEQLKHVAELEFVGAVRQLGLMCGIQLVQHKRTSEPFPWEQRVAYRSTLKMRALGMLTRPLGDVIVLMPPLAATNDQLKQMVDIMKEGIMEAATECLEQQV

SEQ ID NO: 3267 - protein, 423 aa, Brucella melitensis 16M
MRKEMLLPNLSISYSDPIKFVRGDGVWLIDNRGRAYLDCFNNVCHLGHAHPEVVEAIARQAAILNTNTRYLHDTIVSYAERLTATLPEGLTVASFACSGSEANSLALRMARTHSGQRDALVLDWAYHGTTQELIDLSPYKYKRKGGKGRPDHVFEATIPDSYRAPESWPLAEHGRRFAESIAEQIEKMKAQGRAPAFFIAESIPSVAGQVFLPEGYLREVYAMVRAAGGVCIADEVQVGFGRVGSHWWAFEMQGVVPDIVTMGKPIGNGHPMSAVVTTREVADSFNNGMEYFNTFGGNPVSCAAGLAVLDVIEHNDLRRNALEIGNYLIAGFRSMQDRFDIIGDVRGQGLFLGIELVMDRKTKEPATAIARKINDGARERGILMGTEGPFDNVLKMRPPMIFTRANADHLLSVLEDSFAAALK

SEQ ID NO: 3268 - protein, 520 aa, Glycine max
MPSFMAFLSHPYFFAALSASLTLLVVQLLFRKLNKRHSRKKYHPVAGTIFNQMLNFNRLHHYMTDLAAKHRTYRLLNPFRYEVYTTEPTNVEYILKTNFENYGKGLYNYHNLKDLLGDGIFTVDGEKWREQRKISSHEFSTKMLRDFSISIFRKNVVKLVNIVSEAATSNSTLEIQDLLMKSTLDSIFQVAFGTELDSMCGSSQEGKIFADAFDTSSALTLYRYVDVFWKIKKFLNIGSEAKLRKTTEILNEFVFKLINTRILQMQISKGDSGSKRGDILSRFLQVKEYDPTYLRDIILNFVIAGKDTTAATLSWFMYMLCKYPEVQEKAAEEVKEATNTKRISSYNEFVYSVTDEALERMNYLHAAITETLRLYPAVPVDAKICFSDDTLPDGYSVNKGDMVSYQPYAMGRMKFIWGDDAEDFRPERWLDENGIFKPESPFKFTAFQVNNNMKCTTCTGPRVCLRVRFAYRQMKIFAAVLLGCFRFKLKDEKKNVTYKTMINLHIDEGLEIKAFNRYRD

SEQ ID NO: 3269 - protein, 441 aa, Arabidopsis thaliana
MNRRQQVKRRVGKYEVGRTIGEGTFAKVKFARNSETGEPVALKILDKEKVLKHKMAEQIRREIATMKLIKHPNVVQLYEVMASKTKIFIILEYVTGGELFDKIVNDGRMKEDEARRYFQQLIHAVDYCHSRGVYHRDLKPENLLLDSYGNLKISDFGLSALSQQVRDDGLLHTSCGTPNYVAPEVLNDRGYDGATADMWSCGVVLYVLLAGYLPFDDSNLMNLYKKISSGEFNCPPWLSLGAMKLITRILDPNPMTRVTPQEVFEDEWFKKDYKPPVFEERDDSNMDDIDAVFKDSEEHLVTEKREEQPAAINAFEIISMSRGLNLENLFDPEQEFKRETRITLRGGANEIIEKIEEAAKPLGFDVQKKNYKMRLENVKAGRKGNLNVATEIFQVAPSLHMVQVSKSKGDTLEFHKFYKKLSNSLEQVVWTNNEVKKETAK

SEQ ID NO: 3270 - protein, 390 aa, Streptomyces coelicolor A3(2)
MSVNRTAAAATPVEVPRGLAGVVVADTEVGDVRGLEGFYHYRQYSAVELARSRGFEDVWHLLVHGELPDARTGAAFAAETAALRRLPDAVRAALPAIAEAGAGSGPLAGMRTGLSLLGAALGFRPVYDLSVDQRRQDTLVAAAAVPTLLTALHRLGRGLEPVEPREDLSYAANYLYMLTGQEPDEACTRAIEQYLISTIDHGFNASTFTARVIASTGADVAACLAGAVSALSGPLHGGAPSRALDTLDAIGTPDRIDAWIRERVLAGDRIMGFGHAVYRTEDPRSRMLREVAQSFGGPRVEFAVEVERQVEAILAELKPGRELHTNVEFYAGVVMELCGLPREMFTPTFAAARVVGWSANILEQASDSKIIRPAARYVGPGAPVGVPAVA

SEQ ID NO: 3271 - protein, 320 aa, Zea mays
  misc_feature (49)..(49): Xaa can be any naturally occurring amino acid
MVLKFSGSSKQCKGTAGTQSSRLHRRHRLHAREQGSRRGLLPKDRIGGXAGAAGGARTASSDTLDMGRSNRKSPGSSGWIPGTDEAAAGGDDVLALEDAAAPREWTAQVEPGVQITFGTIPTGGNDLKRIRFSREMFNKWEAQRWWGENYDRIVELYNVVMFSGRQQGCSTPVSSVDAGSSSAPYAAAHSTRAAAAYFPSAAVPDPSDHVWAHHFNMLNSAAAAAGTSAAMGGGAPSSYDPSRATTSSRDEASVSLSNVSDLEATEWIEEDEPGVCLTIRELGDGTRELRRIRFSREIFGEDRAKVWWEQNRERIQAEYL

SEQ ID NO: 3272 - protein, 485 aa, Burkholderia fungorum LB400
MSESATVFKNLIAGEWTESVSGKTFANINPADTRDVVGQFQASVVADAQAAIQAASSAFAQWRRTPVTARARIVNKAADWLESHADTFAQELTREEGKPLAQSRDEILRSAQVLRFYAVEAQSFTGETFPSDDPEQHVYTQREPLGVVTVITPWNFPISIPARKIAPALMAGNTVIFKPSSDAPLIGYRLAEAFAQAGIPAGVLNFITGRASDIGAAITESPVVRAISFTGSTAAGEHIHRSVPITTRTQMELGGKNPLIVMDDADLDRAVDLAVKGGLSLSGQACTGTSRILVMESVRETFTAKLVERVKSLKIGSGVTPGMDLGPLANRKQLESVLGYVASGKEQSTHLIGGEQLTGEGFEHGYYVTPAVFSDVPESARIYREEIFGPVLAITSVTGYDDAIAKANDTEYGLSAAIATSNPRYMHRFADEIEAGTVKINRTTTGNVINAPFGGLKRSSTSTFRESGRAGLEFYTQIKTVYRGL

SEQ ID NO: 3273 - protein, 123 aa, Bacillus subtilis subsp. subtilis str. 168
MALNIEEIIASVKEATVLELNDLVKAIEEEFGVTAAAPVAVAGGAAAGGAAEEQSEFDLILAGAGSQKIKVIKVVREITGLGLKEAKELVDNTPKPLKEGIAKEEAEELKAKLEEVGASVEVK

SEQ ID NO: 3274 - protein, 225 aa, Listeria monocytogenes EGD-e
MNEINHTSERVNTEKRTEKQIIMQKILNWFVFSLLLASIGAAIGSKLSPELYLPLVVLEVALLITAMVVRRSKTINKVVGYPVVLAFAFVTGLTLGPTLTYYFGAGQGAAVLMAFVTATVTFTTLAFIGAKMKKDLSFLSSALFAAIIILVIFSFVGVFLPLGSMLSTIISAGGTIIFSLYILYDFNQIMKRDVELADVPMLALNLYLDFLNLFMFLLRLFTGRD

SEQ ID NO: 3275 - protein, 433 aa, Triticum aestivum
MDHGSSPTKICKSVVDEDIISNLPEALRDKILCCLPIKEAVGTCLLSRTWRYTWASMTELMFRTADFASGNDSADDDRRFLKFTDMFLFLHNGPILKFCLNTIANEMVSTGGHLYRWMLMLSRNKIKEIQLQTSIRDSYKVPSSFFSCDELEYVYLRACVFTSLHLPPPSKGFKQLHTLRLEYVTVEGNSLGDLVASCPNLEKLNIRGLYSKSNINIRSTKLKVLKIEGWFTHLNLHAPYLTSVWIGLELNSDTDGASTTRCNFNLSPFIASLSDVETIRFHGHILECVEREFLILKQPKLFNRLTEISLEINLGDLKEANFALCLFQHAPNLRFFKLKLISRNSMVPRVHFWESIDRDVCLFQNVELVGLFDFTGSFAELGFLKFLLEGAPVLRKLGIIDKGLDRNVLKNLLKLRRASKDAEILILEACFPH

SEQ ID NO: 3276 - protein, 326 aa, Glycine max
MDQALVDDIINRLLEVRGRPGKQVQLSESEIRQLCAASREIFLQQPNLLELEAPIKICGDVHGQYSDLLRLFEYGGLPPEANYLFLGDYVDRGKQSLETICLLLAYKIKYPENFFLLRGNHECASINRIYGFYDECKRRFNVRLWKTFTECFNCLPVAALIDEKILCMHGGLSPDLLNLDQIRNLQRPTDVPDTGLLCDLLWSDPSKEVQGWGMNDRGVSYTFGADKVSEFLQKHDLDLICRAHQVVEDGYEFFANRQLVTIFSAPNYCGEFDNAGAMMSVDETLMCSFQILKPADKKVKLNFGSTTTTKPGNSPAGVKSFLGTKV

SEQ ID NO: 3277 - protein, 358 aa, Zea mays
MGSTAGDVAAVVDEEACMYAMQLASSSILPMTLKNAIELGLLEVLQKEAGGGKAALAPEEVVARMPAAPGDPAAAAAMVDRMLRLLASYDVVRCQMEDRDGRYERRYSAAPVCKWLTPNEDGVSMAALALMNQDKVLMESWYYLKDAVLDGGIPFNKAYGMTAFEYHGTDPRFNRVFNEGMKDHSVIITKKLLDFYTGFEGVSTLVDVGGGVGATLHAITSRHPHISGVNFDLPHVISEAPPFPGVRHVGGDMFASVPAGDAILMKWILHDWSDAHCATLLKNCYDALPENGKAIVVECVLPVNTEATPKAQGVFHVDMIMLAHNPGGKERYEREFRELAKGAGFSGFKATYIYANAW

SEQ ID NO: 3278 - protein, 501 aa, Glycine max
  misc_feature (192)..(192): Xaa can be any naturally occurring amino acid
MDQFLWRVLPLLTILVSFGVFFYLQDSYTAQLFPLIKLPRDKCSLLPHRHFWISSKRIVTPQGIISGSVEINDGKIISVVEGHAIQGKPKQEEVIDYGDAVIMPGLIDVHVHLNEPGRTEWEGFDTGTRAAAAGGVTTVVDMPLNCYPTTVSKEKLKLKLDAAEDKIYVDVGMTNNLCLSIQLTELLRYFLXSYTGFWGGLIPENALNTSILDGLLSAGVLGVKSFMCPSGIDDFPMATIDHIKAGLSVLAKYRRPIVVHAEIQQDFENHLELNEDNLDPRAYLTYLNTRPPSWEEAAIKQLVSVTKDTRKGGPLEGAHVHIVHLSDSSASLDLIKEAKSHGDSISVETCPHYLAFTSEEIPNGDTRFKCSPPIRDAYNKDKLWEAVLEGHIDLLSTDHSPTVPELKLMEEGDFLKAWGGISSLQFNLPVTWSYGKKYGLTLEQLSLLWSKKPATLAGLESKGTIAVGNHADIVVWQPELEFDLDDDYPVFIKHSVCLPCY

SEQ ID NO: 3279 - protein, 1023 aa, Neurospora crassa
MTRRDAEVKDRCDTGRESPSTDGTGKSIFHVKPPALAALRFLHLLHLALTCFASAATVTTPSLYRPIRGYRFQHLLSISHVPVQHFPEGIQSRIFVAATSGHTEQTQPGVFGCLQRLDHACLQGHAQPTRPDPTRTHHPDPPPTVHGSVKAPAVCNGIHSRRQNSEKTPLARGKDTDTHSDTLLHHGQAALETAIPRLPKPARQALPVSPWTVLMSGATAPRLQNVLSRPVLSSKRDAGRTSSHHLLKSLLLASRFAASTLVATTSSAGASRSTGTSSPDPGPTINKSQTNRNPSTYTSPPNSLSRTFSASNLLAWYRTLPSPYFNLSGHLDDLSSLIRPFLAFLDPSSLSSPYSMASTSYAFSTSSGSDFSTPRSSSPHSSASVASARSSHSSTFSAGKRLSMSSVRRTSASNPMSSVDLSTIEEALKMANLDTLKGYCQKTYGEVHQETTTEYISQEEARGYQVLNQPHWNKVADFRISPKGTSFTPEERVAKNLTGLIPHVMEDSEKQVERALKMIRTRQTDIDRYLYLSTIKSQNVDLFYRLLMDHAKEMMPLVYTPTIGDVCLQYSTLYTRPEALYISIKQRKSIRTILRNWPYPQPEICVVTDGSRILGLGDLGVNGVGIPIGKLALYTAAAGIHPDKTLPIVLDCGTANETNLKDPLYLGLRQKRIPVAEQQEFMDEFMEAAAEVFPDMVVQFEDFESEKAFNYLDRYRDQYKCFNDDIQGTGAVVLAGYIGAVNLSNVPIEEQRLVFMGAGSAGVGVAKQLVEYYTKRGLSEQQAKDKFWLVDTKGLVTKDRGDKLAEHKKYFARTDNNGHQFRTLEEVIEYVKPSALVGLTATHGVFTESVVRALKASVDAGGLGRRPILFPLSNPLTKAECTFKEAIDWTDGTVLFASGSPFSSYTTNGVTYHPNQGNNVYVFPGIGLGAILAKATRVTDDMIYTSAAALANSLNADEVKQGLIYPRIDRVREASVIVAREVMKSARREGVSTLPEEQWLEWEEWGDVDLERYIKQHIYDPKF

SEQ ID NO: 3280 - protein, 90 aa, Glycine max
MASFARRAMSLAQIPSARAPASVCQRRGLAGAADHHGSTKVDFWKQPTNPGNWKEEHFVLISLSGWGMLFYGGYKLFTGGKGEKPVEAAQ

SEQ ID NO: 3281 - protein, 617 aa, Triticum aestivum
  misc_feature (175)..(175): Xaa can be any naturally occurring amino acid
  misc_feature (198)..(198): Xaa can be any naturally occurring amino acid
MWRHAAARRSAQIRRLLSTSAPSAGAGSVLRGPSIVHKRGTDILHAPWYNKDTAFPLTERDRLSLRGFPPTQRVRLGLQGVLLMRFNKSEEHYQRLVTGSPLLVPKPQSPPLLVVSIATWEAPTWMHDSKEAWHSRIRSTTCLGCGGTMFTANSSTANNVRRSTPGTDVSVTYNXSDQWNTWLFRFSCSTWEYFSRLXLPGILALLLTHFVYVAAAGINPQIVVPIMLDVGTNHEELLEDKLYLGLRQPRLEGEEYLAVVDEFMEAVHARWPKAIVQFEDFQMKWAFETLQRYRSRFCMFNDDVQGTAGVALAGLLGAVRAQGRPLADFTKQKIVVVGAGSAGIGVLNMAKHAMLRMPGTHKIGELGEGHNQFWVLDKDGLITKSRKDLDPAVARFARGYGPEEVEDLHEGASLVEVVKKVKPHVLLGLSGVGGIFNEEVLKAMKESDSPCPAIFAMSNPTTKAECTPEDVFKHVGENAVFASGSPFSNVTLSNGRKGYANQANNMYLFPGIGLGALLSGARHISDGMLHAAAECLASYITDDAIRKGILFPSISSIRHITARVGAAVARAAVDEDLAEGCSDLDPRDLRSMSESDTVDYVARKMWYPVYSPLVNDK

SEQ ID NO: 3282 - protein, 315 aa, Zea mays
  misc_feature (219)..(219): Xaa can be any naturally occurring amino acid
APRGVEPRLFVARAAGPAQQAADAKACSALCSPAARAVPAMESFGVPPAPVAAPEKRKKPLDLKDPVPAAAAAAANGGGATKASPAAKWAEKKKLVGGDAGYVLEDVPHLTDYLPQLPTYPNPLQDNPAYSVVKQYFVNPDDTVTQKIVVHKTSARGTHFRRAGPRQRVYFQPDEVNAAIVTCGGLCPGLNTVIRELVCGLYDMYGVTSVVGIEGGYKXGFYFKNTVALTPRSVNGIHKRGGTVLGTSRGGHDTAKIVDCLQDRGINQVYIIGGDGTQKGASVIYEEVRRRGLKCAVVGVPKTIDNDIAVSSAPP

SEQ ID NO: 3283 - protein, 358 aa, Zea mays
MGSTAGDVAAVVDEEACMYAMQLASSSILPMTLKNAIELGLLEVLQKEAGGGKAALAPEEVVARMPAAPGDPAAAAAMVDRMLRLLASYDVVRCQMEDRDGRYERRYSAAPVCKWLTPNEDGVSMAALALMNQDKVLMESWYYLKDAVLDGGIPFNKAYGMTAFEYHGTDSRFNRVFNEGMKNHSVIITKKLLDFYTGFEGVSTLVDVGGGVGATLHAITSRHPHISGVNFDLPHVISEAPPFPGVRHVGGDMFASVPAGDAILMKWILHDWSDAHCATLLKNCYDALPENGKVIVVECVLPVNTEATPKAQGVFHVDMIMLAHNPGGKERYEREFRELAKGAGFSGFKATYIYANAW

SEQ ID NO: 3284 - protein, 353 aa, Zea mays
MGDAAAAAASTSAPTTPTSILICLEDGSDLLADADDGAGTDLVVAHDERLLVVDQDEEYVALLLSKESASGGCGPVEEMEDWMKAARSGCVRWIIKTTAMFRFGGKTAYVAVNYLDRFLAQRRVNREHAWGLQLLMVACMSLATKLEEHHAPRLSELPLDACEFAFDRASVLRMELLVLGTLEWRMVAVTPFPYISCFAARFRQDERRAVLVRAVECVFAAIRAMSSVEYQPSTIAVASILVARGRETPAGNLDALKAILGSSFPQLDTGHVYSCYSAMIREDDKSPTQSTSTSTSTGVASSGVSVAAHAGGSGSPSPGASVSVGANNAAGTAPPATTDKRNKRRRLRSPQRQ

SEQ ID NO: 3285 - protein, 154 aa, Castanea sativa
MALSLFGGRRSNVFDPFSLDIWDPFEGFSAVANVPPSARETTAFATARIDWKETPEAHIFKADLPGLKKEEVKVEVEDGNVLQISGERSKEHEEKNDKWHRVERSCGKFLRRFRLPENAKVEQVKANMENGVLTVIVPKEEQKKTEVKSIEISG

SEQ ID NO: 3286 - protein, 154 aa, Glycine max
KDAREGDDNLSTVHHELHFTVQECIDALGEVIYHIETYDVTTIRASTPMFLMSRKIKSLGVKMVISGEGSDEIFGGYLYFHKAPNKKEFHEETCRKIKALHLYDCLRANKATSAWGVEARVPFLDKSFISVAMDIDPQWKMIKRDSVQIEKWVT

SEQ ID NO: 3287 - protein, 493 aa, Mentha x piperita
MAALLVFFSVSLILLAVLFHKRKSSLSSRKRPPPSPLRLPVIGHFHLIGALSHRSFTSLSKRYGEVMLLHFGSAPVLVASSAAAAREIMKNQDVIFASRPRLSIFDRLMYSGKGVAFAPYGEHWRNARSMCMLQLLSAKRVQSFGGIREEETSAMIEKIRRSKPTTVVNLSEMFMALTNGVIHRAVLGRKGDGGDDFNRILIKVIKLLGSFNVGDYVPWLSWINRINGVDAEVEKVGTKLDGSMEGILRKYRRKKVGDDETNFVDTLLQFQRESKDTDPVEDDVIKALIFDMVSAGTDTTFAALEWTMAELIKNPRTLKTLQNEVREVSRNKGGITEDDVDKMPYLKAVSKEILRLHPPFAILLPRELTQDANMLGYDIPRGTVVLVNNWAISRDPSLWENPEEFRPERFLETSIDYKGLHFEMLPFGSGRRGCPGSTFAMALYELALSKLVNEFDFRLGNGDRAEDLDMTEAPGFVVHKKSPLLVLATPRQS

SEQ ID NO: 3288 - protein, 280 aa, Listeria monocytogenes str. 4b H7858
MTLSFSDTYRLNNGIEMPRHGFGVYKLTDEARMRTALETAVDVGYRLFDTASFYHNEKELGDFFASSGLKRDEFFVTTKMWNTEQGYDETLRAFEKSQKKLQLDKIDLYLVHWPKQDTFFDTWRAVEKLYDEGLVRAIGVSNFEAHHLDRLRTSANVLPVVDQLETHPHFPNHLLHRYLEELHIVHQAWSPLGRGGVLQEQILIDLAEKHGKSPAQIVLRWHLQNNISIIPKSETPSRIRENAAIYDFELSEADMRQVERLNTGERVSHAPDVMYVRSEI

SEQ ID NO: 3289 - protein, 218 aa, Bartonella doshiae
IASIRLISKVPTLAAMAYKYSIGQAFVYPNNNLSYAANFLRMCFAVPCEEYQVNPVLTRAMDRIFILHADHDQNASTSTVRLAGSSGANPFACIAAGVACLWGPAHGGANEACLKMLQEIGSVKKIPEFIARAKDKNDPFRLMGFGHRVYKNYDPRAKIMQKTCHEVLKELNRQDDPLLDIAIELEHIALNDEYFIEKKLYPNVDFYSGITLKALGFP

SEQ ID NO: 3290 - protein, 154 aa, Glycine max
VGRSLFGGLSNSSPGLFTSSHEMTCKNMFSQQQRTFIQMRTVLKVVDNSGAKKVMCIQALKGKKGARLGDTIIASVKEAHPNGKVKKGKVVYGVVVRAAMQKGRCDGSEVKFDDNAVVLVDKQGQPIGTRVFGPVPHELRQKKHVKILTLAGHN

SEQ ID NO: 3291 - protein, 481 aa, Streptococcus mutans UA159
MPIINKTMLITYADSLGKNLKELNENIENYFGDAVGGVHLLPFFPSTGDRGFAPIDYHEVDSAFGDWDDVKCLGEKYYLMFDFMINHISRQSKYYKDYQEKHEASAYKDLFLNWDKFWPKNRPTQEDVDLIYKRKDRAPKQEIQFADGSVEHLWNTFGEEQIDLDVTKEVTMDFIRSTIENLAANGCDLIRLDAFAYAVKKLDTNDFFVEPEIWTLLDKVRDIAAVSGAEILPEIHEHYTIQFKIADHDYYVYDFALPMVTLYSLYSSKVDRLAKWLKMSPMKQFTTLDTHDGIGVVDVKDILTDEEITYTSNELYKVGANVNRKYSTAEYNNLDIYQINSTYYSALGDDDQKYFLARLIQAFAPGIPQVYYVGFLAGKNDLELLESTKEGRNINRHYYSSEEIAKEVKRPVVKALLNLFTYRNQSAAFDLDGRIEVETPNEATIVIERQNKDGSHIAKAEINLQDMTYRVTENDQTISFE

SEQ ID NO: 3292 - protein, 289 aa, Brassica napus
MSLFDTHNTWAFVFGLMGNVISFSVFLSPVPTFYRVWKKKTTEGFQSLPYVVALFSATLWLYYATQKKDVFLLVTINSFGCFIETIYISIFLAYAPKKARMLTVKLLLLMNFGGFCLILLLCQFLAKGTTRAKIIGGICVGFSVCVFAAPLSIIRTVIKTRSVEYMPFSLSLTLTISAVVWLLYGLALKDIYVAFPNVIGFALGALQMILYVVYKYCKTPPHLGEKEVEAAKLPEVTLDMLKLGTVSSPETITAVRQANKCTCGNDRRAEIEDGQNAKNGKQSSSATAT

SEQ ID NO: 3293 - protein, 428 aa, Mycobacterium tuberculosis H37Rv
MSVVGTPKSAEQIQQEWDTNPRWKDVTRTYSAEDVVALQGSVVEEHTLARRGAEVLWEQLHDLEWVNALGALTGNMAVQQVRAGLKAIYLSGWQVAGDANLSGHTYPDQSLYPANSVPQVVRRINNALQRADQIAKIEGDTSVENWLAPIVADGEAGFGGALNVYELQKALIAAGVAGSHWEDQLASEKKCGHLGGKVLIPTQQHIRTLTSARLAADVADVPTVVIARTDAEAATLITSDVDERDQPFITGERTREGFYRTKNGIEPCIARAKAYAPFADLIWMETGTPDLEAARQFSEAVKAEYPDQMLAYNCSPSFNWKKHLDDATIAKFQKELAAMGFKFQFITLAGFHALNYSMFDLAYGYAQNQMSAYVELQEREFAAEERGYTATKHQREVGAGYFDRIATTVDPNSSTTALTGSTEEGQFH

SEQ ID NO: 3294 - protein, 243 aa, Mesorhizobium loti MAFF303099
MDARQLKVEAARAALAHVSDGMRLGIGTGTTAEEFVRLLADKVATGMTVIGVPTSERTAALCRELGVPLSTLEETPELDLTVDGADEVDPELTLIKGGGGALLREKIVAAASQRMIVIADRSKMVETLGRFPLPIEVNQFGLRATEIAIAKTAADLGLSGPITLRMTGGQAFVTDGGHFILDASFGRIPDTRALSNALHAIPGVVEHGLFIGLASTAIIAGGDGIQTVHAARKPGSSTNHDVA

SEQ ID NO: 3295 - protein, 317 aa, Photorhabdus luminescens subsp. laumondii TTO1
MTDKLTSLRKLTTVVADTGDIAAMKLYQPQDATTNPSLILNAAQIPEYRKLIDEAIAWAREQSDSREQQIVDASDKLAVNIGLEILKLIPGRISTEVDARLSYDSERSVAKAKRLIKLYNEAGISNDRILIKLASTWQGIRAAEQLEKEGINCNLTLLFSFAQARACAEAGVYLISPFVGRILDWYKANSDQKEFAPHEDPGVISVTEIYQYYKQHGYDTVVMGASFRNSGEILELAGCDRLTIAPALLKELSEAQGEVERKLGYAGEIKARPEPLNEAQFYWEHHQDAMATEKLADGIRKFAIDQGKLEKMISDLL

SEQ ID NO: 3296 - protein, 372 aa, Oryza sativa (japonica cultivar-group)
MDDPMLNAVKEEESHGDGGGLEVVAGEDGAAAVAAGLAPGPMEGLHDAGPPPFLTKTYDMVDDAGTDAAVSWSATSNSFVVWDPHAFATVLLPRFFKHNNFSSFVRQLNTYGFRKVDPDRWEFANENFLRGQRHLFKNIKRRKPPSHTASNQQSFGPYLEVGHFGYDAEIDRLKRDKQLLMAEVVKLRQEQQNTKANLKAMEDRLQGTEQRQKQMIAFLARVMKNPEFLKQLMSQNEMRKELQDAISKKRRRRIDQGPEVDDVGTSSSIEQESPALFDPQESVEFLIDGIPSDLENSAMDAGGLVEPQDFDVGASQQQQIGPQGELNDNFWEELLNEGLVGEENDNPVVEDDMNVLSEKMGYLNSNGPTAGE

SEQ ID NO: 3297 - protein, 240 aa, Oryza sativa (japonica cultivar-group)
MGRGKIVIRRIDNSTSRQVTFSKRRNGIFKKAKELAILCDAEVGLMIFSSTGRLYEYSSTSMKSVIDRYGKSKDEQQAVANPNSELKFWQREAASLRQQLHNLQENHRQLMGEDLSGLNVKELQSLENQLEISLRSVRTKKDHVLIDEIHELNRKGSLVHQENMELYKKISLIRQENAELYKKIYETEGPSEVNRDSPTPYNFAVIEKTNVPVQLGLSTLPQHSDAEQSTAPKLGLQLNP

SEQ ID NO: 3298 - protein, 364 aa, Zea mays
MGSTAGDVAAVVDEEACMYAMQLASSSILPMTLKNAIELGLLEVLQKEAGGGKAALAPEEVVARMPAAPGDPAAAAAMVDRMLRLLASYDVVRCQMEDRDGRYERRYSAAPVCKWLTPNEDGVSMAALALMNQDKVLMESWYYLKDAVLDGGIPFNKAYGMTAFEYHGTDPRFNRVFDEGMKNHSVIIAKKLLDFYTGFEGVSTLVDVGGGVGATLHAITSRHPHISGVNFDLPHVISEAPPFPGVRHVGGDMFASVPAGDAILMKWILHDWSDAHCATLLKNCYDALPENGKVIVVECVLPVNTEATPKAQGVFHVDMIMLAHNPGGKERYEREFRELAKGAGFSGFKATYIYANAWAIEFIK

SEQ ID NO: 3299 - protein, 213 aa, Oceanobacillus iheyensis HTE831
MKFFIDTANIDDIRAANSLGILAGVTTNPSLVAKEGVSFHDRLREITKEVSGSVSAEVISEDAEGMIEEGKELAAIAPNITVKVPMTLEGLKAVKVFSELNIKTNVTLIFNANQALLAARAGATYVSPFLGRLDDIGQDGMTLISAIAEIFDRHSVSTEIIAASIRHPLHVTDAALNGAHIATIPYKVLEQLVKHPLTDQGIQKFLDDWNSQK

SEQ ID NO: 3300 - protein, 359 aa, Zea mays
MGSTAGDVAAVVDEEACMYAMQLASSSILPMTLKNAIELGLLEVLQKEAGGGKAALAPEEVVARMPAAPSDPAAAAAMVDRMLRLLASYDVVRCQMEDRDGRYERRYSAAPVCKWLTPNEDGVSMAALALMNQDKVLMESWYYLKDAVLDGGIPFNKAYGMTAFEYHGTDARFNRVFNEGMKNHSVIITKKLLDFYTGFEGVSTLVDVGGGVGATLHAITSRHPHISGVNFDLPHVISEAPPFPGVRHVGGDMFASVPAGDAILMKWILHDWSDAHCATLLKNCYDALPENGKVIVVECVLPVNTEATPKAQGVFHVDMIMLAHNPGGKERYEREFRELAKGAGFSGFKATYIYANAWG

SEQ ID NO: 3301 - protein, 359 aa, Zea mays
MGSTAGDVAAVVDEEACMYAMQLASSSILPMTLKNAIELGLLEVLQKEAGGGKAALAPEEVVARMPAAPSDPAAAAAMVDRMLRLLASYDVVRCQMEDRDGRYERRYSAAPVCKWLTPNEDGVSMAALALMNQDKVLMESWYYLKDAVLDGGIPFNKAYGMTAFEYHGTDARFNRVFNEGMKNHSVIITKKLLDFYTGFEGVSTLVDVGGGVGATLHAITSRHPHISGVNFDLPHVISEAPPFPGVRHVGGDMFASVPAGDAILMKWILHDWSDAHCATLLKNCYDALPENGKVIVVECVLPVNTEATPKAQGVFHVDMIMLAHNPGGKERYEREFRELAKGAGFSGFKATYIYANAWA

SEQ ID NO: 3302 - protein, 469 aa, Fragaria x ananassa
MAFFRTVTKLRSRLGQPPSLRDSVRCLQTQASSDLDLHSQLKELIPEQQERLKKLKKEHGKVQLGTITVDMVIGGMRGMTGLLWETSLLDPDEGIRFRGLSIPECQKVLPGATPGGEPLPEGLLWLLLTGKVPSRSKNMHYPVNNGVVPKFQIMCSRPLMLCLLEHIPMTQFTTGVMALQVQSEFQKAYDKGIPKSRYWEPTYEDSLSLIAQLPVVASYVYRRIYKGGRMIPVDDSLDYGGNFSHLLGFDDHKMQELMRLYVTIHSDHEGGNVSAHTGHLVASALSDPFLSFAAALNGLAGPLHGLANQEVLLWIKSVVDECGENITKDQLKDYVWKTLNSGKVVPGFGHGVLRKTDPRYTCQREFALKHLPDDPLFRLVSKLYDVVPPILTELGKVKNPWPNVDAHSGVLLNHFGLTEARYFTVLFGVSRSIGIGSQLIWDRALGLPLERPKSVTMESLESFCKKAAS

SEQ ID NO: 3303 - protein, 359 aa, Zea mays
MGSTAGDVAAVVDEEACMYAMQLASSSILPMTLKNAIELGLLEVLQKEAGGGKAALAPEEVVARMPAAPGDPAAAAAMVDRMLRLLASYDVVRCQMEDRDGRYERRYSAAPVCKWLTPNEDGVSMAALALMNQDKVLMESWYYLKDAVLDGGIPFNKAYGMTAFEYHGTDSRFNRVFNEGMKNHSVIITKKLLDFYTGFEGVSTLVDVGGGVGATLHAITSRHPHISGVNFDLPHVISEAPPFPGVRHVGGDMFASVPAGDAILMKWILHDWSDAHCATLLKNCYDALPENGKVIVVECVLPVNTEATPKAQGVFHVDMIMLAHNPGGKERYEREFRELAKGAGFSGFKATYIYANAWA

SEQ ID NO: 3304 - protein, 151 aa, Daucus carota
MKRLSSSDSLGALMSICPTTEEGSPGNNHVYSREFQSMLEGLDEEGCVEEMGQISEKKRRLSINQVKALEKNFEVENKLEPERKVKLAQELGLQPRQVAVWFQNRRARWKTKQLERDYGVLKANYDSLKLKNDTLQQENQSLLKEIRELNS

SEQ ID NO: 3305 - protein, 230 aa, Helicobacter hepaticus ATCC 51449
MGLYDRNYTNNAQFANEAVAERDSALVNFVKTTYKFFGASLFFAFIGAMIGFMYLEFVVEYRFFIFIAEIAALFGVMFSRSKPGLNIAMLFIFTTLTGVTITPLVAMVAFKAGAGAVAMAFAMTTIIFGVMSIFGIKTTKDLANMGKMLFIALIVVVVCSIINLFLGSSMFQVLISSAAAILFSLYVAYDTQNIVRGLYTSPVDAAINLYLDFYNIFVSLLSLIGLANRD

SEQ ID NO: 3306 - protein, 264 aa, Aspergillus nidulans FGSC A4
MAALQSLRSTYRMNSGHEIPVLGYGVDSAIMYGNEKACGRAIAASGIDRSQIFFTTKIPPDSMGYNATKRAIDSSLRTAEQEYFDLILLHAPYGGKEARRGSWKALVEAQRAGKTKSIGVSNYGIHHLDELEAYIQSSGDDGVRESKIDVGQYELHPWLDRSEIVEWLQKRNIIVQAYSPLAHGTRMREPLLKKLGYKYGKSPAQIMIRWGLQKGFVPLPKSVTPSRIQENTEVFDFELDEEDMKSLHTGEYSPTDWDPTLDYD

SEQ ID NO: 3307 - protein, 392 aa, Glycine max
MGLRFSSGSAPHSSSLNGSHCSGSARTGSKNVGFSATGKSQFSEIASGSDDREESLGRILKWPNLKVFSFEELISASRRFRYDIQGLVIGKGCFGPVYKGWLDENTLTPAKVGYGMAVAIKMLNQDNFRGFEEWQSEVNFLGRLSHPNLVKLLGYCWDEDELLLVYEFLPKGSLENHLFRRNIEPLSWNTRLKIAIGAARGLAFLHASEKQVIYRDFKASNILLDLNFNAKISDFGLAKLGPSGGQSHVTTRVMGTYGYAAPEYIATGHLYVKSDVYGFGVVLLEILTGMRALDTKRPTGQQNLVEWTKPLLSSKKKLKTIMDAKIVGQYSPKAAFQAAQLTLKCLEHDPKQRPSMKEVLEGLEAIEAIHEKSKESKTRNSYQSPRQRVVRV

SEQ ID NO: 3308 - protein, 158 aa, Streptococcus pneumoniae TIGR4
MTSLYDFSVLNQNNQATPLDSYRGKVLLIVNTATGCGLTPQYQGLQELYERYQDQGFEILDFPCNQFMGQAPGSAEEINAFCSLHFQTTFPRFAKIKVNGKEADPLYVWLQDQKSGPLGKRVEWNFAKFLIGRDGQVFERFSSKTDPKQIEEAIQTLL

SEQ ID NO: 3309 - protein, 399 aa, Zea mays
MLLSSHASAHASEKKIHARRSVFLAGCPGPVRNSSFLHTYSRKLLVRACSTCTYALVNRRPRAPLRPDTSPLPRTGPWRESAGACQSGKPRPPLVGPSSLRLLCWSAPPNSTMPAAASHPSPTGPLVARPPASSSPPAGRPASQTLARRAREKLDAMFGYRKADPDLEAGGSSLLYPGMTESPELRWAFVRKIYVILTVQLAMTAAVSAFVVKVPAVSNFFVSSNAGIALYIFLIVLPFIVLCPLHYYHQKHPVNLLLLGLFTVAISFAVGMTCAFTSGKIILEAAILTAVVVNSLTAYTFWAAKRGHDFNFLGPFLIAAIMVLMVFSLIQIFFPLGKISVMIYGGLASLIFCGYIIYDTDNIIKRHTYDQYIWAAVSLYLDVINLFLSLLQLLRAADS

SEQ ID NO: 3310 - protein, 271 aa, Mycoplasma pneumoniae M129
MDTFTSAVKINWFPGHMKKTHDQLKKLASSLDGVIEVVDARAPTLTQNPEITAYFTNKPKLTLALKADLAQTVANSNILWGTLKQGLQLKRLVIKKLQTLFQAKKNQLKAKGLLVHQFRLAVIGMPNVGKSSLINLLLNKNHLQVANRAGVTKSMSWNQISSEFYLSDTPGVFFKRIDEMAVGYKLVLTNVIKREVVPLEDVGAFAFCYLSKHYPQLLPYEGTDFTEFLHKFAISRKLLQKSNQLNINLACELFVSELINGKYGKLSFELD

SEQ ID NO: 3311 - protein, 422 aa, Pseudomonas syringae pv. tomato str. DC3000
MSDLKTAALEYHANPRPGKLSVELTKPTATARDLALAYSPGVAEPVREIARDPELAYKYTGKGNLVAVISDGTAILGLGDLGPLASKPVMEGKGVLFKRFAGIDVFDIEVDSESPQAFIDTVKRISITFGGINLEDIKAPECFEIEKALIEQCDIPVFHDDQHGTAIVTAAGMINALEIVGKSLESAKIVCLGAGAAAISCMKLLVSMGAKIENIFMVDRTGVIHSGRTDLNQYKAVFAHATEKRSLTDALDGADVFVGLSGPNLLSAENLKLMAKDPIVFACSNPDPEISPELAHATRSDVIMATGRSDYPNQVNNVLGFPFIFRGALDVRAKRINEEMKIAAANALRELAKLPVPQEVCDAYGGIKLEFGREYIIPKPMDTRLLGLIADAVAKAAIESGVATLPYPKHYPLTSVDDVFNG

SEQ ID NO: 3312 - protein, 494 aa, Burkholderia cepacia R18194
MKSESEHPGLAAALAWCRSGAKQHFIDGKWVPAASGRTMETLNPATADVLAHIAEGDKADVDLAVAAARRAFESSGWRGMSPHARTAVLLRLADAIEQHADELAALETLDNGMPAWFSAAVVKMTVDTFRYYAGWPTKILGTTVPTDPSAFIYTLREPIGVCGQINPWNVPLLLAGVKFGPALACGNTIVAKPSELASLTCLRLVEIFHEAGLPPGVMNVVTGYGQTVGAAISEHPGIDKVAFTGSTAIGKQILLASAGNLKRVTLELGGKSPHIVFPDADLDKALAAAVNGFTRNSGQICSSGTRLFVHRSIHDEFANEVAKLAARLKVGNPFDADTKLGPLISSKQRDRVMSYVAAGNDEGATLLTGGRQACDAGYYVEPTVFSGVSNAMRIAQEEIFGPVVCVIPFDTEEDVIAQGNDSTYGLAGGIWTRDIGRAHRIAAALKGGRIWINTFGETDPVMPFGGYKQSGLGREFGAESIQTYTEAKSVMLRY

SEQ ID NO: 3313 - protein, 484 aa, Sinorhizobium meliloti
MNLKDPSLFRQAALVGETWIEADPKNAIEVNNPATGEIIGRVPKLGAADTRTAIEAAARVQKEWAARTAKERSAVLRRWFELMIENKDDLGRILTMEQGKPLAEATGEIVYGASFIEWFAEEARRVYGDLVPGHQKDKRILVMKQPIGVVAAITPWNFPNAMITRKAGPALAAGCAMVLKPAAQTPFSAIAIAVLAERAGMPKGLFSVITGSAREIGAEMTSNPTVRKLTFTGSTEVGAELYRQSAATIKKLGLELGGNAPFIVFDDADLDAAVEGALIAKFRNNGQTCVCANRIYVQDGVYEAFSDKLAQAVAKLKTGNGMEDGVILGPLIDQPALKKVEEHVADALAKGARVVQGGRRHSLGGTFYEATVLADVTQAMAVAREETFGPVAPLFRFKDESDVIAQANDTEFGLASYFYAKDLARVFRVAEALEYGMVGVNTGLISTAEAPFGGVKLSGLGREGSKYGIEEFMEIKYVCLGGIA

SEQ ID NO: 3314 - protein, 340 aa, Actinoplanes sp. A40644
MEAVTIVGPGRLKTASVPVPEPLPGTVLVAPRYAGICGTDLELFHGTSSYLADGRAATPLIFGHEWCGRVVSADPGTGWRPGDRVAGQTMVPCGGCARCRAGRRGLCRRMREVGLYGLDGAAAQYIRVPGHALARLPDTVPDRTAALVEPAVTVVESFARTGCGFDDRVAVLGTGTIGLLAVQFARRVAGRVDAVGVDPAGLALAVRCGADRAIPVGETTAGSYSLVVEASGAPEAFAHALDLVEPGGRVGVIGVANEPTAGVVAGSVALRGVSVLGIQHGLDHYDRTIELFATGALTADPLIGATFPAGAAAEAFAFMESARSGPPKVLLDLTEWKGDR

SEQ ID NO: 3315 - protein, 74 aa, Triticum aestivum
MAFVPGCVQCGTRSNPCRCKVVGPTLGFVAFVVTGVVEWPLGAAVYLFRRRKGRRIMGHPARVVYPRVTTAIPI

SEQ ID NO: 3316 - protein, 106 aa, uncultured Rickettsia sp.
MLKEIGSSEYIPKYIAKAKDKNDPFRLMGFGHRVYKNYDPRAAVLKETCKEVLKELRQLDNNPLLQIAIELEAIALKDEYFIERKLYPNVDFYSGIIYKAMGIPSQ

SEQ ID NO: 3317 - protein, 146 aa, uncultured Rickettsia sp.
ANEAVINMLKEIGSSEYIPKYIAKAKDKNDPFRLMGFGHRVYKNYDPRAAVLKETCKEVLKELRQLDNNPLLQIAIELEAIALKDEYFIERKLYPNVDFYSGIIYKAMGIPSQMFTVLFAIARTVGWMAQWKEMHEDPEQKISRPR

SEQ ID NO: 3318 - protein, 499 aa, Pseudomonas syringae pv. syringae B728a
MQMTTLTRADWEQRARNLKIEGRAFIQGEYTAASSGETFDCISPVDGRMLAKVASCDAADAQRAVDSARSAFNSGVWSRLAPAKRKATMIRFAGLLEQNAEELALLETLDMGKPISDSLGVDIPGGARALSWSGEAIDKLYDEVAATPHDQLGLVTREPVGVVAAIVPWNFPLMMACWKLGPALSTGNSVILKPSEKSPLTAIRIAQLAIEAGIPAGVLNVLPGYGHTVGKALALHMDVDTVVFTGSTKIAKQLMIYAGESNMKRVWLEAGGKSPNIVFADAPDLQAAASAAASAIAFNQGEVCTAGSRLLVERSIKDRFLPMVIEALSAWKPGNPLDPATTVGALVDTQQMNTVLSYIEAGHSDGAKLVAGGKRILQETGGTYVEPTIFDGVNNAMKIAQEEIFGPVLSVLTFDTAEEAIQIANDTQYGLAAAVWTANISKAHLTAKALRAGSVWVNQYDGGDMTAPFGGFKQSGNGRDKSLHAFDKYTELKSTWIKL

SEQ ID NO: 3319 - protein, 174 aa, Enterococcus faecium
LYLGNRHARVEGETYYEFIDQFVQSATELFPELLLHWEDFGRGNAAAILEKYEDQITTFNDDIQGTGIVVLAGVLGGLNISGEQLKDQIILTFGAGTAGVGIANILLDEMIRQGVPEEEARQHFYQVDKQGLLFEDTEGLTPGQIPFARKRSEFINADELTNLEAVVKAIHPTI

SEQ ID NO: 3320 - protein, 49 aa, Oryza sativa (japonica cultivar-group)
MAGTANCIDILIAIILPPLGVFLKFGCGVIMEYLIKLLSVTLVSSMPFA

SEQ ID NO: 3321 - protein, 1150 aa, Gibberella zeae PH-1
MGTRTASSAVADASLRGPGRTHSTRSSRSSRVPSFPPPSPSASAAPAAPAPATSTGTGANYNQSHTRQLSHSHSQSQSRSQSQSLSQAQSQAYASRSHSHSHSHSHSRSASNAANSHPPPHHSQHQRTSSSARTTSQNDHESSRLAANPKHHRTSSKDDRHPPPTRGPDPSRAHRRSSSSRSKNNNHNPPPEMAPSASAPSNGTSHASAAPPTNHADAPPRASTSKHARSRTVIPTQSGKWMLGKTIGAGSMGKVKLARKEDGSEQVACKIIPRGSTDDGHQSRADKERADQSKEIRTAREAAISTLLNHPHICALHDVVRTNHHWYMLFEYVNGGQMLDYIISHGKLKEKQARKFSRQIASALDYLHRNSIVHRDLKIENILISKTGDIKIIDFGLSNLFAPRGHLKTFCGSLYFAAPELLQARAYTGPEVDVWSFGIVLYVLVCGKVPFDDQSMPALHAKIKRGLVDYPAWLSSECKHLLSRMLVTDPKQRATMQEVLTHPWMAKGFNGPPDNYLPNREPLTTPLEPEVILAMQGFNFGTPESINAQLTKIIESDEYQRAIKLYQREKELPQPTKDAEKKRAFGFDFYKRRNSGNSRDTLSAPSSEALQMGNDPMNAFSPLLSVYYLVKEKQDRDHADMVPPAASQSREKEKEKEREREREREEKREREREREKEREREREREREAREKEKAREPELPEIAAPQAAHTNSSAYEMPGEKPTGGRSRPRARTHGEDDMPELPKQTPAPPPEPRVEQIQKKEGTAAGILRRFSTRKRREPERLDRDRSHPPVVQVHSPAEPSPLAPRKSFSIRRGRRDREDASDTQIRSSSNQGQHGELLSPPMSSGGNREGRRGSALGRSTSVNSAEMRRRKDHPATNESDQSVGNEESSSSRRAHGHSRSVSLRAKSIGHARRESIQQRRQRRDAAQEANVPEETDQELEQSGVSTERLDDTELSKPVFLKGLFSVSTTSGKSVPAIRTDIKRVLKQLNVDYTEIKGGFRCRHSPSIDLNKVQDPPMSPGNTPGHKRRFSFGGLIRGDDRDRDDFRDSDRPPTTPRTPGRSDRDRSFSNSETSFDSNSGRNAGPSRQVPGETSTQVQSDLGGSMVLEFEIFIVKVPLLSLHGIQFKRMAGNTWQYKSMADHILRELRL

SEQ ID NO: 3322 - protein, 420 aa, Listeria monocytogenes EGD-e
MSQKIQVENGVLKTPNNPVIPFIEGDGTGPDIWAAAKRVLDAAVKKAYNGEKEIAWKEVLAGEKAFKQTGEWLPQATLDTIDEYLIAIKGPLTTPIGGGIRSLNVALRQELDLYVCLRPVRYFKGVPSPVKRPEDTDMVIFRENTEDIYAGIEFKEGSIESKKLIDFLKSEFGVDKIRFPETSGIGIKPISKEGTERLVRSAIEYAIKEGRKSLTLVHKGNIMKFTEGAFKNWGYDLCEREYGDKVFTWNEYDRIKEAEGTEVADAKQNEALAAGKILVKDSIADIFLQQILTRPAEFDVVATMNLNGDYISDALAAQVGGIGIAPGANINYLTGHAIFEATHGTAPKYAGLDKVNPSSVILSGTLLLEHIGWGEAAALINQSMEKTIAAKTVTYDFARLMDGATEVKCSEFADELIKNF

SEQ ID NO: 3323 - protein, 373 aa, Listeria monocytogenes EGD-e
MTLSKGLENVYVAETSISSIIDDMLTYVGYGIDDLMENNASFEEVIYLLWHLRLPNKDEFKKFKREIQENMAVSETIITSLRMQNHQKLHPMSVLRTTVSMLGVFDTEAELDDGEAVYRKGLRLQAKMPTIVAAFSRIRRGLDPIPPREDLNMAANFLYMITGEEADELSVEAMNKALVLHADHEFNASTFTARVCVATLSDVYSGVTAAIGALKGPLHGGANERVFDMLEEIDQAGDVRNYIQEKIDTKQKIMGFGHRVYRGGDPRAQHLREMSRKLTAEKGEEKWFDISLQVEESVWELKHLKPNVDFYSASVYHALGIDRDLFTLVFSVSRVSGWLAHIFEQYRDNRLIRPRAIYVGPENRSYLPVEERI

SEQ ID NO: 3324 - protein, 470 aa, Lactobacillus delbrueckii
MVLGGVREQGKNMFAVQVNDEIFVLDAGLKYPDSSLFGIDVVIPDMEFFKQYGDQVVGIFLTHGHADSIGALPYILRDWDIPVFGSKLTIELAKIDVQRENKRRNNQLFNVIDADTEIDFKNASVSFFHTTHSVPDSLGIVIHAPQGQIVYTGDFKFDPSARPAYRTDMARLAEIAGNGVLALLPDSSNAEAVLPNASENEVGTYITNVFRNAKGRIIVAGKASNLNRVQQVFNAAAATGRRVLLTGRDVAKIVHTAMKLGYLEVPDGLLMKAKELKDVPDEKTVILETGRMGEPLQSLQKMANNRHRMITIHEGDLVFIATTPSHAVETTVAITSDMVYRAGGTVIELGRNMHTSGHATGRDLQTLIDLLKPRILVPVIGDYRLLEAVKDLAVETGMDPDDVYITQNGDCLEYDTKRGQFFRGDAVPGEDTMIDGSGVGDVGNIVLRDREVLSDDGIFIAVVTIDRKKK

SEQ ID NO: 3325 - protein, 485 aa, Burkholderia fungorum LB400
MRIDHLINGKSGAAKDYFETVNPATQEVLAEVARGGAEEVDAAVRAAKDAFPAWAARPAAERAKLVRKLGELIAKNVPEISETETKDTGQTISQTRKQLVPRAADNFSYFAEMCTRVDGHTYPTDTHLNYTLFHPVGVCALISPWNVPFMTATWKVAPCLAFGNTAVLKMSELSPLTAAMLGNLALEAGIPAGVLNVVHGFGKETGEPLVAHPDVHAVSFTGSTATGNRIVQTAGLKKFSMELGGKSPFVIFDDADFERALDAAVFMIFSNNGERCTAGSRILVQRGIYARFAERFIERAKRLSVGDPLSDSTIVGPMISQGHLAKVRSYIELGPKEGATLACGGLDLPELPDALRKGNFVQPTVFVDVDNRMRIAQEEIFGPVACLIPFDDEADAIELANDISYGLSSYIWTENTGRALRVAAAVAAGMCFVNSQNVRDLRQPFGGTKASGVGREGGTWSYEVFLEPKNVCVSLGSHHIPRWGV

SEQ ID NO: 3326 - protein, 322 aa, Candida tenuis
MSASIPDIKLSSGHLMPSIGFGCWKLANATAGEQVYQAIKAGYRLFDGAEDYGNEKEVGDGVKRAIDEGLVKREEIFLTSKLWNNYHDPKNVETALNKTLADLKVDYVDLFLIHFPIAFKFVPIEEKYPPGFYCGDGNNFVYEDVPILETWKALEKLVAAGKIKSIGVSNFPGALLLDLLRGATIKPAVLQVEHHPYLQQPKLIEFAQKAGVTITAYSSFGPQSFVEMNQGRALNTPTLFAHDTIKAIAAKYNKTPAEVLLRWAAQRGIAVIPKSNLPERLVQNRSFNTFDLTKEDFEEIAKLDIGLRFNDPWDWDNIPIFV

SEQ ID NO: 3327 - protein, 182 aa, Arabidopsis thaliana
MASSMLSSATMVASPAQATMVAPFNGLKSSAAFPATRKANNDITSITSNGGRVNCMQMQVWPPIGKKKFETLSYLPDLTDSELAKEVDYLIRNKWIPCVEFELEHGFVYREHGNSPGYYDGRYWTMWKLPLFGCTDSAQVLKEVEECKKEYPNAFIRIIGFDNTRQVQCISFVAYKPPSFTG

SEQ ID NO: 3328 - protein, 201 aa, Chlamydomonas reinhardtii
  misc_feature (75)..(75): Xaa can be any naturally occurring amino acid
MLLTRKNVAVRPARAARRDVRAMSLLGNLFGGGSKPTSSTSNFHQLSALDIDKKNVDFKSLNNRVVLVVNVASKXGLTAANYKEFATLLGKYPATDLTIVAFPCNQFGGQEPGTNAEIKAFASARGFSGAGALLMDKVDVNGANASPVYNFLKVAAGDTSDIGWNFGKFLVRPDGTVFGRYAPTTGPLSLEKYIVELINSR

SEQ ID NO: 3329 - protein, 318 aa, Pseudomonas aeruginosa UCBPP-PA14
MTWPAEAPLMSPPQRLRAGLLRGCLRLLFRGLVRPPMPVALQRGVLRGLSLATLGAGGVVRERRSLAGVPCEWLRPRGVEARRRVLYLHGGAYLIGSPATHRAITTHLARRCAAEVCAVDYRRAPEHPFPAARDDALAVYLALLEAGHSPRQLLLAGDSAGGHLALSLALELKARGLPLPAGLLLFSPWTDLSCQRLHTPEAGDPLLSRAWLESAVRLLLPADAEPGSAALSPLHADLAGLPPLLVQVGEDELLRDDSLRLAQRAGEQGVAVRLQRYAGCWHVFQAHAGVLASADRALDEAAAFVVECSAEGGQCRTS

SEQ ID NO: 3330 - protein, 367 aa, Triticum aestivum
  misc_feature (192)..(192): Xaa can be any naturally occurring amino acid
  misc_feature (202)..(202): Xaa can be any naturally occurring amino acid
  misc_feature (228)..(228): Xaa can be any naturally occurring amino acid
MGKGGKGEAAAAVAGEGENMAAWLVAKNTLKIMPFKLPPLGPYDVRVRMKAVGICGSDVHYLKEMRIAHFVVKEPMVIGHECAGIIEEVGDGVKHLAVGDRVALEPGISCWRCRHCKGGRYNLCDDMKFFATPPYHGSLADQIVHPGDLCFKLPDNVSLEEGAMCEPLSVGVHACRRADVGAEKSVLIMGAXGPIGLVTMLXARAFGAPRIVIADVDDHRLSVAKSLXGADAVVKVSGNTEDLAGEIERIQAAMGGDIDVSLDCAGFSKTMSTALEATRPGGRVCLVGMGHNEMTVPLTSAAIREVDVVGIFRYKDTWPLCLEFLRSGKIDVKPLITHRFGFSQGEVEEAFEVSARGRDAIKVMFNL

SEQ ID NO: 3331 - protein, 392 aa, Corynebacterium melassecola
MTIDLQRSTQNLTHEEIFEAHEGGKLSISSTRPLRDMRDLSLAYTPGVAQVCEAIKEDPEVARTHTGIGNTVAVISDGTAVLGLGDIGPQASLPVMEGKAQLFSSFAGLKAIPIVLDVHDVDALVETIAAIAPSFGAINLEDISAPRCFEVERRLIERLDIPVMHDDQHGTAVVILAALRNSLKLLDRKIEDLKIVISGAGAAGVAAVDMLTNAGATDIVVLDSRGIIHDSREDLSPVKDALAEKTNPRGISGGINEAFTGADLFIGVSGGNIGEDALKLMAPQPILFTLANPTPEIDPELSQKYGAIVATGRSDLPNQINNVLAFPGIFAGALAAKAKKITPEMKLAAAEAIADIAAEDLEVGRIVPTALDPRVAPAVKAAVQAVAEAQNA

SEQ ID NO: 3332 - protein, 208 aa, Cynodon dactylon
MAAKSSEKGSNNGKESSMADVYRGELTPLQRHVAFFDRNKDGVIYPAETYEGFRAIGAGVPLSAVGAAFVNGFLGPKTIPENEKVGPFKFPIYVKNILKGKHGSDSGVYDAHGRFVPEKFEEIFKKHAHTRPDALTAKELQELLQANREPKDFRGWLGGFTEWKVLYALCKDKDGFLHKDTVKAVYDGSLFDKMEQERKAKKESAKKK

SEQ ID NO: 3333 - protein, 441 aa, Arabidopsis thaliana
MDKTSQLPDELLVKVLSFLPTKDAVRTSLLSMRWKSLWMWLPKLEYDFRHYSVSEGQGLARFITLSLLGHKAPAIESLSLKLRYGAIGSIKPEDIYLWVSLAVHDSNVRELSLKLCTFAERPTKLPKSLYKCKSIVILKLKDEILVDVPRKVCLPSLKTLFLGRVTYSDEDSLHRLLSNCPVLEDLVVERDRIDNLGKLSVVVKSLQRLTLKMSCPCHLDGIMMNTPSLKYLKVTDERQESDSDNESDSDSPRYFYDFEDMPKLEEADFVLTFQNIKKFFKFVTSIKRLSLCLGVYTEESLYHEGLVFNQLEQLKICSCDSDWSILLSRLLESSPNLRELEAYVIEDHPDRRVDLPNQWGNQLNCVPKCLLSSLETFKWSEMYGLLQNQMDVAKYILRNARCLKSATIFFPTTYAKETRDEMIEELSLSFQGPETCQVFFH

SEQ ID NO: 3334 - protein, 125 aa, Zea mays
  misc_feature (67)..(67): Xaa can be any naturally occurring amino acid
MSFAAGSSEDQLNSSPLAMDRRPARTRSDPPHSSRGAVHDAVAVEQKQHRRPQGTGAPPVYFTAELXLACLFVAVSLALLPLVLPPLSPPPSLLLLVPVGLLAVLLALAFVPLDAHSHLAVGSSR

SEQ ID NO: 3335 - protein, 109 aa, Castanea sativa
GTGASCADVLRVMQHEPELMFETLNHRAEECCNGNGNGISALANSLAKSFRNMPYLVANSAASSSCSLTAAAMNNNGFYYCNEDNEYNAAADSATTAGEDEWSYCYACN

SEQ ID NO: 3336 - protein, 375 aa, Mycobacterium avium subsp. paratuberculosis str. k10
MSTLEDNQPRIHKGLAGVVVDTTAISKVVPETNSLTYRGYAVQDLAAHCSLEQVAYLLWYGELPDDQQLALFSQRERAARRLNRSQLSLLHKLPDTCHPMDVVRTFISSMGAEDPDEDDNSASANHAKALRMFAVLPTIVAADMRRRRGLEPIAPHSHMSYAQNFLHMCFGDVPEQVIVDAFEQSMILYAEHSFNASTFAARVVTSTQSDIYSAVTAAIGALKGSLHGGANEAVMHDMLEIGTPDRAAEWLQGKLSRKEKVMGFGHRVYKNGDSRVPTMKQALQRVAAVRDGQKWLDIYQILERGMARANGIKPNLDFPTGPAYYLMGFDIGAFTPIFVMSRITGWTAHIIEQTASNALIRPLSEYVGPPQRALS

SEQ ID NO: 3337 - protein, 194 aa, Ustilago maydis 521
MSELRRKLVIVGDGACGKTCLLIVFSKGTFPEVYVPTVFENYVADVEVDGRHVELALWDTAGQEDYDRLRPLSYPDSHVILICFAVDSPDSLDNVQEKWISEVLHFCHSLPIILVGCKKDLRHDPKIVDELRKTSQRPVSAEEGMAVAQKIGAVRYLECSAKTGEGVREVFEHATRAALVQRSRGSRKKGCTVL

SEQ ID NO: 3338 - protein, 270 aa, Methylobacillus flagellatus KT
MNELHVSRENFIIPGPEGTIPVRLYRRAQAGGDVPLVLYFHGGGFNAGCLDDADFPAGFIAYHCPAVVLSVGYALAPQHPFPAAPEDAYAATRWAARNTCRLNVTAKLLVVAGDDAGGSIAAGLSMMARDRGEFSIAAQVLIAPMLDPSMTLLGDAAGLKSELTAAQCAQRYRQYLPKCTQRMHPYAAPLESLRLAGLPAAMIATAECDVLHIEAEKYANVLIQAGVPTQVSRFSGVQHAELLAHQPMLREVVEFLRRQAMHAGLPIDSG

SEQ ID NO: 3339 - protein, 247 aa, Glycine max
MASSLRISRLLSRSFLSASTTTPLFSRGGSGALGAGLSKFSTAAAIEEPIKPPLKVEHTQLLIDGKFVDAATGKTFPTLDPRTGDVISHVAEGDHEDVDRAVAAARKAFDRGPWPKMTAYERQRILLRAADLFEKHNDELAALETWDNGKPYEQSAQIEIPMLVRLFRYYAGWADKIHGLTVPADGPYHVQTLHEPIGVAGQIIPWNFPLVMFAWKVGPALACGNTIVLKTAEQTPLSALYASKLLH

SEQ ID NO: 3340 - protein, 189 aa, Triticum aestivum
MASFYAAIGFILPFLLAIALPQSTGSPAVAPSTTGSLSIEDACKQTAKLYDLCMATLSPDRSSLTADAVGLTRAAILAVQKNASETATYLTNIDEDENVNKTAELQQCLEDCGERYEAAVEQLADPTIALDMGAYDESQVLVSAGQAEGKLGHEGGQDTPEHQSILMARNTEVDQLCNITLAIAKLIPR

SEQ ID NO: 3341 - protein, 314 aa, Aspergillus flavus
METPFAAPWHQFVEDLGQTPCLPGKDLDSILAGWGQLAGTLATRYGFPPPDESVTTEDVQLDGLWLRCYTPPNATGQEPVGLYFHGGGWVMGGVNEEDGFCRVISRQCQMRLVSVEYRKAPETRYPGALNDGVSAALWALSRYENQPLILMGTSAGGNLAFGTALRLIDQDMADKVSGVVALAPITVHPDAVPEHLKEQYTAYEENAELTVNSRAAMQVFFDCYKAPVDDVYTSCLLHPRLLALPKVYIAELGLDTLRDDARLMKGALDTAKVPVMYDAYPGYPHCSFMFPFKSLGEHQRTFFGGVAKAVRWMS

SEQ ID NO: 3342 - protein, 294 aa, Saccharomyces cerevisiae
MKTLVHVASVEKGRSYEDFQKVYNAIALKLREDDEYDNYIGYGPVLVRLAWHISGTWDKHDNTGGSYGGTYRFKKEFNDPSNAGLQNGFKFLEPIHKEFPWISSGDLFSLGGVTAVQEMQGPKIPWRCGRVDTPEDTTPDNGRLPDADKDAGYVRTFFQRLNMNDREVVALMGAHALGKTHLKNSGYEGPWGAANNVFTNEGYLNLLNEDWKLEKNDANNEQWDSKSGYMMLPTDYSLIQDPKYLSIVKEYANDQDKFFKDFSKAFEKLLENGITFPKDAPSPFIFKTLEEQGL

SEQ ID NO: 3343 - protein, 163 aa, Candida albicans SC5314
MSEEKVRVPETEEERQERLAKQEEIDGRSVYVGNVDYQSTPEQLEEFFHGVGVIERVTILFDRFSGLPKGYAYIEFEQTESVQKAIDELHGKEFRGRELRVTAKRTNLPGFRRGRGRGGFRARGRGRGGFRGRGRGRGGFNSRGTRNGDSEQADGDAENEETD

SEQ ID NO: 3344 - protein, 83 aa, Brassica napus
MDIISHLSDDLLLRILSFVPTKDVVATSLLSKRWECLWTSVSKLGYDDSYHHTGDYKNFSQFVYRSLLSNKAPVLDKLHLKLG

SEQ ID NO: 3345 - protein, 164 aa, Triticum aestivum
  misc_feature (32)..(32): Xaa can be any naturally occurring amino acid
  misc_feature (118)..(118): Xaa can be any naturally occurring amino acid
MEGRMFGLETPLMTALQHLLDVPDGEAGGPGXNAAGEKQGPTRAYVRDARAMAATPADVKELPGAYAFVVDMPGLGSGDIKVQVEDERVLVISGERRREEKEDAKYLRMERRMGKMMXRKFVLPENADMEKISAVCRDGVLTVSLEKLPPPETKKPKTIQVQVA

SEQ ID NO: 3346 - protein, 238 aa, Triticum aestivum
  misc_feature (49)..(49): Xaa can be any naturally occurring amino acid
HTQAHSIQGSRRSRFEKPAWASAEEEDLPATDMPRVVGVLSALLERVTXRNDAATGPGALEPASGSAFRAMTKPGISVRAYMARIARFAGCSPACFVVGYIYLDRLLRRRRALAVDSYSVHRLLITTVLSAVKFMDDICYNNAYFAKVGGISLPEMNYLEVDFLFGVGFELNVSPETFGHYCAILQSEMLCLELEPEPLLPPNAAAPGSAMLCCLSEDDGTSATTSSSSSTQQQQLAA

SEQ ID NO: 3347 - protein, 338 aa, Sinorhizobium meliloti
MKAVVCSEPGRLALVARSGPEAPPPGSVRLAVSRVGICGTDYHIFEGKHPFLEYPRVMGHEISARVIEGGPGTRLAPGTLVVVNPYLSCGECIACRKGKPNCCTAIRVLGVHTDGAFCEEIVMPEQNLYPAEGLSPEAAAAVEFLAIGAHAVRRSAAGRGVRSLVIGAGPIGLGTAVFSRIAGHDVRLLDTSEERLAFATEKLGFSPGILAGDDAALAQATGGDGFDVVFDATGNAQSMERAFGHVAHGGTLVFVSVVKEEIRFSDPEFHKREMTLVASRNATREDFDHVIQSLAAGLVPIEALVTHRTTLEDLVRDLPRWVHDKSGLVKAVVAVSAG

SEQ ID NO: 3348 - protein, 386 aa, Aspergillus flavus
MTGLDMETIFAKIKEEYSRTDDVGKRKIQGHIRELQVGFYSDWDVVMRLSSGPLQVALAKVGIDLGIFRSLKESDTPITLAEFVKKTGASPRLLGRILRTQAAFGLIKETGPQEYTSSAFTDVFANPAAAGAVVQLLDISGPCTQILPDFLAERHYQDITSNKDCVFQKAFDSDLTMFEWMPQHPKHMESLGHLMALERPVSWVDHFPVLEELGDFPAPDKVLMVDIGGGFGQQSKALRAKFPNIPGRVIVQDIPQTLANAQPAAGVEFMEHNFFEPQPIRNAKFYYLRHVFHDWPDEQCVLILKQIIPVMGPESEILIDEMVIPSTGVPWQAAFTDLLMMNSLGGVERTRAEWDDLMKQAGLEIIQSKVYDSKEQTILVAVPRRT

SEQ ID NO: 3349 - protein, 492 aa, Aspergillus nidulans FGSC A4
MSLASLKRKDLFQQHGLIGDKWVSSSGGGTFTVTNPATLETLATLPEMNGADTESAITAAHTAFQSFRKTTARQRATWLRKWHALCVENIDDLALILTVENGKTLAEAKGEVLYAASFLEWFAGEAERVHGEVVPASNANQRILTVKQPLGVAACLAPWNFPIAMITRKVGAALAAGCTTVWKPAGETPLSALAQAVLAREAGFPSGTINVITTLNSVAEVGAALCNSKLVRKLSFTGSTRIGKLLASQCSQNLTKLSLELGGNSPFIVFDDAKVETAVEACILAKFRNSGQTCVTANRIFVQEGIYDRFSAALVEKVKALKVGNGVEEGVIIGPLTHERAVEKAVAHIKDAQEKGASLLLGGSPCQPNNLPGYFLEPTVLGKMSTEALTTREEVFAPVVALYPFKTEEEVLAKANDCDVGLGSYVITESMPRMWRVAESLEVGMVGINMGTLSAAESPFGGVKESGYGREGGRQGIEEYMTVKSILMNVAA

SEQ ID NO: 3350 - protein, 343 aa, Sinorhizobium meliloti 1021
MKAIVIHTAKDLRVEECAVEKPGPGEVEIRLAAGGICGSDLHYYNHGGFGTVRLKEPMILGHEVSGHVAALGEGVSDLAIGDLVAVSPSRPCGACDYCLKGLPNHCFHMRFYGSAMPFPHIQGAFRERLVAKASQCVKAEGLSAGEAAMAEPLSVTLHATRRAGEMLGKRVLVTGCGPIGTLSILAARRAGAAEIVAADLSERALGFARAVGADRTVNLSEDRDGLVPFSENKGTFDVLYECSGAQPALVAGIQALRPRGVIVQLGLGGDMALPMMAITAKELDLRGSFRFHEEFATAVKLMQGGLIDVKPLITHTLPLGEALKAFEIASDKGQSMKTQIAFA

SEQ ID NO: 3351 - protein, 234 aa, Arabidopsis thaliana
MGRGKIVIRRIDNSTSRQVTFSKRRSGLLKKAKELSILCDAEVGVIIFSSTGKLYDYASNSSMKTIIERYNRVKEEQHQLLNHASEIKFWQREVASLQQQLQHLQECHRKLVGEELSGMNANDLQNLEDQLVTSLKGVRLKKDQLMTNEIRELNRKGQIIQKENHELQNIVDIMRKENIKLQKKVHGRTNVIEGNSSVDPISNGTTTYAPPQLQLIQLQPAPREKSIRLGLQLS

SEQ ID NO: 3352 - protein, 106 aa, uncultured Rickettsia sp.
MLKEIGSSENIPKYIAKAKDKNDPFRLMGFGHRVYKNYDPRATVLKETCKEVLKELEQLENNPLLQIAIELEAIALKDEYFIERKLYPNVDFYSGIIYKAMGIPSQ

SEQ ID NO: 3353 - protein, 392 aa, Pseudomonas putida KT2440
MLNAEQRAIIKATVPLLESGGEALTTHFYKMMLSEYPEVRPLFNQAHQASGDQPRALANGVLMYARHIDQLEQLGGLVGQIINKHVALQILPEHYPIVGSCLLRAIEEVLGKDIATPAVIDAWGAAYGQLADILIGAEENLYKEKEEAEGGWRGTREFRLVRREQESSEIVSFYFAPVDGMPVLKAEPGQYIGLKLDIDGAEQRRNYSLSALCDGKEYRISVKREAGGKVSNYLHDELKVGDTLQLFPPAGDFTLAASDKPLVLISGGVGITPTLAMLQAALQTRREVHFIHCARNGAVHAFRDWIDGLAARHPQLKRFYCYAEPEGGAAADAVGLLSEDLLAEWLPQERDVDAYFLGPKGFMAAVKRQLKGLGVPEQQSRYEFFGPAAALE

SEQ ID NO: 3354 - protein, 106 aa, uncultured Rickettsia sp.
MLKEIGSSENIPKYIAKAKDKNDPFRLIGFGHRVYKNYDPRAAVLKETCKEVLKELGQLENNPLLQIAIELEAIALKDEYFIERKLYPNVDFYSGIIYKAMGIPSQ

SEQ ID NO: 3355 - protein, 319 aa, Listeria monocytogenes EGD-e
MKRIAILTSGGDAPGMNAATRAVVRKAIYEGLEVYGINYGFLGLVNGDIRKLELGSVGDLLHRGGTFLYSARYPEFATEEGQLKGIEQLKKHQIDGLVVIGGDGSYHGAEALTKRGFPTIGIPGTIDNDISGTDFTIGFDTALNTVLDALDKIRDTATSHERTFIIEVMGRDAGDIALWSGLAGGAEAIIVPEESFNMDDVVDRLNKGRERGKKHSIIVVAEGVMSGNEFAKQLAEYGDYHARVTVLGHVQRGGSPTAFDRVLASRLGARSVELLLENRGGLAVGIRENRIVENDISEILKEKHTLDQKLFDLASILSI

SEQ ID NO: 3356 - protein, 298 aa, Oryza sativa (japonica cultivar-group)
MAGSERTVVWFRRDLRIDDNPALASAARDGAVLPVFIWCPADEGQFYPGRCSRWWLKQSLPHLSQSLESLGCPLVLIRAESTLEALLRCIDSVGATRLVYNHLYDPVSLVRDDKIKKELSALGISIQSFNGDLLYEPWEIYDDSGLAFTTFNMYWEKCMELPIDASPSLAPWKLVPVPGLESVRSCSVDDLGLESSKDEESSNALLMRAWSPGWRNAEKMLEEFVSHGLLEYSKHGMKVEGATTSLLSPYLHFGEVSVRKVYQLVRMQQIKWENEGTSEAEESIHFFMRSIGLREYSR

SEQ ID NO: 3357 - protein, 191 aa, Glycine max
MADSDNDSGGAHNGGKGSEMSPREQDRFLPIANVSRIMKKALPANAKISKDAKETVQECVSEFISFITGEASDKCQREKRKTINGDDLLWAMTTLGFEDYVEPLKGYLQRFREMEGEKTVAARDKDAPPLTNATNSAYESANYAAAAAVPGGIMMHQGHVYGSAGFHQVAGGAIKGGPAYPGPGSNAGRPR

SEQ ID NO: 3358 - protein, 152 aa, Magnetospirillum magnetotacticum MS-1
MPRLRSALVALALGLVAVPALAVQPDEVLKDPAMEARARHISEGLRCLVCQNQSIDDSDAPLAKDLRVLVRERLKEGDSNEQVVDYVVARYGEFVLLRPVFGWHTLLLWLSPLLAVGLGAFGIWRLSRRRAPKAEGLSEAEAAEVEALLKRP

SEQ ID NO: 3359 - protein, 341 aa, Escherichia coli O157:H7
MKALSKLKAEEGIWMTDVPVPELGHNDLLIKIRKTAICGTDVHIYNWDEWSQKNIPVPMVVGHEYVGEVVGIGQEVKGFKIGDRVSGEGHITCGHCRNCRGGRTHLCRNTIGVGVNRPGCFAEYLVIPAFNAFKIPDNISDDLASIFDPFGNAVHTALSFDLVGEDVLVSGAGPIGIMAAAVAKHVGARNVVITDVNEYRLELARKMGITRAVNVAKENLNDVMAELGMTEGFDVGLEMSGAPPAFRTMLDTMNHGGRIAMLGIPPSDMSIDWTKVIFKGLFIKGIYGREMFETWYKMAALIQSGLDLSPIITHRFSIDDFQKGFDAMCSGQSGKVILSWD

SEQ ID NO: 3360 - protein, 112 aa, Bartonella bacilliformis
ANEACLKMLQEIGSVKKIPQFIARAKDKNDPFRLMGFGHRVYKNYDPRAKIMQKTCHEVLKELNIQDNPLFDIAMELEHIALNDEYFINKKLYPNVDFYSGITLKALGFPTE

SEQ ID NO: 3361 - protein, 388 aa, Thermotoga maritima MSB8
  misc_feature (1)..(1): Xaa can be any naturally occurring amino acid
  misc_feature (96)..(96): Xaa can be any naturally occurring amino acid
  misc_feature (159)..(159): Xaa can be any naturally occurring amino acid
  misc_feature (284)..(284): Xaa can be any naturally occurring amino acid
  misc_feature (334)..(334): Xaa can be any naturally occurring amino acid
  misc_feature (348)..(348): Xaa can be any naturally occurring amino acid
  misc_feature (374)..(374): Xaa can be any naturally occurring amino acid
XGSDKIHHHHHHVDALEVHRFLKGKIRTALPVEKVDRETLSLLYTPGVADVARACAEDPEKTYVYTSRWNTVAVVSDGSAVLGLGNIGPYGALPVXEGKAFLFKAFADIDAFPICLSESEEEKIISIVKSLEPSFGGINLEDIGAPKCFRILQRLSEEXNIPVFHDDQQGTAVVVSAAFLNALKLTEKKIEEVKVVVNGIGAAGYNIVKFLLDLGVKNVVAVDRKGILNENDPETCLNEYHLEIARITNPERLSGDLETALEGADFFIGVSRGNILKPEWIKKXSRKPVIFALANPVPEIDPELAREAGAFIVATGRSDHPNQVNNLLAFPGIXKGAVEKRSKITKNXLLSAVEAIARSCEPEPERIIPEAFDXKVHLNVYTAVKGSA

SEQ ID NO: 3362 - protein, 358 aa, Zea mays
MGSTAGDVAAVVDEEACMYAMQLASSSILPMTLKNAIELGLLEVLQKEAGGGKAALAPEEVVARMPAAPSDPAAAAAMVDRMLRLLASYDVVRCQMEDRDGRYERRYSAAPVCKWLTPNEDGVSMAALALMNQDKVLMESWYYLKDAVLDGGIPFNKAYGMTAFEYHGTDARFNRVFNEGMKNHSVIITKKLLDFYTGFEGVSTLVDVGGGVGATLHAITSRHPHISGVNFDLPHVISEAPPFPGVRHVGGDMFASVPAGDAILMKWILHDWSDAHCATLLKNCYDALPENGKVIVVECVLPVNTEATPKAQGVFHVDMIMLAHNPGGKERYEREFRELAKGAGFSGFKATYIYANAW

SEQ ID NO: 3363 - protein, 112 aa, Bartonella bacilliformis
ANEACLKMLQEIGSVKKIPQFIARAKDKNDPFRLMGFGHRVYKNYDPRAKIMQKTCHEVLKELYIQDNPLFDIAMELEHIALNDEYFINKKLYPNVDFYSGITLKALGFPTE

SEQ ID NO: 3364 - protein, 420 aa, Haloarcula marismortui ATCC 43049
MGYDYDKVEVPDEGQQIQVTEDDELDVPENPIIPIIHGDGIGTDVGPAAQKVLEAAANATGRDISWMRIYAGQSARDKYDENLPDDTVEAIKEFNVAIKGPLTTPVGAGFRSLNVALRKTLDLYANVRPTYHIEGVPSPVKDPEEMDMVTFRENTEDVYAGIEWEAGTDEVEEVKEFVEDEMNFDETIHDGPVGIGVKPITEFGTKRLVREAIDYALEEDRDSVTLVHKGNIMKFTEGAFRDWGYEVAEEEYGEHVITEDELWDEYDGEAPEDSLVVNDRIADNMLQQLLTRTDEYDVIATMNLNGDYMSDAAGAQIGGLGIAPGANFGSARCLAEPVHGSAPKYAGEDKVNPTAMILSGRLMLEYMGWKDAGQLVRDAVEETISSGNVTYDLERQIEGGTKLATSEFAEKVVENIEKLA

SEQ ID NO: 3365 - protein, 443 aa, Rhizobium sp. NGR234
MYRTNTPNLENYWMPFTANRQFKAAPRLLASAEGVYYRDIDGNQVLDGTAGLWCVNAGHARKEISQAVERQLNTLDFAPSFQMGHPIAFQFAEKLAEIAPGEPGKKLDRIFYTGSGSESVDTALKIAIAYQRAIGQGTRTRLIGRERGYHGVGFGGISVGGLVNNRRVFPQVPGADHLRHTHDLARNPFTKGGLPEHGAELADDLERLVALHGAETIAAVIVEPVAGSTGVLLPPKGYLERLRATADKHGILLIFDEVISGFGRLGAPFAVDYFGVTPDIITTAKGLTNGVVPMGAVFTSSKVHDALMHGPEAQIELFHGYTYSGHPVACAAGLAAMEIYEKEALLTRASELATYWEDAVHGLRSRKNVIDIRTIGLVAGIELASRSEAAGARAYDVFVDCFKRGLLIRVTGDIIALSPPLTIEREQVDELMSILADALDRAD

SEQ ID NO: 3366 - protein, 196 aa, Glycine max
  misc_feature (33)..(33): Xaa can be any naturally occurring amino acid
  misc_feature (177)..(177): Xaa can be any naturally occurring amino acid
LKLKLDAAEDKIYVDVGMTNNLCLSIQLTELLXSFMCPSGIDDFPMATIDHIKAGLSVLAKYRRPIVVHAEIQQDFENHLELNEDNLDPRAYLTYLNTRPPSWEEAAIKQLVSVTKDTRKGGPLEGAHVHIVHLSDSSASLDLIKEAKSHGDSISVETCPHYLAFTSEEIPNGDTRXKCSPPIRDAYNKDKLWEAV

SEQ ID NO: 3367 - protein, 162 aa, Pseudomonas syringae pv. tomato str. DC3000
MSAFHDIRLKALGGQELPLADFKNKVVLVVNVASKCGLTPQYAALENLYQQYRDKGLVILGLPCNQFAGQEPGTEQEIAEFCQLNYGVTFPLGEKLDVNGPNRHSLYRLLAGEGAEFPGDITWNFEKFLVGKNGGVSARFSPRTAPDDPAVIQAIEKALAHN

SEQ ID NO: 3368 - protein, 386 aa, Aspergillus oryzae
MTGLGMETIFAKIKEEYARTDDVGKRKIQGHIRELQVGFYSDWDVVMRLSSGPLQVALAKVGIDLGIFRSLKESDTPITLAEFVKKTGASPRLLGRILRTQAAFGLIKETGPQEYTSSAFTDVFANPAAAGAVVQLFDISGPCTQILPDFLAERHYQDITSNKDCVFQKAFDSDLTMFEWMPQHPKHMESLGHLMALERPVSWVDHFPVLEELGDFPAPDKVLMVDIGGGFGQQSKALRAKFPNIPGRVIVQDIPQTLANAQPAAGVEFMEHNFFEPQPIRNAKFYYLRHVFHDWPDEQCVLILKQIIPVMGPESEILIDEMVIPSTGVPWQAAFTDLLMMNSLGGVERTRAEWDYLMKQAGLEIIQSKVYDSKEQTILVAVPRRT

SEQ ID NO: 3369 - protein, 366 aa, Zea mays
  misc_feature (86)..(86): Xaa can be any naturally occurring amino acid
AGRNKDDAEEAISLVEALAVQLTQREGELIYEKAEVKKLANFLKQATVDARKVAEEERALALAEIEKARAAIEKVEKALDVHDSTXAAEEEEIEELRKEVREARRIKMLHQPSKVMDMEFELQALRTLISEKTQLCNQLKKELAMIKRLEDDSSGLFELEGSNTLGSQLCIIPRVDGASNITNCPIQWYRVISGGTRELISGATKFMYAPEPFDVGRLLQAEIVLNADKIIVQTDGPVDNAAGLERYVDSLMKRTDIEFNVVVTQMNGKDYSSNSVHVFHIGKLRIKLRKGWSTKARESYSTTMKLCGSRGGGNAAARAVFWHPRKGSSYTLAFETDRDRNAAIMIARKFASNCNIALAGPGDQGT

SEQ ID NO: 3370 - protein, 420 aa, Zea mays
  misc_feature (55)..(55): Xaa can be any naturally occurring amino acid
STIEEASLEHHKELELPYTKSQRSERRSKIKREISIMKIGRHPNIVRLNEVLAGXTKIYIVLELVTGGELFDRIARHGKLRENEARKYFQQLIDAIDYCHSKGVYHRDLKPQNLLLDSRGNLKVSDFGLSTLSQNGAGLLHTTCGTPNYVAPEVLGSNGYDGSAADIWSCGVILYVLMAGYLPFEENDLPSLYEKITAAKYSCPYWFSPGAKSLIQRLLDPNPRTRITIGEIRADPWFEKNYVAIRRGEDENVSLDDVQAVFDNIEDKYVSEEVTHKDGGPLMMNAFEMITLSQGLDLSALFDRQQEYVKRQTRFVSRKPAKTIVATIEVVAESMSLKVHSQNYKLRLEGAASNRASQFAVVLEVFEVAPSLFMVDVRKVAGDTPEYHRFYENLCSKLCSIIWRPTEVSAKSTPLRTTTC

SEQ ID NO: 3371 - protein, 160 aa, Ustilago maydis 521
MAAENAPMELDSPSTKQPRFQVKKWNAVCLWSWDIQVEDRLLLVVQCQTDAIGCWDVAVDLALDRLPHQCAICRNHIMDLCIECQANQGSATTEECTVAWGQCNHAFHFHCISRWLKTRQVCPLDNRDWELQNFNSLAPFILTRLALILLAPAHSNRYGR

SEQ ID NO: 3372 - protein, 428 aa, Tropheryma whipplei str. Twist
MTRQSFFIKNVTLPGLGARTLFLSGGLIQEIICKDIEEHQFLSTKNTDKASCRVIDAEGFIALPGLVDLHTHLRNSRDGSIRDVTSAAIAGGYTTVSSMPNMHPVQDSPEAVNILKAIAKEDAVCDIRPVGAVTKGLRGNEITDMHSLLDAGVNIFSDDGNCVHDPGIMHQALSFAGRNNCVIAQHAQDPTLTKSAQGDTQGPIVAPKSLWPSIAESTIVARDILLARAANARLHVCHVSSQESVYAIAWGKSLGVQVTAEVTPHHLLFYDSLVMTGDTRFKVNPPLRSKESVECLRDALIRGVIDVVATDHAPHRNKSPFWHSAPNGMTGLEFSVSVIQKIFVNSGHLTWPEVVRIMSNKPAEILGMTPNTVKEGSAANFFLYNPDVTRFVTFDDSLGPSVNSPYAGMNLPGKVMYTFYEGRLVFEN

SEQ ID NO: 3373 - protein, 255 aa, Zea mays
MGHASAHAFIIASVFLPVDPRPSVHCRRYRHADQPIAIGFVSSLSLSLSLVMVRACLQAAVTVSRMMAPLKHVRGLEFAADVGYVDFLSRVNRVEEEARRNGSWDAPHPWLNLFVSARDIADFDRAVIKGMLADGIDGPMLVYPMLKSKWDPNTSVALPEGEVFYLVALLRFCRSGGPAVDELVAQNGAILRACRANGYDYKAYFPSYRGEADWARHFGAARWRRFVDRKARYDPLAILAPGQKIFPRVPASVAV

SEQ ID NO: 3374 - protein, 168 aa, Zea mays
MAAASSATSVHDFTVKDASGKDVDLSTYKGKVLLIVNVASQCGLTNSNYTELSQLYEKYKDQGFEILAFPCNQFGGQEPGTNEEIVQFACTRFKAEYPIFDKVDVNGDNTAPIYKFLKSSKGSLFGDNIKWNFSKFLVDKEGHVVERYAPTTSPLSIEKDIKKLLGSY

SEQ ID NO: 3375 - protein, 208 aa, Zea mays
MASDRVLGTVKWFNGTKGFGFITPDDGSEDLFVHQSSIKSDGYRSLNDGDAVEYTVGSGNDGRAKALDVTAPGGGPLAGGERPDGGNGGGRGGYGGGDRGYGGGGDRGYGGGGDRGYGGGDRGYGGGGDRGYGGDRGYGGGGGYGGGYGGGGGGGGRGCFKCGEEGHMARDCSQGGGYGGGGGGGRGSECYNCGQEGHISRDCPNKRR

SEQ ID NO: 3376 - protein, 151 aa, Brassica napus
  misc_feature (137)..(137): Xaa can be any naturally occurring amino acid
MAFPIDHSLADLTKLNLLPKPHGHASDMFPFRLSVFPRVHLSLRTSTSRVLSSLGSKVDPNGSVLIETTTPPEPSPDVTGGVQDVYGEDAATEDMPITPWSLSVASGYTLLRDPHHNKGLAFSQRERDAHYLRGLLXPTVISQDLQVKKMM

SEQ ID NO: 3377 - protein, 149 aa, Oryza sativa
MSLVRRSNVFDPFADFWDPFDGVLRSLVPATSDRDTAAFANARVDWKETPESHVFKADLPGVKKEEVKVEVEEGNVLVISGQRSKEKEDKNDKWHRVERSSGQFMRRFRLPENAKVDQVKASMENGVLTVTVPKAEVNKPEVKAIEISG

SEQ ID NO: 3378 - protein, 181 aa, Brassica napus
MASSMLSSAAVVTSPAQATMVAPFTGLKSSSAFPVTRKANNDITSIASNGGRVSCMKVWPPVGKKKFETLSYLPDLTEVELGKEVDYLLRNKWIPCVEFELEHGFVYREHGSTPGYYDGRYWTMWKLPLFGCTDSAQVLKEVQECKTEYPNAFIRIIGFDNNRQVQCISFIAYKPPSFTGA

SEQ ID NO: 3379 - protein, 304 aa, Glycine max
MANLPNSKLYGKEKMKGEQELEDEESFSRAMLLCSSVVVSMALQSATELGVFDVLQEAGAKLSAKEIASKLSCDNNPEADSMLDRLLALLASHSILNCSLILDHQNLGTFQRLYTITPVARFFARNSDGVSLGPLMALLQDKIFLHSWSELKDSIREGGIPFNRVYGTHAFEYPRLDARFNQVFNTAMINHTTIVMKKVLECYKGFENIKMLVDVGGGLGININLITSKYPHIQGINFDLPHVLEHAPSYPGVEHVGGDMFENVPKGDAIFMKWILHDWSDEYCLKLLKNCYDAIPDDGKVIVV

SEQ ID NO: 3380 - protein, 103 aa, uncultured Rickettsia sp.
IPQYIAKAKDKNDPFRLMGFGHRVYKNYDPRAAVLKETCKEVLKELEQLENNPLLQIAIELEAIALKDEYFIERKLYPNVDFYSGIIYKAMGIPSQMFTVLFA

SEQ ID NO: 3381 - protein, 267 aa, Saccharomyces cerevisiae
MSTSREDSVYLAKLAEQAERYEEMVENMKTVASSGQELSVEERNLLSVAYKNVIGARRASWRIVSSIEQKEESKEKSEHQVELICSYRSKIETELTKISDDILSVLDSHLIPSATTGESKVFYYKMKGDYHRYLAEFSSGDAREKATNASLEAYKTASEIATTELPPTHPIRLGLALNFSVFYYEIQNSPDKACHLAKQAFDDAIAELDTLSEESYKDSTLIMQLLRDNLTLWTSDMSESGQAEDQQQQQQHQQQQPPAAAEGEAPK

SEQ ID NO: 3382 - protein, 117 aa, Zea mays
NASGGAATAAALAANGTAPAGTAASAADSAVQALLQTCAAKYASARDALAGAGDSIALDDYDSASVHVSAAAEYPQVCRTLFRRQRPGQYPAELAAREETLGQLCSVSLDIIALLSS

SEQ ID NO: 3383 - protein, 496 aa, Schizosaccharomyces pombe
MSEDLFVSINFPNGKSVKQPIGLYINGEWHKSAETWETVDPSIEEVIAKVYLAGEKEIDYAVKSAKEAFKTWKKVPGSEKGELLMKLAELTEKHADTLAAIEAMDSGKPLVSNARGDVDGTIALLRYCAGWADKIYGQVIPTGPEKLAYAKRTPIGVCGQIVPWNYPLNMAGWKIAPALAAGNCIIIKSAETTPLSLLYFATLVEEAGFPKGVVNIISGLGTVAGSYMAKHPGIDKIAFTGSTKVGVIVQQLAASNLKAVTLECGGKSPFLVFEDADLDQAVKWAALGIMYNSGQICTSNSRIYVQDSVYDKFIELFKKHVIQDYIVGMPFDDNTVVGPVVNKTQYNRIKNYIEQGKKEGAKLVLGDEPLPLKQGYFISPTIFADCSENMTIVKEEIFGPVVAISKFKTEDEAIEKANNTTYGLAAMCFTKDLERAHRVSDELEAGMVFINSTENSDIQAPFGGIKMSGIGNELGSNGIEMYTQIKAVHINFNNKL

SEQ ID NO: 3384 - protein, 506 aa, Vibrio parahaemolyticus RIMD 2210633
MIYAQPGSENAIVNFKSHYDNFIGGEWVKPTGGEYFDNISPINGQAYCKVARSGEADINLALDAAHNIKAKWAKTSVTERSNILLKIADRIEQHLEELAVAETWENGKPVRETLAADLPLVVDHFRYFAGCIRAQEGSAAELDEHTASYHFPEPIGVVGQIIPWNFPMLMAAWKLAPALAAGCCVVLKPAEQTPTSILVLMEKIGDLLPPGVINVVNGFGSEAGQALATSNRIAKLAFTGSTQVGNHILKCAADNLIPSTVELGGKSPNIYFSDIFDYEDEYLDKCIEGTLLGFFNQGEVCTCPSRVLVHEAIYDKFVEKLTERAQLIKQGNPLDTDTQVGAQASQEQFDKILSYLEIGREEGAKVVFGGGVSEQPESISQGYYIQPTMLEGHNKMRIFQEEIFGPVIAITKFKDEAEALEIANDTEYGLGAGVWTRDANVAYRMGRNIEAGRIWINCYHAYPAHAAFGGYKKSGIGRETHKMMLDHYQNTKNLLISYSIDPLGFF

SEQ ID NO: 3385 - protein, 307 aa, Methanothermobacter thermautotrophicus str. Delta H
MLILNVNHMNITQGMGVAELIEEMGRSGVLGAGRVHRATKLLRGMIDDLEMAIFMSVAGPLVPGGMRRIIRDLIDDGTISALITSGANLTHDLLEAFGGAHYRDYGFDDEKLHQEGIGRIGDVYTRSEDFEVFESENQEIFSSIFSAKPHISIQELIHEIGGHLDDDMSIIRTAHLRGVPIYAPGLIDSMLGLQLWMYTQDNRICLDAVKDMHSLSDLVFSHERIGAIILGGGLPKHYTLASTLLRGGVDAAVQITMDRSETGSLSGAPLEEAKSWAKAQAGSNLVTVVGDATALFPVILAGALSEL

SEQ ID NO: 3386 - protein, 314 aa, Glycine max
MGAGDKTAAGMPRIGMGTAVQGPKPDPIRRAVLRAIEVGYRHFDTAAHYETEAPIGEAAAEAVRSGAVASRDDLFITSKLWCSDAHRDRVVPALRQTLRNLQMEYVDLYLVHWPVSMKPGRFKAPFTAEDFVPFDMRAVWEAMEECHRLGLAKAIGVANFSCKKLETLLSFATIPPTVNQVEVNPVWQQRKLREFCRGKGIQLCAYSPLGAKGTHWGSDAVMDAGVLQEIAASRGKSVAQVCLRWVYEQGDCLIVKSFDEARMRENLDVDGWELTEEEHRRIAEIPQRKINLGKRYVSEHGPYKSLEELWDGEI

SEQ ID NO: 3387 - protein, 178 aa, Triticum aestivum
  misc_feature (63)..(63): Xaa can be any naturally occurring amino acid
  misc_feature (77)..(77): Xaa can be any naturally occurring amino acid
  misc_feature (84)..(84): Xaa can be any naturally occurring amino acid
  misc_feature (91)..(91): Xaa can be any naturally occurring amino acid
  misc_feature (94)..(94): Xaa can be any naturally occurring amino acid
  misc_feature (111)..(111): Xaa can be any naturally occurring amino acid
  misc_feature (130)..(130): Xaa can be any naturally occurring amino acid
  misc_feature (132)..(132): Xaa can be any naturally occurring amino acid
  misc_feature (138)..(138): Xaa can be any naturally occurring amino acid
  misc_feature (147)..(147): Xaa can be any naturally occurring amino acid
MSSSPSFGLLALAAVLLALNLAQHGSLAATVGPRVIVVGAGMSGISAAKRLSEAGITDLLILXEATDHIGGRMHKTXFAGINVXFRPNWGXRAXNGGKMNPSGPSSIHLKXRNFRSRLRLLAQNFYKEDXGXYDEDYXKKRMNWADXVEEWGKTLALSRSARQFIHRLTTQPTAARAC

SEQ ID NO: 3388 - protein, 386 aa, Listeria monocytogenes EGD-e
MKHVFPTYKRFPIDLVNGTGTVVTDKNGKTYLDFTSGIAVCNLGHCPTNVAEAVQQQLGNIWHTSNLYECALQDSVAELIADGKERLVFFCNSGTESNEAALKLARKYTGKEKIITFEKSFHGRTFGSMSATGQAKIHQGFGELVPGFTYVPYNDIEAFRAEIDENTAAVMLEVIQAEGGVIPANAAFLLEVQLLCKKMGALLIIDEVQTGLGRTGTLYGFEQIGLDPDIFTLAKGLGNGLPIGAMVGKSDLISAFGPGSHGSTFGGNKLALAAAKEILLTMKQTGFLEEVNAKADYFRNLLEANLEVLDNVSDIRGGGFLIGIELENAAEPVITELRDKGLLILTAGTNVLRILPPLTVSYAEIDQAIYLLKSVLENQLIGSEEG

SEQ ID NO: 3389 - protein, 504 aa, Bixa orellana
MESTGRAPLGNGRIGNPGGLVVPEIKFTKLFINGRFVDNVSGQTFDTRDPRTGDVLATIAEADKDDLDLAVKNAREAFDHGPWPRMSGYERARIMTKFADLVEAFIEELAALDTADAGKTLSMGKAVDIPAAVQIMRYYAGAADKLHGQPLKMNQDTQGYTLKDPIGVVGHIIPWNYPTMMFFLKNAPALAAGCTMVVKPAEQTPLSALFYAHLARMAGVPDGVVNVVPGFGPTAGAAVSSHMDVDSVSFTGSQEVGRAIMRAAAQSNLKNVSLELGGKSPVIIFDDADVDMAVSLSQLACFTNKGEICVATSRVYVQEGIYDALVKKIVEAAREWRFDTKANMGPQVDKKQFERVLKYIDLGKREGATLLTGGKTNGDKGYYIQPTIFLDVREDMNIAQDELFGPVMALMKFKTVDEAIQKANCTKYGLAAGIVTKELNLANTVSRSIRAGAVWVNCYFGFDPDAPFGGYKMSGFGKDRGVLAIDQYLKAKTVNTAIPNSPWY

SEQ ID NO: 3390 - protein, 310 aa, Zygosaccharomyces rouxii
MVTLQNSTSTLKLNTGQTIPQVGLGTWRSKENEGYKAVIEALKAGYRHIDGAAVYGNEGEVGKAIQDSGVPRNEIFLTTKLWCTHQRNPQEALDQSLQRLGLDYVGLYLVHWPVPLRTENIKDGNLFQFAEKPDGSKDVDLEWNFIKTWELMQKLLESGKTKAIGVSNFSVNNLKDLLAAPTTKVTPAVNQVEFHPLLPQEELIQYCSEKGIVIEAYSPLGGENAPILSDPTVQEIAKANGVEAGHVVISWAVQKGLVTLPKSVTPSRIVGNLKVLTLSDSDVAKVDGLLKAKGERRTCYQDFSPFPIFQ

SEQ ID NO: 3391 - protein, 294 aa, Listeria monocytogenes EGD-e
MTKTLQDRMILPGNGTIPYIGLGVFQVTEQEFIAGAVEKAIEVGYRLFDTAAVYNNEAIVGQAIASSAVSREELFISSKVWNGDLGYDETLFAFERTLRNLKLDYLDLYLIHWPVAGKYRDSWRAMERLHDEKLIKSIGVANFKQHHLSDLLVAANEKPVLNQVETHPLLPQNDLRKYLVEQNIAHAAWSPLAKGILMQNPVITEIAKKHQASVDQVILQWHLNRNTIIFPKSITSSRIEENSRLSYFQLDASDMEKIDRLETGKRVGPDPDDLEYFLSSIERERAYLASENEE

SEQ ID NO: 3392 - protein, 289 aa, Zea mays
MEIFVLLRFRLQDNIGGGKVLFQGKSDYQNVMVFQSSTYGKVLVLEGVIQVTERDECAYQEMITHLPLCSIKDPKKVLVIGGGDGGVLREVSRHTSVEQIDICEIDKMVVDVSKQFFPHLAVGFEDPRVSLHIGDGVAFLKNAPEGTYDAVIVDSSDPIGPAQELFEKPFFQSVARALRPGGVVCTQAESIWLHMHIIEDIFVNCRQVFKGSVNYAWTTVPTYPSGVIGFMLCSTEGPAVDFQHPVFNIEEDEHSTKSKGPLKFYNSEIHTASFCLPSFAKRVIESKAS

SEQ ID NO: 3393 - protein, 164 aa, Candida albicans SC5314
MSSPKVIIVSSDNEKFPVEPKIAEKSILIKNMINDLHPDGLEEDFEIPTPNVRANVLCKVLEWCEHHKNTVFQDDEDEDAKKSVPVEEWDRNFLKVDQEMLYEIILAANYLNIKPLLESGCKMVAEMIKSKSPEELRRTFNIINDFSPEEEAAIRKENEWAEDR

SEQ ID NO: 3394 - protein, 194 aa, Brassica napus
  misc_feature (19)..(19): Xaa can be any naturally occurring amino acid
  misc_feature (71)..(71): Xaa can be any naturally occurring amino acid
  misc_feature (93)..(93): Xaa can be any naturally occurring amino acid
  misc_feature (111)..(111): Xaa can be any naturally occurring amino acid
  misc_feature (142)..(142): Xaa can be any naturally occurring amino acid
STHASEKLEGAPSMLSSAXVATSPAQAPWMLPFTGCEVHHVAIPQRTPRIATLMLLLSQAAGGRVSCMKAXHPLGKRKLETLSYLPDLTGAEXGIEADYLVRNKRMTCVEXQLEHGFVYREHGSTPAILRWPVIDTMRKLPXCGCTDYAQVLNEVQESMTEDPSPSIKIIGYDNNRQEQRISLIDYKPPSLTAA

SEQ ID NO: 3395 - protein, 302 aa, Triticum aestivum
MKTLLIVTILAMATTIATANMQVDPGYQVHWPQQQPFPQPQQPFCQQPQQTIPQPHQTFHHQPQQTFPQPQQTYPHQPQQQFPQTQQPQQPFPQPQQTFPQQPQLPFPQQPQQPFPQPQQPQQQFPQSQQPQQPFPQPQQQFLQPQQPQQSFPQQQQPLIQLSLQQQMNPCKNFLLQQCNPVSLVSSLISMILPRSDCQVMQQQCCQQLAQIPQQLQCAAIHSVVHSIIMQQEQRQGVQIRRPLFQLVQGQGIIQPQQPAQLEVIRSLVLRTLPTMCNVYVSPDCSTINAPFASIVVGIGGQ

SEQ ID NO: 3396 - protein, 178 aa, Glycine max
MASSMISSPAVTTVNRAGAGMVAPFTGLKSMAGFPTRKTNNDITSIASNGGRVQCMHVWPPIGKKKFETLFYLADPDDAQLAKEGEYPLKKGWIPCLEIQVEHRFVYREHNRAPRYYHGRLWTMWKLAMFGCTDASQGVKELQEAKTAYPNGFIRIIGFDNVRQVQWINFIGYKPPGF

SEQ ID NO: 3397 - protein, 197 aa, Oryza sativa (japonica cultivar-group)
MASERVKGTVKWFDATKGFGFITPDDGGEDLFVHQSSLKSDGYRSLNDGDVVEFSVGSGNDGRTKAVDVTAPGGGALTGGSRPSGGGDRGYGGGGGGGRYGGDRGYGGGGGGYGGGDRGYGGGGGYGGGGGGGSRACYKCGEEGHMARDCSQGGGGGGGYGGGGGGYRGGGGGGGGGGCYNCGETGHIARECPSKTY

SEQ ID NO: 3398 - protein, 378 aa, Oryza sativa (japonica cultivar-group)
MDPYTSRAPASGGVAAGDDDEEAACLQAFELMCIFTVPMTLKAAIELGLLDALAAAGDGRALTADELAAARLPDAAPDKAEAASSVDRMLRLLASFDVVKCSTEAGPGGEPPRRRYSPAPVCRLFTAGGNSHRGSLAPSVLFGVDEDYLCTWRQLAAAVGGGGPSAFERAHGMRMFEYMGTNRRLNTLFNQAMAQQSMIVIDKLLDRFHGFDGVGVLVDVGGGTGATLEMITSRYKHITGVNFDLPHVISQAPSIPGVKHIAGNMFESISNIGDAIFLKMILHMQNDEDCIKILKNCHQALPDNGKVIAVEIVLPTIPDLAQTARYPFQMDMIMLSNSRGGKERTELEFAKLATDSGFSGALRTTYILANYWVLEFSK

SEQ ID NO: 3399 - protein, 162 aa, Triticum aestivum
  misc_feature (58)..(58): Xaa can be any naturally occurring amino acid
  misc_feature (73)..(73): Xaa can be any naturally occurring amino acid
  misc_feature (78)..(78): Xaa can be any naturally occurring amino acid
  misc_feature (105)..(105): Xaa can be any naturally occurring amino acid
  misc_feature (126)..(126): Xaa can be any naturally occurring amino acid
  misc_feature (129)..(129): Xaa can be any naturally occurring amino acid
MAPSVMASSATTVAPFQGLKSTAGMPVARRSGNSSFGNVSNGGRIRCMQVWPIEGIKXFETLSYLPPLTVEDXLKAVXVPAPSNWVPCPDSSKGPVCPTVENHRXPGYYQRKYWTIWNCQGSVDRXTQXLKDPRRQKGSPILTVKLKLFNPKTPGSGEKPQK

SEQ ID NO: 3400 - protein, 214 aa, Listeria monocytogenes str. 4b H7858
MRFFIDTANVEEIKKANRMGFIAGVTTNPSLVAKEGRDFNEVIQEITSIVDGPISGEVVSLEADEMIAEGRVIAKIHPNMVVKIPMTGEGLAAVKVLTEEGIKTNVTLVFSATQALLAARAGATYVSPFLGRLDDIGDDGLVLIRDIADIFEIHGIPTEIISASVRHPIHVIECAKAGADIATVPFKVFEQMLKHPLTDSGIDKFLADWEAAKK

SEQ ID NO: 3401 - protein, 412 aa, Rickettsia hulinii
ELKIRGKIFKLPILKASIGEDVIDISRVSAEADCFTYDPGFMSTASCQSTITYIDGDKGILRHRGYDIKDLAEKSDFLEVAYLLIYGELPSGEQYNNFTKQVAHHSLVNERLHYLFQTFCSSSHPMAIMLAAVGSLSAFYPDLLNFKEADYELTAIRMIAKIPTIAAMSYKYSIGQPFIYPDNSLDFTENFLHMMFATPYTKYTVNPIIKNALNKIFILHADHEQNASTSTVRIAGSSGANPFACISTGIASLWGPAHGGANEAVINMLKEIGSSEYIPKYIAKAKDKNDPFRLMGFGHRVYKNYDPRAAVLKETCKEVLKELGQLDNNPLLQIAIELEAIALKDEYFIERKLYPNVDFYSGIIYKAMGIPSQMFTVLFAIARTVGWMAQWKEMHEDPEQKISRPRQLYTGG

SEQ ID NO: 3402 - protein, 371 aa, Oryza sativa (japonica cultivar-group)
MASGISRTPATGVTAGGGDDEEAAWLHALELISGFTVSMTLKAAIQLGLIDALTAAADGRALTAGELVAQLPAVDDAEAATSVDRMLRLLASFNVVRCSTEAGPGGDPLRRYSPAPVCRWFTAGDNHQGSLAPRLMLDVDEDNLSTWHQMAAAVVSGGPSAFERAHGMPLFEYMGTNHRFNMLFNQAMSQQSMMVMNKLLDRFHGFDGISVLVDVGGGTGVTLKMIISRYKHITGVNFDLPHVISQAPSLPGVNHVAGNMFESVPKGDAIFLKSMLLRNDEECIKILKNCHYALSDNGKVIVVDIVLPETPKPVPEAQNPLRMDVMMLNNLRGGKIRTEQEYAKLAMDSGFSGSFRTTYIFANFMAIELCK

SEQ ID NO: 3403 - protein, 105 aa, Lactococcus lactis
MLYGKENRDEAEFLEPIFGSESEQVDLPKYKLAQQSIEPRVAYQLVQDEMLDEGNARLNLATFCQTYMEPEAVKLMSQTLEKNAIDKSEYPRTTEIENRCVNMIA

SEQ ID NO: 3404 - protein, 120 aa, Davidia involucrata
MGRSGVVIKVGIVAVLMCMVVSAPHAEAAITCGTVTVSLAPCLNYLKKGGPVPPACCNGIKSLNAAAKTTADRQAACNCLKTASTSIAGINLSYASSLPGKCGVNVPYKISPSTDCSKVQ

SEQ ID NO: 3405 - protein, 267 aa, Oryza sativa (indica cultivar-group)
EPHDYIGLSAAAASPTPSSSSCSSSPNPGGEARGPRLTLRLGLPGSESPEREVAAAGLTLGPLPPTTTKAASKRAFPDSSPRHGASSGSVAAAAAACQDKAAPAAAPPAAKAQVVGWPPVRNYRKNTLAASASKGKGEDKGTAEGGPLYVKVSMDGAPYLRKVDLKMYSSYEDLSMALEKMFSCFITGQSGLRKSSNRDRLTNGSKADALQDQEYVLTYEDKDADWMLVGDLPWDLFTTICRKLKIMRGSDAAGIAPRSIEQSGQSR

SEQ ID NO: 3406 - protein, 289 aa, Oryza sativa (japonica cultivar-group)
MLRLLASCNVVKCSTEAGPAGEPLRRRYSPAPVCRWFTAGGNSHHGSLAPSVLFGIDEDYLSTWHQLAAAVGGGGAVAFERAHGAPMFEYMGTNRRLNTLFNQAMAQQSMIVINKLLDRFHGFDGVGVLVDVGGGTGGTLEMIMSRHKHITGVNFDLPHVISQAPSLPGVKHVAGNMFESIPNGDAIFLKSILHLQNDEDCIKILKNCHQALSDNGKLIAVEIVLPAIPEPVPTAQYPFQMDMIMLNNFRGGKERTELEFTKLAMDSSFSGTLRTTYIFANYWALEFNK

SEQ ID NO: 3407 - protein, 176 aa, Gossypium barbadense
LFSFILILTHFLLKSSIRIQVLGWICVAISVSVFAAPLNIMARVIRTESVEFMPFTLSFFLTLSAVMWFAYGLFIKDLCVALPNVLGFILGMLQMLLYAIYRHSEKVNIEEKKLPAEQMKSINVVLTTLGASEVHPVVLDIHTDDTKEEDNKNNEPTGEPDKQTDVKMEDANESPV

SEQ ID NO: 3408 - protein, 157 aa, Lactococcus lactis
FVDPELEWDFRLKNVISINTSGHKYGLVYTGVGWVLWRDKKYLPEELIFKVSYLGGELPTMAINFSHSASQLIGQYYNFVRYGFDGYKAIHERTHKVAMYLAEEIEKTGMFEIMNDGSQLPIVCYKLKENSNLGWNLYDLADRLFNEGMASACLSTS

SEQ ID NO: 3409 - protein, 195 aa, Sinorhizobium meliloti 1021
MSSSNFQRKRPVARDRKGNPSIDAMTTFQGTAMCDLFVRNATVVTEERTFDGGISVSNGRIDELVVGQRDIAAARQIIDASGLLLLPGLVDAHVHFSEPGRGHWEGFETGSRAAAAGGITTFVEMPLNAQPATIDAAALVMKKAAAKQSHIDYALWGGLVDDNLDDLADLRRGGVVGFYRERHCRGGGRGLAGAT

SEQ ID NO: 3410 - protein, 387 aa, Gibberella zeae PH-1
MPRLPFPAFKSLVIQPLRITPTAINRSYYSTMMRAARYYGREDIRVEQVPQPSVKAGQVKVAPAFVGICGTDLHEYLGGPNFCPTTPHPITKESIPVTLGHEFSGIITEVGPDVEGFEVGQPCAIQPTLFCGHCAACHNHAENVCHSGGFIGLSGSGGGLSESVCVNATHVHPLPQDLPLEIGALVEPLSVSWHAMTAAPDINPDSRVVILGGGPIGLAMILCLKAKGVDEIIVSEVATSRQKFARELGATWVVNPIEENLNEIVLALTEGKGADVVFDCAGVPMSIKSACEVVRPKGTVVNLAIWEKEIPFNPNWITMKESSYKSVLGYTHKDFQAVIANLASGAIKPSQMITRKIKLENIVEDGIKALIHDKNNQVKVLVDMSDR

SEQ ID NO: 3411 - protein, 317 aa, Methanosarcina mazei Go1
MDFGASAKNLSTPVKGAKIVPNMTVDELVKEYAGCAFGAGRLAEAVDIYYEMLASGKTTKFFGLAGAMTPAGMRNIIADLIRDGYIDVLVTTGANMVHDTVEALGLHHYKGSDCANDIQLRHECIDRIYDVYLPDQHFTDLEEFLQGVYSGLPQENLSIRQVLTEIGKNLDDDSSILKTAAEMGVPVYCPALQDSVIGLQAWLYKEGNPLHVDAFADMHEFMDICYGAESAGTMLLGGGVPKNYILQSMLVTPRSFDYAIQLTMDRPETGGLSGATLDEAQSWGKVGEDAKSVTVYADSTITLPLIVSAVRTRLSKR

SEQ ID NO: 3412 - protein, 125 aa, Triticum aestivum
MAETAVIAPPPQPMAPPQPVEENATAAPSQPMAPLQPMAESATAAPPPPNATQQPMVENATVVVVVPPPPPDGTTTFLCLILAFFIPPLGVFLKYKCEIEFWICLILTFLAYAPGIIYAVWVIVK

SEQ ID NO: 3413 - protein, 386 aa, Gloeobacter violaceus PCC 7421
MAKHRFLAGKKIDPQPIGAGISVSALIDNTFLAYNAGRLREAARLLVERMLRPGVTVGVTLSGALTPTGLGMAAIIPLMEAGFIDWIISTGANLYHDTHHGIGLDLRRGRADISDVVLREEGVVRIYDIFFDYDVLLSTDRFFREIFKAPEFQAAMGTAEFHYLAGKYIAERERQLGLENKSLLAAAYRLGVPIYTSSPGDSSIGMNIAAMALDGKGPRLDVSLDVNETAAIVLDAKRSGGESGVWILGGGSPKNFMLQTEPQIQEVLGIQEKGHDYFLQVTDARPDTGGLSGATPSEAVSWGKVDPDRLPDTVVCYVDSTIALPLLTAYALDNAESRPLKRLYDRRGEVMAKLKAEYEAAQAAGGRDHNVGEPAPEHISSQAAGR

SEQ ID NO: 3414 - protein, 336 aa, Triticum aestivum
  misc_feature (60)..(60): Xaa can be any naturally occurring amino acid
  misc_feature (82)..(82): Xaa can be any naturally occurring amino acid
MKTLLILTIIAVALTTTTANIQVDPSGQVQWPQQQQPFPQPQQPQQIFPQPQQTFPHQPXQQAFPQPQQTFLHQPQQQFPQXPQQPQQPFPQQPQQQFPQPQQPQQPFPQQPQQQFPQPQQPQQPFPQPQQPQLPFPQQPQQPFPQPQQPQQPFPQLQQPQQPLPQPQQPQQPFPQQQQPLIQPYLQQQMNPCKNYLLQQCNPVSLVSSLVSMILPRSDCKVMRQQCCQQLAQIPQQLQCAAIHGIVHSIIMQQEQQQQQQQQQQQQQQQGIQIMRPLFQLVQGQGIIQPQQPAQLEVIRSLVLGTLPTMCNVFVPPECSTTKAPFASIVADIGGQ

SEQ ID NO: 3415 - protein, 255 aa, Phytophthora infestans
MSVNVPTKILPSGARIPMIGLGVYQSEPGPETYNAILTSLKLGYRHIDTAEIYGNEEDVGRAVRDSGIPREEIFVTTKLFTTNWGYSKALAAGKASNDRLGIVYIYLYLLHAPGPPKERADTWRAVEDLREQETLRDIGVSNFNETLLATLRKTAHIKPAVNQVELHPWMMRQSLVNYQDGRPCLGLYCRRDRSYTRPSAGGVRRRQRIRDAAHRDRLKSNLESVKLKVTPEQVVKLASPDSYLRTAGCDQDRVM

SEQ ID NO: 3416 - protein, 513 aa, Glycine max
MIAYLEHFVHGNDTESMPNDDVSALDGAFHFGATAAAGKDFGGMKSVKPRAVIRPALAGDVERAVKEAARTTYLTVAARGNGHSINGQAMAEKGLVLDMRAMEDHFTLLSLDDGSLYVDVSGGALWEDVLKRCVSEFRLAPRSWTDYLGLTVGGTLSNAGVSGQAFRYGPQTANVTELEVVSGKGETLVCSESQNSELFFATLGGLGQFGIITRARVPVQQAPDMVRWIRVVYTEFGDFTRDAEWLVTLREGDGFDYVEGFVFVNSDDPCNGWTTVPVGPNQYFDPVRIPSTAGPVLYCLELALHYRNQDHPSAVDMEVDRLLGRLRFVEGLKFSVDVTYMEFLLRVKRVEEDAKANGIWDAPHPWLNMFVSKSNIAEFDREVFKKILKHGVGGPILVYPLLRSKWDSRHSVVVPDSNIFYIIALLRFIPPPPKGPPTELLVEQNHEIIQLCYNRGFDFKLYLPHYQSKENWMRHYGDKWSRFVERKANFDPLAILAPGQKIFSRIPQPLSIT

SEQ ID NO: 3417 - protein, 348 aa, Oryza sativa (japonica cultivar-group)
MVEQLRREISIMRMVRHPNVVGIREVLASRARVFVVMEYARGGELFAKVARGRLTEEHARRYFQQLVAAVGFCHGRGVAHRDLKPENLLLDEEGRLKVTDFGLAALPEQLRQDGLLHTQCGTPAYVAPEVLRKRGYDGARADLWSCGVVLYVLLCGFLPFQHENYAKMYQKIFKAEYQVPPWVSGDARRLIVRLLVVDPAKRISIPEIMRTPWFKKGFVPPVPTSPVSPKKWEEDDVLLDGGDSGAMSPRTCNAFQLISSMSSGFDLSGMFESEQKAATVFTSRAPAATVIQKLEAVGRSLGYSATRGKGWKLRLEATASVQRDVKSVGCISFSFFARGYVQAKSRDV

SEQ ID NO: 3418 - protein, 456 aa, Oryza sativa (japonica cultivar-group)
MARRAREEEADQVERKLVLGRYELGRLLGQGTFAKVYYGRDLRSGESVAIKVIDKARLRRTEGMVEQLRREISIMRMVRHPNVVGIREVLASRARVFVVMEYARGGELFAKVARGRLTEEHARRYFQQLVAAVGFCHGRGVAHRDLKPENLLLDEEGRLKVTDFGLAALPEQLRQDGLLHTQCGTPAYVAPEVLRKRGYDGARADLWSCGVVLYVLLCGFLPFQHENYAKMYQKIFKAEYQVPPWVSGDARRLIVRLLVVDPAKRISIPEIMRTPWFKKGFVPPVPTSPVSPKKWEEDDVLLDGGDSGAMSPRTCNAFQLISSMSSGFDLSGMFESEQKAATVFTSRAPAATVIQKLEAVGRSLGYSATRGKGWKLRLEATADGANGRLAVTVEALEVAADVAVVEFAHDAGDELEFNKFCAVDVRPGLADIVWAWQGDRPAAPDVAAATVECSPA

SEQ ID NO: 3419 - protein, 341 aa, Escherichia coli O157:H7 EDL933
MKALSKLKAEEGIWMTDVPVPELGHNDLLIKIRKTAICGTDVHIYNWDEWSQKTIPVPMVVGHEYVGEVVGIGQEVKGFKIGDRVSGEGHITCGHCRNCRGGRTHLCRNTIGVGVNRPGCFAEYLVIPAFNAFKIPDNISDDLASIFDPFGNAVHTALSFDLVGEDVLVSGAGPIGIMAAAVAKHVGARNVVITDVNEYRLELARKMGITRAVNVAKENLNDVMAELGMTEGFDVGLEMSGAPPAFRTMLDTMNHGGRIAMLGIPPSDMSIDWTKVIFKGLFIKGIYGREMFETWYKMAALIQSGLDLSPIITHRFSIDDFQKGFDAMCSGQSGKVILSWD

SEQ ID NO: 3420 - protein, 171 aa, Candida albicans SC5314
MGNELLSTARIYTFKIPDAYNNVIDFDQFKNKVILIVNVASLCGFTPQYKELQLLYEKYHERGLEILGFPCNQFGNQEPLQEEEIVESCRRNFGVSFPIMKKTKVNIDCDGHESELYKYLKSEKPGEVGFKGVRWNFEKFIVNRKGEVVARFNSLITPLQLEGFIEQLLSE

SEQ ID NO: 3421 - protein, 92 aa, Zea mays
MTMTSRFVAAASSSSSSCPLARLISRRGLAGAADGHGPAKVPLWKDPLSPSKWKEEHFVLASLSMWGALFYGGFKFFGGKKEDKIEVASGQT

SEQ ID NO: 3422 - protein, 405 aa, Thermoplasma acidophilum
MAYIQVKDDGTLQVPDRVTIGYIEGDGIGPDISKTTINVLNAALEIAYGGKRSIEWKKILAGDEAYDKTGDRLPQSSLDELKKCVVALKGPLTTPIGEGFRSLNVTLRQYLDLYANIRPVRYFPGVPSPVVHPEYMNMVVFRENTEDLYAGIEWRYDSDGPKKVREFLASTFNINLTADTGIGIKPISKFKSTRLVRKAIQYAIANKRKSVTLVHKGNIMKYTEGAFKEWGYEVAKTEFGNYTVTETEYLQDPEKYSNKIVIKDRITDNMFQQVLTRTQEYDVIATPNLNGDYLSDALAAQVGGIGLAPGANIGDHYAVFEAVHGTAPKYAGMDVANPTSLILSGEMMLQHIGWNEAANILDEAIMQTYKDQKLTQDIARLLNVKALKCSEFGEEIINRMKKPVH

SEQ ID NO: 3423 - protein, 307 aa, Pseudomonas aeruginosa PAO1
MTSKLEQLKQYTTVVADTGDFDAIARLKPVDATTNPSLLLKAAALPRYAEHLRQATAGSGGDAGLACDRFAVAVGKDILGVIPGRISTEVDARLSFDSEATLARAHRLIELYDEQGIDRERVLIKIASTWEGIRAAEILEREGIQTNLTLLFSFAQAVACADAGVFLISPFVGRIYDWYKKSENRDYAGAEDPGVQSVSRIYRYYKANGYKTVVMGASFRNLGQIEQLAGCDRLTISPDLLQQLADAQGELPRLLLPGEGEPRQVLDESAFRWQMNEDAMATEKLAEGIRLFARDQEKLEYQLATRH

SEQ ID NO: 3424 - protein, 339 aa, Ustilago maydis 521
MAANIPSFTLNTGAKLPSVGMGCWQGQPGPGRDNELVDALVRAIKVGYRHLDTATGYRNEAEVGQAVRQSGVARSEIFVTTKLRPGGVHDVVQELENSLNELGIDYIDLWLLHWPQGFTKDDGGFGTGESFGLEHQKHLGPTFNETWAKMEDVFLNSHKGKVKAIGVSNFSIKNLEILAKTSKVTPAVNQIEAHPYLPEHELVKYCKHKSIHVTAYSPLGQYNASIHEDKDLNEIAKKHDVTAATVALSWAVQRGTSVAPKSTNEKRMKQNITLIKLTDEEMKQVDVISQDPTRSTRLNYFVVNKETGTVLGWTMDEMGWEVGFLEEPGKSTKRIAERK

SEQ ID NO: 3425 - protein, 381 aa, Staphylococcus aureus subsp. aureus MRSA252
MLTEQEKDIIKQTVPLLKEKGTEITSIFYPKMFKAHPELLNMFNQTNQKRGMQSSALAQAVMAAAVNIDNLSVIKPVIMPVAYKHCALQVYAEHYPIVGENLLKAIQDVTGLEENDPVIQAWAKAYGVIADVFIQIEKEIYDQMMWIGFKPFKITNIKQESEDIKSFTVETDAYDFSQYVPGQYITVDVSSDKLPYRAKRHYSIVSGDKNHLTFGVKRDVTTEHEGEVSTILHDEIKEGDMINLAAPVGGFVLENTTEPQLFLGSGIGVTPLVAMYEAASAKGLDTQMVQVAENEQHLPFKDNFNSIANHYDNAKLYTHLKGEQGYIGAEELKAFLANKPEIYICGGTKFLQSMIEALKSLNYDMDRVHYETFIPRLSVVV

SEQ ID NO: 3426 - protein, 455 aa, Mycobacterium tuberculosis H37Rv
MSTTQLINPATEEVLASVDHTDANAVDDAVQRARAAQRRWARLAPAQRAAGLRAFAAAVQAHLDELAALEVANSGHPIVSAEWEAGHVRDVLAFYAASPERLSGRQIPVAGGVDVTFNEPMGVVGVITPWNFPMVIASWAIAPALAAGNAVLVKPAELTPLTTMRLGELAVEAGLDEDLLQVLPGKGTVVGERFVTHPDIRKIVFTGSTEVGKRVMAGAAAQVKRVTLELGGKSANIVFHDCDLERAATTAPAGVFDNAGQDCCARSRILVQRSVYDRFMELLEPAVHSIVVGDPGSRATEMGPLVSRAHRDKVAGYVPDDAPVAFRGTAPAGRGFWFPPTVLTPKRGDRTVTDEIFGPVVVVLTFDDEADAISLANDTAYGLSGSIWTDDLSRALRVARAVESGNLSVNSHSSVRFNTPFGGFKQSGVGRELGPDAPLQFTETKNVFIAVGEEM

SEQ ID NO: 3427 - protein, 279 aa, Crocosphaera watsonii WH 8501
MPFIQWYPGHIAKAERQLKEQLNRVDVIFEVLDARIPLASHHPDVPGWIGDKPRLVVLNRTDMIPESVRQGWLNWFAAQGETLYCTNAKQGKGIKALKKAAQAAGVQMNERRQQRGMRPRAVRAVVIGFPNVGKSALINRLLGRKVAASARRAGVTRQLQWIRISDALELLDAPGIIPAKLENQEDAVKLAICEDIGEAAYDNQQIGAALIDLLVELNFDNILSSRYQLDPQNITGEEYIESLGNSKFKGDTERATMQLLNDFRKGVMGKIPLELPQLI

SEQ ID NO: 3428 - protein, 323 aa, Gibberella zeae PH-1
MSSALDQLKATGTTVVSDSGDFASIGKYKPQDATTNPSLILAASKKEEYAKLIDVAIDYAKQKGGSVDQQVDDALDRLLVEFGKEILKIIPGKVSTEVDARYSFDTEASVNKALHLIELYGEQGISKDRILIKIAATWEGIKAAEILQRDHGINTNLTLMFSLVQAIGAAEAGAYLISPFVGRILDWFKASTKKEYTKEEDPGVLSVKQIFNYYKKFGYNTIVMGASFRNTGEITELAGCDYLTISPNLLEDLLNSSDSVPKKLDASQASSLDIEKKSYIKDEALFRFDFNEDQMAVEKLREGISKFAADAVTLKGILKEKLS

SEQ ID NO: 3429 - protein, 497 aa, Gibberella zeae PH-1
MGSRMTPEAIKPVMLIDGQANACLIQLVGASDGNSFPLFNPATGEKVADVPEATEDDTNRAVAAAQRAFPEWSAMDPAKRGSYLKKLASLIKEHNEELALLEAKSMGRPLAEFFEGHIAASSYEHYAEAWPHIQGQASLNTPGYVTMTLRQPFGVVAAIIPWNASLLFFASKSAPALIAGNTVVVKSSEKAPLGAAKFAELIHKAGFPPGVFNVLSGHGNPSGATLASHMDVRAISFTGSSPTGRAIQEAAAKSNLKKVILELGGKSPVIIFDDADLEQAAKDTMYSIQWNSGQVCMANSRVYVQDSIADNFIQACKKALSAAKSGNPTEKGINHGPQADKVQYEKVMSYINEGKKSGTLELGGNGNLDKTGGFFVEPTIFLNTPEDAKVMKEEIFGPVVNINVIKTEEEAIEKANDTEYGLYAAVYTKNVDRAMRVTQKLNSGYVGINCTSPTTARDLPFGGYKSSGQGREGWLYSLDNFLEVKSVMMKVDSGSKL

SEQ ID NO: 3430 - protein, 466 aa, Sinorhizobium meliloti
MDTRPEPFEPPAPVPRTGIPSRLEIIRTVLRNPLELWGEPSYTLPWIETKFINQRTLIVNDPGLIRYILVENAANYEMSNVRRLILRPILRDGLLTAEGEVWKRSRKAMAPVFTPRHAQGFAGQMLRVCEAFVDRYAGASSEPFVTNVAVDMTELTFEILAETLFSGEIAVEKQGFAANVEELLHRMGRVDPMDLLVAPSWVPRLTRIGGRKVLDRFRGVVSETMSLRRRRTTEAPGDVPNDFLTLLLQLEGPDGLSTSEIEDNILTFIGAGHETTARALAWCFYCVANTPAYRETMEQEIDSVLASGADPVDWLGRMPHVLAAFEEALRLYPPAPSINRAAIEEDAWTSPEGERVPIRKGISVLVMPWTLHRHALYWQKPRAFMPERFLPENRDKINRFQYLPFGAGPRVCIGATFALQEAVIALAVLMHRFRFDLTDETHPWPVQRLTTQPRGGLPMKVSARVK

SEQ ID NO: 3431 - protein, 205 aa, Populus euramericana
TFDVNTKTGGPFGTIRHPDELAHGANNGLDIAVRLLEPLKEQFPNLSYADFYQLAGVVAVEITGGPEVPFHPGRPDKSDPPPEGRLPDATKGSDHLRDVFGHMGLSDKDIVALSGGHTLGRCHKERSGFEGPWTPNPLVFDNSYFKELLSGEKEGLIQLPTDKTLLEDPVFRPLVEKYAADEDAFFADYAEAHMKLSELGFAEAY

SEQ ID NO: 3432 - protein, 226 aa, Triticum aestivum
  misc_feature (58)..(58): Xaa can be any naturally occurring amino acid
  misc_feature (70)..(72): Xaa can be any naturally occurring amino acid
WYYLKDAVLDGGIPFNKAHGMSAFEYHGTDPRFNRVFNEGMKNHSIIITKKLLELYKXGFNGLDTLVDVXXXGIGATVGAITAHYPTVKGINFDLPHVISEAPPFSGVTHVGGDMFQKIPSGDTILMKWILHDWSDEHCATLLKNCYDALPAHGKVVLVECILPVNPEATPEAQGGFHLDMIMLAHNPGGRERYEREFEALAKGAGFGAIKTTYIYANIWVIEFTK

SEQ ID NO: 3433 - protein, 434 aa, Exiguobacterium sp. 255-15
MLARAVEYLEKDEQANVEFVFWVNPDYIGEYDARQQYFFQALEHFAKNCKTHDMPIRFIEGQEKDFLEATEMADVLLFNAEYVEPFKSRDDGIMKKRGDKKTERLLDRHLLHPHAVKKNDGSYYKVFTPYKNAFLKKDVDKPYPVKLNLLKERYHKRRQNNAFMLDYFKRAASDTDFAVGEETARKRLRSFLKNNLSAYEEQRDLPAVDGTSLMSRYLRTGEIGIRTIFDAVQQEQDSKGKQTYLTELIWREFYYTILMHYPESKRLPVNEQYTKIEWETDEKGFKAWAEGKTGYPIVDAAMRQLNTTGWMHNRLRMIVASFLTKDLLVDWQKGERYFQQKLVDYEAASNIGGWQWAASVGTDAVPYFRVFNPTTQSKKFDKDGTFIRTYLPELKDLPKTSIHEPTEQQRKDYDYPMPIVEHDMARKRAIARFK

SEQ ID NO: 3434 - protein, 268 aa, Triticum aestivum
  misc_feature (218)..(218): Xaa can be any naturally occurring amino acid
  misc_feature (249)..(249): Xaa can be any naturally occurring amino acid
RRFLIFVLAMTMSIITTARQLNPSEQELQSPQQPVPKEQSYPQQPYPSHQPFPTPQQYSPYQPQQPFPQPQQPTPIQPQQPFPQRPQQPFPQPQQQLPLQPQQSFPQPQHPIPQQPQQSFPQQPQRPEQQFPQQPQQIIPQQTQQPFPLQPQQPFPQQPQRPFAQQPEQIISQQPFPLQPQQPFSQPQQPFPQQPGQIIPQQPQQPSPLQPQQPFSQXQPQRPQQPFPQQPTTINSSGTHNKPFPLQPXQPGPQTNKKDHFGQQPKTN

SEQ ID NO: 3435 - protein, 341 aa, Schizosaccharomyces pombe
MSQTTTETIIPLDSSVKDKLDPEYVNFYNKYVCSNLPIVKTHTYPVDFLRNNGNVMPGQSELLPVESTEDITIPRKHTKAPSGVPSRIFRPHGTAPEGGWPCFLWFHGGGWVLGNINTENSFATHMCEQAKCVVVNVDYRLAPEDPFPACIDDGWEALLYCYENADTLGINPNKIAVGGSSAGGNIAAVLSHKVAASPANFPPLVLQLLVVPVCDNTANAKTHKSWELFENTPQLPAAKMMWYRRHYLPNEKDWSNPEASPFFYPDSSFKNVCPALICAAGCDVLSSEAIAYNEKLTKAGVESTIKIYEGCPHPVMAMDAVLEKGRILNKDATNALLAAFA

SEQ ID NO: 3436 - protein, 112 aa, Populus deltoides x Populus maximowiczii
TFVGKKWFVTYHAYAMGRMESIWGKNCRDFVPERWLENGIYRQESPFKFPVFHAGPRMCLGKDMAYIQMKSIAASVIERFEIDVQNKEKCPDHLLSLTLRMKGGLQVKVKER

SEQ ID NO: 3437 - protein, 490 aa, Zea mays
MAREQLEESIVADGNGKEEEVGVMGIGAADGADDQHGGGKLSMKSLLWHGGSVWDAWFSCASNQVAQVLLTLPYSFSQLGMLSGVLLQIFYGFLGSWTAYLISVLYVEYRSRKEKEGVSFKNHVIQWFEVLDGLLGPYWKAAGLAFNCTFLLFGSVIQLIACASNIYYINDRLDKRTWTYIFGACCATTVFIPSFHNYRIWSFLGLGMTTYTAWYLAIAALLNGQAEGVAHSGPTKLVLYFTGATNILYTFGGHAVTVEIMHAMWKPAKFKYIYLLATLYVFTLTLPSSAAMYWAFGDELLTHSNAFSLLPKTRWRDAAVILMLIHQFITFGFACTPLYFVWEKVIGMHDAKSIFKRALARLPIVVPIWFLAIIFPFFGPINSAVGALLVSFTVYIIPALAHVLTYRTASARMNAAEKPPFFLPSWTGMFVLNMFIVVWVLVVGFGLGGWASMVNFVRQIDTFGLFAKCYQCPKPPVPAAAQSPAPLPHH

SEQ ID NO: 3438 - protein, 373 aa, Thermosynechococcus elongatus BP-1
MGSWPSWDCSASSCNGWPNPWGSAMKAAVLYGKEDVRIETVPDPTPGPGEVVIRVRAATTCGTDLKVWRRGGHARMLTPPILFGHEAAGEIVALGAGVTGWQVGDRVVANNSAPCGQCFYCQRQAFSLCPHLEFNNGTFAEYLKLPASIVRQNLLPIPESLPFALAALTEPLACVLHGVARSGFDPAMVATWPSPPQIVVLGDGAIGLMFVGVLAQQGARVLAFGGSNQRLAIATTFGAEQTINHHQCGDIPAVVKDWTEGRGADIVIEATGVPEVWETAIACGRPGATINLFGGCPRETTIRVDTERLHYEELTLKGVFHNTPSFVRQALQLIASGTLPFEKLISGQAPLMEIETVLQAMKARQVIKVALQP

SEQ ID NO: 3439 - protein, 251 aa, Zea mays
MAAKCYPTVSDEYLAAVAKAKRKLRGFIAEKNCAPLMLRLAWHSAGTFDVATKTGGPFGTMKCPAELAHGANAGLDIAVRLLEPIKEQFPILSYADFYQLAGVVAVEVTGGPEVPFHPGRQDKPEPPPEGRLPDATQGSDHLRQVFSTQMGLSDQDIVALSGGHTLGRCHKERSGFEGAWTANPLIFDNSYFTELLSGEKEGLLQLPSDKALLSDPSFRPLMQRYAENEDVIFAEYAEARLKLSLWGFGQV

SEQ ID NO: 3440 - protein, 177 aa, Plantago major
MASSMLSTSSTAVAGRAQATMVAPYAGLKSTSVFPATRKTGNAKLARNAGKVRCMQVWPPLGKKKYETLSYLPDLTVEQLAKEIDYLLRSKWIPCLEFELEHGFVYRENNRSPGYYDGRYWTMWKLPMFGCTDASQVIAELEECKKEYPNAWVRIIGFDNVRQVQCISFIAAKPPGL

SEQ ID NO: 3441 - protein, 285 aa, Zea mays
  misc_feature (153)..(153): Xaa can be any naturally occurring amino acid
MLWKEADSKPDWVKDLDVVGENFEERWLKASKRSAAKKLSKLSRSHNESLLWIKKIPDIIAIDDEIYSNDDDPERWDMQIFRSIDSNSVKGFPKDPREATSKNLVFGKNVLIDMSVHTAYVNVIRGAQHFIYIENQYFLGSSFNWDSHRDVEXTMQMMYEIIYKALKEVGLDGTYEPQDYLNFFCLGNREAEDTTCTSSGPFSASNPQDQARKNRRFMVYVHSKGMIVDDEYVIIGSANINQRSMEGTRDTEIAMAAYQPQHTWANMLSAPRGQIFGYRKIQCTC

SEQ ID NO: 3442 - protein, 404 aa, Oryza sativa (japonica cultivar-group)
MEGKGVLEGRYEMGRVLGHGNFGRVHAARDVRTGRAVAMKVVSKDKVERAGMAEQIKREIAVMKMVSHPSVVELHEVMATRTKVYLALELVRGGELFDRIARHGRVGEGVARRYFRQLVSAVDFCHGRGVYHRDLKPENLLLDEAGNLKVADFGLSALACHARPDGLLHTACGTPAYVAPEVLAGNGYDGAKADLWSCGVILYVLLAGALPFQDDNLVCMYRKMRRGDFCCPPWVTTDARKLIKSLLDPNPGTRITVAGLLETPWFRKTAPVPRPIIADPAAAPVDTRGNAGDDKDEPPEVLNAFHLISLSEGFDLSPLFEHDPAASPGRATARAGGTRFATREAASGVVARLEALAMGGARVAPSLLMVDVKKDGGDAMEYRPFFSEELRPALKDIVWSPAAT

SEQ ID NO: 3443 - protein, 242 aa, Zea mays
FGSRWPEGVPTAASVQEILFFQAQTMEMMYKIIADELKATDNKDMHPEDYLNFFCLGNREEPPSNGSPESEKSTDKSAAALASKYRRFMIYVHAKGMIVDDEYVILGSANINQRSLAGSRDTEIAMGAYQPHYAWSTKNGHPHGQVYGYRTSLWAEHLGTVDDRFKDPSSLECVRFVNQIAVENWQRFTAEEMSTLQGHLLKYPVKVEADGKISPLSDQECFPDVGGKILGAPTSLPDSLTM

SEQ ID NO: 3444 - protein, 84 aa, Glycine max
MEYQRQRSHQSQGRSRWVPASYFSFESLLLLSCLTASLLILPLLLPPLPPAPFLLLLLPIAILLVLIISAFMPSNVRDITQKKK

SEQ ID NO: 3445 - protein, 486 aa, Bacillus firmus
MNSGVHVGNSDSLKAVWFRRDFRLHDHTALKHAIEAIEKHGGKWLAFFYLDPKTASVEPVHHDYFFQTVMQFKQMLKTNGGDLYIITGTIEGGQLSKLLQAFPEIDAVYANDDRVGDGRLRDEAAEHFLAKQSIPFYTFEDAYLTEPDQVLKKDGTPYKVFTPYYKAWAKERKRTPAVIKRDVLLGSVHKGTAPDREAETLFNNLIKKCSYDWSAIGEEHAIKRLQMFTKKRLSGYKANRDFPSITGTSRLSPYIKTGAVSSRSIYYHILNAEADSYSAETFLKELAWRDFYRMVHFYEPDCKDREIMEGYRELNWSHDQDDLTSWKRGETGFPIVDAGMRQLLNEGWMHNRLRMITASFLTKDLLIDWRLGERYFERMLIDYDPSSNIGGWQWAASVGTDAVPYFRIFNPVTQSKRFDENGTYIRTYIPELNHVPDHYIHEPWKMSEEEQVKYKCRLDEDYPLPIVDHSKQRKKALSFFKGDDEE

SEQ ID NO: 3446 - protein, 240 aa, Zea mays
GVAMEGDDDGPEWMMEVGGAGATGKGKGGALDKNKKRFSEEQIKSLESMFATQTKLEPRQKLQLARELGLQPRQVAIWFQNKRARWKSKQLERDYSALRDDYDALLCSYESLKKEKHTLLKQLEKLAEMLHEPRGKYSGNADAAGAGDDVRSGVGGMKDEFADAGAAPYSSEGGGKFAHFTDDDVGALFRPSSPQPSAAGFTSSGPPEHQPFQFHSGCWPSSTEQTCSSSQWWEFESLSE

SEQ ID NO: 3447 - protein, 498 aa, Oryza sativa (japonica cultivar-group)
MATCAADLAPLLGPVAANATDYLCNRFADTTSAVDATYLLFSAYLVFAMQLGFAMLCAGSVRAKNTMNIMLTNVLDAAAGALFYYLFGFAFAFGTPSNGFIGKQFFGLKHMPQTGFDYDFFLFQWAFAIAAAGITSGSIAERTQFVAYLIYSAFLTGFVYPVVSHWIWSADGWASASRTSGPLLFGSGVIDFAGSGVVHMVGGVAGLWGALIEGPRIGRFDHAGRSVALKGHSASLVVLGTFLLWFGWYGFNPGSFTTILKTYGPAGGINGQWSGVGRTAVTTTLAGSVAALTTLFGKRLQTGHWNVVDVCNGLLGGFAAITAGCSVVDPWAAIICGFVSAWVLIGLNALAARLKFDDPLEAAQLHGGCGAWGILFTALFARQKYVEEIYGAGRPYGLFMGGGGKLLAAHVIQILVIFGWVSCTMGPLFYGLKKLGLLRISAEDETSGMDLTRHGGFAYVYHDEDEHDKSGVGGFMLRSAQTRVEPAAAAASNSNNQV

SEQ ID NO: 3448 - protein, 189 aa, Glycine max
  misc_feature (142)..(142): Xaa can be any naturally occurring amino acid
MAINHETWAFVFGLLGNVISFMVFLAPLPTFYQIYKKKSTEEFQSLPYVVALFSSMLWIYYALVKKDASLLLITINSFGCVIETIYLAIFLIYAPSKTRLWTIKLLLMLNVFGFGAMLLSTLYLTTGSKRLTVIGWICLVFXISVFAAPLCIIKRVIKTKSVEFMPFSLSFFMTINAGMWYFYGLLLKD

SEQ ID NO: 3449 - protein, 143 aa, Triticum aestivum
  misc_feature (58)..(58): Xaa can be any naturally occurring amino acid
  misc_feature (72)..(72): Xaa can be any naturally occurring amino acid
  misc_feature (82)..(82): Xaa can be any naturally occurring amino acid
  misc_feature (124)..(124): Xaa can be any naturally occurring amino acid
  misc_feature (142)..(142): Xaa can be any naturally occurring amino acid
MAPTVMASSATSVAPFQGLKSTAGLPVSRRSSSAGLSSVSNGGRIRCMQVWPIEGIKXFETLSYLPPLSTEXLLKQVDYLIXRSKWVPCLQFNKVGSFSRGAKQFPPGNTMGQYWAMWELPMFXGCTDATQVLNEWRRSKKXT

SEQ ID NO: 3450 - protein, 351 aa, Streptococcus agalactiae 2603V/R
MRAATYLSANELSLTDKAKPQVIKPTDAVVRLVKTTICGTDLHILGGDVPACKPGTTLGHEGIGIVEEVGSAVNHFKVGDKVIISCVTACNTCYYCKHQLPSHCEDGGWILGHLIEGTQAEYVHIPHADGSLYHAPEGVCDDALVMLSDILPTSYEIGVLPSHIKPGDTVCIVGAGPIGLSALLTAQFYSPAKIIMVDLSQKRLEASKKFGATHTILSTSTQEVKEEIDKITKGRGVDVVLECVGYPATFDICQNVVSIGGHIANVGVHGKPVEFNLQDLWIKNITLNTGLVNANTTEMLLEVLETGKIDATQLVTHHFKLSEIEEAYKVFKAAEENNTLKVIIENDITPA

SEQ ID NO: 3451 - protein, 379 aa, Leptospira interrogans serovar Lai str. 56601
MNLNGAELMIRFLEFAGVEIVSGIPGGASLPIYDALYESKIRHILARHEQGAGFIAGGMARANGKPGVCFASSGPGVTNLITAVADAKMDSIPLIVITGQVPVSMIGTDAFQEIDTFSLSVPITKRSYLVKKIEDLIQILPQAWKTAIEGRPGPVWIDVPKDVASAKIDWDISREKEIWNIQKIEFKDTIDLEWKKTFKELLSKAKKPVFYIGGGLNRPLAAELFCILLEKLNFPTVSTLMGLGICPYEHPRFLGMLGMHGSRAANLVLEEADLLVALGVRFDDRATGKLNEFCPNAKIVHVDIDATEIGKLKNPNLFLKHGVENFITQILEEDLSSEHLSSEEWLNQVQTLKTLYGFSIPKRIKFYIRFRFYKVSRTF

SEQ ID NO: 3452 - protein, 452 aa, Mesorhizobium sp. BNC1
MSDFDLVLSGRVVLPDVVVENGYVAVRDGRVEHVGKGDAPSARERHVLGNALILPGAIDAQVHSLSQKHQEDFIWSTRSAAAGGVTTIVDMPYDEGNLVCSAAAVRKKVDHASSQARVDFALYGTIDPMEGPARIAEQAEAGVAAFKFSTFGTDPVRFPRISPALLEECFVAVAKTGLTAGVHNEDDEMVHHAMARVKAAGISDYRAHAMSRPPLTELLATLQIYEIGAQTGCPAHVVHCSLSRGYEIARSYRDQGYAATIEACIHYLTLDEDNDVKRLGGKAKINPPLRPRAEVEKLWEHVRRGNVTLVSTDHVSWSENRKNNSDMLANSSGVPGLEVMVPLFVKGALARDIPLTWAAKLMAESPARHFRIDHAKGALTAGRDADITVLFPRPKIYDAAESGHNVVGWSPYNGIELPWTVGLTYLRGRQVFDGTETAAPGTGRFVRPEARH

SEQ ID NO: 3453 - protein, 351 aa, Staphylococcus aureus subsp. aureus MRSA252
MKALVKTREGHGNLELLDKEVATPLDDKVKIKVHYAGICGTDIHTYEGHYKVNFPVTLGHEFSGEIVEVGADVKDFKVGDRVTSETTFYVCNECEYCESKDYNLCNHRKGIGTQVDGAFTNYVIAREESLHHIPDEVSYQSAAMTEPLACAHHGVSKIQVNSGDVAVVMGPGPIGLLVAQVLKSKGATVVVTGLDNDKVRLDKAEALHMDYVVNLQQTDLKTYINGITDGYGADVVVECSGAVPAARQGLDILRKKGFYSQIGIFKDAEITFDMEKVIQKEITVVGSRSQKPADWEPSLQLMADGLVNAEALVTKIYDISKWDEAYQHLKSGEGIKALLKPLDLDENEGEN

SEQ ID NO: 3454 - protein, 415 aa, Spinacia oleracea
MASFTTTTAAAASRLLPSSSSSISRLSLSSSSSSSSSLKCLRSSPLVSHLFLRQRGGSAYVTKTRFSTKCYASDPAQLKNAREDIKELLQSKFCHPIMVRLGWHDAGTYNKDIKEWPQRGGANGSLSFDVELRHGANAGLVNALKLLQPIKDKYSGVTYADLFQLASATAIEEAGGPTIPMKYGRVDATGPEQCPEEGRLPDAGPPSPAQHLRDVFYRMGLDDKDIVALSGAHTLGRSRPERSGWGKPETKYTKDGPGAPGGQSWTAEWLKFDNSYFKDIKEKRDADLLVLPTDAALFEDPSFKVYAEKYAADQEAFFKDYAEAHAKLSNQGAKFDPAEGITLNGTPAGAAPEKFVAAKYSSNKRSELSDSMKEKIRAEYEGFGGSPNKPLPTNYFLNIMIVIGVLAVLSYLAGN

SEQ ID NO: 3455 - protein, 220 aa, Glycine max
SDGKTFYCLEMAKYFNPGEAEAMNQSVAYLLSKLSYIPSTLFLSEVSYVEFLDRVHVSEKKLRAQGLWEVPHPWLNLLIPRSEIHNFAEEVFGNILKDTNNGPILIYPVNQTRWNSKTSLITPEEDIFYLVAFLSLALPNSTGADSLEHILAQNKRVIDFYTGAKMRVKQYLPHYSTQEEWQVHFGSRWETFVERKRAYDPLALLAPGHKIFQKAVSSSC

SEQ ID NO: 3456 - protein, 119 aa, Populus deltoides x Populus maximowiczii
AGDMFQAVPPAEAILLKCILHDWSDEDCVKILKRCKQAIMSEGQQKAGKVIIIDMVRENQNGDEGSIETQLIFDLAMMVVVSGVERNEKEWAKLFFDSGFLNYKIHPVPGTRAVIELYP

SEQ ID NO: 3457 - protein, 347 aa, Staphylococcus aureus subsp. aureus MRSA252
MKALKLYGVEDLRYEDNEKPVIESANDVIVKVRATGICGSDTSRYKKMGPYIQGMPFGHEFSGVVDAIGSDVTHVNVGDKVTGCPAIPCYQCEYCLKGEYARCEKLFVIGSYEPGSFAEYVKLPAQNVLKVPDNVDYIEAAMVEPSAVVAHGFYKSNIQPGMTVAVMGCGSIGLLAIQWARIFGAAHIIAIDIDAHKLDIATSLGAHQTINSKEENLEKFIENHYANQIDIAIESSGAKVTIGQILTLPKKGGEVVLLGIPYDDIEIDRVHFEKILRNELTVCGSWNCLSSNFPGKEWTATLHYMKTKDINVKPIISHFLPLEKGPETFDKLVNKKERFDKVMFTIY

SEQ ID NO: 3458 - protein, 121 aa, Exiguobacterium sp. 255-15
MAFNKEQFIEDLKGMTVLELNELVKTIEEEFGVSAAAPVAAAGAGAAAAEEQTEFDVILTSAGSGKINVIKAVRELTGLGLKEAKALVDGTPAPVKEGVSKEDADAIKAKLEEAGASVEVK

SEQ ID NO: 3459 - protein, 426 aa, Aquifex aeolicus VF5
MNKTTFENVYYWEGKAQIPQEGQFIKLKEDKTLEVPDNPIIPFIEGDGIGPEITQAMLLIINTAVEKTYNGSKKIYWVELLAGDKAEEKTGERLPQETLDVLKESIVGIKGPLGTPVGKGVRSINSALRRAFDYYSAVRPVYWMGQATPIPNPERVDLVVFRENTDDVYAGVEFFAGTPEAKKVREFLIKEMGAKEEGFPEDVGITVKPMSEFKTKRHVRKALRYALENNKKNVAVIGKGNIMKATEGAFINWAFEVAEEPEFKGKVVTDPEAEPGEGQVKLTKVITDQMLMQLVLKPEAWDVIIAQNLNGDYVSDLAASLIGGPGFVPSGNIGDGYALFESTHGTAWDIAGKGIANPLSLTLSGAMMLEYIGWKEAAQKVYDAVRRTLAEHIGTPDIASGFQKQGIEAKAVGTMEFAEEISKRIE

SEQ ID NO: 3460 - protein, 100 aa, Triticum aestivum
MAPTVMASSATSVAPFQGLKSTAGLPVSRRSNGASLGSVSNGGRIRCMQVWPIEGIKKFETLSYLPPLSTEALLKQVDYLIRSKWVPCLEVQQRSGFIFR

SEQ ID NO: 3461 - protein, 499 aa, Vitis vinifera
MELLSCLLCFLAAWTSIYIMFSARRGRKHAAHKLPPGPVPLPIIGSLLNLGNRPHESLANLAKTYGPIMTLKLGYVTTIVISSAPMAKEVLQKQDLSFCNRSIPDAIRAAKHNQLSMAWIPVSTTWRALRRTCNSHLFTSQKLDSNTHLRHQKVQELLANVEQSCQAGGPVDIGQEAFRTSLNLLSNTIFSVDLVDPISETAQEFKELVRGVMEEAGKPNLVYYFPVLRQIDPQGIRRRLTIYFGRMIEIFDRMIKQRLQLRKIQGSIASSDVLDVLLNISEDNSNEIERSHMEHLLLDLFAAGTDTTSSTLEWAMAELLHNPETLLKARMELLQTIGQDKQVKESDISRLPYLQAVVKETFRLHPAVPFLLPRRVEGDADIDGFAVPKNAQVLVNAWAIGRDPNTWENPNSFVPERFLGLDMDVKGQNFELIPFGAGRRICPGLPLAIRMVHLMLASLIHSYDWKLEDGVTPENMNMEERYGISLQKAQPLQALPVRV

SEQ ID NO: 3462 - protein, 422 aa, Oceanobacillus iheyensis HTE831
MTQAEKIVVENGKMNVPDTPIIPFIEGDGTGPDIWASAQKVIEAAVDKAYDGKKSIEWMEVYAGQKAYDKTGEWLPKDTLDKINEYKIAIKGPLTTPIGGGIRSLNVALRQELDLFTCLRPVRYFEGVPSPVKRPEEVDMVIFRENTEDIYAGIEWQKGSDEVKKVINFLKEEMGVKNIRFPETSGIGVKPVSEEGTKRLVRSAIDYALNEGRKNVTLVHKGNIMKFTEGAFKNWGYEVAEQEYGDKVFTWAEYDRIVEAEGKDAANKAQDEALASGKILVKDAIADIFLQQVLTRPKEFDVVATMNLNGDYISDALAAQVGGIGIAPGANINYDTGHAIFEATHGTAPKYAGLDKVNPSSVILSAVLMLEHLGWREAADLITKSMDKTIGSKVVTYDFARLMDGAKEVKCSEFGQELIKNM

SEQ ID NO: 3463 - protein, 174 aa, Plantago major
MASAMMSSAATVTAQTSMVGQFSGLKFGSTFPIAKKTGRVSSPSSGLKVRCMQVWPPTGKKKYETLSYLPDLTVEQLAKEIDYLLRSKWIPCLEFELEHGFVYRENARSPGYYDGRYWTMWKLPMFGCTDASQVIAELEECKKEYPNAWVRIIGFDNVRQVQCISFIASKPPGL

SEQ ID NO: 3464 - protein, 373 aa, Oceanobacillus iheyensis HTE831
MTASTKGLEGIVATQSSISSIIDDQLSYVGYRIDDLAENSSFEEIIYLLWNQKLPNKSELDELKSQLAENMDIPDAIINHLRSYDLNTVHPMAALRTAISLLGLYDNEADVMDEQANKRKAVRIQAQIATIVTTFSRIRKGQEPVKPKKDLSYAENFIYMLNGKEPEDIEVEAINKALVLHADHELNASTFTARVCVATLSDIYSGITAAIGALKGPLHGGANENVMKMLTEIGEEENAIPYIKEKLANKDKIMGMGHRVYRTGDPRAKFLREMSKELTKLTGQEKWYNMSVKIEDYIKENKGLPANVDFYSASVYHSLGLDHDIFTPLFAVSRTSGWIAHILEQYENNRLIRPRAEYTGPELRDYVSIEQRG

SEQ ID NO: 3465 - protein, 140 aa, Brassica napus
TAYIQTIRSAQHFIYIENQYFLGSSYAWPNYKDAGADNLIPMELALKIVSKIRAKERFAVYVVIPLWPEGDPKSGPVQEILYWQSQTMQMMYDVIVRELKAVQSDAHPLDYLNFYCLGKREQLPENMPATNGSAGSDSYK

SEQ ID NO: 3466 - protein, 159 aa, Plantago major
MSDEEHQFEAQADAGASKTFPQQAGTIRKNGYINIKNRPCKVVEVSTSKTGKHGHAKCHFVAIDIFNGKKLEDIVPSSHNCDVPHVNRVDYQLIDISEDGFVSLLTDNGSTKDDLRLPTDDALATQIKEGFAEGKDLVVSVMSAMGEEQINAIKDVGPK

SEQ ID NO: 3467 - protein, 476 aa, Burkholderia fungorum LB400
MLHAAQFYIDGGWVEPTSPVWFDIVDPSTETPFEKLALGNAQDVDRAVAAARRAFASWSATSVADRVALLKRIVTIYERRYDEFAELMRREMGAPITFARNGQAARGPAHLNALIDVLERFEFEEQRGSTRIVLEPIGVCGLITPWNWPVNQIVVKIAPALAAGCTMVLKPSEYSPLSALLFADVLDEAGVPAGVFNLVNGDGPGVGSAIASHPDIDMVSFTGSTRAGVLVAQSAAETVKRVAQELGGKSANILLDDVDLDQAVTRGVAACFTNSGQSCSIPTRMLVPRHLMNDAAQIAKRAAQAYRLGPTDDPATQLGPLVNANQFKRVQALIQIGIDEGARLVTGGTGRPDGIDTGYYARPTVFADVTPQMTIAREEIFGPVLSMIPYDSEEQAIDIANGTDYGLAAYVQSADLARARKVGRALRAGGVHLNYPPADFGAPFGGYKRSGNGREWGEAGLREYLETKALAGYGVD

SEQ ID NO: 3468 - protein, 319 aa, Oceanobacillus iheyensis HTE831
MKRIGVLTSGGDSPGMNAAIRAVVRKAIYHDLEVYGIKNGYQGLMDGNIEKMTLGSVGDIIHRGGTILFSARSEEFKTDEGQFRAIEQLNKHNIDGLVVIGGDGSFQGAKKLTEKGFPCIGVPGTIDNDIAGTDYTIGFDTSLNTIIDAVDKVRDTATSHERTYIIEVMGRDAGDLALWAGLAVGAESILIPEEKEDFSSIVQRLKNGHDRGKKHSIILLAEGVGSGFEFGKRIEEVAELETRVTVLGHIQRGGSPTGQDRVLASRLGARAIELLIDNQGGRMVGIQKNVLVDYTFDEVFNVEHTIDKGMYKLSKELSI

SEQ ID NO: 3469 - protein, 486 aa, Saccharomyces cerevisiae
MVQRLLPGAHICRRSFNSSAIIKSSALTLKEALENVIPKKRDAVKKLKACYGSTFVGPITISSVLGGMRGNQSMFWQGTSLDPEHGIKFQGLTIEECQNRLPNTGIDGDNFLPESMLWLLMTGGVPTFQQAASFRKELAIRGRKLPHYTEKVLSSLPKDMHPMTQLAIGLASMNKGSLFATNYQKGLIGKMEFWKDTLEDSLNLIASLPLLTGRIYSNITNEGHPLGQYSEEVDWCTNICSLLGMTNGTNSSNTCNLTSQQSLDFINLMRLYTGIHVDHEGGNVSAHTTHLVGSALSDPYLSYSSGIMGLAGPLHGLAAQEVVRFLIEMNSNISSIAREQEIKDYLWKILNSNRVIPGYGHAVLRKPDPRFTAMLEFAQKRPIEFENDKNVLLMQKLAEIAPKVLLEHGKSKNPFPNVDSASGILFYHYGIRELLFFTVIFGCSRAMGPLTQLVWDRILGLPIERPKSLNLEGLEALTKASNVNKL

SEQ ID NO: 3470 - protein, 112 aa, Glycine max
  misc_feature (68)..(68): Xaa can be any naturally occurring amino acid
ARVPFVDKEFIRVAGNIDPEGKMINKDEGRIEIWTLQMTFDDEDHPYMAKHILYNHNEQSSDGVGYGXIDGLKAYDEQHATDRFMLNTGHTITCNTYTANELYHYRMISERV

SEQ ID NO: 3471 - protein, 354 aa, Aspergillus nidulans FGSC A4
MAASFVPRQAFPNYASIPRSYFLGHHRAGLNKMRNMLSSIDYVIECRDTRVPFTSVNPMFEEALGKTRRLIVYTKRDLGSEAGSREQKSLEKQIRSFNRGTPVFFVSPHHLDPRSKSRTNNRPDVNTILTHLREDAQGPDRLVGCRVMVVGMPNVGKSTLINNLRNRGVGKAKAVHTGDQPGITRKIGTPVKIIERDNGAHVYVLDTPGVFMPYVPDAENMLKLALCGCVKDSVISPVTLADYLLYHINLHDPTVYQRWSLPTNEVHPLLDSFARSTGLLAKGGIPNMDLAALHFIQKWRGGGLGRFILDDLQEERRRRESSDEDKASISITQALKAEKSARRQQATDPSVRQK

SEQ ID NO: 3472 - protein, 276 aa, Triticum aestivum
  misc_feature (256)..(256): Xaa can be any naturally occurring amino acid
MGMDRTLYLWRSSEERAADMSTRRTEDGAVKCALRHFRRELVTRGLRFMAAAWGGLSPLPGAAAARVLRRPRVRPRVRGRVGKLYTYIVQPWAPTVMASSATSVAPFQGLKSTAGLPVSRRSNGASLGSVSNGGRIRCMQVWPIEGIKKFETLSYLPPLSTEALLKQVDYLIRSKWVPCLEFSKVGFIFREHNASPGYYDGRYWTMWKLPMFGCTDATQVINEVEEVKKEYPDAYVRIIGFDNMRQVQCVSFIAFXPPGCEESGKGLNSSLTTGHI

SEQ ID NO: 3473 - protein, 178 aa, Glycine max
  misc_feature (91)..(91): Xaa can be any naturally occurring amino acid
  misc_feature (100)..(100): Xaa can be any naturally occurring amino acid
  misc_feature (122)..(122): Xaa can be any naturally occurring amino acid
  misc_feature (149)..(149): Xaa can be any naturally occurring amino acid
MASSMISSPAVTTVNRAGPGMVAPFTGLKSMAGFPTRKTNNDITSIASDGGRVQCMQVWPPVGKKKFETLSYLPDLDDAQLAKEVEYLLKXGWIPYLEFXLKHNFVYHKHNKSPIYYNKRYXTICKRAIFICTNTSHILNKRARTNTTXGNNCIRMITCGRHRQLQYISCISYERPSY

SEQ ID NO: 3474 - protein, 248 aa, Anthurium andraeanum
MTAKAKRGAAVAAEARVAKKRVVKLNKGPWTAEEDQKLVEYVDAHGDRKWTSLPTKAGLNRCGKSCRLRWLNYLRPGIKRGNISEAEEDMIIRLHNLIGNRWSLIAGRLPGRTDNEIKNYWNTHLSKKPLTISDLNDKLNDDGGSRSDVDEPPSSGQSQGPLDSRRPAEPRISEASNEVAFNVDELVNLPAILDFDDLLDSGSCSDGIITSSQIFWTPNFSAHDQQDISDFDDLGMLMDIMDYVICPP

SEQ ID NO: 3475 - protein, 113 aa, Rickettsia helvetica
ANEAVINMLKEIGSSENIPKYIAKAKDKNDPFRLIGFGHRVYKNYDPRAAVLKETCKEVLKELGQLENNPLLQIAIELEAIALKDEYFIERKLYPNVDFYSGIIYKAMGIPSQ

SEQ ID NO: 3476 - protein, 335 aa, Nepenthes alata
YQWAFAIAAAGITSGSIAERTQFVAYLIYSSFLTGFVYPIVSHWFWSVDGWASASRASNLLLGSGVTDFAGSGVVHMVGGVSGLWGALIEGPRIGRFDRSGRSVILRGHSGSLVVLGTFLLWFGWYGFNPGSFLTILKAYGNNGGYFGQWSAVGRTAVTTTLAGSTAALTTLFGKRLLVGHWNVTDVCNGLLGGFAAITSGCSVVDPWAAIICGFVSSWVLIGFNKLAEKVKYDDPLEAAQLHGGCGMWGLIFTGLFATKKYVSEVYGGSPDRPHGLFMGGGGKLLAAQLIQIVVIFGWVTATMGPLFYGLKWLKLLRVKSEHEMAGMDMTSHGG

SEQ ID NO: 3477 - protein, 504 aa, Mesorhizobium sp. BNC1
MEETMQTAHTWKADRQQSLRGHTVPTALLIAGEWIERDKSFTVTNPATNEEIARVSDGTAEDALRALEAATASQEAWAAWAPRQRANLFHRAHRLMLERATAFAEVMTLESGKPLAEAKAEFALSADFFLWYAEQIAHLHGTFASGSPGGYRIIATHRPVGPCFLVTPWNFPLLMIARKGGAALAAGCTTIVKSARETPLTAALFAQTLLEAGFPAGTVNLIHTTSSASISEALLADPRLRKVSFTGSTEVGSRLLSGAAQNIVNASMELGGDGPFVVLEDADIDLAVRQAIICKFRNAGQACVAANRIICHAAVVDEFTQKFVDETRKLRVGDGFEPGTDVGPIISSPQLERVDRMVAMLKDAGAELLTGGKRKGVTGNFYEPTVMRIKGSAPACRNEELFAPIAVIYSVDSVAEAIRFANDTIYGLAAYVFTRNVDRAIAVSEKLDFGMVGINRGIMADPAAPFGGIKSSGLGREAGHDGIYEFLEPQYLALTVNEAAGISQ

SEQ ID NO: 3478 - protein, 495 aa, Gibberella zeae PH-1
MTSTTQISLPNGKKYDQPTGLFINNEFIAATGDEFVVTNPHTEEEVIKLKGASKEDVDKAVQAARKAFEGEWSELAAVDRGAFLYKIADLIDRDRELIAAIDAFDNGKPFSACLAGDLDESYNVFRYYAGAADKISGKTIETSPAKLAYVLQEPLGVCGQIIPWNFPFMMLAWKVAPALACGNTVILKPAEQTPLSALYFGNLVKEAGLPAGVVNVLPGLGPSTGKAIAGHMDIDKVAFTGSTNTGRAIMKDAANNLKNITLECGGKSPSIVFADAELEQAVKWCHFGIMDNKGEVCTSTSRIYVHEDIYDKFLEKFVEVTKENDKLGAPFDESTVQGPQVSKTQYDRVLSYIEEGRKSGAKLLYGGSKHGGKGYFLQPTVFADTTEDMKIMKEEIFGPVVSIAKFSTDEEAIKKANDTSYGLAAALFTEKIARAHKVARKLQAGMVWINSSGDSHFGIPFGGYKSSGIGRELGQYALDAYTQPKAVHVNLGFEL

SEQ ID NO: 3479 - protein, 460 aa, Magnaporthe grisea 70-15
MATTKSAFLHRSLKEFPAQVVEAKDKTLVFSDGTKVLDSTCGAAVACIGYNNDLSERVKQAMIRQMDKFPYCNSFFGHEVGEQLAQELMDGTGGAMSKAYIVNSGSEAMEGTMKMARQYFLELQPPQPSRINFIAREGSYHGTTLGALSMSGHVGRRSKFLDLLLPNVARVSRCDAYRGMKEGQSVAEYVEQLADELDKKFQELGPETVCAFVAEPVVGATLGCVPAVPGYFEAMRKVCDKYGALLILDEVMSGMGRSGTLHAWQQEGVVPDIQTIGKGLGGGYAPVAAFMINHRVADTLESGTGEFMHGHTYQGHALGCAAALEVQRIVREENLIDNVKQRGVQLEKLLQQHLGNHPNVGNIRGKGLFWGIEFVADKASKEPFPRSVDLANKVNRAGVKEFGVSLYPGTGTKDGVLGDHVILAPAYNCTADEIEEIVIKTKETVARVLRVKNAETATSA

SEQ ID NO: 3480 - protein, 130 aa, Leptospira interrogans serovar Copenhageni str. Fiocruz L1-130
MTNAVLNEKNHSVTSEETKKERVRILAPRVDIYSDEENIYLLADLPGVEEKDVQVQLEKDQLIISGKTSNKDIQGELRYSEFRTGEYKRTFTLTESVEEDRISAVYKNGVLNLTLPKRKPLTKKIEVRSE

SEQ ID NO: 3481 - protein, 279 aa, Exiguobacterium sp. 255-15
MEQKLKLWFTEHQTEDYGITFRVNHVYESEQTEFQRLEMVETDEFGTMLLLDGMVMTTDRDEFVYHEMVAHVPLFTHPNPKSVLVVGGGDGGVIREVLKHPSVEKAVLVEIDGKVIEYSKKYLPNIAGGLDDARVEVIVGDGFMHIAEAVNEYDVIMVDSTEPVGPAVNLFTKGFYSGISKALKEDGIFVAQSDNPWFTPELIRDVQRDVKEIFPITKLYIANVPTYPSGLWTFTIGSKKHDPLAVAPERFHEIETKYYTPELHTAAFALPKFVKDLTI

SEQ ID NO: 3482 - protein, 411 aa, Oceanobacillus iheyensis HTE831
MANLRDEALHLHKVKQGKLEINTKVPVKDAKDLSLAYSPGVAEPCKEIYDRKETVYDYTMKGNMVAVVSDGSAVLGLGNIGPEAALPVMEGKAVLFKGFAGVDAFPICVDTHDVEQIVQTVKLLEPNFGGVNLEDIAAPNCFIIEDRLKSETNIPIFHDDQHGTAIVTVAGLINALKLVGKKFSDIKVVANGAGAAGIAIIRLLQSFGVRDMIMCDSKGAIYEGRPYGMNTVKDSVAKYTNANKVEGSLSDVLEGADVFIGVSVGGALTKDMVRSMNDDAIIFAMANPDPEILPEDAKEAGARVIGTGRSDFANQVNNVLAFPGIFRGALDVRATRINEEMKVAAAEGIATLISDDELHDDYVIPSPFDERVAPLVASHVAKAAMSTGVARMNVDPEEVAEKTRKLTQQEK

SEQ ID NO: 3483 - protein, 425 aa, Bacillus israeli
MIVAEGQKITMTNGTLNVPNDPIIPFIEGDGTGPDIWRAASKVLEAAVEKAYNGEKKIVWKEVLAGEKAFKETGEWLPQETLDVIREYMIAIKGPLTTPVGGGIRSLNVALRQELDLFVCLRPVRYFNGVPSPVKRPQDTDMVIFRENTEDIYAGIEYAKGTEEVKKVIEFLQKELGVNKIRFPETSGIGIKPISEEGTKRLVRAAINYAIEHGRKSVTLVHKGNIMKFTEGAFKNWGYELAEQEFGDKVFTWAEYDRIVEKEGKEAANKAQEEAEKAGKIIIKDAIADIFLQQILTRPREFDVVATMNLNGDYISDALAAQVGGIGIAPGANINYETGHAIFEATHGTAPKYAGLDKVNPSSVILSGVLMLEHLGWKEAADLIIQAMEKTIASKVVTYDFARLMDGATEVKCSEFGNELIKNMG

SEQ ID NO: 3484 - protein, 441 aa, Gibberella zeae PH-1
MKSVVFKGVKQVALEDRPKPMIQDPTDIIVKVKYTAFELHVFRGHQPSGTGFIMGHEFTGVIDQVGSAVKSLEVGDAIVSPFTVSCGECFFCKRGYSSRCDKSLLFGTVLLDGAQAEYVRIPYAQSTVMKAPKEVEDLKLCLMADIFPTGCYAASNGLDSLDKERVQESIVVLIGCGPVGICALIAALEYKPKAILAVDGIESRLSLAKDLGAEPWNYLTQKQDLEKRVKDLSDGRGADVIIEVVGHSSALDMGFKLLRPWGIISSVGVHNGEIPWTGNEAYGKNLTIKMGRCPVRSIFENSLKLLAKKQHLLEFMTATVMPLSNAPEGYELFDSMKVQKVIFDAEKIRSAFLMIKPDVASSDATDIRFEMKRNGDSYILNGILSSGSDDLRCDVYIVVGKIDASNPNTHRRQFVFLVPVRFPGVAVHHILNVFSAGRTLS

SEQ ID NO: 3485 - protein, 258 aa, Plantago major
VIFHTFCEDIASQLPAVVVSVEYRLAPENRLPIAYDDALNAILWAKDQALGKGGRDPWMEYADFTKVFILGSSAGANIAYHVALRALDFDISPLQIKGVMMNQGYFGGVARTASEIRLKDDAYVPLYVNDVLWTLALPTNLNRDHEFCNPISGGTYLGRIYRLPKIYIKGDYGDPLVDRSVQLAQYLINNGRTVFYRFNAGGFHGIELQNTTAAQELYDDFKYFVNNPFIMNENGISKEPLSYDMKEIMSGGVSRASA

SEQ ID NO: 3486 - protein, 294 aa, Triticum aestivum
  misc_feature (40)..(40): Xaa can be any naturally occurring amino acid
  misc_feature (143)..(143): Xaa can be any naturally occurring amino acid
RGAAVDGLLLLDRDDEYAALMLSKEGAGAGGGGGACGEDXGTEGTNAARAACVHWIVKTNARFLFGGKTAYVSVTYLDRFLAQRRVDRGKEWALQLLSVACLSLAAKVEEHRVPRLPEFRPDEYDFDSASILGTGSLSNPSPXLQMIAGTPFPYLSCFVARFRHDERKAIVLRAVKCIFASIKAMSSVEYQPSTMALASILVARGGREGTGTAPNLEEELKAILGSSWQQLHTGHVYSCYSVMIQEEDRSTQSGREVASSGVSAAAPAGSPGTSVAMAMVRGGVVEQDPVERAG

SEQ ID NO: 3487 - protein, 409 aa, Novosphingobium aromaticivorans DSM 12444
MIAQPLTIIGGRLVPGSGEPVAGNLRCEGGRIVALGDVAPQDGDTVFDAGGALVAPGLVDLGVFAVDKPAFHFGGITRAALMPDQAPPLDHPARVRFAAQSGKPDMWVHPLAAATRGLEGTELAELALMRDAGAKAVSTGRAWIGDSGVMLRLLRYCAMLRLVVVTHAEDAAITGSAVATAGEVATRLGLPSAPAEAEALAVARDIALAEMSGCHVHFRQVTTAQALDLVRTAKARGVRVTAGVTPAHFVLSDLELVGFRTFCRLSPPLRSDADRKAVIAAIADGTIDVIASGHDPRGPEDKRLPFADAEPGMAGAETLLPLTLTLVRDGVIDLARAFELLAGNPARLLGVDAGRLETGAEADIAIVDPARPWIVNSGKMAASAGNTPFDRRPVEGRVTALFKGGKQVH

SEQ ID NO: 3488 - protein, 321 aa, Haemophilus influenzae R2846
MIKKIAVLTSGGDAPGMNAAIRGVVRSALAEGLEVFGIYDGYQGLYNNKIKQLNRYSVSDVINRGGTFLGSARFPEFKDPNIRAKCAEILRSHGIDALVVIGGDGSYMGAKLLTEEHSFPCVGLPGTIDNDVAGTDYTIGYQTALQTAVDAIDRLRDTSSSHQRISIVEIMGRHCSDLTISAGIAGGCEYIVASEIEFNREELIQQIERSIIRSKRHAIIAITELLTDVHSLAKEIEARVGHETRATVLGHIQRGGSPCAFDRILASRMGAYAVDLLLQGKGGYCVGIQNEQLVHHDIIDAINNMQRVFKADWLKVAKRLE

SEQ ID NO: 3489 - protein, 177 aa, Corynebacterium glutamicum ATCC 13032
MSTYQDDRFPGPDPYAPLGEKPSFTLTSTDLENGAKLAEAQLGGTDISPQLSWSDLPEGTKSLAITCLDPDAPTGAGFWHWAVFNIPTTVTEIPTGAGDETLGGIEGVVSLKGDSGKRGFYGAQPPAGHAPHRYLFAVHALDVEKLDIAPDATPTVLGFNLYFHTLGRSIVWGWYEN

SEQ ID NO: 3490 - protein, 384 aa, Rhodopseudomonas palustris CGA009
MSSQPLMFFLAFLAVLALIGAAAWLVRRFAGNRLGTNASRGRMPRLAVIDAAAVDGRRRLVLVRRDNVEHLLMIGGPSDIVIEPNIVRATPARDPLPTRAGVEPRLTTPEPGQWEADTAAELPEPELPPLPTRPLRPALAEEPRRAPPPMPERRPADPFASLVPEPIARPEPPLQPLPRTEPPMPRVEAPIMRAEPPIMRADPPILRPEPPITRPEPPVLRPEPPVLRPEPPVLRPEPPRPEPRMEPAPRPRAEPAMPRPPRPEPKPAPGPLRTERPAPPPAPPAPPPAPAAPVAAALATADQNLAEMANRLEAALRRPPNAPAEPAPPVAPEPPARPNPPAPRAAEPATEEPTADTSPAAGKTGFESLEDEMAALLGRPKSPT

SEQ ID NO: 3491 - protein, 1158 aa, Streptococcus agalactiae
MFKSNYERKMRYSIRKFSVGVASVAVASLFMGSVAHASELVKDDSVKTTEVAAKPYPSMAQTDQGNNSSSSELETTKMEIPTTDIKKAVEPVEKTAGETSATDTGKREKQLQQWKNNLKNDVDNTILSHEQKNEFKTKIDETNDSDALLELENQFNETNRLLHIKQHEEVEKDKKAKQQKTLKQSDTKVDLSNIDKELNHQKSQVEKMAEQKGITNEDKDSMLKKIEDIRKQAQQADKKEDAEVKVREELGKLFSSTKAGLDQEIQEHVKKETSSEENTQKVDEHYVNSLQNLAQKSLEELDKATTNEQATQVKNQFLENAQKLKEIQPLIKETNVKLYKAMSESLEQVEKELKHNSEANLEDLVAKSKEIVREYEGKLNQSKNLPELKQLEEEAHSKLKQVVEDFRKKFKTSEQVTPKKRVKRDLAANENNQQKIELTVSPENITVYEGEDVKFTVTAKSDSKTALDFSDLLTKYNPSVSDRISTNYKTNTDNHKIAEITIKNLKLNESQTVTLKAKDDSGNVVEKTFTITVQKKEEKQVPKTPEQKDSKTEEKVPQEPKSNDKNQLQELIKSAQQELEKLEKAIKELMEQPEIPSNPEYGIQKSIWESQKEPIQEAITSFKKIIGDSSSKYYTEHYFNKYKSDFMNYPLHAQMEMLTRKVVQYMNKYPDNAEIKKIFESDMKRTKEDNYGSLENDALKGYFEKYFLTPFNKIKQIVDDLDKKVEQDQPAPIPENSEMDQAKEKAKIAVSKYMSKVLDGVHQHLQKKNHSKIVDLFKELEAIKQQTIFDIDNAKTEVEIDNLVHDAFSKMNATVAKFQKGLETNTPETPDTPKIPELPQAPDTPQAPDTPHVPESPKAPEAPRVPESPKTPEAPHVPESPKAPEAPRVPESPKTPEAPHVPESPKTPEAPKIPEPPKTPDVPKLPDVPKLPDAPKLPDGLNKVGQAVFTSTDGNTKVTVVFDKPTDADKLHLKEVTTKELADKIAHKTGGGTVRVFDLSLSKGGKETHVNGERTVRLALGQTGSDVHVYHVKENGDLERIPSKVENGQVVFKTNHFSLFAIKTLSKDQNVTPPKQTKPSTQGSQVEIAESQTGKFQSKAANHKALATGNETVAKGNPTSTTEKKLPYTGVASNLVLEIMGLLGLIGTSFIAMKRRKS

SEQ ID NO: 3492 - protein, 182 aa, Triticum aestivum
MYLHSTAMAPTVMASSATSVAPFQGLKSTAGLPVSRRSNGASLGSVSNGGRIRCMQVWPIEGIKKFETLSYLPPLSTEALLKQVDYLIRSKWVPCLEFSKVGFIFREHNASPGYYDGRNWTMWKLPMFGCTDATQVINEVEEVKKEYPDAYVRIIGFDNMRQVQCVSFIAFKPPGCEEFGKA

SEQ ID NO: 3493 - protein, 331 aa, Arabidopsis thaliana
MFTCINCTKMADRGEEDEEDEARGSTTPNTKEAVKSLTTQIKDMASKFSGSHKQSKPTPGSSSSNLRKFPDFDTASESVPYPYPGGSTSSTPAWDLPRSSYHQSGRPDSRFTSMYGGERESISAQSCDVVLEDDEPKEWMAQVEPGVHITFVSLPSGGNDLKRIRFSREVFDKWQAQRWWGENYDRIVELYNVQRFNRQALQTPGRSEDQSQRDSTYTRIDSARESRDWTQRDNNFRPPGGSVPHHFYGPPMDAARITTSSRDEPPSMSNASEMQGEWVEEDEPGVYITIRQLPDGTRELRRVRFSRERFGEVHAKTWWEQNRDRIQTQYL

SEQ ID NO: 3494 - protein, 314 aa, Azoarcus sp. EbN1
MPLSSQAKALLDMVYRVGAPRFHELSVDQARHSFRKLQWAFGLPSPAVAATVEVAMTRVDGSTLNARLYRPLESSRDDELPLLIYFHGGGWCVGDLESYDVLCRQLANGSGCAVLSIDYRLAPENPFPAAVEDAIFSIEWAAEQAQRLGIDRGCIALGGDSAGGNLSIVGALLAHERASVAIRFMFLVYPSTEIASDRPSRQLFGQGYLLDGESLEWFYGHYLPAGNDEDWRASPMRAPSLAGLPPILLVTAECDPLADDCMAFAERVRAEGGEIEHVAVDGVVHGFITLGQFFPEATHAVDRITAGLRRAVRP

SEQ ID NO: 3495 - protein, 260 aa, Oryza sativa
MSPAEASREENVYMAKLAEQAERYEEMVEFMEKVAKTTDVGELTVEERNLLSVAYKNVIGARRASWRIISSIEQKEESRGNEAYVASIKEYRSRIETELSKICDGILKLLDSHLVPSATAAESNVFYLKMKGDYHRYLAEFKSGAERKEAAENTLVAYKSAQDIALADLPTTHPIRLGLALNLSVFYYEILNSPDRACNLAKQAFDDAIAELDTLGEESYKDSTLIMQLLRDNLTLWTSDNAEDGGDEIKEAAKPEGEGH

SEQ ID NO: 3496 - protein, 159 aa, Ralstonia solanacearum GMI1000
MTLTLTSPAFAAGAEMPGRLTCEGTDTSPPLAWTGLPAGTRSLALIVDDPDAPDPAAPRMTWVHWVLYNIPPATAALAEDAARSHLPSGTREGTNGWQRTGYGGPCPPIGRHRYFHKLYALDTELPDLGTPDKAALERAMHGHVLAQAELVGTYQKHKR

SEQ ID NO: 3497 - protein, 243 aa, Oryza sativa (japonica cultivar-group)
MRGVSGVEAKDSLTIVALQSPVTVERPVRGDLEEHVPKPYLARALAAPDIYHPDGTTTDDHEHHHLSVLQQHVAFFDRDDNGIIYPWETYEGCRALGFNMIMSFLIALVVNVSMSYPTLPGWLPSPFFPIYIHNIHRSKHGSDSGTYDNEGRFMPVNFENIFSKYARTSPDRLTYREVWQMTEGNREVLDLFGWFAAKLEWTILYVLARDEEGYLAREAIRRMYDGSLFEYVAMQREQHAKMS

SEQ ID NO: 3498 - protein, 496 aa, Ferroplasma acidarmanus
MEKIFGNIINGIEETGGERIELKSPVDGSLIGYIIDTDKDTVERAIQSSREAFNKFYLESTIKSRQELIGKLTDIVQEKATIYADLESKNTGKTIRQSTFMDIPLAISHIRYFAETDEFKFQRKITHPEYPGTEGIVQNAPMGVVASIAPWNVPFLMAVWKIIPPVLAGNAVVIKPSHYTPLTAIELVKDMKAAGFPDGLVNLVNGTGRTTGNLLVNSDHVDMVSFTGSTPTGSRIMEQAAKNIKKVSLELGGKSPNIVFADADLDHAVKGVIFGIFLNAGQLCESASRLIIEESIMDKFLQKVKTYLDSMKSGNPMDFETDISAITTKEQKEKIESLISQTVKSGGNIFYSKNMQGTPDKGTYFPPTLLTGLTPGQQISDEEIFGPVLTVYPFKSEKEAIDLANSTKYGLAAGIWTKDIEKAGRVASMIEAGTVWVNEYHLLSAAAPRGGFKKSGIGRELGLEGILEYTQTRHIFYGNNESGMSDVAYGILIKTE

SEQ ID NO: 3499 - protein, 213 aa, Oryza sativa (japonica cultivar-group)
MGVEVCVKAAVGHPDTLGDCPFSQRVLLTLEEKKVPYEMKLIDVQNKPDWFLKISPEGKVPVFNGGDGKWIPDSDVITQVIEEKYPTPSLVTPPEYASVGSKIFSCFTTFLKSKDPNDGSEKALLTELQALEEHLKAHGPFINGQNISAADLSLAPKLYHLQVALEHFKGWKIPEDLTNVHAYTEALFSRESFIKTKAAKEHLIAGWAPKVNA

SEQ ID NO: 3500 - protein, 168 aa, Triticum aestivum
GRIEKWVLRNAFDDEEKPYLPKHILYRQKEQFSDGVGYSWIDGLKDHAKAHVSDSMMTNASFVYPDNTPTTKEAYYYRTVFEKFYPKNAARLTVPGGPSIACSTAKAVEWDAAWSELLDPSGRAALGVHDAAYEEKAPASVDPVVDNVSRSPAHDVKRLKTAISAAAV

SEQ ID NO: 3501 - protein, 405 aa, Mesembryanthemum crystallinum
MVLEATMICIDNSEWMRNGDYTANRFQAQADAVNLICGAKTQSNPENTVGILTMAGKGVRVLVTPTSDLGKILACMHGLDMGGEMNLAAGIQIAQLALKHRQNKKQQQRIIVFAGSPVKYDKKVLETIGRKLKKNSVALDVVDFGEDEDGKSEKLEALVAAVNNNDTSHIVHVPAGPNALSDVLISTPIFTGDGEGGSGFAAAAAAAAAGGVSGFDFGVDPNLDPELALALRVSMEEERARQEAAAKRAAEEAGRQEKGGEQQSSSQDATMGESSSAANPEAEKKNDLTDDENALLQQALAMSMDEPASTTTVRDTDMADATGDDQDLQLALQLSVQDSAKESTSQSNPEEVGKLLADQSFVSSILASLPGVDPNDPSVKDLLASMQNQSEKKDEDKPPSEEEKK

SEQ ID NO: 3502 - protein, 475 aa, Gibberella zeae PH-1
MRLLTRPSSCAIARGLCRNSTFPCSISRASVSTLHAKINSPPPRIVRSEGCWLETHQGHRILDASSGASVVSIGHNDSRVKEAIIAQLDQVAYCYNPFFTTEAAEKISRFLTDSTDGHMSKVFVVSSGTEAVEAALKIARQYFTELPTPQPNRTKFIARKQSYHGNTLGSLSVGGHKARRGVYEPVLATNVSHVSPCYPYREMKEGETEEQYVERLAKELDDEFKRVGPDTVCAFIAETVSGTSLGCAPAVPGYFKAMREVCDRHGALLIMDEVMSGMGRTGTLHAWEQEGVVPDLQTVAKGLGAGYMPVGALLVGNKVANTLEQGSGAFSHSQTYQGHPVACAAAFSVQMAMKEDKMLQNTQEVGKVLGKKLKERLAGHKNVGDVRGRGLFWGLEFVRDKDTKEPFPLDDQIAGKLHKAGLTSDHGISLIPATGNVDGMQGDMVIVSPPLTVTKEEVDMVVDRIEKVVTSVLGS

SEQ ID NO: 3503 - protein, 161 aa, Ustilago maydis 521
MVSFYDLKAKKPSQEDYTFDQLKGKVVLVVNTASKCGYTPQFAELEELNKKYADQGLQIIGFPCNQFAGQDPGSDESIGEFCQRNYGVTFPMMAKSDVNGSNTNEVFQFLKKEKAGILGTEMIKWNFTKFLIDKEGNVIERYGSNTKPSAIAPAIEKLLSQ

SEQ ID NO: 3504 - protein, 483 aa, Thermococcus kodakaraensis
MCLIAGGMGGNLREKLIKMAIAGKHRGPESFGVWTDGGVLKSDDFSKLTEIPDGRIGLLQCRLAITGSKSFTQPFINDLALVHNGEIYNHAALREYLERRGVSFESDVDSEVVLRLIEFLREEHLSYPEIVKKLFWMLEGDYAVAFSDGERIYLFRDPLGIRPLYFSRNGLFASEKKVLWAVGEREVEPVQPGELVVLEKNGVRRARLFSLENLKSKAKCERKDPVGGVGKLLRYAVKNRVSKKTGVLFSGGLDSTLVAYLASQYSDVILYTAGTEDSPDIEWARKVADHFGWALRERTFEVEDVRDAVKRVMYAIEEPNPMNLAIGLPLYFASGLASSDGTRVLLSGQGADELFGGYAKYLERPELMEEDIALISERNLARDDKITMLNGVEGRYPFLALPVVSFALKLPLEAKIVDGTRKVILRKLALRLGIPEWIAEREKRAAQYGSRAQKLLEKIAREEGLTLREFAEKLFRETFPNAF

SEQ ID NO: 3505 - protein, 466 aa, Vitis vinifera
MALATRRFFNTICRGTRSFGALPEGIPSSSQHLINLEYEYSAHNYHPIPIVFSQAKGSTIWDPEGKKYLDFLSAYSAVNQGHCHPKVLKALVEQAERLTLSSRAFYNDRFPIFAERLMNMFGYDMVLPMNTGAEGVETALKLARKWGYEKKKIPKDQAIIVSCCGLLHGRTLAVISMSCDNEATRGFGPLLPGHLKVDFGDEVALEKIFEENGDRIAGFLFEPIQGEAGVIIPPDGYLKAVRELCSKFNILMIADEIQSGLGRSGRMLACDWAEVRPDVVILGKALGGGVIAVSAVLADKDVMLSIQPGEHGSTFGVNPLASAVAVASLDVITEEGLSERSDQMGQELRNQLMKIHQLFPNLIKEVRGKGLFNAVELNSKALFPVSAYDICLKLKERGVLAKPTHDTIIRLTPPLSISLDELQEGSNALRDVMEFDVPKMQKAKHKRVPQTTTNICDRCGRNMDDS

SEQ ID NO: 3506 - protein, 113 aa, Triticum aestivum
  misc_feature (98)..(98): Xaa can be any naturally occurring amino acid
AARILQRDHGINVNLTLMFSQVQAIAAAEAGTFLISPFVGRILDWYKAKTGKTYSKEEDPGVELLRKYSDYYKKLGYKTIRHGCLIQEILGEITELAXGCDYLTSLPNLLEEF

SEQ ID NO: 3507 - protein, 235 aa, Synechocystis sp. PCC 6803
MAELDAANLMKQAVGKAAADRVKSNTIVGLGTGSTTAYALEFIGDRLKKGELENVVGIPTSFQAEVLARKYGIPLTTLDVADRIDIAIDGADEVDPQKNLIKGGGAAHTREKIVDALAETFLVVVDSGKLVDKLGSTFLLPVEVIPMALTPVMRALAKLGGKPELRMGVKKAGPVVTDQGNLVIDVKFDAITNPAELEKTINNLPGVLENGLFVGVADVILVGEIIDGQPTVREF

SEQ ID NO: 3508 - protein, 485 aa, Burkholderia cepacia
MLKKSTTSSTANMCRVSVGSRSSSPLNNAVIAKVHEAGRAEVDAAVAAAQAALKGAWGRMSLAQRVEVLYAVADGINRRFDDFLAAEVEDTGKPMSLARHVDIPRGAANFKIFADVVKNVPTEFFEMPTPDGVGAINYAVRRPVGVVGVICPWNLPLLLMTWKVGPALACGNTVVVKPSEETPQTAALLGEVMNTAGVPPGVYNVVHGFGPNSTGEFLTSHPDVNAITFTGETGTGEAIMKAAADGARPVSLELGGKNAAIVFADCDLDKAIEGTLRSCFANCGQVCLGTERVYVERPIFDRFVSRLKKGAEGMQLGRPEDLATGMGPLISQEHREKVLSYYKKAVEAGATVVTGGGVPEMPEALKGGAWVQPTIWTGLGDDSVVAREEIFGPCALVMPFDSEEEVIRRANDNDYGLARRIWTTNLSRAHRVAGAIEVGIAWVNSWFLRDLRTAFGGSKQSGIGREGGVHSLEFYTELKNVCIKL

SEQ ID NO: 3509 - protein, 176 aa, Triticum aestivum
  misc_feature (90)..(90): Xaa can be any naturally occurring amino acid
  misc_feature (100)..(100): Xaa can be any naturally occurring amino acid
  misc_feature (115)..(115): Xaa can be any naturally occurring amino acid
  misc_feature (125)..(125): Xaa can be any naturally occurring amino acid
MAPTVMASSATSVAPFQGLKSTAGLPVSRRSNGASLGSVSNGGRIRCMQVWPIEGIKKFETLSYLPPLSTEALLKQVDYLIRSKWVPCLXFKQGWVYLPXEHNASPGYYDGRYWXTMWKLPMFGXCTDATQVINKWRSQEGVPDAYFAYRIDNIASEWLIASNGSRSARLNTHTAH

SEQ ID NO: 3510 - protein, 130 aa, Methanosarcina acetivorans C2A
MTCDPAGGRAINAAGVQFPPVHYNGDIFLPGQANNFYTYPAVGLAVYVTRAKRATDEMFIKAARATANQRTDEQLKKGLLFPPQSSILETEVRTAVQIATLIFNRDLARVDQPEDINVWLRATLYKPQYS

SEQ ID NO: 3511 - protein, 345 aa, Thermus thermophilus HB27
MERRSVQKKDLLSTPVVPIDIKAFDAGPILEAMGKTAFQARNLHRAAEIYLEMLEDDCAVILTLAGSLVSAGQGLIVHDLIRKGLVDVIVATGANIVDQDFFEALGHRHYQGDPRADDEALRRLWIDRIYDTYIDEEELRHTDYTVAEIADGLEPRPYSSREFIWHMGRYLAERGLGEKSIVRAAYEEGVPIFVPAFSDSSAGFGLVYHQVKHPEAHVTIDSVADFRELTEIKLKAGTTGLVMLGGGVPKNFAQDVVVAAEVLGHRVEMHKYAIQITVADERDGGLSGSTLSEAQSWGKVDARLSQMVFAEATLAFPLLASYVWHRAPARAKRRYAELFREKAPA

SEQ ID NO: 3512 - protein, 460 aa, Mycobacterium tuberculosis H37Rv
MSRSHPSVPAHSIAPAYTGRMFTAPVPALRMPDESMDPEAAYRFIHDELMLDGSSRLNLATFVTTWMDPEAEKLMAETFDKNMIDKDEYPATAAIEARCVSMVADLFHAEGLRDHDPTSATGVSTIGSSEAVMLGGLALKWRWRQRVGSWKGRMPNLVMGSNVQVVWEKFCRYFDVEPRYLPMERGRYVITPEQVLAAVDENTIGVVAILGTTYTGELEPIAEICAALDKLAAGGGVDVPVHVDAASGGFVVPFLHPDLVWDFRLPRVVSINVSGHKYGLTYPGVGFVVWRGPEHLPEDLVFRVNYLGGDMPTFTLNFSRPGNQVVGQYYNFLRLGRDGYTKVMQALSHTARWLGDQLREVDHCEVISDGSAIPVVSFRLAGDRGYTEFDVSHELRTFGWQVPAYTMPDNATDVAVLRIVVREGLSADLARALHDDAVTALAALDKVKPGGHFDAQHFAH

SEQ ID NO: 3513 - protein, 420 aa, Thermus thermophilus HB27
MGPLLVWHRGDLRLHDHPALLEALARGPVVGLVVLDPNNLKTTPRRRAWFLENVRALREAYRARGGALWVLEGLPWEKVPEAARRLKAKAVYALTSYTPYGRYRDAKVQEALPVPLHLLPAPHLLPPDLPRAYRVYTPFARRFLGVEAPLPAPEALPKGPEEGEIPREDPGLPLPEPGEEAALAGLRAFLEAKLPAYAEERDRLDGEGGSRLSPYFALGVLSPRLAAWEAERRGGEGARKWVAELLWRDFSYHLLYHFPWMAERPLDPRFQALPWQEDEALFRAWYEGRTGVPLVDAAMRELHATGFLSNRARMNAAQFAVKHLLLPWKRCEEAFRHLLLDGDRAVNLQGWQWAGGLGVDAAPYFRVFNPVLQGERHDPEGRWLKRWAPEYPSYAPKDPVVDLEEARRRYLRLARDLARG

SEQ ID NO: 3514 - protein, 200 aa, Chromobacterium violaceum ATCC 12472
MMTLYSGITCPFSQRCRIVLFEKGMDFEIIDVDIHNKPEDLAVMNPYNEVPVLVERDLILHESNIINEYIDERFPHPQLMPADPVMRARARLFLYRFENELFIHVKTLEAGATGKEATKAREAIRDGLTTIAPIFSKQKFMLGDDFSMIDVAIAPLMWRLEHYNIDLGKSAAPILKYAERIFQRQSFIDSLTPSEKAMRK

SEQ ID NO: 3515 - protein, 364 aa, Buchnera aphidicola
MKKKYRIAVLPGDGIGPEVMREAYKILNILKYHFSLPLEIEEFDVGGSAIDKEGVALPKKTLLGCENADAILFGSVGGRKWDSLPIDQRPERASLLPLRKHFNLFANLRPAQLYSELKYLSPLAFLIVIKNGFNILCVRELTGGIYFGQPSGRSKTNNFEYAFDTEVYYDYEINRIAHLAFQLAQTRNYKVCSIDKSNVLNSSILWREIVKKVSLSYPNVHLSHLYIDNATMQIIKDPNQFDVLLCSNLFGDIISDECAIITGSIGMLPSASLNEKKFGLYEPAGGSAPDIEGKNIANPIAQILSVSMLVRYSMNLKNIADKIDYSVISILKKGYKTADIAHDNNYLKTNEMGDVIADALISGE

SEQ ID NO: 3516 - protein, 363 aa, Buchnera aphidicola
  misc_feature (76)..(94): Xaa can be any naturally occurring amino acid
MKTKYRIAVLPGDGIGPEVMREAYKILNILKNYFSLPIETREFNVGGAAIDQDGVALPKTTLLGCENSDAILFGSXXXXXXXXXXXXXXXXXXXLLPLRKHFNLFGNLRPAQLYSELIHLSPLRSDIINNGFNILCIRELTGGIYFGKPAGRLKKNNIEYAFDTEIYYNYEINRIAHLAFQLAKTRNYKVCSIDKSNVLNSSILWREIVQKVSKNYPDVHLSHLYIDNATMQIIKNPNQFDILLCSNLFGDIISDECAMITGSIGMLPSASLNEKKFGLYEPAGGSAPDIEGKNIANPIAQILSVSMLVRYSMNLKTIADKIDQSVISVLKKGYRTADISNNSHYLKTNEMGDVIASALISGE

SEQ ID NO: 3517 - protein, 477 aa, Oryza sativa (japonica cultivar-group)
MGISKGGSGKEAKKPPLLLGRFEVGKLLGQGNFAKVYHARNVATGEEVAIKVMEKEKIFKSGLTAHIKREIAVLRRVRHPHIVQLYEVMATKLRIYFVMEYVRGGELFARVARGRLPEADARRYFQQLVSAVAFCHARGVFHRDIKPENLLVDDAGDLKVSDFGLSAVADGMRRDGLFHTFCGTPAYVAPEVLSRRGYDAAGADLWSCGVVLFVLMAGYLPFQDRNLAGMYRKIHKGDFRCPKWFSPELIRLLRGVLVTNPQRRATAEGIMENEWFKIGFRRFSFRVEDDRTFTCFELDDDAAVDAPTSPPDTPRTVDSGDVGAAPTRPRKAGSLTSCDSAPLNAFDIISFSPGFDLSGLIPEQQKHTARFVSAAPVEVIVATLEAAAAAAGMAVREREDGSISMEGTREGEHGALAVAAEIYELTPELVVVEVRRKAGGAAEYEEFFRARLKPSLRELVCDDRPCPEDSGELSRSL

SEQ ID NO: 3518 - protein, 158 aa, uncultured bacterium pCosAS1
MKLISQDLRDGDKLPLRHVFNGMGYEGDNISPHLAWDEVPSGTKSFVVTCYDPDAPTDSGWWHWIVANIPADTRVLPQGSGSSLVALPEGAVETRTDFGKAGYGGAAPPKGETHRYIFTVHALNVERIEVDEEASGAMVGFNVHFHTLGSASITAMYS

SEQ ID NO: 3519 - protein, 317 aa, Sulfolobus solfataricus P2
MWKVFFINGNFVKENVRDELPKPNEVKVFPKYIGICGTDKNIYLGKKPVKEPLVLGHEISGITEKGEKVAIFPNYWCGYCNNCRRGFYNSCKNKISIGVNADGGMAEYINVPKDFVFRIPYTLDLKLGALVEPTAVAVAALNKIDKEIEKVIIIGGGSTGTLVSIVAEINGLETFVIEKDSRKEEILKEKGFRTTKELKFDDRVAVIDTINNQESMVLAQSILKNSIARSELIITGLDNEQISLNRDIIVRNEVIIRGSIIYSKDDFLNSIKIVSENQEKFNKIVDKVGYIDNINEWFRKYVIELPNIKVLIKMDSI

SEQ ID NO: 3520 - protein, 429 aa, uncultured bacterium pCosAS1
MTTDDLAFDRQHIWHPYTSMTQPLPVYPVVEAHGCELTLASGEQLVDGMSSWWAAIHGYNHPRLNAAMKAQIDRMSHVMFGGITHQPAVDLCRRLVAMTPETLECVFPADSGSVAVEVAMKMALQYWHAKGESRQRFITFRNGYHGDTFGAMSVCDPDNSMHSLWKGYLPENLFAPAPQSRFDGAWDEMDMVGLAPLMAAHRHEIAAVILEPIVQGAGGMRMYHPEWLKRIRRMCDREGILLIADEIATGFGRTGKLFACEHAGITPDILCLGKALTGGTMTMSATLTTRQVAETISNGEAGCFMHGPTFMGNPLACAVASESLALLESGEWQDQVAAIESQLQEELAVARDSEFVADVRVLGAIGVVETTHPVNMAALQRFFVARGVWVRPFGKLIYLMPPYVIRPDQLSKLTRAVVDAVQAPAHFTR

SEQ ID NO: 3521 - protein, 607 aa, Glycine max
MDTNIGSLSLDACKPANNDVGCPPNGAVSAIKPSVPATTMTSSDATLGRHLARRLVQVGVTDVFSVPGDFNLTLLDHLIAEPQLKNIGCCNELNAGYAADGYARCRGVGACVVTFTVGGLSVINAIAGAYSENLPLICIVGGPNTNDFGTNRILHHTIGLSDFSQELRCFQTVTCYQAVVNNIEDAHELIDTAISTCLKESKPVYISISCNLPGIPHPTFSREPVPFSLSPRLSNKMGLEAAVEAAAEFLNKAVKPVMVGGPKLRVANACDAFVELADACGYPFAVMPSAKGLVPEHKPHFIGTFWGAVSTAFCAEIVESADAYLFAGPIFNDYSSVGYSLLLKKEKAIIVQPERVVISNGPAFGCVLMKDFLRELAKRLKHNNTAYENYSRIFVPEGKPVKAEPREPLRVNVLFKHIQDMLSGETAVIAETGDSWFNCQKLKLPKGCGYEFQMQYGSIGWSVGATLGYAQAVPEKRVISCIGDGSFQVTAQDVSTMLRNEQKTIIFLINNGGYTIEVEIHDGPYNVIKNWNYTGLVDAIHNGEGKCWTTKVTCEEELVEAIQTATGDKKDCLCFIEVIVHKDDTSKELLEWGSRVCAANGRPPNPQ

SEQ ID NO: 3522 - protein, 364 aa, Buchnera aphidicola
MKTQYRIAVLPGDGIGPEVMREAYKILKILKNNFLLSFEIEEFNVGGIAIDQEGLALPKKTLLGCEKSDAILFGSVGGKKWDNFPIEERPERAALLPLRKHFNLFANLRPAKIYSELKHLSPLRSNIVRDGFDILCIRELTGGIYFGQPSGRRLEKNNIEYAFDTEIYYDYEINRIAHLAFQLAQSRSHKVCSIDKSNVLNSSILWKEIVQKVSKNYPDVDLSHLYIDNAIMQIIKNPNQFDVLLCPNLFGDIISDECAIITGSIGMLPSASLNEKKFGLYEPAGGSAPDIAGKNIANPIAQILSLSMLVRYGMNLKDIADKIDKSVLSVLKKGYRTADISNNNNYLKTNEMGDVIANALISGE

SEQ ID NO: 3523 - protein, 506 aa, Rhodopseudomonas palustris CGA009
MNLITTMHPDASTVFKARYGNFIGGRWVAPVDGRYFDNTTPITGAKLTEIPRSQKEDVELALDAAHTASVTWSKTTTTERSLILNRIADRMEANLDLLAIAETLDNGKPIRETRAADLPLAIDHFRYFAGALRAQEGSISEIDHDTIAYHFHEPLGVVGQIIPWNFPLLMAAWKLAPALAAGNCVVLKPAEQTPASILVWAELVGDLLPPGVVNVVNGFGVEAGKPLASSPRIAKIAFTGETSTGRLIMQYASENLVPVSLELGGKSPNIFFGDVTAEDDPFFDKAIEGFVMFALNQGEVCTCPSRALVQESIYDRFMERALARVAAIRQGDPRDPATMIGAQASQEQLDKILSYIDIGRHEGAELLAGGGRAQLPGGLAGGYYVHPTVFRGHNQMRIFQEEIFGPVVSVTTFKDEAEAIAIANDTQYGLGAGVWTRDGTRAYRFGRAIAAGRVWTNCYHAYPAHAAFGGYKQSGIGRETHKMMLDHYQHTKNLLVSYGTGPLGFF

SEQ ID NO: 3524 - protein, 181 aa, Triticum aestivum
  misc_feature (103)..(103): Xaa can be any naturally occurring amino acid
LWLLVVAAQCASLATAAGPRVIIVGAGMSGISAGKRLSEAGITDLVILEATDRIGGRIHKTKFAGVNVEMGANWVEGVNGDEMNPIWTMANGTGGLNLRTFRXDFDHLASNTYKQDGGLYDEKVVEKIIERMDEVEESGSKLSAPFTTTATGLVVWPSTLTAFGLEGRLGYTVTPAKLLEF

SEQ ID NO: 3525 - protein, 285 aa, Mycoplasma penetrans HF-2
MKYIKLANGLHMPIIGLGVYKAEGENCENTIIKAIDDYGYRMIDTAQVYFNEEFVGNAIKQTKIKREDIFITTKVWISNYGYNNTMYSISKSLKKLQTNYIDLVLLHQPFGDYYSAWKALEVLYKKGIVKAIGVSNFEADRLVDFCLHVDVKPVINQIELHPLRQRIEDLHWNNKYGVAVESWASFGRATSEIMENPILVSLAEKYNKTVPQIILRWLIQQNIVVIPKTVTESRLKENMDIFDFEISDDDMDLIKTINQNKTVSKHHHDPSTAEEIFSKFPEIRR

SEQ ID NO: 3526 - protein, 347 aa, Listeria monocytogenes str. 4b H7858
MKNTIKWIAIGFAGIILLPLLIVFFIYKKAVGKKEYNPEVLENLDEASQKFVKNTSPLSDVDSRYKYMRLATKALPSAKDIEIGDVENKKIDGPAGKIPIRIYTPQEDGPFEIIVYYHGGGFVLGGLQTHDAIARKLVQTTGARVVTVDYRLAPENPFPAAVEDAYAALLWVQNHRTSLRAKSSDIIVAGDSVGGNLATVVTQIAKSKGKPNITAQILLYPATDIFSRDASVLYPSMDEFAEGYVLTKESLDKFFKLYIANASDRKYDPLVAPIRSKDLVGLPKTFIATAEFDPLRDQGEAYAKKLKDAGVEVFAKRFEKVPHGFMTTNSEATDETYELISEFLEEK

SEQ ID NO: 3527 - protein, 389 aa, Chlamydomonas reinhardtii
MADPGAQPVPAPQSAEEPVTGGLQESVEVTASGKLDSYNREYNQFLVCGSLFECPAKYLPIKPIGKGAYGVVCSAKNLDNQEKVAIKKIANAFDNVIDAKRTLREIKLLRHLQHENIVQIKDIIPPTNRDAFKDLYVVYELMDTDLHQIIRSPQALSNDHSQYFLYQLLRGLKYIHSANILHRDLKPSNLLVNANCDLKICDFGLARTSTSNEREFMTEYVVTRWYRAPELLLSCSGYTTAIDVWSVGCIFAELLGRKPLFPGKDYVHQLSLITKVIGSPSEEELGFITSEKAKRYIRSLPRSERVDFGQLWPHVTKTALDLIDKMLVFDPTKRITVEQALEHPYLASLHDVSDEPVCPTPFTFDFDSEHLTPDVVREVILQDMAELHT

SEQ ID NO: 3528 - protein, 314 aa, Glycine max
  misc_feature (157)..(157): Xaa can be any naturally occurring amino acid
MAMASLASSSVLLNLLFIVSALHLGAAAARILSEKEDQQQLQFQYHKGPLLSGNISVNLIWYGSFKPSQRAIISDFITSLSSSPKSTAQPSVATWWKGTEKYYQLIKSAPKPSLTLALGAQILDENYSLGKSLTTDNIVSLASKGAPNDAINVVLTXSDVTVEGFCSSRCGTHGSSVGHGKLAYVWVGNSETQCPGQCAWPFHQPIYGPQSPPLVAPNNDVGLDGMVINVATLLAGTVTNPWGNGYFQGPKEAPLEAASACTGLYGKGAYPGYAGELLLDPTTAASYNANAVNHRKYLLPALFDPTTSACSTLP

SEQ ID NO: 3529 - protein, 683 aa, Glycine max
  misc_feature (12)..(12): Xaa can be any naturally occurring amino acid
MSGGGCSSIVVXSRGDLRIEDNPALTAGVRAGAVVAVFIWAPEEEGQYYPGRVSRWWLKNSLAHLDSSLRNLGTPLITKRSTDTLSSLFEVVKSTGATQLFFNHLYDPLSLVRDHRAKEVLTAQGITVRSFNADLLYEPWDVNDAHGRPFTTFAAFWERCLSMPYDPESPLLPPKRIIPGDASRCPSDTLLFEDELEKASNALLARAWSPGWSNADKALTAFVNGALIEYSKNRRKADSATTSFLSPHLHFGEVSVKKVFHLVRIKQVFWANEGNKAGEESVNLFLKSIGLREYSRYISFNHPYSHERPLLGHLKFFPWVVNEGYFKAWRQGRTGYPLVDAGMRELWATGWLHDRIRVVVSSFFVKVLQLPWRWGMKYFWDTLLDADLESDALGWQYISGSLPDGREIDRIDNPQFEGYKFDPNGEYVRRWLPELARLPTEWIHHPWNAPESVLQAAGIELGSNYPLPIVGIDAAKVRLLEALSQMWQQEAASRAAMENGTEEGLGDSSESAPIAFPQDIQMEERPEPVRNNPPHGTRRYQDQMVPSITSSHVRVEEEETSSDLRNSAADSRAEVPINVTTQQNARETVNQGVLLNTNRNTRVQNNPTTWLRNAAEDSTAESSSSTRRERDGGVVPVWSPPASNFSEQFVDDENGIGTGSSYLQRQHPQSHQLMNWTRLPQTG

SEQ ID NO: 3530 - protein, 110 aa, Glycine max
LISCPAATTVNRAEAGMVAPFTVLKTMAGFPTRKTNNDITSIASNGGREQCMQVWPPGGKTKSETLCYLPDLDDAQLATVVEHLLRQGRIPCLEFESEHGFAHREHSRSP

SEQ ID NO: 3531 - protein, 398 aa, Candida albicans SC5314
MTVEYETKQLTPAQIKIILDTVPILEEAGETLTQKFYQRMIGNYDEVKPFFNTTDQKLLRQPKILAFALLNYAKNIEDLTPLTDFVKQIVVKHIGLQVLPEHYPIVGTCLIQTMVELLPPEIANKDFLEAWTIAYGNLAKLLIDLEAAEYAKQPWRWFKDFKVTRIVQECKDVKSVYFTPVDKDLLPLPKPERGQYLCFRWKLPGEEFEISREYSVSEFPKENEYRISVRHVPGGKISGYIHNNLKVGDILKVAPPAGNFVYDPATDKELIFVAGGIGITPLLSMIERALEEGKNVKLLYSNRSAETRAFGNLFKEYKSKFGDKFQAIEYFSEDNNTDDKIVIDKAFNRKLTTDDLDFIAPEHDVYLVGPREFMKDIKEHLGKKNVPVKLEYFGPYDP

SEQ ID NO: 3532 - protein, 370 aa, Arabidopsis thaliana
MALMKKSLSAALLSSPLLIICLIALLADPFSVGARRLLEDPKPEIPKLPELPKFEVPKLPEFPKPELPKLPEFPKPELPKIPEIPKPELPKVPEIPKPEETKLPDIPKLELPKFPEIPKPELPKMPEIPKPELPKVPEIQKPELPKMPEIPKPELPKFPEIPKPDLPKFPENSKSEVPKLMETEKPEAPKVPEIPKPELPKLPEVPKLEAPKVPEIQKPELPKMPELPKMPEIQKPELPKLPEVPKLEAPKVPEIQKPELPKMPELPKMPEIQKPELPKMPEIQKPELPKVPEVPKPELPTVPEVPKSEAPKFPEIPKPELPKIPEVPKPELPKVPEITKPAVPEIPKPELPTMPQLPKLPEFPKVPGTP

SEQ ID NO: 3533 - protein, 232 aa, Zea mays
MEYAAVGYGYGYGYDERQEPAESADGGGGGDDEYATVLSAPPKRPAGRTKFRETRHPVYRGVRRRGPAGRWVCEVREPNKKSRIWLGTFATPEAAARAHDVAALALRGRAACLNFADSARLLQVDPATLATPDDIRRAAIQLADAASQQDETAAVAADVVAPSQADDVTAAAAAAAAMYGGGMEFDHSYCYDDGMVSGSSDCWQSGAGAGGWHSIVDGDDDDGASDMTLWSY

SEQ ID NO: 3534 - protein, 181 aa, Clostridium acetobutylicum ATCC 824
MSVYDFKAKTIEGKEVSLDTYKGKVLIIANTASKCGFTPQYEGLEKLYKEYKDKGLEILGFPSNQFAEQEPGDNNEVKNFCKLNYGVTFQLFEKTDVRDENAHPLFNYLTENAPFKGFDLNHPTGKMLSEVLEKNFPKFLEGNSVKWNFTKFLIDRDGNVVKRFEPTSEPSDMVKDIEKLL

SEQ ID NO: 3535 - protein, 239 aa, Arabidopsis thaliana
MGRGKIAIKRINNSTSRQVTFSKRRNGLLKKAKELAILCDAEVGVIIFSSTGRLYDFSSSSMKSVIERYSDAKGETSSENDPASEIQEMYIVTLEKYAYSEELVLDRQMMGEELSGLSVEALQNLENQLELSLRGVRMKKDQMLIEEIQVLNREGNLVHQENLDLHKKVNLMHQQNMELHEKVSEVEGVKIANKNSLLTNGLDMRDTSNEHVHLQLSQPQHDHETHSKAIQLNYFSFIA

SEQ ID NO: 3536 - protein, 289 aa, Plantago major
  misc_feature (104)..(104): Xaa can be any naturally occurring amino acid
MAKTIVDSDYLRDVEKARRELRALISNKNCAPIMLRLAWHDAGTYDVSTKTGGPNGSIRNEEELTHGANNGLKIALEFCEQVKSKCAKISYADLYQLAGVVAVXVTGGPTITFVPGRKDSKISPREGRLPDAKKGAPHLKDVFYRMGLSDKDIVALSGGHTLGRAHPERSGFEGPWTAEPLKFDNSYFIELLQGESEGLLKLPSDLALLDDPEFRRYVELYAKDEEAFFKDYAESHKKLSELGFTPSPAAGVKAIVKDSTVLAQSAVGVAVAATVVILSYLYEVRRKMK

SEQ ID NO: 3537 - protein, 124 aa, Borrelia afzelii
MALNKEDILTWLEGAKTMEVVELVTAIEEKFGVTAAVATSVGGAASTGSIDSEEQTEFDVILMSFGDSKINVIKEVRSITGLGLGEAKALVESAPKAIKEGLSKSDAEELKKKLEAVGAKVEVK

SEQ ID NO: 3538 - protein, 294 aa, Saccharomyces cerevisiae
MKTLVHVASVEKGRSYEDFQKVYNAIALKLREDDEYDNYIGYGPVLVRLAWHISGTWDKHDNTGGSYGGTYRFKKEFNDPSNAGLQNGFKFLEPIHKEFPWISSGDLFSLGGVTAVQEMQGPKIPWRCGRVDTPEDTTPDNGRLPDADKDAGYVRTFFQRLNMNDREVVALMGAHALGKTHLKNSGYEGPGGAANNVFTNEFYLNLLNEDWKLEKNDANNEQWDSKSGYMMLPTNYSLIQDPKYLSIVKEYANDQDKFFKDFSKAFEKLLENGITFPKDAPSPFIFKTLEEQGL

SEQ ID NO: 3539 - protein, 461 aa, Oryza sativa (japonica cultivar-group); identical to SEQ ID NO: 200

SEQ ID NO: 3540 - protein, 468 aa, Triticum aestivum
MHPAHPPRGVLAVVDSRTGKRYEVKVSEDGTVRATDFKKITAGKDDKGLKTYDPGYLNTAPVRSSICYIDGDEGILRYRGYPIEEVAESSSFVEVAYLLMYGNLPTQSQLAGWEFAISQHSAVPQGLLDIIQSMPHDAHPMGVLASAMSTLSVFHPDANPALRGQDLYKSKQVRDKQIVRVLGKAPAIAAAAYLRLAGRPAVLPSNNLSDSENFLYMLDSLGNKEYKPNPRLARVLDILFILHAEHEMNCSTAAVRHLASSGVDVFTALSGAVGALYGPLHGGANEAVLKMLNEIGAVENIPDFIEGVKNRKRKMSGFGHRVYKNYDPRAKVIRKLAEEVFSIVGRGPLIEVAVALEKAALSDDYFIKRKLYPNVDFYSGLVNRVLGFPSDFFPVLFAIPRMAGWLGHWKESRDDPGNKIMRPRQVYTGVWLRHYTPVRERVASNQGEELGQIATSNATRRRRAGSSL

SEQ ID NO: 3541 - protein, 363 aa, Buchnera aphidicola
MKQKYRIAILPGDGIGPEVMREAYKILSILKDHFSLSLEIQEFNIGGSAIDQEGIALPKKTLLGCQNSDAILFGSVGGKRWDHLPINERPERASLLPLRKHFNLFANLRPAKLYSELQHLSPIRSNIIKNGFDILCVRELTGGIYFGKPSDRVKKNNVEYAFDTEVYYDYEINRIAHLAFQLARTRKFKVCSIDKSNVLNSSILWREVVEKVSKMYPDVHLSHLYIDNATMQIIKNPNQFDVLLCSNLFGDIISDECAVITGSIGMLPSASFNEKNFGLYEPAGGSAPDIAGKNTANPIAQILSLSMLVRYGMKLNKIADKIDDAVALSLKAGYRTADISNDNNFLKTNEMGDVIANFLINGK

SEQ ID NO: 3542 - protein, 278 aa, Desulfitobacterium hafniense DCB-2
VHIEAVHALAHGHSSMRFTPRARSRRKAAAVRRGEHERKWEQRTQCARRGAALLRCRARLRRALHVRSIEDAHLRHWRPARQGEPRMHRPDPTPSARRSRGRRAAATLLAVAALALSAFAHADEFVLQSADLREGEQVPALHLFPACAGGNVSPTLEWKNPPEGTRSFAITVFDPDAPTGNGWWHWALVNLPADTAALPRGAKPPAGAMALRNDFGVAGYSGPCPPPGKTHRYEFTVWALKSDKLKLDAKAQAMLGGAMARADALGHATITVKYSRPK

SEQ ID NO: 3543 - protein, 406 aa, Vibrio vulnificus YJ016
MSVTASQVHGAVQTLTQSSDTLFLLLGAIMVFLMHAGFAFLEVGTVRHKNQVNALVKILADFGISTLAYFFIGYWVAYGAHFFADAETLAQGNGYELVKFFFLLTFAAAIPAIVSGGIAERARFYPVLIATFFTVGIVYPLFEGIIWNGNFGVQAWFEATFGVGFHDFAGSVVVHGVGGWIALVAVIFLGMRRGRVRAGKHTNFAPSNIPFLALGAWILCVGWFGFNVMSAQTLNGISGLVAMNSLMAMAGGIVAALIAGKNDPGFIHNGPLAGLVAVCAGSDLMHPLGALVTGSVAGVLFVYLFTYLQNKTKIDDVLGVWPLHGVCGAWGGIAAGIFGQSSLGGLGGVSFTVQLLGTLLGISVALIGAGIVYGAINRFSGLRLSQEDEFNGADLAIHKISSVNAE

SEQ ID NO: 3544 - protein, 206 aa, Zea mays
  misc_feature (171)..(171): Xaa can be any naturally occurring amino acid
MATSFQGTTTKCNACDKTVYLVDKLTADNRVYHKACFRCHHCKGTLKLANYNSFEGVLYCRPHFDQLFKRTGSLDKSFEGTPKVVKPERNVGNENAIKVSSAFAGTREKCFGCTKTVYPIERVTVNNTMYHKSCFKCCHGGCTISPSNYIAHEGKLFCKHHHTQLIKEKGXSASSRTITTRRHRVPGQWMMKTRSISQSLRISRDE

SEQ ID NO: 3545 - protein, 364 aa, Buchnera aphidicola
MKKKYRIAVLPGDGIGPEVMQEAYKILNILKDHFLLPLEMKEFNIGGIAIDQEGIALPKNTLLGCENSDAILFGSVGGKKWDYLSIDKRPERAALLPLRKHFNLFSNLRPAKLYADLKYLSPLRSNIIKDGFDILCVRELTGGIYFGKPNGHSKKNDIEYAFDTEVYYDYEISRIAHLAFQLARNRKKKVCSLDKSNVLKSSILWKEIVEKISKNYPDVHLSHLYIDNAIMQIIKDPSQFDVILCSNLFGDIVSDECAAITGSIGMLPSASLNEKNFGLYEPAGGSAPDIAGKNIANPIAQILSVSMLVRHGMNLKKIADKIDESVVSVLKQGYRTADISNNSHNYLKTSEMGDIIANFLINGK

SEQ ID NO: 3546 - protein, 195 aa, Triticum aestivum
  misc_feature (110)..(110): Xaa can be any naturally occurring amino acid
  misc_feature (130)..(130): Xaa can be any naturally occurring amino acid
  misc_feature (132)..(132): Xaa can be any naturally occurring amino acid
  misc_feature (143)..(143): Xaa can be any naturally occurring amino acid
  misc_feature (145)..(145): Xaa can be any naturally occurring amino acid
  misc_feature (156)..(156): Xaa can be any naturally occurring amino acid
  misc_feature (161)..(161): Xaa can be any naturally occurring amino acid
MAPTVMASSATSVAPFQGLKSTAGLPVSRRSNGASLGSVSNGGRIRCMQVWPIEGIKKFETLSYLPPLSTEALLKQVDYLIRSKWVPCLEFSKVGFIFREHNASPGYYDXRYWTMWKLPMFGCTDATQVXNXVEESRKDYPDXYXRIIGFKTCSSXCVNFXANLQDPERLKIITQHNAIFKAWFLHYFNFQKKSS

SEQ ID NO: 3547 - protein, 199 aa, Aspergillus nidulans FGSC A4
MATGPATQSLKCVVTGDGAVGKTCLLISYTTNAFPGEYIPTVFDNYTASVMVDGRPISLGLWDTAGQEDYDRLRPLSYPQTDVFLICFSIVSPPSFDNVKSKWFPEIEHHAPNVPIILVGTKLDLRDDPAQLESLRMRKQEPVTYEQALAVAKEIRAHKYLECSALTQRNLKSVFDEAIRAVLNPRPATKQRNKKCTIL

SEQ ID NO: 3548 - protein, 170 aa, Zea mays
  misc_feature (77)..(77): Xaa can be any naturally occurring amino acid
  misc_feature (133)..(133): Xaa can be any naturally occurring amino acid
MAASSTATSVHDFIVKDASGKDVDLSTYKGKVLLIVNVASQCGLTNSNYTELAQLYEKYKDQGFEILAFPCNQFGGXQEPGTNEEIVQFACTRFKAEYPIFDKVDVNGNNAAPIYKFLKSSKGGLFGDSIKWXNFSKFLVDKEGRVVDRYAPTTSPLSIEKDIKKLLGSS

SEQ ID NO: 3549 - protein, 497 aa, Vitis labrusca x Vitis vinifera
MKKSSAGAPSKPTKPAWVLPYKTQDLRTLYTIGQKLGQGQFGTTFLCTDKATGHNYACKSIPKRKLFCKEDYDDVWREIQIMHHLSEHPNVVRIRGTYEDPVFVHLVMELCEGGELFDRIVQRGHYSEREAAKLIKTIVGVVEGCHSLGVMHRDLKPENFLFDTTAEDAALKATDFGLSVFYKPGETFSDVVGSPYYVAPEVLCKHYGPEADVWSAGVILYILLSGVPPFWAETETGIFRQILQGKLDFESEPWPCISETAKELLRKMLDRNPKKRLTAHEVLSHPWVVDDRMAPDKPLDSAVLSRLKQFSAMNKLKKMALRVIAEGLSEEEIGGLRELFKMIDTDNSGTITFDELKDGLKRVGSELMESEIRDLMNAADIDNSGTIDYGEFLAATVHLNKLEREENLVSAFSFFDKDKSGYITIDELQQACKEFGLSEAHLDDMIKEIDQDNDGQIDYGEFAAMMRKGNGGIGRRTMRNNLNLGDVLGIPDMRLTN

SEQ ID NO: 3550 - protein, 174 aa, Triticum aestivum
MAPAVMASSATTVAPFQGLKSTAGLPVGRRSSGSLGSVSNGGRIRCMQVWPIEGIKKFETLSYLPPLSTEALLKQVDYLIRSKWVPCLEFSKVGFVFREHNSSPGYYDGRYWTMWKLPMFGCTDATQVLNEVEEVKKEYPDAYVRVIGFDNLRQVQCVSFIAFRPPGCEESGKA

SEQ ID NO: 3551 - protein, 426 aa, Vibrio parahaemolyticus RIMD 2210633
MDLAFDRHHIWHPYTSTLTPLTCYPVSSANGVHIKLEDGTELVDGMSSWWSTIHGYNHPHLNQAAHQQIDQVSHVMFGGITHQPAISLCKKLLSLAPNNLEHVFLADSGSVAVEVSLKMALQYWHAKGERRPKFLTLRHGYHGDTFAAMSVTDPDNSMHSLYKGFLPEHIFAQSPTCGYWDEWKPEDLADFEHKIDSHHQELAAVILEPIVQGAGGMRIYHPEFLKGVRRLCDKYDLLLIADEIATGFGRTGKLFACEHADIQPDILCVGKALTGGYMTLSATLASKHVADTVCGGDAGCFMHGPTFMGNPLACAVATASLELIEQGDWQQQTQQIEMLFSELLPKLEEYDLVKNTRWLGAIGVVETHRPVNMETIQALFVEHGVWIRPFGNLIYMMPPFISKPEDIEKLINAIDAALQRKDCFAS

SEQ ID NO: 3552 - protein, 160 aa, Acinetobacter sp. ADP1
MTNLYQFEAELLEGDTKSLADYQGKVLLIVNTASKCGFTPQFAGLEKIYEKYKDRGFEVLGFPCNQFGGQDPGSNNEIGAFCQRNYGVSFPMFAKVDVKGPEAHAIFRYLTREAKGILGSENIKWNFTKFLVGRDGKVLNRYAPTTKPESLEEDIEKALA

SEQ ID NO: 3553 - protein, 138 aa, Zea mays
MAAAARQRGTVKWFNDTKGFGFISPEDGSEDLFVHQSSIKSEGFRSLAEGEEVEFSVSEGDDPGHMARDCSSGGGGYGGGGGGGGGGCYNCGQAGHMARDCPSGGGGGGGRFGGGGGGGDRSCYNCGEAGHIARDCPT

SEQ ID NO: 3554 - protein, 489 aa, Glycine max
MESRTKSNPQLTRALCYGNDGKQQGRSPSVIVIGGGMAGIAAARALHNASFQVVLLESRDRIGGRIHTDYSFGFPVDLGASWLHGVSNENPLASVIGRLGLPLYRTSGDNSVLYDHDLESYALFDMDGKQVPPELVTKVGEIFETILQETDKIRQESSEDMSVLRGLSIVFDRKPELRLEGLAHKVLQWYLCRMEGWFAADSDTISLKGWDQVLLPGGHGLMVRGYLPVINTLAKGLDILLGHRVTKVVRRYNGVKVTVESGKTFFADAAVIAVPLGVLKAKKILFKPKLPDWKEAAIADLGIGLENKIILHFENVFWPNVEFLGVVADTSYGCSYFLNLHKAAGHAVLVYMPSGQLAKDVEKMSDEAAVNFAFMQLKKILPDASSPIQYLVSRWGSDINSLGSYSYDAVGKPHELYERLRVPVDNLFFAGEATSMSYPGSVHGAFSTGMMAAEDCRMRVLQRYGEVDLFQPVMGEEASLSIPLQISRL

SEQ ID NO: 3555 - protein, 291 aa, Exiguobacterium sp. 255-15
MISVAKDYYRTLGVEKTASNQEIKRAYRKLAKQYHPDVNQEASADQRFKDIQEAFDVLGDEEKRAQYDQYGSNYERMAGAGYGQSADYDDLFRQFNGRQSRTAGSAGQSFGFEDMFGSFFSQEPEETDEELELTVPLSHLSQNDKVTIRLATGAIQMSLPKDLYDGKKVRLRGKSSKRNRKGIAGDVYVTIHLKDDDQFRRQETDVISTVRVYPTVFVLGGEVVADTLEGKRVKLKIKPGTKPGARLRIPNRGLSNREGHRGALLVQLEVKLPEMEPSFYEEWENRLSVKE

SEQ ID NO: 3556 - protein, 146 aa, Triticum aestivum
  misc_feature (103)..(103): Xaa can be any naturally occurring amino acid
MFRTNERLPGAVLQAQARVLERLRGVSIGSSTSRPSITLDEFSATDVGSDEESLENTSISSTTSNRSPGLSKSAFLRLQIEIFEAKKDDNREASPECSICLRXFYDGDELIRLRCRHRFHSTCLEPWVRKCADCPYCRTNIRSRPR

SEQ ID NO: 3557 - protein, 124 aa, Borrelia garinii
MALSKEDILTWLEGAKTIEVVDLVTAIEEKFGVTAAIAAVGGGAASTGSTDSEEQTEFDVILMSFGDSKINVIKEVRSITGLGLGEAKALVESAPKAIKEGLSKSDAEELKKKLEAVGAKVEVK

SEQ ID NO: 3558 - protein, 321 aa, Brassica napus
  misc_feature (215)..(215): Xaa can be any naturally occurring amino acid
MSSLVFKLFLFVSLFQISISARKLAQDEPNQFQSLKYHKGALLSGKISINLIWYGEFKPAQRAIISDFITSLSHSSSKTPNQPSVATWWKTTEKYYKLAAGDKTPSPSLSLTLKSQILDETYSLGKSLTDRDIRKLASKGDQYDAVNVVLTSADVAVTGFGMSRCGTHGHARGNTGKRGSKFAYIWVGNSETHWHCVTQFPGQCAWPFHAPVYGXPQNPPLVAPNNDVGLDGMVINLASLLAGTATNPFGNGYYQGPQNAPLEAASACPGVYGKGAYPGYAGNLLVDTTTGGSFNAYGANGRKFLLPALYDPTTSDCSTMV

SEQ ID NO: 3559 - protein, 408 aa, Zea mays
MASAPGEVPSHFLCPISLQLMREPVTLPTGISYDRAAISRWLATPAPAGGRTCPVTRVPLPPQPQLTPNHTLRRLIHAWLASLSPEAEVNEDVAALRGPVPGAEAVVALLSDAAGAQVEALKRLRELVAECEDSRTVLESQDGVFDALSRVVSSADACSTAREEAVGLLASLRIPEPELAGVVARHSNLGDALTAVLRSSNLKSRANAALLVRSLSEVAWPAWVIGLSQELLAEVVRVVRDRVSTQATKAALHALAALCPYGRTRVKIVGVGAVPAIVDLLLDDPERRVNELALVALDRLCTCAEGRAELVAHAAGLAVVGKKVLRVSETASERAVRVLRSVARHAATPAVLQEMVESGVVAKLCAALWSQQCGLRTKQKAHEVLKLHSRTWRSSPCLSPKFLGLYPS

SEQ ID NO: 3560 - protein, 571 aa, Glycine max
  misc_feature (196)..(196): Xaa can be any naturally occurring amino acid
  misc_feature (209)..(209): Xaa can be any naturally occurring amino acid
MCGILAVLGCVDNSQTKRARIIELSRRLRHRGPDWSGIHCYEDCYLAHQRLAIVDPTSGDQPLYNEDKTVIVTVNGEIYNHKQLRQKLSSHQFRTGSDCEVIAHLYEEHGEEFVNMLDGMFAFILLDTRDKSFIAARDAIGITPLYLGWGHDGSTWFASEMKALSDDCERFISFPPGHIYSSKQGGLRRWYNPPWXFSEDIPSTPYDQXPFCLEVLVWHAVLQKLWNGMHHGLLSGGLDSSLVAAVVNRDLAESESARQWGSQLHTFCIGLKGSPDLKAAKEVADYLGTRHHELYFTVQEGIDALEEVIYHIETYDVTTIRASTAMFLMSRKIKALGVKMVLSGEGSDEIFGGYLYFHKAPNKKEFHEETCRKIKALHLYDCLRANKSTAAWGVEARVPFLDKEFINVAMSIDPEWKMIRPDLGRIEKWVLRNAFDDDKNPYLPKHILYRQKEQFSDGVGYSWIDGLKDHANKQVTDATMMAANFIYPENTPTTKEGYLYRTIFEKFFPKNAAKATVPGGPSVACSTAKAVEWDAAWSKNLDPSGRAALGIHDAAYDAVDTKIDEPKNGTL

SEQ ID NO: 3561 - protein, 323 aa, Candidatus Blochmannia floridanus
MNQLDNLKKFSKISADTGDVDLIRTYQIQHATTNPSLILKSPLFTTYLKLFNDAIDYAQKIGGNQNTKITNASDRLIVNIGSEILANISGYISTEIDAQLSFNTDLTIKKAHKLITMYQKKNIDTSRVLIKIAATWEGIQAAEELEKSGIKCNLTLVFSFAQARACAERNIYLISPFIGRIYDWYNQRNLIKTSYINDDPGIQSIKKIYHYYKTYGYNTIIMGASFRRLEQILALSGCDYLTISPHFLKQLYQNTNSVTRQLFPPKTIISHHIPVLDQSEFFQEHNKNQMAVEKLNEGIQQFSIDQQKLHKLLLNNLNVQLQK

SEQ ID NO: 3562 - protein, 363 aa, Buchnera aphidicola
MKQKYRIAILPGDGIGPEVMREAYKILNILKNDFLLPLEFQEFNIGGIAIDNEGLALPKKTLLGCENADAILFGSVGGKKWDTLPIDQRPERAALLPLRKHFNLFANLRPAKLYSELEYLSPLCSKITKNGFDILCVRELTGGVYFGHPHGRVKKDDIEYAFDTEVYYDYEINRIAHLAFQLARNRKNKVCSIDKSNVLNSSLLWKEIVEKVSNSYSDVRLSHLYIDNATMQIIKNPNQFDVLLCSNLFGDIISDECAAISGSIGMLPSASLNENNFGLYEPAGGSAPDIEGKNIANPIAQILSVSMLVRYGMHLTKIADQIDKSVISVLKRGYRTADISNNNNYLKTHEMGDVIADALINGK

SEQ ID NO: 3563 - protein, 309 aa, Salmonella enterica subsp. enterica serovar Typhi Ty2
MALESGIAQLVEEFIAAGRPSSREQNIDDRRAGYIASTTLAGETETRVQVEDIELDAMTFRVVSPLNATGKLPCIIYYHGGCFVSGGFATHDNQLRQLAFYSRCRVIAAQYRLAPEHTFPAAHNDAETGANTIWKYAQKLGIDRENITLAGDSAGGHLALVTALRLKAARQWQPAQLILIYPMLDATARFASYTCNGLDYIITRDTLLSGYEMYMPRTDPLHPEASPLWREDFAGLPSTHIITAEFDPLRDEGEALYQRFQEQGVECTCQRYLGVIHGFFQLGGVSKTARDAIRDVAWRVVSPSTSKMT

SEQ ID NO: 3564 - protein, 252 aa, Glycine max
  misc_feature (108)..(108): Xaa can be any naturally occurring amino acid
MAEERFTGVVQWFNNGKGFGFIKPDDGGEDLFVHQSSIRSDGYRTLLEGDRVEFAIATGDNDKTKAVDVTGVDGAPLQPRAAAGNNNRAAGSGFGFGARRNGGGGAAXYQCGEFGHLARDCNRSSNSGGGGGGSGGGCFNCGGFGHLARDCVRGGGGSVGIGGGGGGGSCFRCGGFGHMARDCATGKGNIGGGGSGGGCFRCGEVGHLARDCGMEGGRFGGGGGSGGGGGKSTCFNCGKPGHFARECVEASG

SEQ ID NO: 3565 - protein, 116 aa, Aspergillus nidulans FGSC A4
MADVEMKEASSSKTKAVSKAEGSGDGKKKFEVKKWNAVALWAWDIVVDNCAICRNHIMDLCIECQANQGSSTTEECTVAWGICNHAFHFHCISRWLKTRQVCPLDNKDWEFQKYGR

SEQ ID NO: 3566 - protein, 365 aa, Buchnera aphidicola
  misc_feature (128)..(128): Xaa can be any naturally occurring amino acid
  misc_feature (154)..(154): Xaa can be any naturally occurring amino acid
MKTKYRISVLPGDGIGPEVMREAYKILNILKNHFSLPLEIKEFNIGGAAIDQEGVALPKKTLLGCENSDAILFGSVGGKKWDHLPIDKRPERASLLPLRKHFNLFANLRPAQLYSELKYLSPLRSDIXIKNGFNILCIRELTGGIYFGKPTGRXLKKNNIEYAFDTEIYYDYEINRIAHLAFQLAQTRNYKVCSIDKSNVLNSSVLWRETVQKVSKNYPDVHLSHLYIDNATMQIIKDPNQFDILLCSNLFGDIVSDECAIITGSIGMLPSASLNEKKFGLYEPAGGSAPDIEGKNIANPIAQILSVSMLVRYGMNLKKIADKIDQSVISVLKKGYRTADISNNNNYLKTNEMGDVIANTLISGE

SEQ ID NO: 3567 - protein, 195 aa, Nanoarchaeum equitans Kin4-M
MAHGPRYRVPFRRRREGKTVYRKRLKLLLSGKPRLVVRRFNSNILAQLVEYDPKGDRVIFTIHSNVLKKYGWKGHRGNLPSAYLVGLIAGYEALKRGYKEAVLDIGRYKSTKGNALYAVLKGALDAGLNIPHSETILPSEDRIRGEHIANYAKMLKENEELYKKQFSRYLKEGLDPEQLPNHFEEVKQKIISQYQ

SEQ ID NO: 3568 - protein, 363 aa, Buchnera aphidicola
MTRKYRIAVLPGDGIGPEVMREAYKILNILKDDFSLPLEIKEFNIGGAAIDQEGVALPKKTLLGCENSDAILFGSVGGKKWDNLPINQRPERASLLPLRKHFNLFANLRPAQLYSELKNLSPLRSNIIKNGFNILCIRELTGGIYFGKPTGRLKKNNIEYAFDTEIYYNYEINRIAHLAFQLSQTRNYKVCSIDKSNVLNSSILWREIVKKVSKHYPDVHLSHLYIDNATMQIIKDPNQFDVLLCSNLFGDIISDECAMITGSIGMLPSASLNEKKFGLYEPAGGSAPDIEGKNIANPIAQILSLSMLVRYSMNLKKIADKIDQSVISVLKKGYRTADISNNNDYLKTNEMGDVIASALISGE

SEQ ID NO: 3569 - protein, 162 aa, Triticum aestivum
MEGRMFGLETPLMTALQHLLDVPDGEAGGPGNAAGEKQGPTRAYVRDARAMAATPADVKELPGAYAFVVDMPGLGSGDIKVQVEDERVLVISGERRREEKEDAKYLRMERRMGKMMRKFVLPENADMEKISAVCRDGVLTVSLEKLPPPETKKPKTIQVQVA

SEQ ID NO: 3570 - protein, 335 aa, Methanopyrus kandleri AV19
MNASPTVVVIPGDGIGPEVIDAALKVVRAVLGDELEIVEEQAGYSLWKKRGVTIEDETIERCREADAMLFGACTTPEDPEAKSPIVTLRKELGLYANVRPARSWPVPRPVDTEFDLVIVRENTEGLYTGCECEIHDGVTVALRKISEEGTRRVAEVACDLAEERSGRVTIVHKANVLKLTCGTFKRVAAETVERRGLEWDDEYVDAAAYKLVREPDSFDVILTSNLFGDILSDLAAGLMGSLGLAPSANLGDDAALFEPVHGSAPDIAGKGIANPVAAILSAAMMLDHLGYGEEARIIERAVEEVLREGVRTPDLGGSATTEEVAEAIAERVATG

SEQ ID NO: 3571 - protein, 272 aa, Bradyrhizobium japonicum USDA 110
MDNLKTQGISMPKLGLGTFRMQGDACRAAVESALSIGYRHIDTAEMYANEEPIGAALAAARLPRGELHVTTKVWHENLAPDAIRRAFDASLKKLRLDHVDLYLVHWPSRSANWGAVFETLMKLKEEGRTRAIGVANFTTALLKIAVEDIKAPIACNQIEYHAMLDQSKVLAYLNARSIPLVAYCPLAQGRVASDPVLAEIGARHNATAAQVALKWLLDQGGVAAIPKASRRESQQANLDALKIMLDDADRNKIAALPKDRRCVNPGFAPAWD

SEQ ID NO: 3572 - protein, 398 aa, Candida albicans SC5314
MTVEYETKQLTPAQVKIILDTVPILEEAGETLTQKFYQRMIGNYDEVKPFFNTTDQKLLRQPKILAFALLNYAKNIEDLTPLTDFVKQIVVKHIGLQVLPEHYPIVGTCLIQTMVELLPPEIANKDFLEAWTIAYGNLAKLLIDLEAAEYAKQPWRWFKDFKVTRIVQECKDVKSVYFTPVDKDLLPLPKPERGQYLCFRWKLPGEEFEISREYSVSEFPKENEYRISVRHVPGGKISGYIHNNLKVGDILKVAPPAGNFVYDPATDKELIFVAGGIGITPLLSMIERALEEGKNVKLLYSNRSAETRAFGNLFKEYKSKFGDKFQAIEYFSEDNNTDDKIVIDKAFNRKLTTDDLDFIAPEHDVYLVGPREFMKDIKEHLGKKNVPVKLEYFGPYDP

SEQ ID NO: 3573 - protein, 2072 aa, Streptococcus mitis
MEKYFGEKQQRFSFRKLSVGLVSATISSLFFMSVLASSSVEAQETKGVHYKYVTESELSSEEKKQLVYDIPTYMENDDETYYLVYKLNSQNQLGDLPNTGSKNEMQALVAGTSLAALGILIFAVSKKKVKNKTVLHLVLVAGIGNGVLISAHALENNLLLNYNTDYELTSGEKLPLPKDISGYTYIGYIKEENITSESKVNNQEKSAATPTKQQKVDYNVTPNFVENPSTVQAMQEEKPVSSTKPTEVQVVEKPLSTELTNPTKEEKQSLDSQVQLSEHKNLEAKKDEKVSPKEKTGVNTLNPQDEVLSGQLNKPELLYREETIETKIDFQEEIQENPDLAEGTVRVKQEGKLGKKVEVIRIFSVNNEEVSREIVSTSTTAPVTRIVEKGTKKAQVIKEQPETGAEHKEVQSGAIVEPAIQPELPAAVVTDKGEPAVQPELPEAVVTDKGVPEVQPALPEAVVTEKGEPAVQPELPEAVVTDKGETEVQPESPDTVVSDKGEPEQVAPLPEYKGPQAGAIVEPEQVAPLPEYTGPQAGAVVEPAIQPELPEAVVTDKGEPEVQPALPEAVVTEKGEPAVQPELPEAVVTDKGETEVQPESPDTVVSDKGEPEQIAPLPEYTGVQAGAIVEPEQVEAPKEYTGVQAGAIVEPEQVAPLPEYTGVQAGAIVEPEKVEAPKEYTGVQAGAIVEPEQIAPLPEYTGPQAGAIVEPEQVAPLPEYTGVQAGAIVEPEQIAPLPEYTGPQAGAIVEPEQVDPLPEYKGNIEQLKPETPVEKPKETDPEKTLELRNVSDIELYSHQTNGTYKQHVSLDSVPSNPDTYFVKVKSSAFKDVYLPVASISEELKDGRTFYKITARVDKLQQEIDHKYVENFSFYLAKKTTEETTNFTSFSNLVHAINQNLGGTYYLSASLNANEMELESDAKSYIKGNFTGRLIGEKDGKHYAIYNLKKPLFNNLSNATVEKLSLKNVSISGKNDIGSLANEAKNGTKINQVHVDGVLAGERGIGGLLAKSEQSSITESSFKGRIVNTYETTATYNIGGLVGHLTGENASIAKSKATIAISSNANSSDQTVGGLVGLVDNDAHVRDSYAEGDINNVKQFGEVAGVAGYLWDRTSGKEQHAGSLTNVLSDVNVTNGNAITAYHYNNMKVTATFSNKANRVIKVALENDEVVSKESFEERGKMLDDSQIASKKAEINPLTPPTVEPLSTSGNKESDFSKVANYQAKRALAYKNIEKLLPFYNKATIVKYGNLVNENSLLYQKELLSSVMMKDNQVITDIVSNKQTANKLLLHYKDHSSEKLDLKYQTDFAKLAEYSLGDTGLLYTPNQFLYDQNSIIKQVLPELQQVSYNSEAIRNTLGISPEVKLTELYLEDQFAKTKDHLEESLKKLLSADAALVENNQVMTGYIVDKIKRNKEALLLGMSYLERWYNFSYDKVSAKDLVMYHLDFFGKGNASPLDTLIELGKSGFNNLLAKNNVDTYAISLASHHGTKDLFNTLENYRKVFLPNTSNNEWFKSQTKAYIVEEKSNIPEVKAKQEKAGSKYSIGVYDRITNDSWKYRNMVLPLLTLPERSVFVISTISSLGFGAYDRYRNKDHQASGDLNSFVEKSAHETAERQRDHYDYWYRILDEKGREKLYRNILLYDAYKFGTDNTEGKATEVADFDNPNPAMKHFFGPVGNKVGHNGHGAYATGDAVYYMGYRMLDKDGAITYTHEMTHDSDQDIYLGGYGRRSGLGPEFFAKGLLQAPDHPEDATITINSILRHLKSDSKEGERLQVLDPTTRFKDATDLQKYVHNMFDVVYMLEYLEGQSIVNKLSVYQKMEALRKIENKYVKDPSDGNKVYATNVVRDLTIEEAEKLHSFNDMIDNNILSSREYASKTYERNGYFTIKLFAPIYAALSNDDGTPGDLMGRRMAYELLAAKGFKDGMVPYISNQYEDLAKQNGKKITIYGKERGLVTDKLVLEKLFDGKYSSWAAFKKDMYQERIAQFNHLTKVTFKDPTQSWMSNATKTIQRVNDLQQLMDEAVLKDAEERNYYYWNNYNPETDSAVHKLKRAIFKAYLDQTDDFRSSIFENKK

SEQ ID NO: 3574 - protein, 400 aa, Candida albicans SC5314
MTVASASIINNYFESKPLTPEHIQIIIDSVPILEHLDVQLTEKFYKRLLKQNPEFKPFFNETHQKLLRQPRIMIHFLIQYAKNIQDLTPMIDFIKKIASKHVGLQVKPEHYPKLGQVLINVIINLFPKQLVHDEFIEAWTLAYQNLANLLIKLESEQYVEKPWYGFKQFKVTRLQRECSDVKSLYITPVDGSPIPKPKRGQYLCMRWLLPGEKHEITREYSISEYPKNNEYRITVRYIPGGKVSNYIHNNINVGDIVYSGPPCGDCVYESSSKNLVFLAGGNGVTALLPMIEAGLTEGRQVKLLYSNRSTDSRSFGKLFQSYKLQYGDRFQVVEFLSRGRTIDPIDKFYRRSLTLEDLDFIVPEDDVYLIGPRTYMKMIEDYLKDRNITVKLDYFGPREI

SEQ ID NO: 3575 - protein, 181 aa, Zea mays
  misc_feature (110)..(110): Xaa can be any naturally occurring amino acid
MSYYGDRRAESSIVEAFTLSPLPYPVILVLLMVTLLLGASWFFTYDDFIEEASQQLSWALLGVPIALVLLIRWISSVDSFEGYLGFYPTESRWKGRYERGPAEGSSPWGXVALLVLLLLVLASFHSTIHDMWGPVNGCSDCSPDSCSVPRAHVCACATGCCLIDRWIDDSMYIFVRGDAAG

SEQ ID NO: 3576 - protein, 400 aa, Zea mays
MVLEATMICIDNSEWMRNGDYAPSRFQAQADAVNLICGAKTQSNPENTVGVMTMAGKGVRVLVTPTSDLGKILACMHGLEVGAEANLAAAIQVAQLALKHRQNKRQQQRIIAFIGSPVKYDKKVLETIGKKLKKNNVALDIVDFGESDDEKPEKLEALIAAVNSSDSSHIVHIPPGENALSDVLLSTPIFTGEEGGSGFAASAAAAAATGASGFEFGVDPNVDPELALALRLSMEEERARQEAIAKKAAEDTSNTEHNNVPSSNSDSVMAEGEPASNAAAGDKEQPKDDDDLLQQALAMSMEGGASGSAAVTDSAMAEAGAVDPDLALALQMSVQDANMSSDTDMSKVFEDRTFVSSILNSLPGVDPNDPSVKDLLASLHSQGEQEKKEDTSDKTEDEKN

SEQ ID NO: 3577 - protein, 374 aa, Streptomyces purpurascens
  misc_feature (1)..(1): Xaa can be any naturally occurring amino acid
  misc_feature (31)..(31): Xaa can be any naturally occurring amino acid
  misc_feature (96)..(96): Xaa can be any naturally occurring amino acid
  misc_feature (163)..(163): Xaa can be any naturally occurring amino acid
  misc_feature (196)..(196): Xaa can be any naturally occurring amino acid
  misc_feature (308)..(308): Xaa can be any naturally occurring amino acid
  misc_feature (312)..(312): Xaa can be any naturally occurring amino acid
XSSSSPGEPLEPTDQDLDVLLKNLGNLVTPXALRVAATLRLVDHLLAGADTLAGLADRTDTHPQALSRLVRHLTVVGVLEGGEKQGRPLRPTRLGXLLADGHPAQQRAWLDLNGAVSHADLAFTGLLDVVRTGRPAYAGRYGRPFWEDLSADVALADSFDALXSCDEDLAYEAPADAYDWSAVRHVLDVGGGNGGXLAAIALRAPHLRGTLVELAGPAERARRRFADAGLADRVTVAEGDFFKPLPVTADVVLLSFVLLNWSDEDALTILRGCVRALEPGGRLLVLDRADVEGDGADRFFSTLLDLRXLTFXGGRVRTRDEVVDLAGSAGLALASERTSGSTTLPFDFSILEFTAVSEEAAPAAQASEALPAQE

SEQ ID NO: 3578 - protein, 112 aa, Bartonella sp. Sb1859nv
NEACLKMLQEIGSVKRIPEFIARAKDKNDPFRLMGFGHRVYKNYDPRAKIMQKTCHEVLKELNIQDDPLLDIAIELENIALNDEYFVEKRLYPNVDFYSGITLKALGFPTEM

SEQ ID NO: 3579 - protein, 89 aa, Zea mays
SRITRAERARAPYVDFLKPIIADGDTGFGGTTATVKLCKLFVERGGAGVHLEDESSVSRNCGHMSVNVRVAVSKHVNRLVAARLQFDVM

SEQ ID NO: 3580 - protein, 424 aa, Glycine max
  misc_feature (207)..(207): Xaa can be any naturally occurring amino acid
HASADAWAVGATRISVLPIIPCSGQLFSFLPSPPFVHSPTPHSDQIHHSFFFPFLQQAQWRRRSLPLLKHLLLSRRIPARSVTYMHRPGDGSPRPVTLIPGDGIGPMVTGAVEQVMEAMHAPVYFEKFEVHGHMKAVPPEVLDSIRKNKVCLKGGLVTPMGGGVSSLNVQLRKELDLYASLVNCFNLPGLPTRHDNVDIVVIRENTXEGEYSGLEHEVVPGVVESLKVITKFCSERIAKYAFEYAYLNNRKKVTAVHKANIMKLADGLFLESCREVATKYPGIKYNEIIVDNCCMQLVSKPEQFDVMVTPNLYGNLVANTAAGIAGGTGVMPGGNVGAEHAVFEQGASAGNVGSDKIREQKKANPVALLLSSAMMLRHLQFPAFADRLETAVEKVILEGKCRTKDLGGTSTTQEVVDAVIDALD

SEQ ID NO: 3581 - protein, 401 aa, Zea mays
MEAVGVTPAPVAAPEKKKLLDLKDPFPAAAAANGGAKASPAAKWAMKKKLVGGDAGYVLEDVPHLTDYMPQLPTYPNPLQDNPAYSVVKQYFVNPDDTVTQKIVVHKTSARGTHFRRAGPRQRVYFQSDEVNAAIVTCGGLCPGLNTVIRELVCGLYDMYGVSSVVGIEGGYKGFYSKNTVALTPKSVNDIHKRGGTVLGTSRGGHDTAKIVDCLQDRGINQVYIIGGDGTQKGASVIYEEVRRRGLKCSVVGVPKTIDNDIAVIDKSFGFDTAVEEAQRAINAAHVEAESAENGIGVVKLMGRNSGFIAMYATLASRDVDCCLIPESPFYLEGKGGLLEFVERRLKDNGHMVIVVAEGAGQDLIARSMNFVDTQEGARTRHGQDHRGHHAPRTSLCFYSV

SEQ ID NO: 3582 - protein, 124 aa, Borrelia afzelii
MALNKEDILTWLEGAKTMEVVELVTAIEEKFGVTAAVATSVGGAASTGSTDSEEQTEFDVILMSFGDSKINVIKEVRSITGLGLGEAKALVESAPKAIKEGLSKSDAEELKKKLEAVGAKVEVK

SEQ ID NO: 3583 - protein, 159 aa, Clostridium acetobutylicum ATCC 824
MSVYDFKAKDISGEEISLSKYEGKVLLIVNTASKCGFTPQYKELEDIYKKLGNEKFEILGFPCNQFANQEPGGSGDIKNFCEINYGVTFPLFEKIDVKGENAHPLFKYLASQAGGILGKEIKWNFTKFLIDKKGDVVDRFAPVTKPSKIKDKIVKLMEE

SEQ ID NO: 3584 - protein, 181 aa, Clostridium acetobutylicum ATCC 824
MSIYDFKVKDINGEDISMEEYRGKALLIVNTASKCGFTPQYEDLEALYKKFKGENFEVLGFPCNQFENQEPGTNNDIKKFCQINYGVTFKIFDKVDVNGENEAPLYRYLKEQAPFKELDESTPTAKIIAAFLREKLPETLIGDSIKWNFTKFLIDKNGRVVNRFESGVEPMEIESYIKALI

SEQ ID NO: 3585 - protein, 1395 aa, Neurospora crassa
MPMGDATPKVRRASGGRCIAFSGLIIVVGPEPGGCISPVWCSGQTTSMPQVEAQEMRPRHEYLIVAPIHLLPQRRDSPLDLRRGGVWGMTTTSRDAYTPLESLFLLRGIAKHGLDQQAFHRIADLLQQNHLIKLAPSYDAARLRPEPLQELFLHLLWDELKQEHDTPGPKPDGDLSPNSKRRRLQPPPLPTLREAHQYVPKIESLYRKLEQTYVNQTLQEIDQYERHYDRLQTEVRVLEQAVARDEEQERRQKIPDGLPAQDGPVAHKQSPALGSVPSPVAVQGPGARLPNGASHGPSPVASPRIASPRLPPPQSQSPRTPSTPQLPIPTPPPPPPPPPPPPPPPPPPIPPQLPPQVSAHIPPRPEVARHASVPSPTTQLPPVRSSPAPLPPTTLPPTLPPTTTAALQPQLVSSPRLGHHNIPRGPITSGPGSPRPMTAGGGIPHVLQPPASFSQAPPQPPQPPKPSTPTGGLPRLDSIAGPSRQSPVLQTAHHPATTLPQPQPLIPGQAQGGQLKWEPPYQPQAGHRPILGPGQQHPHYSPVSQPVQPLHSPRLPSHPPPQQVQQHAVVTRPPQPPPMKPQVLIPPQTGQHYAPPLQPAPNRAMSDSPGPSPVRQPVASNAATGIPRANYQQHPSPYPPYHLPQHLQQGAAVSSPPQSPSAIPPRLTHGLAAPQQQRSPPPLQPQQQQSPQHQPQALQAPPPFSQPVTTSMAPSPSLAPIQSEVQRAYPSPYPPQLPQPSHPPQAHPPQAPHPPQVPHQHPPQAHQVPQVPQASQAPQPHVSRAPQVHPTPHLPHPPQAPLPQVTQAQSPRIPPITHAPQPPVTHAPHVAHPPQQQQQPQQQQQPQQPQQPQQPQPPISQHRPRSQSAATTYSGPRFSPITSVTTTLVPPARLGLGTGTKWVSAASASTPKLPDVRSGGDDIRPPAFEPLSPVQQPAVLPTARQDAARPSPARQPTNETSRARGSIPLVGPQPTPASQARQQAAQKVSKPLDKPTASEQPSTVKEIAKESAKEPEPATSVKNEVDTPRATMDTGDTTADESVAGKRQAARQAKRKRDELSPTPAATPAEATPNGNATPANEKSQQETLATASAAPPDAHRVLWSRGFHKVSASAMEQIVRHRSANMFAAPIREKDAPGYHKVILQPQDLKSIRAAIAHGNRSATQAAAALPGGDPGHMLVWLPQMEELVPPRGIINTAQLDRELAHMFSNAIMYNPDRWHGPGSSFLAEREERTDDNNQPGGHGHGHPGDVLGYKVDEFGVVKDARAMFSEADSLLADLRVAEDGRVKSMMEDGTLQKMPSVNGSQNHSRQASKGGEKAEEEQKDKDKPSGDGDKEKDKDGDVSMIGDKEEEAQADGKVDEEGDGEGTATETETAGGSNGNPSKRRRVTRGEKG

SEQ ID NO: 3586 - protein, 427 aa, Escherichia coli
MADTKAKLTLNGDTAVELDVLKGTLGQDVIDIRTLGSKGVFTFDPGFTSTASCESKITFIDGDEGILLHRGFPIDQLATDSNYLEVCYILLNGEKPTQEQYDEFKTTVTLHTMIHEQITRLFHAFRRDSHPMAVMCGITGALAAFYHDSLDVNNPRHREIAAFRLLSKMPTMAAMCYKYSIGQPFVYPRNDLSYAGNFLNMMFSTPCEPYEVNPILERAMDRILILHADHEQNASTSTVRTAGSSGANPFACIAAGIASLWGPAHGGANEAALKMLEEISSVKHIPEFFRRAKDKNDSFRLMGFGHRVYKNYDPRATVMRETCHEVLKELGTKDDLLEVAMELENIALNDPYFIEKKLYPNVDFYSGIILKAMGIPSSMFTVIFAMARTVGWIAHWSEMHSDGMKIARPRQLYTGYEKRDFKSDIKR

SEQ ID NO: 3587 - protein, 365 aa, Buchnera aphidicola
  misc_feature (128)..(128): Xaa can be any naturally occurring amino acid
  misc_feature (346)..(346): Xaa can be any naturally occurring amino acid
MKKQYRIAVLPGDGIGPEVMKEAYKILKILQNYFSLHIEIKEFNIGGIALDKEGVALPKDTLLGCENSDAILFGSVGGKKWNNLPIEKRPERASLLPLRKHFNLFYNLRPAKLYSELRFLSPLRSKTXIKNGFDILCIRELTGGIYFGEPRGRLKKNNIEYAFDTEVYYDYEINRIAHVAFQLARTRKNKVCSIDKANVLNSSLLWREIVTKVSKNYPDVHLSHLYIDNATMQIIQNPNQFDILLCSNLFGDILSDECAIITGSIGMLPSASLNEKNFGLYEPAGGSAPDIAGKNIANPIAQILSLSMLVRYGMNLKKIANKIDQSVISVLKKGYRTFDISDDNNXFLKTNEMGDVIADALINGE

SEQ ID NO: 3588 - protein, 382 aa, Ralstonia solanacearum GMI1000
MMRDAGQLDLMDSRVTQLAFWSALPERWTSDAEETLVCCHVRQETHDVKSFFFRSPAGRTFLFEPGQFITLELDIEGETINRCYTLSSSPARPHTISITVKRVPGGKVSNWLHDNLQPGAAIRVLGPAGEFTCARHPARKYLFLSAGSGVTPLMSMSRAHHDLAEDRDIVFVHSARTPDDIIFARELELIASNHTNFRTSFVVERLGARTNWPGITGFLSLPLLKLIAPDFMEREIFTCGPAPYMKAVRGLLEEAGFDPARYHEESFSFESLTTGAAAEAIAPDAAPTANPDAAAPQFSISFAKTGREIACGAAQHVLDAARQAGVRLPASCTQGMCGTCKVKLVSGQVDMKHNGGIRQREIDQGMVLLCCSKPLSDLVIDK

SEQ ID NO: 3589 - protein, 93 aa, Glycine max
  misc_feature (66)..(68): Xaa can be any naturally occurring amino acid
LVALLSSALPNSTGADSLEHILAQNNRIIDFYTGAQLRVKQYLPHYSTQEEWQVHFGSRWEAFVEXXXAYDPLALLAPGHRIFQKAVSSLLIN

SEQ ID NO: 3590 - protein, 363 aa, Buchnera aphidicola
MKKNYRIAVLSGDGIGPEVMQEACKILNVLKKYFFLSLEIQKFNIGGIAIEREGVALPKTTLLGCENSDSILLGSVGGKKWDNLPVEQRPERAALLPLRKHFNLFSNLRPAKLYPELKCLSPLRSDIVKNGFDILCVRELTGGIYFGEPKGFVNKNNTKYAFDTEIYHEYEIIRIAHLAFKLARSRKKKVCSIDKSNVLQSSILWREVVESVSKKYPDVHLSHLYIDNAAMQIIKDPNQFDVLLCSNLFGDIISDECATITGSIGMLPSASFNEKNFGLYEPAGGSAPDIEGKNIANPIAQILSLSMLVRYGMNLNQIADKIDKAVNNVLKKGYRTSDISHDNNFLKTDEMGDLIVDSLINGK

SEQ ID NO: 3591 - protein, 479 aa, Methanosarcina mazei Go1
MVAMKMQINGKAAGSCGGECFDVRNPATCELLEQVPRGTEEDVALAVEAALSAFEGWASISPQQRGMVFYRAAGLVRQRKEELAALLTQEQGKPLAEARNELEGFSHVLEYYCGLAGSLRGDFIPVTGNGYSFTVKKPLGVCAAIIPWNMPALIMGWKIAPALISGNTFVLKPASSTPLTNLTLASILNEAGLPAGVLNVVTGSGEIAGESLVRSPDVRKISFTGESGTGKRISELAASGMKRVTLELGGSDPMIVCDDANLESAVAGAIRGRFYNCGQTCTAVKRLYVFESVAREFIRKLEEGVKRLKVGNGLDKDTDMGPLNNHSQFEYIKELVAGIEEKGEGRIIAGGKAPSFKGMGKGYFFEPTLVSDVPGDSRLLKEEVFGPLLPIVTVRNLDEAIEEANRSIYGLGASIWTKDLDRIRMGCEQLNAGIIWVNQHLKVAPEVPFGGVKESGFGRENGPDILSEYLETRTIMLKT

SEQ ID NO: 3592 - protein, 121 aa, Zea mays
  misc_feature (12)..(12): Xaa can be any naturally occurring amino acid
MNAPDRYERFVXVPEGTKKVSYERDTKIVNAASFTVEREDHTVGNILRMQLHRDPNVLFAGYKLPHPLQYKIIVRIHTTSQSSPTQAYTQAINDLDKELEYLKQAFEDEKNRYEDRMKQGF

SEQ ID NO: 3593 - protein, 181 aa, Zea mays
MASSMLSSAAVVTSPAQATMVAPFTGLKSSAAFPVTRKTNKDITSIASNGGRVSCMKVWPPIGKKKFETLSYLPDLSDVELAKEVDYLLRNKWIPCVEFELEHGFVYREHGNTPGYYDGRYWTMWKLPLFGCTDSAQVLKEVEECKKEYPGAFIRIIGFDNTRQVQCISFIAYKPPSFTEA

SEQ ID NO: 3594 - protein, 157 aa, Brassica napus
FTASSSSSSSISLLNSDLIMIGAKSFLGLPIASPKGIISDSNSLSTNSRSVGVLRACVSMEGSQTMSHSKNGSIPELKSVNGHTGQKQGPLSTVGNSTNIKWHECPVEKVDRQRLLDQKGCVIWVTGLSGSGKSTLACALNQKLYQKGKLCYILDGD

SEQ ID NO: 3595 - protein, 247 aa, Candida albicans SC5314
MSIVSLTGIEVLNNPAKFTDPYEFQITFECLEPLKEDLEWKLTYVGSSDSLDHDQELDSILVGPVPVGINSFLFKADAPSPELIPASELVSVTVIILSCSYNDKEFVRVGYYVNNEYDTEELRENPPAKVAIDHVVRNILAEKPRVTRFNIVWDNEEGADEYPPEQPEDEEEEEEEEEEGEEEEEDEDEEDDDDDEDLNGDAVVDLEKEEISTPRDNDEDIEIDIASESEVEEGGVEEEAKVNTPKD

SEQ ID NO: 3596 - protein, 359 aa, Arabidopsis thaliana
MEGDVGIGLVCQNTMDGKASNGNGLEKTVPSCCLKAMACVPEDDAKCHSTVVSGWFSEPHPRSGKKGGKAVYFNNPMWPGEAHSLKVEKVLFKDKSDFQEVLVFESATYGKVLVLDGIVQLTEKDECAYQEMIAHLPLCSISSPKNVLVVGGGDGGVLREISRHSSVEVIDICEIDKMVIDVSKKFFPELAVGFDDPRVQLHIGDAAEFLRKSPEGKYDAIIVNSSDPVGPALALVEKPFFETLARALKPGGVLCNMAESMWLHTHLIEDMISICRQTFKSVHYAWSSVPTYPSGVIGFVLCSTEGPAVDFKNPINPIEKLDGAMTHKRELKFYNSDMHRAAFALPTFLRREVASLLAS

SEQ ID NO: 3597 - protein, 211 aa, Zea mays
  misc_feature (190)..(190): Xaa can be any naturally occurring amino acid
GSERSWSERRACVAMDGAEDDGTEWMMHGAGGKGKGGGALDKNKKRFSDEQTKSLESMFATQAKLEPRQKLQLARELGLQPRQVAIWFQNKRARWKSKQLEREYSALRDDYHALLCSYESLKDEKRALLKQLEKLAEMLHEPPQGKYYGGNADDVRSGGVGGTKEEEESTDACAGAALYSSDSTPAAAGXSSSAEQTCSGSQWWELESLSE

SEQ ID NO: 3598 - protein, 481 aa, Chlamydomonas reinhardtii
MSSTPSATAIDHGATYSDLLIIQGAIVFFLQVGFVSLEVGYGRSKNVKNILLKNTVNILLCAICWWAVGYAFSYGSSTDGFIGTSGFFHDGGLGAAKLWFYSWTFCLSTVTIVSGCLAERTSLVAYPVFTVLMASWVHPVVVHWAWSRDSWLLGISSECRFLDFAGGTVVHICGGMMGLVGAALVGPRIGRFEEGRAKELPGHDVSSVAIGTLFLWFGWFGFNCGSAYVYMGNMAAAAAEAAASAVASGDTSADVYASAAAAVSAAVTSGANATLHPGSTPADRVALNMTLCASVSGLTALLLSSLRSGTVDLCVCCNSLLAGLVMSTPACGFITSWAAVIYGLVAAALYMGGTRMLVRFHVDDPLESSAIHFGCGGVGTLLLALLARPTYVQELTGYDCGGLVYGGRKGAILLGLQLLGIAAITAWTAFFSVLVFYLLRRLGRLRVDQVTELAGLDNMEHGGPAYPEFNLVPYNTGSAER

SEQ ID NO: 3599 - protein, 473 aa, Gloeobacter violaceus PCC 7421
MPSIAIIGGGLAGLQAAYQLKKLGLYADVYEAKSFVGGRIQSRKNVVGPGLVVELGGTFINSNHRDILTLAQEFNLPLFNRAKDAQQFPFPETGYYFDGQNRLESEVAEKLRPLADQIAKDAALLDENFDKFAPQFDRLSVAEYLNIHADKIPEPFIRTLIENSIRTEYGVEPVDSSALQLLFNLPVVDGEAVEVLGSSDEIFVVEGGSERLIASLAAVLPGRIHTRMALTRLEKMGQKYRLTFAGAQTREVDFVIVAVPVNGLKKIDFQVPLPPAFRRFIKEVSLGFNEKLFAGFSERVWRQEEGFVSEGWTDLGFSQVWEDTQRQPASSDAALTFFMGAQEVFATQSLGAQTLGEAFLQRFEAVVDGAQAAATGRFSRTRWNQDPWIGGGYTTFKPGQLTEFGGFLYIESVIPAFRQDVNFGNLIFAGEHLSDEFYGFMNGAAQTGRLAAQVVLRQIQEGQLASGKPTSAA

SEQ ID NO: 3600 - protein, 494 aa, Triticum aestivum
MSATCAADLGPLLGAAAANATDYLCNRFADTTSAVDSTYLLFSAYLVFAMQLGFAMLCAGSVRAKNTMNIMLTNVLDAAAGALFYYLFGFAFAFGTPSNGFIGKHFFGLKDMPQTGFDYSFFLFQWAFAVAAAGITSGSIAERTQFVAYLIYSAFLTGFVYPVVSHWIWSVDGWASAARTSGPLLFKSGVIDFAGSGVVHMVGGIAGFWGALIEGPRIGRFDHAGRSVALKGHSASLVVLGTFLLWFGWYGFNPGSFVTILKSYGPPGSINGQWSGVGRTAVTTTLAGSVAALTTLFGKRLQTGHWNVVDVCNGLLGGFAAITAGCSVVDPWAAVICGFVSAWVLIGLNALAGRLKYDDPLEAAQLHGGCGAWGIIFTALFAKKQYVEEIYGAGRPYGLFLGGGGRLLAAHIVQILAIAGFVSCTMGPLFLALKKLGLLRISAEDEMAGMDLTRHGGFAYVYHDDDEHDKSVGGFMLRSAQTRVEPAAAANSQV

SEQ ID NO: 3601 - protein, 344 aa, Saccharomyces cerevisiae
MSSSVASTENIVENMLHPKTTEIYFSLNNGVRIPALGLGTANPHEKLAETKQAVKAAIKAGYRHIDTAWAYETEPFVGEAIKELLEDGSIKREDLFITTKVWPVLWDEVDRSLNESLKALGLEYVDLLLQHWPLCFEKIKDPKGISGLVKTPVDDSGKTMYAADGDYLETYKQLEKIYLDPNDHRVRAIGVSNFSIEYLERLIKECRVKPTVNQVETHPHLPQMELRKFCFMHDILLTAYSPLGSHGAPNLKIPLVKKLAEKYNVTGNDLLISYHIRQGTIVIPRSLNPVRISSSIEFASLTKDELQELNDFGEKYPVRFIDEPFAAILPEFTGNGPNLDNLKY

SEQ ID NO: 3602 - protein, 161 aa, Triticum aestivum
  misc_feature (50)..(50): Xaa can be any naturally occurring amino acid
MWHCKDHHLKFKADAPASIDTTPMQAAVIHKGVLLVIKNRPCKGKEATTXILATHEHPKSDYIALDIFNALELEDIVPSSHNCDVPHVDRTEYQLIDISEDGFVSLLTDNGSTKDDLKLPTDDAILTQLKDGFAEGKDLALTVMSAMGEEQICAVKDLGPR

SEQ ID NO: 3603 - protein, 146 aa, Triticum aestivum
  misc_feature (36)..(36): Xaa can be any naturally occurring amino acid
  misc_feature (70)..(70): Xaa can be any naturally occurring amino acid
  misc_feature (82)..(82): Xaa can be any naturally occurring amino acid
MAAFLRPKCSSVGRALIGILGDNLYGGASSSVETVXRRSLSDAVSQQIRTFQSRMRTNLKVAARQLGAKXGDAAYSPVRGKXDGVVVRAAMKKGRSDGSEVQFDDNAIVIVNNKGELIGTRVFGPVPHELRKKKHLKILALAEHIV

SEQ ID NO: 3604 - protein, 372 aa, Chenopodium rubrum
MAPSFDLLCAEDNSSIFDEVDDNYYGVVDDDVLQICNLQQQHGNLRNFDDFTLILLIIIKEHNFEALISGFFVANHECLASLFDNERQHFLGLDYLKRFRNGDLDLGARNLVIDWIHKVQSHYNFGPLCVYLSVNYLDRFLSAYELPGKAWMMQLLGVACLSLAAKVDETDVPLILDLQVSESKFVFEAKTIQRMELLVLSTLKWRMQSVTPFSFIDYFLYKLSGDKMPSKSLIFQAIQLILSTIKGIDLMEFRPSEIAAAVAISVTQQTQIVEFTDKAFSFLTDHVEKERLMKCVEIMHDLRMSSRSNGALASTSVPQSPIGVLDASACLSYKSDDTSTTPSGSCGNSAHSSPASAPPPKRRKLDRTSQIS

SEQ ID NO: 3605 - protein, 132 aa, Brassica napus
MCGILAVLGCVDNSQATRSRIIKLSRRLRHRGPDWSGLHCYEDCYLAHERLAIIDPISGDQPLYSEDKTVVVTVNGEIYNHKALRESESLKSHKYHTGSDCEVLAHLYEEHGEEFINMLDGMFAFVLLDTKD

SEQ ID NO: 3606 - protein, 181 aa, Glycine max
FGSSRELGLQPRQVAIWFQNKRARWKSKQLERDYGILQSNYNSLASRFEALKKENQTLLIQLQKLNHLMQKPMEPGQRCTQVEAANSMDSESENGGTMKCEAEGKPSPSMEISEHLLGVLSDDDTSIKVEDFGLEDEHGLLNFAKHVDGSLTSPEDWNAFESNDLLGQSTTDDYQWWDFWS

SEQ ID NO: 3607 - protein, 166 aa, Brassica napus
  misc_feature (23)..(23): Xaa can be any naturally occurring amino acid
  misc_feature (37)..(37): Xaa can be any naturally occurring amino acid
GKIDKFIAGESTLPLHELESGGXRYFLGMFLGGAYEXALGGVHNLFGGPSVVRVLQSDGPHSFAVTRAVPGQSSADVLRGMQHEPEMMFETLKHRAEEVLHRKGGEGEDDDEGEFCNVAACLDRSFHNMPYLATEEVLSMSNSLSDAVSNLGFYYCDEDGFDYLSA

SEQ ID NO: 3608 - protein, 287 aa, Listeria innocua Clip11262
MTIQWFPGHMAKARREVTEKLKLVDVIFELVDARIPLSSSNPMLEEIIHQKRRVIILNKADTADEKTTKEWIDYFAEKGLPAVAVNAQEGKGLFKIEQAAEKLMAEKFERLRSKGMKPRAIRAMILGIPNVGKSTLINRLAKKNIARTGNKPGVTKAQQWIKVGKTLELLDTPGILWPKFEDQEIGYKLALTGAIKDDLLQMEEIAGYGLRFLEKHYPDRLQNWLKVEKVSEDPIETLAFIAEKRGLLDRYNDPDYSRAAETVVREIRQQKLGRMSFDFPNWEDDAE

SEQ ID NO: 3609 - protein, 267 aa, Chromobacterium violaceum ATCC 12472
MKMPKLGVGTFRLKDQQAEESVSMGLELGYRHIDTAQIYRNEADVGRAIAKSGVPRDELYVTTKIWIDQFAQGKLIPSLRESLDKLGLDSVDMTLIHWPSPNDEVPVAVYMNQLAEAKHLGLTREIGVSNFTIAHLRQAMDVVGADAIGTHQLEVHPYLQNLKVRAFCREHGIALTGYMPLAYGRAVGDPTLQAIGQKHGATAAQVALAWQLQQDIAVIPSSTKRANLAANLDALKLRLDADDMARIAALEDGGRIADPDFAPAWDA

SEQ ID NO: 3610 - protein, 82 aa, Zea mays
VDSIDPSAGLERYVDSLMKRTDIEFNVVVTQMNGKDYSSNSVHVFHIGKLRIKLRKGWSTKARESYSTTMKLCGSRGGGNAA

SEQ ID NO: 3611 - protein, 368 aa, Glycine max
MGEAKGKEEEVLAPVHSTVFKESESLDGKCVKIEGYDFNRGVNYPLLLSSMVTTGFQASNLGDAIQVVNQMLDWRLVDEPVAEDCSDQERDLEYRKSVTCKVFLGFTSNLISSGVRDTVRFLLQHRMVDVVVTTTGGIEEDLIKCLAPTYKGDFSLPGAYLRSKGLNRIGNLLVPNDNYCKFEDWIIPIFDQMLGEQNNENALWTPSKLIARLGKEIKNESSYLYWAYKNNIPVFCPGLTDGSLGDMLYFHSFRNPGLIVDIVQDIRAMNGEAVHASPRKTGMIILGGGLPKHHICNANMMRNGADYAVFINTAQEYDGSDSGARPDEAVSWGKIRDSAQTVKVHCDATIAFPLLVAETFASRVKPPH

SEQ ID NO: 3612 - protein, 215 aa, Hordeum vulgare subsp. vulgare
MSYAYLFKYIIIGDTGVGKSCLLLQFTDKRFQPVHDLTIGVEFGARMITIDNKPIKLQIWDTAGQESFRSITRSYYRGAAGALLVYDITRRETFNHLASWLEDARQHANANMTVMLIGNKCDLSHRRAVSYEEVEQFAKEHGLVFMEASAKTAQNVEEAFIKTAGTIYKKIQDGVFDVSNESYGIKVGYAVPNASGGGAGLVLSNQGRLLAIKQV

SEQ ID NO: 3613 - protein, 138 aa, Arabidopsis thaliana
MADTPSSPAGDGGESGGSVREQDRYLPIANISRIMKKALPPNGKIGKDAKDTVQECVSEFISFITSEASDKCQKEKRKTVNGDDLLWAMATLGFEDYLEPLKIYLARYREGDNKGSGKSGDGSNRDAGGGVSGEEMPV

SEQ ID NO: 3614 - protein, 120 aa, Glycine max
  misc_feature (58)..(58): Xaa can be any naturally occurring amino acid
  misc_feature (88)..(88): Xaa can be any naturally occurring amino acid
  misc_feature (92)..(92): Xaa can be any naturally occurring amino acid
AASMISSPAVTTVNRAGAGMVAPFTGLKSMAGFPTKKTNNNITSITSNSGRVQFIQVXPPIGKNKFKTLSYLPDRNNTQLSKKVQYLXKKDXIPYYKFELKHDFLYPEHNRSPRYYNKRY

SEQ ID NO: 3615 - protein, 333 aa, Bdellovibrio bacteriovorus HD100
MMKLTVIPGDGIGPEIMAQVVRVLKHVHAPFEYEEHQAGEVALNSLGELLPQTTIDSINKTKLAIKGPTTTPVGGGHKSINVTMRQKFDLYANVRPVRSLPGVQCVCSDVDLTIVRENTEDLYAGIERMVDEDTAESIKRITRKGSERIARYAYDLAQKTGKPRMAIVHKANIMKLSDGLFLKVAQEVGWQYPEITTKDVIVDNACMQLVTKPQQFDVIVTENLYGDILSDLCAGLVGGLGVVPGANIGANHAIFEAVHGSAPDIAGQNKANPTALLQSAVMMLQHVGENAKADAIMKALIAALSDVNARTGDLGGKGTTVSFTDAIIQRLGH

SEQ ID NO: 3616 - protein, 240 aa, Zea mays
MGRGKIVIRRIDNSTSRQVTFSKRRNGIFKKAKELAILCDAEVGLVIFSSTGRLYEYSSTSMKSVIDRYGKAKEEQQDVANPNSELKFWQREAASLRQQLHNLQENYRQLTGDDLSGLNVKELQSLENQLETSLRGVRAKKDHLLIDEIHDLNRKASLFHQENTDLYNKINLIRQENDELHKKIYETEGPSGVNRESPTPFNFAVVETRDVPVQLELSTLPQQNNIEPSTAPKLGLQLIP

SEQ ID NO: 3617 - protein, 234 aa, Triticum aestivum
MESSTTDAGDKHLESYLTLGLTVSQSKKGNTKFPKVLSLLATYLGRSVQKNEELLGSNGIKEAATIFHGQKVPDLSIQLYAERIFKYAECSPSCFVLALVYMERYLQQPNVYMTPFSVHRLLITSVVVAAKFTDDAFFNNAFYARVGGIRTIEMNRLELDLLFNLDFRLKVNLETFGSYCLQLEKHAPVSPERLPVQVHRVNGSKDLSYSNSSADEFCQSKLVSYSSQALQGCS

SEQ ID NO: 3618 - protein, 256 aa, Glycine max
  misc_feature (218)..(218): Xaa can be any naturally occurring amino acid
MTMHRESWAFVFGVMGNIISFGVFLAPLPTFYQIYKKKSTEGFQSLPYVVALFSAMLWIYYAFVKRETALLLITINTFGIVVESIYLSIFLIYAPRKPRLTTIKLLLLLNVFGFGAMLLSTLYLSKGAKRLAIIGWICLVFNISVFAAPLFIIRRVIKTRSVEYMPFTLSMFLTINAVMWFFYGLLLRDYYVALPKHAWRLSFGIIQMVMYLMYRNAXTPVALEEPVKAQELNGHIIDVVKIGTMEPNHGGAVGKV

SEQ ID NO: 3619 - protein, 228 aa, Glycine max
  misc_feature (87)..(87): Xaa can be any naturally occurring amino acid
MTSASELFHSRRHRLGRSALDLGLDTELNAADSLRRHYHLRRLRHHPERASDRIDGRYRRSFASESVDSEENVRSSLRGSDSERLPXARGFLRQYDRDSFGEDPESESSNEDPSGASLVTELTSQMARSQFLQELSTKPPGLTQEALDCLHQEVFSSNASEIGLDSRVLQDCSICLESFTDGDELIRLPCGHKFHSVCLDPWIRCCGDCPYCRRCIVVNTHSSLNEDE

SEQ ID NO: 3620 - protein, 214 aa, Ageratina adenophora
  misc_feature (29)..(29): Xaa can be any naturally occurring amino acid
TLISLKDDADADGEGVKLTDIEIKALLLXLFTAGTDTSSSTVEWAIAELIRHPRLLKQAQEEIDTVVGRDRLVTELDLNQLTFIQAIVKETFRLHPSTPLSLPRISSEACEVDGYYIPKGSTLLVNVWAIARDPEMWTDPLEFRPSRFLPGGEKPNVDVRGNDFEVIPFGAGRRICVGMTLGLRMVQLLVATLVQTFDWELAKGLEPEKLNMER

SEQ ID NO: 3621 - protein, 118 aa, Zea mays
  misc_feature (6)..(6): Xaa can be any naturally occurring amino acid
  misc_feature (10)..(10): Xaa can be any naturally occurring amino acid
  misc_feature (19)..(19): Xaa can be any naturally occurring amino acid
  misc_feature (47)..(47): Xaa can be any naturally occurring amino acid
  misc_feature (49)..(49): Xaa can be any naturally occurring amino acid
  misc_feature (59)..(59): Xaa can be any naturally occurring amino acid
  misc_feature (62)..(62): Xaa can be any naturally occurring amino acid
  misc_feature (65)..(65): Xaa can be any naturally occurring amino acid
  misc_feature (69)..(70): Xaa can be any naturally occurring amino acid
  misc_feature (72)..(72): Xaa can be any naturally occurring amino acid
  misc_feature (79)..(79): Xaa can be any naturally occurring amino acid
  misc_feature (86)..(86): Xaa can be any naturally occurring amino acid
MASRLXAAEXSSSSLSSAXPLARLISRRGLAGAADGHGSAKGPLGKXPXSPSKGKEEHXGLXRLXKGGXXFXGGYKLFXGKKEAKXEATQGAKEAPEGQKKKGKLTGGQKGTGRILAS

SEQ ID NO: 3622 - protein, 511 aa, Pelargonium x hortorum
MYNMSLYLLLGSSALAFAAYLVLFSFSKSRRRLPPGPKAWPIVGNLPHMGSMPHQNLAAMARTYGPLVYLRLGFVDVVVALSASMASQFLKTHDSNFSSRPPNAGAKHIAYNYHDLVFAPYGPRWRLFRKITSIHLFSGKALDDYRHVRQEEVGVLASNLARAVSTIVNLGQLLNICATNALGRAVIGKKVFKDGTDDVDPKADEFKSMVVELMVLAGVFNIGDFIPPLDCLDLQGVASKMKNLHKRFDAFLSAILQEHNINSAASATPSMLTTLISLKDSVEDSEGGKLTDTEIKALLLNMFTAGTDTTSSTVEWAIAELIRQPEILIRAQKEIDSVVGRDRLVTELDLSKLPYLQAIVKETFRLHSSTPLSLPRIATQSCEINGYHIPKGATLLVNVWAIARDPDVWADPLSFRPERFLPGSEKENVDVKGNDFELIPFGAGRRICAGMSLGLRMVQLLTATLLHAFNWDLPQGQIPQELNMDEAYGLTLQRASPLHVRPRPRLPSHLY

SEQ ID NO: 3623 - protein, 166 aa, Triticum aestivum
  misc_feature (111)..(111): Xaa can be any naturally occurring amino acid
  misc_feature (152)..(152): Xaa can be any naturally occurring amino acid
  misc_feature (154)..(154): Xaa can be any naturally occurring amino acid
MATSSAKSVHDFTVKDAKGNDINLGDYKGKVLIIVNVASQCGLTNSNYTELSQLYEKYKQKGLEILAFPCNQFGAQEPGSNEQIQEFVCTRFKAEFPVFDKVDVNGDKAAXLYKYLKSSKGGLFGDGIKWNFSKFLVDKEGNVVDRYAPTTXPXSIEKDLLKLLDA

SEQ ID NO: 3624 - protein, 403 aa, Deinococcus radiodurans R1
MLTPEQKAIVKATVPALEAHGETITRTFYASMFAAHPELLNIFNPANQQTGKQARSLAASVLAYAAHIDHPEALGGMVGRIAHKHVSLEVLPEHYPIVGQYLLGAIAGVLGDAAKPEILDAWAAAYGELADLMIGIEKGMYDAGAGQPGGWRDFRPFRVARKVAESRVITSFVLEPVGGGALPAYQPGQYLSLKVKVPGQERWQIRQYSLSDAPSPDHYRISVKREGGGLVSEYLHGAVQEGDELLVHVPAGDFVLQQSERPVVLISAGVGITPMLAMVQTLAQAGSQRPVTFIHAAQNGSVHAFRDDVARLTHEYPHFRKVVFYDEAGPDDQLGTHHDVAGRLSLDAVRGALPAGEAEFYYCGPAGFAGAVEAILDDLQVPAERRFTETFGPSQSFAPVILG

SEQ ID NO: 3625 - protein, 245 aa, Nicotiana tabacum
MGRGRVQLKRIENKINRQVTFSKRRSGLLKKAHEISVLCDAEVGLIVFSTKGKLFEYSTDSCMERILERYERYSYAERQLTATDHETPGSWTLEHAKLKGRLEVLQRNQGHYAGEDLDSLCMKELQNLEHQLDSALKHIRSRKNQLMHESISELQKKDEALQEQNNNLSKQVKEGEKELAQQTQWEQQSHDHLNSSSFVLTQPLSSLHLGEAYPTAGDNGELEGSSRQQQQNTVMPPWMLRHLNG

SEQ ID NO: 3626 - protein, 411 aa, Glycine max
  misc_feature (116)..(116): Xaa can be any naturally occurring amino acid
MSPVPGAHAPLLPGSKSKDVPPATVSGAVFNVATSIIGAGIMSLPATLKVLGVIPALVLILVIAFLAELSVEFLMRFTRAGETTTYAGVMREAFGPLGAVAAQVAVVITNLGCFIXQQWFGIHWWSSREFALLVVLFLILLPLVLYRRVESLKFSSAISTLLAVAFVTICTVLAIVAIVEGRTQSPRLIPCLDQHTSFFDLFTAVPVVVTAYTFHFNVHPIGFELAKPSEMATAVRIALLLCCVIYFSIGLSGYLLFGDSTQSDILVNFDQNAGSALGSLLNVLVRLSYAFHVMLTFPLLNFSLRTNVDEFFFPKKSPLATDSKRFVSLTLVLLALSYIAAILVPDIWYIFQFMGSTSAVCLAFVFPGAIVLRDSYGISTRRDKIIALVMVILAAITSVIAISTNIYKAFQ

SEQ ID NO: 3627 - protein, 128 aa, Corynebacterium efficiens YS-314
MAKLTKDELIEAFKEMTLIELSEFVKEFEEVFEVTAAAPVAVAAAGAAGGEAAAAEEKDEFDVVLEDAGAKKIGVIKVVRELVSGLGLKEAKELVEGAPKAILEGANKDDAEAAKAKLEEAGAKVTLK

SEQ ID NO: 3628 - protein, 512 aa, Oryza sativa (japonica cultivar-group)
MVAKKPRVVVVGAGISGLAAAHRLCGAGGDRFEVAVVEAGDRVGGRILTSEFAGHRVEMGATWVQGVVGSPVYALARDAGALGEEEGRGLPYERMDGFPDRVLTVAEGGEVVDADTVAGPIEELYRGMMEAARAGEAGGGGGVEEYLRRGLRAYQAARSAGGGGGGGKELEEVDEALLAMHINRERTDTSADDLGDLDLTAEGEYRDFPGEHVTIPGGYSRVVERLAAALPPGTVRLGLRLRRLKWGGTPVRLHFADGAPPLTADHVILTVSLGVLKASLGNKDTAGVGAAAIAFDPPLPPFKREAVARLGFGVVNKLFMEVEAVAPSEPEDVAGVQPAAAGFPFLHMAFRGHVSKIPWWMRGTESICPVHAGSTVALAWFAGREAAHLESLPDDDVIRGAHATLDSFLPAAPRWRVRRIKRSGWATDPLFLGSYSYVAVGSSGDDLDRMAEPLPRGPDAAADERPPSPRLLFAGEATHRTHYSTTHAAYLSGVREANRLLQHYRGGANHTT

SEQ ID NO: 3629 - protein, 277 aa, Azotobacter vinelandii
MQTIVTHDKLVLPKLGLGTWPMLGEECTQAVLSALELGYRHIDTAAAYENEAAVGLALERSPVPRESVHLTTKVWWDRLQPAAMRASLQRSLEALRTDRVDLFMIHWPGKDWDLPRSIETLVALREEGKARHIGVANFPLPLLRRTVEELGAPLSAIQVEYHVLLGQRRLLDYVRQHGMALIAYSPLARNRIAEVAEIRDIAARHQARPAQIALKWLLDQPAVAAIPKAASVANQRINLDAFKVTLNDRERALIDALPKNQRLVSPDFAPRWDPFDE

SEQ ID NO: 3630 - protein, 242 aa, Nicotiana tabacum
MGRGKVQLRRIENKINRQVTFSKRRGGLVKKAHEISVLCDAEVALIVFSHKGKIFEYSSDSCMEQILERYERYSYTERRLLASNSESSVQENWSLEYAKLKAKIDLLQRNHKHYMGEDLDSLNLKDLQNLEQQLDTSLKLIRSRKNQLMHESISMLQKKEKAIQEENNMLSKKIKEKDNTVGQQVEWHQQNQVPTSTSFLLQPHPCLNIGGNYQEEAEEARRNELDLNLDSLYPCHMGCFAT

SEQ ID NO: 3631 - protein, 444 aa, Bacillus subtilis
MSSYLIKPELSSAYPVVSYAKGSYVYDQTGKKYLDGSSGAVTCNIGHGVRDVTEKLKEQLDQVSFAYRSQFTSEPAEQLAALLAQELPGDVNWSFFVNSGSEAIETAMKIAIQYWQEKKQTQKSIFLSRWSSYHGITLGALSLSGFYERRYRFTHLIERYPAISAPHIYRLNHETEEDFVQTAADELDTMIKRIGSQFIAGFVAEPIIGAAGAAITPPPGYYERLSEVCRTHDVLFIADEVMTGLGRTGRMLATEHWDTVPDIAVLGKGLGAGYAPIAAAVVSDSIIETIKQGSGVIMSGHTYSAHPYSAKAALEVLRYVLKHGLIKQSEKKGAVLKKKLDEAASQSGIIGEVRGKGLLLGIEFVQTKKRRKCFRQQQAITQLIVSEAKKRGLIVYPSKAGIDSGEGDAVIIAPPFTISDGEMEELISIFSETVAAVEKNLKKD

SEQ ID NO: 3632 - protein, 484 aa, Brachymonas petroleovorans
MDAQRTLPDCSKLFLGGRWVEPAQGMYYDNENPAKRETICRVAQASAADVDAAVRGAQQALEPGSPWAQMTPAARARLLWRVAERIREQVEELAWLESLDTGKPYGEALHGDIPHAAGAFEYYAGWCSKLAGSVLPVSPRYLDYTRLEPVGVVGAIIPWNFPLQMAAMKVAPALAAGNAVLLKPAEQTPLTAFALARIFEELEFPPGVLSVLPGFGATGAALVAHPGIDKITFTGSTAVGKTIMRGAADTLKRVSLELGGKSPNIVFADADLKRAVRGATTGIYYNQGQMCTAGSRILVQDSLYDKFLEAFTAAIADLRPGDPLDPKTRMGALVSQEQFERVSHYVALGQEDGATLLAGGQGSAERGYFFPPTIFTDVKPEHRIAQEEIFGPVVSVMRFGSEEEALRLANGVSYGLAAGVWTADVGRAHRVAHGLRAGTVWVNTYNALWNEAPFGGYKQSGIGREGGREGIEPYTEVKNICLSL

SEQ ID NO: 3633 - protein, 442 aa, Triticum aestivum
MSNYHDDHVEDMEDDYDMDDPAEDMVDAHHERGLRDSDSEDDEYAHSNDKIPDTSAADARKGKDIQGIPWERLAITRENYRQTRLEQYKNYENIPNSGEAAAKECKPTVKGGMYYEFRQNTRSVKSTILHFQLRNLVWATSKHDVYLMSHYSVLHWSALSGVDTELMNVQGHVAPREKHPGSLLEGFSQTQVSTLAVKDNLLVAGGFQGELICKHLDREGISFCCRTTYDDNAITNAVEIFNTASGAVHFMASNNDSGVRDYDMERFQLCKHFQFDWPVNHTSLSPDGKLVVIVGDDPNGLLIDANSGKTLHSMKGHHDFSFASAWSPDGRTFATGNQDKTCRIWDARNLSKAVHVLKGNLGAIRSIRFTSDGQFLSMAEPADFVHIFDVKSDYNRRQELDFFGEISGMSFSPDTDALFVGVWDRTYGSLLQFGRLYNKLVP

SEQ ID NO: 3634 - protein, 371 aa, Senecio vernalis
MEESMKQASVMENLRSVVFKESESLEGTCAKIRGYDFNNGIDYSQILKSMVSTGFQASNLGDAIETVNQMLDWRLSHEQVTEDCSQEEKNPTYRESIKCKIFLGFTSNLISSGVRDIIRYLVQHHMVDVIVTTTGGIEEDLIKCLADTFKGEFSLPGAELRSKGLNRIGNLLVPNDNYCKFEDWIIPIFDQMLEEQKAKNVLWTPSKLIMRLGKEINNESSYLYWAYKNDIPVFCPGLTDGSLGDMLYFHTFRNPGLIVDVVQDIRAINSEAVHANPRKTGMIILGGGLPKHHICNANMMRNGADYAVFINTAQEFDGSDSGARPDEAVSWGKIRGSAKSVKVHCDATIAFPLLVAETFAAKREQSAEPSS

SEQ ID NO: 3635 - protein, 420 aa, Triticum aestivum
  misc_feature (315)..(315): Xaa can be any naturally occurring amino acid
  misc_feature (335)..(335): Xaa can be any naturally occurring amino acid
MEGPSVEVPPYFLCPISLEIMRDPVTLATGITYDRCSIERWLSDGHATCPITQQKLAEADREATPNHTLRRLTQAWCALHAVERFPTPRPPLDACRVAEIVEEGRGAGRQKELAALREIKAIVAESDRNRRCVEATPGAVEFLVSVVRNHATASKSAEDLLELSLDSPTSTSSPEEDALSVICSLKPSKKSLVRILEENGDFLDTLVYMLRRPSYRSRCYGILLLKAMVSVMEPARLMAVRTEVVQELVRVVSDRVSAKAVKAALHVLCRLCPWGRNRVKAVEAGAMTVLVELLLDEGGRHPTELAVVAIDHLCXLCGGAVGPGGAPGGAGRRGXKAMRVSLTTTESAVRALHAVARHSPTPAVLQEMLAVGVVAKLLLVLQVDAGERARAKAKELLKMHARVWKDSPCLQAHLKAHYPC

SEQ ID NO: 3636 - protein, 484 aa, Physcomitrella patens
MNVSEGCSTLTGAQLKYSTDKSNMSYETVYRDAAVESPQREVSNESGSTLKEHDYFGLSEVLSSNSSSGKQPEKCCREELNLNESATTLQLGPPAAVKPSGQADGDDAHDEGAGPENPAKRSAYHMQQESLADGRKAAAEMGSFKIQRKNILEEFRAMKAHAHMTKSPKTVQTMQHNMHVSYSGAQMAFGGAKNNGVKRVFSEAVVANHNAASGVGVGVREGNDDVSRCEEMNGTEQLDLKVHLPKGMGMARMAPASGSPSFDNMQGPLNPFFRKSLVSKMPVPDGGDSSANASNDCANRKGMVASPSVQPPPAQNQTVGWPPVKNFNKMNTPAPPASTPARACPSVQRKGASTSSSGNLVKIYMDGVPFGRKVDLKTNDSYDKLYSMLEDMFQQYISGQYCGGRSSSSGESHWVASSRKLNFLEGSEYVLIYEDHEGDSMLVGDVPWELFVNAVKRLRIMKGSEQVNLAPKNADPTKVQVAVG

SEQ ID NO: 3637 - protein, 370 aa, Senecio vernalis
MAESNKEAIDSARSNVFKESESLEGTCAKIGGYDFNNGIDHSKLLKSMVSTGFQASNLGDAMIITNQMLDWRLSHDEVPENCSEEEKKNRESVKCKIFLGFTSNLISSGVRETICYLTQHRMVDVLVTTTGGIEEDFIKCLASTYKGKFSLPGADLRSKGLNRIGNLIVPNDNYIKFEDWIIPIFDQMLIEQKTQNVLWTPSRMIARLGKEINNETSYLYWAYKNNIPVFCPSITDGSIGDMLYFHSVSNPGPGLVVDIVQDVIAMDNEAVHASPQKTGIIILGGGLPKHHICNANMMRNGADFAVFINTAQEYDGSDSGARPDEAVSWGKISSTGKAVKVHCDATIAFPLLVAETFAVKKEKASKVNGF

SEQ ID NO: 3638 - protein, 503 aa, Physcomitrella patens
MKFSNEVVHKSMNITEDCSALTGALLKYSTDKSNMNFETLYRDAAVESPQHEVSNESGSTLKEHDYFGLSEVSSSNSSSGKQPEKCCREELNLNESATTLQLGPPAAVKPSGHADGADAHDEGAGPENPAKRPAHHMQQESLADGRKAAAEMGSFKIQRKNILEEFRAMKAQAHMTKSPKPVHTMQHNMHASFSGAQMAFGGAKNNGVKRVFSEAVGGNHIAASGVGVGVREGNDDVSRCEEMNGTEQLDLKVHLPKGMGMARMAPVSGGQNGSAWRNLSFDNMQGPLNPFFRKSLVSKMPVPDGGDSSANASNDCANRKGMVASPSVQPPPAQNQTVGWPPVKNFNKMNTPAPPASTPARACPSVQRKGASTSSSGNLVKIYMDGVPFGRKVDLKTNDSYDKLYSMLEDMFQQYISGQYCGGRSSSSGESHWVASSRKLNFLEGSEYVLIYEDHEGDSMLVGDVPWELFVNAVKRLRIMKGSEQVNLAPKNADPTKVQVAVG

SEQ ID NO: 3639 - protein, 159 aa, Senecio vernalis
MSDEEHQFESKADAGASKTYPQQAGTIRKGGHIVIKNRACKVVEVSTSKTGKHGHAKCHFVAIDIFNGKKLEDIVPSSHNCDVPHVNRTDYQLIDISEDGFVSLLTENGNTKDDLKLPTDDALLTQIKDGFGEGKDLVVSVMSAMGEEQICALKDIGPK

SEQ ID NO: 3640 - protein, 150 aa, Agrostis stolonifera var. palustris
MSIVRWSNVFDPFSLDLWADPFDAFRSILPAASGNHDTAAFVNARMDWKETPEAHVFKADLPGVKKEEVKVEVEGGNVLVVSGERKGEGGQERQVATLERSSGKFVRRFRLPENAKVEEVKAGLENGVLTVTVPKAEVKKPEVKAIEISG

SEQ ID NO: 3641 - protein, 219 aa, Zea mays
MAPTTMAATRVSPVLLLLLTIQLSLLFRLPDSPSTPALALAAEPEQQNAKQHRQPALLVQSTCNSTSFYDLCIAALAADPASSTADVPGLGAIAVSAAANNASGTAAFLGNASDAAATPQADRALLRTCAGKYAAARDALVQARASLAEQAYDYAFVHVSAAGEYPAVCRTLFRRRQQQQRGASRSAYPAELAKREEALRRLCTIALDIISLLQNQETY

SEQ ID NO: 3642 - protein, 346 aa, Triticum aestivum subsp. tibeticum
MKTFLVFALLAIAATSAIAQMETSRVPGLEKPWQQQPLPPQQQPPCSQQQQPFPQQQQPIIILQQSPFSQQQQPVLPQQQPVIILQQPPFSQQQQPVLPQQPPFSQQQQQQQQQQPPFSQQQQPVLPQQPPFSQQQQPPFSQQQQPSSQQPPFPQQHQQFPQQQIPVVQPSVLQQLNPCKVFLQQQCSPVAMPQHLARSQMWQQSSCNVMQQQCCQQLPRIPEQSRYEAIRAIIFSIILQEQQQGFVQPQQQQPQQSVQGVYQPQQQSQQQLGQCSFQQPQQQLGQQPQQQQVQKGTFLQPHQIARLEVMTSIALRTLPTMCSVNVPLYSSITSAPLGVGTGVGAY

SEQ ID NO: 3643 - protein, 431 aa, Triticum aestivum
  misc_feature (222)..(222): Xaa can be any naturally occurring amino acid
  misc_feature (288)..(288): Xaa can be any naturally occurring amino acid
  misc_feature (307)..(307): Xaa can be any naturally occurring amino acid
MDATTAKQLRRLRTLGRGASGAVVWLASDDASGQLLAVKSAGAGAADTLRREGSVMAGLCSPHIVPCLGSRAAPGGEYQLFLEFAPRGSLADEAARSGGSLAERAIQGYAADVARGLAYLHGNSLVHGDVKARNVMVGADGRAKLADFGCARAADSDRTIGGTPAFMAPEVARGEEQGLAADVWALGCTVIEMATGHAPWSDMDDVFAAVHRIGYTDAVPEXPASLSPQAKDFLRKCLARNPRHRSTAAQLLEHPFLASAFHDVDAEPAKQDWIMSPKSTLNADFWEXSDEESETEDMLTSAAERIXSLASPCSALPDWESDDGWIVVHGGRPEASETTTPTAIAGTDFGPWSEEGLEAEVDVHFAGADAGRWYDLVRNVDGAHYFGWYERDLGVSVVTDRPLCLIVSHGRKIVKFGCHCDRERTMHFDFA

SEQ ID NO: 3644 - protein, 316 aa, Zea mays
MVLEATMICIDNSEWMRNGDYAPSRFQAQADAVNLICGAKTQSNPENTVGVMTMAGKGVRVLVTPTSDLGKILACMHGLEVGAEANLAAAIQVAQLALKHRQNKRQQQRIIAFIGSPVKYDKKVLETIGKKLKKNNVALDIVDFGESDDEKPEKLEALIAAVNSSDSSHIVHVPPGENALSDVLLSTPIFTGEEGGSGFAASAAAAVATGASGFEFGVDPNVDPELALALRLSMEEERARQEAIAKKAAEDTSNTENINASSSNSDSVMAEAELASNAAAGDKQEQPKPQDDDDLLQQALAMSMEGGASGSAGGSL

SEQ ID NO: 3645 - protein, 491 aa, Synechococcus elongatus PCC 7942
MPRGVAPAFAGRKPKGWAWASTAVPDFQGGFKRLINRFQGSKLWLACVPLAATIAVFWGVAANAQGSADPVPSAQFLVNNLWLMVATVLVIFMNAGFAMVETGLCRQKNAVNVLAKNLIVFTLAATAYWFIGYSLMYGSPVVDGFLYFGKGGPLGFFFDPTVSAETIKNDGLISSLDFLFQAAFAGTAATIVSGSVAERIKFVDFIIFSLILTAVIYPIAGSWQWNVGSGWLNKAGFIDFAGSTVVHSVGGWAALIGAITLGPRMGKFQDGRPGALPGHNLAIATLGALILWIGWYGFNGGSVLAFNTAVPYVAVTTTLGGAAGGISATITSWSTSGKPDLSMVINGILAGLVGVTAGCDGFGMGGSFIVGLIAGVLVVFSVYTFENLKIDDPVGACSVHLVCGIWGTLAVGLFNLEKGLFYGGGFGQLGSQILGIISYGVWTVVASVIIWNILKALLGLRVSLKKSYKAWILANTGWKPTLALPRMHLTP

SEQ ID NO: 3646 - protein, 456 aa, Bordetella parapertussis 12822
MTTLSSAQQQDIQYQLHSYTNAVKHRDVGPRIITHGEGVYVFDDQGNRYLEGMAGLWSVAVGFGEQRLVEAAARQFQELPYYHTFTHKSHPSVIALAERLIGYTDGRMAQAFFTNSGSEANDTVVKLVWYYNNALGRRDKKKIIARQRGYHGVTVASTSLTGLPGNHKDFDLPLPQIRHTACPHYYRYGLPGETEEDFATRMAGELEAMILREGPDTVAAFIGEPVMGAGGVIVPPRTYWQKIQAVCRKYDILVIADEVITGFGRLGQRFGSQVFDIEPDIMVLSKQITSSYQPLGAVLLNARVADVVAEHSGRLGTFGHGYTASGHPVATAVALENLRLIDERGLIEHAAEMGALLHLELQALSSHPLVGEVRGVGLIAGVELVADKATRQPFDPLGKAGGYAYERAHDHGLIVRGIQDTVAFCPPLIITAEQVRDMVARFARTLDDVAAHVAQG

SEQ ID NO: 3647 - protein, 506 aa, Zea mays
  misc_feature (155)..(155): Xaa can be any naturally occurring amino acid
  misc_feature (167)..(167): Xaa can be any naturally occurring amino acid
  misc_feature (173)..(173): Xaa can be any naturally occurring amino acid
  misc_feature (192)..(192): Xaa can be any naturally occurring amino acid
MASPAMVPLRQLFVDGEWRPPAQGRRLPVVNPTTEAHIGEIPAGTAEDVDAAVAAARAALKRNRGRDWARAPGAVRAKYLRAIAAKVIERKPGLAKLEALDCGKPYDEAPWDSDDVAGCFECFAHPLSSNIVTGLGPDACAPLSSHANSDKVYFXLVGLIPVRNYPXLMATWXKPAPALAAGKRAMLVFDDXAIDKAVEWTSVWVLLGLSSGVLDNDPVLGPDAGAPLSAHPDVDKVAFTGSFETGKKIMASAAPMVKPVTLELGGKSPIVVFDDVDIDKAVEWTLFGCFWTNGQICSATSRLLIHTKIAKKFNERMVAWAKNIKVSDPLEEGCRLGPVVSEGQYEKIKKFISNAKSQGATILTGGVRPAHLEKGFFIEPTIITDITTSMEIWREEVFGPVLCVKEFSTEDEAIELANDTQYGLAGAVISGDRERCQRLSEEIDAGCIWVNCSQPCFCQAPWGGNKRSGFGRELGEGGIDNYLSVKQVTEYISDEPWGWYQSPSKL

SEQ ID NO: 3648 - protein, 497 aa, Bordetella parapertussis 12822
MSTLPPLSHWESLAAGLTLRNQAFIDGRWHDGRAGPLAAINPATGQLLAEVTACSQADIDQAVAAARRAFESGVWSRMPRRERKQCMLRLAALIREHAEELALIETLDMGKPIGDTMAFDIPETAHTYAWYAETIDKQYDEIAPTDADALATITREPLGVVAAVVPWNYPLLMASWKVAPALAAGNSVILKPAEQSSLSALRLAELALQAGIPAGVLNVVPGAGPVAGRALGLHMDVDCLAFTGSTATGKRFMEYSGQSNLKQIWLECGGKSPHIIFDDCPDLDRAALAAAIGIFNNQGEVCIAGSRLYVQAGIYDTFVSKVEACARAMQPGNPLDPASPMGAMVDERQMARVLEYVESGRREGARLRMGGERVRADSGGYYIEPTIFECARPDLTIVREEIFGPVLAVTRFDGEDEVVAQANASAYGLGSGLWTADLSRAHRVSRRLRAGLVWVNCYFDGDVTVPFGGVKQSGFGRDKSLHALDKYTSLKTTWIRL

SEQ ID NO: 3649 - protein, 161 aa, Zea mays
MDGRMFGLETPLMVALQHFLDVPDGDAGAGGDKAGGGGPTRTYVRDARAMAATPADVKELPGAYAFVVDMPGLGTGDIKVQVEDERVLVISGERRREEREDAKYLRMERRMGKFMRKFVLPDNADMDKISAVCRDGVLTVTVEKLPPPEPKKPKTIEVKVA

SEQ ID NO: 3650 - protein, 369 aa, Brachymonas petroleovorans
MAKTGRIALFESPHQPFTFREMPVPDPKPGAAVVRVTMANICGSDLHAWHGDFKLAGLGGKLPTVLGHEMTGQIVALGEGKHTDGNGQPLHEGDHVVYTYFTGCGHCPMCLRGHRVSCDELTMAMTEPALEWPYFVGGYADYYYVKPGATIYKVPQGLPDEVVAGANCALSQVISGWERAQLTFDETVLIQGAGGLGLYACAVAKAFGARLVIAIDAVQQRLDMARRFGADATINLTELPDEKARVNLVKKLTDGRGVDVVMELVGRADVVPEGLRMLGQFGRYVTIGNINAGQTYAADPSRLVMSNKSMLGVSLYEPPTLGKALRFLERHRDTLPFAEMLSTRFPLEQINEAFAKADAREVVRASIVP

SEQ ID NO: 3651 - protein, 293 aa, Nostoc sp. PCC 7120
MGLTDNYKLNLIQWYPGHIAKAEKNLKEQLSRVDVVFEVRDARIPLATHHPQIDEWVGNKARILVLNRLDMIPPQVRSLWIDYFQNRGEVPYCTNAQHGQGVVGVAKAAQAAGVELNQRRRDRGMLPRAVRAVVIGFPNVGKSALINRLLGKRVVESAARPGVTRQLRWVRISDQLELLDAPGVIPVKLGNQEAAVKLAICDDIGQASYDNQLVAAALIDLVNSLQEQAGELLPKSPLYTRYELDPTPHTGEGYLHALAEYRHKGDVERTARQLLTDYRKGLLGTLPLELPPM

SEQ ID NO: 3652 - protein, 208 aa, Zea mays
MAGDEEDHLADAPRVVGVLSALLERVVERNDAVADELAAGTESAAPPSAFRATARPDISVRSYMARIARFAGCSPACYVVAYVYLDRLLRRARSAPAVDSYTVHRLLITAVLAAVKFMDDVCYNNAYFARVGGISLSEMNYLEVDFLFAVGFDLNVSPGTFGHYCTVLRGRDAVPGAGRVLPPPAASTSLHRCCLSEDDDGSSSTSSS

SEQ ID NO: 3653 - protein, 305 aa, Ferroplasma acidarmanus
MNMVDPDFNSLIELSKSAGDMTKIEPAMLRNFLDESSLSSRGKPVEIKETKDYKIKLDGRTLNARMYDNNNAKSAILYYHGGGFLFGNIETYDNYCRFLAKESWVKIISIEYRLAPEHKFPDAFNDAYDSFHYIAKKKKDFGIEGRIGVAGDSAGANLAAALCLKCRDGKTEMPAVQVLFYPSLAPDNFSRSFIEYSDNYVLTGKMIRYFGNMYSKNMQDLINPYFSPLVADDFSNLPPAIMVTNEYDPLRDPEETYVKKLREAGVRAVGIRGIGMIHGSATDFEVSDGARNIVKMVARIIPDYL

SEQ ID NO: 3654 - protein, 155 aa, Triticum aestivum
  misc_feature (55)..(55): Xaa can be any naturally occurring amino acid
MTRASTLDFRRKTQGQNNWSGPLRLVNVVRNKFPTYKNGTNGIVIKFADEPETPXLKESVAKGTADLLDRRQRLSVRELAMKFEKGLSTATLLSNETLSYCIGFNSQVKCKQVALLERDILLKDLKSVLESLRGQVAGKYKDEFEGSVSMGDILA

SEQ ID NO: 3655 - protein, 322 aa, Ustilago maydis 521
MSSALDSLKQYTAVVSDSGDFESIDAYKPQDATTNPSLILAAVKQEKYARLIDVAVKYAKEQTSDKSKQLDLATDRLLVAFGVEILKIIPGRVSTEVDARLSYNKEATIEKAKHLIALYESLGVKRERVLIKIASTWEGIQAARELESQHNIHCNLTLLFGFNQAVACAEANVTLISPFVGRILDYYKKAEGKEYASHEDPGVLSVQRIYTYYRQHGYKTIVMGASFRNIGEILELAGCDFLTISPKLLEELKNKEGPVEQKLSVEKAKSAEPIAKVSYINDQAAFLLDLAKDPMANTKLAEGIAGFAKDGATMEQMIADKL

SEQ ID NO: 3656 - protein, 510 aa, 'Flavobacterium' lutescens
MSFELLKALGLDATNSGTYLGDGEWSSATGAGTISPRNPTTGEVIAQVQATTEADYETILARAQQAFKVWRTTPAPRRGEAIRLCGEALRRHKDALGSLVALEMGKSKPEGDGEVQEMIDIADFAVGQSRMLYGYTMHSERPGHRMYEQYQPLGIVGIISAFNFPVAVWAWNSFLAAICGDVCIWKPSNKTPLTAIASMRICNEALREGGFPDIFFLINDAGTALSEKLVEDKRVPLISFTGSTQVGRIVNQKVAARLGRCLLELGGNNAIILDETADLKLAVPGIVFGAVGTAGQRCTTTRRLIVHESIYDNVLATLIKAYKQVEGKIGDPLDAANLMGPLNSPEAVQQFLASIEKAKAAGGTVQTGGTAIDRPGNFVLPAIVTGLKNSDEVVQHETFAPILYVMKYSTLDEAIEMQNGVPQGLSSSIFTTNLKAAEKFLSAAGSDCGIANVNIGTSGAEIGGAFGGEKETGGGRESGSDAWKVYMRRQTNTINYSDSLPLAQGIKFDL

SEQ ID NO: 3657 - protein, 191 aa, Zea mays
  misc_feature (102)..(102): Xaa can be any naturally occurring amino acid
MSLCTIARRLCLSKPSSGSRLSAIWAHLYSTEAAKDMGAKKYKYPDVYDPYGPMPPPSEKVVELADRIAALPPEEIKQIAPALLLRLNQEPPQAVSGPGFRXGAQVGSGAGSGKAEKKAEKTVFDVRLEKFDAAAKIKIIKEIRTFTDLGLKEAKELVEKAPVVLKQSLTKEEAEAIIAKIKAAGGVAVME

SEQ ID NO: 3658 - protein, 193 aa, Emericella nidulans
MAEIRRKLVIVGDGACGKTCLLIVFSKGTFPEVYVPTVFENYVADVEVDGKHVELALWDTAGQEDYDRLRPLSYPDSHVILICFAVDSPDSLDNVQEKWISEVLHFCQGLPIILVGCKKDLRHDPKTIEELNKTSQKPVTPEQGEEVRKKIGAYKYLECSARTNEGVREVFEAATRAALLTKTHKSKKKCSIL

SEQ ID NO: 3659 - protein, 388 aa, Streptococcus pyogenes MGAS8232
MKNQLGQLALEQAKTFGGKLEVQPKVDIKNKHDLSIAYTPGVASVSSAIAKDKTLAYDLTTKKNTVAVISDGTAVLGLGDIGPEAAMPVMEGKAALFKAFAGVDAIPIVLDTKDTEEIISIVKALAPTFGGINLEDISAPRCFEIEQRLIKECHIPVFHDDQHGTAIVVLAAIFNSLKLLQKSLDEVSIVVNGGGSAGLSITRKLLAAGATKVTVVDKFGIINEQEAAQLAPHHLDIAKVTNREFKSGTLEDALEGADIFIGVSAPGVLKAEWISKMAARPVIFAMANPIPEIYPDEALEAGAYIVGTGRSDFPNQINNVLAFPGIFRGALDARAKTITVEMQIAAAKGIASLVPDDALSTTNIIPDAFKEGVAEIVAKSVRSVVLKS

SEQ ID NO: 3660 - protein, 368 aa, Pseudomonas putida KT2440
MNMSDTFLNPVTTQTWANGRHIVRCVKVIQETWDVRTFCFMADQPIMFFFKPGQFVTLELEIEGKPVMRSYTISSSPSVPYSFSITVKRVPGGLVSNFLHDTMHEGAELPVHGPVGLFNAIDFPAGKVLYLSGGVGITPVMSMARWFYDTNANVDMVFVHSARSPKDIIYHRELEQMASRIPNFSLHIICEKHGLGEPWAGYRGYLNQRLMELIAPDYMERVVFCCGPTPYMTAVKRMLEAVGFDMKNYHEESFGATPPEAKADAVEHAEQAADAPELDVSDLNLVEFIGSEKSIRIAPGETVHAAAAKVGLMIPKACGMGICGTCKVLKLGGEVEMEHNGGITEEDEAEGYILSCCSVPKGDVRIDY

SEQ ID NO: 3661 - protein, 349 aa, Streptococcus pyogenes MGAS8232
MKAATYLSTGNLQLIDKPKPVIIKPTDAIVQLVKTTICGTDLHILGGDVPACKEGTILGHEGIGIVKEIGDAVTNFKIGDKVIISCVTSCHTCYYCKRGLSSHCEDGGWILGHLINGTQAEYVHIPHADGSLYHAPDTIDDEALVMLSDILPTSYEIGVLPSHVKPGDNVCIVGAGPVGLAALLTAQFFSPANIIMVDLSQNRLEAAKTFGATHTICSGSSEEVKTIIDDITNGRGVDISMECVGYPATFDICQKIISVGGHIANVGVHGKPVDFNLDELWIKNITLNTGLVNANTTEMLLNVLKTGKIDATRLITHHFKLSEVEKAYETFKHAGANNALKVIIDNDIS

SEQ ID NO: 3662 - protein, 383 aa, Rickettsia sp. R300
DISRVSAEADCFTYDPGFMSTASCQSTITYIDGDKGILRHRGYDIKDLAEKSDFLEVAYLLIYGELPSGEQYNNFTKQVAHHSLVNERLHYLFQTFCSSSHPMAIMLAAVGSLSAFYPDLLNFKEADYELTAIRMIAKIPTIAAMSYKYSIGQPFIYPDNSLDFTENFLHMMFATPCTKYKVNPIIKNALNKIFILHADHEQNASTSTVRIAGSSGANPFACISTGIASLWGPAHGGANEVVINMLKEIGSSEYIPKYIAKAKDKNDPFRLMGFGHRIYKNYDPRAAVLKETCKEVLKELGQLDNNPLLRIAIELEAIALKDEYFIERKLYPNVDFYSGIIYKAMGIPSQMFTVLFAIARTVGWMAQWKEMHEDPEQKISRPR

SEQ ID NO: 3663 - protein, 289 aa, Bifidobacterium longum NCC2705
MTNGHINPANVPDIALKDGHSIPQVGLGVLRIDDEGVVPVVESALEAGYRHIDGAAGYNNEAGVGRALAASGYNKGAKRETLWVTTKLRDSQQGYDSALKAFDNSLKLLQLDYVDMYMIHWPTPFDWRSTDTWKAFVKLRDEGMARTLGVCNFMPADLKRLHEETGAWPAVNQIELHPTWQQREVVAFCKEHGIAVEAYSPMARGADLNAGDGTIEKIAAAHEVSPAQVILRWHIENGTIIIPKSVHADRQKENLNLFGFALTADEHAAIDALDGPTRAGHDPLTFTYA

SEQ ID NO: 3664 - protein, 466 aa, Thermosynechococcus elongatus BP-1
MSLWRPTAILLASDLPLIPPTRLRAMTLPTFVDLNLDPFWMPFTANRQFKQSPRLLVSAAGMYYRSIDGREILDGTAGLWCVNAGHCRPEIISAIAQQAATLDFAPTFQMGHPGPFQVADRLRRITPDPLNHVFFANSGSEAVDTALKIALAYHRLRGEGTRQRLIGRERGYHGVGFGGISVGGIAPNRKFFGSLLAGVDHLPHTHNLEHNAFSKGQPTWGAHLADELERLVALHDASTIAAVIVEPLAGSTGVLIPPQGYLERLRAICDRYGILLIFDEVITGFGRLGAPFASQYFGVTPDLITVAKGLTNAAVPMGAVIVRDEIYETFMQGPAGQIEFFHGYTYSGHPLACAAALATLEIYEKEALFERAASLAPYWQEAIHSLRGLPHVIDIRNLGLVAGIELAPREGQGGPRGYDALCRAFEAGLLIRVTGDIIALSPPLIVERSHIDQMVDILSRVLQELP

SEQ ID NO: 3665 - protein, 477 aa, Helianthus tuberosus
HEWVLGVGKPKNLPPGPTRLPIIGNLHLLGALPHQSLAKLAKIHGPIMSLQLGQITTLVISSATAAEEVLKKQDLAFSTRNVPDAVRAYNHERHSISFLHVCTEWRTLRRIVSSNIFSNSSLEAKQHLRSKKVEELIAYCRKAALSNENVHIGRAAFRTSLNLLSNTIFSKDLTDPYEDSASGKEFREVITNIMVDSAKTNLVDVFPVLKRIDPQGIKRGMARHFSKVLGIFDQLIEERMRTGRFEQGDVLDVCLKMMQDNPNEFNHTNIKALFLDLFVAGTDTTSITIEWAMTELLRKPHIMSKAKEELEKVIGKGSIVKEDDVLRLPYLSCIVKEVLRLHPPSPLLLPRKVVTQVELSGYTIPAGTLVFVNAWAIGRDPTVWDDSLEFKPQRFLESRLDVRGHDFDLIPFGAGRRICPGIPLATRMVPIMLGSLLNNFDWKIDTKVPYDVLDMTEKNGTTISKAKPLCVVPIPLN

SEQ ID NO: 3666 - protein, 487 aa, Burkholderia cepacia R18194
MTIKHWIGGREVESRETFTTLNPATGDVITDVASGGEAEVDAAVRAAKEAFPKWASTPAKERAKLMRKLGELIEKNVPNLAALETQDTGLPIAQTSKQLIPRASENFNFFAEVCVQMNGRTYPVDDQMLNYTLYQPVGVCALVSPWNVPFMTATWKTAPCLALGNTAVLKMSELSPLTADQLGRLALEAGIPPGVLNVVQGYGATAGDALVRHPDVRAVSFTGGTVTGKRIMERAGLKKYSMELGGKSPVLIFDDADFDRALDASLFTIFSINGERCTAGSRIFVQRTIYDRFVQEFARRANNLIVGDPSDPATNLGAMITRQHWEKVTGYIRIGEQEGARVVAGGADKPAGLPDHLRNGNFVRPTVLADVDNRMRVAQEEIFGPVACIIPFEDEDDGLRLANDTAYGLASYIWTQDVGKVHRLARGIEAGMVFVNSQNVRDLRQPFGGVKESGTGREGGEYSFEVFAEIKNVCISMGSHHIPRWGV

SEQ ID NO: 3667 - protein, 118 aa, Triticum aestivum
  misc_feature (7)..(7): Xaa can be any naturally occurring amino acid
  misc_feature (10)..(10): Xaa can be any naturally occurring amino acid
  misc_feature (16)..(16): Xaa can be any naturally occurring amino acid
  misc_feature (38)..(39): Xaa can be any naturally occurring amino acid
  misc_feature (44)..(44): Xaa can be any naturally occurring amino acid
  misc_feature (52)..(52): Xaa can be any naturally occurring amino acid
  misc_feature (62)..(62): Xaa can be any naturally occurring amino acid
  misc_feature (79)..(80): Xaa can be any naturally occurring amino acid
  misc_feature (83)..(83): Xaa can be any naturally occurring amino acid
  misc_feature (90)..(90): Xaa can be any naturally occurring amino acid
  misc_feature (98)..(98): Xaa can be any naturally occurring amino acid
  misc_feature (105)..(107): Xaa can be any naturally occurring amino acid
  misc_feature (110)..(110): Xaa can be any naturally occurring amino acid
  misc_feature (114)..(114): Xaa can be any naturally occurring amino acid
MAPAVTXSSXTTVAPXQGLKSTAGLPVSRRTSASLGSXXNGGRXRCMQVWPXEGIKKYETLXYLPPLATEALLKQVDYXXRSXWVPCLEXARWLRFRXHNSPPGXXXGRXWTMXKHGA

SEQ ID NO: 3668 - protein, 178 aa, Zea mays
MAEAPASPGGGGGSHESGSPRGGGGGGSVREQDRFLPIANISRIMKKAIPANGKIAKDAKETVQECVSEFISFITSEASDKCQREKRKTINGDDLLWAMATLGFEDYIEPLKVYLQKYREMEGDSKLTAKSSDGSIKKDALGHVGASSSAAEGMGQQGAYNQGMGYMQPQYHNGDISN

SEQ ID NO: 3669 - protein, 380 aa, Yarrowia lipolytica
MLPPPRARCRHKSFRHPHPSHRHRHTPTHSRITRPTRTATMEDSDVLMRDINDDGLKPMDAMGAGGEGTFTELTPTTRGQLDAWIARLTECQPLSEDDVNELCNMAKGVLQKEENVQPVHAPVTICGDVHGQFHDLMELFKIGGPCPDTNYLFMGDYVDRGYYSVETVSYLVAMKVRYPNRLTILRGNHESRQITQVYGFYDECLRKYGNANVWRAFTSLFDYFPVTALVENQIFCLHGGLSPMIESIDNIRELNRFQEVPHDGPMCDLLWSDPDDRGGWGMSPRGAGFTFGADISEQFNHTNNLSLISRAHQLVMEGFSWAHEQQVVTIFSAPNYCYRCGNQAAIMEVDENLSNSFLQYDPCPRPGEPSVSRRTPDYFL

SEQ ID NO: 3670 - protein, 455 aa, Aspergillus niger
  misc_feature (72)..(72): Xaa can be any naturally occurring amino acid
MDRRVTIASQVAIAAVAGYCIYKAFNARQQQKSLKDAVPKSSAAPLTPEQIKIIKATVPVLQEYGTKITTAXYMNMSTVHPELNAVFNTANQVKGHQARALAGALFAYASHIDDLGALGPAVELICNKHASLYIQADEYKIVGKYLLEAMKEVLGDACTDDILDAWGAAYWALADIMINREAALYKQSQGWTNWRQFRISKKVPESDEITSFYLEPVDGKPLPAFRPGQYISVSVQVPEEDPQARQYSLSDTSRSDYYRISVKKETGLDPRAPGAKRHPGYVSNVLHDMIKEGDLIDVSHPYGDFFLSTAEATHPIVLLSAGVGMTPMMSILNTITKKSNRKIHFIHGSRTTEARAFKSHVQKLEKEIPNMQVTYFLSRPGDSDQLGVDYHHAGRIDLQKLDGPSHLYLDNPSTEYYICGPDTFMTQMEEALKAYGVGDDRIKMELFGTGGVPHN

SEQ ID NO: 3671 - protein, 220 aa, Arabidopsis thaliana
MEPRINDLQVESRVHELLDFPVHTNQISSAIYEILLQCPNDHIENPKKKPYNCPHSGAKCDVTGDIQRLLLHLRNDHNVEMSDGRSFSHRYVHHDPKHLHHATWMLTLLDCCGRKFCLYFEAFHLRKTPMYMAFMQFMGDEEEAMSFSYSLQVGGNGRKLTWQGVPRSIRDSHKTVRDSQDGLIITRKLALFFSTDNNTTDKELKLKVSGRVWREQPVSI

SEQ ID NO: 3672 - protein, 669 aa, Zea mays
MSASQSSMSGAGEPGARAVVWFRRDLRVEDNPALAAAARAAGEVVPAYVWAPEEDGAYYPGRVSRWWLSQSLKHLDASLRRLGAARLVTRRSNDAVAALLDLVRCTGATHLLFDHLYDPLSLVRDYRVKEQLAAEGIDVQSFNADLLYEPWEVLDEDRRPFTMFAPFWNRCLCMPDPAAPLLPPKRINSGDLSRCPWDELVFEDESERGSNALLARAWSPGWQNADKALTAFLNGPLMDYSVNRKKADSASTSLLSPYLHFGELSVRKVFHQVRMKQLMWSNDGNHAGEESCTLFLRSIGLREYSRYLTFNHPCSHEKPLLSHLRFFPWVVNEVYFKVWRQGRTGYPLVDAGMRELWATGWVHDRIRVVVSSFFVKVLQLPWRWGMKYFWDTLLDADLESDALGWQYISGSLPDGRELDRIDNPQFEGYKFDPHGEYVRRWLPELARLPTEWIHHPWDAPESVLQAAGVELGSNYPRPIVELDAANSRLQDALSEMWELEAASRAAMENGMEEGLGDSTDEPPIDFPQELRMEVDRQPVQPAIHAPGVTGRRREDQMVPSMTSSFIRAETELTADFGHTSEDSRPEVPSNIHHLQARPEREETVDGGTGNAVRVHGNHHQQSLQNNMHRVLGIAPSISEASSSWTGRDGGVEPVWSPPAASGHSDSYAA

SEQ ID NO: 3673 - protein, 160 aa, Brassica napus
KHPNRKKESFISDSDYFKKSRESPNTFFRSQSFIFWESLNFPGKFITLSLDSPESNSSGSIKMKPPASLDHWRDYFRRADSDIFQIIDHAIMVAAADSPIKFKSRRDKIAELLFSCRVARCNGCDHLELSIPGEDTAAGGGGSKESNNPVWRGKEGGRPE

SEQ ID NO: 3674 - protein, 352 aa, Streptomyces tubercidicus
MTDTASELDPSTGWAEPTAEAPPEAALMQLLMGGFVTQSIGVAARFGVADALAQGPRHVDDIAAEVGAHAPSLYRLLRALGDFGVFAELAGRRFALTPAGELLRSDSTPSLRGLAEHFGSGFHRAAWSGLYDSVRTGEAAFERVHGAPQFDYYRSHPEEAATFDAAMTSVASAIYATLESYDFGRFSTVVDVGGGNGAYLSGILASYPALRGVLFDLPDVVERSAPVLAKAGVADRCEVAGGSFFDAVPPGADAYVLTAVIHDWDDEASVRILRNCRAAMPAHATLLLGEPVLPDGPEPSVGKLLDLETLIGTTGRQRTEAEFRELLDRAGLRLTRVLHSSGPDSLVEAVPR

SEQ ID NO: 3675 - protein, 355 aa, male-killing Rickettsia from Adalia bipunctata
GFMSTASCRSTITYIGGDKGILRYRGYDIKDLAEKSDFLEVAYLLIYGELPSSEQYNNFTKKVAVHSLVNERLHYLFQTFCSSSHPMAIMLAAVGSLSAFYPDLLNFKEADYELTAIRMIAKIPTIAAMSYKYSIGQPFIYPDNSLDFTENFLHMMFAAPCEKYKVNPIIKNALNKIFILHADHEQNASTSTVRIAGSSGANPFACVSTGIASLWGPAHGGANEAVINMLKEIGSSENIPKYIAKAKDKNDPFRLMGFGHRVYKNYDLRAAVLKETCKEVLKELGQLDGNPLLQIAIELEAIALKDEYFIERKLYPNVDFYSGIIYKAMGIPSQMFTVLFAIARTVGWMAQWKEM

SEQ ID NO: 3676 - protein, 340 aa, Streptomyces tubercidicus
MGSDIAQDGSLQLLEISESFIYARALHLAAELKLADLLADGPRPTAELAEASATRPAALYRLLRALAGRGVFTEVETGRFGLTPVGECLRSDHPRSVRATVAQAGRLTAKTFNHAEEVLRTGEGAFTTAFGQPVWDYLQEHPDEGADFDTAMHEHSRIERDAIVAAYDFSGTARLVDIGGGDGTLLATVLTAHPETAGVLFDLPHVVERHRIGDAGLTDRCEIVGGDVFGELPAGGDLYMMKSVLHGWTDREVVSILTGCRRAMKPDGTLLLIERVIPVGDTPHSSKAFDLAMLVMAGGQERTQDEYTELLTEAGFRVERVIGTDSSLSIVEAVPTGAAL

SEQ ID NO: 3677 - protein, 414 aa, Oryza sativa (japonica cultivar-group)
MGNCASAIDSFFFTKRANNENDDDDAAPGMSASKRTTSSTTTGKLSTLSNSTFIPSTISGVSTDDAYPDGQILESRNLRIFTFAELKNATKNFRTDTVLGEGGFGKVYKGWVDERTMNPSKSSTGVVVAVKKLNPESVQGTEQWESEVNFLGRISHPNLVKLLGYCKDNDELLLVYEFMAKGSLENHLFRRGAVYEPLPWSLRLKILIGAARGLAFLHSSERQIIYRDFKASNILLDSNFNAKLSDFGLAKHGPDGGLSHVTTRVMGTYGYAAPEYVATGHLYVKSDVYGFGVVLLEMLSGLRALDPSRPSGKLNLVDWAKPLLADRRKLSQLMDSRLEGQYHSRGALQAAQLTLKCLSGDPKSRPSMKEVVEALEKIKLIKSKSREPRNSSSLVRGQGNSPRSDSARTSSKGR

SEQ ID NO: 3678 - protein, 355 aa, Gibberella zeae
MSRANPPNAAGSRKISFNVSEQYDIQDVVGEGAYGVVCSAIHKPSGQKVAIKKITPFDHSMFCLRTLREMKLLRYFNHENIISILDIQKPRSYESFQEVYLIQELMETDMHRVIRTQDLSDDHCQYFIYQTLRALKAMHSANVLHRDLKPSNLLLNANCDLKVCDFGLARSAASQEDNSGFMTEYVATRWYRAPEIMLTFKEYTKAIDVWSVGCILAEMLSGKPLFPGKDYHHQLTLILDVLGTPTMEDYYGIKSRRAREYIRSLPFKKKVPFRTLFPKTSDLALDLLEKLLAFNPVKRITVEEALKHPYLEPYHDPEDEPTAPPIPEEFFDFDKHKDNLSKEQLKQLIYQVIMW

SEQ ID NO: 3679 - protein, 123 aa, Phytophthora infestans
MIQIQTKLKVNDNSGIKIGQCLKIYKKKVGKIGDTILISAKKLRLNQKKKIKIIKGDLFKALIIHTTYQKKSTIGNLIKFDKNCIIILNNQNKPLGTRIFGPITSEFRKQKNFKILSLASNIL

SEQ ID NO: 3680 - protein, 192 aa, Xylella fastidiosa Temecula1
MNMLNVLRFPVLALALAFVSSGVLADVGSLLDLDYRPLAGKETVNLQRLYGGKVLLVVNTASKCGFTPQYEGLEALHQKLSPLGFAVLGFPSNDFKGQEPGDEQQIQEFCTLTYGVKFPMFQKVHVKGNEVTPLYQRLTQTTGVAPGWNFHKYLIARDGHVVAQFDSRTRPDDPILLEAIKRELAKSVQVVH

SEQ ID NO: 3681 - protein, 363 aa, Bacillus sp. KSM-K16
MLYAKGLENVVVAETTISAIDGEQGTLLYRGYQAEELAKSADFEDVAYLLLNGQRPTEAEKDDFSTALKTMRPLPDDLKKLLAALPKDLSMMDALRTLISSYTGKEGWPPQQQEAMRLVAIVPTIVAAWANRSCGKDAIEPDPSLNHVANYLYMLTGEKPHAAHIRALSAYLILTAEHGMNASTFAARVIASTEADLRSAICGALGALKGRLHGGAPTGVLELFSDIQTADTSSETLLREKLERGERLMGFGHRVYKTTDPRANALREVLKSLNNQETFLSEAVAIEQLATQLLAEYKPGRQLHANVEYYAAAIMEALRLKPDWFTPTFCVSRVVGWCSHVIEQSQDNRIMRPQQQYCGPKPD

SEQ ID NO: 3682 - protein, 132 aa, Candida albicans SC5314
MIYLKSLLNVIDNSGAQVVECIKVLRHKPKSCAQIGDRITCVVKQARPLQQELTGQSSTNRVKRRDICQAVVVRTRAPLKRKDGSVVRFDDNACVLINKNGEPLGTRISSVVAKELKDLNYNKIVALAPKTF

SEQ ID NO: 3683 - protein, 281 aa, Leptospira interrogans serovar Lai str. 56601
MMELWLDEALELKNGRALKIKVKEFLHSRTTPFQKIDVFESVGFGRMFTLDGVVMMTEADEFAYHEMIVHVPMMSHPNPEKVLVIGGGDGGTVREVLKHPSVKEVHLCEIDKGVIDVCYEYFPEIANAMKDPRVKHAYEDGAKYVKDYQNYFDCIMVDSSDPVGPAEVLFKRPFYETMANCLKEGGICTTQGESFYYHGSIIRELFNFIPEIFKHCGYYYTVVPTYPSGIIGFTYCSKGPDPYTVVPDPQRVPQGLKYYSAEMHKAAFVLPQFAQKHIVRK

SEQ ID NO: 3684 - protein, 301 aa, Triticum aestivum
  misc_feature (161)..(161): Xaa can be any naturally occurring amino acid
  misc_feature (210)..(210): Xaa can be any naturally occurring amino acid
  misc_feature (245)..(245): Xaa can be any naturally occurring amino acid
  misc_feature (255)..(255): Xaa can be any naturally occurring amino acid
  misc_feature (258)..(258): Xaa can be any naturally occurring amino acid
  misc_feature (272)..(272): Xaa can be any naturally occurring amino acid
MKTLFILTILAMATTIATANMQVDPSGQVQWPQQQPFRQPQQPFYQQPQHTFPQPQQTFPHQPQQQFPQPQQPQQQFPQPQQPQQPFPQPQQAQLPFPQQPQQPFPQPQQPQQPFPQSQQPQQPFPQPQQPQQSFPQQQQPLIQPYLQQQMNPCKNYLLQXQCNPVSLVSSLVSMILPRSDCQVMQQQCCQQLAQIPRQLQCAAIHSVVXHSIVMQQEQQQGIQILRALFQLVQGQGIIQPQQPXAQYEVIRSLXYLXTLSNIVHVYVRPDXSTIKRTHFASISRRALSGTMEKMKELWLI

SEQ ID NO: 3685 - protein, 326 aa, Acinetobacter sp. ADP1
MLQSLDPQLASFFAMLENQGAPAFDIGTLNDPNINEMRNWYLNFGPHVAGQFIELQDVEDLWIQVDDGSLRLRLYKTQRQHSESCETLIYFHGGGWCIGSIETHDLLCRHLVNDLDVNVISVDYRLAPEYPYPQAAHDAIHATQWIFEHASALGIHPDHLYVAGDSAGGNLAAITALTFKEQTYRTSLAGQILIYPCIDLTVIHDNKYPSFEKQKLTPPLSAEQMSKMIQIYLKNEDFAYQWLASPLLAQSHQHLPSTLIITAEFDPLHDQGCVYFEKLKSSLVNTEYHEIKGVVHGFFEMYGVLNKTKETINIIRAWLKNNTKSK

SEQ ID NO: 3686 - protein, 501 aa, Candida albicans SC5314
MTIPLSVDVTLPDGKKFTQPTGLFINNEFIKSKSGKTLESINPGTSEINGEVYAAESEDIDYAVECASKAFKSWKKITGVERGKYLYKLADLVEQQRDLLGAMEAWDSGKTKSTNAVFDVDECIAVIRYAASWADKITGKVIQNDPKKFAYTIHEPWGVCAQIVPWNYPLLMSMWKIPIAVAAGNTVVLKTSEITPLSMLYFASLVKQVGFPPGVINIVSGFGATAGAALASHKKVAKIAFTGSTATGKIIQKLAAENLKAVTLECGGKSPLIIRSDADIDQAVKWGAIGIMSNQGQICTSTSRIYVHESIYDKFIEEFAAHVKSDYKQGDVFDDEAVVGPQVSKMQHDKILNYIDIGKKEGARCVLGGEKNIEGELSKGYFVKPTIFADVKPEMRIVNEEIFGPVVVVGKFSTDEEAITYANQTDYGLGAAIFTKDITAAHNMASDIEAGMVWINSSNDSDYHVPFGGVKMSGVGRELGEYGLNMYTQAKAVHVNLGTRL

SEQ ID NO: 3687 - protein, 158 aa, Zea mays
PEPHDVGRYIQAEVKSGGQISIPKTAGSIDPAAGLVEYVETLVRNPETDYNVVIIQVNGVAQAADSVHVLCIGRLRMRLAKEKTVVAKEFYSSSMQLCGVRGGGDAAPQSIFWQPRKGLSFVLAFETTRERNSALMLARRFAIDCNIILGGPGDKTSW

SEQ ID NO: 3688 - protein, 52 aa, Glycine max
  misc_feature (43)..(43): Xaa can be any naturally occurring amino acid
KFGLTTAQILRVVKNLDLAGMLDWLRLTHFHTGSQIPSTALLXDGVGTRCAD

SEQ ID NO: 3689 - protein, 206 aa, Triticum aestivum
  misc_feature (171)..(171): Xaa can be any naturally occurring amino acid
MATSFQGTTTKCNACDKTVYLVDKLTADNRVYHKACFRCHHCKGTLKLANYNSFEGVLYCRPHFDQLFKRTGSLDKSFEGTPKVVKPERNVGNENATKVSSAFAGTREKCFGCTKTVYPIERVTVNNTMYHKSCFKCCHGGCTISPSNYIAHEGKLFCKHHHTQLIKEKGXSASSRTTTTRRHRVPGQWMMKTRSISQSLRISIDE

SEQ ID NO: 3690 - protein, 278 aa, Leptospira interrogans serovar Copenhageni str. Fiocruz L1-130
MNNKENPLKQTIMLNNGISMPILGLGVWKTKSGKECKEAVLNALEAGYRHIDTARIYDNEVDVGQAIRESGIPRKEIFITTKLWNADQGSDKTRKALENSLDRLGIDFVDLYLIHFPVTSKRMDSWKELEKLYHDKLCKAIGVSNYTIIHLTELLKNSQITPAVNQVEFHPFLNQIHLLEYCKKHKIQLEAYSPLAHGQKIEDPTIAKIAQKYDKTPAQILIRWAIEQKIVVIPKSIKKERIIENSKVFDFAISEEDMKILNSLDEDFRTCWDPSEVV

SEQ ID NO: 3691 - protein, 161 aa, Xanthomonas campestris pv. campestris str. ATCC 33913
MTTLSTYQFTDLDGQPQSLAEYAGKVVLVVNVASKCGFTPQYAGLQALWQRYRDRGLVVIGFPCDQFGHQEPGDAADIRQFCSLDYAVDFPLAAKVEVNGSGAHPLWQWLKHEKRGVLGSEAIKWNFTKFLIGRDGSVLERYAPTTKPEALAADIERALGA

SEQ ID NO: 3692 - protein, 428 aa, Bacillus cereus ATCC 14579
MNYLFKNGRYMNEEGKIVATDLLVQDGKIAKVAENITADNAEVIDVNGKLIAPGLVDVHVHLREPGGEHKETIETGTLAAAKGGFTTICAMPNTRPVPDCREHMEDLQKRIEEKAHVNVLPYGAITVRQAGSEMTDFETLKELGAFAFTDDGVGVQDASMMLAAMKRAAKLDMAVVAHCEENTLINKGCVHEGKFSEKHGLNGIPSVCESVHIARDILLAEAADCHYHVCHVSTKGSVRVIRDAKRAGIKVTAEVTPHHLVLCEDDIPSADPNFKMNPPLRGKEDHAALIEGLLDGTIDMIATDHAPHTAEEKAQGIERAPFGITGFETAFPLLYTNLVKKGVITLEQLIQFLTEKPADTFGLEAGRLKEGRAADITIIDLEQEEEIDPTTFLSKGKNTPFAGWKCQGWPVMTIVGGKIAWQKESALV

SEQ ID NO: 3693 - protein, 476 aa, Naumovia castellii
MSAVLSTQTTRSILSNSGRRAATIALIHRLYTTASAEPTLKETFSQLIPSKIDEIKQFKKDHGKTVIGNVLLEQAYGGMRGIKGIVWEGSVLDPEEGIKFRGLTIPEIRDQLPKLGDEPLPEGIFWLLLTGEIPSRAQVEQLSADLASRAELPEHVVNLLNGLPKHLHPMAQFSIAVNALESESKFAKAYAQGVNKKEYWKYTFEDSLDLLGKLPTIAATIYRNVFKDGKLGAWDPQADYGKNLATLMGFKNKDFMELMRLYLTIHSDHEGGNVSAHTTHLVGSALSSPYLSLAAGLNGLAGPLHGRANQEVLEWLFKLREEVKGDYSKETIEKYLWDTLNSGRVVPGYGHAVLRKTDPRYTAQREFALKHFPDYELFKLVSSIYEVAPKVLTKQGKTKNPWPNVDSHSGVLLQYYGLTEASFYTVLFGVARAFGVLPQLIIDRAVGAPIERPKSFSTEKYKELVAKIESGETKVV

SEQ ID NO: 3694 - protein, 506 aa, Arabidopsis thaliana
MERTLLQWRLLPLLALIVALFSFFFASPRSLQGNNKCSLLPHDHYWISSKRIVTPNGLISGSVEVKGGIIVSVVKEVDWHKSQRSRVKVIDYGEAVLMPGLIDVHVHLDDPGRSEWEGFPSGTKAAAAGGITTLVDMPLNSFPSTVSPETLKLKIEAAKNRIHVDVGFWGGLVPDNALNSSALESLLDAGVLGLKSFMCPSGINDFPMTNITHIKEGLSVLAKYKRPLLVHAEIERDLEIEDGSENDPRSYLTYLKTRPTSWEEGAIRNLLSVTENTRIGGSAEGAHLHIVHLSDASSSLDLIKEAKGKGDSVTVETCPHYLAFSAEEIPEGDTRFKCSPPIRDAANREKLWEALMEGDIDMLSSDHSPTKPELKLMSDGNFLKAWGGISSLQFVLPITWSYGKKYGVTLEQVTSWWSDRPSKLAGLHSKGAVTVGKHADLVVWEPEAEFDVDEDHPIHFKHPSISAYLGRRLSGKVVSTFVRGNLVFGEGKHASDACGSLQLATT

SEQ ID NO: 3695 - protein, 480 aa, Thermosynechococcus elongatus BP-1
MSLRLFWHRRDLRLNDNLGLAAAYTRTPKVVGLFCFDPAILSASDIAAVRVAYLVGCLQALQEAYRRLGGSFLIFRGDPRQILPQVAKGLGAVAVHWHEDVEPYGRERDRAVAAALKEKGIAVETAWDQLLHPPEAIQTKQGQPYTVYSPFWRNWSSLAKPEPVSAPRHLEPLTEIEQATAGTLGAICLPTAKDLGFHWSGDLILAPGEAAAQAQLETFIDQHIQDYGEQRNYPAQPGTSLLSPALKFGVIGIRRVWTATQAAMAAARSEEAQRSIRTWQQELAWREFYQHALYWFPHLAERPHREGFATFPWLNNEAHFAAWCEGRTGYPIVDAAMRQLNETGWMHNRCRMIVASFLTKDLIINPQWGERYFMQKLIDGDLAANNGGWQWSASSGMDPKPLRIFNPASQAQKFDPEAEYIRRWLPEVRSLDTIDLVTGNISPLERHRCGYPLPIVDHRQQQQRFKQLYQEHFRSPIPQE

SEQ ID NO: 3696 - protein, 473 aa, Naumovia castellii
MLRFSRQLHNSTRLCSQATGLKESLKAIIPKRKEEFLKLKKECMGTKVDDITIGSILSGMRGNRSMFWEGSMVDAQRGITFHGKTIEQCQRELPGDESGNFYPESMLWLLMTGEVPTKQQTKQLMEELAVRGSEANFPIATSRVIDSLPNDMHPMTQLAIGLASMNKVSRFASNYEKGLLNKNNYWEDTFEDTLNLISFLPILTGKIYSKITNDGKPLGKFSPTEDWSSNICSLMGMSNSTYSVNKNNFNASESKDFLSLMRLYTGIHADHEGGNVSAHTTHLVGSALSDPYLSYSSGIMGLAGPLHGLAAQEVVRFLVEMNGQISSPNQPDEIERYLWDLLNSKRVIPGYGHATLRKPDPRFTAMLKFTKDRKSEFENDKNVVLMQNLSSIAPKVLKAHGKCQNPYPNVDSASGILFHHYGLKESLFFTVIFGCSRSMGPLTQLVWDRIYGLPIERPKSVNMETLKLLSNSQ

SEQ ID NO: 3697 - protein, 177 aa, Triticum aestivum
MAGVSRSMVAPLLVLNLVMYIVVIGLASWNLNHFINGTTNYAGVAGNGATFYFLLFAILAGVVGAASKLAGVHHVRTWRGDSLATSASSALVAWAITALAFGLACKEIHVGGHRGWRLRVLEAFIIILAFTQLLYVMALHAGLFGNQFGDGYGGAEHQYGDHHHHKGMGTAAATARV

SEQ ID NO: 3698 - protein, 271 aa, Triticum aestivum
EIREARRIKMLHQPSKVMDMQFELQGLRTLISEKTQLCNQLKKELAMIKRLEQDSSKLFELEGSDTLGSQFRIVPRVDGAPDISSGPPRWYRVISGGHRELVSGATRLTYAPEPFDVGQLLQAEIILKADKVTVQTDGPINHASGLEHYVESLMKRADIEFNVVVTQMNGNDYASKSVHVFHIGKLRVKLRKGRSTKARESYSTTMKLCGSRGGGNAAACAVFWQTRKGLSYTLAFETDRDRNAAIMLARKFASSCNVVLAGPGDQVHGGG

SEQ ID NO: 3699 - protein, 426 aa, Helicobacter pylori 26695
MSVTLVNNENNERYEFETIESTRGPKAVDFSKLFETTGFFSYDPGYSSTAGCQSKISYVNGKKGELYYRGHRIEDLVAKYKYVDVCKLLLTGELPKNQDESLEFELELRHRSFVHESLLNMFSAFPSNAHPMAKLSSGVSILSTLYSTHQNMHTEEDYQTMARRIVAKIPTLAAICYRNEVGAPIIYPDIARSYVENILFMLRGYPYSRLKHTTQGEVEITPLEVEAFDKILTLHADHSQNASSTTVRNVASTGVHPYAAISAGISALWGHLHGGANEKVLLQLEEIGDVKNVDKYIARVKDKNDNFKLMGFGHRVYKSYDPRAKILKGLKDELHQKGVKMDERLSEIAAKVEEIALKDEYFIERNLYPNVDFYSGTILRALKIPVRFFTPVFVIGRTVGWCAQLLEHVKSPQARITRPRQVYVGD

SEQ ID NO: 3700 - protein, 127 aa, Brassica napus
MESVKNSDLKSSVNGGVVDVYGEDSATIEHSITPWSLSVSSGYSLLRDPRYNKGLAFSEKERDTHYLRGLLPPAVVDQNLQEKRLINNIRQYQYPLQKYMALTELQERNERLFYKLLIDHVEELLPI

SEQ ID NO: 3701 - protein, 425 aa, Helicobacter pylori 26695
MAYNPKILQKPKEGEEITIKDNKLHVPNHPIIPFIEGDGIGSDITPAMIKVVDSAVQKAYKGEKKIAWYEVFVGEKCYQKFKDYKELSPEEQWLLPDTIEAINHYKVSIKGPLTTPIGEGFRSLNVALRQKMDLYVCLRPVRWYGSPSPVKEPQKVDMVIFRENSEDIYAGIEWQEGSAEAKKLIHFLQNELKVKKIRFPESSGIGVKPISKEGTERLVRKAIEYAIDNDKPSVTFVHKGNIMKYTEGAFMKWGYALAQKEFNAQVIDKGPWCSLKNPKNGKEIIIKDMIADAFLQQILLRPSEYSVIATMNLNGDYISDALAAMVGGIGIAPGANLNDTVGMFEATHGTAPKYAGLDKVNPGSIILSAEMMLRHMGWVEAADLIVSAMEKAIKSKKVTYDFARLMDGAKEVKCSEFASVMIENM

SEQ ID NO: 3702 - protein, 135 aa, Brassica napus
MDARMFGLETPRVAALHHLLDVPDGDKAGGGATRTYVRDARAMAATPADVKELAGAYAFVVDMPGLSTGDIRVQVEDERVLVISGERRREEREDAKYLRMERRMGKFMRKFVLPDDADVAKAPPLGGDRVLTVTV

SEQ ID NO: 3703 - protein, 136 aa, Oryza sativa (japonica cultivar-group)
MRKMRDKGEGSSAARTEGRKLVVRAREGEAELDEVEHIDVGLERVEWGIGSGGEEPVEIREVWTDNLEVELALIRDVVDEFPFVAMDTEFPGIVCYPRRRSALCAAVDRKHEAWEICLTPVQVQSLPSGVLACQLI

SEQ ID NO: 3704 - protein, 116 aa, Gibberella fujikuroi
MAAPNDAEHEMTFDSADAGASLTYPMQCSALRKSGFVVIKNRPCKIVDMSTSKTVKHGHAKVHLVATDIFTGKKYEDLSPSTHNMDVPNVSRREYQLLDISGGGFLSLMTDDGDTK

SEQ ID NO: 3705 - protein, 414 aa, Pyrococcus furiosus
MEVVLEGKFLLDKRTIEGYIGIEDGKISKISLREIKGDHKIKVDKGKVILPGLIDVHVHLRDFEESYKESIESGTKAAVHGGITVVFDMPNTKPPIMDEKTLKLREHLFKRKSYADYALGFLLAGNKPVEADFYKIFMGASTGGIYSKNFEEDYIRALDIVSIHAEDYEIIQKYPERPPIAEIRAIERVIEAVKTHKKPAHICHISTAKGLKLLLDSRLEMLSFEVTPHHLFLTRSDYDKNPLLKVYPPLRSEEDRIALWKNIDKVPVIASDHAPHTLEDKEAGAAGLPGLETEVPLLLDAVNKGLITLQDIVEKMHINPIKIFGIENKGFEKGKDADFTIVDMKREWTIRADNLYTKAGWTPYEGWRVKGKVIMTIIRGEVVMEEDEIIGKPRGERIVKKGKHRRNLGSSEEH

SEQ ID NO: 3706 - protein, 389 aa, Sulfolobus tokodaii
MWIKGKAWFNNSIDTICIQIDRFIKNIKKDCKPDIEFKENQLILPASIDMHVHVRGAQLSYKETVATATSEAAYGGIGLIIDMPNTLPPVNTYERVIERIREFENYSRTDFGIYSGVTKEIEKIDTLPIAGYKIYPEDLDRTETKVLLEKSKKLKVLHPEIPLALKVPRKLRNIWMEIAALHYVQGNVHVTHITNYETVKIAKELGFSTDITPHHLLVNGERDCITKVNPPIRDYLTRLGLWKALFEVDTVVSDHAPHSKEEKNLNYDLCPPGIAAVSFTTPFIYSLVFKDLLNIERAVNLLSKNPAKILNIPYGEIRIGYVANFTIISKNDWKYRTKFSKVTETPLDNFPLEAKVEFTIVQGKIAFDGKNVLPIRGVNAFDKSSRYPV

SEQ ID NO: 3707 - protein, 468 aa, Mesorhizobium loti
MRLSNLGTEQLREKDRSFVFHPSTHLAKHSRGETPNRIMAGAEGVYIWDTEGRKSLDGFGGLYCVNMGYGCTEIAEAIARQAHEMPFAHIYASQGTEPVALLAEAVVEYFGQNMRRVFFGLSGSDANETNIKLVWYYNNILGRPEKKKIISRHRGYHGSGLVTGSLTGLAFFHNFFDLPLDLVRHTTTPHHYRQAHDGESEQAFSKRCADELEALIVAEGPETVAAFIGEPVLGTGGIVPPPKGYWTAIQSVLDKYDILLIADEVVCGFGRTGEKFGSHLYGMRPDFVTIAKGLSSAYLPISGSIIGDRVWSILEQGTEKHGALGHGWTYSGHTLCAAAALANIRLLKERNILEHVRDVGPYWHARMNAELAGHPIVGEVRGVGILSAVELMRDPKQRIPFESDLQVGVRAAAALFENGVIGRAMPHGDILGFAPPLIITRKEIDIIVNATAKSVETTYRALKAEGAI

SEQ ID NO: 3708 - protein, 447 aa, Haloarcula marismortui ATCC 43049
MTDIHIKDAQVVTASGVQHGEITMSDGTIDAAGPASAVPTPSNPDTVIDADGMVALPGATDVHTHMHDDELFPDGIDFASQTASAVAGGVTTVIELPTQTPVTTPEAIQRKAETCSTLAHIDFGLVAGNIQDPDIDVSGIMSAGVADFKTFTADPYLASDASIAALMRHVGDAGGTVRVHCETQGLLDDARSTIVSDDPEVYMGSRPLEAELDAISRAGYFAEYADCPLHVVHISSGSGAREAGRFKSRANVPVTLETCPQYLAFSKEDVADKGPFLKVNPSLKSDAERERLWDAVQDGTIDLIGTDHFPTYRETRDVGWDDIWEPYAGLPGVETMVEFLVSEGVHKGRLSWPRLCELVCAAPARSAGIYPRKGSLQQGTDADVVLIRDEEYEVTADDHTFVGGWTPYEGQHWSARVDTVIAGGEIVAKDHRVRSTAGRGQFLNRPL

SEQ ID NO: 3709 - protein, 477 aa, Mesorhizobium loti
MSEARSYELFINGKWRAGGSRVTLPVINPATEKVVASVASATVSDLDEALASAERSRKAWCSRPAKERGEILVAAARVLATQIEPAARDLSAEQGKTIAEATGEYARAVETLEWNGTHAEELSATIPLGPNRMIVPEPLGVVAAFTPWNYPAVLITRKLAPALAAGCPVILKGAEETPSVAVHIVESLRQAGVPDGVVNLVFGVPVHISRHLLSSPIVKVLTFTGSTAVGKQLAMLAANNLQRCILELGGHSPVIVCEDADLAKAIPAISEYKFECAGQSCNAPSRILVARTLYEEFLSRMTEAARKIRIGLPDDPATEMGPMANARRIEAMQRLTKDAVDRGAHIETGGTRLDGAGFYWPPTILTGVPKDARVLHEEPFGPILTVAPFDTLDEAIGEANDTEYGLAAYFFTDAADTQRKLTNSLSAGAVSVNYLKGVSADAPYGGVKQSGYGYEGGEQGVRSFQILKMVNGLGSFG

SEQ ID NO: 3710 - protein, 451 aa, Pyrococcus abyssi GE5
MWEEINMIKIYTLGGYEEVGKNMTAVEYNGEVVIVDMGIRLDRVLIHEDVEFQKMSSKDLRKLGAIPDDRPIRNKKVVAIALSHGHLDHIGAVGKLAPHYPDVPIYGTPYTIRLAKSEIKGEEYFEVTNPLYETNYGEIVQVSENLAIEFVQITHSIPQSSIVVIHTPEGAVVYACDYKFDNNHPYGERPDYKRLKELGKEGVKVLIAESTRVAEETKTPSEAVAKMLLEDFFLYEGMEADGLIATTFASHIARLQELIEIANKMGRQAIFIGRSLAKYTGIAKQLGLIKMKGSRVLRSPNAVSKVLKEVSQARENYLLIVTGHQGEPGAILTRMANGELYDIGPRDTVVFSAGVIPNPLNVAQRYALETKLRMKGVRMIKNLHVSGHASKEDHRYLIRMLNPEYIVPAHGEFRMLTHYAELAEEEGYMIGKEVFISRNGHVVEIPGSLEG

SEQ ID NO: 3711 - protein, 780 aa, Zea mays
MAASLSLHVTAGCGSKKKKRSMAAKGLREVGRRRAAEVGRRCLSGGSAGPPAPAAKRKEGGKAVNLFTAVNQALHIALDTDPRAYVFGEDVGFGGVFRCTTGLADRFGKSRVFNTPLCEQGIAGFAIGLAAMWLYRLAVEEVPEEDYMLPLSEAEVSHEAPVTGGFGAEIAASIAERCFQRLEAPVARVCGLDTPFPLVYEPFYMPTKNKGVSLVLGYADALAAPLPHAVTVRADASDEGSARSPFYAAARTSWVLDVTYPAVGCGRHATATEAFDRVRGAFLCPTSLWETGAPSLDTLAESAATYAVMMSSQQQQQQQTAGPSRQAVYGAPVLPEIPTRFVYRPQVATDVMSGSSSLWKTGAPPHDTLAESAAMYAATLSSHQQQQQMARPDRQAMYGAPVLPEIPTRFVYRPQTATDVMSSFSSLWETGAPPPAAYAAMLSSQQQQMPTTRPGWQAAPRGAPVPPPMNMRFVPNTMPAADAMDVGSSAPMAPSDSSSERTPSPLQRVEVRQVWAHNFDSEAKLIESLLPKFRYVAVDTEFPGTVYRPAGPAYKLEPAERYRLLRCNVDALHPVQLGLTLFDAGCVLPGGHGGATRYVWQFNFSDFDVRRHRHVVESVAALRSRGVDLDRTRQYGVAAAAVFGPRLRKWTRAGLGRAGVVTSHGGYDLAYLVKMMFGTGFRMSGSAAEFNAVVKSVLHRRRVFDIGEMARLCPHEHLHRGLDSIAGQLNAARFAADAARQAGYDSLRTCYTFMKLREIYFDDDGKLAGVDGILAEVTAF

SEQ ID NO: 3712 - protein, 347 aa, Pisum sativum
MDGREAMAFSGGPGSYYLHRGGVEAAGSGSGGFQVPPGFRALPNNGIIAQPNVRAQGGNGDTSSMFSLEPQSHADFNHDISVGASSGAPSSEPVKKKRGRPRKYGPDGSVSLKLTPMSAPANSTQDSGTPSEKRGRGRPRGSGRKQQLAALGDWMTSSAGLAFSPHVITIAAGEDIAAKLLLLSQQRPRALCILSGTGIASKVTLRQPASTNAGVTYEGKFQILSLSGSYLVSEDGGPTNRTGGISVSLSSRDGHVIGGSVAMLIAGSPIQLVVCSFVYGGGSKVKTKQGMITNGESSEPHNDNLGSPASAPPDQNYISSPTGMWPGSQPSDMKSAPAHTGIDLTRG

SEQ ID NO: 3713 - protein, 202 aa, Arabidopsis thaliana
MAELENPSVMSKLIAFLSSLLERVAESNDLTRRVATQSQRVSVFHGLSRPTITIQSYLERIFKYANCSPSCFVVAYVYLDRFTHRQPSLPINSFNVHRLLITSVMVAAKFLDDLYYNNAYYAKVGGISTKEMNFLELDFLFGLGFELNVTPNTFNAYFSYLQKEMTLLQPLSLVVVPSSRSLITFNDDEASHQKQQQQQLAV

SEQ ID NO: 3714 - protein, 294 aa, Arabidopsis thaliana
MALTNNLWAFVFGILGNIISFVVFLAPVPTFVRICKKKSTEGFQSLPYVSALFSAMLWIYYAMQKDGTAFLLITINAFGCVIETIYIVLFVSYANKKTRISTLKVLGLLNFLGFAAIVLVCZLLTKGSTREKVLGGICVGFSVSVFAAPLSIMRVVVRTRSVEFMPFSLSLFLTISAVTWLFYGLAIKDFYVALPNVLGAFLGAVQMILYIIFKYYKTPVAQKTDKSKDVSDHSIDIAKLTTVIPGAVLDSAVHQPPALHNVPETKIQLTEVKSQNMTDPKDQINKDVQKQSQV

SEQ ID NO: 3715 - protein, 489 aa, Bordetella bronchiseptica RB50
MRIEHLIDGKAVAGKQYFETINPATQETLAEVAAGGEAEVHAAVAAAKAAFPKWAGLPAAERARLVRKLGDLIAAHVPEISRTETNDCGQTIAQTGKQLVPRAADNFYYFAEMCTRVDGHTYPTPTHLNYTLYHPVGVCALISPWNVPFMTATWKVAPCLAFGNTAVLKMSELSPLTAARLGELALEAGIPPGVLNLVHGYGRDAGEPLVAHPDVRAVSFTGSTATGNRIVQAAGLKKFSMELGGKSPFVIFDDADLDRALDAAIFMIFSNNGQRCTAGSRILVQQSIYADFTQKFVERARRIRVGDPLDEGTIVGPLISPAHLAKVRGYIELGSKEGATMLCGGLDRPSYAPELDARVRDGNFVWPTVFADVDNRMKIAQDEIFGPVACLIPFRDEAHAIELANDIEYGLSSYVWTESVGRAHRVAAAIEAGMCFVNSQNVRDLRQPFGGTKASGTGREGGTWSYEVFCEPKNVAVSLGNHHIPHWGA

SEQ ID NO: 3716 - protein, 448 aa, Corynebacterium diphtheriae NCTC 13129
MSTQNYPATGRLAEPEYGTLLVKNVKIYGEGEPVNVLITDGVITDTHAGDVKADREVDGQGGVLLPGLVDIHVHLREPGREDTETIATGSAAAAKGGFTAVFTMANTMPVMDQPIIAESVWHKGQDIGLCDVHPVGSITKGLEGKEITEFGMMAHSQAKVRMFSDDGKCVDNPLIMRRAVEYARGTDVLLAQHCEDPRLTDGAVAHEGAMAAKLGLGGWPRVAEESIVARDAILARDYGGRMHICHASTQGTVELVKWAKEHEIPLTAEVTPHHLLLTDERLATYDGVNRVNPPLRENSDILALRDALLNGTIDCVATDHAPHGSEDKCCEFEHAKPGMLGLETSLAVVAAVFVETGLADWRFVAKVMSERPAEIVKLPGHGRPIAVGEPANLTIVDPGAKWTASGEKMASKATNTPYEGMEFNARVTTTILRGRLTCVDGEPTQARA

SEQ ID NO: 3717 - protein, 212 aa, Oryza sativa (japonica cultivar-group)
MHQGAARQAGQSGGGGGGGGGADRLSALPDAALFRIVSHLTARQAVRTSVLSKRWRHVWASVPRVDIRHPCACDERADQERFGDFVTTMLLNRRPFAPIKALRLWWSHDGDAETWIAHAVRRGAEEIDFSARHHQDDPKPELEYTSFISPKIKILKLTTFGMDIKAITHICSSPHNGKEGRGSNSSAKRKAQGEVARLAVKQRRARNSRSPE

SEQ ID NO: 3718 - protein, 165 aa, Glycine max
  misc_feature (50)..(50): Xaa can be any naturally occurring amino acid
ASSMISSPAVTTVNRAGAGMAAPFTGLKSMAGFPTWKTNNDLASVASNGXRLQCMLVWPPVGKMIFETLCYLPDLDDAQLAKEVESLLKKGWIPCMEFELEHSFEYREHSCVPGYYNGRYCTMCKLPMVGCTMLPTCMNDILEAKTVVPRGYIRLSGLGNVRQVQ

SEQ ID NO: 3719 - protein, 113 aa, Rickettsia moreli
ANEAVINMLKEIGSSEYIPKYIAKAKDKNDPFRLMGFGHRVYKNYDPRAVVLKETCKEVLKELGQLDNNPLLQIAIELEAIALKDEYFIERKLYPNVDFYSGIIYKAMGIPSQ

SEQ ID NO: 3720 - protein, 175 aa, Triticum aestivum
MAPTVMASSATSVAPFQGLKSTAGLPVSRRSNGASLGSVSNGGRIRCMQVWPIEGIKKFESLSYLPPLSTEALLKQVDYLIRSKWVPCLEFSKVGFIFREHNASPGYYDGRYWTMWKLPMFGCTDATQVINEVEEVKKEYPDAYVRIIGFDNMRQVQCVSFIAFKPPGCEESGKA

SEQ ID NO: 3721 - protein, 317 aa, Pseudomonas aeruginosa PAO1
MIEVIVGAIRLEAQDIHSFELFRADGAALPSFEPGAHIDLHLPNGLVRQYSLCGPAERPRHYRIAVLRCRDSRGGSATLHAELRVGQRLHIGEPRNLFPLSPEPGPHLLFAGGIGITPLLAMAERLARDGADFQLHYCAHSGERAAFVDYLGRCAFADRVHCHFDHGESSRRADLRALLATSPRDAQLYLCGPAGFMQWIEESARELGWEASRLHREHFAAAPRDASADGTFEVQLASNGALIRVAAGQTVLAALREAGVDLPASCEQGICGTCLTRVLDGEPEHRDLYLSEEEQAANDCFTPCCSRSRSPRLVLDL

SEQ ID NO: 3722 - protein, 276 aa, Streptomyces coelicolor A3(2)
MISIPAYTLNDGTSLPALGLGTWPMKDEEAERAVRAALETGYRLIDTATNYRNETGVGRGVASAGLPREEIVVTTKLPGRHHGYEETLASFEESRARLGLEYVDLYLIHWPLPRVDKYVDSWKAMVKLREDGLVRSVGVSNFTAEHIERLERETGVLPSVNQIELHPLLPQDELRAYHERKGIRTESWSPLGRGSDLLDDPAVAAVAAAHGVTPAQAVLRWHTQLGAVPIPKSADPARQRANLDVFGFELDAEQLRAVADRVHRRIGGDPEVHEEF

SEQ ID NO: 3723 - protein, 483 aa, Oryza sativa
MTTPHGLLQYSSGAFSDQVPADDSAEEHGVKDHAMLAPFTAAWQTAISPPLVIERSEGCYVYDVNGTKYLDALAGLLSTALGGSEPRLVKAATEQLNKLPFYHSFWNHTTRPSLDLAKELISMFTAREMGKVFFTNSGSEANDSQVKIVWYYNNALGRPKKKNIISRTQSYHGTTFISASLSGLPTLHQDFDLPGRFVLHTDCPHYWRFHLPGETEEEFATRLADNLENLILKQGPETIAAFIAEPVIGAGGVILPPKTYFEKIQAVVKKYDNLFIVDEVITGFERLGTMFGSDLYNIKPDLVSLAKALSSAYAPIGAILVSPEISDVIHSHSNKLGTFAHGFTYSGHPVSCAVALEALKIYRERDIPGHVTHVAQRFQEGIKAFAAGSPIVGETRGVGLLIATEFTDNKSPYELFPFEWGVGEIFGQECKKRGMMVKVLGNLIAMSPPLIITREEIDKLVSIYGEALKATEERVAELKSKKN

SEQ ID NO: 3724 - protein, 281 aa, Brassica napus
RPTRPDFDAPATGTPSVVVREVWADNLESEFELISGIVEDYPFISMDTEFPGVIYKADLRRLNPGYLYKLLKSNVDALSLIQVGLTLSDADGNLPDLGGGGGGSRFIWELNFRDFDVDRDPRARESLELLRRHGIDFERNRREGVESGRFAELMVSSGLICNESVSWVTFHSAYDFGYLVKILTRRELPGSLGEFLRLLRAFFGERVYDVKHMMRFCERRLFGGLDRVARSLEVNREVGKCHQAGSDSLLTWQAFRRMRDLYFVEDGPEKHAGVLYGLEVF

SEQ ID NO: 3725 - protein, 198 aa, Zea mays
  misc_feature (171)..(171): Xaa can be any naturally occurring amino acid
MATSFQGTTTKCTACDKTVYLVDKLTADNRVYHKACFRCHHCKGTLKLANYNSFEGVLYCRPHFDQLFKRTGSLDKSFQGTPKVVKPERNVGNENATKVSSAFAGTREKCVGCSKTVYPIERVTVNNTMYHKSCFKCCHGGCTISPSNYIAHEGKLYCKHHHVQLIKEKGXTSASSRMTTRRHRRLGRWRTTKKKSIN

SEQ ID NO: 3726 - protein, 246 aa, Corynebacterium efficiens YS-314
MVSAIRTGYRLIDTAYNYENEGAVGVAIRESGVPREELIVTSKLPGRFHEFELARPRIEESLYRLGLDHIDLLLIHWPNPNRDLYVQAWQALIDARDRGLVRHIGVSNFLPEHIDRLEAETGELPVVNQIELHPYFPQVEQVEWHNARGIVTEAWSPLSNGRGLVDEPLLTDIGRRYGVGGGEVALAWHHARGIVPIPRSTNPERQKSNLEAVHLTLSDEEVSAITALGRPDGRIKDQDPAVYEEF

SEQ ID NO: 3727 - protein, 285 aa, Triticum aestivum
  misc_feature (30)..(30): Xaa can be any naturally occurring amino acid
  misc_feature (55)..(55): Xaa can be any naturally occurring amino acid
  misc_feature (160)..(160): Xaa can be any naturally occurring amino acid
WIPRAAGIRHEVDPSGQVQWPQQLPCRHLXQQQPLPPPQTFPQHTTIPQQPQQTXFPQQPSFSQQQPPFPQPQQPPQHFPQQQPVLPQQPPFPQPQQPQLPFPQQPQQPFPQPQQPQQPFPQPQQQFPQPQQPQQSFPQQQQPLIQPSLQQQMNPCKNFXLQQCNPVSLVSSLVSLILPRSDCQVMQQQCCQQLAQIPQHLQCAAIHSVAHSIIMQQQHQGIQILRPLFQIVQGQSIIQQQPAQLEVIRSLVLKTLPTMCNVYVRPDCSNIRTPFASTVAGIGGQ

SEQ ID NO: 3728 - protein, 352 aa, Streptomyces tubercidicus
MTDTASELDPSTGWAGPTAEAPPEAALMQLLMGGFVTQSIGVAARFGVADALAGGPRHVDDIAAEVGAHAPSLYRLLRALGDFGVFAELADRHFALTPAGELLRTDSTPSLRGLAAHFGSGFHRAAWSGLYDSVRTGAAAFERVHGAPQFDYYRSHPEEAAVFDAAMTSVASAIYATLESYDFGRFSTVVDVGGGNGAYLSGILASNPALRGVLFDLPDVVERSAPVLAKAGVADRCEVAGGSFFDEVPRGADAYVLTAVIHDWDDEASVRILRNCRAAMPAHATLLLGEPVLPDGPEPSVGKLLDLETLIGTTGRQRTEAEFRELLDRAGLRLTRVIHSAGPDSLVEAVPR

SEQ ID NO: 3729 - protein, 492 aa, Arabidopsis thaliana
MPEFSSSVKLKYVKLGYQYLVNHFLSFLLIPIMAIVAVELLRMGPEEILNVWNSLQFDLVQVLCSSFFVIFISTVYFMSKPRTIYLVDYSCYKPPVTCRVPFATFMEHSRLILKDKPKSVEFQMRILERSGLGEETCLPPAIHYIPPTPTMDAARSEAQMVIFEAMDDLFKKTGLKPKDVDILIVNCSLFSPTPSLSAMVINKYKLRSNIKSFNLSGMGCSAGLISVDLARDLLQVHPNSNAIIVSTEIITPNYYQGNERAMLLPNCLFRMGAAAIHMSNRRSDRWRAKYKLSHLVRTHRGADDKSFYCVYEQEDKEGHVGINLSKDLMAIAGEALKANITTIGPLVLPASEQLLFLTSLIGRKIFNPKWKPYIPDFKLAFEHFCIHAGGRAVIDELQKNLQLSGEHVEASRMTLHRFGNTSSSSLWYELSYIESKGRMRRGDRVWQIAFGSGFKCNSAVWKCNRTIKTPKDGPWSDCIDRYPVFIPEVVKL

SEQ ID NO: 3730 - protein, 440 aa, Zea mays
MSTTKVKRRVGKYELGRTIGEGTFAKVRFARDTVTGEAVAIKILDKEKVLKHKMVEQIKREISTMKLIKHPNVVRIYEVMGSKTKIYIVLEFATGGELFDTIVNHGRMREDEARRYFQQLINAVDYCHSRGVYHRDLKPENLLLDSYGNLKVSDFGLSALSQQIKDDGLLHTTCGTPNYVAPEVLEDQGYDGAMADLWSCGVILFVLLAGYLPFEDSNLMTLYKKISNAEFTFPPWTSFPAKRLLTRILDPNPMTRITIPEILEDEWFKKGYKRPEFDEQYDTTLDDVDAVFNDSEEHHVTEKKEEEPVALNAFELISMSAGLNLGNLFDSEQEFKRETRFTSKCPPKEIVRKIEEAAKPLGFDVQKKNYKLRLEKVKAGRKGNLNVATEILQVAPSLHMVEVRKAKGDTLEFHKFYKNLSKTLKDVVWKSDDLQTQHAS

SEQ ID NO: 3731 - protein, 87 aa, Zea mays
AGSVWMSSEMKALNEDCVRFEIFPPGHLYSSAAGGFRRWYTPHWFQEQVPRTPYQPLVLREAFEKVTIKMAVTDTDLWPWAMGPCAA

SEQ ID NO: 3732 - protein, 185 aa, Guillardia theta
MSEKSNLAPFIKKLYQLVNDPMTNDYICWEKNETCFIVNKPTELSVYILPRYFKHNNFSSFVRQLNQYGFHKLEPNEWVFGHPYFKGGDKLKLSSIKRKKQWSSQKNVSVDFYNNEIFKKLIYELDTLKKYKQVLTKDILDVCRRQERFLIKQQSIETKIKKIEEELNNLKYLVFGYFGKILKSN

SEQ ID NO: 3733 - protein, 250 aa, Brassica napus
MNSVSTFSELLGSENESPVGGDYCPMLAASCPKKPAGRKKFRETRHPIYRGVRLRKSGKWVCEVREPNKKSRIWLGTFKTAEIAARAHDVAALALRGRGACLNFADSAWRLRIPETTCAKDIQKAAAEAALAFEAEKSDTTTNDHGMNMASQAEVNDTTDHGLDMEETMVEAVFTEEQRDGFYMAEETTVEGVVPEEQMSKGFYMDEEWMFGMPTLLADMAAGMLLPPPSVQWGHNDDFEGDVDMNLWNY

SEQ ID NO: 3734 - protein, 1367 aa, Magnaporthe grisea 70-15
MSTETSPRAVRFSQGEDERLMRPFVLGADSGNSHSSGELSSPDLHHMVETPDEMGSLTRYVDVTSHGGSHVSLATNGSARSHRNSGGESTAAGYTNGGATPRPAQRPMGPARTPSNTYQPPRKPTAQQTPSYLHTSTSDLRNGSRMRNGYGQQEKEYVRSLRAQHYGGDYFVSYSNGSQLGASSGDGYPDSDSEGETPSSEAPYDDAYDQNVIMIDSNEDTAPSEEELKDPASRERLEWHGMLEAVLTGDVVRQEKKRLIAGTGEDLGKLQRGAELWMGIRARVCGRHLSVQRRMVEETRATLARMIDEVIDFSVKGESTAGKSAAEQIAEVLEKIDKIEGQYPTRNALLAVHTSANTERFQEACDAVYTWTNINYLINTELTILRNWVGNHELDFTRAREKSPNGHHGLSDESSFMDRLMKEEGLKSLHDHEEDEGDRKSRRNGMLHRVGKTIEKAKEALVEQHQVFKKRQMSLDMDELLMLLGFPARLIEEIIKVRLAYTKRMKESAQQNPMMQDNMIAQFQTLLKLAIRIKQEAAKLSEPQPGWELPPCIDESFDQVVLDALKYYFKMLNWKLGGNKNTFKEAELLFQEWGFANEIASHLYRGDIEVAEQFSSLTYKTLNRLAITFEKELQRRPKETPSEMSKRYKQVLESVRVRQRMLQRFSRMLNDNYENASDFSINFRPDKMQEFFLRLQETGHFQVYTGSLEHEGLLVIASPSLANRESEIQSLIGTTAYDEIVQDATNPYILIMRPEGQLGWWGPKIQLSVREEPVELKMGHLRLIAGGSQTRLSNAKQNFLATIEMHLDLLIEQRSNLPKVNARLMEIRKVQYKLSNTFMDSVEIIRNNTKGLGLQDLIQTCFIFATEFGQRSLLYLDSNRRQMNNIKLTKLALDWVGFVCDDCQSSDRKAFKWAVLALEFAMVMTRGRHILALGEAEFVKLRLKVAGCMSLLISHFDIMGARSTVAAQAEKLKLEAMVGQMRRMDHNMMDDQEAIRYVRNHRLSGLNLIDEARKEIALERSALGRVLEVSNEVDRSLAYLSSTATNFTMRWQQGHFVGGGTFGNVYAAMNLDTGHLMAVKEIRLQDPKLIPSITGAIKDEMRVLESVDHPNVVSYYGIEVHRDRVYIFMEFCSGGSLASLLEHGRIEDESVIMVYALQLLEGLAYLHEIKIAHRDIKPENILLDHNGIIKYVDFGAAKVIARQGRTLANQDLMSAATKPNKSMTGTPMYMSPEVIKGENPGHFGAVDVWSLGCVILEMATGRRPWANLDNEWAIMYNIAQGNPPQLPTPDQLSPEGIDFLKCCFARDSTKRATALELLHHKWIMTIRDRIVPQQPPTPSDTSSSSAQNTPNPASSSKGGGASSDGYY

SEQ ID NO: 3735 - protein, 1029 aa, Aspergillus nidulans FGSC A4
MTGSECQPRHSASSGTGRDIHTLSWDGDHDPANPFNWSISRKWAVTYLAALISFLTMMNGTIITVAHFEIAELFNIDETAFPHTYWPVTTWAVGGAFSALFLLPLAEDFGTRPVFLVTYFAFVCFLIPQAVAQNFATLVATRFFAGACVAILANTAAGVIGNVWDTEWSRSIPVSLYIFGYMAGSSMGPVIGAAVLQSLSWRWIGYMQLIWFGALFPIYYFFFYESRGDIILAQRDRKMGKNGKDILPGHPAHSKLNLQNLAVSSTRPVILFCTEPVLFVSTLWSAFTVGTIFLFTQSVEQVFIGTYDWTISKTGYVQAAVVIGEGIGFFFSFLSRELYFASASRNTEVPNSLIPEARLYMAVLGGLFGISGGMFTYAWTSYPFIPWIAPAISLAMVGAGSVLVVTGVSDYVVDAYSQYAGSAIGAVATGENIFSAFLPLATMSMYNNLGFQWASTLLAFVSLVLALVPTLMFVWGRELDNYALPTIATYAYSPANHYCTTQQAFQCHCSNFPSLHSCPTTTRHRPTNHLLKMPSLANTLKDPTLFIESSYIDGKWVTSSSSRTFNVYDPATEEFIGTCPESNIDDINSAIRAAATAFPKWRALSGRQRGRILRRWFDLIVENKEDIGKIITAENGKAKGDAEGEALFSAGFFEWFSEEAARIYGDVVPHSNPSSRVQVLKEPVGVCGLITPWNFPMAMGARKVAAALAAGCTVVLKSDGLTPYSSNVLALLAERAGVPGGVFNVVTALENTPALGLALCESDNVKKISFTGSTRVGKLLMKQSSHTLKKLSLELGGNAPFIVFDDADLETAVTSAVACKFKVTGQTCVCANRFYVQEGIYEAFSKRFVEEVKKCQVGHGLDPGVTHGPLTNGIAKTQEHIQDALNKGATVLLGGSRLPSLGKNFHELTILGDVDDSMKVASEETFGPLAALSKFKAEDEVVRRANGVEVGLASYLITSDLGKAHRVSEKLEFGMVAINTGVISDSAAPFGGVKHSGMGREGSKYGIDDYLNIKTIVTGGIHTAYSAHL

SEQ ID NO: 3736 - protein, 331 aa, Arabidopsis thaliana
MFTCINCTKMADRGEEDEEDEARGSTTPNTKEAVKSLTTQIKDMASKFSGSHKQSKPTPGSSSSNLRKFPDFDTASESVPYPYPGGSTSSTPAWDLPRSSYHQSGRPDSRFTSMYGGERESISAQSCDVVLEDDEPKEWMAQVEPGVHITFVSLPSGGNDLKRIRFSREVFDKWQAQRWWGENYDRIVELYNVQRFNRQALQTPGRSEDQSQRDSTYTRIDSARESRDWTQRDNNFRSPGGSVPHHFYGPPMDAARITTSSRDEPPSMSNASEMQGEWVEEDEPGVYITIRQLPDGTRELRRVRFSRERFGEVHAKTWWDQNRDRIQTQYL

SEQ ID NO: 3737 - protein, 320 aa, Bordetella bronchiseptica RB50
MAYDPGIQAYVERARRALGDMAGLKALSLAQRRVRADRYAALVREPYPESLEVSDTYIVQPGHEIPVRVYRPRAEGPLPTIVYLHGGSFVAGSPQGHDFITTSLACNTGAQVLSVHYRRAPENPYPAPTDDAYAALCWAQREAELLGVDPERIAVAGDSAGGNLAAACALMARDRGGPALRMQALIYPTLDADLDTPSYLNNTADAFLTREAMAFAVNAFLPQGLDTRDGYALPLRAADHAGLPPAYLLLADHDPLLDDGTRYAARLREAGNAVQLRIGAGMIHGFLRARRLSATADAEFHLLCAALRQALGLPEPAARW

SEQ ID NO: 3738 - protein, 549 aa, Triticum aestivum
QKGKINSNVLREAKAVPNQTSKQPLPSLLLLCSSSLQSTYFAPTDPMDRADPARGRLAVLSSHLLAAGAEPAAALERSPASAAAPGTRAGVLAVVDSRTGKRYEVKVSEDGTVRATDFKKITAGKDDKGLKTYDPGYLNTAPVRSSICYIDGDEGILRYRGYPIEEVAESSSFVEVAYLLMYGNLPSQSQLAAWEFAISQHSAVPQGLLDIIQSMPHDAHPMGVLASAMSTLSVFHPDANPALRGQDLYKSKQVRDKQIVRVLGKAPAIAAAAYLRLAGRPAVLPSNNLSYSENFLYMLDSLGDKEYKPNPRLARVLDILFILHAEHEMNCSTAAVRHLASSGVDVFTALSGAVGALYGPLHGGANEAVLKMLNEIGAVENIPDFIEGVKNRKRKMSGFGHRVYKNYDPRAKVIRKLAEEVFSIVGRDPLIEVAVALEKAALSDEYFIKRKLYPNVDFYSGLIYRAMGFPTEFFPVLFAIPRMAGWLAHWKESLDDPDNKIMRPQQVYTGVWLRHYTPVRERVASNQGEELGQIATSNATRRRRAGSSL

SEQ ID NO: 3739 - protein, 432 aa, Burkholderia cepacia R1808
MPVAVAGDGIEIIDSTGKRYIDACGGAAVSCLGHSNQRVIDAIKRQVQQLPYAHTSFFTTDVAEELADRLVEAAPAGLEHVYFVSGGSEAIEAALKLARQYFVEKGEPQRRHFIARRQSYHGNTLGALAIGGNAWRREPFLPLLIEAHHVSPCYAYRDQAAGETDEAYAQRLADELEQKIVALGAENVAAFVAETVVGATAGAVPPVRTYLKKIRAVCDKYGVLLILDEIMSGMGRTGYLFACDEDDVAPDLLTIAKGLGAGYQPIGATLVSDRIYRTIVDGSGFFQHGHTYLGHATACAAALEVQRVIADEKLLDSVKARGEQLRASLREHYAAHPHVGDVRGRGLFVGVELVRDRDSKAPFDPKLKLHAAVKREAMQRGLMVYPMGGTIDGVHGDHILVAPPFICTAQQIDTIVERLSGAIGAALASAGA

SEQ ID NO: 3740 - protein, 261 aa, Maackia amurensis
MASSKERETFVYVAKLAEQAERYEEMVDSMKNVATLDVELTVEERNLLSVGYKNVIGARRASWRILSSIEQKEEAKGNEVNAKRIKEYRQKVESELTNICNDVMRVIDEHLIPSASAGESTVFYYKMKGDYYRYLAEFKTGNEKKEAGDQSMKAYESATAAAEAELPPTHPIRLGLALNFSVFYYEILNSPERACHLAKQAFDEAISELDTLNEESYKDSTLIMQLLRDNLTLWTSDIPEDGEDAQKANGTAKLGGGEDAE

SEQ ID NO: 3741 - protein, 475 aa, Thermus thermophilus HB27
MEVKEAPTEALIGGAWRRLERRFPVVSPATGERVAEVADCGEEEAREALEEAVLAFPAWSRATAYERAQVLRRWYERILEHQEPLARLMALEMGKPLKEGRAEVAYAAGFVEWYAEEAKRVYGETVPSQFPHKRILVRYEPVGPVYGITPWNFPAAMVTRKVAPALAAGCTFVLKPAEESPLTALYLAKLFLEAGGPPGVFQVLPTSRPAEVSRPFLEDERVRKLTFTGSTEVGVRLYGEAAKTLKRVSLELGGGAPVLVFADADLDRAVEETLRAKFRNAGESCVAANRIFVQAEVAEAFAEAYARRVQALKVGDPLSEETDVGPLVNEAALRKVRTHVEDALAKGARLVAGGEAKGLFFAPTVLLDVKPESLLFREETFGPVAPLTVFREEEEAVRWANGFPVGLAAYVFTRDLSRAFRVAEALEYGIVGVNDGVPSTPQAPFGGVKRSGLGREGGKWGLLEYLEVKYVSLGL

SEQ ID NO: 3742 - protein, 250 aa, Zea mays
MAKNYPTVSAEYSEAVEKARRKLRALIAEKSCAPLMLRLAWHSAGTFDVSSRTGGPFGTMKCPAELAHGANAGLDIAVRLLEPIKEEFPTLSYADFYQLAGVVAVEVTGGPEIPFHPGREDKPQPPPEGRLPDATKGSDHLRQVFGKQMGLSDQDIVALSGGHTLGRCHKERSGFEGAWTTNPLVFDNSYFKELLSGDKEGLLQLPSDKALLSDPVFRPLVEKYAADEKAFFDDYKEAHLKLSELGYADA

SEQ ID NO: 3743 - protein, 155 aa, Arabidopsis thaliana
MSCSATDLAVLLGPNATAAANYICGQLGDVNNKFIDTAFAIDNTYLLFSAYLVFSMQLGFAMLCAGSVRAKNTMNIMLTNVLDAAAGGLFYYLFGYAFAFGSPSNGFIGKHYFGLKDIPTASADTPTFSTNGPLQSLRLESQVARSLNGHSSWLT

SEQ ID NO: 3744 - protein, 439 aa, Arabidopsis thaliana
MDRISHLADEILSKILSFLGTKDVMQTMLLSKRFKSQWLLVPKLEFDDSTHLPETWGYQEPDYGNFRRFVDRSLLSREGRVLQTLFLKLGRQCSYDDIAIWVGIAVKRGLMELKLKYTDSYYPKRSSLPRSLYTCETLVVLKLKKGYLDVPDLVCLRSLKTLSLRDMNYSNASCLLRLLASCPVLEELFIQQGYYDSCALSFKIILPCLKKLSYLPKRKKKYSGIDRSEVSGGISGLVLDAPSLKYLHIVDRSGLFSVSEIININAVVKATLEVNASRPEKLLYSLVSVEHIRLCLSATEVVYPVGLGSSFHKLKRLEVCTCKSEWLDLFIHLLEDSPSLQDIKINQCHPVTNPRPQWNQPGSVPRCLSSSLETLEWVEYGGTHEEKELSTYLFKTAVCFKKASFTAKWSGGDANKKLQMLQELALSPRVSPTCELVFN

SEQ ID NO: 3745 - protein, 506 aa, Pseudomonas aeruginosa PAO1
MRYAHPGSEGAIVSFKARYGNYIGGEFVPPVKGQYFTNTSPVNGQPIAEFPRSTAEDIDKALDAAHAAADAWGRTSVQERSNILLKIADRIEQNLELLAVTETWDNGKAVRETLNADIPLAADHFRYFAGCIRAQEGSAAEINDSTVAYHIHEPLGVVGQIIPWNFPLLMAAWKLAPALAAGNCVVLKPAEQTPLGICVLLELIGDLLPPGVLNVVQGFGREAGEALATSKRIAKIAFTGSTPVGSHILKCAAENIIPSTVELGGKSPNIYFEDIMQAEPAFIEKAAEGLVLAFFNQGEVCTCPSRALVQESIYPAFMEEVLKKVRAIKRGDPLDTETMVGAQASQQQYEKILSYLDIAQQEGAELLAGGSVEKLEGNLASGYYIQPTLLKGHNGMRVFQEEIFGPVVGVTTFKDEAEALAIANDTEYGLGAGLWTRDINRAYRMGRGIKAGRVWTNCYHLYPAHAAFGGYKKSGVGRETHKMMLDHYQQTKNLLVSYDINPLGFF

SEQ ID NO: 3746 - protein, 253 aa, Anabaena variabilis ATCC 29413
MTSEPILSPETAIAALSDEDNQIRYYAAWWLGKHNVQAGCTALCAALFDERYRIPLGGYPLRRQAARALGMLKNPQAVPALIAALKCDEDLRLREAVICSLAAIGDKRAVIPLLNLLQSTQAQPYEALIEALATLQVWSARPQIEPFLKHYSERVQCAAARYLYLLTQESEYIERIVKNLNHDNMYLRWAAVFDLGAVAHQQAVQAILAAQVPNSLKLLNLKRILEAMLNNNSVNQEKASVLFGAIDDLLIQL

SEQ ID NO: 3747 - protein, 422 aa, Arabidopsis thaliana
MDKLSQLPEALLVRILSLLSAKDVVSTMVLSKRWQFLWMLVPKLIYDDSYQAIEYGSFSRFVDRSFTLHDAQVLDTLHFKLGKTSCGTGDIRVWIKTAEKSCLRELIIEIDKSNSDNSSVVLPRSLYTCCRMLVTLKLNNAVLVDATSSFSFPSLKTLSLVSMKFPGDELIKMLLSNCPVLEDLVVKRCPYDNVTTFTVRVSSLKCLVLHETELASINADCGFVIDTPSLECLDIEDGRGGFCVIENNMTKVVKANVCNSYVHTQQLMGSISSVKRLYVCIPSSKDAYPVGSVFHCLVRLTICTCETEWLNLLMCVLRDSPKLRELKLVKNHVYRSHQPRPCWNEPSAVPECLLTSLETLEWVKYEGTEEEKEVAAFILRSGSCLKKVTISSKSTDINKKFEMLKELSLLFRRSPTCQIAFD

SEQ ID NO: 3748 - protein, 482 aa, Geobacillus stearothermophilus
MIYVNGKWSKGEGKKRPVINPANEEIIIEINEASQQQAVEAIQAARHAFQYTDWPFNPAKRIAALRQLADLLEQNAETFASIETLNTGKPIRESRLDVSDSIQCLRYYADFVEQRAIEEIKRTDGTTSKIIEEPIGVCALIVPWNFPLLLGIWKLAPALAAGNTVVFKPSELTPLSFIELTKLIDSIGLPPGVFNLVPGGGSPVGETLVTHPDVEKISFTGGTKTGRWIYEQGARRLKRVSLELGGKSPLLIFDDADLASTIEWALFASFFNQGEVCVAASRILVQRRVYDSFLDQLTQRLASLRIGDPFAEHTEMGPLISSSHLEKVETYIQIGLQEGGVLLQGGKRMKELGYYLTPAVFAHVRQDMRIVQEEIFGPVITVQPFEHDEEAIKLANDTIYGLAAGLFSRDLERAEQIAGKLRAGTIWINSYHTPYVDAPWGGLKQSGIGRELGPQGFAAFTETKHVNISQHGKPLGWYSSHS

SEQ ID NO: 3749 - protein, 343 aa, Vibrio vulnificus YJ016
MKIKALSKLKPEEGIWMTEVDKPVLGHNDLLIKIKKTAICGTDVHIYNWDEWSQKTIPVPMVVGHEYVGEVVGIGQEVRGFEIGDRVSGEGHITCGHCRNCRGGRTHLCRNTIGVGVNRTGCFSEYLVIPAFNAFKIPANISDDLASIFDPFGNAVHTALSFDLVGEDVLITGAGPIGIMAAAVAKHVGARHVVITDVNEYRLDLARKMGVTRAVNVAEQKLDDVMVELGMTEGFDVGLEMSGNPSAFNSMLKTMNHGGRIALLGIPPSDMGIDWNQVIFKGLVIKGIYGREMFETWYKMASLIQSGLDLTPIITHHFKVDDFQQGFDIMRSGMSGKVILDWE

SEQ ID NO: 3750 - protein, 431 aa, Mycobacterium leprae TN
MADTDDTVTLKYPGGEIDLQIVRATEGNDGIAIVPVLAKTGYTTFDVGYGNTASTKSSITYIDGDAGILRYRGYPIEQLAEKSTFIEVCYLLIYGELPATDQLAEFTHRIQRHTMLHEDLKRFYDGFPRNAHPMPVLSSVVNALSAYYQDALDPMDNGQVELSTIRLLAKLPTIAAYAYKKSVGQPFLYPDNAFSLVENFLRMTFGLPAEPYEPDPEVVRALDMLFILHADHEQNCSTSTVRLVGSSRANLFTSISGGINALWGPLHGGANQAVLEMLEGIRESGDDVGGFVQKVKNCQAGVKLMGFGHRVYKNYDPRARIVKEQADKILVKLGGDDDLLNIAKGLEEAALTDDYFIERKLYPNVDFYTGLIYRALGFPTRMFTVLFALGRLPGWIAHWREMHDEGDSKIGRPRQIYTGYTERDYTAIETR

SEQ ID NO: 3751 - protein, 264 aa, Triticum aestivum
  misc_feature (170)..(170): Xaa can be any naturally occurring amino acid
  misc_feature (187)..(187): Xaa can be any naturally occurring amino acid
  misc_feature (189)..(190): Xaa can be any naturally occurring amino acid
  misc_feature (223)..(223): Xaa can be any naturally occurring amino acid
  misc_feature (240)..(240): Xaa can be any naturally occurring amino acid
MSASPSMSGGAGERTRTVVWFRRDLRVEDNPALAAAARTAGEVVPAYVWAPEEDGPYYPGRVSRWWLSQSLKHLDASLRRLGATRLVTRRSTDTVAALLELVRSTGATHLFFNHLYDPLSLVRDHRVKQVLGAEGITVQSFNSDLLYEPWEVPRRHGWPFTMFTPFWNTXLCMVDPPAPHAAPKRIXSXXMSRCCSSDELIFEDESERGSNALLAPALSRGGXNATKVLRALFKGPFIDXPGPGRRAEGKKPKGLPPYLHLGEA

SEQ ID NO: 3752 - protein, 510 aa, Nicotiana tabacum
MALLDLQPSTSLLFCLVPLLFLFFIKFNKTITNTLLSSNSSKIPRSYPLIGSYFSILANHDQRIKWISDIILSTPNLTFTLIRPLNFHTIFTANPSNVQHMLKTNFQVYQKGHNSNTTLKDFLSNGIFNVDGDIWKYQRQVASHEFNTRSLRKFVETVVDTELSERLIPILATAAANKTVLDFQDILQRFAFDNICKIAFGYDPGYLLPSLPEAEFAVAFEDAVRLSTERFILPFPLIWKMKRALNIGSEKKLRFAVEQVREFAKEIVREKQRELKDKSSLDSADLLSRFLSTGHSDENFVTDIVISFILAGRDTTSAALTWFFWLISKHPEVESQILKEIGEKSESLLLYDEVKNMIYTHASLCESMRFYPPVPMDTKEATKDDILPDGTFVKKGNRVTYHPYAMGRVEKVWGKDWAEFRPERWLDKDEVTGNWTFVSKDAYTYPVFQAGPRVCLGKEMAFLQMKRVVAGVLRRFKVVPVVEQGAEPVFISYLTAKMKEVFPVTIEERI

SEQ ID NO: 3753 - protein, 512 aa, Vicia sativa
MELETLVAWLLFSATLLWLLLLATKTQSKSLKSPSSTTNSTIPKSYPIFGSIFSIAANFHRRVQWISDILQTTPSSTFILHRAFGSRQVFTANPLVVQHILKTNFPCYPKGLTLNRSLGDFLGNGIFNADGETWKLQRQISSHEFNAKSLRKFVETVVDVELSGRLLPILSEASKTEKILPDFQDILQRFTFDNICIIAFGFDPEYLLPSLPETAFAKAFDYGTRISSLRFNAAVPLIWKVKKILNIGTEQRLKEAVAEVRGLASRIVREKKQELLEKSALESLDILSRFLSSGHSDESFVIDIVISFILAGRDTTSAALTWFFWLLSKHSHVETEILKEVTAKSESVSYDEVKDMVYTHAALCESMRLYPPVPVDTKEVAYDDVLPDGTFVKKGWRVAYHIYAMGRSEKIWGSDWAEFRPERWLRRDEDGMWSFVGMDPYAYPVFQAGPRVCLGKEMAFLQMKRVAAGVLREFRVVPAMENGIEPEYTAHLTALMKGGFPVRIEKRSHTDE

SEQ ID NO: 3754 - protein, 78 aa, Zea mays
MVTELAWTHRHQSSRGEGEREMKEGTANCIDILIAIILPPLGVFLKFGCKVEFWLCLLLTFLAYLPGIIYAIYVITKD

SEQ ID NO: 3755 - protein, 91 aa, Brassica napus
MGSTPAEVPCDVVSDNRSGLGGGISDVYGEDLATLDQLVTPWVSSVASGYSLMRDPRYNKGLAFTDKERDAHYLTGLLPPVVLSQEVQERK

SEQ ID NO: 3756 - protein, 141 aa, Zea mays
  misc_feature (120)..(120): Xaa can be any naturally occurring amino acid
  misc_feature (131)..(131): Xaa can be any naturally occurring amino acid
MASSMLSSAAVVTSPAQATMVAPFTGLKSSSAFPVTRKANNDITSIVSNGGRVSCMKVWPPVGKKKFETLSYLPDLTEVELGKEVDYLLRNKWIPCVEFELEHGFVYREHGTTPGYYDGXRYGTMWKLPLXFGGTDSASRV

SEQ ID NO: 3757 - protein, 159 aa, Zea mays
PVACAETGVTLISPFVGRILDWYKKSTGKEYTAETDPGVKSVQRIFNYYKQHGYNTIVMGASFRNTGEITELAGCDYLTIAPKLLEELKNSDAKVPKKLDAAPADQAKEEKVSFVDNEAAFRWELFNDPMAFDKLHEGIRGFAKDGDACKEMLREKLRA

SEQ ID NO: 3758 - protein, 122 aa, Calycanthus floridus var. glaucus
MIQPQTHLNVADNSGARELMCIRIIGASNRRYAHIGDVIVAVIKEAVPNMPLERSEVIRAVIVRTCKELKRDNGMIIRYDDNAAVVIDQEGNPKGTRVFGAIARELRKLNFTKIVSLAPEVL

SEQ ID NO: 3759 - protein, 484 aa, Xanthomonas campestris pv. campestris str. ATCC 33913
MLRGLTCRCRVCMSYAIVWFRRDLRLEDNPALRAALDAGHDPIPLYIDAPHEEGQWAPGAASRAWRHRSLAALDASLRARGSALLIRQGDSAQVLDAVIAQTEAVAVYWNRKYEPATQPRDAQIKRSLRERGLEVQSCNAALLFEPWTLATQQGRPYKVFTPFWRNALTQLRLPDAMPAPRSLPPLPASLDGVHVDALNLLPTPAWDQGFWEHWQPGEAGAHEMLEIFVDGALSGYRENRDRPDRVGTSQLSPHLHFGEIAPWRIASTLEAQRSARNGADIDGYIRQLGWRDFAYHLLHHFPDTTTQNLNPRFAGFDWATVDPVTLDAWQRGRTGIPIVDAGLRQLWHTGWMHNRVRMIVASLLCKHLRVHWLEGARWFWDTLVDADLANNTMGWQWVAGTGADAAPYFRVFNPVTQAEKFDPQATYITRWIPELAALPVKERFAPWLHPLSLARLAPTYPRAPIIGLAEGRDAALAAYAGTRG

SEQ ID NO: 3760 - protein, 498 aa, Burkholderia cepacia R18194
MLSLVSHLDHLNVRPGRLFIDGQWLDWPDARFDQLNPCTNEVMTSFADAGAQGVELAVAAARKAFDEGPWPRMRAQDRKRLLQPIVERLYAAEEEIARLQTLDNGIPYAFSRHSRVSAKSAADVFDHFLGWIDKINGDTLPIFSGASNMQYMTFRDPVGVVAAVLPYNGPVLTFAMKVAPALACGCTVIVKSSELTNLAVARLAQIIADSDLPPGVFNFVTGGVETGSALTSHAGVDKVTFTGSPAVGEKIMIASAPTMKRLSLELGGKSAALVFPDTRSVQTTAHALMGLCSTFLSGQVCSTPSRAVVHRSIMDEFLHHAQEQLQKVRFGDPFDAATTSAPMISRRHQARVLDYVESGRQQGATLLAGGRAPGGEFRNGNWVEPALFANVSNDMTIAQEEIFGPVLSVIPFDTEEEAIRIANDSAYGLAGCVYTTDVSRAFRVARAVKSGAIGVNGFASIPNAPFGGIKRSGTGREGGWSTIEAFTELKTVNFNLDA

SEQ ID NO: 3761 - protein, 316 aa, Methylobacillus flagellatus KT
MANLFDQLKEFTTIVADTGDVEAIKSVKPYDATTNPSLLLKASTIPQYAPLIDEAIAYAKSQSGDKAQQIEDAADKLAVLIGLEILKHIPGKISTEVDARLSFDTEAMVQKGRKLIKLYEDAGIAKDRVLIKLASTWEGIKAGEILEKEGINCNLTLLFSFAQARACAEAGVFLISPFVGRILDWYKAKTGETYTAETDPGVQSVRKIYAYYKEHGYKTVVMGASFRNTGEIIALAGCDRLTVSPNLLEELKATEGKLERVLVDNGVTKQRPPLLTEKEFRFDLNEDAMATEKLAEGIRGFVVDQNKLEKALAEKL

SEQ ID NO: 3762 - protein, 383 aa, Pyrobaculum aerophilum str. IM2
MLKECIKIEGRAFLGGKVTRVKLGSGECKTLQLSNKYLILPGMVDIHVHFRDWGLSHKETLRGGAAAALAGGVVAVGDMPNTKPHIRTADLYKKRLEEGSALPIIYKVHMGIPQDLEELRAARPPTIKIYPEDVEAFGWGHIEKAAEACASLGCRLVLHCEDPAYFKEGERPPIAELACVERTRQMAFKTGVKIHLTHITLSQTAEAARGWATVDATPHHLLLDVENCKDSGLCHVNPRLRTPEMRKRLLAAFASGLVDIYATDHAPHTLEEKRSGAPPPGICSLDVALSLLLTLWKRGVVTLSDVVRLYSHRPARFFDLQIDVKKGYFTVVRLEEFTVRGEEFAGTCKHTPFEGFKAFGRVFATSVGGRIYFKDGDVYMINI

SEQ ID NO: 3763 - protein, 344 aa, Bacillus sp. KSM-K16
MKAVFVDDAEKINIKEIDIPVVKDNDVLIKVAVAGICGSDIHTYKGLHPFRKPPVVIGHEVAGEVVSVGQAVKRVQVGDRVTVEPQIGTGESEGVMTGQANLSDKRLAPGMGDWLGTMAEYFVSPEAQVIKLPDAVSYEKGVLVEPLAVGVHAARKGGIQPGDRVAILGAGPIGLLTLMAVKAKGASHVVVTDVLDYSLDVAKQMGATAAINIKGKPDWIEEAKSKVGRSFDKVLITAGVPGIINDSLNLLKKGGRAVTVAMFHGQQDFDVEQLQQNEKEIVGCMTYNRPDTEEALDIIAKGALPVEKVISHQLSYEQADKGFEMVDKKQDNSVKVIVSFEQEG

SEQ ID NO: 3764 - protein, 296 aa, Pseudomonas putida
MAGKSPLINLNNGVKMPALGLGVFAASAEETASAIASAISSGYRLIDTARSYNNEAQVGEGIRNSGVDRAEMFVTTKLFNCDYGYERALRAFDESLGRLGLDYVDLYLLHWPTKDWNATIQSWKAAEKILGDGRARAIGVCNFLEDQLDELIAASDVVPAVNQIELHPYFAQKPLLAKNRALGIVTEAWSPIGGAINDGDGDNHGGRKHPLTDPVITTIAEAHGRSAAQVILRWHFQNDVVAIPKSVNPERIAKNIDVFDFALSDAEMAQLDELDTGVRIGPDPRDVDTSSFAEFV

SEQ ID NO: 3765 - protein, 447 aa, Magnaporthe grisea 70-15
MSAVRDKQQPDAAPAAAAAGNKPAPSITPEQVAVVKSTAPVLKEHGVTITTVFYKNMIDAHPELHNVFSTTSQATGAQPRALASAVLAYATHIDDLARLSHAVSRIAHKHVSLHITPDQYDIVGKYLIEAIGQVLGDAATPEIVAAWIAAYGVLADVFIGVEGKMYQEHSDWLGFRKFRVLRKEAEAESITSFYLAPSDGKTPLPRFLPGQYVSVQLFVPELGYLQSRQYSLSEGYRKGGEHYRISVKREEGVEVGAPGIISNMLHDKISVGDEVEVSHPQGEFFVDPADATKAGAPLVLLSAGVGATPLLSILESVTVADGGVPAPAATRPVSWIHASRSRAQRPFETRVAEIQKTVGEERLRSRLFLGKIDAEKDVANQHFHFGGGRMDLDKLDADRDLHTSDARAEYYLCGPEAWMLDTREKLEQMGVAHERIHLELFATGDVQ

SEQ ID NO: 3766 - protein, 431 aa, Xanthomonas axonopodis pv. citri str. 306
MSTTLQSAEQLQQDWSNNPRWAGIARNYSAADVARLRGTVHVEHSLARLGAEKLWNSLHATPFVNALGALTGNQAMQQIKAGLKAIYLSGWQVAADANLAGQMYPDQSLYPADSVPAVVKRINNTLLRADQLHHAEGNDAIDFLQPIVADAEAGFGGVLNAFELMKAMIEAGAAGVHFEDQLASVKKCGHMGGKVLVPTREAIEKLNAARLAADVLGVPTVLIARTDAEAADLITSDVDANDQPFTTGERTVEGFFKTRNGLDQAISRGLAYAPYADLIWCETGKPDLEFARAFAQAIHARFPGKLLAYNCSPSFNWKKNLDDATIAKFQTELASYGYKFQFITLAGFHALNHSMFHLAHGYARRQMSAFVELQQAEFEAAEMGFTAVKHQREVGTGYFDAVTQAIQQGQSSTTALRGSTEEEQFQSDKAA

SEQ ID NO: 3767 - protein, 127 aa, Oryza sativa (japonica cultivar-group)
MDATTTAKRKRPAASDIADDAPTTVDEVSDAEVEEFYAILRRMRDATRRLGARPPPPRAPAWRPSFSWEDFADAPPKQAPPPPQQPADHERVAENATPPRRPAPGLDLNVEPPSDAPATPRSARAPA

SEQ ID NO: 3768 - protein, 235 aa, Glycine max
MSLFAAFSICKVAKDAAGVAGNVFAFGLFVSPIPTFRRIIRNGSTEMFSGLPYIYSLLNCLICMWYGTPLISADNLLVTTVNSIGAVFQFVYTIIFLMYAEKAKKVRMVGLLLAVLGMFAIVLVGSLQIDDVIMRRFFVGFLSCASLISMFASPLFIIKLVIQTKSVEFMPFYLSLSTFLMSTSFLLYGLFNDDAFIYVPNGIGTILGMIQLILYFYFESKSRVSSREPLIVSYA

SEQ ID NO: 3769 - protein, 371 aa, Bacillus cereus G9241
MTVIRGLEGVVATTSSVSSIIDDTLTYVGYNIDDLAENATFEEVVYLLWHRKLPNEQELAEFNEIVSEYYKVPGEILAYLKQVDLKIAHPMSVLRTAISMLSLYDESAEIMDEKSNYLKAVKLQAQVGTLVAAYARIRKGLDVVEPRNDLSLAANFLYMLNDREPNEVEIEAFDKALVLHADHELNASTFTARVCVATLSDVYSGITAAIGALKGPLHGGANENVMKMLTEIGEEENVESYIHNALQNKVKIMGFGHRVYEQGDPRAKHLREMSKRLCVLLGEEKWYNMSIKIEDIVTKEKGLPPNVDFYSASVYHCLGIDHDLFTPIFAISRMSGWLAHILEQYENNRLIRPRADYNGPTHQVYVPIAQR

SEQ ID NO: 3770 - protein, 267 aa, Glycine max
GSSSSRIGLSGSSGSSGSRAFRGDYETCLVYTEEMKERCVEQFKQGTVCMEQLAAVEGLCELVRKAVGAAESVRRYHVNLSIFTSVPDAWGIDQVFPIIPIHRLEEKPSVRGILSDLTCDSDGKIDKFINGESSLALHEMEGGSYYLGMFLGGAYEEALGGVHNLFGGPRVIRVSQSDGPHSFAVTRAVPGPSCGDVLRVMQHQPELMFETLKHRAQEYVSHDNAAAVLAAGLARTFDRMPYLLPLSSFVADDVACAAAVPAGEDDE

SEQ ID NO: 3771 - protein, 213 aa, Oryza sativa
MAEGAELVGESAHQDMPRVVAALAGILERVAGRNDAAATPAELAAAPASPFRATAKPGISVRAYAARIARFAGCSPACYVVAYIYLDRLLRRGRRCLALALAVDSYSVHRLLITAVLSAVKFMDDICYNNAYFAKVGGISLAEMNYLEVDFLFGVGFDLNVTPETFADYCAVLQSEMLCAAAPPTRLHYCCLSEDDAGSSSSSSLREAAMEAS

SEQ ID NO: 3772 - protein, 116 aa, Glycine max
  misc_feature (10)..(10): Xaa can be any naturally occurring amino acid
  misc_feature (70)..(70): Xaa can be any naturally occurring amino acid
MAGEDYTFKXAMIVDARARNISHNVTCTESGSQSIEDSQAYIAILLRKLILDEIQSGKTDKDIYNKLADXFTETVLYTPNFDMQTTPIWLLPLLIASSAARVWAYNMHKQKTNVHI

SEQ ID NO: 3773 - protein, 511 aa, Nicotiana tabacum
MMIDLELSTSLLFCLIPFLFLLFIKTTLANLFSSNKSTSKIPKSYPIIGSCFSILANKERRIQWTSDIMQNTSNLTFTLNRPFGFRQIFTANPANVQHMLKTQFHIYQKGDVFKTTMADFLGDGIFNVDGDIWKYQRQVSSHEFNTKSLRKFVETVVDTELNERLIPILATAAVEKTVLDFQDILQRFAFDNICKIAFGYDPAYLLPSLPQAKFAVAFEEAVKLSSERFNAIFPFVWKIKRNFNIGSEKKIRVAVNEVRQFAKELVKEKQKELKEKSSLDSVDLLSRFLSSGHSDEDFVTDIVISFILAGRDTTSAALTWFFWLIFEHPETENQILKEAKAKSESPVYDEVKDMIYTHASLCESMRFYPPIPIDTKAATEDNILPDGTFVKKGTRVSYHIYAMGRVENLWGKDWAEFRPERWLDKDEASGNWTFVARDTYTYPVFQAGPRICLGKEMAFLQMKRVVAGVLRRFKVVPLAEKGVEPVFLSYLTAKMKGGFPVTIEERNGTDI

SEQ ID NO: 3774 - protein, 121 aa, Leuconostoc mesenteroides subsp. mesenteroides ATCC 8293
MAFDKDAIIASLKDATILDLADLVSAIEEEFNVSAAAPVAAAGAADGAAAAKSEFDVELTSAGTAKVKVIKAVREATGLGLKEAKDLVDNAPSVVKEGLSEDDANALKESLEATGASVTVK

SEQ ID NO: 3775 - protein, 180 aa, Zea mays
MADAPASPGGGGGSHESGSPRGGGGGGGGSVREQDRFLPIANISRIMKKAIPANGKIAKDAKETVQECVSEFISFITSEASDKCQREKRKTINGDDLLWAMATLGFEDYIEPLKVYLQKYREMEGDSKLTAKSSDGSIKKDALGHVGASSSAAQGMGQQGAYNQGMGYMQPQYHNGDIKK

SEQ ID NO: 3776 - protein, 511 aa, Nicotiana tabacum
MALLDLQLSTSLLFCLVPLLFLFFVKFKKTITNTLLSSNNSSKIPRSYPLIGSYFSILANHDRRIKWISDIILTTPNLTFTLIRPLNFRTIFTANPSNVQHVLKTNFQVYQKGHGSYSTLKDFLSNGIFNVDGDIWKYQRQVASHEFNTRSLRKFVETVVDTELSERLIPILATAAANKTVLDFQDILQRFAFDNICKIAFGYDPGYLLPSLPEAEFAVAFEDAVRLSTERFIVPFSLIWKIKRALNIGSEKKLRVAVEQVREFAKEIVREKQKELNDKSSLDSADLLSRFLSTGHSDEDFVTDIVISFILAGRDTTSAALTWFFWLISKHPEVESQIMKEVGEKSESLLLYDEVKNMMYTHASLCESMRFYPPVPMDSKEATKDDILPDGTFVKKGTRVTYHPYAMGRVEKVWGEDWAEFKPERWLDKDEVTGNWTFVPKDAYTYPVFQAGPRICLGKEMAFLQMKRVVAGVLRRFKVVPVVEQGVEPVFISYLTAKMKGGFPVTIEERI

SEQ ID NO: 3777 - protein, 498 aa, Anabaena variabilis ATCC 29413
MAINTGKNKLMNRHIQPWQRLLVLAIGSMVFAVFAPTIVQAANTPTLESLSETTIKLQISIDTTWVLLSGFLVFFMQTGFAMLEAGLVRQRSVVNTLLENFIDAAVTVLAWWAVGFGIAFGTSAGGLFGIDTFFLNQLPGADGSYPLGAPGSTAAINTYTLFFFQFAFAATASTITTGSMAGRTDFIGDLIYSAIMGAISYPIIVHWAWNSNGWLGKLSYHDFAGGSIVHTVGGWTALVGAYLLGPRPDRPPWGKLPPAHNLALATLGTMILWFGWYGFNPGSTLGTANPGLIGLVTINTTLAAGAGALTALIFLYVRTGKWDLVYCLNGSLAGLVAITAPCAYVAPWASVLIGFTGGISVVLGVSLIESLHIDDPVGAFSVHGISGMMGTLSIGFLGQAELTLNQKAGLFLGGGFDLLGIQMLGIVAITVFTVAFAFLMYGGLKAVGYLRVNAEADSIGIDAYEHGASVWPDIYPVEEVSKLQDQTKISENKTLEEQ

SEQ ID NO: 3778 - protein, 180 aa, Glycine max
MQHRNLTSGRPSGTDGSDYSYRMVVDSRYQLVAKGKKRLSLYFITEAVLLLIGVTLTYLPGIEADAPNTVAYSSVIVSVVSLIIGNIGRRRSRSGLLRFYAAVSSIAMLLLIASLAQQHLLLKAIQDSKLWKTGKYDVNELSHFQIGLLLYMVTLSVLKLCTVNAVVSLLFNMAPPKKTS

SEQ ID NO: 3779 - protein, 320 aa, Glycine max
  misc_feature (38)..(38): Xaa can be any naturally occurring amino acid
  misc_feature (268)..(268): Xaa can be any naturally occurring amino acid
YVSSEFGSCLLPDLQPENLLLDSNAVLKVTDFGLSTYXQQEDELLRTACGTPNYVAPEVLNDRGYVGSTSDIWSCGVILFVLMAGYLPFDEPNHAALYQKIGRAQFTCPSWFSPEAKKLLKRILDPNPLTRIKVPELLEDEWFKKGYKPTTFVEEEDVNVDDVAAAFNDSKENLVTERKEKPVSMNAFELISRSQSFNLENLFEKQQGSVKRETHFTSQRPANEIMSKIEEAAKPLGFNVHKRNYKMKLQGDKSGRKGHLSVAKEVFXMAPPLQMVEIQKTGGDTLEFHKFYKNFSSSSGFPKVVWHSKKKENKIIKSAK

SEQ ID NO: 3780 - protein, 364 aa, Arabidopsis thaliana
MVIMQVLASKTKINMVMELVTGGELFDRIVSNGKLTETDGRKMFQQLIDGISYCHSKGVFHRDLKLENVLLDAKGHIKITDFGLSALPQHFRDDGLLHTTCGSPNYVAPEVLANRGYDGAASDIWSCGVILYVILTGCLPFDDRNLAVLYQKICKGDPPIPRWLSPGARTMIKRMLDPNPVTRITVVGIKASEWFKLEYIPSIPDDDDEEEVDTDDDAFSIQELGSEEGKGSDSPTIINAFQLIGMSSFLDLSGFFEQENVSERRIRFTSNSSAKDLLEKIETAVTEMGFSVQKKHAKLRVKQEERNQKGQVGLSVTAEVFEIKPSLNVVELRKSYGDSCLYRQLYERLLKDVGTSSPEQEIVT

SEQ ID NO: 3781 - protein, 247 aa, Chlamydomonas reinhardtii
MGEQLRQQGTVKWFNATKGFGFITPGGGGEDLFVHQTNINSEGFRSLREGEVVEFEVEAGPDGRSKAVNVTGPGGAAPEGAPRNFRGGGRGRGRARGARGGYAAAYGYPQMAPVYPGYYFFPADPTGRGRGRGGRGGAMPAMQGVMPGVAYPGMPMGGVGMEPTGEPSGLQVVVHNLPWSCQWQQLKDHFKEWRVERADVVYDAWGRSRGFGTVRFTTKEDAATACDKLNNSQIDGRTISVRLDRFA

SEQ ID NO: 3782 - protein, 132 aa, Triticum aestivum
MDLIDHKDFGESPPWASQVLELVELILRPPEGGPPCLRDHSEEVLSVLNLLRLILIIDSRGSRSAKMLRDEKIRAVYSEWLLPLRSVVTGNQSELEKDGGDDDENQMACLLNPVQLVLHRCIELVEEKMKGL

SEQ ID NO: 3783 - protein, 136 aa, Mycobacterium leprae TN
MPTGKVKWYDADKGFGFLSQEDGEDVYVRSSALPAGVEGLKAGQRVEFGVASGRRGPQALSLKLIDPPPSFARQVRREALAEHRHSPDELHGMVEDMITLLESTVQPELRKGRYPDRKTARRVSEVVKAVAREFDA

SEQ ID NO: 3784 - protein, 336 aa, Staphylococcus aureus subsp. aureus Mu50
MRAAVVTKDHKVSIEDKKLRALKPGEALVQTEYCGVCHTDLHVKNADFGDVTGVTLGHEGIGKVIEVAEDVESLKIGDRVSIAWMFESCGRCEYCTTGRETLCRSVKNAGYTVDGAMAEQVIVTADYAVKVPEKLDPAAASSITCAGVTTYKAVKVSNVKPGQWLGVFGIGGLGNLALQYAKNVMGAKIVAFDINDDKLAFAKELGADAIINSKDVDPVAEVMKLTDNKGLDATVVTSVAKTPFNQAVDVVKAGARVVAVGLPVDKMNLDIPRLVLDGIEVVGSLVGTRQDLREAFEFAAENKVTPKVQLRKLEEINDIFEEMEKGTITGRMVIKF

SEQ ID NO: 3785 - protein, 229 aa, Pyrococcus horikoshii OT3
MNVEEMKKIAAKEALKFIEDDMVIGLGTGSTTAYFIKLLGEKLKRGEISDIVGVPTSYQAKLLAIEHDIPIASLDQVDAIDVAVDGADEVDPNLNLIKGRGAALTMEKIIEYRAGTFIVLVDERKLVDYLCQKMPVPIEVIPQAWKAIIEELSIFNAKAELRMGVNKDGPVITDNGNFIIDAKFPRIDDPLDMEIELNTIPGVIENGIFADIADIVIVGTREGVKKLER

SEQ ID NO: 3786 - protein, 227 aa, Cicer arietinum
PVYKPPVEKPPVYKPPIEKPPVYKPPVEKPPVYKPPVEKPPVYKPPIEKPPVYKPPVEKPPIYKPPVEKPPVYKPPVEKPPVYKPPVEKPPVYKPPVEKPPVYKPPVEKPPVYKPPVEKPPVYKPPVEKPPVYKPPVEKPPIYKPPVEKPPVYKPPIEKPPVYTPPVEKPPVYKPPIEEPPVYKPPVEKPPVYGPPYEKPPHYPGYPPYEKPPHHPGYPPADDDNRF

SEQ ID NO: 3787 - protein, 279 aa, Haloarcula marismortui ATCC 43049
MTQQQSPTDGGPRASGMPMLGLGTWQNEDAEQCAESVRTALEAGYRHIDTAQAYDNESAVGDGIAAADVDRDDIFLATKVWISNLSHDDVIETTEESLDKLGVDSVDLLYVHWAAGEYEPEETLPAFDELVDRGLIDNVGVSNFEPHHVETAMDVLDAPVFANQVETHPFLQQSELREHAAEQDYELVAYSPLARGEVFGHDVIEAIADDHDASEAQVSLAWLREKGVTAIPKATSEAHITDNLASLDLSLTDADIDRIDNIDTVDRRVDPDFGPAAWD

SEQ ID NO: 3788 - protein, 282 aa, Streptococcus pyogenes MGAS8232
MAMIQWFPGHMSKARRQVQENLKHVDFVTILVDARLPLSSQNPMLTKIVGDKPKLMILNKADLADATRTKEWKAYYESQGIKTLAINSKEQSTVKKVTEAAKELMADKIKRLRDRGIQKETLRTMIIGIPNAGKSTLMNRLAGKKIAVVGNKPGVTKGQQWLKSNKELEILDTPGILWPKFEDELVGLKLALTGAIKDQLLPMDEVTIFGLNYFKTHYPSRLTKRFKNIPLEEEAPEIIMTLTRQLGFKDDYDRFYSLFVKEVRDGKLGQYTLDQVGDMDAD

SEQ ID NO: 3789 - protein, 306 aa, Sporothrix schenckii
MDGKRQLNSFQQLEKLGEGTYATVFKGRNRHTGEFVALKEIHLDSEEGTPSTAIREISLMKELKHENIVALHDVIHTESKLMLVFEYMDGDLKKYMDTNGERGALKPMLIKSFMYQLLKGIDFCHQNRVLHRDLKPQNLLINGKGQLKLGDFGLARAFGIPVNTFSNEVVTLWYRAPDVLLGSRTYNTSIDIWSVGCIMAEMYTGRPLFPGTTNEDQMLRIFRIMGTPAEHNWPGISQFPEYKATAPRYATQDLRQILPQIDATGIDLLQRLLQLRPELRISAHDALQHPWFHDILQYQHCQQAAG

SEQ ID NO: 3790 - protein, 213 aa, Brassica napus
LAHFALFFNQGQCCCAGSRTYVHEKVYDEFVEKAKARALKRVVGDPFKKGIEQGPHIDSKQFEKVMKYIRSGVESNATLECGGGQVGDKGYFIQPTVFSNVKDDMLIAQDEIFGPVQSILKFSDVDEVIKRANDTRYGLAAGVFTKSLDTANRVSRALKAGTVWVNCFDVFDAAIPFGGYKMSGNGKKKGIYSLNNYLQVKAVVTPLNNPAWI

SEQ ID NO: 3791 - protein, 283 aa, Escherichia coli CFT073
MQKVKLNNGIEMPLLGFGVFQMTDAAECERAVIDAINSGYRLIDTAASYQNEIQVGNALKQSGIARNELFVTTKLWLQDTSYEGAKAQFERSLNRLQLDYVDLYLIHQPYGDVHGAWRAMEELQQAGKIRAIGVSNFHPDRLADLIAFNNVVPAVNQVEVNPFNQQLQAVPWMQSRGIQPEAWAPFAEGKNGLFQHPVLTAIGEKYGKSVGQVVLRWIYQRGIVSLAKSVRKERMEENINILDFELSPEDMLQITALDTATSAFFSHRDPAMVEWLTGRKLDV

SEQ ID NO: 3792 - protein, 155 aa, Saccharomyces cerevisiae
GASIVSLLGIKVLNNPAKFTDPYEFEITFECLESLKHDLEWKLTYVGSSRSLDHDQELDSILVGPVPVGVNKFVFSADPPSAELIPASELVSVTVILLSCSYDGREFVRVGYYVNNEYDEEELRENPPAKVQVDHIVRNILAEKPRVTRFNIVWD

SEQ ID NO: 3793 - protein, 282 aa, Mycobacterium avium subsp. paratuberculosis str. k10
MSKVPTIELNDGARIPQLGFGVYQIKPDETAAAVRAALDIGYRHIDTAEMYGNEREVAQGIRDAGLDRSEVFVTSKLNNGFHEPDAARRAFDATLNALGSDYVDLFLIHWPLPTLYGGDFVSTWRVLEEFARDGRARSIGVSNFQVAHLERLAAETDTVPAVNQVEVHPYFTNEKVRGYAREHGLAIEAWSPIAQGGVLGDAVINRIADGLGRTAAQVVLRWHIQRGDIVFPKTVNPDRMKSNFELFDFELDERAMEAISALDRGESGRRGPNPDTFDYIPR

SEQ ID NO: 3794 - protein, 294 aa, Escherichia coli CFT073
MEGLTVEFSVLSNNLKMPMMGFGVFQVTDKDVCKQSVLNAIRTGYRLIDTAAVYGNEDAVGEAVREAISEGLCTREELFITSKLWVQDMLNQDIAAAGIEASLKKSGLECFDLYLLHQAMRDYFSAWRALEDAYEEGKLKAIGVSNFYPHVLANFCETVRVKPMVNQVELHPYFAQPEALATMKYYNVQPEAWAPLGGGRHKPFENNLLQSIADAHQKSISQVILRWNIQRGVVVIPKSTHQQRIEENFAIWDFSLTEKEMAQISSLDLGYVGESVKHFNPEFVRGCLAVKIHD

SEQ ID NO: 3795 - protein, 390 aa, Zea mays
  misc_feature (140)..(140): Xaa can be any naturally occurring amino acid
  misc_feature (174)..(174): Xaa can be any naturally occurring amino acid
  misc_feature (186)..(186): Xaa can be any naturally occurring amino acid
SSLQCSLHVPDEDMLSPLGALRLDGHFSFHDVSAMARDFGNQCSFLPAAVLHPGSVSDIAATVRHVFSLGEGSPLTVAARGHGHSLMGQSQAAQGIVVRMESLRGARLQVHDGFVDAPGGELWINVLRETLKHAWHPSRXTDYLHLTVGGTLSNAGVSGQAFRHGPQVSNVNQXEIVTGLKRTLKXQPEVTELLSRLRIINRTGVLNNWRASFKPQDPVEASHFQSDGRVLYCLELTKNFNSDDTDTMEQVNLEFLDRVHTSELKLRAQGLWEVPHPWLNLLIPRSSIRRFAKEVFGKILVGFLSSAPSLSGYGSIAHSMNLNKQIVEFCEEAGIGMKQYLAPYTTQQQWKAHFGARWETFERRKHRYDPLAILAPGQRIFPKASLPLPL

SEQ ID NO: 3796 - protein, 247 aa, Zea mays
ACLQISTMFTHHQKIVVVDHEMPNQGSQQRRIVSFIGGIDLCDGRYDTQYHSLFRTLDTVHHDDFHQPNFEGGSIKKGGPREPWHDIHSRLEGPIAWDVLYNFEQRWRKQGGKDLLVRLRDLPDIIIPPSPVMFPEDRETWNVQLFRSIDGGAAFGFPETPEEAARAGLVSGKDQIIDRSIQDAYVNAIRRAKNFIYIENQYFLGSSYGWKPEGIKPEEIGALHLIPKELSLKNVSKIESWERFTVY

SEQ ID NO: 3797 - protein, 246 aa, Ralstonia metallidurans CH34
MSTEADAWIQHELMVAPMAATHGAPRSALVVGGGDGGSAFELLRIPTMREVVVAELDGEVVRLAREWLRGIHQGALDEPGDPRLSLAIGEGLGLMEAFARAGRQFDLIVYDLTEADDGSPAAALFSPHGLHTARRCLAPGGAMSLHLGPPLHRPETARRLLARLRHVFRHVAPLTTFVPAYGALWGIALASDALDIAAQPADKIATRLQQWQLEHKLRAYHAYLHPALFVHPRHVQAIFDSGSRPA

SEQ ID NO: 3798 - protein, 411 aa, Anaplasma platys
MKENAVLMCGDKKVSLPMLSGTDGIQLIDITTLYRDHKVLTYDPGFMSTAACSSEITFIDGEKGILRHRGLDIADLIGIKGGFCSVAHLLLYGVLPSDTVFEQFLAAIGAQHALSSDVLGVISSFRRDAHPMAILMACFSTLAAKYHGDNRGNEELAVLAIAQVPSLVAAIYRHRMGLELVSPDPSLSYTGNFVKMMFGALEKTRADAIEEALDAIFIMHADHEQNASTATVRMAGSAGTELFACLAAGTATLWGPAHGGANEAVIRMLESIGSPDKVEEFIGFVKDNNSKVRLMGFGHRVYKSYDPRAKILGQISRSVLDNLGCSDELLGVAEELERCALQDEYFVERKLYPNVDFYSGIVLRAMGVPVEMYTTFFALARTAGWVSQWCELLRGSESLKICRPRQLYAGK

SEQ ID NO: 3799 - protein, 1166 aa, Ustilago maydis
MPPLPYRRSSSLLPVTHSGTSTVARATTSLATRTPIHLTLEDLKRRTIKFISEEDNTTRIVNVSDCRDAYDVMARVLKKFGKPPSGNSYTPTADQGPTGDELGATETWGIFATSADGQNTKALSDNELLAICHAPQPHDPLRERGLTLRRIPNHLPGEDARKVPVRSGRNKLEAFFGERMPVAQMQPAGPGSGVNADEEDAGSVTISGKKMKRASTVSIMSGLGVGPFSSSSHNTGAGHTHGSTRAEGKLLSKKESKHMSPPPVTSKPSKIRNFFGQRPPSELINTNLADFFPSTDSKALQRTARRSIYGRASASTRSKRNSTWSFVADPDAPPLPNKGSMDGHPTPLERSSISIRERGTTPVIQIGYDSRSEDDHQSNARRTSSGTHSHLHSSLTGPPTLPPVVSRDSLDEWSRDLKAVGSPVTEENAMFQSSRHGHASGSQQHHAAMKHYPSHASGYADRPSISRRASGESARSRRSLASQVRHGLSAARERNADTASLLTVDEITQEVENRRESISLAGAGGGWVVDEDGVPIPIPGSSSPFSSSAAASTRPSSGISSSYVHNGHLEHDDSEGHSDEEANQSSDLEEATRTRKARGVPSKAASIRTVASKRASSVLQAPGDESDRHLGDPMAVARSTTSRASSVSELRRSVHDHGDPSDGESGSDFTDSDLDSDGSETDEDEQANDVYLPSAKPAPIKWHKGALIGAGSFGNVFLGMNAKTGLLMAVKQVELPSGDSHLDQRKKGMLEALEREIKLLKSLEHENIVQYLDSFADDSHLNIFLEYVPGGSIVALLRNYGAFEEPLVRNFVRQILNGLSFLHNRGIMHRDIKGANILVDNKGGIKISDFGISKKVESDLVLATNKSGAGGGGAGGAAHRPSLQGSVFWMAPEVVKQTSYTIKADIWSLGCLVVEMISGTHPWAELNQMQALFQIGMGRKPSLPDEISNECRDFLEKTFELDYNNRPSADELLNHAFMGTEMTFPPSSGADGSGGGDDDAGGSGDAGDGDASTMGMTNDAETGTTRETRETKDGKRPTRSKSTRRLEREKRHKEAAAAAAAATALDTGTPNTPTSHTAAAAAAAAAAAASASASASASPAVASTSPAPGDAETGSPTNGKSAVPPAGSTGGTPESILTVSIATARGNSTSTALSAADAAFSEEADS

SEQ ID NO: 3800 - protein, 402 aa, Bacillus cereus G9241
MHKVHQGKLETVSKVKVENAKDLSLAYSPGVAEPCKEIYDDKSKVYEYTMKGNMVAVVTDGTAVLGLGNIGPEASLPVMEGKAVLFKSFAGVDAFPIALNTNDVDKIVETVKLMEPTFGGVNLEDIAAPNCFIIEERLKKETNIPIFHDDQHGTAIVTVAGLVNALKLVGKKMSDIKVVANGAGAAGIAIIKLLYRYGVRDIIMCDRKGAIYDGRPTGMNPVKDEVAKYTNKNRIEGSLADVVQGADVFIGVSAEGALTEEMVRTMNDDAIIFAMANPVPEIMPELAKAAGAAVVGTGRSDFANQVNNVLAFPGIFRGALDVHATQINEEMKMAAVQAIAELVAEDELNADYIIPAPFDARVAPQVAAYVAKAAMETGVARRQVDPNEVAEKTKQLALIGKE

SEQ ID NO: 3801 - protein, 250 aa, Zea mays
MYFRPPPKGPEWYAGDAETGQAARPLYPMMLEDPRLRWAFIRKVYSILSIQMLLTVAVAAVVVYVRPVALFFVSTAAGFGLYIFLIILPFIVLCPLYYYYQRHPVNLLLLGLFTVAISFAVGLTCAFTKGEVIPDSAVLTAVVVLSLTAYTFWAAKRGHDFNFLGPFLFAAVMILMLFALIQLFFPLGRISLMIYGGLAALVFCGYIIYDTDNLIKRYSYDEYVWAAGALYLDRINLFLSLVTLFRAADS

SEQ ID NO: 3802 - protein, 460 aa, Ralstonia metallidurans CH34
MSDMQEHKVTPYDQFNYEVPENVFPREGISANAAAAIVISDEWTDTNPMLNMSSFVTTFAEPEAREVAARNIFKNYIDHDMYPRLFAMEGRMVRWLHELWNGPKGVEPYGTCTVGSSEACMLGGLAHKWNWRQRRQAEGKDATRPNMVTGGNVQIVWKKFLRYFDVEPRIVPLKPGNYCLTAEDLDKYVDENTICVVAIAGQTFTGEDDDIQGIHDWLDAYEKRTGISIPMHIDGASGGFVNPFLYPDYKWDFRLPRVQSINASGHKYGLTPPGLGWVVFRERKIFNEELVFYVNYLGGEMPTATLNFSRNAFQVAVQYYQFLRLGFDGYKRVMQHTLDNAIFLRQQLVDSGYFDIMNTTQRIPVVAVTLNKKYKNFNEFDVSNKVREKGWVLSAYTMPPNAESVTSLRVVVRPHVNHNVAQLLANDIINACKFLEANGGNAKPPALHKHAEAQSTSLKC

SEQ ID NO: 3803 - protein, 303 aa, Brassica napus
STDAPGGRFRLVSNLGGGRVMATAAKVAGIGVAKSGFRGGFGVPAAANDQFIVRNASASKPVSASISSAVHPSVEEDAVVMRKPVWEDEWEFAEVETKTIPRVVFDKPPSLQEAKEATDDLKDALNMAYMEGSNEVGSVSRMFSSFQPSENRAVESAVPQVALKAFAFLSENTAAQSVVASIASDPKVWDAVMENKDLMKFLETNTASTTVEADNDDKSELSSETESEEESEAKPINLMEILRDMKLKAVQMMENVSSYFGGGFRTKTFTKGGQERKRMLLNDPTTLFGLAVCVIFMVVLKRA

SEQ ID NO: 3804 - protein, 320 aa, Zea mays
  misc_feature (20)..(20): Xaa can be any naturally occurring amino acid
  misc_feature (29)..(29): Xaa can be any naturally occurring amino acid
  misc_feature (49)..(49): Xaa can be any naturally occurring amino acid
MEAEAAAKRTRESGEDAAAXGISAVIPGXWFSEISPMWPGEAHSLKVEXKVLFQGKSDYQNVMVFQSSTYGKVLVLDGVIQVTERDECAYQEMITHLPLCSIKDPKKVLVIGGGDGGVLREVSRHSSVEQIDICEIDKMVVDVSKQFFPHLAVGFEDPRVSLHIGDGVAFLKNAPEGTYDAVIVDSSDPIGPAQELFEKPFFQLVARALRPGGVVCTQAESIWLHMHIIEDIVVNCRQVFKGSVNYAWTTVPTYPSGVIGFMLCSTEGPAVDFQHPVFNIEEDEHPMKSKGPLKFYNSEIHTASFCLPSFAKRVIESKAN

SEQ ID NO: 3805 - protein, 224 aa, Burkholderia cepacia R1808
MVAVPEVPEVPEVPEVPEVPEVPEVPEVPEVPEVPEVPEVPEVPEVPEVPEVPEVPEVPEVPEVPEVPEVPEVPEVPEVPEVPEVPEVPEVPEVPEVPEVPEVPEVPEVPEVPEVPEVPEVPEVPEVPEVPEVPEVPEVPEVPEVPEVPEVPEVPEVPEVPEVPEVPELPPPDVPDEPPPDVPDVPDVPDVLGLIDGVTGPSTDPQPYSVTTDKAASATVVFLK

SEQ ID NO: 3806 - protein, 347 aa, Azotobacter vinelandii
MKALVLEKQHDLKIRDIDLPTPPVGPDDVRIRIHTVGVCGSDVHYYTHGRIGHFIVDRPLVLGHEAAGTVVEVGSGVTRLAVGDRVCMEPGIPDPKSKASRLGLYNVDPSVVFWATPPVHGCLTPEVVHPAAFVYKLPDNVGFAEGALVEPFAIGMQAAVKARIKPGDVAVVIGAGTIGMMTALAALAGGASRVLVSDLMVEKLAIAQRYEGITAVNVRERSLRDAVAEVTDGWGADVVFEASGSARAYGDALAAVCPGGALVLVGMPVEPVPFDVVAAQAKEIRIETVFRYANVYERAVNLIASGKVDLKPLVSATYPFERGVEAFERAASARPGDVKVQITFGDG

SEQ ID NO: 3807 - protein, 180 aa, Triticum aestivum
  misc_feature (95)..(95): Xaa can be any naturally occurring amino acid
PEPNLMRRGLGRLEQRGPMHKECDEANGARQDPVPYAATRKLTNGTPFRRIEGIKALAEALVSAAVSTNESFVCPENIPTTTKDNYFRTESYDFXPKNAARLTVPGGPSVACSTAKAVEWDAAWSKLLDPSGRAALGVHDAAYEEEKAPASVDPVLENAFHPPAHGESTLVKSAVPAAAV

SEQ ID NO: 3808 - protein, 284 aa, Glycine max
  misc_feature (52)..(52): Xaa can be any naturally occurring amino acid
  misc_feature (65)..(65): Xaa can be any naturally occurring amino acid
  misc_feature (71)..(71): Xaa can be any naturally occurring amino acid
  misc_feature (103)..(103): Xaa can be any naturally occurring amino acid
MVLIRLWFVLLGFFGGFGSAAEQRRWTLNDFDIEKPLGRGKFGHVYLAREKXDNHIVALKVLFKXQLQQSXVVHQLRREVEIQSHLRHPHILRLDGYFYDQSXGPKGDLYKELQKCKYFSERRVTTYVASLARAFIYCHGKHVIHRDIKPENLLIGSQIQEIYRAYVHTFNRRRTMCGTLDYLPPEMVESVEHDASVDIWSLGVLCYEFLYGVPPFEAKEHSDTYRRIIQVDLKFPPKPIVSSAAKDLISQMLVKDSSQRLPLHKLLEHPWIVQNAEPSGVYRS

SEQ ID NO: 3809 - protein, 354 aa, Ralstonia eutropha JMP134
MVQAQFHRLQIAEVVAETDQAHSLVFALPESLRDTFAYRPGQFLTLRVPVDGVPQQRCYSLSSAPDVDSALRVTIKRVQGGRVSNWVCDHLGAGDTVEVMPPAGVFTPPTLHGDFLLLAGGSGITPVLSIAKAALRHGRGTVTLVYANRDEQSVIFREALGELARRHPGRLRVIHWLDSVQGPPSQRQVEELVRPWSLAECFICGPGPFMDSAQAALQELGVPRGKLHVERFVSLPDRTSAPVQAVMPAASTVVTPVPVATMHGAALTVQLDGETHQVSVAPDETVLDAMQRAGVAAPNSCRAGLCGACMCQVTQGDVTLGENHVLDQADLESGWTLACQARPASGDIHLKFPD

SEQ ID NO: 3810 - protein, 76 aa, Zea mays
MSSGGCSTCLEVIFAAILPPLGVFFRYGCCSSEFFVSLLLTLLCYVPGVAYSLYVILRTPPEPPGIDGERPYDMLA

SEQ ID NO: 3811 - protein, 507 aa, Pseudomonas sp. KIE171
MSGDYMVQATTNLVGAAYWRGRADEIQFEGRCLIDGKMVEAQSGYTFDCVSPVDGRVLTKVSAGGEADVNRAVAAARSAFRDRRWSGQSPVSRKRTLQAFAALIRLHRDELALLETLDMGKPISASRSVDVEAVASCFEWYAEAIDKLYEQIAPTAETDLALITREPLGVVGAIVPWNFPMLTAAWKTAPALACGNSVVLKPAEQSPLTAIRLAQLALEAGVPEGVFNVVPGLGGSAGRALACHMDVDGIFFTGSTATGRLLTEYAAKSNLKRVCLELGGKSPNIILASYGDIEKAAVASAESMFNNQGEVCIAPSRLIVERSIHKRVVEIVAEVAKRRQPGDPLDPTTRMGALVDANHADRVMGFIGRAKADGATLVAGGTRALTETGGSYVVPTVFDNVSNCMEIARDEVFGPVLSVIPVANVGEAVAVANDSPYGLGAGVWTDRLSDAHKISRELRAGVVYVNCYNDCDITTPFGGVKQSGNGRDKSLYALDEYTELKTTWIKL

SEQ ID NO: 3812 - protein, 217 aa, Glycine max
MGSLALETEDVISDIYLSLGLKESDKGVGGPRVLSLLSSLLERSVQRNETSLEAKHIKDVVTVFHGLRAPTLSVRKYIDRIFKYSGCSPSCFVVAHIYVDRFIQHTEIKLTSLNVHRLLITSIMLAAKFIDDAFYNNAYYAKVGGVSTSELNRLEMSFLFGIDFRLQFSVDTFGRYCRQLEKEAAEVVQIERPMQACRIKESWSNKDDPTCASTIAR

SEQ ID NO: 3813 - protein, 256 aa, Glycine max
  misc_feature (198)..(198): Xaa can be any naturally occurring amino acid
MGRGKIVIRRIDNSTSRQVTFSKRRNGLLKKAKELAILCDAEVGVMIFSSTGKLYDFASSSMKSVMDRYSKSKEEPCQLGSSASEIKFWQREAAMLRQQLHNLQESHRRKMMGEELSGLTVKELQNLENQLEISLHGVRMKKDQLLMGEIQELNRKGNLIHQENVELYKKVYGTQDDNETNRDSVLTNGLGIGEDLQXACESPAKPATATATTLQGTFRNYKNGQIAIALIHIQDACVSQLLSRKMDSDLNLDVFV

SEQ ID NO: 3814 - protein, 351 aa, Glycine max
MRMMTFTSQLFRYVLRRTFPAMMNAAVDLNLFDIIDKAESSTLSASEIASLLPNSHPQLANRLERILPVLASYSLLNCSIRTTEDGVRERLYALSPIGQYFASDDDGGSLGPLSSLFHRGYFHVLKDVKDAIMDPNNNDHFQNVHGMPPYQYMKTDEELNKLFNKALAQTGPPAMKMLLKLYKGFEQVSTLVDVGGGVGETLKQIIFEYPSIKGINFDLPQVVQDAPPYPGIEHVEGDMFESVPKGDAILLKLVCHNWLDEDCVKFLRNCHKALPQHGKVIVIDYIIPEVPDSSKISMQTCVADSLMFLVTSGKERTEKEFESLCRNSGFSRFHVACRDSPSVLSVIEFYK

SEQ ID NO: 3815 - protein, 161 aa, Pasteurella multocida subsp. multocida str. Pm70
MPKCGKFLLSFVFVISVFARADMVDTYSFNSPEERVRAVALAKALRCPQCQNQNLVESNSPIAYDLRIEVYNMVNEGKSNQQIIDAMTARFGNFVLYKPPFQWTTLLLWLSPIFLTVLAFGLMWRYAKKREKPQHTTALDPAQQAKLTQLLKQTEHTGNKK

SEQ ID NO: 3816 - protein, 255 aa, Brassica napus
  misc_feature (94)..(94): Xaa can be any naturally occurring amino acid
  misc_feature (159)..(159): Xaa can be any naturally occurring amino acid
MTEGGEYYLARMSVDPFMAMKKSNHNKNSPRASGDEQIKSLEMMFESETKLEPRKKVQLARELGLQPRQVAIWFQNKRARWKSKQLETEFNILXRQNYNDLASQFESLKKEKQALVSELHRLNEEVQKTHEEKRLCCGDQAAVVALSSTDHESENEENXRREQEEEVRPEMEVCEKGDDGVLCGHHNDDYDDGGYNNNIKREYFGGFEEEADHLMNIVEPADSCLTSSDDWGGFKSNANLLDQSSSNFPWWDFWS

SEQ ID NO: 3817 - protein, 355 aa, Arabidopsis thaliana
MDRISGLPDELLVEILHCLPTKEVVSTSILSKRWEFLWLWVPKLTFVMNHYESDLPIQDFITKNLRLLKPQVIESFHLQCFSSSFKPEDIKHWVVTTISRRVRELIINYCDLSWLDKPVVLLDLPNSLYTCTSLVTLKLIGHSIIVDVPRTVSLPCLKTLELDSVAYSNEESLRLLLSYCPVLEDLTIHRDMHDNVKTLVIIVPSLLRLNLPIDGAYSCDGYVIVTPALKYLKVPGLYREDFSYLLTHMPNVEEADLSVEQDVERLFESITSVKRLSLFVLLDIEDESMYHNGIYFNQLEHLDLHIYRDNWSKLLVRLLEDSPKLRVLKIVVDVSFFIGNLKALVLLIISFLTKI

SEQ ID NO: 3818 - protein, 106 aa, Brassica napus
KARDNRCVNESIAMASRLVAAAASSSSLSSASPLARLISRRGLAGAADGHGSAKVPLWKDPLSPSKWKEEHFVLASLSMWGVIFYGGYKLFSGKKEAKTEAASPQA

SEQ ID NO: 3819 - protein, 266 aa, Oryza sativa (japonica cultivar-group)
MAPPQERDYIGLSPAAAAALATELRLGLPGTAEEAESEGGGGGGTDAAPLTLELLPKGGAKRGFADAIVGGPAGQRREAAGGKAAAAAAEAEEEEEKKKAQAPAAKAQVVGWPPIRSYRKNTMAMSQPALKGKDDGEAKQAPASGCLYVKVSMDGAPYLRKVDLKMYKNYKELSLALEKMFSCFTVGHGESNGKSGRDGLSDCRLMDLKNGTELVLTYEDKDEDWMLVGDVPWRMFTDSCRRLRIMKGSDAVGLAPRATDKSKNRN

SEQ ID NO: 3820 - protein, 131 aa, Triticum aestivum
  misc_feature (34)..(34): Xaa can be any naturally occurring amino acid
  misc_feature (49)..(49): Xaa can be any naturally occurring amino acid
  misc_feature (66)..(66): Xaa can be any naturally occurring amino acid
  misc_feature (97)..(97): Xaa can be any naturally occurring amino acid
RERAVHAQPTRGPRCWTSGWDGGHVLQLWRRLKXHQGTRNWSALHQKPXNYLCHQTPKHHQLLTPXDQPVYNKDKSINGGGYVEVYLHQELRTRLSXHRFRTVWDCYGITHLYEEYRKGCIDLCLGGPFLT

SEQ ID NO: 3821 - protein, 405 aa, Arabidopsis thaliana
  misc_feature (150)..(150): Xaa can be any naturally occurring amino acid
  misc_feature (374)..(374): Xaa can be any naturally occurring amino acid
MDRISGLPDELLVEILHCLPTKEVVSTSILSKRWEFLWLWVPKLTFVMNHYESDLPIQDFITKNLRLLKPQVIESFHLQCFSSSFKPEDIKHWVVTTISRRVRELIINYCDLSWLDKPVVLLDLPNSLYTCTSLVTLKLIGHSIIVDVPXTVSLPCLKTLELDSVAYSNEESLRLLLSYCPVLEDLTIHRDMHDNVKTLVIIVPSLLRLNLPIDGAYSCDGYVIVTPALKYLKVPGLYREDFSYLLTHMPNVEEADLSVEQDVERLFESITSVKRLSLFVLLDIEDESMYHNGIYFNQLEHLNLHIYRDNWSKLLVRLLEDSPKLRVLKIVVDGEPSFDEEFEHVSWIYNDESSVPKCLLDSLEVFEFAGYTRXPEERDFVSFILKHACHLKSSSISRLSCYVLE

SEQ ID NO: 3822 - protein, 227 aa, Brassica napus
CLLNKLIRFIFSLFINFFFKKACNEAMFPCRSPPNWWTEELCILNIDFFSDVLASMKQRGLKPSSLASAIITYTERSLRDLVRDHSGRGVKFSDPENNDSEERSQQRDLVESIVSLLPSDKGLFPINFLCSLLRCAVFLEASLASKNELEKRISVVLEHVTVDDLLIPSFTYDGERLLDLDSVRRIISTFVEKEKNVGVFNGGDFNKGLFSASLQRVARTVDSYLAE

SEQ ID NO: 3823 - protein, 371 aa, Malus x domestica
MGKGGMSDGDHADRCCGEAINGDVQQENMAAWLLGVKNLKIQPYKLPNLGPHDVRVRLKAVGICGSDVHHFKNMRCVDFIVKEPMVIGHECAGIIEEVGSEVEDLVPGDRVALEPGISCKRCNLCKQGRYNLCRKMKFFGSPPNNGCLANQVVHPGDLCFKLPDNVSLEEGAMCEPLSVGIHACRRANVCQETNVLVVGAGPIGLVTLLAARAFGAPRIVIADVNHERLLIAKSLGADAVVKVSTNIEDVAEEVAKIQKVLENGVDVTFDCAGFNKTITTALSATRPGGKVCLVGMGQREMTLPLATREIDVIGIFRYQNTWPLCLEFLRSGKIDVKPLITHRFGFSQKEVEEAFETSARGGNAIKVMFNL

SEQ ID NO: 3824 - protein, 254 aa, Brassica napus
MTHTLQSPPSAAALSASIQKGRWKTAAAGFSVAPPPPAVNFTLRRSIPRIHASASSSSSSSSPSSPSLGAGENSELDAVSAFSEIVPDTVVFDDFERFPPTAATVSSALLLGICGLPDTIFRNAVDMALADSTCAGLDTTDSKLSCFFDKAIVNVGGDLVKLVPGRVSTEVDARLAYDTNAIIRKVHDLLRLYNEIDVPHDRLLFKIPATWQGIEAAKLLESEGIQTHLTFVYSFAQAAAAAQAGASVIQIFVG

SEQ ID NO: 3825 - protein, 368 aa, Malus x domestica
MGKGGQSCNGVVRDAKPVEQENMAVWLVDVNTIKILPFKLPAIGPNDVRIRIKAVGICGSDIHYLKTMKCGDFQVKDPMVIGHECAGIVDKVGSKVKHLVPGDRVAVEPGISCAHCQQCKGGRYNLCFDMKFFATPPVHGSLANQIVHPADLCFKLPENVSLEEGAMCEPLSVGVHPFRRANVGPETTVLIVGAGPIGLVSVLAARAFGAPRIVIVDMDDRRLAMAKSLGPDGTVKVSTKMEDLDDELAKIKEAMGSEVDVTFDCVGFNKTMSTGLNATRPGGKVCLVGMGHGVTTVPLTPAAAREVDVVGVFAYKNTWPLCLEFLRSGKIDVKPLITHRFGFTEKEVEEAFATSARGGNAIKVMFTL

SEQ ID NO: 3826 - protein, 368 aa, Malus x domestica
MGKGGQSCNGMVRDVKPVEKENMAAWLVDVNTIKILPFKLPTIGPNDVQIRIKAVGICGSDVHYLKTMKCADFEVKEPMVIGHQCAGIVDKVGSEVKHLVPGDRVAVEPGISCAHCQQCKGGRYNLCPDMKFFATPPVHGALANQIVDPADLCFKLPENVSLEEGAMCEPLSVGVHACRRANVGPETTVLIVGAGPIGLVSVLAARAFGAPRIVIVDMDSKRLAVAKSLGADGTVKVSRKMEDLDDEVAKIKETMGAEVDVTFDCVGFNKTMSTGLNATRPGGKVCLVGMGHSMMTVPLTAAAAREVDVVGVFRCKNTWPLCLEFLRSGKIDVKPLITHRFGFTEKEVEEAFATSARGGDAIKVMFNL

SEQ ID NO: 3827 - protein, 85 aa, Brassica napus
MSLFLKDDSIQIREVWHDNLESEMALIRDIVDDFPFVAMDTEFPGIVCRPVGTFKTNTEYHYETLRTNVNLLKMIQLGLTFSDER

SEQ ID NO: 3828 - protein, 472 aa, Guillardia theta
MNKLFSIKIGPYYLGKTLGVGSFGKVKLGEHELCGQKVAVKILNRKKIKNLKMEEKVKREICILKLFMHPHIIRLYEVIETPTDIFVVTEYITGGELFDYIVERGRLNEDESRKFFQQMISGIEYCHNHMVVHRDLKPENILLDAHLNVKIADFGLSNIMKDGNFLKTSCGSPNYAAPEVINGKSYLGPEVDVWSCGVIMYALLCGSLPFDDENIPNLFKKIKSGIYILPGYLSDLSRDMIAKMLITNPLLRITINEIRDHPWFNSRLPKYLSFPTFKKNFVIQKKLNIDDNILELVSNKTFLSKKYIKLGIMKHERNSTAIIYHLIRESITPFDMITVDNSYIRDIIKKENVIKKSNEKEHNTSLHQAFLGIESPRENLKDILNEIQRAIKTFRSKTHNLNHFSVIIVINTNSLFETKYKKKKEIILRTTTILIQIFKRSMKYLIDLQKINGDSFFFLSTCNFIKQELNLK

SEQ ID NO: 3829 - protein, 203 aa, Schizosaccharomyces pombe
MSAFKKSGSKSETSKKLVVVGDGGCGKTCLLIVFSSGTFPERYVPTVFENYITDITYGPNSKVIELALWDTAGQEEYDRLRPLSYPNSNVILLCFSIDCPASLNNVTEKWYPEVQHFCPRTPIVLVGLKADLRKDRNATEVLRTQGLTPVTYQQAQSVALSMNAPYVECSAKENTGVNEVFQLAVGLTIKKSFSFSKKSCVIL

SEQ ID NO: 3830 - protein, 494 aa, Klebsiella aerogenes
MSEITLLAEVTAFLRQPHGQFIAGQREAGRGAPFAVINPATGRAIAEVTAADSDQADRAMESARQALSQWREMPTLARGALLLKLADTLAEHREALAQLESLCSGKTITLVRMLELDQSVALLRYFAGWAGKVTGETLDVSLPSMAGEKYTAFTRRQPLGVVVGIVPWNFSIMIAIWKLAAALVCGCTIVLKPSEYTPLTLLRVAELAKAVGIPDGVINVVNGAGGEIAQRLITHPACAKVSFTGSVATGEKVQQSASASGKRVTLELGGKYAALFLDDLTPEAMVNGIIEAGYLNQGQICAAAERFYLPQGKLDAVLALLKDKLSAFAPGSPLDERTLMGPLANRQQYDKVLRLIQTARDEGDTIVCGGEALPGEGYFLQPTAVKVRSEESTLMREETFGPVCSFIGYRSEEEALARINASPYGLAASVWSDNIRQALRYSEAIEAGIVWVNMHTFLDPAVPFGGMKGSGIGREFGSAFIDDYTELKSVMVRY

SEQ ID NO: 3831 - protein, 146 aa, Zea mays
VMASKSKIYFVLEYAKGGELFNKIAKGGKLSEDAARKYFQQLVSAVDFCHSRGVYHRDLKPENLLLDENENLKVSDFGLSALAESKRQDGLLHTTCGTPAYVAPEVLSRKGYDGAKSDVWSCGVILFVLVAGYLPFHDTNLIEMYR

SEQ ID NO: 3832 - protein, 200 aa, Neurospora crassa
MASGSPQNVIRRKLVIIGDGACGKTSLLSVFTLGFFPATYIPTVFENYVTDCRVDGKSVQLALWDTAGQEDYERLRPLAYSKAHVILIGFSVDTPDSLDNVKHKWVTEANERCPNVPIILVGLKKDLRGDPVAIEEMRKRSQRFVMEDEGQRIAKEIGARKYLECSSLTGEGVDDVFEAATRAALLTFEKKEGSGCCVIL

SEQ ID NO: 3833 - protein, 168 aa, Triticum monococcum
MAAASSATSVHDFTVKDSSGKDVDLSVYKGKVLLIVNVASQCGLTNSNYTELSQLYPKYKDQGFEILAFPCNQFGGQEPGTNDEIVQFACTRFKAEYPIFDKVDVNGNNVSPLYKFLKSSKGGLFGDSIKWNFSKFLVDKEGHVVDRYAPTTSPLSIEKDIKKLLGSS

SEQ ID NO: 3834 - protein, 470 aa, Ralstonia metallidurans CH34
MTNLGGVMRSDRQEASGDGGNPGFEAFRQALGGQLVQRGDPDYDMARKVWNGAIDKHPALVVYCADATDVAGAVRFARATGLTIAVRSGGHNLAGLSTCDNGIVIDLSRMKRIDVDVARRRARAEAGLNLGEFDQATLRHGLATTMGVNSDTGIAGLTLGGGFGKLGRKYGLSCDNLEAVEIVTADGERLHASTTEHPDLFWAIRGGGGNFGIVTAFHFRLHPIPARLPVCAVVYPWDQAREAMLHYDAFARAAPDDVAADAALVTQPSGERCLSISACHVGPDGTEETRQAALRPLVEFGNPVDAQLDFVPYLQMQSASDALFARGRRYYWKAQFLRQIRAEAVDALLAAYALAPSPGCLVVFQQVGGAIARVPDEATAYGNRSADFDCFPLAIWDDPADDDKHREWARGLWEAVQPYSTGGVYANNLGDEGAQRTRAAYGVNHSRLVAVKRQYDPDNAFRLNQNIDPA

SEQ ID NO: 3835 - protein, 72 aa, Brassica napus
MIPICVQCGTGGNPCRCKVVGPTLGLVAFLAAGVVEWPVGALVYIFKHAKGRRIMGHPATHVYPKVSRSIPI

SEQ ID NO: 3836 - protein, 816 aa, Zea mays
  misc_feature (92)..(92): Xaa can be any naturally occurring amino acid
  misc_feature (123)..(123): Xaa can be any naturally occurring amino acid
  misc_feature (159)..(159): Xaa can be any naturally occurring amino acid
  misc_feature (183)..(183): Xaa can be any naturally occurring amino acid
  misc_feature (197)..(197): Xaa can be any naturally occurring amino acid
MAQILLHGTLHATIFEAESLSNPHRATGGAPKFIRKLVEGIEDTVGVGKGATKIYATVDLEKARVGRTRMISNEPVNPRWYESFHIYCAHMXAADVIFTVKIDNPIGASLIGRAYLPVQDLLXGEEIDKWLEICDEKREPVGDSKIHVKLQYFDVCKDXRNWARGVRSTKYPGVPYTFFSQRXQGCKVTLYQDAHVXPDNFVPRIQLADGKNYEPHRCWEDIFDAISKAQHLIYITGWSVYTEITLVRDTNRPKPGGDVTLGELLKRKASEGVRVLMLVWDDRTSVGLLKKDGLMATHDEETANYFHGTDVNCVLCPRNPDDSGSFVQDLQISTMFTHHQKIVVVDHEMPNQGSQQRRIVSFIGGIDLCDGRYDTQYHSLFRTLDTVHHDDFHQPNFEGGSIKKGGPREPWHDIHSRLEGPIAWDVLYNFEQRWRKQGGKDLLVRLRDLSDIIIPPSPVMFPEDRETWNVQLFRSIDGGAAFGFPETPEEAARAGLVSGKDQIIDRSIQDAYVNAIRRAKNFIYIENQYFLGSSYGWKPEGIKPEEIGALHLIPKELSLKIVSKIEAGERFTVYVVVPMWPEGVPESASVQAILDWQRRTMEMMYTDIAQALEANGIEANPKDYLTFFCLGNREVKQEGEYEPEEHPEPDTDYIRAQEARRFMIYVHTKMMIVDDEYIIIGSANINQRSMDGARDSEIAMGAYQPYHLATRQPARGQIHGFRMSLWYEHLGMLEDVFQRPESVECVQKVNEVAEKYWDLYSSDDLEQDLPGHLLSYPIGVTADGSVTELPGMENFPDTRARVLGNKSDYLPPILTT

SEQ ID NO: 3837 - protein, 181 aa, Brassica napus
MASSMLSSATVVSSPAQAAMVAPFTGLKSSAAFPVTRKTNTDITSIASNGGRVNCMKVWPPVGKKKFETLSYLPDLTDVELAKEVDYLLRNKWIPCVEFELEHGFVYREHGNTPGYNDGRYWTMWKLPLFGCTDSAQVLKEVQECKTEYPNAFIRIIGFDNNRQVQCISFIAYKPPSFTGA

SEQ ID NO: 3838 - protein, 471 aa, Chromobacterium violaceum ATCC 12472
MSKRYRTALVWLRRDLRLDDHAAFYHALKHSEAVLPVFVFDASILAALPRDDRRVDFIWQSAAALKAELNQLGGDLLIRHGLPQHEIPRLAAELGAEAVFCNRDYEPAARARDAEVAQRLAEQGVAFRDSKDQVIFETDEVLTGAGKPFSVFTPYKNAWLKKLTPFHLQAYPVRRYLDALMPREPQSMPSLADIGFLPSDLASLPVKAGAAGAEALFADFAGRIERYKAQRDFPGVKGVSYLSVHLRFGTLSIRRLAAYAWHDGGEGAMTWLSELIWRDFYQQVLWHRPDAAKHAFKPEYDALPFPNDPEWFDAWREGRTGYPLVDAAMRQLNRSGYMHNRLRMVAASFLVKDLLIDWRWGEQYFAEKLLDFDLAANNGGWQWAASTGCDAQPYFRIFNPVSQSEKFDPDGRFIRRYVPELAALPDKLIHAPWQAKPEQLMSAGVRLGRDYPHPIVDHAVQRELALALFKR

SEQ ID NO: 3839 - protein, 262 aa, Burkholderia fungorum LB400
MKARLDISDITIAGHAQDITLRSFHPFAHSAMPIVLYFHGGGFVKGSLDETSKPATLIAAQTPAWVIAVGYSLAPEFPFPAATEDAHLALEWAVGNARGYRADPNRIAAVGHDAGGNIAAGLAAIARDRGVRRLSAQALLAPLLDPSMTRLMEGQCPGRSDLAPEDCARSYRAYLPSANHRIHPYAAPLESRRLATLPPTLIATAEQDLVRGDGETYARELITAGVPVEMTRHGGVCHGELISHSPALDGVVEFLRKRLARD

SEQ ID NO: 3840 - protein, 363 aa, Triticum aestivum
  misc_feature (207)..(207): Xaa can be any naturally occurring amino acid
  misc_feature (211)..(211): Xaa can be any naturally occurring amino acid
  misc_feature (214)..(214): Xaa can be any naturally occurring amino acid
  misc_feature (253)..(253): Xaa can be any naturally occurring amino acid
MGSTAADMAASADEEACMYALQLVSSSILPMTLKNAIELGLLETLVAAGGKLLTPAEVAAKLPSTANPAAADMVDRMLRLLASYNVVSCTMEEGKDGRLSRRYRAAPVCKFLTPNEDGVSMAALALMNQDKVLMESWYYLKDAVLDGGIPFNKAYGMSAFEYHGTDPRFNRVFNEGMKNHSIIITKKLLEVYKGFEGLGTIVDVGGXGVGXTVXAITPPHSAIKGINFDLPHVISEAQPFPGVTHVGGDMHVXQKVPSGDPILMKWILHDWSDEHCATLLKNCYDALPAHGKVVLVECILPVNPEATPKAQGVFHVDMIMLAHNPGGRERYEREFEALAKGAGFKAIKTTYIYANAFAIEFTK

SEQ ID NO: 3841 - protein, 180 aa, Triticum aestivum
  misc_feature (112)..(112): Xaa can be any naturally occurring amino acid
NDRWCVQATEGMNIKEECKRWFTEMKWKKVHRFVVYKIDERTRAVLVDKVGGPGEGYDELVAALPGDDCRYAVFDFDFVSVDNCQKSKIFFIAWSPAASRIRAKILYATSKXGLRRVLEGVHYEVQATERSEMGSTHHQERAQFSDPPAKSFYMFGLPVPTIPVYYNPTDLIWAGGCLVV

SEQ ID NO: 3842 - protein, 240 aa, Triticum aestivum
  misc_feature (92)..(92): Xaa can be any naturally occurring amino acid
MGERVKGTVKWFNVTKGFGFISPDDGGEDLFVHQSSIKSDGYRSLNENDAVEFEIITGDDGRTKANDVTAPGGGALSGGSRPVEGGGDRGGXRGGYGGGGGGYGGGGGGYGGGGGGYGGGGGGYGGGGGGYGGGGYGGGGGGGRGCYKCGEEGHISRDCPQGGGGGYGGGGYGGGGGGGGGRECYKCGEEGHISRDCPQGGGGGGGYGGGGGRGGGGGGGGCFSCGESGHFSRECPNKAH

SEQ ID NO: 3843 - protein, 381 aa, Arabidopsis thaliana
MTNHLQDPLPTYPKPVLTKEEQEVDEKMVSLQAESIVNTVAFPMVLKAAFELGVIDTIAAAGNDTWLSPCEIACSLPTKPTNPEAPVLLDRMLSLLVSHSILKCRMIETGENGRTGKIERVYAAEPVCKYFLSDSDGTGSLVPLFMLLHTQVFFKTWTNLKDVILEGRDAFNSAHGMKIFEYINSDQPFAELFNRAMSEPSTMIMKKVLDVYRGFEDVNTLVDVGGGNGTVLGLVTSKYPHIKGVNFDLAQVLTQAPFYPGVEHVSGDMFVEVPKGDAVFMKWILHDWGDEDCIKILKNCWKSLPEKGKIIIVEFVTPKEPKGGDLSSNTVFAMDLLMLTQCSGGKERSLSQFENLAFASGFLRCEIICLAYSYSVIEFHK

SEQ ID NO: 3844 - protein, 311 aa, Sulfolobus tokodaii str. 7
MKREELLVEEIKDLTLEELKGYADFYKILDKVYGFTAESVVRGVKILKDMIKEADLRFLSFTANLVSTGLRGLFADLIKQGYFNVIITTGGTIDHDIARSFGGKYYKGLFEYDDSMLRELEIHRLGNILVPMESYGKVIEDVVRKYMNEIVSIKKEWPVYELLWEFGKRISDENSILKAAYEKKVPIIVPGIIDGSFGTNLFIYSQFTQLKLNLFEDMKLIKDLIFSCKKSGALIIGGGISKHHTIWWNQFKDGLDYAIYITTAQEYDGSLSGAKPREAISWNKIKPTSENVVIYGDATIILPILSASLLG

SEQ ID NO: 3845 - protein, 350 aa, Bacteroides thetaiotaomicron VPI-5482
MLAYTYIEHGKFELREKPEPKITDARDAIVRVTLGSICTSDLHIKHGSVPRAVPGITVGHEMVGVVEEVGAEVTSVRPGDRVTVNVETFCGECFFCHHGYVNNCTDPNGGWALGCRIDGGQAEYVRVPYADQGLNRIPDTVSDEQALFVGDVLATGFWATRISEITEKDTILLIGAGPTGICTLLCSMLKNPKRIIVCEKSPERIQFVREHYPDVLITTPENCKEFVLQNSDHSGADVVLEVAGTEDSFRMAWDCARPNAIVTIVALYDKPLLFPLPEMYGKNLTFKTGGVDGCDCAEILSLIEEGKIDTTPLITHRCSLNEIEEAYRIFENKLDGVIKVAIVCQTESNK

SEQ ID NO: 3846 - protein, 131 aa, Sulfolobus tokodaii str. 7
MSIQYTTVGDLKVGNYVVIDGEPCRVVEISKAKTGKHGSAKANIVAIGLFTGQKRTLMAPVDQQVEVPIIEKHIGQILADKGDTITIMDMENYETFDIEKPTDADIVDKIRPGAEVEYWEIMGRKKIVRVK

SEQ ID NO: 3847 - protein, 321 aa, Kineococcus radiotolerans SRS30216
MLVRIVYGGICGSDLHYAADGRNGAYVVTEPLVLGHEVVGVVERAGPDTPAAPPAGTRVAVHPATPCAPAGAAAPTGLHLRPGGTYLGSASTHPHTQGGFTGLLAVGVERLRELPAALPLRRAVLAEPLAVALHAVGRLEGRVAGARVLVSGAGPIGVLAVAALKRAGAAHVTAADLQELPLRVATAVGADEVVDLSRGGSLPEAGFDVVVEAAGVVPSLLAAIRAVRPGGSILQLGILPAGPQPVPVGELLSKEVALFGTQRFDTELDAAVELLAADDSLDAVVTDVFGIEDAAAAFARARDSANSSKTVLRITPDPDDA

SEQ ID NO: 3848 - protein, 373 aa, Haemophilus influenzae 86-028NP
MHGYNHPRLNAAAQNQLAKMSHIMFGGFTHDPAVELAQLLVQILPNGLDKIFFADSGSVAVEVAMKMAIQYQHAKGEVQRQKFATIRSGYHGDTWNAMSVCDPTTGMHHLFHHSLPVQYFLPQPNIPFNESWNDCVIEPLADLLKKKGSEIAALILEPVVQGAGGMYFYSPTYLVKAQALCKQYGVLLIFDEIATGFGRTGKLFAAEHAGISPDIMCIGKALTGGYLTLSASITTTEIAQIICSGEAKCFMHGPTFMANPLACAIAAESIRLLLESPWQQNIQRIEHSLKQQLSPLAEKDYVKEVRALGAIGVVEMKSAVNMKTLVPRFVEQGVWIRPFGKLVYVMPPFVIKDDELQKLTEGMILALIQEYEH

SEQ ID NO: 3849 - protein, 348 aa, Pseudomonas putida
MLAIRKTKAGPGGLSVDDVAAPKEAHSTDVLVKVEAAGICGTDLLIYKWGEFAKRMKLPTILGHEVSGVIEQVGSDVKGLRPGMRVSLESHLPCGTCYTCRRGWAHVCPKTRYPGVDFDGGFASFVVVPESVCWPVPCGIPPLQATMMEPFGLAVHASLEGSGVSGLNVLVSGCGPIGLMNIAAAKALGASKVIATDIHPLRLTAAAKMGADECINATEESVYKTVRSLLGERGVDVAIDYSGQAAALKELIQSITHGGELRLMGVPSHDILLNLEEWLFKGLIVRGLHGRRLYETWERSTSLLVTGRVDLSSLVSHRLPLSAAEDAFEMALNGQSLKILFEPNGSCI

SEQ ID NO: 3850 - protein, 183 aa, Streptococcus agalactiae
AIKQQTIFDIDNAKTEVEIDNLVHDAFSKMNATVAKFQKGLETNTPETPDTPKIPELPQAPDTPQAPDTPHVPESPKAPEAPRVPESPKTPEAPHVPESPKTPEAPKIPEPPKTPDVPKLPDVPKLPDVPKLPDAPKLPDGLNKVGQAVFTSTDGNTKVTVVFDKPTDADKLHLKEVTTKELA

SEQ ID NO: 3851 - protein, 371 aa, Senecio vernalis
MEESIKQASVMENLRSVVFKESESLEGTCAKIRGYDFNNGIDYSQILKSMVSTGFQASNLGDAIETVNQMLDWRLSHEQVTEDCSEEEKNPTYRESIKCKIFLGFTSNLISSGVRDIIRYLVQHHMVDVIVTTTGGIEEDLIKCLADTFKGEFSLPGAELRSKGLNRIGNLLVPNDNYCKFEDWIIPIFDQMLEEQKAKNVVWTPSKLIMRLGKEINNESSYLYWAYKNDIPVFCPGLTDGSLGDMLYFHTFRNPGLIVDVVQDIRAINSEAVHANPRKTGMIILGGGLPKHHICNANMMRNGADYAVFINTAQEFDGSDSGARPDEAVSWGKIRGSAKSVKVHCDATIAFPLLVAETFAAKREKSVEPSS

SEQ ID NO: 3852 - protein, 281 aa, Arabidopsis thaliana
MDIFDNSDLEYLVDEFHADFDDDEPFGEVDVTSESDSDFMDSDFDFELSESKTNNETSALEARNGKDIQGIPWESLNYTRDRYRENRLLHYKNFESLFRSREELDKECLQVEKGKNFYDFQFNTRLVKSTIAHFQLRNLVWATSKHDVYFMNNYSLMHWSSLLQRGKEVLNVAKPIVPSMKQHGSLSQSVSRVQISTMAVKDDLIVAGGFQGELICKKINEPEVAFCTKLTSADNDITNSVDIYNAPSGSLRVMTANNDCTVRLFDATNFALLNRLPFTGL

SEQ ID NO: 3853 - protein, 491 aa, Escherichia coli CFT073
MMSRMAEQQLYIHGGYTSATSGRTFETINPANGNVLATVQAAGREDVDRAVKSAQQGQKIWAAMTAMERSRILRRAVDILRERNDELAKLETLDTGKAYSETSTVDIVTGADVLEYYAGLIPALEGSQIPLRETSFVYTRREPLGVVAGIGAWNYPIQIALWKSAPALAAGNAMIFKPSEVTPLTALKLAEIYSEAGLPDGVFNVLPGVGAETGQYLTDHPGIAKVSFTGGVASGKKVMANSAASSLKEVTMELGGKSPLIVFDDADLDLAADIAMMANFFSSGQVCTNGTRVFVPTKCKAAFEQKVLARVERIRAGDVFDPQTNFGPLVSFPHRDNVLRYIAKGKEEGARVLCGGNVLKGDSFDNGAWVAPTVFTDCSDDMTIVREEIFGPVMSILTYESEDEVIRRANDTDYGLAAGIVTADLNRAHRVIHQLEAGICWINTWGESPAEIPVGGYKHSGIGRENGVMTLQSYTQVKSIQVEMAKFQSIF

SEQ ID NO: 3854 - protein, 81 aa, Zea mays
MKTSVVVVAALAAVLFLAQSYASLAGASGPRVIIVGAGMSGISAGKTLWEAGVRDLLILEATGRVGGRMHKHNFGGINVEI

SEQ ID NO: 3855 - protein, 497 aa, Ralstonia solanacearum
MTRTDLPPAPITLNDPALWRTQAFLAGAWTDADDGSTRDVTDPATGRVIGTVPAMGAAETRRAIEAAQAAQRAWRKVTARERARILRKLADLMLEHQQDLARILTAEQGKPLPEATGEIAYAASFIEWFAEEARRVYGDTIPAPQGDRRIVVNKEPIGVTAAITPWNFPIAMMTRKVGPALAAGCAMVVKPALETPYSALAFAELAARAGVPAGLLSIVTGDAQGIGGELTANPVVRKLSFTGSTAVGRLLMRQCADDVKKLSLELGGNAPFIVFDDADLDAAVEGAMVAKYRNAGQTCVCANRFYVQRGIYDAFAARLSEAVRALRVGNGAEPGVQQGPLIHQRAMDKVRAHVDNAVAQGARVLVGGKPHALSAQGGAFFEPTVIVDARPGMLVAHEETFGPLAALIPFDTEDEAVAAANDTEFGLAAYFYTRDLGRAWRVSEALESGMVGVNTGLISTAEAPFGGVKQSGLGREGSKYGIDEYLEIKYVCMAGLG

SEQ ID NO: 3856 - protein, 496 aa, Burkholderia cepacia R18194
MTIVTEAAQAARTQALAWINRGPKRLLIGGRWVDAASGNTFETINPATEQVLCRVAEADSADVDAAVIAARRAFDAPSWGGLSPHARTRALLKIADAIEQHVDELAAIESLDNGMPLWFALAAVTATIDIVRYYAGWCSKVLGTTIPSDGSTLIYTLREPLGVCGQIIPWNVPILMAAIKFANALCCGNTVILKPAELACLTSIRLAELIQETDLPPGVINVLPGYGPTAGAALAQHPGVDKIAFTGSTPVGKQITRDATLNLKKVTLELGGKAPNVIFADADIEKAVQAAVKTFCGNSGQVCSAGTRLFVQEGIHEQVAERVAQIAATWKAGDPFASDTKLGPLISAKQRDRVWSYIGVGQEGGATLRLGGDPWRGAGYFVEPTVFDNVRNGMRIAQEEIFGPVLSIIPFKDEGDAVLQANDTTYGLSAAVWTRDVARAHKVVRALKAGRLWINTFGESDPAMAFGGYKQSGWGREFGQESIDAYTQTKSIMLRM

SEQ ID NO: 3857 - protein, 543 aa, Glycine max
  misc_feature (127)..(127): Xaa can be any naturally occurring amino acid
TRPQKFGWVSLVSHLRLSVLLLSVSLGNSASLQENFVQCLNLNSDRTFPFNPLIYTPKSPSFTSVLDSSGKNQRLLVPSTPKPKFIFTPTRDSHVQAAVICSKKLGIHLRVRSGGHDFEGVSYVSEXESPFIVVDLIKLRDINVDIKSNTAWVQAGATTGELYYRIYEKSSLHGFPAGLCTSLGIGGHITGGAYGSMMRKYGLGVDNVLDAKIVDANGRILDRKAMGEDLFWAIRGGGGGSFGILLWWKVKLVPVPPTVTVFTVKKTLEQGATKILDKWQEVAPYIDENLFIRVIIQPSSDARNKTQRTIATSYNALFLGGARTLLQVMKTSFPELGLTIKDCLETSWIKSVLYIAGFPSDTPPEVLLKGKSTFKNFFKAKSDFVREPIPETGLEGLWQRLLVEDSPLMIWNPYGGRMSQFSESETPFPYRNGTLYKIQYFSLWQEGDKNAAKHIDWIRKLYNYMGPYVSSLPREAYVNYRDLDLGINTKNSTSYIQASAWGYRYYKNNFDRLVKIKTKVDPENVFRHEQSIPPLPKKVDLLV

SEQ ID NO: 3858 - protein, 489 aa, Burkholderia cepacia R18194
MSVNIPGFIEGNKKLLIGGQWVEPAGGEHIEAINPATGEVLCHIAKGGTQDVERAVAAARRAFEGPWSRFTPHERRKLLLRVHDVILDHFDELALIETLDMGAPLARTRGYKEWLSQLLQFYASQTGAGTVQAAPMSIAPGFTALKHLMPVGVVGGIIPWNGPLMGLWWIYGPALATGCTAVLKPAEDASLSSLRVSELMMEAGVPDGVINVVTGYGKDVGQALAEHPDVDRVAFTGSVGTAQAIVRASAGNLKRLQLELGGKSPDIVFADADLDKAVPGAAMGVFTNTGQVCVAGTRIFVQRAIHDEFVQRIAAFAKTIRIGDGLSPDTQIGPLISQRQLERVMHYVDIGGKEATLVHGGQRPGGELARGYFVEPTVFANVRNDMTIAREEIFGPVASVIPFDTMEEALQLANDTPYGLAGGVWTSSLSTAHKVSQGIRSGTVWVNCYGVIDPAVGFGGTKMSGYGWKGGKEHVESFLYPKATYINLG

SEQ ID NO: 3859 - protein, 159 aa, Listeria monocytogenes str. 1/2a F6854
MNVHDFSEKAMNGKEIALSDYKGKVLLIVNTASKCGLTPQLEGLEAMYKKLGGDNFEILGFPCNQFLRQDPGSDEEILEFCQMNYGVTFQMFSKIKVKGKDASPLYKYLTEQTGGKKVEWNFAKFLIDENGEVVERFPSKMKPEDFEDKVEALVAKVNN

SEQ ID NO: 3860 - protein, 100 aa, Glycine max
  misc_feature (76)..(76): Xaa can be any naturally occurring amino acid
MSGVWVFKNGVVRLVENHGSDRWVLAHTASNEIITPYAVLEHKPSSLGWERYYDDPDLLQFHKRSTVHLISLPRDXNKFRSMHMYDIVVKNKNYFEVRDM

SEQ ID NO: 3861 - protein, 462 aa, Zea mays
FIRHHRTATEEGGMAAAGGGPRRTTRVGPYELGKTVGEGSFAKVKIAKDTRNAATCAIKVLDRNHVLRHKMVEQIKREIATMKLIRHPNVVQLHEVMASKSKIYMVLEFVEGGELFDKIVNSGRLGEDEARIYFHQLINAVDYCHSRGVYHRDLKPENLLLDSNGALKVSDFGLSAFAPQTNEDGLLHTTCGTPNYVAPEVLADKGYDGMAADVWSCGIILFVLMAGYLPFDDANLMRLYKLVKICQAYFSCPPWFSSGAKKFIKRILDPNPDTRITIAEILEDEWFKKDYKPPRFEQGEDVSLDDIDAAFNDSEDRLVAEKREKPESMNAFALISRSQGFNLGNLFEKEMMGMVKRETSFTSQCTAQEIMTKIEDACGPLGFNVRKQNYKMKLKGDKSGRKGHLSVATEVFEVAPSLHMVELRKTGGDTLEFHSFYKNFSSELKDIVWKAESDANNKQTNK

SEQ ID NO: 3862 - protein, 81 aa, Triticum aestivum
MALGHELVHHGYSQSSKWSTDISPNLEWKLIYVGSAEDENYYQQFESVLVGPVNVGTYHFVLEVVERCRLGSGVVRSTTVQ

SEQ ID NO: 3863 - protein, 186 aa, Carica papaya
FGSVYKGFIDDKLRPGLKAQPVAIKLLDLDGSQGHKEWLTEVIFLAQLRHPHLVKLIGYCCEEEHRLLVYEYMPRRSLENQLFRRYSVSLPWSTRMKIAHGAAKGLEFLHEAENLVIYRDFKASNILLDADYNPKLSDFGLAKDGPEGDDTHVSTRVMGTQGYAAPEYIMTGSHLTAKSDIYSFGI

SEQ ID NO: 3864 - protein, 320 aa, Rubrivivax gelatinosus PM1
MPSAAFQPPQHGLTPTMRDVLDRMRRAGRPPLHTMSVDAAREAYRLGAEILDLPRVALARVEDLLVPARDGHLLPARLYAPSSARLPVLLYLHGGGFTIGSLDTHDSLCRQLALQGGAAVLSLDYRLAPEHRFPAAVDDAWDALQWVAREGGARLGLDDTRLAVGGDSAGGTLSAVCALMARDAALPLALQLLFYPGTAARQDSDSHRRFAEGVLLARPLIDWFFGHYIATEHREDWRFAPLLAPDHGGVAPAWIGLAECDPLVDEGVAYGDVLRAAGVPVQLELWRGVVHDFIKMGRAVPEARQAHAAAARALREAFSP

SEQ ID NO: 3865 - protein, 303 aa, Neurospora crassa
MPLEAVMIVVDNSESSRNGDYIPTRYDAQADAVNIIFQNVVQGNPESSVGLMSMAGRGPEVLVTLTTDQGKILEGLHRTKKNIRGSAQLSRAIQVAWLALKHRQNKSQRGRIVIFVCSPIEEEESDLVKLAKKMKKNNTSVDFVLFGDIDDENQKKLEAFNREVKSGEGSNMVVIPPSSKLLSDQLISTPILLGEAAAGGSGGAGGDAGGAANEDFPFGIDPSVDPELALALRMSMEEEKARQEKRAKEEAEAAKKASLEDVKEEAGESEPLLGKDGEPSGSGSKKDGDKPGKSDDGDKMDTS

SEQ ID NO: 3866 - protein, 694 aa, Zea mays
MPALAVDAATPVAHAFASCDAARFPAPPVVGPAAAAEAAPWSADLSAALYNVDGWGAPYFFVNDDGDVAVRPHGAATLPGQEIDLAKVVAKAAGPRAGGGLGLPLPLLVRFPDVLRHRVETLNAAFGYAVRSTGYGSRYQGVYPVKCNQDRYVVEDIVEFGAPFGFGLEAGSKPELLLAMSCLAARGGLDALLICNGYKDDGYVSLALMARSMGLNTVIVLEQEEELDIVVEASRRLGVRPVVGMRAKLRTKHAGHFGSTSGEKGKFGLSAAQILSVVTKLKAIGMLDCLQLLHFHIGSQIPTTALLSDGVGEAAQIYCELARLGADMRVIDVGGGLGIDYDGTHSAQTDMSVAYSLEEYAGAVVAAVGRVCDRKGVQHPIICSESGRALVSHHSVLVFEAFSATAPGRLDAATAYLLDELTDDCRADYRNVMAAAVRGDYDTCGLYADQLKRRSAEQFKEGVLGLEHLAAVDAFCELVARGMGAPEPPRTYHINLSVFTSLPDMWAIGQQFPIIPIQRLQERPAVDGVLSDLTCDSDGKVSEFIGGRHSLPLHELPTHATRGYYLGMFLGGAYQEALGGLHNLFGGPSVVRVSQCDGPHCFAVTRAAAGPSCADVLRAMQHEPEVMYEVLKQRTDGATAAALARAFGAMPYLVFDPEAAVMSGGESSDSERSAAGAAEEEDDEEWEFMRGLTV

SEQ ID NO: 3867 - protein, 512 aa, Arabidopsis thaliana
MTSSFLLLTFAICKLIIAVGLNVGPSELLRIGAIDVDGHFTVHPSDLASVSSDFGMLKSPEEPLAVLHPSSAEDVARLVRTAYGSATAFPVSARGHGHSINGQAAAGRNGVVVEMNHGVTGTPKPLVRPDEMYVDVWGGELWVDVLKKTLEHGLAPKSWTDYLYLTVGGTLSNAGISGQAFHHGPQISNVLELDVVTGQFGIITRARISLEPAPQRVRWIRVLYSSFKVFTEDQEYLISMHGQLKFDYVEGFVIVDEGLVNNWRSSFFSPRNPVKISSVSSNGSVLYCLEITKNYHDSDSEIVDQEVEILMKKLNFIPTSVFTTDLQYVDFLDRVHKAELKLRSKNLWEVPHPWLNLFVPKSRISDFDKGVFKGILGNKTSGPILIYPMNKDKWDERSSAVTPDEEVFYLVALLRSALTDGEETQKLEYLKDQNRRILEFCEQAKINVKQYLPHHATQEEWVAHFGDKWDRFRSLKAEFDPRHILATGQRIFQNPSLSLFPPSSSSSSAASW

SEQ ID NO: 3868 - protein, 383 aa, Actinobacillus pleuropneumoniae serovar 1 str. 4074
MKNITKFAVTLLAGLVITACGSKNHSIDIKPKSDKPKQEQPKQPQPKQDQPKQEQPKQEQPKQEQPKQEQPKQEQPKQEQPKQEQPKQDQPKQEQPKQEQPKQDQPKQEQPKQDQPKQEQPKQDQPKQEQPKQDQPKQDQPKQDQPKQDQPKQDQPKQEQPKQDQPKDKTSGGVFIVEGVSKNLPQLTKEKLTDANLNSIKVDGIEIKFADATKAKGNWKVSPDNSLVVCCDKYSSVRFGVYESKGKSYSFYNGNATAEMPTSGKFTYTGDAYLLASVVGNGAESIGTSKFEADFGTKKLTGTLTFDKLKDSKNVDIDSKISGNSFTGKATFDSFKGTDAIVEGKFYGENAKELAGAFDSAKEKGAKLGDKSWGGVFGAKQQK

SEQ ID NO: 3869 - protein, 477 aa, Mesorhizobium loti MAFF303099
MSHNLQFYVDGAWVDPVVPNTLDVIDPSNEDAFAQISLGSKADVDKAVAAAKRAFNSFGFTSVEERLDILNRVIEVYKKRSKDLALAVSREMGAPRQMALDSQVGVGLAHLEKMAEVLRTFQFRHVKGSALIVKEPIGVVGLITPWNWPLNQITCKVGPALAAGCTMVLKPSEIAPLDAIIFAEIIDEAGVPKGVFNLVNGDGPGVGQALSSHPDVDMMSFTGSTRAGILVAKAAADTVKRVHQELGGKSANILFPDVDLARAVTKGVAGCFGNSGQSCNAPTRMFVPRDRHDEAAGYAKAAAEKFVVGPADGANTKLGPVVSQMQFDKIQDLIQAGIDEGATLVAGGPGRPAELNRGYYVRPTVFADVTHDMRIAREEIFGPVLAILPYDTVEKAVEQANDTVYGLASYIQAKDIQKARDVAARMRSGNVYINYPAWDAGLPFGGYKQSGNGREYAEYGLEDFLEIKGIAGYEAAE

SEQ ID NO: 3870 - protein, 218 aa, Ipomoea batatas
MGRGKVEIRRIEKSTNRRVTFWKRRNGLLKKAMEMGILCDAEVGLMIFSSTGKLHEFATTSIRSVIERYNKTQGDSLQSPLDPTLELKFWQIEVAILRQQLHNMQEDHRKVMGEVYGLSVKDLQNLENQLEMSLSGIRMKKEQILIEQIQELTHKQGSFVHQENFELFNKFQAYGTSDPNAVNGDTISPYDFTISEESQGHIHFQLPQNFSDLARALY

SEQ ID NO: 3871 - protein, 404 aa, Chromobacterium violaceum ATCC 12472
MLSEQTRSLVKATVPVLQQHGVALTSHFYRRMFEHNPELKNVFNQGHQHSGQQQQALAMAVLAYARHIDDPSPLLPVLTRVAHKHVSLGIRAEHYPIVGKHLLASIRELLGEAAGDDLIQAWAEAYGLLADTLIGIENGMYGDATSADGGWSGWRPFRVAKKEIESEEIASFYLEPSDGGALPAFKPGQYVSVKRFVAEWGLSQPRQYSLSDAPNGEYLRISVKREDAAQGKPAGRVSNLLHREVQVGDVLELSAPQGDFFLHEERDGPAVLISAGVGQTPMQAMLGQLLKRGGREVRFLHAARHGGAHAMGAKVRQLADRHPQLKVHVCYETPRAQDAIGVDYQAAGRLNLADVKGIALLPDADYYLCGPLGFMRAQRDSLRGLGVAADRIHYEVFGSHPGDD

SEQ ID NO: 3872 - protein, 571 aa, Glycine max
KALNKGTAFSMTERDRLDLRGLLPPNVMSPDLQIERFMVDLKRLEVQARDGPSDPNALAKWRILNRLHDRNETMYYKVLIAKIEEYAPIVYTPTVGLVCQNYSGLFRRPRGMYFSAEDRGEMMSMVYNWPAEQVDMIVVTDGSRILGLGDLGVQGIGIAIGKLDLYVAAAGINPQRVLPVMIDVGTNNEKLLEDPLYLGLQQHRLDGDDYLAVVDEFMEAVFTRWPNVIVQFEDFQSKWAFKLLQRYRNTYRMFNDDVQGTAGVAIAGLLGAVRAQGRPMIDFPKQKIVVAGAGSAGIGVLNAARKTMARMLGNNEVAFESAKSQFWVVDAQGLITEGRENIDPDALPFARNLKEMDRQGLREGASLVEVVKQVKPDVLLGLSAVGGLFSKEVLEALKGSTSTRPAIFAMSNPTKNAECTAEEAFSILGDNIIFASGSPFSNVDLGNGHIGHCNQGNNMYLFPGIGLGTLLSGARIVSDGMLQAAAERLATYMSEEEVLKGIIFPSTSRIRDITKQVATAVIKEAVEEDLAEGYHGMDARELQKLSEDEIAEYVQNNMWSPEYPTLVYKKE

SEQ ID NO: 3873 - protein, 195 aa, Streptococcus agalactiae
AIKQQTIFDIDNAKTEVEIDNLVHDAFSKMNATVAKFQKGLETNTPETPDTPKIPELPQAPDTPQAPDTPHVPESPKTPEAPHVPESPKTPEAPHVPESPKTPEAPHVPESPKTPEAPKIPEPPKTPDVPKLPDVPKLPDVPKLPDAPKLPDGLNKVGQAVFTSTDGNTKVTVVFDKPTDADKLHLKEVTTKELA

SEQ ID NO: 3874 - protein, 245 aa, Hordeum vulgare subsp. vulgare
MAGEDATRAATEEELSSVAEAAPVTAQRPVRSDLEKYIPKPYLARALVAPDVYHPQGSKERGHEHRHRSVLQQHVAFFDMDGDGVIYPWETYQGLRALGFNMIVSFVIVIIIHATLSYTTLPTGYRLSLPFYIDNIHRAKHGSDTATYDTEGRYMPVNFENIFSKNARWSPDKLTFREIWTMTDDQRQANDPFGWVASKAEWILLYMLAKDEEGNLPREAIRRCFDGSLFEFIADERRQAHGKQY

SEQ ID NO: 3875 - protein, 195 aa, Streptococcus agalactiae
AIKQQTIFDIDNAKTEVEIDNLVHDAFSKMNATVAKFQKGLETNTPETPDTPKIPELPQAPDTPQAPDTPRVPESPKTPEAPHVPESPKAPEAPRVPESPKTPEAPHVPESPKTPEAPKIPEPPKTPDVPKLPDVPKLPDVPKLPDAPKLPDGLNKVGQAVFTSTDGNTKVTVVFDKPTDADKLHLKEVTTKELA

SEQ ID NO: 3876 - protein, 118 aa, Oryza sativa (indica cultivar-group)
MARAQLVLVALVAAALLLAGPHTTMAAISCGQVNSAVSPCLSYARGGSGPSAACCSGVRSLNSAASTTADRRTACNCLKNVAGSISGLNAGNAASIPSKCGVTIPYTISPSIDCSSVN

SEQ ID NO: 3877 - protein, 395 aa, Burkholderia fungorum LB400
MESLKTGTDTLFLLLGAGMVLAMHAGFAFLELGTVRKKNQVNALVKILVDFSVSTIAYFFIGYAIAYGVQFFGSAESLAAHNGYALVRFFFLLTFAAAIPAIVSGGIAERSKFNPQLFATFVLVGFIYPFFEGIAWNGRFGIQNWLAEMFGAQFHDFAGSVVVHAFGGWVALPAVLLLGARHGRYHRDGGIAAHPPSNIPFLALGAWVLAVGWFGFNVMSAQTVDKISGLVAVNSLMAMVGGTLTAWLAGRNDPGFSYNGPLAGLVAVCAGSDIMHPLGALVTGGIAGVLFVYMFTCVQNRWRIDDVLGVWPLHGLCGAWGGLAAGIFGLRALGGMGGVSFGAQLVGTLGGIVVATLGGTLVYGAIRLTVGLRLDQEDEYNGADLSIHKISATPE

SEQ ID NO: 3878 - protein, 97 aa, Glycine max
  misc_feature (72)..(72): Xaa can be any naturally occurring amino acid
  misc_feature (86)..(86): Xaa can be any naturally occurring amino acid
MASSMISSPAVTTVIRAGAGMVARFTGLKSMAGFRSSKTINDITSIATNGGRVHCMQVWSPVGNKLFETLSXLPFLDDVQLAHELXYLLMNGWIPCL

SEQ ID NO: 3879 - protein, 195 aa, Streptococcus agalactiae
AIKQQTIFDIDNAKTEVEIDNLVHDAFSKMNATVAKFQKGLETNTPETPDTPKIPELPQAPDTPQAPDTPHVPESPKAPEAPRVPESPKTPEAPHVPESPKTPEAPKIPEPPKTPDVPKLPDVPKLPDVPKLPDVPKLPDVPKLPDAPKLPDGLNKVGQAVFTSTDGNTKVTVVFDKPTDADKLHLKEVTTKELA

SEQ ID NO: 3880 - protein, 106 aa, Rickettsia felis
NMLKEIGSSENIPKYIAKAKDKNDPFRLMGFGHRVYKNYDPRAAVLKETCKEVLKELGQLENNPLLQIAIELEAIALKDEYFIERKLYPNVDFYSGIIYKAMGIPS

SEQ ID NO: 3881 - protein, 195 aa, Streptococcus agalactiae
AIKQQTIFDIDNAKTEVEIDNLVHDAFSKMNATVAKFQKGLETNTPETPDTPKIPELPQAPDTPQAPDTPHVPESPKAPEAPRVPESPKTPEAPHVPESPKAPEAPRVPESPKTPEAPHVPESPKTPEAPKIPEPPKTPDVPKLPDAPKLPDGLNKVGQAVFTSTDGNTKVTVVFDKPTDADKLHLKEVTTKELA

SEQ ID NO: 3882 - protein, 510 aa, Candida albicans SC5314
MGRATIKSGSINLLNTIIGAGILAMPYGLKNNGLLFGCILIIWSSLTSSMGLYLQNKVAKYTGQRGSVSYFSLSQLTYPNLSILFDSAISIKCFGVGVSYLVVIGDLMPKIVESLVGGGNINSDSLLMARNFWITIFMIVIVTPLSYLKKLDSLKYTSILALFSVGYLICLVVAHYFTTPTTSPSGGGGGDDDDIVYHYIGPISLKSTLSSFPIFVFAYTCHQNMFAIINELKPSDTDGSQTRQSNLIIRNAISIACLSYLIVGIFGYLTFGNSVNANIITMYPHNSISSLIGRLCIVVMVSLSFPLQCHPCRGSINHVIHFCTHGVQQSKFRSTTTNNNYNNGDQHGYTSLSSDIESLQSIGGNDTTAGSIGSIGGGDSVVGDADESFISTTPVEGAQDTDGHDPIIVPMTTKKFYIITTVIVVLSYLVAISVTSLAHVLAFVGSTGSTSISFILPGLFGYLLIKPIEGNTSLNNLEKFCKYGGLFLAIWGILVMIVCLSATIFLGATH

SEQ ID NO: 3883 - protein, 513 aa, Zea mays
MGNCCPGSSSSAEPAPPQPPDPSGSSRPVASPASVSPTAAPAPARPPAPIGPVLGRPMEDVSTIYTVGKELGRGQFGVTTLCTHKATGHRFACKTIAKRKLSTKEDVEDVRREVQIMYHLSGQPGVVELKGAYEDKGSVHLVMELCAGGELFDRIIARGHYTERAAASLLRTIVEIVHTCHSMGVIHRDLKPENFLLLSKDEDAPLKATDFGLSVFRDIVGSAYYIAPEVLKRSYGPEADIWSIGVIVYILLSGVPPFWAESEHGIFNSILRGQVDFTSDPWPRISPSAKDLVRKMLTPDPKKRISAYDVLNHPWIKEDGEAPDTPLDNAVLGRLKQFRAMNQFKKAALRVIAGCLSEEEIRGLKEMFKSMDSDSSGTITVDELRRGLANKGTKLSEAEVQQLMEAADADGNGTIDYEEFITATMHMNRMDRDEHLYTAFQYFDKDNSGYITMEELEQALREKGLLDGRDIKEIVAEVDADNDGRINYTEFAAMMRKGDPEPSNPKKRRDIVL

SEQ ID NO: 3884 - protein, 201 aa, Streptococcus agalactiae
AIKQQTIFDIDNAKTEVEIDNLVHDAFSKMNATVAKFQKGLETNTPETPDTPKIPELPQAPDTPQAPDTPHVPESPKAPEAPRVPESPKTPEAPHVPESPKAPEAPRVPESPKTPEAPHVPESPKTPEAPKIPEPPKTPDVPKLPDVPKLPDAPKLPDGLNKVGQAVFTSTDGNTKVTVVFDKPTDADKLHLKEVTTKELA

SEQ ID NO: 3885 - protein, 482 aa, Oryza sativa (japonica cultivar-group)
MQKEALAMVSSDVNFPKGHFPDYKIGPNNQIIDPEEIHEAVPLKEIVAKETAQLLEQRRRLSVRDLKEKFEKGLSGASKLSEEAKRREAASLDRQVLLKKLRDVLDTLKGRVAGRNRDDADEAISLVEALAVQLTQREGELIYEKAEVKKLASFLKQATEDARKVAEEERALALAEIEKARTAIAIVEKGLQEHDAASSSREKEEIEGLRKEVREARRIKMLHQPSKVMDMEFELKALRTLIAEKNQLCNQLMKELAMIKRLEEDSSDLYDLEGSDILGSQFCIIPRFDDAPDISSCPTQWYRVISGGNRNLILGATKPTYAPEPFDVGRLLQAEIVLNAEKVTIQTMGPINPAAGLEHYVESLMKRADVEFNVVVTQMNGNDYSSNSVHAFHIGKMRIKLRKGWSTKARESYSTTMKLCGSRGGGNAAATAVFWQARKGLSYTLAFETDRDRNAAIMLARKFASNCNITLTGPGDEVHAGS

SEQ ID NO: 3886 - protein, 230 aa, Saccharum hybrid cultivar CP65-357
MAAPRRLSSCCLLFAVLLGAVLATATAFFDEAAAAGVGLGHGARFARKHGRAAAELPQPEPQPKPEPKPEPQPQPEPLPKPEPQPKPTPKPEPKPKPEPVPKPKPEPKPEPEPKPHPKPEPKPEPEPKPEPKPEPKPEPKPEPKPEPLPKPEPQPEPKPEPKPEPVPKPEPKPEPKPEPKPEPKPEPKPEPLPKPEPEPKPEPKPEPLPKPEPKPEPKPEPKPEPLPKPE

SEQ ID NO: 3887 - protein, 198 aa, Picea mariana
MSTCKFIKCVTVGDGAVGKTCMLISYTSNTFPTDYVPTVFDNFSANVVVDGNTVNLGLWDTAGQEDYNRLRPLSYRGADVFILAFSLISKASYENIMKKWLLELRHFAPGVPIVLVGTKLDLRDDKQFFTDHPSAVPITTAQGEELKKQIGAAAYIECSSKTQQNIKAVFDSAIRVVLQPPKVKRKKKRKSHKTCSIL

SEQ ID NO: 3888 - protein, 250 aa, Manihot esculenta
MPKNYPKVSEEYQKAIDKARRKLRGFIAEKGCAPLMLRIAWHSAGTYDVKTNTGGPFGTMRHAAEQGHAANNGLDIAVRLLEPIKEQFPILSYADFYQLAGVVAVEITGGPDIPFHPGREDKPEPPPEGRLPNATKGADHLREVFGKTMGLTDKDIVVLSGGHTLGRCHKERSGFEGPWTPNPLIFDNSFFQVLLDEPTEDLLQLPTDSVLVTDPVFRPYVEKYAADEEAFFADYAESHMKLSELGFAEA

SEQ ID NO: 3889 - protein, 112 aa, Bartonella washoensis
ANEACLKMLQEIGSVKRIPEFIARAKDKNDPFRLMGFGHRVYKNYDPRAKIMQQTCHEVLKELNIQDDPLLDIAIELENIALNDEYFVEKRLYPNVDFYSGITLKALGFPTE

SEQ ID NO: 3890 - protein, 440 aa, Bordetella pertussis Tohama I
MSNRETEIRNLQKDWAENTRWQGIKRAYSAEDVIRLRGSVAVEHSLARRGATRLWDSLHSEPFVNSLGALTGNQAMQQVKAGLKAIYLSGWQVAGDANLAGEMYPDQSLYPANSVPQVVRRINNALARCDQIQWMEGKNPGDQDYIDYYAPIVADAEAGFGGVLNAFELMKAMIEAGAAGVHFEDQLASVKKCGHMGGKVLVPTREAVSKLVSARLVADVMGTPTILLARTDADAADLVTSDVDENDRPFITGERTVEGFFRTRAGLDQAISRGLAYAPYADLIWCETSTPNLEYARKFAEAVHRQFPGKLLAYNCSPSFNWKKNLDDGTIAKFQRELGAMGYKFQFITLAGFHALNYGMFELAHGYARRQMSAFVELQQKEFAAAELGFTAVKHQREVGTGYFDAVTQTIEGGQSSTTALTGSTEEVQFEQGGQAVKAA

SEQ ID NO: 3891 - protein, 389 aa, Escherichia coli CFT073
MSDTTILQNSTHVIKPKKSVALSGVPAGNTALCTVGKSGNDLHYRGYDILDLAEHCEFEEVAHLLIHGKLPTRDELAAYKTKLKALRGLPANVRTVLEALPAASHPMDVMRTGVSALGCTLPEKEGHTVSGARDIADKLLASLSSILLYWYHYSHNGERIQPETDDDSIGGHFLHLLHGEKPSQSWEKAMHISLVLYAEHEFNASTFTSRVIAGTGSDMYSAIIGAIGALRGPKHGGANEVSLEIQQRYETPGEAEADIRKRVENKEVVIGFGHPVYTIADPRHQVIKRVAKQLSQEGGSLKMYNIADRLETVMWESKKMFPNLDWFSAVSYNMMGVPTEMFTPLFVIARVTGWAAHIIEQRQDNKIIRPSANYVGPEDRQFVALDKRQ

SEQ ID NO: 3892 - protein, 67 aa, Triticum aestivum
MDNRSGMPQNSIQHQPAEEVIDEVVKEAINKPWLPLPLGLKPPSTDSVLAELSRQGISTIPPRNQRL

SEQ ID NO: 3893 - protein, 329 aa, Chlamydophila pneumoniae AR39
MPMSNQFDQLKKLSTIVCDSGDPELVKASGSQDATTNPSLILKVAQEPKFQELLNEAVVWGIRQNGDDLQTLSFILDKIQVNFALEIIKNIPGRISLEIDARLSFNVEAMVQRAVFLSQLFEAMGGDKKRLLVKIPGTWEGIRAVEFLEAKGIACNVTLIFNLVQAIAAAKAKATLISPFVGRIYDWWIAAYGDEGYSIDADPGVASVSNIYAYYKKFGIPTQIMAASFRTKEQVLALAGCDLLTISPKLLDELKKSQHPVKKELDPAEAKKLDVQPIELTESFFRFLMNEDAMATEKLAEGIRIFAGDTQILETAITEFIKQIAAEGA

SEQ ID NO: 3894 - protein, 420 aa, Oryza sativa
MYGRMPKKSNNTKYYEVLGVSKTATQDELKKAYRKAAIKNHPDKGGDPEKFKELAQAYEVLNDPEKREIYDQYGEDALKEGMGGGSSSDFHSPFDLFEQIFQNRGGFGGRGHRQKRGEDVVHTMKVSLEDLYNGTTKKLSLSRNALCTKCKGKGSKSGAAATCHGCHGAGMRTITRQIGLGMIQQMNTVCPECRGSGEMISDKDKCPSCKGNKVVQQKKVLEVHVEKGMQHGQKIVFQGEADEAPDTVTGDIVFVLQLKDHPKFKRKFDDLFTEHTISLTEALCGFQFVLTHLDGRQLLIKSNPGEVIKPGQHKAINDEGMPQHGRPFMKGRLFVEFNVEFPEPGALTPGQCRSLEKILPPRPRNQLSDMELDQCEETTMHDVNIEEEMRRRQQHRRQEAYDEDDDEDAGAGPRVQCAQQ

SEQ ID NO: 3895 - protein, 495 aa, Pseudomonas aeruginosa PAO1
MSIAIDPSVSAFLRSPHGLLIDGESGPARSGADMPLYDPATGAELARVARAGAEDVDRAVAAARRAFEGNWAGQRPADRERLLLRLAERIEAHGEQLAQLETLNNGKSINLSRALEVGASVEFIRYMAGWATKIEGRSLDLSIAAVPGARYRAYTVPEPVGVVGAIVPWNFPLLMAIWKIVPALACGCTVVLKPADETPLTALRLGQLCLEAGIPPGVVNIVTGTGAEAGAALAAHPGIDKLAFTGSTPVGKLIGHAAVENMTRFSLELGGKSPVIILDDTSLDMAAAGSAGAIFFNQGQVCTAGSRLYVQRKRFDQVLERLAAIAGDLSIGPGLDPTTQINPLVSARQQERVLGMIESGVAEGASVVCGGARQGETGFYVQPTILADVTPGMQVVREEIFGPVLVATPFDDLDEAVRLANDSIYGLGASIWSNDLRQVMDLVPRIKAGTVWVNAHNLLDPSMPFGGFKQSGIGREMGHAAIEAYTENKSVCIAY

SEQ ID NO: 3896 - protein, 511 aa, Zea mays
  misc_feature (55)..(55): Xaa can be any naturally occurring amino acid
  misc_feature (66)..(66): Xaa can be any naturally occurring amino acid
  misc_feature (108)..(108): Xaa can be any naturally occurring amino acid
  misc_feature (177)..(177): Xaa can be any naturally occurring amino acid
  misc_feature (431)..(431): Xaa can be any naturally occurring amino acid
  misc_feature (500)..(500): Xaa can be any naturally occurring amino acid
MMASQAMVPLRQLFVDGEWRPLALGRRLPVVNPTTEAHIGEIPAGTTEDVDPAVXASSRAALKRNXRGRDWARAPGAVRARDLRAIVAKGIERKQELAKLEALDCGKXYDEAAWDMDDVAGCFEYFADQAEALDKRQNSPVSLPMETFKCHLRREPIGVVGLITPWNYPLLMATWKXVAPALAAGCTAVLKPSELASVTCLELADICKEVGLPSGVLNIVTGLGPDAGAPLSAHPDVDKVAFTGSIETGKKIMASAAPMVKPVTLELGGKSPIVVFDDVDIDKAVEWTLFGCFWTNGQICSATSRLLIHTKIAKKFNERMVAWAKNIKVSDPLEEGCRLGPVVSEGQYEKIKKFISNAKSQGATILTGGVRPAHLEKGFFIEPTIITDITTSMEIWREEVFGPVLCVKEFSTEDEAIELANDTQYGLAGAXVISGDRERCQRLSEEIDAGCIWVNCSQPCFCQAPWGGNKRSGFGRELGEGGIDNYLSVKQVTEYISDEXPWGWYQSPSKL

SEQ ID NO: 3897 - protein, 122 aa, Rickettsia australis
AHGGANEAVINMLKEIGSSENIPKFIAKVKDKNDPFRLMGFGHRVYKNYDPRAAALKETCKAVLKELGQLENNPLLQIAIELEAIALKDEYFIERKLYPNVDSHSGIIYKAMGIPSQMSTVL

SEQ ID NO: 3898 - protein, 172 aa, Escherichia coli
DAAVEKAYKGERKISWMEIYTGEKSTQVYGQDVWLPAETLDLIREYRVAIKGPLTTPVGGGIRSLNVALRQELDLYICLRPVRYYQGTPSPVKHPELTDMVIFRENSEDIYAGIEWKADSADAEKVIKFLREEMGVKKIRFPEHCGIGIKPCSEEGTKRLVRAAIEYAIAND

SEQ ID NO: 3899 - protein, 183 aa, Triticum aestivum
  misc_feature (130)..(130): Xaa can be any naturally occurring amino acid
MAPTVMASSATSVAPFQGLKSTAGLPVSRRSNGASLGSVSNGGRIRCMQVWPIEGIKKFETLSYLPPLSTEALLKQVDYLIRSKWVPCLEFSKVGFIFREHNASPGYYDGRYWTMWKLPMFGCTDATQVXKQVEEVKERITLTPNVRINRIHNIVSACVSSSPARAQDRKAKQYSHRHLMVCL

SEQ ID NO: 3900 - protein, 409 aa, Triticum aestivum
  misc_feature (110)..(110): Xaa can be any naturally occurring amino acid
  misc_feature (128)..(128): Xaa can be any naturally occurring amino acid
  misc_feature (149)..(149): Xaa can be any naturally occurring amino acid
  misc_feature (200)..(200): Xaa can be any naturally occurring amino acid
  misc_feature (233)..(233): Xaa can be any naturally occurring amino acid
  misc_feature (263)..(263): Xaa can be any naturally occurring amino acid
  misc_feature (284)..(284): Xaa can be any naturally occurring amino acid
  misc_feature (326)..(326): Xaa can be any naturally occurring amino acid
  misc_feature (349)..(349): Xaa can be any naturally occurring amino acid
MVLESTMICIDNSEWMRNGDYSPSRFQAQADAVNLICGAKTQSNPENTVGVMTMAGKGVRVLVTPTSDLGKILACMHGLEVGPDANLPAAIQVAQKLALQHRQNERPQLXNYVFIGSPGTYDRKSGTXEAAEDRMKLGALDVPLGDLIXGESDDQAPEKLEALIAAVNSSDSSHIVHVPPGDHALSDVLISHSYLYWRRXGGSGFAASAAAAAATGATGYDFGVDPNVDPELXLALRLSMEEERARQEAIAKKAAEDNQGSGXSSSTDAIMAEAELTLNAPADXNADLLKDDDDAQLLQQALAMSMDEGASGAAAVADAAMAEAAXDDQDWALALQMSVQDAEAGWSIXYEAKVFEDSAFVTSILNSLPGVDPNDPSVKDLLASLHGQGEQEEKKDTEDKPDKPEDGKN

SEQ ID NO: 3901 - protein, 481 aa, Salmonella typhimurium LT2
MTIWENAMQYQLLINGVLVDGEGERQSVYNPATGEVILEIAEASPAQVDAAVQAADNAFAEWGQTTPKARAECLLKLADSIEQNALEFARLESQNCGKPLHCVINDEIPAIVDVFRFFAGAARCLSGLAAGEYLEGHTSMIRRDPIGVVASIAPWNYPLMMAAWKLAPALAAGNCVVIKPSEITPLTALKLAVLAKDIFPPGVLNVLFGRGQTVGDVLTGHEKVRMVSLTGSIATGEHILRHTAPAIKRTHMELGGKAPVIVFDDADLDAVAQGVRTFGFYNAGQDCTAACRIYAQRGIYDALVEKLGNAVSSLKMGAPEDESTELGPLSSLAHLKRVTAAVEEAKALSHIRVITGGSQTEGKGYYFAPTLLADAKQEDAIVQREVFGPVVSITVFDDEDQVLRWANDSRYGLASSVWTQDVGRAHRLSARLQYGCTWINTHFMLVSEMPHGGQKQSGYGKDMSLYGLEDYTLVRHIMVKH

SEQ ID NO: 3902 - protein, 203 aa, Pyrococcus horikoshii
MAHGPRYRVPFRRRREGKTNYRKRLKLLKSGKPRLVVRKSLNHHIAQIIVYDPKGDRTLVSAHTRELIRDFGWKGHCGNTPSAYLLGLLIGYKAKKAGIEEAILDIGLHPPVRGSSIFAVLKGAIDAGLNVPHSPEIFPEDYRIRGEHIAEYARMLKEQDEDRFRRQFGGYLEKGLDPEKLPEHFEEVKARIIEKFESEGARE

SEQ ID NO: 3903 - protein, 343 aa, Vibrio vulnificus CMCP6
MKIKALSKLKPEEGIWMTEVDKPVLGHNDLLIKIKKTAICGTDVHIYNWDEWSQKTIPVPMVVGHEYVGEVVGIGQEVRGFEIGDRVSGEGHITCGHCRNCRGGRTHLCRNTIGVGVNRTGCFSEYLVIPAFNAFKIPANISDDLASIFDPFGNAVHTALSFDLVGEDVLITGAGPIGIMAAAVAKHVGARHVVITDVNEYRLDLARKMGVTRAVNVAEQKLDDVMAELGMTEGFDVGLEMSGNPSAFNSMLKTMNHGGRIALLGIPPSDMGIDWNQVIFKGLVIKGIYGREMFETWYKMASLIQSGLDLTPIITHHFKVDDFQQGFDIMRSGMSGKVILDWE

SEQ ID NO: 3904 - protein, 284 aa, Picea mariana
KKAAGSSYQSESFGGRAIKSLARSINGNVCVKTGGLMQSDICRLRAVAEDGGLGVGEEEEGNDFPPDSQQPRILSVLSYALRRLVTRNDQFTPKNFVTVFHGVRTPGISIAKYLERVYKYTSCSPSCFVVAYIYIDRLVHRQPNFPVISLNIHRLLLTSLMIAAKMLDDAHYNNAFYARVGGVSIAELNRLEVDFLFRLDFRLKVTASVFESYCLHLEKEMLCGASGQRIDRTLPGFHRSTDVVSSDLDIVIREESKVQVSVRCPRCSPATTMVVGDHPDPPGR

SEQ ID NO: 3905 - protein, 534 aa, Glycine max
  misc_feature (146)..(147): Xaa can be any naturally occurring amino acid
  misc_feature (157)..(157): Xaa can be any naturally occurring amino acid
  misc_feature (200)..(200): Xaa can be any naturally occurring amino acid
MVSPISHLPLIIVLLLSFSLANSASLQESFVQCLNLNSDRTFPFYSSIYTPSNPSFTSILDSSAQNLRLLVPSAPKPEFIFTPSRDSHVQAAVICSKKLGIHIRVRSGGHDYEGISYVSEIETPFIVVDLVKLRGINVDVKSNTAXXVQAGATTGEXVYYRIYEKSSVHGFPAGLCTSLGIGGHITGGAYGTMMRKYGLXGVDNVLDAQIVDANGRVLDREAMGEDLFWAIRGGGGGSFGILLWWKITKTMVPPTVTVFTVTKTLEQGATKILHKWQEVAPYIDENLFIRVIIQPSSDARNKTQRTIATSYNALFLGGARTLLQVMKTSFPELGLTIKDCLETSWIKSVLYIAGFPSDTPPEVLLKGKSTFKNFFKAKSDFVREPIPETGLEGLWQRLLVEDSPLMIWNPYGGRMSQFSESETPFPHRNGTLYKIQYLSLWQEGDKNAAKHIDWIRKLYNYMGPYVSSLPREAYVNYRDLDLGINTKNSTSYIQASAWGYRYYKNNFDRLVKIKTKVDPENVFRHEQSIPPLPL

SEQ ID NO: 3906 - protein, 254 aa, Arabidopsis thaliana
MENEREKQVYLAKLSEQTERYDEMVEAMKKVAQLDVELTVEERNLVSVGYKNVIGARRASWRILSSIEQKEESKGNDENVKRLKNYRKRVEDELAKVCNDILSVIDKHLIPSSNAVESTVFFYKMKGDYYRYLAEFSSGAERKEAADQSLEAYKAAVAAAENGLAPTHPVRLGLALNFSVFYYEILNSPESACQLAKQAFDDAIAELDSLNEESYKDSTLIMQLLRDNLTLWTSDLNEEGDERTKGADEPQDEN

SEQ ID NO: 3907 - protein, 348 aa, Schizosaccharomyces pombe
MTDLDLDWQLEELENGRLIPESNVVELCQRVRDILIEESNIQWISSPVTICGDIHGQLHDLLELFRIGGSCPGTKYLFLGDFVDRGFYSVETFLLLLTLKCKYPKEMTLIRGNHESRQITQVYGFYDECVRKYGSANVWRYCCEIFDYLSLGALVDGKVFCVHGGLSPSISSIDQIRLLDRKQEVPHEGAMCDLLWSDPEDISGWGLSPRGAGFLFGADVSEVFNRANDLSFIARAHQLVMEGYKIHFSDKDKQYPKFTNEEDSELDSDSASPVDDSPAPGDIITIPEKDKGSVVTVWSAPNYCYRCGNVASILQLDENQTQSFKIFGTASQERSGIPTKRPIADYFL

SEQ ID NO: 3908 - protein, 203 aa, Pyrococcus abyssi GE5
MAHGPRYRVPFRRRREGKTNYRKRLKLLKSGKPRLVVRKSLNHHIAQIIVYDPKGDRTLVSAHTRELIRDFGWKGHCGNTPSAYLLGLLIGYKAKKAGIEEAILDIGLHPPVRGSSVFAVLKGAVDAGLNVPHSPEIFPEDYRIRGEHIAEYARMLKEQDEEKFRRQFGGYLEKGLDPEKLPEHFDEVKARIIEKFESEGARE

SEQ ID NO: 3909 - protein, 359 aa, Arabidopsis thaliana
MEGDVGIGLVCQNTMDGKASNGNGLEKTVPSCCLKAMACVPEDDAKCHSTVVSGWFSEPHPRSGKKGGKAVYFNNPMWPGEAHSLKVEKVLFKDKSDFQEVLVFESATYGKVLVLDGIVQLTEKDECAYQEMIAHLPLCSISSPKNVLVVGGGDGGVLREISRHSSVEVIDICEIDKMVIDVSKKFFPELAVGFDDPRVQLHIGDAAEFLRKSPEGKYDAIIVDSSDPVGPALALVEKPFFETLARALKPGGVLCNMAESMWLHTHLIEDMISICRQTFKSVHYAWSSVPTYPSGVIGFVLCSTEGPAVDFKNPINPIEKLDGAMTHKRELKFYNSDMHRAAFALPTFLRREVASLLAS

SEQ ID NO: 3910 - protein, 122 aa, Zea mays
  misc_feature (42)..(42): Xaa can be any naturally occurring amino acid
  misc_feature (79)..(79): Xaa can be any naturally occurring amino acid
MAGCCVFLRWPSASPSRIGYRSLVDAAADDDAAAPPSTVTVXGKERRAFAVDRLVLDSYPLRLLLETAARREERRAGGXAIFVDVDAILFEHILWLACDARSVSQILHLDLKEIIDFYAQDA

SEQ ID NO: 3911 - protein, 315 aa, Pinus pinaster
LYEMIFSAVKPLALKAAVLLNLPDIIATRGNGGPLSAEQIAFHIAAANSSSTGNSHVDVGYLYRILRFLASYGVFAEQEEADQPDDAETKKIKFGLTGISKLLVHGGNGQSRGPVLLLIANNVLLEAFQHLHESVLEGCYTFNKAHGMDLWEYLANNLEFNKIFNEAMATNTRSVMASVAKMYEDGFKSMATLVDVGGGMGSALSIIVKEHSHIRGINLDLPHVIATASITGVEHMEGNMFEHIPSADAVMMKWILHDWADEECVNCREEATTQRSEGKVLVVSSCCGDKSEACRAIGLLYDISMMVTHWWKNER

SEQ ID NO: 3912 - protein, 380 aa, Azotobacter vinelandii
MSTASCESKITYIDGDKGILLHRGYPIEQLAEKSDYLETCYLLLNGELPNADQKAKFVNNIKNHTMVHEQLKNFLNGFRRDAHPMAVMCGVVGALSAFYHDSLDINDPQHREISAIRLVAKMPTLAAMVYKYSLGQPLMYPRNDLDYAENFLHMMFNTPCEVKPISPVLAKAMDRIFVLHADHEQNASTSTVRLAGSSGANPFACIAAGIAALWGPAHGGANEAVLTMLDEIGDVSNIEKFVAKAKDKNDPFKLMGFGHRVYKNFDPRAKVMKQTCDEVLSELGINDPQLELAMKLEEIARNDPYFKERNLYPNVDFYSGIILKAIGIPTSMFTVIFALARTVGWISHWKEMLSGPYKIGRPRQLYTGYEKRDYISVEKR

SEQ ID NO: 3913 - protein, 508 aa, Ralstonia solanacearum
MTLDVTRQDPRYDTLRHGFNLRWPSSDAQAAGRIALCEKTDEVAPALQRIIDTGMRPTVRSGGHCYEDFVSNNPGGVIVDLSLLNAPEVRADGAVRVPAGMQNWNGALELYKRHGVTLPGGSCYSVGAGGHISGGGYGLLSRLQGLTVDWLSAVDIVTVDKQGRAAPRTVDAARDPDLFRACRGAGGGNFGIITSYTFARLPEAPREVALATVAFDWAAMTPERFAELLRLYGDYWATRGKDPDTWGLFSLLKLTHKSAGQIVMLTQFCNPDGTCRDLSVLNDFLARFQVCAPVPARARPPGYGPAHRQGVGQLLCSKPHTVVQYDWLTATQSLNGSGPNQRGKYKSAYMKRGFTAREAQRIYTHLTRTVQGIDLSQSLLQVDSYGGAVNKAERIADTAVPQRASVMKLQYQTYWTSAADDAGHLRWIGDFYRDVYGTPDVSAPHAGTPYPGDRYEGCYINYPDVDMLAYPFWPQLYYGDGDLYAFLQRVKRRYDPNNIFHHAMSVRP

SEQ ID NO: 3914 - protein, 291 aa, Bordetella pertussis Tohama I
MTARDPLAAIRARLAEVTACWQAAESLAQIRASFADYLAEVGPRGAAMARPRPQPLAPALAGAWIGQGARRALYCHGGGFQIGGIASHASLIARLAEAGQARILAVEYRLAPEHRYPAAIDDAFAAYQWLLANGGAPAAIIGDSAGGALALQTAQRARDAGLPLPRSLVLLSPWLDLSMQGRSYVELAEQDIFSKPAQLRAMARSYLGHLGPPPASPLWDDLSGLPPIVVHAGAHDITLDDSHTLAARVRAAGGQVQLQVFPGMCHHFQIYEALAEAQESIDALGRHLRQD

SEQ ID NO: 3915 - protein, 191 aa, Nicotiana tabacum
MTFAGTTQKCSACEKTVYLVDRLAADNRIYHKACFRCYHCKSTLKLSNFNSFEGVIYCRPHFDQLFKRTGSLDKSFEGTPKVTKPEKPVDNENGSGTKVSSLFAGTREKCVGCTKTVYPIEKVSVNGTAYHKACFKCSHGGCTISPSNYIAHEGRLYCKHHHIQLFKEKGNYSQLESDHETDPALSTQSLT

SEQ ID NO: 3916 - protein, 486 aa, Burkholderia cepacia R18194
MTNRTIELKHPRAFYIGGQWVAPSTPDTFDVLDCATEEVVATVAKAASADMQRAIDAARDAFDNGPWPRMTPQERAGYLEKFAERLEALNDEFARIWTIETGIVYKVAQPRIGLFISGAFRQYAAMAATFPFVEEQRSVTGNLGYRVYEPVGVVGEIIPWNGPAGLMAYKTAPALLAGCTLVIKSSPEAPCSAYLFAEICDEIGLPPGVVNVVTADRDVSEELVRHPGVDKITFTGSTGAGRRIASIAGDRIARVTLELGGKSPAVILDDYDIETAANVLGPSYFGYNTGQICHSLTRVIVPRAKHDAMVEALSAIAKQIVVGDPFAPETTSGPLASARQRETVERFVATGIAEGATLATGGKRPAGLARGFFFEPTVFGNVDNRSTIAQDEIFGPVLSVIPADDEASAIRMANDTPFGLNAAVFTNDRARALHVARQIRSGTVGHNGPRTDFSIGFGGFKQSGIGREGGVEGLTAFMESKTIVMA

SEQ ID NO: 3917 - protein, 188 aa, Helianthus annuus
MAFAGTTQKCMACDKTVYLVDKLTADNRVFHKACFRCHHCNGTLKLSNYNSFEGVLYCRPHFDQLFKKTGSLDKSFEGTPKIVKQPKTIDGEKPMANKVSSMFVGTKDKCLGCKNTVYPTEKVSVNGTAYHKSCFKCSHGGCTISPSNYIAHEGHLYCRHHHTQLIKEKGNLSQLEGERSARVGETAP

SEQ ID NO: 3918 - protein, 358 aa, Glycine max
  misc_feature (314)..(315): Xaa can be any naturally occurring amino acid
  misc_feature (334)..(335): Xaa can be any naturally occurring amino acid
  misc_feature (343)..(343): Xaa can be any naturally occurring amino acid
  misc_feature (346)..(346): Xaa can be any naturally occurring amino acid
  misc_feature (348)..(348): Xaa can be any naturally occurring amino acid
MSSNSDAAAATVHAHGRLAMLAAHLLPSQLTDHGALHPLHLSSQLPPTPNLAGSLTVVDERTGKKYQLQVSKEGTVKASEFKKILTGKNDKGLKLYDPGYLNTAPVRSTISYIDGDEGILRYRGYPIEELADKSTFTEVSYLIMYGSLPSESQLAEWEFAISQHSAVPQGVLDMIQSMPHDAHPMGVLVNAMSALSVFHPDANPALRGLDIYDSKQIRDKQITRVIGKITTIAAAVYLRMAGRPPVLPSNHLSYTENFLYMLDSFGNRSYKPNPRLTRVLDIIFILHAEHEMNCSTSAVRHLASSGVDVYTAIXXAVGALYGPLHGGANEAVLXXLSEIGTVXDIXRXIESVKARKRK

SEQ ID NO: 3919 - protein, 181 aa, Nicotiana tabacum
MTFAGTTQKCSACEKTVYLVDRLAADNRIYHKACFRCYHCKSTLKLSNFNSFEGVIYCRPHFDQLFKRTGSLDKSFDGTPKVTKPEKSVENENGSGSKVSSLFAGTREKCVGCTKTVYPIEKVSVNGTAYHKGCFKCSHGGCTISPSNYIAHEGRLYCKHHHIQLFKEKGNYSQLESDHET

SEQ ID NO: 3920 - protein, 448 aa, Borrelia burgdorferi B31
MVYRIKNENLDFKIDSLGECKQNNPLIDFYASEGSSHFVNEKNKIKFSVYRNEDKGDRYEDVLLEKAGPREKIYFVPRHVKAAITTCGGLCPGFNDVIRSIVRTLWKIYGVRNIYGVKFGYQGLLPESNSPFINLNPDVVDDINKFGGTILGSSRGGIKPVEIVDTLERMNINMIFNIGGDGTQKGSLLIAEEIEKRNLKIAVVGIPKTVDNDFMFVQKSFGFETAVEQAVAAVAGAHFEANSAYNGIGLVKVMGRDSGFIAAHTALSSNDVNFCLIPELDFDIEGPNGFLVHLERRLLEKESLEEIPHAVILIAEGAGQKYFDHFPKKKDDSGNLLYEDIGLYIKDKITEYFKAKNIQFTLKYIDPSYIIRSSPANASDSLYCARLGSNAVHAAMAGKTKMLISLWSTKFVHIPIKMAVIDRNKVNPNGSFWRDVLSSTGQPISMKN

SEQ ID NO: 3921 - protein, 302 aa, Glycine max; identical to SEQ ID NO: 264

SEQ ID NO: 3922 - protein, 417 aa, Pseudomonas stutzeri
MDSTALIPVQYGLDTFYFVICGALVMWMAAGFAMLEAGLVRAKNTAEILTKNIVLYALASIMYLLVGYYIMYSSPEGGIFPSLGFLIGDEHAVDLVAAGGEDAPYYSARADFFFQIVFAATCMSVVSGAVAERMKLWAFIAFAVVMTGFIYPIQGFWKWGGGFLDAAGFLDFAGSGVVHMAGAAAALAGVLLLGARKGKYGPNGQINAIPGANMPLATLGAFILWMGWFGFNGGSQLKMSTIEDANAVAQVFVNTNMGAAGGLIAALITARLLFGKSDLTMVLNGALAGLVAITAEPLTPSALQATLIGGVGGVLVVFSILGLDKLKLDDPVGAISVHGVAGMWGLLAVTADQCRRFFRQSSCLGLVSIFLWVFFASLIVWGIIKAVMGLRVSEEEEYEGVDVVECGLEAYPEFTRQ

SEQ ID NO: 3923 - protein, 185 aa, Zea mays
WGASIPRRSGNTLATRTPCTSPPRPPEEFQLALFKNQRKEYLFANRIFDLFDVKKRGAIDFGDFVRALNVFHPNIPMDEKIDFSFKLYDMDSTGFIERKEVKQMLIALLGESEMRLSDDIIETILDKTFSDADANQDGKIDRTEWENFVTRNPSLMKIMTLPYLKDITTTFPSFVFNSEVDDLVT

SEQ ID NO: 3924 - protein, 477 aa, Neisseria meningitidis Z2491
MNEYSQLIKHPDISLSPISDGIGVGNPATGEILAYVRNTGSDKLKNLIQKAAAAQKLWAAKTALERADILWRWYFLVKENKEALARLMTMEQGKSLTESRGEIDYAASFVRWFAEEARRIDGDVLTSVKASQKLIVLKQPVGVTAAITPWNFPSAMIARKAAPALAVGCAMIVKPASLTPLSAYALVVLAYEAGVPQDLLPVVSGRASEIGREFATNPIIRKISFTGSTEVGAKIFADSAADIKKLSLELGGNAPFIVFDDADLDKAVEGALASKFRNSGQTCVCTNRVYAQSGIYDAFCRKLSEKAAALKLGNGLEDGVNQGPLIEEKAVEKVEQHIADALSKGAVCLTGGKRSALGGTFFEPTVLSGVTAQMAVAREETFGPLCPVFRFETEAEVIEAANNTEYGLAAYLFTADTARQWRVGEALEYGMVGINTGLISNEAAPFGGVKRSGLGREGSKYGADEYLELKYLCMDVG

SEQ ID NO: 3925 - protein, 162 aa, Triticum aestivum
MEGRMFGLETPLMTALQHLLDVPDGESGGAGNAGGEKQGPTRAYVRDARAMAATPADVKELPGAYAFVVDMPGLGSGDIKVQVEDERVLVISGERRREEKEDAKYLRMERRMGKLMRKFVLPENADMEKISAVCRDGVLTVSVEKLPPPEPKKPKTIQVQVA

SEQ ID NO: 3926 - protein, 315 aa, Glycine max
  misc_feature (63)..(63): Xaa can be any naturally occurring amino acid
  misc_feature (193)..(193): Xaa can be any naturally occurring amino acid
NHYPKFLSLSIHLSIAHFHANGPHTKPSHSKDSSEVSGSAAEQRRWTLNDFDIGKPLGRGKFXHVYLAREKTSNHIVALKVLFKSQLQQSQVVHQLRREVEIQSHLRHPHILRLYGYFYDQKRVYLILEYAPKGELYKELQKCKYFSERRAATYVASLARALIYCHGKHVIHRDIKPENLLIGAQSQLKIADXFGWSVHTFNRRRTMCGTLDYLPPEMVESVEHDASVDIWSLGVLCYEFLYGVPPFEAKEHSDTYRRIIQVDLKFPPKPIVSSAAKDLISQMLVKDSSQRLPLHKLLEHPWIVQNAEPSGVYRS

SEQ ID NO: 3927 - protein, 435 aa, Ralstonia eutropha JMP134
MDAAKAAFPAWSRATSQERFDILRKASDEIIARKEELGRLLSREEGKTLAEGIGEVARAGQIFAFAAGECLRAGGEAIPSVRAGVGVEITREPVGIVGMITPWNFPIAIPAWKIAPALAWGNCVVIKPADLVPGSAWALVDIIQRAGLPKGVLNLVMGRGSVVGQALLEHKDVHAISFTGSVATGRKVAATCIASNPMKKVQIEMGGKNPLVVLDDADLNTAVEVAVNGAFFSTGQRCTASSRLVVQAGIHDRFVEACIERLKSIVVDDALKQGTQIGPVVDQSQIDQDLRYIQIAKDEGGKLVFGGELLKRATPGFYLQPALFTETTNAMRISREEVFGPVANIVRVRDYDEALALANDTEFGLSAGICTTSLKYATHFKRSSEAGMVMVNLPTAGVDYHVPFGGRKGSSYGSREQGTYAKEHYTTIKTAYTMA

SEQ ID NO: 3928 - protein, 323 aa, Photorhabdus luminescens subsp. laumondii TTO1
MSNEIKRIGVLTSGGDAPGMNAAIRGVVRAGLTEGLEVFGIYDGYLGLYENRMKKLDRFSVSDMINRGGTFLGSARFPEFRDEKVRTVAIENMRKNGLDALVVIGGDGSYLGAKKLTEAGFPCIGLPGTIDNDVAGTDYTIGYFTALETVVEAIDRLRDTSTSHKRISIVEVMGRYCGDLTLSAAIAGGCEFIVLPEVSFSCDELVAEIKAGIDKGKRHAIVAITEHVCDVYELAKHIEKETHHETRATVLGHVQRGGSPVAYDRILASRMGAYSIQLLLEGYGGRCVGIQNEKLVHHDIIDAVQNMKRVFKQDWLETAKKLY

SEQ ID NO: 3929 - protein, 189 aa, Zea mays
FLDKEFINVAMGMDPEWKMYDKNLGRIEKWVMRKAFDDYEHPYLPKHILYRQKEQFSDGVGYNWIDGLKSFTEQQVTDEMMNNVAQMFPYNTPSTKEAYYYRMIFERLFPQDSARETVPWGPSIACSTPAAIEWVEQWKASNDPSGRFISSHDSAATDHTAVSRRWPTAAARPANGTVNGKDVPVPIAV

SEQ ID NO: 3930 - protein, 182 aa, Salmonella typhimurium LT2
MKTVFSLTAAAMMALSGGVSAASAFSLSSADIPADFRLTQQHVFKGFGCSGENISPQLSWRNPPAGTKSYAITVFDPDAPTGSGWWHWTMVNIPAQIHDLPTGADKKTLPAGVVQGRNDFGYAGFGGACPPPSDKPHRYQFTVWALNTATLPLDSESSGALVGFMLNAHVIAKAKFTATYGR

SEQ ID NO: 3931 - protein, 155 aa, Lycopersicon peruvianum
MDLRLMGIDNTPLFHTLHHMMEAVGEDSVNAPSKKYVRDAKAMAATPVDVKEYPDSYVFVVDMPGLKSGDIKVQVEEDNVLLISGERKREEEKEGVKFIRMERRVGNFMRKFSLPENANTDAISAVCQDGVLTVTVQKLPPPEPKKPKTIQVKVA

SEQ ID NO: 3932 - protein, 106 aa, Glycine max
SMIFFPAGTTVNRAGARMGGSFTGLKFMGGFPTKKNNHDLTFIGCNRGRIPCMPVWAPIGKKKFETLFYLPDLDDAPLGKEVEYLLRKGWISCVEFELEHRFVYRE

SEQ ID NO: 3933 - protein, 276 aa, Oryza sativa (japonica cultivar-group)
MASAAVAAAAAPLRRSLLPSLNPSCLFSSLASSSHRLSLPRALRPAGPLPSDVEDSDDSNAGDGAGEALRKSRNDLKREARRAVQWGMDLAKFSPLQIKRILRAASLDREVFDALMLVKRFGSDVREGKRRQFNYIGRLLRGAQPELMDTLIQYSKDGDDNRLLALMSENTFLMEDEEIEDLPCNEEEGDKEHIEIADRWFEGLLSKDISVTNEIYAIHNVEFDRQELRKLVRTVHMVQDNIENEHEEESTMKLLGAKKQLLCFLRSIAKEAYVKS

SEQ ID NO: 3934 - protein, 196 aa, Glycine max
MGERVKGTVKWFNVTKGFGFISPDDGGEDLFVHQSSIKSDGYRSLNENDAVEFEIITGDDGRTKANDVTAPGGGALSGGSRPVEGGGDRGGRGGYGGGGGGYGGGGGGYGGGGGGYGGGGGGYGGGGYGGGGGGGPCLLQVGREEGPSSPMASRGRRPPARPPPVNGYKWRLRKGHLLSGTAPQRGLGWSSGFTEI

SEQ ID NO: 3935 - protein, 117 aa, Fragaria x ananassa
MASSTAMKLSLVALLCIVVALPIAQAITCGQVASNISPCLTYVKSGGAVPAACCSGIRNLNGMAKTTADRQAACNCLKQAAGGIKGLNPNLAAGLPGKCGVSVPYKISTTTNCAAVK

SEQ ID NO: 3936 - protein, 66 aa, Glycine max
MVQFFSAVSILILVAVAASMVVLPLMLPPLPPPPLILLFFPVGIMAALMLLAFVPSEVPMATNLIL

SEQ ID NO: 3937 - protein, 470 aa, Schizosaccharomyces pombe
MVSLKKKSKRRTTRLRSRIEKKAAESKRKQKRADKKNPQWKSRIPKDPGIPNSFPYKDKILAEIEEQKRIREEEKLARRASGQVDAAMEEEDAVDENGSLMISKIAEAAQASNPDDEEEFVMEEDNLGEAPLLVDSESYEASVKADTSRKAYDKEFKKVVEASDVILYVLDARDPEGTRSKDVERQVLASSAEEKRLIFVINKIDLVPSEVLNKWVTYLRNFFPTIPMRSASGSGNSNLKHQSASASSTISNLLKSLKSYSAKKKLKSSLTVGVIGYPNVGKSSVINALVNRSANGRSAPCPAGNVAGMTTSLREVKLDNKLRLVDSPGIVFPSSDSKDDLYRLVMLNAVSSTKVDDPVAVASYILQFLSRVPGQLERMFQRYELPPLLNTSDIDTATDFLVNIARKRGRLGRGGIPNLNAAANIVINDWHAGRIEWWAEPEVINEKNSSEVQDTQIVTEWAKEFDLNDF

SEQ ID NO: 3938 - protein, 470 aa, Pirellula sp. 1
MPQITSRIGRRLGETRWMLRIWALNRNAIVFGNSSSPGSVIVAELAHHNLDIKRVAILFAGGPAPAANAVISTAAFSFLEEGAQVFGIKHGYSRLAEYTAAGPLQEGTDYIRFTHDSLTHARSSRGIMIGTARTNPGKHVSSPEHLKDPELVAPLRRVYEGLCSLEVDALISIGGDDTLKTANKLKMFQDNLPGDARRFPVVHLPKTIDNDYSGIDFTFGFFTAVETLAEEIRNLNYDAAAGRAYFLCEAMGRSAGWLAYGAAIAGEASMVLSVEDITGALADEEVVNQETGETRKIMAMDRVIDRMVDMMLAREREGRQYGTIVIAEGMAEYLPAKYLEGVTRDDHGHINISLVNLSAVMSRLLAARYNERTGRTRKVNGLQMGYESRCAPPHAYDVMLGSQLGVGAYRALVEEKLNGVMVSVSGQFDLHFVPFEELVDPQTLVTKVRFIEQNSDFHRLARFLETCVDN

SEQ ID NO: 3939 - protein, 209 aa, Zea mays
MGRGLGAAPVSPRLASLGAAALALLVAAALPSPAAGAGLNATAVLSAFPNFADFARLLASTPVASELAGRSSLTLLAVPNANLPQSPSAFVAGADIADVLRYHVLLEYLSPSDLARLPPSGKLVTTLFQTTGRAPSDFGAVNLTVGPNSTVVVRSPAPSPGSSATVLGAVTAVPYNLSVLAVGGLIVPSRIDLAASMLQASGVASEFEA

SEQ ID NO: 3940 - protein, 211 aa, Schizosaccharomyces pombe
MASNTAPKNVVTINQKLVLLGDSAVGKSSLVLRFVKDQFDDYRESTIGAAFLTQTLPIDENTSVKLEIWDTAGQERYKSLAPMYYRNANCAIVVYDITQAASLEKAKSWIKELQRQAPEGIVIALAGNKLDLAQERRAVEKADAEAYAAEANLLFFETSAKTAENVNELFTAIAKKLPLEDKLNQARGAVNRGVNLSEARPAAQPSGSCSC

SEQ ID NO: 3941 - protein, 321 aa, Pasteurella multocida subsp. multocida str. Pm70
MIKKIAVLTSGGDAPGMNAAIRGVVRSALAAGLEVYGIYEGYYGLYHNKVKQMTRYSVSDIINRGGTFLGSARFPEFKDPAVRAKCAEILRSHGIDALVVIGGDGSYMGAKLLTEEHGFPCVGIPGTIDNDVAGTDYTIGYQTALQTAVEAIDRLRDTSSSHQRISIVEIMGRHCSDLAISAGIAGGCEYIVASEVEFNREELIQQIERSIIKGKRHAIIAITELICDVNELAREIESRVKHETRATILGHIQRGGTPCAFDRILGSRMGVYAVDLLMQGKGGYCVGIQNEQLVHHDIIDAINNMRREFKADWLALSKRLD

SEQ ID NO: 3942 - protein, 320 aa, Buchnera aphidicola str. Sg (Schizaphis graminum)
MIKKIGVLTSGGDAPGMNAAIRGVVRTALSEKLEVFGIYDGYLGLYENRMTLLDRYSVSDMINRGGTFLGSARFPGFYKNEIRTIAVNNLNKRNIDALVVIGGDGSYIGAQKLTKMGIPCISIPGTIDNDVAGTDYTIGYFTALETVVEAIDRLRDTSSSHQRISIVEVMGRYCGDLTLAAAIAGGCEFIVLPEIHYKKEELVSEIQAGIEKGKKHAIVAITEYICDVEKLAKYIEKKTNRETRATILGHIQRGGAPVVYDRILASRMGAYAVELLIEGYKGKCVGIQNEKMVFNDITDALKNMKRVFKKDWLITAKKLY

SEQ ID NO: 3943 - protein, 457 aa, Bordetella parapertussis 12822
MARPLDTLLANTLVFLEGQGLVPGSIGIADGRIAVIGSHGQDMPAARETIDCQGLWTLPGVIDPHVHFGFGSPETDFETESRNAALGGTTSVISFHRSADIRESFDAVRARAESQSCIDFGFHFGITSRLHVDTLDEISRRFGVSSYKLYMMYKGAAGLSKGFTDIDDGLLWGALNATRAIPGAVLGVHCENVEVIPWLRDPLRAAGRDDLAAWNEQSPDFLEAENVHRVCYFAGKTGTPVNIVHLSSREALREVRRHRHEGRAAPIYVETCPHYLFLDDRSPAGTYAKVNPPVRSAADIDAMWEGVCDGAITTIGSDHVPRKRATKDKDIWAASNGFPGTGMILPILLHEGYHRRQVPLETLMRVASGASARIYGMPAKGRIAVGNDADLVIVDPDLEKTVDPGELESHADYSPYEGMRLKGWPVRTLVRGRTVARDGRIADEARQTPGGRYLRRL

SEQ ID NO: 3944 - protein, 173 aa, Flaveria bidentis
MASIPATFATVAQANMVAPFTGLKANAAFPVTKKVNGFSTLPSNGGRVQCMKVWPPVGKKKYETLSYLPELTEAQLAKEIDYLIRNKWVPCLEFELEHGFVYRENARSPGYYDGRYWTMWKLPMFGCTDSAQVMKELQECKKEYPQAWIRIIGFDNVRQVQCVSFIASKPTGF

SEQ ID NO: 3945 - protein, 439 aa, Arabidopsis thaliana
MRKLFFFLCTHVPKQRAKFTRIMESCQKKQKLETPTELSDMPDDLIFKIFSFLPFFKEDLATRFISEYGKGLWNPDPNAIFDDESLDMTCMSFVYGSLMSKDAQILDSLHLKLRKYYIASDINFLVQLGVNRSMRELRIDFFGKTLELPCCLSTCTTLKVLVLDHLNIMSVPGWFRLPSVETLQLSSVTGGSNYVPSLIRLCSVHERLVVDQNRNKDLVNINVPTLRSLSIDNKRRGHVPLGSFWINVPSLMFLNIKDTFQTIFESMPAMIKANIEVAHDQSQSVKFIESLTSTRHLCLCSPTSENPYPNGTKFSNLVHLKLCTCSAGWQNLLACMLNDAPNLRSLTLKLRQKSDVNPKKVWEKPTVVPECLSTRLEILKWRDYEGTEHEKDMVGYILANATFLQRATFSTKDRNQCDSRFSELQSMERVSEICEFVFD

SEQ ID NO: 3946 - protein, 480 aa, Triticum aestivum
MAIAVSPTHTKQKQQQQDHRRIPSQSNHTRRQARMAIAVSGQWTRLRTLGCGASGAVVTLAADAASGELFAVKSVRAADAAQLSREQGILSGLSSPHVVGCIGGGGDRDGSYHLFLEFAPGGSLADEAARNGGRLEERAIRAYAADVLRGLAYIHGKSLVHGDVKSRNVVIGADGRAMIADFGCARALGSAGPIGGTPAFMAPEVARGEEQGPAADVWALGCTVVEMATGRAPWGEMDNVLAAVHRIGYTDAVPEVPTWLSAEAKSFLAMCFARNARDRCTAAQLLEHPFVALQAGEAKARWVSPKSTLDAAFWESETDEEEEEEEEVSESPSERIKSLSCSVLPDWDSDEGWIDVLGEQCEACDSPAATKGPADVSSRAPSKVLGSPAVPAEDVAVVGTLSSDEHEVDAEDEPFGDDTILAADPSVDRQNQVCSSSDRDVLSSSHVPCNNRVLAIEKFRFPQKKKKKKKKKKKKKKKKK

SEQ ID NO: 3947 - protein, 173 aa, Flaveria bidentis
MASIPATVAAVPQTNMVAPFTGLKANAAFPVTKKVNGFSTLPSNGGRVQCMKVWPPVGKKKYETLSYLPELTEAQLAKEVDYLIRNKWVPCLEFELEHGFVYRENASSPGYYDGRYWTMWKLPMFGCTDSAQVMKELQECKKEYPQAWIRIIGFDNVRQVQCVSFIASKPTGF

SEQ ID NO: 3948 - protein, 502 aa, Oryza sativa (japonica cultivar-group)
MAAANGGDSKGFEVPKLEIKFTKLFINGRFVDAVSGKTFETRDPRTGEVIAKIAEGDKADIDLAVKAAREAFDHGPWPRMSGFARGRILHKFADLVEQHVEELAALDTVDAGKLFAMGKLVDIPGGANLLRYYAGAADKVHGETLKMARPCHGYTLKEPVGVVGHIVPWNYPTTMFFFKASPALAAGCTMVVKPAEQTPLSALFYAHLAKLAGVPDGVLNVVPGFGPTAGAAISSHMDIDKVSFTGSTEVGRLVMEAAAKSNLKPVSLELGGKSPVIVFDDADLDTAVNLVHMASYTNKGEICVAGSRIYVQEGIYDAFVKKATEMAKKSVVGDPFNPRVHQGPQIDKEQYEKILKYIDIGKREGATLVTGGKPCGENGYYIEPTIFTDVKEEMSIAQEEIFGPVMALMKFKTVEEAIQKANSTRYGLAAGIVTKNIDVANTVSRSIRAGAIWINCYLGFDPDVPFGGYKMSGFGKDMGMDALEKYLHTKAVVTPLYNTPWL

SEQ ID NO: 3949 - protein, 256 aa, Glycine max
MEAKKIPEVILNSGKKMPVIGLGTASIPLPSHEALTSILIDAFEVGYRHFDTASLYESEESLGKAVAKALELGLINSREELFITSKLWSTDAHPDLVVPALKTSLQKLGLEYVDLYLIHWPVRLKPEAKGYHNILKENVLPSFDMKGIWEAMEECYRLGLAKSIGVSNFGIKKLSQLLENATIPPAVNQVEMSPAWQQGKLKEFCKQKGIHVSAWSPLGAYKSAQGTNAVMESPILKEIACERQKSMAQVLLVSQS

SEQ ID NO: 3950 - protein, 207 aa, Zea mays
  misc_feature (143)..(143): Xaa can be any naturally occurring amino acid
MGERVKGTVKWFNVTKGFGFISPEDGSEDLFVHQSAIKADGYRSLNENDVVEFEVITGDDGRTKAADVTAPGGGALAGGSRPGDGGGDRGGRGGGGYGGGGYGGGGGGGYGGGGGGYGSGGGSYDGGGGYGGGGGGGRYGGGXGGGGRECYKCGEEGHISRDCPQGGGGGGGGYGGGGGRGGGGGGGGCFSCGESGHFSRECPNKTN

SEQ ID NO: 3951 - protein, 495 aa, Mesorhizobium loti MAFF303099
MNLPPNALWIDQDDYDVRGFSHGLYIDGRWRPSSDGRVIDVVDPSSGSVIAAVPDATLEDALAAVDAAAKAATAWRETAPRKRSEILRRCFELMVERSETLAMLISLENGKALRDARGEVAYAAEFFRWNAEEAVRITGEFGTAPSGANRIVVDYEPIGICVLITPWNFPAAMATRKIAPALAAGCTVILKPASETPLTAYALAALYSEAGVPAGVVNVLTTTSPGPLTSAMLADPRVRKLSFTGSTGVGRTLLGEAAKHVVSCSMELGGNAPFVVFDDADLDAALDGAMIAKMRNAGEACTAANRIYVQSGIHDAFADGLRKRMAALKVGPGMSADTECGPMITRKAVDKIDRLVKDAVGRGAKVLCGGSIPEEEGFFYPPTVLSQVPPDADMAHEEIFGPVAPVTRFETEAEVIMHANNTEYGLAAYIYTRDVGRGLRVASRIEAGMIGLNRGLMSDPAAPFGGVKQSGLGREGGQHHGIAEFMEAKYIAVTF

SEQ ID NO: 3952 - protein, 407 aa, Vibrio parahaemolyticus RIMD 2210633
MDIILGVVMFTLIVLALVLVILFAKSKLVPTGDITISVNGDADKAIVTQPGGKLLSALAGAGVFVSSACGGGGSCGQCRVKVKSGGGDILPTELDHITKGEAREGERLACQVAVKTDMDIELPEEIFGVKKWECTVISNDNKATFIKELKLQIPDGESVPFRAGGYIQIEAPAHHVKYADYDIPQEYREDWEKFNLFRYESKVNEETIRAYSMANYPEEHGIIMLNVRIATPPPNNPDVPPGIMSSYIWSLKEGDKCTISGPFGEFFAKDTDAEMVFIGGGAGMAPMRSHIFDQLKRLHSKRKMSFWYGARSKREMFYVEDFDGLAAENDNFVWHCALSDPLPEDNWDGYTGFIHNVLYENYLRDHEAPEDCEYYMCGPPMMNAAVIGMLKDLGVEDENILLDDFGG

SEQ ID NO: 3953 - protein, 488 aa, Arabidopsis thaliana
MSSPRSNKPKIVNGPGGYILQDVPHLIDYLPDLPTYPNPLQDNPAYSVVKQYFVHADDSVPEKVVVHKDGPRGVHFRRAGPRQKVYFESDEVHACIVTCGGLCPGLNTVIREVVSSLSYMYGVKRILGIDVSLGGYRGFYAKNTIPLNSKVVNDIHKRGGTIIGTSRGGHDTNKIVDSIQDRGINQVYIIGGDGTQRGASVIFEEIRRRRLKVAVVGIPKTIDNDIPVIDKSFGFDTAVEEAQRAINAAHVEAESNENGIGFVKLMGRYSGYIAMYATLASRDVDCCLIPESPFYLEGEGGLFEFIERRLKDHGHMVIVLAEGAGQDLMCKSMESTPMDASGNKLLKDVGLWLSQSIKDHFKKNKMVMNLKYIDPTYMIRAVPSNASDNVYCTLLAQSAVHGAMAGYTGYTSGLVNGRQTYIPFYRITETQNNVVITDRMWARLLSSTNQPSFLGPKDTSEEKKELPETPLLDDGAVDIPPVTKEVTK

SEQ ID NO: 3954 - protein, 190 aa, Triticum aestivum
MTVQTSNRGVSLRCSLGDALISNPSYPSIQRHRDSSCYLAKLPPSHSPLAAAAAASNPRLWPPAPPRARNSFSVPVDSREAAMEHGSVADSSASTFSIMEEDHTLANSVRFVLNQDPRVAFCGYSIPHPADNKVNIRVQTTGDPAKDVMKDALQDLMVMGQHVRGTFDKAVADFKSKMPAEQMDVDLNQQ

SEQ ID NO: 3955 - protein, 428 aa, Rhodobacter sphaeroides 2.4.1
MTKSAKLTIGEKVIDLPIHSPTLGPDVVDIRKLYAEADVFTYDPGFTSTAACESTITYIDGDKGELFYRGYPIEQLADRSHYLEVCYLLLYGELPNAAQQADFEYRITRHTMLHEQIHYFFRGFRRDSHPMATMVGVVGAMSAFYHDSLDINDPWQREVAAIRMIAKLPTIAAMAYKYSIGQPFNYPQNHLDYAGNFLHMCFAVPAEPYTVNPVLAKAMDRIMMLHADHEQNASTSTVRLAGSSGANPFACIAAGIACLWGPAHGGANRACLEMLREIGTVDRIPEYIRRAKDKDDPFRLMGFGHRVYKNFDPRAKVMKESADEVLGLLGIENNPTLQVAKELERIALEDDYFVAKKLYPNVDFYSGIILDAMGFPTSMFTPIFAISRTVGWISQWKEMIGDPTQKIGRPRQLYKGETRRDYVDLRHR

SEQ ID NO: 3956 - protein, 472 aa, Ralstonia eutropha JMP134
MQTHAGLLIDGKLVQGNATLDVVNPATGEVFTTVARATEREAAAAIAAAKAAQPAWGSLALEQRRALLLRFADELEANAEDLAASLVLEQGKPLAEARQELQFAQAFVRHIAGLSLPVSVVQDDATHRIELHHKPLGVVAAIAAWNFPVLIAAYKLAPALLMGNTVVLKPAPTTPLATLQMGAILKDIFPAGVVNIITDANDLGSFLTSHPDIAKVSFTGSTATGKKVMASAGPGLKRITLELGGNDAAIVLDDANVDDIAPKIFGSAFYNCGQVCLALKRLYVHASIHNQLCEALAELARQAVVGNGADEGVTIGPLQNAMQYDKAGRFLAAARHDGKILAGGALLNGDGYFVAPTIVRDLHDQSELVAQEQFAPILPVLRYDAIDEAVVRANASPYGLGGSVWSADEDRARAVAQRLQVGTAWVNHHLHFGPHIPLVGAKESGVGVEFGTEGLAEYAQLSVINIARQQAA

SEQ ID NO: 3957 - protein, 465 aa, Aspergillus fumigatus
MAMTMRSTRHASKLAQTARLALTNSRRYSTAEPDLKTALKAVIPAKRELFKQVKERSDEVIGEVKVANVIGGMRGLKSMLWEGSVLDPEEGIRFHGKTIKDCQKELPKGTSGTEMLPEAMFWLLLTGQVPSTNQVRAFSRELAEQSHLPQHILDLIKSFPRSMHPMTQLSIAVAALNTESKFAKAYEKGLSKADYWEPTFDDSISLLAKIPRVAALVFRPDEVDQVGTQALDASQDWSYNFAELLGKGGKENQDFHDLLRLYLALHGDHEGGNVSAHATHLVGSALSDPFLSYSAGLLGLAGPLHGLAAQEVLRWILAMQDKIGTKFTDDDVRNYLWDTLKSGRVVPGYGHGVLRKPDPRFQALMDFAATRPDVLANPVFQLVKKNSEIAPAVLTEHGKTKNPHPNVDAASGVLFYHYGFQQPLYYTVTFGVSRALGPLVQLIWDRALGLPIERPKSINLLGLKK

SEQ ID NO: 3958 - protein, 497 aa, Spinacia oleracea
MAFPIPARQLFIDGEWREPIKKNRIPVINPSTEEVIGDIPAATAEDVEVAVVAARRAFRRNNWSATSGAHRATYLRAIAAKITEKKDHFVKLETIDSGKPFDEAVLDIDDVASRFEYFAGQAEALDGKQKAPVTLPMERFKSHVLRQPLGVVGLISPWNYPLLMATWKIAPALAAGCTAVLKPSELASVTCLEFGEVCNEVGLPPGVLNILTGLGPDAGAPLVSHPDVDKIAFTGSSATGSKVMASAAQLVKPVTLELGGKSPIVVFEDVDIDKVVEWTIFGCFWTNGQICSATSRLLVHESIAAEFVDKLVKWTKNIKISDPFEEGCRLGPVISKGQYDKIMKFISTAKSEGATILYGGSRPEHLKKGYYIEPTIVTDISTSMQIWKEEVFGPVLCVKTFSSEDEAIALANDTEYGLAAAVFSNDLERCERITKALEVGAVWVNCSQPCFVQAPWGGIKRSGFGRELGEWGIQNYLNIKQVTQDISDEPWGWYKSP

SEQ ID NO: 3959 - protein, 486 aa, Pseudomonas sp. KL28
MRQIENFIAGEFVASASGKRFDKHSPLDNRIICSVSEAGRGEVDAAVRAARSALQGEWGGLTTEQRIELLYGVANEITRRFDDFVEAEMSDTGQPEHVMKHVFIPRGAANFKVFADVIKNVASESFQMDTPDGRGALNYSIRRPKGVIGVVCPWNAPFMLMTWKVGPALACGNTVVVKPSEESPQTAALLGEVMNAVGIPKGVYNVVHGFGPDSAGEFVTRHPQVDAITFTGETRTGTAIMKAASEGMRDVSFELGGKNAGIVFADADFEAAVESFSRSVFLNTGQVCLGTERVYVERPIFERFVQALKVKAEAVKYGRPDDHQANYGPLISQEHKQKVLSYYRKAVEEGATLVTGGGVPQMPGELAEGAWVQPTIWTGLPETAAVVQEEIFGPCCHISPFDSEDEVVEKANATDYGLSTTIWTSNLARAHRMAGRIDVGITWINSWFLRDLRTPFGGSKQSGIGREGGVHSLEFYTETRNVCVKL

SEQ ID NO: 3960 - protein, 146 aa, Brassica napus
  misc_feature (140)..(140): Xaa can be any naturally occurring amino acid
SPDYVAPSSNSLNRPNSRGSDPDGPNTIPMFANGASTPVFDGASFRQQANHAAESINRNSTRAKESEARNENEWVEQDEPGVYITLTALPGGARDLKRVRFSRKRFSEKQAEEWWAENRGRVYEQYNVRLVVDKSSVGVXSEDLAH

SEQ ID NO: 3961 - protein, 212 aa, Oryza sativa (japonica cultivar-group)
MAEGAELVGESAHQDMPRVVAALAGILERVAGRNDAAATPAELAAAPASPFRATAKPGISVRAYAARIARFAGCSPACYVVAYIYLDRLLRRGRRCLALALAVDSYSVHRLLITAVLSAVKFMDDICYNNAYFAKVGGISLAEMNYLEVDFLFGVGFDLNVTPETFADYCAVLQSEMLCAAPPTRLHYCCLSEDDAGSSSSSSLREAAMEAS

SEQ ID NO: 3962 - protein, 226 aa, Glycine max
MASNAKRSRQVSHYEVKRTLYNDIYLRRSQFQAPSPCSSRILFLRSTTIITSFSLRTDHTMATSSAKSVHDFTVKDAKGNDINLGDYKGKVLIIVNVASQCGLTNSNYTELSQLYEKYKQKGLEILAFPCNQFGAQEPGSNEQIQEFVCTRFKAEFPVFDKVDVNGDKAAPLYKYLKSSKGGLFGDGIKWNFSKFLVDKEGNVVDRYAPTTSPLSIEKDLLKLLDA

SEQ ID NO: 3963 - protein, 239 aa, Glycine max
MEAKKIPEVILNSGKKMPVIGLGTASIPLPSHEALTSILIDAFEVGYRHFDTASLYESEESLGKAVAKALELGLINSREELFITSKLWSTDAHPDLVVPALKTSLQKLGLEYVDLYLIHWPVRLKPEAKGYHEAMEECYRLGLAKSIGVSNFGIKKLSQLLENATIPPAVNQVEMSPTWQQGKLKEFCKQKGIHVSAWSPLGAYKSAQGTNAVMESPILKEIACERQKSMAQVLLVSQS

SEQ ID NO: 3964 - protein, 472 aa, Podospora anserina
MAPAMRLTSSALRASLKASSFATKQTAFTAARCYSSKTQTLKERFAELLPEKIEEIKALRKEHGSKVVDKVTLDQVYGGARGIKCLVWEGSVLDAEEGIRFRGKTIPECQQVLPKAPGGSEPLPEGLFWLLLTGEVPTEQQVRDLSADWAARAEIPKFVEELIDRCPSDLHPMAQFSMAVTALEQTSSFARAYAKGINKKEYWGYTFEDSMDLIAKLPTIAARIYQNVFKGGKVAPVQKDKDYSFNFANQLGFGNNADFIELMRLYLTIHTDHEGGNVSAHTTHLVGSALSSPFLSLAAGLNGLAGPLHGLANQEVLNWLTEMKKVIGDDISDESITKYLWDTLNSGRVVPGYGHAVLRKTDPRYSAQREFAQKHMSEDPMFKLVSQVYKIAPKVLTEHGKTKNPYPNVDAHSGVLLQYYGLTEANYYTVLFGVSRAIGVLPQLIIDRAVGAPIERPKSFSTEKWIEICKKL

SEQ ID NO: 3965 - protein, 244 aa, Zea mays
MVGGGGGGPLRRVGKYEVGRTIGEGTFAKVKFAQNTETGESVAMKVLDRSSILKNKLAVLIKREISIMKLVRHPNVVRLHEVLASRKKIFIILEFITGGELFDKIIRHGRLSEADARRYFQQLIDGVDFCHKKGVYHRDLKPENLLLDSQGNLKISDFGLSAWPAQGSFLLRTTCGTPNYVAPEVLSHKGYNGALADTWSCGVILYVLLAGYLPFDEVDLTTLYGKIESAEYSFPALFQVVQNH

SEQ ID NO: 3966 - protein, 206 aa, Emericella nidulans
MATNITHHAGLTRNERNQLRKQKGLTIWLTGLSASGKSTIAVELEHQLLQRGLHAYRLDGDNVRFGLNKDLGFSDADRNENIRRIAEVAKLFADSSSIAITSFISPFRADRDTARKLHEVPTPNDSTGLPFVEVFVDVPIEVAEKRDPKGLYKKAREGIIKEFTGISSPYEAPENPEVHVKNVDLPIQEAVKQIIDYLDSKKLLDA

SEQ ID NO: 3967 - protein, 386 aa, Corynebacterium glutamicum ATCC 13032
MIVSTQPITDRSALSAEHAEVIKATLPLVGGKINEITPVFYNKMFAAHPELIANTFNRGNQKQGDQQKALAASIATFATMLVTPDAPDPVQLLSRIGHKHVSLGITADQYDIVHEHLFAAIVEVLGAETVTAPVAEAWDAVYWIMANVLIGFENNLYASNDLEPGDVFREVTVTAKKQLSATVWEYTLAGELVAPEPGQYTSIGVVLDDGARQLRQYSLLGGSDTEYRIAVEDNGEVSGFLRDRVSVGDKIEATIAAGDLVLNKDTNPVVLISQGIGSTPMVGMLAGMNPERDVVVLHADQAESTYAQVEEVQGLVEKLPKAAFEIFYRDNDQWLEVAGRIPSGASVYLCGGVEFLKNVREQIEALDEQPRDVNFELFAPNDWLIS

SEQ ID NO: 3968 - protein, 562 aa, Glycine max
MAPTTTVPIGTLPSGSVTGRLASVYSEVQKTRVDHALPLPSVLKHPFTILDGPPSSAAGNPDEIAKLFPHLFGQPSAALAPSGAVQTQKKLKIGVVLSGGQAPGGHNVISGIFDYLQERAPGSTLYGFKGGPAGIMKCKYVELTSEYIYPYRNQGGFDMICSGRDKIETPEQFKQAEETAKKLDLDGLVVIGGDDSNTNACLLAENFRSKNLKTSVIGCPKTIDGDLKCKEVPTSFGFDTACKIYSEMIGNVMIDARSTGKYYHFVRLMGRAASHITLECALQTHPNITIIGEEVAAKKLTLKNVTDYIVDVVCKRAEINYNYGVILIPEGLIDFIPEVQHLIAELNEILAHDTVDEGGLWKKKLTDQSLKLFDFLPQAIQEQLMLERDPHGNVQVAKIETEKMLIQMVETELEKRKQEGKYNGEFKGQSHFFGYEGRCGLPTNFDATYCYALGYGAGALLHSGKTGLISSVANLCAPVEEWTVGGTALTSLMDVERRHGKFKPVIKKAMVELEGAPFKKFASLRDEWALKNCYISPGPIQFSGPGSEVINHTLLLELEALA

SEQ ID NO: 3969 - protein, 423 aa, Exiguobacterium sp. 255-15
MAIRIDHATWYKNGQLQKSSIRMEDGIFTDLDATPLETDQVIDATGYTVAPGFVDVHVHLREPGGEHKETIATGTAAAAAGGFTTICPMPNTRPVPDDRETLDALFKKIEETASVRVFPYAAISKNQLGQELVAFEQLTDAFAFTDDGVGVQSAAVMREAMTRAAAVHKSIIAHCEDDSLKAGCVHEGAYSAREGLQGIPSLAESIHIARDVLIAEATGCHYHVCHVSTKESVRVIRDAKRAGIRVTAEVTPHHLVLTEDDIIGRDPNFKMNPPLRSEADRQALLAGLQDGTIDCIATDHAPHAAEEKAIGIERAPFGITGFETAFPLLYTKLVEPGIFTLNQLFDWMSRNPADLFDLPFGRIEVGAPADLVLLDLETVRAVQPDQFLSKGKNTPFAGASLTGYPVLTLVGGEIVFKGEKAHV

SEQ ID NO: 3970 - protein, 507 aa, Oryza sativa (japonica cultivar-group)
MGSTGDCGNGKAAAGGGGLVVPEIKFTKLFINGEFVDAASGKTFKTRDPRTGDVLAHIAEADKADVDLAVKAAREAFEHGKWPRMSGYERSRVMNKLADLVEQHADELAALDGADAGKLLTLGKIIDMPAAAQMMRYYAGAADKIHGESLRVAGKYQGYTLREPIGVVGVIIPWNFPTMMFFLKVSPALAAGCTIVVKPAEQTPLSALYYAHLAKLAGVPDGVINVVPGFGPTAGAALSSHMDVDSVAFTGSAEIGRAIMESAARSNLKNVSLELGGKSPMIVFDDADVDMAVSLSSLAVFFNKGEICVAGSRVYVQEGIYDEFVKKAVEAAKNWKVGDPFDAATNMGPQVDKVQFERVLKYIEIGKNEGATLLTGGKPTGDKGYYIEPTIFVDVKEEMTIAQEEIFGPVMSLMKFKTVEEAIEKANCTKYGLAAGIVTKNLNIANMVSRSVRAGTVWVNCYFAFDPDAPFGGYKMSGFGRDQGMVAMDKYLQVKTVITAVPDSPWY

SEQ ID NO: 3971 - protein, 326 aa, Erwinia carotovora subsp. atroseptica SCRI1043
MKIGLVISGGDVSGINNFIFQVNRMTASDIVIFDGGINGLIDNCCKVLTRRDLVDYSLSSMPLVTSGRKTGKCRKTDYEKIVKNIQKQKLDALIMAGGDGSFQFLKKLSCYGIHCYGIGMTIDNDISGNSYTIGFSTACEQVMSEVEKLRNTGRGLQGRVFMIELLGGYCGELTLQAALKSNADIALIPESPWDIDALSQCILDKIAEQNSVIILCSEGYTHEYTPGFQGAIDTIIKKLEHKIGIRIRKTILGYGLRNGAPTGEEIIQGTLLAEEVVRCINAGLTNKIIIINNNNKAIPIDLEDSERRLVDIESHFYKLAKSHHLI

SEQ ID NO: 3972 - protein, 402 aa, Arabidopsis thaliana
MAEISGLPDDLLVKILAFLPTKVAISTSVLSKQWRFLWMWLPKLKYDDYDDITDGFNSVSAFQTYRDFIAKNLPLHRAPIIESLSLGFRCGTLQPEDLKSWVEVAVSRSVRELSILAYYRNNYALSSSSLYTCKSLVTLKGFNIRVDVPPTVCLLPSLRTLELKRVRYLNEDSLRMLLSFCPVLEYLSIERHDNDNLRGLVVDVPSLRRLSLTSYTGCSSDDYVIVTPSLKYFKAFDYRSEISSYKIEKIPELEEADISIERNPEKLFVYFKSIKCLSLQVDFNSKEEPGYDSGIVFNHLEELTPYINDANWSKLLFRLLNDSPKLRVLEISNSKSFYKEKIGEYLPVSWSKNQGSVPKCFLNSLETFRVKWYYSEEQEDRDFLSLIFKHARCLKSTSILHR

SEQ ID NO: 3973 - protein, 372 aa, Arabidopsis thaliana
MAKISDLSDELLMWLSKLEFYFSDGSESACLRDFIAKNLPLHKAPIIESLRFCSFFGSLQPKDLKSWVRIAVSRCVRELSISLHDTTAAVSLPSSLYTCKSLVTLKLYGKKVLLDVPRTVFLPSLKTLQLERLRYSDEDSLRLLLSYCPVLEDLSIVREDYDNLRALVVIVPSLQRLSLEIPGNCSSDGYVIVTPSLKYFKVVDYRESMSYLIEQMPELEEADIVVLQYPEKLLESVTFFKRLSIRVIFNTYTETVYRDGIVFNRLENLKLCICNGDWSKLLIQFLKDSPNLRVLNLLVDDYPSSLGDYEPVRWKNNKSSVPKCLLESLETFEFAGYIGTPEERDFLSYIFKHARCLKSSSILSRPERYHGI

SEQ ID NO: 3974 - protein, 182 aa, Burkholderia cepacia R18194
MSTIYDIPVNAIDGAQTTLRPYEGKVLLVVNVASKCGLTPQYEGLEALYEGKRAEGLEVLAFPANNFKGQEPGTDAEIQSFCTGTFGVKFPLFSKISVIGDDKHPLYRSLTQAQPQATGDGPFRTRLEGYGIQPNPAPEVLWNFEKFLVSRTGEVVARFSPDTTADDPKLVAAIDAELAKAA

SEQ ID NO: 3975 - protein, 472 aa, Arabidopsis thaliana
MSTASVIIIGAGISGISAAKILVENGVEDVLILEATDRIGGRIHKQNFGDVPVELGAGWIAGVGGKESNPVWELASRFNLRTCFSDYTNARFNIYDRSGKIFPTGIASDSYKKAVDSAILKLKSLEAQCSGQVAEEAPSSPKTPIELAIDFILHDFEMAEVEPISTYVDFGEREFLVADERGYECLLYKMAEEFLVTSHGNILDYRLKLNQVVREVQQSRNGVVVKTEDGSVYEANYVIVSASIGVLQSDLLSFQPLLPRWKTEAIQKCDVMVYTKIFLKFPQCFWPCGPGQEFFIYAHEQRGYFTFWQHMENAYPGSNILVVTLTNEQSKRVEAQSDQETMKEAMSVLRDMFGATIPYATDILVPRWWNNRFQRGSYSNYPMISDNQLLQNIKAPVGRIFFTGEHTSEKFSGYVHGGYLAGIDTSKSLLEEMKQSLLLQPLLAFTESLTLTHQKPNNSQIYTNVKFISGTS

SEQ ID NO: 3976 - protein, 100 aa, Glycine max
MSGVWVFKNGVVRLVENHGSDRKVLVHTASNEIITSYAVLEHKLSSLGWERYYDDPDLLQFHKRSTVHLISLPTRPNKFRSMHMYDIVVKNKNYFEVRDI

SEQ ID NO: 3977 - protein, 360 aa, Azotobacter vinelandii
MSKQILVLPGDGIGPEIMAEAVKVLQLANEKYQLGFVLGYDELGGAAVDKYGVPLADETLERARAADAILLGAVGGPKWDAIDPAIRPERGLLKIRSQLGLFGNLRPALLYPQLAEASTLRPEVVAGLDILIVRELTGGIYFGAPRESRLLANGERMAYDTLPYSESEIRRIAKVGFDMARVRGKKLCSVDKANVLASSQLWRAVVEEVAKDYPDVVLSHMYVDNAAMQLVRAPKQFDVIVTDNMFGDILSDEASMLTGSIGMLPSASLDADNKGMYEPCHGSAPDIAGKGIANPLATILSVSMMLRYSFGQVEAANAIEQAVSKVLDQGLRTGDIWSEGCRKVGTAEMGDAVVAALATL

SEQ ID NO: 3978 - protein, 277 aa, Triticum aestivum
  misc_feature (223)..(223): Xaa can be any naturally occurring amino acid
  misc_feature (239)..(240): Xaa can be any naturally occurring amino acid
  misc_feature (256)..(256): Xaa can be any naturally occurring amino acid
  misc_feature (259)..(259): Xaa can be any naturally occurring amino acid
  misc_feature (261)..(261): Xaa can be any naturally occurring amino acid
AGRVWHGGLTAVMKLTKLFIEKGAAGIHIEDQAPGTKKCGHMAGKVLVPIQEHINRLVAIRAQADIMGSDLLAIARTDAEAATLLSTNIDPRDHAFILGSTNSTLKPLNDLMIAAEATGKSGAELQRIEDEWLAKANLSSFDDAVAAAIDAGSFSDKAGIKQEYTSRAKGKSNFEARAVARQLLGRNIFFDWDAPRTREGYFRLKGGCDCAVNRAIAYAPYCXAIWMESKLPDFAQAEXXAQGVHAVWPEKKLAYXLSXSXNWETAMPRDEQETTSD

SEQ ID NO: 3979 - protein, 126 aa, Sinorhizobium meliloti
MADLAKIVEDLSSLTVLEAAELSKLLEEKWGVSAAAPVAVAAAGGAAGAAAPVEEEKTEFDVILTDAGANKINVIKEVRAITGLGLKEAKDLVEGAPKAVKEAVSKAEAADLKKKLEDAGAKVDVK

SEQ ID NO: 3980 - protein, 352 aa, Pseudomonas aeruginosa PAO1
MKALRWHAARDLRLSELERQAPRPGEVELEVAYCGICGSDLHEYQSGPHSIPQAEAHPLSGCRAPLTLGHEFCGVVAALGPGVEGPRIGDRVAVEPEYRCGECRYCREGRYNLCESMGFIGLMGDGGFAERARVPAYMLHRLPDAVGFRQAAVLEPAAVALHALRRSSLAPGQRCAVFGLGPIGLLLVMLARLRGIEDIAAVDVSPERLALAGEFGASRALDARDGDTAARLREGGALDCAFEAAGSQASLDAALASLRKGGELVLVSLMGEVRLDAFDLVNRELRLLGSVGYRDAYPELIALLADGRLDLARAVTRSVPLEQAVEHGFEALLRDKSQLKVLVNPNPALADA

SEQ ID NO: 3981 - protein, 510 aa, Brucella melitensis 16M
MNTAVRKIDVKKEAADLLSKLGVDASAYTGGDLTGFSPVSGEEIASIKTHSKEDAEKIIAKADEAFRAWRTVPAPKRGELIRLLGEELRASKEDLGRLVSLEAGKIPSEGLGEVQEMIDICDFAVGLSRQLYGLTIATERAGHRMMETWHPLGVVGVISAFNFPVAVWSWNAALAIVCGNAVVWKPSEKTLLTALACDAIFKRALKRFGDAPEGISQLLLGDREIGEVLVDSPKVPVVSATGSTRMGREVGPRLAKRFARAILELGGNNAGIVCPSADLDMALRAIAFGAMGTAGQRCTTLRRLFVHESVYDALVPRLQKAYASVSVGSPLETSALVGPLIDKQAFDNMQKALKEAAAHGGKVQGGERVDTGYENAYYVRPAIVEMPRQEGPVLEETFAPILYVMKYSDFDDVLASHNAVGAGLSSSIFTLNLQEAERFLSAEGSDCGIANVNIGTSGAEIGGAFGGEKETGGGRESGSDAWKAYMRRATNTINYSKALPLAQGVSFDID

SEQ ID NO: 3982 - protein, 379 aa, Zea mays
  misc_feature (173)..(173): Xaa can be any naturally occurring amino acid
MEAGGAGSGLNGAVQAKGTGADDGSAKRLPPCCVKARAAAPESEARCHATVVSGWFTEPRSRCGKASKVQYYNNPMWPGEANSLKVEKILYQGKSLYQEVLVFESSTYGKVLVLDGIVQLTDKDECAYQEMITHLPLCSIPSPKKVLVIGGGDGGVLREVSRHSSVESIDICXCKDFFPHLSVGFQDPRVQLHVGDAVEFLRNAPEGTYDAIIVDSSDPIGPAQELVEKPFFDTIARALRPGGVLCNQAESMWLHTHLIQDMLSICRETFKGSVRYAWTSVPTYPSGVIGFLLCAKEGPLVNFLTPINPIEKLEGATKAGREIRFYNSEMHRAAFVLPTFARRELEAYCVSTETEQAEETPAAPLKLTLASRSEIFATS

SEQ ID NO: 3983 - protein, 128 aa, Triticum aestivum
  misc_feature (50)..(50): Xaa can be any naturally occurring amino acid
  misc_feature (66)..(66): Xaa can be any naturally occurring amino acid
  misc_feature (81)..(81): Xaa can be any naturally occurring amino acid
  misc_feature (104)..(104): Xaa can be any naturally occurring amino acid
MVLEATMICIDNSEWMRNGDYAPSRFQAQADAVNLICGAKTQSNPENTVXVMTMAGKGVRVLVTPXSDLGKILACMHGLEXGAEANLAAAIQVAQLALKHRQNXRHIGYTSSESCEHKKFGDIGEKCA

SEQ ID NO: 3984 - protein, 132 aa, Arabidopsis thaliana
MRVTDECTSSFMDMKWKKVHRYIVFKIEEKSRKVTVDKVGGAGESYHDLEDSLPVDDCRYAVFDFDFVTVDNCRKSKIFFIAWSPEASKIRAKILYATSKDGLRRVLEGIHYELQATDPTEMGFDIIQDRAK

SEQ ID NO: 3985 - protein, 241 aa, Eschscholzia californica
MGRGRVELKRIENKINRQVTFAKRRNGLLKKAYELSVLCDAEVALIIFSNRGKLYEFCSSSSMFKTLERYQKSNYGAPETNVSVRESQEHSSHQEYLKLKARVEALQRSQRNLLGEDLGPLSGKELESLERQLDMSLKQIRSTRTQYMLDQLTDLQRREQMLSDANKTLRRRLEEGTVTCHQWEQNMQYGQQQAHAQGEGFFHPIECEPTLQMGYQQDQITVAAAAGPSMTMNSYMPGPGW

SEQ ID NO: 3986 - protein, 125 aa, Triticum aestivum
MAMEARMKGTVKWFNDTKGFGFITPADGSEDLFVHQSSIKADGFRSLAEGEVVEFAVSEGDDGRTKAVDVTGPDGSFVQGGAGGGGGGGGFGSRGGGGSRGGGGFGARGGDGSGGYGGGYGGGCG

SEQ ID NO: 3987 - protein, 268 aa, Arabidopsis thaliana
MSLNVDILKSTEIGKAVNGLRKHSSDKIRQLAKTLIAEWKELVDQWVNTTKEITGAEGTPESANPSVLDEEEAFPSLPYDVDIFTPEPNGFEISHFFDSLDFDGNPRNSEEHNTSREHERRPQNIAKRKPEGTQMRIQDAPFRSIKPSSATDFDGTRRPVKQSTEQRMKNETVSVHKSEKPMIQRKPVVTEQKRKAPGPQQEKLKGLDADAKFEFAKRKLQESYQHHENAKKQRTIQVLEMIPKQGSAQKPQLKRPGMSNRNWANGRK

SEQ ID NO: 3988 - protein, 453 aa, Zea mays
MAASARDSTDAAERVVDDHDGWASDAEMDVEMDVVEGDADRRDGGADGDDEYLLLTRIRDTSAAEARAGKDIQGIPWERIHIARQDYRKARLEQYKNYENFPQSGELMDKLCKQVEKSSKYYEFQHNTRSVKPSILHFQLRNLLWATSKHDVYFMSNSTVSHWSSLSHKLSEVLDFSGHVAPAEKYPGSLLEGFSGVQVSTLAVNEGLVVAGGFQGELIGKDVEGCSVKFCMRTTLSDNAITNAIDIHRSISGSLHITVSNNDCGVREYDMERYQLVNHYRYNWPVNHTSVSPDKKLLAVVGDDRDALLVDSRNGKVTSTLVGHLDYSFATAWHPDSRTFATGNQDKTCRIWDTRNLSTSLAVLRGNIGAIRCIRYSSDGRFLVFSEPADFVHVYSVAADYKKRQEIDFFGEVSGITLSPDDESLFIGVCDRVYASLLQYRMIRGFDYLDSYV

SEQ ID NO: 3989 - protein, 248 aa, Eschscholzia californica
MGRGRVELKRIENKINRQVTFAKRRNGILKKAFELSVLCDAEVALIIFSSRGKLYEFCSSSSILKTLERYQRCSSNASQASRSIKDNDETYQNYLKLKSRVEVLQQNQRNLLGLDLEPLSLKELDQLESQLEVSLKQVTSTKTQFMLDNLSDLQTKEEVLQEANRSLNRKMEENMAEIPQQLRWEAGDGHNIPYNRHIPITDGFYQPLECNPTFQIGSSSMKSFDHLTDPPPTVQNLLGYFPSWSFET

SEQ ID NO: 3990 - protein, 177 aa, Lemna gibba
MASSMMASTAAVARAGPAQSNMVAPFNGLRSSVAFPATRKANKNLSTLPSNGGKVSCMQVWPPEGLKKFETLSYLPPLSVEDLAKEVDYLLRNDWVPCIEFSKEGFVYRENHASPGYYDGRYWTMWKLPMFGCTDASQVIAEVEEAKKAYPEYFVRIIGFDNKRQVQCISFIAYKPT

SEQ ID NO: 3991 - protein, 346 aa, Triticum aestivum
  misc_feature (284)..(284): Xaa can be any naturally occurring amino acid
  misc_feature (292)..(292): Xaa can be any naturally occurring amino acid
  misc_feature (298)..(298): Xaa can be any naturally occurring amino acid
  misc_feature (316)..(316): Xaa can be any naturally occurring amino acid
MPRVCTHLHSFDPPILQVPELKAMASPFSAPSLIMEEEGRFEAEVAEVGAWWNTERFRLTKRPYTARDVVLLRGTLRQSYASGEMAKKLWRTLKAHQAGGTASRTFGALDPVQVTMMAKHLDTIYVSGWQCSSTHTSTNEPGPDLADYPYDTVPNKVEHLFFAQQYHDRKQQEARMSLPRAERAHAPFVDFLKPIIADGDTGFGGATATVKLCKLFVERGAAGVHLEDQSSVTKKCGHMAGKVLVAVSEHVNRLVAARLQFDIMGVENVLVARTDAVAATLIQXNIDARDHXFILGAXDPRLKNGSSRHALRRMSXGRTGGAAASRQWTHGHSNSRVVRSMELTHD

SEQ ID NO: 3992 - protein, 434 aa, Shigella flexneri 2a str. 301
MKTRTQQIEELQKEWTQPRWEGITRPYSAEDVVKLRGSVNPECTLAQLGAAKMWRLLHGESKKGYINNLGALTGGQALQQAKAGIEAVYLSGWQVAADANLAASMYPDQSLYPANSVPAVVERINNTFRRADQIQWSVGIEPGDPRYVDYFLPIVADAEAGFGGVLNAFELMKAMIEAGAAAVHFEDQLASVKKCGHMGGKVLVPTQEAIQKLVAARLAADVTGVPTLLVARTDADAADLITSDCDPYDSEFITGERTSEGFFRTHAGIEQAISRGLAYAPYADLVWCETSTPDLELARRFAQAIHAKYPGKLLAYNCSPSFNWQKNLDDKTIASFQQQLSDMGYKFQFITLAGIHSMWFNMFDLANAYAQGEGMKHYVEKVQQPEFAAAKDGYTFVSHQQEVGTGYFDKVTTIIQGGTSSVTALTGSTEESQF

SEQ ID NO: 3993 - protein, 177 aa, Lemna gibba
MASSMMASTAAAVARAGPAQSSMVPFNACRSSVPFPATRKANNNLSTLPGNGGRVSCMQVWPPEGLKKFETLSYLPPLSVEDLAKEVDYLLRNDWVPCIEFSKEGFVYRENHASPGYYDGRYWTMWKLPMFGCTDASQVIAEVEEAKKAYPEYFVRIIGFDNKRQVQCISFIAYKPT

SEQ ID NO: 3994 - protein, 242 aa, Liriodendron tulipifera
MGRGRVELKRIENKINRQVTFAKRRNGLLKKAYELSVLCDAEVALIIFSNRGKLYEFCSTSSMFKTLERYQKCNYGAPEAAVTTREIQSSHQEYLKLKARVEALQRSQRNLLGEDLGPLNGKELDTLERQLDVSLKQIRSTRTQYMLDQLTDLQRREQMLSEANKALKRRLDEGMQANPHQGWNHNPHAMEYVRQQGPPQGDGFFHPLDCEPTLQIGYQTDQITMSTAPGPSLNNYMPGWLA

SEQ ID NO: 3995 - protein, 177 aa, Lemna gibba
MASSMMASTAAAVARAGPAQTNMVPFNACRSSVPFPATRKANNDLSTLPSNGGRVSCMQVWPPEGLKKFETLSYLPPLSVEDLAKEVDYLLRNDWVPCIEFSKEGFVYRENHASPGYYDGRYWTMWKLPMFGCTDASQVIAEVEEAKKAYPEYFVRIIGFDNKRQVQCISFIAYKPT

SEQ ID NO: 3996 - protein, 483 aa, Rickettsia conorii str. Malish 7
MAEFTPITIAYGDGIGPEIMEAVLYILRKAEARIRLETIEVGEKLYKKHYTSGISEESWESIQRTGIILKAPITTPQGGGYKSLNVTIRKTLQLFANIRPAVSLHPFTRTLHPNLNLTIIRENEEDLYAGIEYRQTHNMYESMKLISHTGCEKIIRYAFEYAVKNNRKKVMCLSKDNIMKFSDGVLHKVFNEIAKEYPQINNAHYIIDIGTARLATKPEIFDVIVTSNLYGDIISDVAAEISGSVGLAGSANIGQHYAMFEAVHGSAPDIAGKDIANPSGLLNAAIMMLVHIGQGDIATLIENAWKKTIEDGVHTADIYNEQSSSKKVGTKEFAEEVTKRLGQLPTKLPKADYPLIAEKQESNIDYKIDTKEVKKLVGTDIFVNMNVSSAHDIADKINKLDLGNFELKTISSKGLKLWPRDTRFETVSDHWCCRFMNKDGTEIKHLDITRLLEALSTANIDFIKVENLFEFDGVAGYSLAQGE

SEQ ID NO: 3997 - protein, 411 aa, Microbulbifer degradans 2-40
MENSIFELQYALDTFYFLVCGALVMWMAAGFAMLEAGLVRSKNTTEILTKNVALFAIACIMYFVCGYAIMYGGDYFLTTITGDGVTGAEEPASYAPSADFFFQVVFVATAMSIVSGAVAERMKLWAFLAFAVVMCGVIYPVEGGWTWGGNSVFGMYTLGDLGWSDFAGSGIVHMAGAAAALAGVLVLGARKGKYGPNGQINAIPGANLPLATLGTFILWMGWFGFNGGSVLATASVESANSVAIVFMNTNAAAAGGLVSALILARILFGKADLTMALNGALAGLVAITAEPSTPSALQATLFGGLGGLLVVFSILTLDKLKIDDPVGAISVHGVVGLLGLLLVPVTNDASSFSGQIIGALTIFTWVFGTSLAVWFLIKLVIGVRVSEEEEFEGVDLSECGMEAYPEFTNGK

SEQ ID NO: 3998 - protein, 453 aa, Zea mays
MAASARDSTDAAERVVDDHDGWASDAEMDVEMDVVEGDADRRDGGADGDDEYLLLTRIRDTSAAEARAGKDIQGIPWERIHIARQDYRKARLEQYKNYENFPQSGELMDKLCKQVEKSSKYYEFQHNTRSVKPSILHFQLRNLLWATSKHDVYFMSNSTVSHWSSLSHKLSEVLDFSGHVAPAEKYPGSLLEGFSGVQVSTLAVNEGLVVAGGFQGELIGKDVEGCSVKFCMRTTLSDNAITNAIDMHRSISGSLHITVSNNDCGVREYDMERYQLVNHYRYNWPVNHTSVSPDKKLLAVVGDDRDALLVDSRNGKVTSTLVGHLDYSFATAWHPDSRTFATGNQDKTCRIWDTRNLSTSLAVLRGNIGAIRCIRYSSDGRFLVFSEPADFVHVYSVAADYKKRQEIDFFGEVSGITLSPDDESLFIGVCDRVYASLLQYRMIRGFDYLDSYV

SEQ ID NO: 3999 - protein, 327 aa, Zea mays
MDATPPSSRDLSLEPSRPASSAGPAKRVGLLLGRYELGRLLGHGTFAKVYHARQADTGETVAIKVLDKEKALRNGLVPHIKREIAILRRVRHPNIVRLFEVMATKSKIYFVMEFVRGGELFARVAKGRLKEDTARRYFQQLISAVGFCHARGVFHRDLKPENLLVDERGDLKVSDFGLSAVADQFHPDGLLHTFCGTPSYVAPEVLARRGYDGAKADIWSCGVILFVLMAGYLPFHDQNLMAMYRKIYRGEFRCPRWFSKDLSCLMNQLLDTNPETRITVAPGAAQARSSSPLCSSAPSIRNSEFRTHKHACSLFDKSNLLSKPSPV

SEQ ID NO: 4000 - protein, 474 aa, Mycobacterium avium subsp. paratuberculosis str. k10
MHGLLSKTRVYLVPVLGSALSAHQAGVDRLLESYRSIPATSAVRLAKPTSNLFRARTKRDAPGLDTSGLTGVLGVDPETRTADVAGMCTYADLVAATLPYGLSPLVVPQLKTITLGGAVSGLGIESASFRNGLPHESVLEMDILTGAGELLTASRTQHADLFRAFPNSYGTLGYSTRLRIELEPVAPFVALRHIRFHALADLIAAAERIIDTGGHAGTPVDYLDGVVFSADESYLCVGRRTTTPGPVSDYTGQHIYYQSIRHDSPGDEPTKDDRLTMHDYFWRWDTDWFWCSRAFGVQNPRVRRWWPRRYRRSSVYSKLVSLDRRLRISDRIEARNGRPPRERVVQDVELPVERTFEFLEWFLETVPITPIWLCPLRLRDHDGWPLYPMRPDHTYVNVGFWSSVPAGATEGATNRLIEAKVSELDGHKSLYSDSFYTREEFDELYGGEAYNTVKKTYDPDSRLLDLYAKAVQRR

SEQ ID NO: 4001 - protein, 506 aa, Zea mays
  misc_feature (51)..(51): Xaa can be any naturally occurring amino acid
MASPAMVPLRQLFVDGEWRPPAQGRRLPVVNPTTEAHIGEIPAGTAEDVDXAAVAAARAALKRNRGRDWARAPGAVRAKYLRAIAAKVIERKPELAKLEALDCGKPYDEAAWDMDDVAGCFEYFADQAEALDKRQNSPVSLPMETFKCHLRREPIGVVGLITPWNYPLLMATWKVAPALAAGCAAVLKPSELASVTCLELADICKEVGLPPGVLNIVTGLGPDAGAPLSAHPDVDKVAFTGSFETGKKIMAAAAPMVKPVTLELGGKSPIVVFDDVDIDKAVEWTLFGCFWTNGQICSATSRLLIHTKIAKKFNERMVAWAKNIKVSDPLEEGCRLGPVVSEGQYEKIKKFISNAKSQGATILTGGVRPAHLEKGFFIEPTIITDITTSMEIWREEVFGPVLCVKEFSTEDEAIELANDTQYGLAGAVISGDRERCQRLSEEIDAGCIWVNCSQPCFCQAPWGGNKRSGFGRELGEGGIDNYLSVKQVTEYISDEPWGWYQSPSKL

SEQ ID NO: 4002 - protein, 347 aa, Listeria monocytogenes str. 4b F2365
MKNTIKWIAIGFAGIILLPLLIVFFIYKKAVGKKEYNPEVLENLDEASQEFVKNTSPLSDVDSRYKYMRLATKALPSAKDIEIGDVENKKIDGPAGKIPIRIYTPQEDGPFEIIVYYHGGGFVLGGLQTHDAIARKLVQTTGARVVTVDYRLAPENPFPAAVEDAYAALLWVQNHRTSLRAKSSDIIVAGDSVGGNLATVVTQIAKSKGKPNITAQILLYPATDIFSRDASVLYPSMDEFAEGYVLTKESLDKFFKLYIANASDRKYDPLVAPIRSKDLVGLPKTFIATAEFDPLRDQGEAYAKKLKDAGVEVFAKRFEKVPHGFMTTNSEATDETYELISEFLEEK

SEQ ID NO: 4003 - protein, 344 aa, Arabidopsis thaliana
MLTQKKSFGRLSAVINPLDYIINPLDNPWFDLSEVSIESCYGSQTLPRSLRSRHWNLKTLKLKKLSFVDTDAYMWFESLKTLHLLSVRFSDDKSVQRLLSVCPKLEDLVVKRTTYVNVRIFSINVPSLRSLSIDYSWAVSRPADVHGFVIDAPSLRFMNIKDHFSNLLQFENMPKLVKANVEVDCDLSEKFIGSITSIQHISLCSKNSKIPYPSGTSFFYLEHLELCTCSQDWWNLLNRILEDAPRLQVLKLKLGNCVQCSTELMDYWNEPCSVPKCLSSHLEIFEWRHYKGTKQERKVAKYILAKASCLKVAIFSSVCIEKNLIFKKLENVDRGSKACELVFQ

SEQ ID NO: 4004 - protein, 435 aa, Arabidopsis thaliana
MEAARSGIEDVTSPDRISQLPNDLLFRILSLIPVSDAMSTSLLSKRWKSVWKMLPTLVYNENSCSNIGSLGFDQFCGRSLQLHEAPLLKTLTLELRKQTDSLDSSIFPNIHSTLLEFSIKSTGYPVYYSTISFPNNLDVFQTLVVLKLQGNICLDVVDSPVCFQSLKSLYLTCVNFENEESFSKLLSACPVLEDLFLQRLCSVGRFLFSISVPSLQRLTYTKEQAYYSNDEAILEITAPSLKHLNIFDRVGVFSFIEDMPKLVEASVRVKLSKNEKLPKVLTSVEHLSLDLYPSMVFHLDDRFISKQLLHLKLDIYDNFQSNLLLSLLKDLPNLQSLKLNHSHPSYNVEDQPCSVSEPSSVPECLSFHLETFQWIGYAGTFEEIAAAVYVLKNARCLKNATISLYSRGTENGLMMIKELESMSKGSIMCQLLVKF

SEQ ID NO: 4005 - protein, 441 aa, Arabidopsis thaliana
MKAPRLGSEEVSYSDRISYLPDDLLLRILSFIHTSDAISTSLLSKRWKFVWKMMPTLDLDEDSCRNIGTLRFDEGCCMFLKSHEAPVLTSLNLKLMTPSHDIDRLLSNIKPILHEITITSYRYSTIRFPRNLNVCQTLVVMKLQDKVLVDVSFPVCFRSLKSLHLTRVKYSCRESFTTLLSACPVLEDLDLFIGRVHYDCLNSFTIWVPSLQRLSICDESYRFRSTTFEISVPSLKYLKIACQDSCFKFVEDMPNLVEAHVEANQHETKNLLRFLTSVERLKDPDLTDRIFHQLLYLELHLHKRLNGDRILSLLKHSPNLQTLKLNEVNQNVAKPLRSIKDQPNISVRKPNSVPECLTFHLETLEWQGYAGRPEDKEIAVYILGNALRLNTATISRYFSSSRFRHHQKKDLKIVEELKSITKASTSCQLVLQQFIEIKYSM

SEQ ID NO: 4006 - protein, 488 aa, Arabidopsis thaliana
MGSKLKLYPLLNHSSVFHPDSRYQSAPTMEEEQQQLRVLFAKYEMGRLLGKGTFGKVYYGKEITTGESVAIKIINKDQVKREGMMEQIKREISIMRLVRHPNIVELKEVMATKTKIFFIMEYVKGGELFSKIVKGKLKEDSARKYFQQLISAVDFCHSRGVSHRDLKPENLLVDENGDLKVSDFGLSALPEQILQDGLLHTQCGTPAYVAPEVLRKKGYDGAKGDIWSCGIILYVLLAGFLPFQDENLMKMYRKIFKSEFEYPPWFSPESKRLISKLLVVDPNKRISIPAIMRTPWFRKNINSPIEFKIDELEIQNVEDETPTTTATTATTTTTPVSPKFFNAFEFISSMSSGFDLSSLFESKRKLRSMFTSRWSASEIMGKLEGIGKEMNMKVKRTKDFKVKLFGKTEGRKGQIAVTAEVFEVAPEVAVVELCKSAGDTLEYNRLYEEHVRPALEEIVWSWHGDNHNNNIVKSNGNYVSDENSGSDC

SEQ ID NO: 4007 - protein, 499 aa, Hordeum vulgare
MIGTRVLAHSRVDPAIRWGVAARGRVVFAAIRWGAAARGRVVFAAVRWGAAARGTKREAGQETSTSETKKTKRKWGRGFCGMASHEVEEPLTSETKKTKRKWGRGFCGMASHEAEEPLTSETKKKRKNVAASSEPDKKRWFKNKIWKKKKAKNEQLATLVKEISLATKLNSAMHVNINLSMNICPTQTYEEHSGTYLRNLAVIAVKQLDKDGLQGNREFLVEVLMLSLLHHPNLVTLLGYCTECDQKILVYEYMPLGSLQDHLLDLTPKSQPLSWHTRMKIAVDAARGLEYLHEVANPPVVYRDLKASNILLDGNFSAKLADFGLAKLGPVGDKTHVTTRVMGTYGYCAPEYAMSGKLTKMSDIYCFGVVLLELITGRRAIDTTKPTREQILVHWAAPLFKDKKKFTKMADPLLDSKYPLKGLYQALAISSMCLQEEAISRPLISDVVTALTFLADPNYDPPDDIEPLPISVPNYDKGISLREAEISLSGFEEKQVEDS

SEQ ID NO: 4008 - protein, 372 aa, Zea mays
LPSVAGQWQKGKLLGSGTFGCVYEATNRHTGALCAMKEVNIIPDDAKSAESLKQLEQEVKFLSQFKHENIVQYYGSDIIEDRFYIYLEYVHPGSINKYVKQHYGAMTESVIRNFTRHILRGLAFLHGQKIMHRDIKGANLLVDVQGVVKLADFGMAKHLSTAAPNLSLKGTPYWMAPEMVQATLMKDVGYDLAVDIWSLGCTIIEMFDGKPPWSDLEGPAAMFTVLHKDPPIPENLSNEGKEFLQCCFKRTPAERPTASELLDHPFIRNSSHYNKHGSIHSFAGIKVNDTTYSSRDNWPASKSDSNMKGKNTNVEPSRAARSSESTFRLAPLTIQEATPNFSPRPFVNSMQFTSVNPQPSPLPRPNGKEVLF

SEQ ID NO: 4009 - protein, 552 aa, Glycine max
VALVECVKAIQATKVVFNHLYDPVSLVRDHNIKEKLVEQGISVQSYNGDLLYEPWEVNSESGRAFTTFNAFWKKCLHMQMDIVSVVPPWQLIPAEGKIEECSLEELGLENESEKPSNALLGRAWSPGWRNADKALREFVELHLLHYSKKRLKVGGESTSLLSPYLHFGELSARKVFQVTCMKQILWTNEGNSAGEESANLFLRAIGLREYSRYLCFNFPFTHERALLGHLKFFPWNPDADIFKNWRQGRTGFPLVDAGMRELWATGWIHNRIRVIVSSFAVKMLLLPWKWGMKYFWDTLLDADLESDILGWQYISGGLPDGHELERLDNPEIQGVKFDPEGEYVRQWLPELARMPTEWIHHPWDAPLTVLRAAGVELGQNYPKPIIDIDLARERLTEAIFKMWESEAAAKAAGSEPRDEVVVDNSNTLENLDTRKVVVLGKAPCATISANDQKVPALQDSKNEPPTRKRPKHMIEEGQNQDHSQNHNKDTGLSSIDQDICSTADSSSCKKQCASTSSYSFSVPQQCSSSSNLKWPWQEKIDMEQSSSKDGAM

SEQ ID NO: 4010 - protein, 341 aa, Escherichia coli CFT073
MKALSKLKAEEGIWMTDVPVPELGHNDLLIKIRKTAICGTDVHIYNWDEWSQKTIPVPMVVGHEYVGEVVGIGQEVKGFKIGDRVSGEGHITCGHCRNCRGGRTHLCRNTIGVGVNRPGCFAEYLVIPAFNAFKIPDNISDDLASIFDPFGNAVHTALSFDLVGEDVLVSGAGPIGIMAAAVAKHVGARNVVITDVNEYRLELARKMGITRAVNVAKENLNDVMTELGMTEGFDVGLEMSGAPPAFRTMLDTMNHGGRIAMLGIPPSDMSIDWTKVIFKGLFIKGIYGREMFETWYKMAALIQSGLDLSPIITHRFSIDDFQKGFDAMRSGQSGKVILSWD

SEQ ID NO: 4011 - protein, 157 aa, Brassica napus
  misc_feature (137)..(137): Xaa can be any naturally occurring amino acid
MAAVTPLAKYKLVFLGDQSVGKTSIITRFMYDKFDTTYQATIGIDFLSKTMYMEDRTLRLQLWDTAGQERFRSLIPSYIRDSSVAVIVYDVANRQSFLNTSKWIEDVRTERGSDVIIVLVGNKTDLVDKRQVSIEEXDNKARDFGVIFIETSARQDL

SEQ ID NO: 4012 - protein, 250 aa, Zea mays
MVKAYPTVNEDYLKAVDKAKRKLRGLIAEKNCAPLMLRLAWHSAGTFDVATKTGGPFGTMKNPAEQAHGANAGLEIAIRLLEPIKEQFPILSYADFYQLAGVVAVEVTGGPDVPFHPGRQDKPEAPPEGRLPDATQGSDHLRQVFSTQMGLSDQDIVALSGGHTLGRCHKDRSGFEGAWTSNPLIFDNSYFKELLSGEKEGLLQLPSDKALLSDPSFRPLVDKYAADEDAFFADYAEAHLKLSELGFAEA

SEQ ID NO: 4013 - protein, 489 aa, Sinorhizobium meliloti 1021
MQSYQIREMATPLCQPAASHFIDGTFIEDRTGPEILSVNPVDGEIIAKLHGATSCIIEKAIASAKRAQKEWARKEPAERGRVLSRAADIMRARNRELSVLETRDTGKPISETLVADAASGADCLEYFGAIAATLSGDSIQFGEDWVYTRREPLGVCLGIGAWNYPIQIAAWKAAPALACGNAMIFKPSEVTPLSALKLAEILTEAGLPPGVFNIVQGAGDVGAELATHPAIAKVSLTGSVKTGARVASAAMAGIRPVTMELGGKSALIVFDDADVEAAVSGAILGNFYSAGQICSNGTRVFLQRGIREAFLARLLARVAALKIGDPMDEETDIGPLVSAAHRNRVATYVARAEVEGAYQMAPPRKLPPGDAWHEPVVFTNVTDWMTLAREEVFGPVMAVLDFDDEQDVVARANATDFGLAAGIFTRDLVRAHRLAAELEAGTVWINAYNLTPAGMAFGGIKRSGIGRENGRVAIDHYTQLKSVFVSMQT

SEQ ID NO: 4014 - protein, 576 aa, Zea mays
  misc_feature (497)..(497): Xaa can be any naturally occurring amino acid
LAARGGSNRDSSSRAPQGQPSRRRTRKLAPCSPAARAVPAMESFGVPPAPVAAPEKRKKPLDLKDPVPAAAANGGGATKASPAAKWAEKKKLVGGDAGYVLEDVLHLTDYLPQLPTYPNPLQDNPAYSVVKQYFVNPDDTVTQKIVVHKTSARGTHFRRAGPRQRVYFQPDEVNAAIVTCGGLCPGLNTVIRELVCGLYDMYGVTSVVGIEGGYKGFYSKNTVALTPRSVNGIHKRGGTVLGTSRGGHDTAKIVDCLQDRGINQVYIIGGDGTQKGASVIYEEEVRRQGLKCSVVGVPKTIDNDIAVIDKSFGFDTAVEEAQRAINAAHVEAESAENGIGVVKLMGRNSGFIAMYATLASRDVDCCLIPESPFYLEGKGGLLEFVERRLKDNGHMVIVVAEGAGQDLIARSMNFVDTQDASGNKLLLDVGLWLSQKIKDHFKKKPSFPITLKYIDPTYMIRAVRSNASDNVYCTLLAHSALHGAMAGYTGFTVAPVXGRHAYIPFYRITEKQNKVVITDRMWARVLCSTNQPCFLSHEDVENMKHDDDEHHHMHNTQLLEGGSSPVSKCNGSAAAV

SEQ ID NO: 4015 - protein, 107 aa, Glycine max
  misc_feature (5)..(5): Xaa can be any naturally occurring amino acid
  misc_feature (8)..(9): Xaa can be any naturally occurring amino acid
  misc_feature (11)..(11): Xaa can be any naturally occurring amino acid
  misc_feature (15)..(16): Xaa can be any naturally occurring amino acid
  misc_feature (25)..(25): Xaa can be any naturally occurring amino acid
  misc_feature (29)..(29): Xaa can be any naturally occurring amino acid
  misc_feature (37)..(37): Xaa can be any naturally occurring amino acid
  misc_feature (43)..(43): Xaa can be any naturally occurring amino acid
  misc_feature (46)..(46): Xaa can be any naturally occurring amino acid
  misc_feature (49)..(50): Xaa can be any naturally occurring amino acid
  misc_feature (67)..(67): Xaa can be any naturally occurring amino acid
  misc_feature (75)..(75): Xaa can be any naturally occurring amino acid
  misc_feature (79)..(79): Xaa can be any naturally occurring amino acid
  misc_feature (86)..(86): Xaa can be any naturally occurring amino acid
  misc_feature (89)..(89): Xaa can be any naturally occurring amino acid
  misc_feature (92)..(92): Xaa can be any naturally occurring amino acid
MSILXKGXXAXITEXXNDNLKEEFXLIRXIVDKYNYXAMDTEXPGXVLXXVGNMKNIDHYNYQTLTXNVDMLKLXQLGXTFYDENXNLXPAXGEPLLWQFNFRESTS

SEQ ID NO: 4016 - protein, 319 aa, Pinus radiata
MEITHTLLEDVPGFIQVYEDGFVARFDHRLTPASPQVASDGARSKDVVIDPVKGISARLFLPAELPLAQKLPLLFYFHGGGFCIGTTAWEGYHLFLSLLAATTRALVISVDYRLAPEHRLPAAYDDCFDAVEWVASGGGKAEPWLDAHADYGRCFLAGESAGGNIAHVVGSRTADQDLGPLKIRGLIVIHPYFGSEERIECEKVAAGDDAAALELNDLFWRLALPPGSDRDYPTCNPRGPRSADLRKVPLPPVLVTVAGLDLLKTRGLLYYELLQSCGKEAELMEAEGEIHAYHVFHPRSEATRLLQERMSQFIHRFDA

SEQ ID NO: 4017 - protein, 218 aa, Glycine max
  misc_feature (176)..(176): Xaa can be any naturally occurring amino acid
MVLRKVGKYEIGRTVGEGTFAKVKFAQNTESGESVAMKVLDRSAIIKHKMVDQIKREISIMKLVRHPYVVRLHEVLASRTKIYIILEFITGGELFDKIVSHGRLSEAESRRYFQQLIDGVDFCHSKGVYHRDLKPENLLLDSQGNIKISDFGLSAFPGQGVSLLRTTCGTPYYVAXGVLSTRGYYGASPDVWSCGVILYVLLAGYLPFDELDLPTFVQ

SEQ ID NO: 4018 - protein, 350 aa, Camellia sinensis
QIKVSTPLSSSIILDSFPPSQAFFNRSLNPVMVPLLSFLQSSGSSLMLNIYPYYDYMQSNGVIPLDYALFRPLPSNKEAVDANTLLHYSNVFDAMVDAAYFAMAYLNFTNIPVIVTESGWPSKGDSSEPDANLDNANTYNSNLIKHVLNKTGTPKHPGISVSTYIYELYNEDMKPGPLSEKNWGLFDANGAPIYILHLTGSGSVLANDTANQTYCTAKDGADAKMLQAALDWACGPGKVNCSALLQGQPCYEPDTVAAHATYAFDTYYQQMGKASGTCDFNGVATITTTNPTHGSCVFPGSNGKNGTFLNSTAPSLNSTSSGCPARYMRGSASASAIVAVGILSWSLVFL

SEQ ID NO: 4019 - protein, 370 aa, Brucella melitensis 16M
MASRKLLLLPGDGIGPEAMAEVRKVIAFLNSDLNLGFETEEGLVGGCAYDAHGQAISDADMEKALAADAVLFGAVGGPKWDSVPYEVRPEGGLLRLRKDMQLYANLRPAICYPALAHSSSLKPEVIEGLDILILRELTGGVYFGEPKEIIDLGNGQKRGIDTQVYDTYEIERIADVAFELARTRRNKVTSMEKRNVMKSGVLWNQGVTARHKEKHADVQLEHMLADAGGMQLVRWPKQFDVILTDNLFGDLLSDVAAMLTGSLGMLPSASLGAADSKTGKRKALYEPVHGSAPDIAGKGIANPIAMIASLAMCLRYSFGLVAEADRLEAAIAGVLDDGIRTADIWSEGNTKVGTTEMGDAILAKFKALSA

SEQ ID NO: 4020 - protein, 646 aa, Glycine max
  misc_feature (232)..(232): Xaa can be any naturally occurring amino acid
MSSAEKPSSKGQAWFCTTGLPSDIVVEVDDMTFHLHKFPLMSKSRKLHLLITQQEAASNSTVPQQQQQQQETEDEDEIVEEQCHVTFTGFPGGSEAFEMAAKFCYGVKIDLTPSNVAALRCAGEFLEMTEDYSEDNLVSKTEGFLSQHVLKNLKDSVKTLKSCDSLMPMAENLGITQRCVDSVVSRASSADPALFGWPVSDATSVSKQVLWNGLDGDGRRKVGAGAGESWFXEDLALLRLPLFKRLILAMRSAELSPEIIETCLMYYAKKYIPGVSRSNRKPLPSSSSSSSVATEAEQKEILETLVSNLPLEKSSKAATATRFLFGLLRTTNILNASEACRDALEKKIGLQLEEATLDDLLVPSYSYLNETLYDVDCVARILGHFLEEERNVAAIDGRAPRSPGLMLVGKLIDGYLSEIATDANLKPSKFYDLAISVPDRARLFHDGLYRAVDVYLKAHPWVFEAEREKICGLLDCQKLTLEACTHAAQNERLPLRAVVQVLFFEQLQLRQAIAGTLMAAEAAAEPGRQSAALEREAEDGRGEGLGLEHVQERNGTWRVAVRENQVLRLDMDSMRTRVHQLERECSSMKRVISKFDKFAASGGGWRASLGRKFGCKFKTQVCDSHESTAVDTRKGRHHQQHHPHHD

SEQ ID NO: 4021 - protein, 99 aa, Glycine max
MSAVNITNVAVLDNPTAFLNPFQFEISYECLVPLDDDLEWKLTYVGSAEDETYDQQLESVLVGPVNVGTYRFVFQADPPDPLKIREEDIIGVTVLLLTC

SEQ ID NO: 4022 - protein, 177 aa, Lemna gibba
MASSMMASTAAVARAGPAQSSMVAPFNGLRSSVAFPATRKANNDLSTLPSNGGRVSCMQVWPPEGLKKFETLSYLPPLSVEDLAKEVDYLLRNDWVPCIEFSKEGFVYRENHASPGYYDGRYWTMWKLPMFGCTDASQVIAEVEEAKKAYPEYFVRIIGFDNKRQVQCISFIAYKPT

SEQ ID NO: 4023 - protein, 462 aa, Arabidopsis thaliana
MASNGVDEQIKLVEGPAGYVLEDVPHLSDYILDLPTYPNPLQSNAAYSVVRQYFVDEDDTVQEKIVVHKDSPRGTHFRRAGPRQKVYFKPSDVRACIVTCGGLCPGLNTVIREIVCGLHFMYGVTEVIGVDCGFRGFYSKNTVALTPKTVSDIHKRGGTILGTSRGGHDTSKIVDNIQDREINQVYIIGGDGTQKGANAIYKEIRRRGLKVAVAGIPKTIDNDIPVIDKSFGFDTAVEEAQRAINAAHVEATSVENGIGIVKLMGRYSGFIAMYATLASRDVDCCLIPESPFYLEGKGGLYEFIAKRLRENGHMVIVIAEGAGQDLVAESIEQQDASGNKLLKDVGLWMSLKIKEYFAKHNVMDITLKYIDPTYMIRAIPANASDNVYSTLLAQSAVHGAMAGYTGFVSGLVNGRHTYIPFNRITERQNKVVITDRMWARMLSSTNQPSFMNPPKGTTEFTD

SEQ ID NO: 4024 - protein, 177 aa, Lemna gibba
MASSMMASTAAVARVGPAQTNMVAPFNGLRSSVAFPATRKANNDLSTLPSNGGRVSCMQVWPPEGLKKFETLSYLPPLSVEDLAKEVDYLLRNDWVPCIEFSKEGFVYRENHASPGYYDGRYWTMWKLPMFGCTDASQVIAEVEEAKKAYPEYFVRIIGFDNKRQVQCISFIAYKPT

SEQ ID NO: 4025 - protein, 323 aa, Ralstonia eutropha JMP134
MPAVPLDPQVAALLDLIARAKRPPIHVMDVEDAKIAYEKSAPILDISPLPMHAVDDLHVCARDGHGIPVRLYAPREASWADPLPMLVYFHGGGFTVGSVNSHDALCRMQAAHADCMVLSVDYRLGPQWRFPTAANDAFDVLHWVFEEAARLGADPARIALGGDSAGGTLATACAVHARDSGLAPVLQLLIYPGTCARQDTPSHGALAEGYLLTADMIQWFFSHYLDQESSRDDWRFAPLDGGGSGADVRGCCPAWIAVAGYDPLHDEGVAYADKLRAAGVTVTLADYAGMIHDFFKMGRFVPAVAQAHADAVAALRAAFGTGQ

SEQ ID NO: 4026 - protein, 151 aa, Desulfitobacterium hafniense DCB-2
MGKTLIHRGPDQNGLEYGEHFAFQHNRLAIIDIEKGRQPMTATHQGYDYTIVYNGELYNTADLRQELLEHGVKFKTYCDTEVVLYAYIIWGEQCSSKLNGIYAFVIYDSKEKKTYLSRDRFGVKPFFYTFVEGALLFASEIKALLKHPQVK

SEQ ID NO: 4027 - protein, 419 aa, Sulfolobus tokodaii str. 7
MLSRKIIEESDIYLATSTRDPELFPLVIDHGEGVWIYDVDGNKYLDFTSGIGVNNLGWPSHPEVIKIGIEQMQKLAHAAANDFYNIPQLELAKKLVTYSPGNFQKKVFFSNSGTEAIEASIKVVKNTGRKYIIAFLGGFHGRTFGSISLTASKAVQRSIVGPFMPGVIHVPYPNPYRNPWHINGYENPSELVNRVIEFIEDYIFVNLVPPEEVAGIFFEPIQGEGGYVIPPKNFFAELQKLAKKYGILLVDDEVQMGLGRTGKLFAIENFNTVPDVITLAKALGGGIMPIGATIFRKDLDFKPGMHSNTFGGNALACAIGSKVIDIVKDLLPHVNEIGKIFAEELQGLADDVRGIGLAWGLEYNEKKVRDRIIGESFKRGLLLLPAGRSAIRVIPPLVISEEEAKQGLDILKKVIKVVK

SEQ ID NO: 4028 - protein, 237 aa, Neurospora crassa
MATATESAPRNHLADKPENSMGGRNLSIITPTIQMSAPPGDPMDITSSNSNSSSNSNSSSINNNNATMAAPSNSDSLPPPKSPVEDTLNAQAAPNGRPQLSSANDQLSPDNIIMPAPAAAAPAVHQPKIVQTAFIHKLYNMLEDKSIQHLISWSPTSESFVMQPSQEFSKASSQYFKHTNISSFVRQLNMYGFHKGKESPDVAGYQQSLTWSKSERCLPPWSSRRYHLGVQAWQRQL

SEQ ID NO: 4029 - protein, 184 aa, Triticum aestivum
  misc_feature (41)..(41): Xaa can be any naturally occurring amino acid
  misc_feature (80)..(80): Xaa can be any naturally occurring amino acid
  misc_feature (99)..(99): Xaa can be any naturally occurring amino acid
  misc_feature (118)..(118): Xaa can be any naturally occurring amino acid
MAGVGRNMVAPLLVLNLIMYLIVIGFASWNLNHFINGLTNXRPGVGGNGATFYFLVFAILSRGSLAPLSKLAGVHHVRTXWRGDSLATSASSSLVAWGXPPLAFGLACKEIHIGGYRXGWRLRVLEAFVIILAFTQLLYVIALHSGLFGNQFGGNHAGGYPAEHAYGAGDPHNKGMGTGGVARV

SEQ ID NO: 4030 - protein, 497 aa, Arabidopsis thaliana
MPQAPMPEFSSSVKLKYVKLGYQYLVNHFLSFLLIPIMAIVAVELLRMGPEEILNVWNSLQFDLVQVLCSSFLVIFISTVYFMSKPRTIYLVDYSCYKPPVTCRVPFATFMEHSRLILKDKPKSVEFQMRILERSGLGEETCLPPAIHYIPPTPTMDAARSEAQMVIFEAMDDLFKKTGLKPKDVDILIVNCSLFSPTPSLSAMVINKYKLRSNIKSFNLSGMGCSAGLISVDLARDLLQVHPNSNAIIVSTEIITPNYYQGNERAMLLPNCLFRMGAAAIHMSNRRSDRWRAKYKLSHLVRTHRGADDKSFYCVYEQEDKEGHVGINLSKDLMAIAGEALKANITTIGPLVLPASEQLLFLTSLIGRKIFNPKWKPYIPDFKLAFEHFCIHAGGRAVIDELQKNLQLSGEHVEASRMTLHRFGNTSSSSLWYELSYIESKGRMRRGDRVWQIAFGSGFKCNSAVWKCNRTIKTPKDGPWSDCIDRYPVFIPEVVKL

SEQ ID NO: 4031 - protein, 493 aa, Mycobacterium avium subsp. paratuberculosis str. k10
MSDIQTQAKTEYDKLFIGGKWTEPSTSEVIEVHCPATGEYVGKVPLAAAADVDAAVAAARAAFDNGPWPTTPPKERAAVIANALKVMEERKDLFTGLLAAETGQPPTSVETMHWMSSIGALNFFAGPAVDQVKWKEVRTGGYGQSIVHREPIGVVGAIVAWNVPLFLAVNKLGPALLAGCTVVLKPAAETPLSANALAEAFAEAGLPEGVLSVVPGGIETGQALTSNTDVDIFSFTGSSAVGREIGRRGADMLKPCTLELGGKSAAIVLDDVDLPSALPMLVFSGIMNSGQACVAQTRILAPRSRYDEIVDAVSTFVQSLPVGLPSDPAAQIGSLISEKQRARVEGYIAKGIEEGARLVCGGGRPEGLDSGFFVQPTVFADVDNKMTIAQEEIFGPVLSIIPYDTEEDAIKIANDSVYGLAGSVWTADVQRGIAVSEKIRTGTYAINWYAFDRCCPFGGYKNSGIGRENGPEGVEHFTQQKSVLMPMGYTLEG

SEQ ID NO: 4032 - protein, 183 aa, Fusobacterium nucleatum subsp. vincentii ATCC 49256
MKIYDFSVKNRKDEDISLKSYKGKVLLIVNTATRCGFTPQYDELENLYEKYNKEGFEVLDFPCNQFGNQAPESDEEIHTFCQLNYKVKFDQFAKVEVNGENALPLFQYLKEQKGFSGFDPKHKLTSVLTEMLSKNDPDFAKKSDIKWNFTKFLVDKSGNVVARFEPTTSVKVIEQEIKKLLEK

SEQ ID NO: 4033 - protein, 349 aa, Nostoc punctiforme PCC 73102
MELIDRFKALLAALLYGQEDLRLEQVADPTPAAGEVVIQVGAATTCGTDLKVWRRGGHAKMLKPPTLFGHEGAGRIVALGAGVTNWQVGDRIVANNSAPCMKCFFCQRQEYSLCPNLTWNNGTFAEYLKIPAPIVEHNLLQIPDELPWELAAMTEPLACVLHGVARSNIKPKDRVVVLGDGAIGLMFVAALSEKAEVLLWGGNNHRLEIGQKLGATQTFNYHQIPDIPNLVKELTQGWGADVAIEATGVPSVWETAIACARPGATVNLFGGCPRDTSITVNTEQLHYSELTIKGVFHNTPEYVREALALIASRKIPFELLISEQRPLKDLEQVFCEMKARQVIKAAMIP

SEQ ID NO: 4034 - protein, 323 aa, Pichia stipitis
  misc_feature (58)..(58): Xaa can be any naturally occurring amino acid
MSSNSLEQLKATGTVIVTDTGEFDSIAKYTPQDATTNPSLILAAAKKPEYAKVIDVAXEYAKDKGSSKKEKAEIALDRLLIEFGKNILAIVPGRVSTEVDARLSFDKEATIKKALELIALYESQGISKDRILIKIASTWEGIQAARELEAKHGIHCNLTLLFSFVQAVACAEAKVTLISPFVGRILDWYKASTGKTYEGDEDPGVISVRAIYNYYKKYGYKTIVMGASFRNTGEIKALAGCDYLTVAPKLLEELLNSTEPVPQVLDAASASATDVEKVSYVDDEATFRYLFNEDAMATEKLAQGIRAFGKDAVTLLEQLEARF

SEQ ID NO: 4035 - protein, 123 aa, Lactobacillus delbrueckii subsp. lactis
  misc_feature (99)..(99): Xaa can be any naturally occurring amino acid
  misc_feature (109)..(109): Xaa can be any naturally occurring amino acid
MKLQTKAMLITYPDSLGHNLKDLSQVMDRYFSKAIGGIHLLPFFPSHGDRGFSPMTYEKVAPEFGTWSDVEKLGEQYYLMFDFMINHISAHSDYYLDLXKNKEKSPWRXLFLSWDKFWPAGRP

SEQ ID NO: 4036 - protein, 493 aa, Triticum aestivum
MDPNSFKTGGLLLPTIERRCASPPSVIVIGGGISGIAAARVLSNSSFEVTVLESRDRIGGRVHTDYSFGCPIDMGASWLHGVSNENSLAPLIGHLGLRLYHTSGDNSVLYDHDLESCSLFDKNGVAVPMETAAKVGVIFEKILKETVKLRDEQEHDMPLEQAISMVLERHPDLKLEGLDDRILQWCVCRLEAWFAADADEISLKNWDQEHVLTGGHGLMVDGYFPVIQALSQGLDIRLNQRVKKIARQQKGVTVTIEDGTQYSADACIITVPLGVLKANVIKFEPELPSWKSSAIADLGVGIENKVAMHFDKAFWPNVQVLGMVGPTPKTCGYFLNLHKATGHPVLVFMAAGRFAQDVEKLSDKEAVELVMCHLRKMIPDATEPTQYLVSRWGSDPNSLGSYSCDLVGKPSDVCERFSAPVESVLYFAGEAASAEHSGAVHGAYSSGMNAGKECRKKLFINKGVLNLTRLAPRLSRNWGTFSPSPNWPPQGIR

SEQ ID NO: 4037 - protein, 450 aa, Ralstonia solanacearum
MTPSTTSVFHRDPRKTLPTAVGGESMMLIDAEGKRYLDASGGAAVSCLGHGHPRVVEAICKQVRALAYAHTSFFTTAVAEELAARLAAAAPGDLGHVYFVSGGSEAIEAALKLARQYFVEIGQPQRQYFIARRQSYHGNTLGALAIGGNAWRREPFLPLLVPAHHVSPCFAYRERRDGETDAQYVQRLADELDAKIVELGADRVAAFIAETVVGATAGAVPPVADYFRKIRAVCDRHGVLLILDEVMSGMGRTGHLFACEEDGVVPDLIAIAKGLGGGYQPIGAMIASDRIYDAITRGSGFFQHGHTYIGHATACAAALEVQKVIAEENLLANVLARGEQLRAALRERFAAHPHVGDVRGRGLFVGVELVADRGTKAPLPPARKTHARVRAEAMQRGLMVYPMGGTIDGQRGDHILLAPPFIATAQDIDAIVARLGDAVEAATANALEAA

SEQ ID NO: 4038 - protein, 294 aa, Arabidopsis thaliana
  misc_feature (182)..(182): Xaa can be any naturally occurring amino acid
MAIPTETQHQEKEASDASAAAAQKRWTLSDFDIGKPLGRGKFGHVYLAREKRSNHVVALKVLFKSQLQQSQVEHQLRREVEIQSHLRHPNILRLYGYFYDQKRVYLILEYAARGELYKDLQKCKYFSERRAATYVASLARALIYCHGKHVIHRDIKPENLLIGAQGELKIADFGWSVHTFNXRRTMCGTLDYLPPEMVESVEHDASVDIWSLGILCYEFLYGVPPFEAMEHSDTYRRIVQVDLKFPPKPIISASAKDLISQMLVKESSQRLPLHKLLEHPWIVQNADPSGIYRV

SEQ ID NO: 4039 - protein, 85 aa, Glycine max
  misc_feature (13)..(13): Xaa can be any naturally occurring amino acid
  misc_feature (82)..(82): Xaa can be any naturally occurring amino acid
  misc_feature (84)..(84): Xaa can be any naturally occurring amino acid
MVLESTMVCVDKXEYMRNGDFLPTRLQAQQDAVNIVCHSKTRSNPENNVGLITLANDCEVLTTLTPDTGRILSKLHTVQPKXNXT

SEQ ID NO: 4040 - protein, 281 aa, Cucumis melo
TLEDGMKVAVKRGNPRSEQGLAEFRTEIEMLSKLRHRHLVSLIGYCDERSEMILVYEYMANGPLRSHLYGTDLPPLSWKQRLDICIGAARGLHYLHTGAAQSIIHRDVKTTNILLDENFVAKVADFGLSKTGPSLDQTHVSTAVKGSFGYLDPEYFRRQQLTEKSDVYSFGVVLMEVLCTRPALNPVLPREQVNIAEWAMTWQKKGMLDHIMDPNLVGKVNPASLKKFGETAEKCLAEYGVDRPSMGDVLWNLEYALQLEETSSALMEPEDNSTNQSLPSN

SEQ ID NO: 4041 - protein, 496 aa, Pseudomonas sp. VLB120
MNSSLSAIDGLRLPHQMLIGGQWVSAQSGKTLNVYNPATGDILTEVPDGDVEDVNAAVESAAATLRSDTWRPCLPVLASVFCCAWRISSEVHGDELARLETLNNGKLLIYSKLMEVGASAQWLRYMAGWATKLTGSTLDLSLPLPPEVRSRASTQRVPVGVVAAIIPWNFPLLMAVWKIAPALACGNTVVLKPAEETPLTALRLAELAMEAGLPAGALNVVTGRGETAGDALVRHPKVAKVAFTGSTEVGRIIGSACGRSLKAVSLELGGKSPVIVLADCDPQEAAEGAAAAIFFNHGQVCTAGSRLYVHESIYEDVIQRLAVIGESIVVGSGLEQGVHMGPMVSKKHHENVLRHIRNGIEDGADLICGGTEAPCAQGFFVKPTIFANREKKDIRLLSQEVFGPVLVATPFSDIAEVVNEANRSVYGLGASIWTNDLSAALRINDELEAGTVWVNTHNMVDPNLPFGGFKDSGVGREHGAAAIEHYTTTRSLVIAY

SEQ ID NO: 4042 - protein, 429 aa, Xylella fastidiosa Dixon
MSDLDKVTLNAGETSLVLPVLKPTLGNGCVDIAKLTKETGLFTYDSGFTATASCKSAITYIDGEKGVLLYRGYPIEQLAEHSSFLEVAYLLMNGELPRKDEFAKFDDEITHHTMMHESLKNFLGGFHYDAHPMAMLAASVASLSAFYHDTLDLNDLEQRRLAAIRLIAKVPTLAAAVHRYSIGWPIRYPRNNLGYVERFLHMMFEVPSEPLQLNPVVTKALDLLFILHADHEQNASTSTVRLVGSTGANPYASVAAGITALWGPAHGGANEAVLKMLEEIGDAKNVDLVIAKAKTKDKNSPFRLMGFGHRVYKHFDPRAKIIRETAHTVLGELGVNDPLLEVALKLEEVALKDDYFVQRKLYPNVDFYSGIIYKAINIPLEMFTVMFAIARTAGWVSHWLEQQVDPEMKISRPRQIYTGHSERDYKDAR

SEQ ID NO: 4043 - protein, 456 aa, Brucella suis 1330
MTAQPNSLEARDIRYHLHSYTDAVRLEAEGPLVIERGDGIYVEDIAGKRYIEAMSGLWSVGVGFSEQRLAEAAARQMKKLPFYHTFSYRSHGPVIDLAEKLVAMAPVPMNKAYFTNSGSEANDTVVKLIWYRSNALGEPERKKIISRKRGYHGVTIASASLTGLPNNHRSFDLPIDRILHTGCPHHYHDALPGESEEQFATRLANELEQLILAEGPHTIAAFIGEPVMGAGGVVVPPKTYWEKVQAVLGRYNILLVADEVICGFGRTGNLFGCQTFDIKPDILVMSKQLSSSYLPISAFLINERVYAPIAEESHKIGTLGTGFTASGHPVAAAVALENLAIIEERDLVANARERGARMQKRLRELQDHPLVGEVRGVGLIAGVELVIDKEAKTGLEQPGALGARANAALQERGVISRAMGDTLAFCPPLIINDQQVDTMVSALEAALNDVQASLGK

SEQ ID NO: 4044 - protein, 355 aa, Verticillium dahliae
MSRSNAPNPSGSRKISFNVSEQYDIQDVVGEGAYGVVCSAIHKPSGQKVAIKKITPFDHSMFCLRTLREMKLLRYFNHENIISILDIQKPRGYDTFNEVYLIQELMETDMHRVIRTQDLSDDHCQYFIYQTLRALKAMHSANVLHRDLKPSNLLLNANCDLKVCDFGLARSAASQEDNSGFMTEYVATRWYRAPEIMLTFKEYTKAIDVWSVGCILAEMLSGKPLFPGKDYHHQLTLILDVLGTPTMEDYYGIKCRRAREYIRSLPFKKKVPFRTLFPKTSDLALDLLEKLLAFNPVKRITVEEALKHPYLEPYHDPDDEPTAPPIPEEFFDFDKHKDTLSKEQLKQLIYQEIMR

SEQ ID NO: 4045 - protein, 286 aa, Oryza sativa (japonica cultivar-group)
MHTYIYTPRAAELEHSHSASATRSHSLGQAPPSLDRSRAAMDMAGHEVNSSSSSSGAESSSSSSGRQQYKKRPAGRTKFRETRHPVYRGVRRRGGAGRWVCEVRVPGKRGARLWLGTYVTAEAAARAHDAAMIALRGGAGGGGAACLNFQDSAWLLAVPPAAPSDLAGVRRAATEAVAGFLQRNKTTNGASVAEAMDEATSGVSAPPPLANNAGSSETPGPSSIDGTADTAAGAALDMFELDFFGEMDYDTYYASLAEGLLMEPPPAATALWDNGDEGADIALWSY

SEQ ID NO: 4046 - protein, 348 aa, Triticum aestivum
  misc_feature (66)..(66): Xaa can be any naturally occurring amino acid
LCPGLNDVIRQVVFTLATYGVKNIVGIPFGFRGFFEKCLKEMPLSRNLLENINLAGGSFLRVSRGXAKTSEIVHSIQATRIDMLFVLGGNGTHAGANAIHDECRKRKLKVSVVAVPKTIDNDIPLMDKTFGFDTAVEEAQRAINSAYIEARSAYHGIGLVKLMGRSSGFIAMHASLSSGQVDVCLIPEVSFALDGEYGVLQHLEQLIKNKGFCVVCVAEAAGQELLQNSGATDASGNAILSDIGVHMQQKIKTHFKGIGVHADIKYIDPTYMVRACRANASDAILCTVLGQNAVHGAFAGFSGITSCICNTHYVYLPVTQVITAPKRVNHKGRMWHRCLTSTGQPDFR

SEQ ID NO: 4047 - protein, 106 aa, uncultured Rickettsia sp.
MLKEIGSSENIPKYIAKAKDKNDPFRLMGFGHRVYKNYDPRAAVLKETCKEVLKELEQLENNPLLQIAIELEAIALKDEYFIERKLYPNVDFYSGIIYKAMGIPSQ

SEQ ID NO: 4048 - protein, 227 aa, Lactobacillus plantarum WCFS1
MNQDQLKQLVGQKAVEYIQDGMQVGLGTGSTVKFMVDALGERVKNEHLNIVGVSTSDRTAAQAKALGIPMKSVDEVDHLDLTIDGADEIADDFQGVKGGGAALLFEKIVAINSDKVMWIVDESKMVHQLGAFGLPVEVIPYGSQHVFEKMAARGYNPVFRKVNDELVRTDSNNIIIDLHIDPITDPHALAEDLIHMVGVVEHGLFLDMVNTVIVGHANGPEVIEARP

SEQ ID NO: 4049 - protein, 462 aa, Glycine max
MESKPHVLMQRYELGRLLGQGTFGKVYYARSTITNQSVAIKVIDKDKVMRTGQAEQIKREISVMRLARHPNIIQLFEVLANKSKIYFVIEYAKGGELFNKVAKGKLKEDVAHKYFKQLISAVDYCHSRGVYHRDIKPENILLDENGNLKVSDFGLSALVDSKRQDGLLHTPCGTPAYVAPEVIKRKGYDGTKADIWSCGIVLFVLLAGYLPFHDPNLIEMYRKISKAELKCPNWFPPEVCELLGMMLNPNPETRIPISTIRENSWFKKGQNIKNKRPVVENNTVSSSSTVLLDQNDCDGLAAEANGESVVPLSINAFDIISRSVGFDLSRFFDESFKKKEARFSSRLPANVIISKLEDIANQLRMKIKKKAAGLLKLESLNEGRKGVLSIDAEIFEVTPCFHMVEVKKSNGDTLEYQKILKEDIRPALQDIVWVWQSDQQLQSQQSEQQQQTDDQQQQQPQS

SEQ ID NO: 4050 - protein, 205 aa, Triticum aestivum
MGERVKGTVKWFNVTKGFGFISPEDGSEDLFVHQSAIKADGYRSLNENDVVEFEVITGDDGRTKAADVTAPGGGALAGGSRPGDGGGDRGGRGGGGYGGGGYGGGGGGYGGGGGGYGGGGGSYGGGGGYGGGGGGGRYGGGGGGGRECYKCGEEGHISRDCPQGGGGGGGGYGGGGGRGGGGGGGGCFSCGESGHFSRECPNKTN

SEQ ID NO: 4051 - protein, 106 aa, uncultured Rickettsia sp.
MPKEIGSSENIPKYIAKAKDKNDPFRLMGFGHRVYKNYDPRAAVLKETCKEVLKELEQLENNPLLQIAIELEAIALKDEYFIERKLYPNVDFYSGSIYKAMGIPSQ

SEQ ID NO: 4052 - protein, 429 aa, Sinorhizobium meliloti
MTDFYKLVPNAPEGRFDGIERPYSAEDVKRLRGSVEIRYSLAEMGANRLWKLIHEEDFVNALGALSGNQAMQMVRAGLKAIYLSGWQVAADANTASAMYPDQSLYPANAAPELAKRINRTLQRADQIETAEGKGLSVETWFAPIVADAEAGFGGPLNAFEIMKAFIEAGAAGVHYEDQLASEKKCGHLGGKVLIPTAAHIRNLNAARLAADVMGTPTLVIARTDAEAAKLLTSDIDERDRPFVDYDAGRTVEGFYQVKNGIEPCIARAIAYAPHCDLIWCETSKPDLEQARKFAEGVHKAHPGKLLAYNCSPSFNWKKNLDDATIAKFQRELGAMGYKFQFITLAGFHQLNYGMFELARGYRDRQMAAYSELQEAEFAAEANGYTATKHQREVGTGYFDAVSVAITGGQSSTTAMKESTEHDQFRPAAE

SEQ ID NO: 4053 - protein, 369 aa, Arabidopsis thaliana
MIENDDSPQHPSLFFTDFTRANSHVRVLHHKFLGKGVYGSVDLIRYTKTDGSSLQAAVKTSYAEDLEEYDALKREIQILSELKGYPNIVICYGDDLEEDFNEHGHKVYKLLLEYANEGSLSSFMENYPDRKLPDPMIRDFTRMILEGLVSMHSHGYVHCDLKSDNLLIFSRKDSASCELKIFDFGNCRQVGEVPDHWKSDYPYVGTPESFFDGVAKKTLDLWSLGCLVLKIYTGEQPWERVTSVDFVNFLSDGEAPNIPEYVPCDAREFIETCFAREHEKRGTASELLLHPFLCQKQPLLVKLKLRIKQASKITMGIREKPLTLKMFLSKPPQLKKLLSKLLRLKKMIHPKPLELDSSFVSYSSDLCLL

SEQ ID NO: 4054 - protein, 264 aa, Triticum aestivum subsp. compactum
NMQVDPSSQVQWPQQQPVPQPHQPFSQQPQQTFPQPQQTFPHQPQQQFPQPQQPQQQFLQPQQPFPQQPQQPYPQQPQQPFPQTQQPQQLFPQSQQPQQQFSQPQQQFPQPQQPQQSFPQQQPPFIQPSLQQQVNPCKNFLLQQCKPVSLVSSLWSMIWPQSDCQVMRQQCCQQLAQIPQQLQCAAIHTVIHSIIMQQEQQQGMHILLPLYQQQQVGQGTLVQGQGIIQPQQPAQLEAIRSLVLQTLPTMCNVYVPPECSIIKA

SEQ ID NO: 4055 - protein, 106 aa, Zea mays
  misc_feature (47)..(47): Xaa can be any naturally occurring amino acid
MTVSRTHRRSFEHRGGREMKEGTANCIDILIAIILPPLSAFLKFDCXVELWLCLLLMFLAYLPGIIYWIYVISLDYPDIAVYRYKAKELGDQAAKAMYMNVLLRSL

SEQ ID NO: 4056 - protein, 283 aa, Triticum aestivum subsp. compactum
MKTLLILTILAMAITIGTANMQVDPSSQVQWPQQQPVPQPHQPFSQQPQQTFPQPQQTFPHQPQQQFPQPQQPQQQFLQPQQPFPQQPQQPYPQQPQQPFPQTQQPQQLFPQSQQPQQQFSQPQQQFPQPQQPQQSFPQQQPPFIQPSLQQQVNPCKNFLLQQCKPVSLVSSLWSMIWPQSDCQVMRQQCCQQLAQIPQQLQCAAIHTIIHSIIMQQEQQEQQQGMHILLPLYQQQQVGQGTLVQGQGIIQPQQPAQLEAIRSLVLQTLPTMCNVYVPPECSI

SEQ ID NO: 4057 - protein, 464 aa, Lycopersicon esculentum
MATCGIDWKSVLPNCFKGNNVRSEAKVMENSKQMNSDHHRLAFSDISTDSRSVLISLDDLSSNAVIGSNLHVFTYEELKLITSDFSSANFLGKGGFGPVHKGFIDDKIKPGLDAQPVAVKLLDLDGNQGHQEWLTEVVFLGQLRHHHLVKLIGYCWEEEQRLLVYEYMARGNLEDQLFSRYSSCLPWLTRIKIMVGAAKGLAFLHGEEKPVIYRDFKASNILLDSDYRAKLSDFGLAKDGPEGDDTHVSTRVMGTHGYAAPEYIMTGHLTSKSDVYSFGVVLLELITGRRAMDKKRPLKERILVDWARPMLRDPHKLDRIMDPRLEGQYSTQGAKKVAALAYQCLSHHPRSRPTMSNIVKILEPVLDMKDIPMGPFVYVVPSSKPDKGTEIGELKTKVNDENKAGVRENEVDNAGENREDGNAKQRRVGHRYKHRLKTDASVYSDTHLYHKTVKHERTNKLNSY

SEQ ID NO: 4058 - protein, 161 aa, Triticum aestivum
  misc_feature (90)..(90): Xaa can be any naturally occurring amino acid
MSDTDEHHFESKADFGASKTYPQQAGAIRMGGHIVIKARPCKAVEVYTSKTGKHGHAKCHFVAIDIFNGKKLEDIVPSSHNCDVPHVDRXDYQLIDITDDGYVSLLTESANTKDDLKLPTDDALLGQSKIGFADGKDLILSGMAAMGEEQICAEKEIADGT

SEQ ID NO: 4059 - protein, 205 aa, Triticum aestivum
QQSFPQQPEQIIPQQPQQPFPLQPQQPFPQQPEQIISQQSQQPFSLQPQQPFSQPQQPLSQQPGQIIPQQSQQPCPLQPQQPFPQQPEQIIRQQPQQPFLLQSQQPFHQQPEQIISQQPQKPFSLQPQQPFSQPQQPFPQQPGQIIPQQPQQPFSLQPQQPFPQQLQQPFALQPQQSFPQQPQQPFPQPQQAFPEQAEQIIPQQP

SEQ ID NO: 4060 - protein, 367 aa, Rosa hybrid cultivar
MERLNSFRHLNQKWSNGEHSNELLHAQAHIWNHIFSFINSMSLKSAIQLGIPDIINKHGYPMTLSELTSALPIHPTKSHSVYRLMRILVHSGFFAKKKLSKTDEEGYTLTDASQLLLKDHPLSLTPYLTAMLDPVLTNPWNYLSTWFQNDDPTPFDTAHGMTFWDYGNHQPSIAHLFNDAMASDARLVTSVIINDCKGVFEGLESLVDVGGGTGTLAKAIADAFPHIECTVLDLPHVVADLQGSKNLKYTGGDMFEAVPPADTVLLKWILHDWSDEECIKILERSRVAITGKEKKGKVIIIDMMMENQKGDEESIETQLFFDMLMMALVGGKERNEKEWAKLFTDAGFSDYKITPISGLRSLIEVYP

SEQ ID NO: 4061 - protein, 350 aa, Staphylococcus epidermidis ATCC 12228
MKAAVWYGQKDVRVEDREPKAIKDNEVQVKVSWAGICGTDLHEYLEGPIFISTDQPDPLLGQTAPVTLGHEFSGVIENVGKDVSRFKKGDRVVVNPTVSKREKPENVDLYDGYSFIGLGSDGAFAEFTNAPETNVYHLPDNVSAREGALVEPTAVAVQAVKEGELLFGDTVAVFGAGPIGLLTIVAAKAAGASKIFVFDLSEERLAKAKSVGATHVYNSGNVDPVQTVYEHTDNGVDVSFEVAGVGITLQQSIEVTRPRGTAVIVSIFGHPVEFNPLLQMNKGVKLTTTIAYTPTTFQQTIDLIANGSLNVKDVVTDQIELENIVESGFNQLVNDKSQAKILVRLNGDQK

SEQ ID NO: 4062 - protein, 57 aa, Zea mays
MPFTASDICKIILAIILPPVGVFLERGCGADFFINILLTILGYIPGIIHALYIILKY

SEQ ID NO: 4063 - protein, 366 aa, Rosa hybrid cultivar
MERLNSFKHLNQKWSNGEHSNELLHAQAHIWNHIFSFINSMSLKSAIQLGIPDIINKHGPMTLSELTSALPIHPTKSHSVYRLMRILVHSGFFAKKKLSKTDEEGYTLTDASQLLLKDHPLSLTPFLTAMLDPVLTTPWNYLSTWFQNEDPTPFDTAHGMTFWDYGNHQPSIAHLFNDAMASDARLVTSVIIDDCKGVFEGLESLVDVGGGTGTVAKAIADAFPHIECTVLDLPHVVADLQGSKNLKYTGGDMFEAVPPADTVLLKWILHDWNDEECIKILKRSRVAITSKDKKGKVIIIDMMMENQKGDEESIETQLFFDMLMMALVRGQERNEKEWAKLFTDAGFSDYKITPILGLRSLIEVYP

SEQ ID NO: 4064 - protein, 131 aa, Lotus corniculatus var. japonicus
YQWAFAIAAAGITSGSIAERTQFVAYLIYSSFLTGFVYPVVSHWLWSSDGWASPTRTTGSLLFGSGAIDFAGSGVVHMVGGIAGLWGAFIEGPRIGRFDRTGRSVALRGHSASLVVSRFVSTMVRLVRLQS

SEQ ID NO: 4065 - protein, 472 aa, Mycobacterium avium subsp. paratuberculosis str. k10
MPIATINPATGETVKTFTPASDAEVDAAIARAYERFLDYRHSTTFAQRAQWANATADLLEAEADEVAAMMTLEMGKTLKSAKAEALKCAKGFRYYAQNAEQLLADEPADAGKVGAARAYIRYQPLGVVLAVMPWNFPLWQAVRFAAPALMAGNVGILKHASNVPQSALYLADVITRGGFPEGCFQTLLVPSSAVERILRDPRVAAATLTGSEPAGQSVAAIAGDEIKPTVLELGGSDPFIVMPSADLDEAVKTAVTARVQNNGQSCIAAKRFIVHTDIYDAFVDKFVEQMKALKVGDPTDPATDVGPLATESGRDEIAKQVDDAVAAGATLRCGGKPLDGPGWFYPPTVVTDITKDMALYTEEVFGPVASMYRAADIDEAIEIANATTFGLGSNAWTNDAAEQQRFIDDIEAGQVFINGMTVSYPELGFGGVKRSGYGRELAGLGIRAFCNAKTVWIGSSKSGDAGGGSKVE

SEQ ID NO: 4066 - protein, 177 aa, Streptomyces coelicolor A3(2)
MSANNPFARLPEAASFTVTSTTVADGAAWPSAQRSAGVPGGKDVSPQLSWSGAPEGTRSYAVTVYDPDAPTGSGFWHWAVADIPAAVTELPEGAGDDTGPGLPEGAFQLPNDARAARYIGAAPPAGHGPHRYFVVVHALDVESIGIPADATPAVLGFTMAGHILGRAVLTATAETPA

SEQ ID NO: 4067 - protein, 663 aa, Zea mays
MSPSNLPPPGETRVGCSLPSPVTPQAMGGGPARHVAMRALRARFLSRQREGGPAAASTWWWCASGSAKGDMESTLKGIRGSDAPCVLDLDDAATVAGGVEDTYGEDRATEEQLVTPWTVSVASGYNLLRDPRYNKGLAFTERERETHYLRGLLPPAIVSQELQERKIMNNIRQYQLPLQRYMALMDLQEGNERLFYKLLIDNVEELLPIVYTPTVGEACQKYGSIFSRPQGLYISLKEKGKILEVLKNWPERSIQVIVVTDGERILGLGDLGCQGMGIPVGKLSLYTALGGVRPSACLPITLDVGTNNEELLNDEFYIGLRQRRATGQEYTDFLQEFMSAVKQNYGEKVLIQFEDFANHNAFDLLARYGTTHLVFNDDIQGTASVVLAGLIAAQTLLGGSLADHTYLFLGAGEAGTGIAELIALEISRQTKAPIEECRKKIWLVDSKGLIVSTRKESLQHFKKPWAHEHKPLSNLLDAVNAIKPTVLIGTSGKGQTFTKDVVEAISSFNERPIILALSNPTSQSECTAEQAYTWSKGQAVFATGSPFDPVEYNGKIHVPGQANNAYIFPGFGLGVVMSGAIRVHDDMLLAASEALAQQVTEENFEKGLIYPPFSNIRKISAHIAASVAAKAYELGLASRRPRPKDLVKYAESCMYSPIYRNYR

SEQ ID NO: 4068 - protein, 471 aa, Vibrio vulnificus CMCP6
MAMKLVWLRRDLRSVDNTALNHAIATSQEVVACFVATPLQWRDHHMAPMQADLIARRLAVLAEELNALNIPLLYDEVDDYAQSATRVANWAEQLAVSEVVLNREYEVNERVRDEQLVNQLASSEIGVLDVEDKCVQAPGCVLNKQGDYFKVFTPFKKAWLKSFVPPQIIKTSAAQPVVLPEALQSSLWHEQAPFSYPRQSSEEWSVDSQQIRETLRHFCHEEVDRYHEQRDFPATAGTSVLSPYLAIGAISVRQCIARLYWQQSYLSNGREVWLSELIWREFYHHLIHFEPKLVKGQGFVEWEKHLLWPAKPDWFDRWCRGETGYPIVDAAMRQLNQTGWMHNRLRMIVASFLTKDLHVNWRLGEQYFMQKLVDGDFAANNGGWQWCASTGCDGQPYFRIFNPITQGEKFDPNGEFVKHWLPELVEVPSKFVHQPWNWPGHMQLDYPAPMVDHKQEREITLSLYTQAKDCL

SEQ ID NO: 4069 - protein, 180 aa, Nicotiana plumbaginifolia
MASSVLSSAAVATRSNVAQANMVAPFTGLKSAASFPVSRKQNLDITSIASNGGRVQCMQVWPPINKKKYETLSYLPDLSQEQLLSEIEYLLKSGWVPCLEFETERGFVYREHHHSPGYYDGRYWTMWKLPMFGCTDATQVLAEVEEAKKAYPQAWVRIIGFDNVRQVQCISFIAYKPEGY

SEQ ID NO: 4070 - protein, 505 aa, Brucella suis 1330
MNKVEFSRTVKPAFAKRYGNFIGGKWVEPRSGRYFENTSPVNGQVLCEVARSDAADVEAALDAAHAARELWGRTSVAERALILNRIADRIEENLPALAAAETWDNGKPIRETTNADLPLAVDHFRYFAGVIRAQEGGISEIDHDTVAYHFHEPLGVVGQIIPWNFPLLMATWKLAPALAAGNCVVLKPAEQTPASILVLMELIADILPPGVVNIVNGFGLEAGKPLASSPRIAKIAFTGETTTGRLIMQYASQNLIPVTLELGGKSPNIFFKDVAAEDDDFLDKAIEGFVMFALNQGEVCTCPSRALIQESIYDRFMKKALKRVEAIVQGDPLDPATMIGAQASSEQLEKILSYLDIGRQEGAEVLAGGERNMLPGDLAGGYYVKPTVFKGHNKMRIFQEEIFGPVVSVATFKDDAEALSIANDTLYGLGAGIWTRDGTRAYRFGRAIKAGRVWTNCYHAYPAHAAFGGYKQSGIGRENYLKMLDHYQNTKNMLVSYSPKKLGFF

SEQ ID NO: 4071 - protein, 322 aa, Sesbania rostrata
MAEKKIPEVLLNSGHKMPVIGMGTSVESRPSNDVLASIFVDAIQVGYRHFDSASVYGTEEAIGMAVSKAIEQGLIKSRDEVFITSKPWNTDAHHDLIVPALKTTLKKLGMEYVDLYLIHWPVRLRHDLENPVIFSKEDLLPFDIEGTWKAMEECYRLGLAKSIGICNYGTKKLTKLLEIATIPPAVNQVEMNPSWQQGNLREFCKQKGIHVSAWSPLGAYKIFWGSGAVMENQILQDIATAKGKTIAQVALRWVYQQGSSAMAKSFNKERMKQNLEIFDFELSEEELEKIKQIPQRRQYTGDMWLSENGSCKTLEELWDGDV

SEQ ID NO: 4072 - protein, 399 aa, Helicobacter hepaticus ATCC 51449
MDFTHTQALDEEFVLHTYARANVAFVRGENARIFDTQGNDYIDFGAGIGVCSVGHANAKLAQTIYKQAQTLLHTSNLYYIQPQARLAQEIITLYRYNTPYTAPMRAFFCNSGAEANECAIKIARKYGKPRNAYKIITLDSSFHGRTIASLKATAQEKMHQHFGPFPDGFVYAKNLDDVIAKIDDSTCAVLLELVQGEGGVLPMDKEKINTLSTILKQKQILLMVDEVQSGVFRSGEIFASKVYEIDPDVITTAKGLAGGVPIGAVLTKLTDIFEYGDHGSTFGGNFLSCAAGLETLAILNELYNNGTLQRTITLFHAELDALVVDFADIFSHKVGLGLMCGLYTRNPDMQQEIIAQALKHYVIVLKSGKGVVRFLPPLTITQEEIKEGFARVRNALKTL

SEQ ID NO: 4073 - protein, 450 aa, Oryza sativa (japonica cultivar-group)
MSVSGGRTRVGRYELGRTLGEGTFAKVKFARNADSGENVAIKILDKDKVLKHKMIAQIKREISTMKLIRHPNVIRMHEVMASKTKIYIVMELVTGGELFDKIASRGRLKEDDARKYFQQLINAVDYCHSRGVYHRDLKPENLLLDASGTLKVSDFGLSALSQQVREDGLLHTTCGTPNYVAPEVINNKGYDGAKADLWSCGVILFVLMAGYLPFEDSNLMSLYKKIFKADFSCPSWFSTSAKKLIKKILDPNPSTRITIAELINNEWFKKGYQPPRFETADVNLDDINSIFNESGDQTQLVVERREERPSVMNAFELISTSQGLNLGTLFEKQSQGSVKRETRFASRLPANEILSKIEAAAGPMGFNVQKRNYKLKLQGENPGRKGQLAIATEVFEVTPSLYMVELRKSNGDTLEFHKFYHNISNGLKDVMWKPESSIIAGDEIQHRRSP

SEQ ID NO: 4074 - protein, 153 aa, Lilium longiflorum
LKPLKSMDSKFEVDHSLIAKLNQLTEFLANRNQPLRAPFVPDARAMPAAATDIKDMPGAYVFIIDMPGVESEEIKIDVEEGNMLVISGERKREEEEERYLEMQRRMGKMMRKFKLLENANSGAISAVCKNGVLTVTVEKLPSQEPKAIEIKIA

SEQ ID NO: 4075 - protein, 217 aa, Arabidopsis thaliana
RRNGLLKKAKELAILCDAEVGVIIFSSTGRLYDFSSSSMKSVIERYSDAKGETSSENDPASEIQFWQKEAAILKRQLHNLQENHRQMMGEELSGLSVEALQNLENQLELSLRGVRMKKDQMLIEEIQVLNREGNLVHQENLDLHKKVNLMHQQNMELHEKVSEVEGVKIANKNSLLTNGLDMRDTSNEHVHLQLSQPQHDHETHSKAIQLNYFSFIA

SEQ ID NO: 4076 - protein, 357 aa, Saccharomyces cerevisiae
MSQNSNPAVVLEKVGDIAIEQRPIPTIKDPHYVKLAIKATGICGSDIHYYRSGGIGKYILKAPMVLGHESSGQVVEVGDAVTRVKVGDRVAIEPGVPSRYSDETKEGSYNLCPHMAFAATPPIDGTLVKYYLSPEDFLVKLPEGVSYEEGACVEPLSVGVHSNKLAGVRFGTKVVVFGAGPVGLLTGAVARAFGATDVIFVDVFDNKLQRAKDFGATNTFNSSQFSTDKAQDLADGVQKLLGGNHADVVFECSGADVCIDAAVKTTKVGGTMVQVGMGKNYTNFPIAEVSGKEMKLIGCFRYSFGDYRDAVNLVATGKVNVKPLITHKFKFEDAAKAYDYNIAHGGEVVKTIIFGPE

SEQ ID NO: 4077 - protein, 151 aa, Zea mays
MAMAYKMATEGMNVKEECQRWFMEMKWKKVHRFVVYKIDERSRAVLVDKVGGPGEGYEELVAALPGDDCRYAVFDFDFVTVDNCQKSKIFFIACWRLLLSCWSPAASRIRAKILYATSKQGLRRLLDGVHYEVQATDPSEMGFDVIRGRAQ

SEQ ID NO: 4078 - protein, 189 aa, Streptococcus agalactiae
DLFKELEAIKQQTIFDIDNAKTEVEIDNLVHDAFSKMNATVAKFQKGLETNTPETPDTPKIPELPQAPDTPQAPDTPHVPESPKAPEAPRVPESPKTPEAPHVPESPKTPEAPKIPEPPKTPDVPKLPDVPKLPDAPKLPDGLNKVGQAVFTSTDGNTKVTVVFDKPTDADKLHLKEVTTKELADKIAH

SEQ ID NO: 4079 - protein, 468 aa, Glycine max
  misc_feature (61)..(61): Xaa can be any naturally occurring amino acid
CLILCVGVLLQTYPNPLQDNPAYSVVKQYFVHVDDSVPQKVVVHKDGARGVHFRRAGPRQXDEVQAAIVTCGGLCPGLNTVIRELVCGLHHMYGVKKVLGINGGYRGFYARNTITLTPKSVNDIHKRGGTVLGTSRGGHDTKKIVDSIQDRGINQVYIIGGDGTQKGASAIFEEVRKRGLKVSVVGIPKTIDNDIPVIDKSFGFDTAVEEAQRAINAAHVEAESVENGIGVVKLMGRNSGFIAMYATLASRDVDCCLIPESPFYLEGPGGLYEYIEKRLKENGHMVIVIAEGAGQELVSESVQSMSKQDASGNKLFQDVGLWISQKIRDHFAAQKTLPITLKYIDPTYMIRAIPSNASDNVYCTLLAQSAVHGAMAGYTGYTSGLVNGRQTYIPFYRITERQNHVVITDRMWARLLSSTNQPSFLDAKGDNEEKEEEEALNQLPDGHCAKDTSLASKEINSSIYPTAC

SEQ ID NO: 4080 - protein, 405 aa, Candida albicans SC5314
MVEKKNFQFLTINSWHLYHNSTFQLIMSGSGKLPGLASDAVLKQSIPVPEDFQEVKGIDYSQDNAYNMRAKDLIKSMSTMGFQASSLSQACDIIDNMRSWRGKHKDTLEEHEQTGEFDDEGYQKTTIFMGYTSNLISSGLRDTLRYLVQHKMVSAIVASAGGVEEDLIKVLAPTYMGDFTLPGKGLRDQGMNRIGNLLVPNDNYCKFEEWIVPILDKCLEEQEEAMKKLGPKGLIAGSEAIWTPSKLIDRLGKEINDESSVLYWAHKNKIPIFCPALTDGSIGDMLFFHTFKASPQQLRLDIVADIRKINSMSMAASKAGMIILGGGLIKHHICNACLMRNGADYAVYINTGQEFDGSDAGARPDEAISWGKIKAEAKSVKVYADVSLVFPLIVAATFASEKPQN

SEQ ID NO: 4081 - protein, 477 aa, Brucella suis 1330
MTFHQNLIAGEWVGGDDIANINPSDTNDVVGTYARATAEDTKAAIAAAKAAFPAWSRSGILERHAILRKTADEILARKEELGRLLSREEGKTLVEGIGETIRASQIFDFFAGECLRLAGEVLPSARPGIGVEVTREPVGVVGIITPWNFPIAIPAWKIAPALCYGNTIVFKPAELVPGCSWAIADILHRAGLPKGVLNLVMGKGSVVGQTILDSADVNAVTFTGSTGTGKRVAAASIEHNRRFQLEMGGKNPVVVLDDADLNVAVESVVNSAFFSTGQRCTASSRIIVTEGIHDKFVAAAIEKLKTVVVDNALKPGTHIGPVVDETQLQQDMDYIELGRKEGAKLAFGGERLNRETPGFYLQPALFTEATNQMRISREEIFGPVASVIRVKDYEEALATANDTSFGLSSGICTTSLKYATHFKRNSEAGMVMVNLPTAGVDFHVPFGGRKGSSFGPREQGRYAAEFYTTVKTAYTLA

SEQ ID NO: 4082 - protein, 189 aa, Streptococcus agalactiae
DLFKELEAIKQQTIFDIDNAKTEVEIDNLVHDAFSKMNATVAKFQKGLETNTPETPDTPKIPELPQAPDTPQAPDTPHVPESPKTPEAPHVPESPKTPEAPKIPEPPKTPDVPKLPDVPKLPDVPKLPDVPKLPDAPKLPDGLNKVGQAVFTSTDGNTKVTVVFDKPTDADKLHLKEVTTKELADKIAH

SEQ ID NO: 4083 - protein, 506 aa, Bordetella pertussis Tohama I
MDLSDLKKLGLDVAYPFKEQYENYIGGQWVAPAGGEYFDNLSPITGQPFCRVPRSGAADVELALDAAHRACAAWARTSPAERANILLRIADRIEGQLPMLAVAESIDNGKPLRETTAADLPLAIDHFRYFAGCIRAQEGAISEIDANTVAYHFHEPIGVVGQIIPWNFPLLMVAWKLAPALAAGCVVVLKPAEQTPASILVLAELIGDLLPPGVLNVVNGYGKEAGQALATSKRIAKIAFTGSTPVGKHILHAAADNLIPATVELGGKSPNIFFDDVMDHDDEFLDKALEGLAMFALNQGEVCTCPSRILIQESIYERFIEKAIARVQSIKTGHPLDAGTMVGAQVSQVQMDKILSYIDIGRQEGAQCLTGGARNDMLPGGLDQGFYVQPTMLLGKNSMRIFQEEIFGPVAAVATFKDEEEAIAMANDTFYGLGAGVWSRDGARAYRVGRGIEAGRVWTNCYHLYPAHAAFGGYKQSGIGREAALSNYQQTKCLLVSYSAKALGFF

SEQ ID NO: 4084 - protein, 201 aa, Streptococcus agalactiae
DLFKELEAIKQQTIFDIDNAKTEVEIDNLVHDAFSKMNATVAKFQKGLETNTPETPDTPKIPELPQAPDTPQAPDTPHVPESPKAPEAPRVPESPKTPEAPHVPESPKAPEAPRVPESPKTPEAPKIPEPPKTPDVPKLPDVPKLPDAPKLPDGLNKVGQAVFTSTDGNTKVTVVFDKPTDADKLHLKEVTTKELADKIAH

SEQ ID NO: 4085 - protein, 193 aa, Cucumis sativus
  misc_feature (193)..(193): Xaa can be any naturally occurring amino acid
TGDEGNNEYKKGLWTVEEDKILMDYVKAHGKGHWNRIAKKTGLKRCGKSCRLRWMNYLSPNVKRGNFTEQEEDLIIRLHKLPGNRWSLIAKRVPGRTDNQVKNYWNTHLSKKLGIKDQKTKQSNGDIVYQINLPNPTETSEETKISNIVDNNNILGDEIQEDHQGSNYLSSLWVHEDEFELSTLTNMMDFINX

SEQ ID NO: 4086 - protein, 201 aa, Streptococcus agalactiae
DLFKELEAIKQQTIFDIDNAKTEVEIDNLVHDAFSKMNATVAKFQKGLETNTPETPDTPKIPELPQAPDTPQAPDTPRVPESPKTPEAPHVPESPKAPEAPRVPESPKTPEAPHVPESPKTPEAPKIPEPPKTPDVPKLPDVPKLPDAPKLPDGLNKVGQAVFTSTDGNTKVTVVFDKPTDADKLHLKEVTTKELADKIAH

SEQ ID NO: 4087 - protein, 495 aa, Rhodobacter sphaeroides 2.4.1
MLQEIDWHARAKAVALPNRPFIDGQYVDSLSGETFACIYPGDGRPLTDVASCNAADVDVAVRSARKAFEAGVWSRMAPADRRRILLRFSELILANREELALLETLNVGKPIANAYNGDVVSAAACIAWYAEAIDKVYGEVAATAYDMTTLVMREPLGIVAAVVPWNYPMSMAAWKLGPALATGNSVILKPAEQSPFTALKFGELAIEAGMPPGVLNVVPGLGHIAGKALGLHMDVDCVGFTGSTEVGKYFMQYSGQSNIKRIGLELGGKSPQVVLADCDDLDAAAAGIAAGIFANTGQVCNAGSRLIVDEKIHDQLLEKIAAQAKVFAPGDPLDTATRMGSMVSEEQMDRVLGYIDAGRADGARPVIGGGRVKTETGGFYIEPTIFEGVRNDMKIAQEEIFGPVLSAIPVKGFDEAMATANDTVYGLAGAVWTGSVKNAHRAAKSLRAGVVWVNCFDRGSLAVPFGGFKQSGFGRDKSLHAMDKYTDLKAVWFAH

SEQ ID NO: 4088 - protein, 232 aa, Triticum aestivum
MGERVKGTVKWFNVTKGFGFISPDDGGEDLFVHQSSIKSDGYRSLNENDAVEFEIITGDDGRTKANDVTAPGGGALSGGSRPVEGGGDRGGRGGYGGGGGGYGGGGGGYGGGGGGYGGGGGGYGGGGYGGGGGGGRGCYKCGEEGHISRDCPQGGGGGYGGGGYGGGGGGGGGRECYKCGEEGHISRDCPQGGGGGGGYGGGGGRGGGGGGGGCFSCGESGHFSRECPNKAH

SEQ ID NO: 4089 - protein, 360 aa, Triticum aestivum
MCTVSSAWRLRPFHHAPVLFPFPSLAPPLPEPSRLPLRMADAKAEAARQAPQSSQEEEEDWKEAEGDVEVADRSTSNGGGAGEGITDRPIRVYADGIYDLFHFGHARSLEQAKKSFPNAYLLVGCCNDELTHQYKGRTVMTEDERYESLRHCKWVDEVIPDAPWVVTEEFLNKHNIDFVAHDSLPYHDASGASNDVYEFVKKLGKFKETKRTEGISTSDIIMRIVKDYNEYVMRNLARGYSRNDLGVSYVKEKRLRVNMGLKTLRDKVKQHQEKVGEKWSTVAKLQEEWVENADRWVVGFLEKFEEGCHSMGTAIKERIQERLKEAQSRDFSLLQYDSDDFDDFEEEDDEVAKDAKYVKE

SEQ ID NO: 4090 - protein, 338 aa, Anisodus tanguticus
MEVISNHNNGSTTKIILKNGSICNGNVNGNSHSHEKIENKLVECTNSIKPGWFSEFSALWPGEAFSLKIEKLLFQGKSDYQDVMLFESATYGKVLTLDGAIQHTENGGFPYTEMIVHLPLGSIPSPKKVLIIGGGIGFTLFEVSRYPTIETIDIVEIDDVVVDVSRKFFPYLAAGFDDPRVTLIIGDGAAFVKAAQPGYYDAIIVDSSDPIGPAKDLFERPFFEALAKALRPGGVVCTQAESIWLHMHLIKQIIANCRQVFKGSVNYAWTTVPTYPTGVIGYMLCSTEGPEVNFKNPVNSIDKDTSHVKSKGPLKFYNSDIHKAAFILPSFARDLVEF

SEQ ID NO: 4091 - protein, 241 aa, Brassica napus
GDPRVRDIEDVRREVEIMKHMPKHPNIVSLKDAFEDDDAVHIVMELCEGGELFDRIVARGHYTERAAAAVMKTILEVVQVCHKNGVMHRDLKPENFLFANKKETSPLKAIDFGLSVFFRPGEGFNEIVGSPYYMAPEVLRRNYGPEVDIWSAGVILYILLCGVPPFWAETEQGVAQAIIRSVIDFKRDPWPRVSDTAKDLVRKMLEPDPKKRLSAAEVLEHPWIQNAKKAPNVSLRETVKA

SEQ ID NO: 4092 - protein, 271 aa, Triticum aestivum
  misc_feature (115)..(115): Xaa can be any naturally occurring amino acid
MAHAAAAAAVPLRRPLLLFLRPARLLSFVAPRSSSVRAYTRALRPLAPLPSDDEDPDDGDGAPSRNEKKREARRAVKWGMELAKFSPPQIKRIVRAASLEREVVDALMLVKKFGXDVREGRRRQYNYIGSLLRGAQPELMEDLIHSLKNGDESRIQALLSEVADKSMPIEDEEVGELPHEEEDEGNQEYMEIADRWFEGLVCQDIPVTNEVYAIHNVEFDRQELRKLVRIVQEVQKSMGNKDSGEGSDRKLSRAKKPLIMFLRSLAKKTLE

SEQ ID NO: 4093 - protein, 222 aa, Triticum aestivum
  misc_feature (27)..(27): Xaa can be any naturally occurring amino acid
  misc_feature (87)..(87): Xaa can be any naturally occurring amino acid
MKTLLILTIIAVALTTTTANIQVDPSXGQVQWPQQQQPFPQPQQPFSQQPQQIFPQPQQTFPHQPQQAFPQPQQTFLHQPQQQFPQXPKQPQQPFPQQPQQQFPQPQQPQQPFSPSNHNNNFPQPQQPQQPFPQPQQPQLPFPQQQQQQQQQQQQQGIQIMRPLFQLVQGQGIIQPQQPAQLEVIRSLVLGTLPTMCNVFVPPECSTTKAPFASIVADIGGQ

SEQ ID NO: 4094 - protein, 413 aa, Glycine max
MPGHRSKSEKHDVDGGGGEKQLRRDPYEVLGVSRNSTDQEIKTAYRKMALKYHPDKNANDPKAADMFKEVTFSYNILSDPDKRRQYDSAGFEAVESDNQELELDLSSLGAVNTMFAALFSKLGVPIKTTVSATVLEEALNGLVTIRPLPLGHNIAKRVEKQCAHFYSVTITEEEAQAGFVCRVQSPDKSKFKLLYFDQEDNSGLSLALQEDSAKTGKVTSAGMYFLGFPVYRLDQTMNSIAAAKDPDTSFFRKLDAFQPCELTELKAGTHVFAVYGDNFFKSANYTIEALCAAPFSEEKENLRNIEAQILSKRAEISKFEAEYREVLAQFSDMTNRYAHEMQAIDELLKNRNEIQASYTSAPLKRTTSRSRSKNSSKEAKEDGQAKEKRSTRERPKKKKWYNLHLRVDKRKAC

SEQ ID NO: 4095 - protein, 178 aa, Trifolium repens
MALISSAAVTTINRAPVQANLATPFTGLKSSAGFPVTKKNNDITSITSNGSRVNCMQVWPPVGKKKFETLSYLPPLTDEQLLKEVEYLLRKGWVPCVEFELEKGFVHRQYNSSPGYYDGRYWTMWRLPLFGTTDAAQVLKEVAECKAEYPEAFIRIIGFDNVRQVQCISFIASTPKVY

SEQ ID NO: 4096 - protein, 505 aa, Pseudomonas syringae pv. tomato str. DC3000
MSTATILELMRPYWGDRSVIASYVGGAFIEGHGAPVEVRNAHNDSLLLSFPDADESLVEVADKAAKAAQQQWWAMTAQARGRAMYQVGNLIREEQENLAQIESLTANKPIRDARVEVLKVAEMFEYYAGWADKLHGEVIPVPTTHLNYVTYEPLGTVLQITPWNAPIFTCGWQIAPAIAAGNAVILKPSELTPLSSLVVGVLIERAGVPKGLVNVIAGFGHSIGQAFIAKADIRKVVFVGSPATGRHIAVAAAQRCIPAVLELGGKSANIVFDDADLEVALRGAQAAIFSGAGQSCVSGSRLLVQQSIFEKFTNALAVAATQFKVGDPGDPETQIGPINNAKQYNHVKSMVERALKDGAKLVGEQADPIPDRPGYYINPTVLAGTNELHCAQEEIFGPVVVAIAFKDEEDAIRIANDSRFGLAGGVWTRDVGRAHRVAKQVRAGTFWVNGYKTIHVSSPFGGYGESGYGRSSGLDALREYSEVKSVWVETAAKPAASFGYGASLE

SEQ ID NO: 4097 - protein, 160 aa, Synechococcus elongatus PCC 7942
MAPQVTDIAVTTIDGAAKSLSDYAGQVLLIVNVASYCGYTSQYSGLEALYRQYRDRGLQVLAFPCNDFGAQEPGSNEEIKTFCSTRFDVSFELFDKVHAKGADQHPLYAALTQTDPAGDVAWNFEKFLVGKDGTVLARFKSGVAPNDASLIQAIEAALAA

SEQ ID NO: 4098 - protein, 1647 aa, Ustilago maydis 521
MSQPGARRAYHHGSQRGGSTINQKAALASAYQELGKELSSSKLKIVGNYTLQRPIGEGTFGKVRLGLHRLTNTRVAIKQIPKAHSASLTREIHHHRRLHHPNVMQLYEVIATEQYIWMVSELCAGGELYDYLVENQVLAEPEARRIFGQLCLAVAYVHSKGIVHRDLKLENILLDERCNVKLGDFGFTREFERNRLMDTFCGTTGYASPEMLAGKKYTGEQVDIWSLGVILYALLCGALPFDDDDEAVMKQKILQGDFEIPDCLSEEAHDLVVSILQHDPAKRPSIQSILAHPWFTKMMVNSPMSTLEEDQIATDYFASKPSASTSQSKQHDRFPPTLHKALAELDTATELDTADATSAAPPTNPADAFDFEDHDSSNSCHRHHLSASSEQSYHSARSDSESSGRRSTNTDLTDPTTADSLSGTDEVEGLDQAIVQLNASSRPSALANATAAASHPDKNAIGLHRNERLGSNGSDASLSGVPRPSTKTNTASLPTHHELPPVPDGTGQDDHLSIYQSVPLTKRGSQSSSRGHHRTPSRTKRRSLSSGGLSDHHPPMLGRKPVDYVSQLADLQPATFSTSIEQNLLHQLSALGLDVGQMVHSVVTDACDASGATWWMLLRKSKDRHSEQPDITSPIVQVIPAPGDHPAPINASAFSKAGQTVTPSSPAQFSPPPVPVKDPARRSEDKFRTQERPTTLEASSSENAGLAEQSIRRLQTVVSHEELDVSAAPALHTSTSELMMATKPATDRQSSVPASGPMPLAGLPASTVSLPNDRSLTSTPDSVSSRPKSQHRHTTAVASPAKLQHVALTTLEGSPTSEGSKARGNSQNDRPRSNSLSVRQFAQSVLGTKDRGSATSSPVRPPPEQVVVAGEALPLERAKSPTLFGRRNTVSNVKDSMVGRLSGPSTPKKTPVDMLDKPRKSTGKKSCETDLDRVKALERSADSASSSPSRSTTGQAVGVVSNAKVDSSVPSASQDSFSTMSVTPQGSEKSGHRGKAGSFFMSTVRTWLGGNEKPTRKSKTGKQASASHRGLGIDDGPMAAKSPTNSLSTSGSVSTLTYGTPSRSASVRRRSAHYQQTSATRRGGPRSPHLGTSSRRSSNGSSYQAHLELPPNSFQQSMNRPANMRRMSAGSITPTATLHGDYLNDVGGVSGASRHSRPSSSHSLAHSGAASRPGLHGKAGSTGSTSSAYRPGQASSVYSTGSGRRHPRPSQDGGTTVRRHRTYASSSGSPSRRNSFRHDSRPSSIKSRASSPGRAMSGLGELWAADAEADGDGGGTGARRSTRSTPRHSLEMRKTGEAFDSAAPHHQHHQHVVAQSIFVAHKSRSPYRPPSANPNLHGSLVRGSSQLSGRSNVSANSEDAGYVAPNSTLGLPATGTGAWRHSWGRPPPCWAGPVDPPPTSSYSKRSGAAGVEDDGRPKLRDVFANRDDDDWTDEEEEQTYSGGLGQMGTLSSAMSSSVGRVGSGIGASSSPYATRNLAALGSSGYSTQRAVNLDTANAPEIGLREAPFSSRYAGVRNMFQTATAGTPAFGSRSHHSVSLSLGNEFAPRLLSTTIHSPTVSAASLGGGLGCIGESADAHSVTVSSKPKPESSGTQTQAQQQQSSASASASASASQQQQSGGGSSGSGSRITASFHKPVQIIEEEEEDE

SEQ ID NO: 4099 - protein, 120 aa, Oryza sativa (japonica cultivar-group)
MKGAAAVAMVVVAGCLLAAAAVSVVDGAVTCGDVDASLLPCVAYLTGKAAAPSGDCCAGVRHLRTLPVGTAERRFACDCVKKAAARFKGLNGDAIRDLPAKCAAPLPFPLSLDFDCNTIP

SEQ ID NO: 4100 - protein, 322 aa, Ralstonia solanacearum
MAVDPQILQFHQRLAERFGALPLPADALARRARFAAVAEVLARPDPEGIEASDLTLPLPGRTLDAVMFRPRSVQRPRLLVWFHGEGWMVGAARTTHRLMCALLAADTGCAVISVDYRLAPEHPFPAPTDDARDALAYLAEQRLHLSLDPDFLAVGGDSAGGHLAAQAAQAVHDRVRQGLVTAQLLVCPATMPAFGSESYSAFAQGPGLTRDEMRWYWAQFIGEAALDRPLAEQDARLFLMADPPAHLPPDTVVIVAAHDVLRDDGLAYADHLVQHGAQVVTIEASGMTHGFARLQPEAERAREWMRRAAHAFVGMIGGDAAG

SEQ ID NO: 4101 - protein, 201 aa, Streptococcus agalactiae
DLFKELEAIKQQTIFDIDNAKTEVEIDNLVHDAFSKMNATVAKFQKGLETNTPETPDTPKIPELPQAPDTPQAPDTPHVPESPKAPEAPRVPESPKTPEAPHVPESPKTPEAPKIPEPPKTPDVPKLPDVPKLPDVPKLPDVPKLPDAPKLPDGLNKVGQAVFTSTDGNTKVTVVFDKPTDADKLHLKEVTTKELADKIAH

SEQ ID NO: 4102 - protein, 377 aa, Arabidopsis thaliana
MVQRLEFESSRNIYDFAENVTRSLLSHKAPVLESLHLKVGDQFDGVYVGVWATIAFTRHVREFVLDLSSYHGPRVRFPTSLFCFDTLETLKLDYVYIYVPCPVSMKSLRTLHLLSVVYKGDESGHNLFASCPNLEHLVLRRGFFFDAVVNFIIDAPSLKTLLLSDPFSARESSRGYVIKAPSLKYLGIESVEGFEYFLIENVTELVEANIRNVSKIVNENILGSLKSAKRLSLDLSPLKLVYLEMHTHKVEWWNLLTHMLDSSPKLQVLKLIDRETRHENLEFDKKYKDQGKWNQPKYVPECLETFMWRNCNWGREEEKEVATYILRNARQLKKATFSTDPIEAKRLCKLAKRRKMREELDGVVMTSNSCHLVFEFE

SEQ ID NO: 4103 - protein, 172 aa, Triticum aestivum
  misc_feature (127)..(127): Xaa can be any naturally occurring amino acid
  misc_feature (161)..(161): Xaa can be any naturally occurring amino acid
MAAASSATSVHDFTVKDASGKDVDLSVYKGKVLLIVNVASQCGLTNSNYTELSQLYPKYKDQGFEILAFPCNQFGGQEPGTNDEIVQFACTRFKAEYPIFDKVDVNGSNVSPLYKFLKSSKGGLFGXDSIKWNFSKFLVMTRRVTLLDRYAPNPLPPVSIXEKDIKKLLGSS

SEQ ID NO: 4104 - protein, 296 aa, Arabidopsis thaliana
MGYLLEETLSSNSKTPIVIDDDNELGLMAVRLANAAAFPMVLKAALELGVFDTLYAEASRSDSFLSPSEIASKLPTTPRNPEAPVLLDRMLRLLASYSVVKCGKVSEGKGERVYRAEPICRFFLKDNIQDIGSLASQVIVNFDSVFLNTWAQLKDVVLEGGDAFGRAHGGMKLFDYMGTDERFSKLFNQTGFTIAVVKKALEVYQGFKGVNVLVDVGGGVGNTLGVVASKYPNIKGINFDLTCALAQAPSYPGVEHVAGDMFVDVPTGDAMILKVSSIELITYMFWKFIHGTRTLY

SEQ ID NO: 4105 - protein, 207 aa, Streptococcus agalactiae
DLFKELEAIKQQTIFDIDNAKTEVEIDNLVHDAFSKMNATVAKFQKGLETNTPETPDTPKIPELPQAPDTPQAPDTPHVPESPKAPEAPRVPESPKTPEAPHVPESPNVPESPKTPEAPKIPEPPKTPDVPKLPDVPKLPDVPKLPDVPKLPDAPKLPDGLNKVGQAVFTSTDGNTKVTVVFDKPTDADKLHLKEVTTKELADKIAH

SEQ ID NO: 4106 - protein, 490 aa, Bacillus halodurans C-125
MKRDHYRMVINGERVDSDETFETFNPAKGEILATVAKASREHAEKAVQAARHAFDHGKWRKYPVGKRARVLNQIAAIMRERFQELVEIEVLNSGKAISAAQAQINQAIEDFEFYAGAIVGHRGTVNNVPNGFLNYTQKEPVGVCAQIIPWNYPLMMAAWKVAPALAAGCSVVVKPASLTPITAILLNEICHEAGVPEGVVNTVAGAGSVVGDYLVGHEDVNKVAFTGSTPIGKDIMEKASHTLKRVTLELGGKSPNLVFADADMEAAVAGSLFGIYFNTGQSCEARSRLFVHEEIYDEFIEEFITRAKKLQLGDPFDKGTHVGSIISRDQLEIIDSYVRSAEEEGATIALGGKERRVEGFENGHWYEPTVITNVTPDMKAVQEEIFGPVVVVETFQDEREVIKRANDTKFGLGSAIWTKDQGRATRVAHQLEAGIVMVNCPFSAFPGTPFGGYKESGFGRELCVETLDLYMEDKSILSYYGPKPINPFGV

SEQ ID NO: 4107 - protein, 439 aa, Desulfovibrio desulfuricans G20
MALFTKEEALKYHEAPRPGKLEVVPAKPCRNQKDLSMAYSPGVAEACKAIREDPAKAALYTGRSNLVGVVSDGSAVLGLGNIGPLAGKPVMEGKGVLFKTFADIDVFDINLDVRSADQLIEVVKTLEPTFGGINLEDIKAPECFYIEETLKREMNIPVFHDDQHGTAVISGAGLLNALDITNRRAEDMKVVIVGAGAAGIACATFYVALGVDPANIYMFDSRGLIHAGRSDLNSYKKRFAQKKDAGSLEDVMKGADMFLGLSTKDLVSKDMVRAMAKDPVLFAMANPDPEIAYPDAKEACPGCIMGTGRSDFPNQVNNVSGFPYIFRGALDVGATEINEAMKIAAARSLAALAREPVPAEICALYGVDSLEFGVDYVIPKPLDPRVLEWETPAVAQAAMDSGVATVPVADMKAYAASLRVRVDAAARRAAAVVDSYSGV

SEQ ID NO: 4108 - protein, 448 aa, Pseudomonas aeruginosa PAO1
MNQPLNVAPPVSSELNLRAHWMPFSANRNFQKDPRIIVAAEGSWLTDDKGRKVYDSLSGLWTCGAGHSRKEIQEAVARQLGTLDYSPGFQYGHPLSFQLAEKIAGLLPGELNHVFFTGSGSECADTSIKMARAYWRLKGQPQKTKLIGRARGYHGVNVAGTSLGGIGGNRKMFGQLMDVDHLPHTLQPGMAFTRGMAQTGGVELANELLKLIELHDASNIAAVIVEPMSGSAGVLVPPVGYLQRLREICDQHNILLIFDEVITAFGRLGTYSGAEYFGVTPDLMNVAKQVTNGAVPMGAVIASSEIYDTFMNQALPEHAVEFSHGYTYSAHPVACAAGLAALDILARDNLVQQSAELAPHFEKGLHGLQGAKNVIDIRNCGLAGAIQIAPRDGDPTVRPFEAGMKLWQQGFYVRFGGDTLQFGPTFNARPEELDRLFDAVGEALNGIA

SEQ ID NO: 4109 - protein, 184 aa, Pseudomonas syringae pv. syringae B728a
MMKLRFFSIPLLLLAMSGAAMAADCPPLLQGELPKLRAKENIDLCKRFAGKPLVVVNTASFCGFAPQFKGLEALSQRYKGQGLEVLGVPSNDFKQEAKDGEETAKVCYVNYGVTFTMTEPQAVRGDDATHLFKVLAEQSSAPRWNFYKYVVDRQGKVIANFSSMTKPDDPELIAAIEKAIASKP

SEQ ID NO: 4110 - protein, 291 aa, Triticum aestivum
MAISTDSRSEEKPSQHSQVEKRWVLSDFDVGKALGRGKFGHVYLAREKRSSQIVALKVLFKSQLKQSQVEHQLRREVEIQSHLRHPNILRLYGYFYDQTRVYLILEHAAKGELYKELQRCKHFSERRSATYIASLARALIYLHGKHVIHRDIKPENLLVGVQGELKIADFGWSVHTFNRRRTMCGTLDYLPPEMVEKTEHDYHVDIWSLGILCYEFLYGLPPFEAKEHSETYRRIVKVDLKFPLKPFVSPAAKVLISQMLVKNSAHRLPLHKVLEHPWIVQNADPSGVYRG

SEQ ID NO: 4111 - protein, 219 aa, Streptococcus agalactiae
DLFKELEAIKQQTIFDIDNAKTEVEIDNLVHDAFSKMNATVAKFQKGLETNTPETPDTPKIPELPQAPDTPQAPDTPHVPESPKAPEAPRVPESPKTPEAPHVPESPKAPEAPRVPESPKTPEAPHVPESPKTPEAPKIPEPPKTPDVPKTPDVPKLPDVPKLPDAPKLPDGLNKVGQAVFTSTDGNTKVTVVFDKPTDADKLHLKEVTTKELADKIAH

SEQ ID NO: 4112 - protein, 288 aa, Zea mays
  misc_feature (127)..(127): Xaa can be any naturally occurring amino acid
  misc_feature (161)..(161): Xaa can be any naturally occurring amino acid
  misc_feature (192)..(192): Xaa can be any naturally occurring amino acid
  misc_feature (228)..(228): Xaa can be any naturally occurring amino acid
MATANGSSKGSFEVPKVEVRFTKLFIDGKFVDAVSGKTFETRDPRTGEVIASIAEGGKADVDLAVKAAREAFDNGPWPRMTGYERGRILHRFADLIDEHVEELAALDTVDAGKLFAVGKARGHPGAXAHLLRYYAGAADKVHGATLKMAQRMHGYTLKEPXVGAWVGHIVPWNYPTTMFLLQGRGPRLAAGXPVVVKPAEQTPLSALFYAHLARGGPASPPGVLNVVXPGFGPTAGAAVAAHMDVDKVSFTGSTEVGRLVMRAAAESNLKPVLLELGSYGGGGGGWRD

SEQ ID NO: 4113 - protein, 494 aa, Rhodobacter sphaeroides 2.4.1
MTDLFHALGIADAATGGSLSVLSPIDGAEIGRVRPTDPAAMPGLIARAQEAFRHWREVPAPRRGELVRLFGEELRAAKAELGALVTLEAGKITSEGLGEVQEMIDICDFAVGLSRQLYGLTIASERPGHRMMETWHPMGPCAVISAFNFPVAVWSWNAALALVCGNPVIWKPSEKTPLTALASMAIFGRALARFGDAPEGLAQLVMGGPEIGEALVLSPEVPIVSATGSTRMGRIVGPKVAARFGRPILELGGNNAMIVAPSADLDMAVRAIVFSAVGTAGQRCTSLRRLIVHHSVREELVGRLVKAYASLKIGDPRADGTLVGPLIDAASRDRMVAALDRARAKGGTVHGGKPVEGVPGGAYIQPALVEMPAQTGVVCEETFAPILYVMGYETLDEAIALQNAVPQGLSSCIFTLNLREAEAFVSAAGSDCGIANVNIGPSGAEIGGAFGGEKDTGGGRESGSDAWRGYMRRQTNTINWSAALPLAQGVRFDI

SEQ ID NO: 4114 - protein, 249 aa, Streptococcus agalactiae
DLFKELEAIKQQTIFDIDNAKTEVEIDNLVHDAFSKMNATVAKFQKGLETNTPETPDTPKIPELPQAPDTPQAPDTPHVPESPKAPEAPRVPESPKAPEAPRVPESPKAPEAPRVPESPKAPEAPRVPESPKTPEAPHVPESPKAPEAPRVPESPKTPEAPHVPESPKTPEAPKIPEPPKTPDVPKLPDVPKLPDAPKLPDGLNKVGQAVFTSTDGNTKVTVVFDKPTDADKLHLKEVTTKELADKIAH

SEQ ID NO: 4115 - protein, 367 aa, Archaeoglobus fulgidus DSM 4304
MDIIEELRAYREKDIPYSRVLSSMCTVPHPVAVEAHRMFIETNLGDPGIFRGTVELEAKLMRLIGDILHCETPAGYICSGGTEANIQGIRAARNVQKKENPNIVIPKTAHFSFEKIGDILGVKIKRAGVDEEYKVDVGQVEDLMDENTVAIVGIAGTTELGQIDPIVELSKLAEERQVELHVDAAFGGLVIPFMDNPYPFDFQNRGVSSITIDPHKMGMATIPAGGIIFRNESYLRALEVETPYLTSKTQFTLTGTRPGTGVASAYAVLKSLGFEGMREVVKNCLKNTRILVEEMRDLGFEPVIEPVMNVVSFRTDEAERIKEELYRMRWVISTIREPKAIRFVVMPHVTEEVIKNFISDFRKVLRR

SEQ ID NO: 4116 - protein, 255 aa, Streptococcus agalactiae
DLFKELEAIKQQTIFDIDNAKTEVEIDNLVHDAFSKMNATVAKFQKGLETNTPETPDTPKIPELPQAPDTPQAPDTPHVPESPKAPEAPRVPESPKAPEAPRVPESPKAPEAPRVPESPKAPEAPRVPESPKTPEAPHVPESPKAPEAPRVPESPKTPEAPHVPESPKTPEAPKIPEPPKTPDVPKLPDVPKLPDVPKLPDAPKLPDGLNKVGQAVFTSTDGNTKVTVVFDKPTDADKLHLKEVTTKELADKIAH

SEQ ID NO: 4117 - protein, 323 aa, Salmonella typhimurium LT2
MKPENKIPVLTRLSDEMTAVVNFQQPGLPPWPADGDIETQRQYYLLERRFWNADAPSMTTRTCAVPTPYGDVTTRLYSPQPTSQATLYYLHGGGFILGNLDTHDRIMRLLARYTGCTVIGIDYSLSPQARYPQAIEETVAVCSYFSQHADEYSLNVEKIGFAGDSAGAMLALASALWLRDKHIRCGNVIAILLWYGLYGLQDSVSRRLFGGAWDGLTREDLDMYEKAYLRNDEDRESPWYCLFNNDLTRDVPPCFIASAEFDPLIDDSRLLHQTLQAHQQPCEYKMYPGTLHAFLHYSRMMTIADDALQDGARFFMARMKTPR

SEQ ID NO: 4118 - protein, 250 aa, Brassica napus
MTKNYPAVSEEYQKAIEKCKRKLRGLIAEKNCAPIMVRLAWHSAGTFDCASRTGVPFGTMRFDGELAHGANSGLHIALRLLEPIREQFPTISHADFHQLAGVVAVEVTGGPEIPFHPGREDKPQPPPEGRLPDATKACDHLRQVFLKQMVLTDQDIVALSGAHTLGRCHKDRSGFEGAWTSNPLIFDNSYFKELLSGEKEGLLQLPSDKALLDEPVFRPLVEKYAADEEAFFADYAEAHLKLSELGFADA

SEQ ID NO: 4119 - protein, 377 aa, Vibrio cholerae O1 biovar eltor str. N16961
MSAAKELGGAGLRGQSAGSTALCTVGKTGTGLTYRGYDITDLAHHAQFEEVAHLLLVGYLPTQAELDQYKTRLIGLRGLPEKLKQALELIPAEAHPMDVMRTGCSILGNLEPEHTFAEQQAATERMLALFPAIICYWYRFSHEGVRIDTADQSEDSIGGYFLKMLTGQAPSELFKKVMHCSLTLYAEHEFNASTFAARVCASTLSDIHSCVTGAIGTLRGPLHGGANEAAMAMIEQWHSADEAEAGIMRMLASKEKIMGFGHAIYRESDPRNALIKEWSKALSEAVGDSHLYAVSERVEAVMKREKDLFCNADFFHASAYHFMGIPTKLFTPIFVMSRLTGWAAHVYEQRANNRIIRPSADYVGPEHQTWLPIEQRG

SEQ ID NO: 4120 - protein, 274 aa, Haloarcula marismortui ATCC 43049
MDDIQIQGTSVPALGLGTWQLTGQSCRETVETALGMGYRHIDTAQAYGNERQVGLGMDAAAVDREDVFLTTKLDGSNRDERSVRRSTRESLNKLGTDYLDLLLIHWPNTPWMASLSETLGAMNDVVEEGLVRHIGVSNFSPSLLDRARDISSAPIFTDQVQYHPYWDQRKLLDYCRIHDVLLTAYSPLARGGVLDDPALVQIGNKYGKSPAQVALRWLVQQDGVAAIPKASSREHLEANLAVFDFELTDAEMERIRDPSKVKTGVQFVRSQLPF

SEQ ID NO: 4121 - protein, 331 aa, Neurospora crassa
MTGFTAANTTYTLNNGVRIPAVGFGTFANEGAKGETYAAVKKALEVGYRHLDCAWFYQNEDEVGQALAEFLENHKDVKREDIFICTKVWNHLHEPEDVKWSLQNSLDKLKVDYVDLFLIHWPIAAEKDEATNMPKIGPDGKYIIKKELTENPEPTWRAMEDLVDAGKTRSIGVSNWTIPGLQKLLKFARIKPTVNQIEIHPFLPNTELVEFCFKNQIIPTAYSPLGSQNQVPSTGERVRDDPTLKAVAERSGHNLAQVLLAWGLRRGYVVLPKSSTPSRIESNFQIPVLRDEDFKAIQEVAKGRHCRFVNMKDTFGYDVWPEESDGQLKQE

SEQ ID NO: 4122 - protein, 122 aa, Streptococcus mutans UA159
MALNIENIIAEIKEASILELNDLVKAIEEEFGVTAAAPVAAAGAAGGEEAAAKDSFDIELTAGGDKKVAVIKVVREITGEGLKEAKGLVDNAPSVLKEGVAAAEAEELKAKLEEAGATVTLK

SEQ ID NO: 4123 - protein, 496 aa, Pseudomonas syringae pv. tomato str. DC3000
MVAELLARLGVANSAHTQGDYPVYTPIDGSQIASVTLENEAQVVARIDSAHSAFLKWRTVPAPRRGELVRIFGEVLREHKADLGELVSVEAGKITQEGLGEVQEMIDICDFAVGLSRQLYGLTIASERPGHHMRETWHPLGVVGVISAFNFPVAVWAWNTTLALVCGNPVIWKPSEKTPLTALACQALFDKALTIFGDAPAALAQLVIGDRDAGEALVDDPRVPLISATGSTRMGREVGPRVAARFGRTILELGGNNAMILAPSADLDLAVRGILFSAVGTAGQRCTTLRRLIVHRSIKDEVVACVKAAYAKVRVGDPREGNLIGPLIDQQAFSAMQNALTKARDEGGQVFGGERQLQDKYPNGYYVTPAIAEMPGQTEVVRHETFAPILYVLAYDDFEEALRLNNEVPQGLSSCIFTTDLREAEAFQSAAGSDCGIANVNIGTSGAEIGGAFGGEKETGGGRESGSDSWRAYMRRQTNTVNYSRELPLAQGIVFD

SEQ ID NO: 4124 - protein, 410 aa, Aspergillus nidulans FGSC A4
MSLSPEQIQLIKATVPVLQEHGTTITKVFYDNMLTAHPELKTVFNVSNKVHGHQPQALAGALFAYASYIDNLGVLSPAVERICHKHASLAIQPDGYQIVGKFLLEAMGQVLGDALTPPLLEAWAAAYWQLANIMIGKEAELYKSADGWTDFRDFRVARKEPESDVITSFYLEPVDGKPLPSFLPGQYVSIQVQVPQLNHAQCRQYSLSDQPKPTYYRISVRKDLGLDASDPSAPAHPGYVSNILHDNINVGDIVKLTHPYGDFHLTDAAASSPLVLISAGVGLTPMTSMVNTLRTAESNTRPVHFIHGAHTSASRAFQAHLQSLPNLKTTYFLTAPTESDKQGENYTYKGRVDLSKIADEDLFLGDKQTEYYICGPTAFMLDTQKALVARGVDQSRVHMELFGTGGVPAA

SEQ ID NO: 4125 - protein, 122 aa, Anabaena variabilis ATCC 29413
MIQPQTYLNVADNSGARKLMCIRVLGAGNSRYGFIGDKIIAVVKDATPNMAVKKSDVVEAVIVRTRHHIRRDSGMTIRFDDNAAVIINKDGNPRGTRVFGPVARELRDKNFTKIVSLAPEVL

SEQ ID NO: 4126 - protein, 177 aa, Glycine max
  misc_feature (145)..(145): Xaa can be any naturally occurring amino acid
ALSMISSSAVTTVYRACAGMVAPFTVLKSMAGFPTRKTNNDITSIANNGGRVHCMHVWPPSVKKKFDTLFFLPHLADAQLANGSEYLPMMGWISCLQFKLEHGSVYREHNRSPGYYYGLYCTMSKLPIFACTDASHASKDLLEAXTVFPDGFLRIIRFHNVRQEHCIIFISYNRSCF

SEQ ID NO: 4127 - protein, 486 aa, Chloroflexus aurantiacus
MTATAEDVLSTLPLRLLINGEWRDANNGATFAVINPANGTVLGYVPNAGVEETRTAIAAAVAAQPGWAATPAGERAALLRRVAQMMLDRQQELATIMTLEQGKPLAEARGEIAYAASFLSWFAGEAERIYGMTIPASTNAKRILVLRQPVGVVAMITPWNFPSAMITRKLGPALAAGCTVICKPAEQTPLSALALGQLFSEAGAPPGVINILTCQDPRPFADTIFADTRVRKISFTGSTEVGKELMRRSADTLKRVSLELGGNAPFIVFADADLDAAVRGAVASKFRNAGQTCVCANRIFVQRPIYAAFAERFAAEVNRLTVGDGLQPGVNIGPLIDDQARQKVERHVHDAIAAGARVLVGGGPAPLGGNFWLPTVLLDARSDMLVAREETFGPVAPLIPFDDEAEVIRMANDTPYGLAAYAFTRDVGRVWRLAEGLEYGIIGINDPIPSTAQAPFGGVKQSGIGREGGPTGIDEYLDIKYVSIGI

SEQ ID NO: 4128 - protein, 289 aa, Mycoplasma gallisepticum R
MYLTTKKIKVMKYNLLANNYKMPSIGFGTYKLEDGKQTVEAVKTALEVGYRHLDCAEIYENQLSVSQGIKLSGVNRKEIFITSKIWNDDKGYESTKKAFHKILKDLDLEYLDLLLIHWPIGKGFKDNWQEVNAQTWKAMEEFYLEGKIKAIGLSNFLVHHIEALKKSAKILPMVNQLEFHPGYLQPEIVEYCQKNNIVVQAWSPFSQSKVLENKTLVQLAKKYEVTVAQLILNWIIQKDIVPLPKSKTPERIRSNFDVFNFGINQADLKVIDQLNDCGGLGLHPDQVDF

SEQ ID NO: 4129 - protein, 255 aa, Streptococcus agalactiae
DLFKELEAIKQQTIFDIDNAKTEVEIDNLVHDAFSKMNATVAKFQKGLETNTPETPDTPKIPELPQAPDTPQAPDTPHVPESPKAPEAPRVPESPKTPEAPHVPESPKAPEAPRVPESPKAPEAPRVPESPKTPEAPHVPESPKAPEAPRVPESPKTPEAPHVPESPKTPEAPKIPEPPKTPDVPKLPDVPKLPDVPKLPDAPKLPDGLNKVGQAVFTSTDGNTKVTVVFDKPTDADKLHLKEVTTKELADKIAH

SEQ ID NO: 4130 - protein, 219 aa, Streptococcus agalactiae
DLFKELEAIKQQTIFDIDNAKTEVEIDNLVHDAFSKMNATVAKFQKGLETNTPETPDTPKIPELPQAPDTPQAPDTPHVPESPKAPEAPRVPESPKTPEAPQAPDTPHVPESPKAPEAPRVPESPKTPEAPHVPESPKTPEAPKIPEPPKTPDVPKLPDVPKLPDAPKLPDGLNKVGQAVFTSTDGNTKVTVVFDKPTDADKLHLKEVTTKELADKIAH

SEQ ID NO: 4131 - protein, 372 aa, Archaeoglobus fulgidus DSM 4304
MKDGLEDVIACKTTISRIALENGRAILEYRGYDIRDLARKASYEEVAYLLLYGELPKKYELQDFKIELAERRELPPQIIGLLTHLPPYTHPMVVLRTATSYLGSLDKKIAVRTREETFNKAKDLIAKFPTIVAYYHRIRTGRNIIPPALEFSHAANFLYMLHGEEPTKTAERALDMDLILHAEHELNASTFAARIAASTLADIYACVVAATGTLMGPLHGGAAQEVMRMLREVASPRRAEEYVKRKIEAGERIMGFGHRVYRGVMDPRAELLRYLAKRLAAEGSTKWFEISEAIAKAAYKYKKLLPNVDFYSASVYANLGIPDDLFVNIFAMGRISGWTAHIIEQYENNRLIRPRAEYVGEKEKKFIPLSKR

SEQ ID NO: 4132 - protein, 358 aa, Ammi majus
MASHDQEAFLAAMQIVNSSTVDGVLNALIELNVFDIIMKKVGLDGYLHPDEIALNLPAKNLEASDMLDRMLRLLATHSIIKCKLVKRSGGTHRLTRSYGLTSISQYFVQAKDGPCLAPYIRLIHHKEMQRSWSKVKDATIEGGVPFNKAHGGKNIFEYLEKDKDLAELLSQAMDKSIATSMNILLQMYKGLEGVQEVVDVGGAHGATLSCIVSMNPHLKGINFDLPHVVKNAPSLPGIVHVGGDMFESVPRGDVILLQRLLHDWTDEESVKILKTCHEALPDHGKVVIIEMMPAELPENDVQAKNISQVDIRMLIYTHGGRERTAEEFQMLGKEAGFASSKFICGADLYGVVELYKKM

SEQ ID NO: 4133 - protein, 166 aa, Triticum aestivum
  misc_feature (53)..(53): Xaa can be any naturally occurring amino acid
  misc_feature (69)..(69): Xaa can be any naturally occurring amino acid
  misc_feature (101)..(101): Xaa can be any naturally occurring amino acid
  misc_feature (107)..(107): Xaa can be any naturally occurring amino acid
  misc_feature (125)..(125): Xaa can be any naturally occurring amino acid
  misc_feature (136)..(136): Xaa can be any naturally occurring amino acid
  misc_feature (153)..(153): Xaa can be any naturally occurring amino acid
MSDSEEHHFESKADAGASKTYPQQAGTVRKNGFIVIKNRPCKVVEVSTSKTGXSMGHAKCHFVAIDIFXMGKKLEDIVPSSHNCDIPHVNRTEYQLIDISXEDGFVXSLLTSDGNTKDDLRLPTXDETLVAQIKEXFESGKDLVVTVQSAMGXEEQICALNGFGPK

SEQ ID NO: 4134 - protein, 146 aa, Gibberella zeae PH-1
MPARSKEEQPQAEDTNMEDAPASAQPETNDEEVEDEEEEEEIEAQRVRILPGSTDTAASFEFTDEGHTLGNALRYIIMKNPDVEFCAYSIPHPSEPKMNIRIQTYSGTAVDALKKGLVDIQEVCDVVADEFWTKREAYNAEQGIDR

SEQ ID NO: 4135 - protein, 484 aa, Brucella melitensis 16M
MKSTIHSEGAAVSASVANHTPKPPLLSVDDAKALDLPRMTELFTAHLNPGQLHFMKLLGFHKVKVERAEGMYYYDQNGRRILDFFGGFGSLAFGHNHPRIIAARRKFQEELRHEIAIAFMSQYAAALAYDLAACSPGDLDMVFLGSSGSEAMEAAIKVAERAAGPKKPKIVYAENSFHGKTKGVLSITDGGLYRGEFKLVDNTVRVPFGDITAIENAFRSDPEIGTIVLETVQGGCGIIQADAEFWQKLRQLCDRYGVIWVADEVQCGFGRTGKFYAFEHYGVIPDVTALAKSLGGGKAAMAAMIARRDIYMKAYGTPKTAMIHAMATFGGIGEACITAIEAVNILYDEQLIDNSAEVGDYLLERLKELQVRYPGLLKDVRGKGMMVGLEFHDFSQAMPMVLRPMLAMLDDKLKGSLPGFIGSHLLRDHGVLVAFTEYNRNVIRLEPPLICQRAHVDEFIKALDEVLSRGIVKIVKDFIKAQIK

SEQ ID NO: 4136 - protein, 177 aa, Nostoc punctiforme PCC 73102
MRQQEPGVTVWFTGLSGAGKTTICQFVEKELRIQGYRVEVLDGDAVRQNLCKGLSFSKEDREENIRRIGFVAHLLARNNVIVLVSTISPYRKVREEVRQNIPSFIEVYVNASLEVCEQRDVKGLYKKARMGEIKNFTGIDDPYEIPLRPEVECKTNQETLYQSATKVLEKLEELGYI

SEQ ID NO: 4137 - protein, 490 aa, Gloeobacter violaceus PCC 7421
MIRSLVWFRKGLRLHDNPALLDAARDAARLYPLFIVDPWFVNPERVGVNRMRFLLESLGEIDGNLRRLGSRLIVLQGRPQEVLERVLSRWQIGRLCFERDTEPYARRRDEAIRSMAERVGVRVISPTAHTLYDPDELIELGRGKVPTTYGAFGRLAAKLGEPDAPVASPSHLPPPGELDADYGIPTLAELGYPDPECPSRGIIPPGGEGEGLRRLHVYLSDRQRSAGFAKPDTDPTAFDPPSTTALGAHLKFGCLSARTFYAEVQKVYREVGEHTEPPMSLIGQILWREFFYTVGYATPNYDRIEGNPVCRQIPWDDNPEYLAAWSEARTGFPWIDAAMTQLRTEGWLHHLSRHAVACFLTRGDLWVSWEKGQAVFERLLLDQDWSLNASNWMWLSASAFFNAYYRVYSPISFAKKYDPEGRYVRRYLPKLARVPAEFIYEPWRAPLLVQKQAGCVVGRDYPDPIVDHEQAKACNLERMRLAYEQNAKGG

SEQ ID NO: 4138 - protein, 170 aa, Zea mays
MAPTVMMASSATAVAPFQGLKSTASLPIARRSSRSLGNVSNGGRIRCMQVWPAYGNKKFETLSYLPPLSTDDLLKQVDYLLRNGWIPCLEFSKVGFVYRENSTSPCYYDGRYWTMWKLPMFGCNDATQVYKELQEAIKSYPDAFHRVIGFDNIKQTQCVSFIAYKPPGSD

SEQ ID NO: 4139 - protein, 312 aa, Triticum aestivum
MDPMDIVGKSKEDVSLPKSTMTKIIKEMLPPDVRVARDTQDLLVECCVEFINLLSSESNDVCSRDDKKTIAPEHVIRALQDLGFKEYVEEVYAAYEQHKLETLDSPKATKFTGIEMTEEEAVAEQQRMFAEARARMNNGAAKPKEPALEPQNQPQQPPQPHLQLHPQAQQPPQPQPQLHYPQSQQPLQPFTQAPPQQPLHPQLQQYTQAPPQQPLQPPLQLYPQAQPEQPLQPQSSGSTTGTCVISAAAPSATGTLLLQPPPQQSPQSQLQLHQQPQPTLVPPPQPQPQPLELQQPQPLTQLQAEHGLDWDS

SEQ ID NO: 4140 - protein, 110 aa, Lactobacillus delbrueckii subsp. lactis
  misc_feature (101)..(101): Xaa can be any naturally occurring amino acid
LQPDTKIRTFAIGMDQNPIDLKYAREVADYLGTDHTEFIMTREDVLGVLREVIYTLETWDITTIRASIGMYILCKKIHETTDLKVILTGECSDELFGYKYXDFAPSPEEF

SEQ ID NO: 4141 - protein, 497 aa, Ammi majus
MDVIIIVLSVMLAYVLVKHLLLSRDRGKNLPPGPFQLPIIGNLTNLGKLPHRSLAKLSQNYGPIMHLQLGRVTTIVISSSAIAQQVFQKKGRAFSRRFIPDSLCACDHSLYSFVWLPIGPQWRNLRKISNSNLFSANKLDANQHLRGRKVNELIAYVQKCSQTGDAVDIGRAAFRTSFNLLSNTVFSKDMVDPYQDSAQEFKDLAWNIMVEAGSPNLVDYFPVLKKMDPQGVKRRMTGYFQKVIKMLDGLINERLALKGSGTTVDKTDMLDELINISQVNPNEMDKILMEHLFVDIFVAGTDTTSNTVEWGMAEILRSTETMMKVKAELRHLVGKGVILEEGDIYRLPFLQCIVRETLRLHPPFPLLLPRQTEEETELNGYTIPKNSQVLVNAWAIGRDPVSWKNPSSFRPERFLDSEVDVKGQDFELIPFGAGIRICPGLPLVMRMVPVMLGSLINCFDWELEGGIPLNELDMEEKCGLSVAKLHPLRVLATSQVV

SEQ ID NO: 4142 - protein, 197 aa, Zea mays
  misc_feature (169)..(169): Xaa can be any naturally occurring amino acid
MATSFQGTATKCTACDKTVYLVDKLTADNRVYHKACFRCHHCKGTLKLANYNSFDGVLYCRPHFDQLFKRTGSLDKSFQGTPKVVKPERNVGNENATKVSSAFAGTREKCVGCSKTVYPIERVTVNNTMYHKCCFKCCHGGCTISPSNYIAHEGKLYCKHHHVQLIKEXGTSASSRMTTRRHRRLGRWRTTKKKSIN

SEQ ID NO: 4143 - protein, 601 aa, Glycine max
  misc_feature (51)..(51): Xaa can be any naturally occurring amino acid
  misc_feature (98)..(98): Xaa can be any naturally occurring amino acid
  misc_feature (427)..(427): Xaa can be any naturally occurring amino acid
MWKVVRYAAARSRRFSTAIPGPCKVHKRGTDILHDPWFNKDTGFPLTEREXLGLRCLIPPRVISFEQQYDRFMNSYRSLENNTQGQSDRVVSLSKWRXILNRLHDRNETLYYRVLIDNIKEFAPIIYTPTVGLVCQNYSGLFRRPRGMYFSAKDKGEMMSMIYNWPAHEVDMIVLTDGSRILGLGDLGVQGIGIPIGKLDVYVAAAGINPQRILPVMLDVGTNNQKLLEDRLYLGLRQPRLEGEEYLSIVDEFMEAVHARWPKAIVQFEDFQMKWAFETLKRYRKRFCMFNDDIQGTAGVALAGLLGTVRSQGQPLTDFVKQKIVVVGAGSAGLGVLSMAVQAVSRMSGGSGTDANSQFFLIDKDGLVTTERSNLDPAAVPFAKNPRDLEGLSEGASIIEVVKKVKPHVLLGLSGVGGVFNTEVLKXLYPSVDSIRAVTAKVGAAMLRAAVAIEAFSHAGENIVFASGSPFENVDLGNGEVGHVNQANNMYLFPGIGLGTLLSVFCHTSDRIVSAAADCLASYMTDADVRRGILYPSIDCIRDVTAEVGAAVVCAAVAEKQAEGHGDVGFKELENMSKEETVEYVRGNMWYPEYCPLVHEK

SEQ ID NO: 4144 - protein, 299 aa, Neurospora crassa
MPVRVVPREDEQVDDERQGVDFATAVSNCPPTAERPQAIDIDVDIYKPSIARANVAPSTEQPEGSAEYVDALDLKDYTVLQQHCMFWDRDRDGVIWPQDTFIGFYELGFNLFFCFLATLVINLNFSYPTRLGVSYIPDPYFRLYLPSMHKAKHGSDSGTYDKEGRFVPQAFEDMFSKWDRGDKGALSAGELWNMIAANRLAADPFGWAAGIFEFGVTWLLVQQDGMVDKEDLRRIYDGSMFFKIREAYRTEKGWNKGFGLCEFFNLGREQWAKNKGRIPPLNGIVSKVERSVTQKLHRA

SEQ ID NO: 4145 - protein, 365 aa, Ammi majus
MNTTTELIPPTFQVNDDEEEACMFAMQLASASVLPMVLKSAIELNLLESIAKAGPGAYVSPSQLAAALPSSQPDTPVMLDRILRLLASYSVLNCKLRDLPDARVERLYGLAPVCKFLTKNSDGVSMAPLLLMNQDKILMESWYHLKDAVLDGGIPFNKAYGMTAFEYHGKDPRFNKVFNQGMSNHSTITMKKILQTYDGFGGLKTVVDVGGGTGATLNMIISKYPNLKGINFDLPHVVEDAPSYAGVEHVGGDMFVSVPKGDAIFMKWICHDWSDAHCLAFLKNCYKALPKDGKVILAECILPEAPDSKLTTKNVILIDVIMLAHNPGGKERTEKEFEAFGKQAGFKSFNKACCAYNTWVIEYYK

SEQ ID NO: 4146 - protein, 437 aa, Vibrio vulnificus CMCP6
MTNLTRRQQIEALEKDWATNPRWKNVKRTYTAEEVVALRGSMVPANTIAQRGADKLWSLVNGSSKKGYVNCLGALTGGQAVQQAKAGIEAIYLSGWQVAADNNTASTMYPDQSLYPVDSVPSVVKRINNSFRRADQIQWSNGKSPEEGGIDYFLPIVADAEAGFGGVLNAYELMKSMIEAGAAGVHFEDQLASVKKCGHMGGKVLVPTQEAVQKLVAARLAADVAGTTTLVIARTDANAADLLTSDCDPYDADFIVGERTQEGFYRVRAGIDQAISRGLAYAPYADLIWCETATPCLEEARKFAEAIHAEYPDQLLAYNCSPSFNWEKNLDAETIAKFQQELADMGYKYQFITLAGIHNMWFNMFELAHAYAQGEGMRHYVEKVQRPEFEAAEKGYTFVAHQQEVGTGYFDKMTNTIQGGNSSVTALTGSTEEDQFH

SEQ ID NO: 4147 - protein, 433 aa, Mesorhizobium loti MAFF303099
MGGANQEATATLQFAGKTHEFKVRSGSVGPDVIDIASLYSTTGAFTYDPGFTSTASCESEITFIDGDAGILLHRGYPIDQLAEHGDFLEVCYLLLYGELPTKAQKDDFDYRVTRHTMVHEQMSRFFTGFRRDAHPMAVMCGVVGALSAFYHDSTDISDPYQRMVASMRLIAKMPTIAAMAYKYHIGQPFIYPKNDLGFAANFLHMCFAVPCEEYKINPVLARAMERIFILHADHEQNASTSTVRLAGSSGANPFACIAAGIACLWGPAHGGANEAALNMLGEIGHVDHIPEFIARAKDKNDPFRLMGFGHRVYKNYDPRAKIMQKTAHEVLGELGIKDDPLLDIAMELEKIALTDPYFIEKKLYPNVDFYSGITLKALGFPTTMFTVLFAVARTVGWIAQWKEMIEDPRQKIGRPRQLYTGAPERDYVPIAKR

SEQ ID NO: 4148 - protein, 361 aa, Streptomyces ambofaciens
MPELPPPHVVREAEKARAELQRQSRELAPPPFALLEMIMGVMVSRAVHVVAELKVAEALAEGPLSAEELAGRVGADADALGRVLRLLASNGVFATRADGTFELTPMADALRADHPMSMRPIALLMGHPIHWEDWSGFPETVVTGEPALPKLRGMHAFEFLTKNAEYGQVFFEGMGSMSASETGPIVAAYDFTRFGTVVDFCGGQGGLLAGILASSPATRGVLYDPRVEENGAAEFLAAQGVADRTERVAGDLFEVPPGGADAYVLKHIVHDWPEEQALQILRNVRAAIKPGGRLLIAEMVIPEQGDEPHSGKLVDLWLMLLVGGRERTPGQYADLLARAGFRLERVVETAAAISLVEAVPV

SEQ ID NO: 4149 - protein, 495 aa, Alternaria alternata
MTSVKLSTPQTGEFEQPTGLFINNEFVKAVDGKTFDVINPSTEEVICSVQEATEKDVDIAVAAARKAFNGPWAKETPENRGKLLNKLADLFEKNADLIAAVEALDNGKAFSMAKNVDVPAAAGCLRYYGGWADKIEGKVVDTAPDSFNYIRKSLLVFAVRSSMELPILMWSWKIGPAIATGNTVVLKTAEQTPLSAYIACKLIQEAGFPPGVINVITGFGKIAGAAMSAHMDIDKIAFTGSTVVGRQIMKSAAGSNLKKVTLELGGKSPNIVFADADLDEAIHWVNFGIYFNHGQACCAGSRIYVQEEIYDKFIQRFKERAAQNAVGDPFAATLQGPQVSQLQFDRIMGYIEEGKKSGATIETGGNRKGDKGYFIEPTIFSNVTEDMKIQQEEIFGPVCTISKFKTKADVIKIGNNTTYGLSAAVHTSNLTTAIEVANALRAGTVWVNSYNTLHWQLPFGGYKESGIGRELGEAALDNYIQTKTVSIRLGDVLFG

SEQ ID NO: 4150 - protein, 487 aa, Adiantum capillus-veneris
MTTSTTIVWLRRDLRLDDNPALKEASKIGNAVVPVFVWVPEEEGQFQQGRMSRWWLKQSLKQLAQSLDSLGSPLIIRRSSSSLQALMDLVIHTQASQVFFNHLYDPISLVRDQRVKEGLLQTGIHVRTFNADLLYEPWQVNDPSGKAFTTFNEFWDKCLNMPEEPHAPLLPPTRSLLAFAGHLPGCTVEDLELENNSEKDSNALLARSWTPGWINAEKALEAFVERHLLQYAANQHMVDGSTTSFLSPHLHFGELSVRKVFYNVRIKAVQWTKEGKPDGEQSVNLFLRSIGLRDYSRYICFNFPFTHERLILQNRRPFPWRVDEGLFKAWRQGRTGYPLVDAGMRQIWATGWLHNRIRVIVSSFFVKVLQLPWTWGMKYFWDALLDADLENDILGWQYISGGLPDGHELERMDDLQIEGYKYDPRGEYVRKWLPELSRLPTEWIHHPWDAPPRALRAAGVELGSNYPRPLVEFAAAWSRLQTALREA

SEQ ID NO: 4151 - protein, 331 aa, Methanothermobacter thermautotrophicus str. Delta H
MYRITVIPGDGIGVEVMEAALHVLQALEIEFEFTHAEAGNECFRRCGDTLPEETLKLVRKADATLFGAVTTVPGQKSAIITLRRELDLFANLRPVKSLPGVPCLYPDLDFVIVRENTEDLYVGDEEYTPEGAVAKRIITRTASRRISQFAFQYAQKEGMQKVTAVHKANVLKKTDGIFRDEFYKVASEYPQMEANDYYVDATAMYLITQPQEFQTIVTTNLFGDILSDEAAGLIGGLGLAPSANIGEKNALFEPVHGSAPQIAGKNIANPTAMILTTTLMLKHLNKKQEAQKIEKALQKTLMRGIMTPDLGGTASTMEMAEAIKEEIVKGE

SEQ ID NO: 4152 - protein, 474 aa, Prochlorococcus marinus subsp. marinus str. CCMP1375
MVHYEKLSPPTTGEKIKFNNGLPIVPANPIIPYIRGDGTGVDIWPATQKVIDQAIEKAYGIDRKIEWFKIYAGDEACDLYGTYQYLPKDTIEAIREYGVAIKGPLTTPIGGGIRSLNVALRQKFDLYSCVRPCRYYQGTPSPHKHPENLDVIVYRENTEDIYIGIEWESNDPIGIKLIEHLNNDVIPASPSLKNRIIPQGSGIGIKPVSKDGSQRHIRRAIQHALKLNGNKRHVTLVHKGNIMKFTEGSFRDWGYELATNEFRNECITERESWILSNLEQNPRLSIENNAKLIDPGYESLTKEKKDIICNEVQLVINNIHKTHGNNKWKKMVLVDDRIADSIFQQIQTRPQEYSILATLNLNGDYISDAAAAIVGGLGMAPGANIGDRAAIFEATHGTAPKHAGLDRINPGSVILSGVMMLEYIGWQEAADLITKGLSQSIYDKQVTYDLARLMEPPQSPLSCSEFANAVIERF

SEQ ID NO: 4153 - protein, 280 aa, Bacillus subtilis subsp. subtilis str. 168
MTTHLQAKATLHNGVEMPWFGLGVFQVEEGSELVNAVKTAIVHGYRSIDTAAIYGNEAGVGEGIREGIEEAGISREDLFITSKVWNADLGYEETLAAFETSLSKLGLDYLDLYLIHWPVEGKYKEAWRALETLYKEGRIKAIGVSNFQIHHLEDLMTAAEIKPMINQVEFHPRLTQKELIRYCQNQGIQMEAWSPLMQGQLLDHPVLADIAQTYNKSVAQIILRWDLQHGIITIPKSTKEHRIKENASVFDFELTQDDMNRIDALNENLRVGPDPDNFDF

SEQ ID NO: 4154 - protein, 326 aa, Escherichia coli O157:H7
MWKEPGTSCIHLEKTHLIIKLLRSIIDDIAPGTVIITETNVPHKDNIAYFGEGDDEAHMVYQFSLPPLVLHAVQKQNVEALCQWAQSLSLPSGKTTWFNFLASHDGIGLNPLRGLLPESEILALVEALQQEGALVNWKNNPDGTRSPYEINVTYMDALSRRESSDEERCARFILAHAILLSFPGVPAIYIQSILGSRNDYAGVEKLGYNRAINRKKYHSEEITRELNDEATLRHAVYHELSRLITLRRSHNEFHPDNNFTIDTVNSSVMRIQRSNAEGNCLTGLFNVSKNIQHVNITGLHGRDLISEVDILGNKITLRPWQVMWIK

SEQ ID NO: 4155 - protein, 216 aa, Desulfitobacterium hafniense DCB-2
MTTALNEAAAAVVRATVPALAAHGHAVTTAMYRRLFRDERIAALFNHANQGGDNAQAHALAGAILAYAQHIDDLPALSGALERIAQKHVGYHILPEHYPFVAGALLGAIEETLGEAATPQVLAAWGEAYWFLADLLQRREAELRGELAQVVGGWSGWREFVVAAKRAENASSDAAIVSFELRPADGGAVIAHRPGQYLTLRYPVPGQARQAQYSIS

SEQ ID NO: 4156 - protein, 317 aa, Burkholderia fungorum LB400
MTTALDQLKQYTTVVADTGDFQQLAQYKPQDATTNPSLILKAVQKDDYKPLLEKTVKAHASKPVGAIIDQLLIAFGTEILKIIPGRVSTEVDARLSFDTEGSIAKGRELIALYKEHGIGRERVLIKLASTWEGIRAAEVLQKEGIHCNMTLLFSLAQAAACAEAGAQLISPFVGRIYDWYKKNAGSAWDEAKDGGANDPGVKSVRRIYAYYKKFGYKTEVMGASFRTPGQILELAGCDLLTISPDLLQKLHESTEKVERKLSPDIAKESDIERVPVDESSFRFLVNDEAMATEKLAEGIRAFAADAIKLEKLIDALR

SEQ ID NO: 4157 - protein, 278 aa, Arabidopsis thaliana
MIKSEADLSDVIVIRDVWAYNLESEFDLIRGIVEDYPFISMDTEFPGVIYKADLDVLRRGNPNYLYNLLKSNVDALSLIQVGLTLSDADGNLPDLGGQKNRRYIWEFNFRDFDVERDPHAPDSIELLRRHGIDFERNRREGVESERFAELMMSSGLICNESVSWVTFHSAYDFGYLVKILTRRQLPVALREFLGLLRAFFGDRVYDVKHIMRFCEQRLYGGLDRVARSLEVNRAVGKCHQAGSDSLLTWQAFQRMRDLYFVEDGAEKHAGVLYGLEVF

SEQ ID NO: 4158 - protein, 164 aa, Glycine max
MEHFVRRVLPLLTILISLVVFFYLQDSYRAHLHPLVKFPRNKCSLLPHRHFWITSKRIVTPQGIISGSVEINEGKIISVIEGYSKQGKSKQEKIIDYGDAVVMPGLIDVHVHLDEPGRTAWEGFDTGTRAASAGGVTTVVDMPLINHPTTVSKETLKPKLELQR

SEQ ID NO: 4159 - protein, 102 aa, Triticum aestivum
  misc_feature (28)..(28): Xaa can be any naturally occurring amino acid
  misc_feature (65)..(65): Xaa can be any naturally occurring amino acid
  misc_feature (82)..(82): Xaa can be any naturally occurring amino acid
  misc_feature (93)..(94): Xaa can be any naturally occurring amino acid
  misc_feature (96)..(96): Xaa can be any naturally occurring amino acid
MAPTVMASSATSVAPFQGLKSTAGLPVXSRRSNGASLGSVSNGGRIRCMQVWPIEGIKKFETLSXLPPAQHGGLLKQVDYLXIRSKWVPCLRXXAXLGFNFR

SEQ ID NO: 4160 - protein, 167 aa, Oryza sativa (japonica cultivar-group)
GRWSATRPGGGGGGGGGVREQDRFLPIANISRIMKKAIPANGKIAKDAKETVQECVSEFISFITSEASDKCQREKRKTINGDDLLWAMATLGFEDYIEPLKVYLQKYREMEGDSKLTAKAGDGSVKKDVLGSHGGSSSSAQGMGQQAAYNQGMGYMQPQYHNGDVSN

SEQ ID NO: 4161 - protein, 359 aa, Capsicum annuum
MDSTNQNLTQTEDEAFLFAMQLASASVLPMVLKSALELDLLEIMAKAGPGAAISPSELAAQLPTKNPEAPIMLDRMLRLLATYSVLNCTLRTLPDGRVERLYSLAPVCKLLTKNADGVSVAPLLLMNQDKVLMESWYHLTDAVLDGGVPFNKAYGMTAFEYHGTDPRFNKVFNRGMSDHSTMTMKKILEDYKGFEGLNSIVDVGGGTGATVNMIVSKYPSIKGINFDLSHVIEDAPAYPGVEHVGGDMFVSVPKADAIFMKWICHDWSDEHCLKFLKNCYEALPANGKVLVAECILPETPDTSAATKNAVHVDIVMLAHNPGGKERTEKEFEALAKGAGFTGFRRACCAYQTWVMEFHK

SEQ ID NO: 4162 - protein, 368 aa, Prunus cerasus
MGKGGMSSQGGALEPMDGEQENMAAWLVGVNTLKIQPFKLPTVGPNDVRVKIKAVGICGSDVHYLKTMKCADFIVQEPMVIGHECAGIVDEVGSMVKNLLPGDRVALEPGISCWRCEQCKGGRYNLCPDMKFFATPPVHGSLANQIVHPADLCFKLPENVSLEEGAMCEPLSVGVHACRRANIGPETNVLVIGAGPIGLVSVLSARAFGAARIVIVDVDDERLSIAKSLGADDSVKVSTNPQDLENEVSKISKAMRGGVDVSFDCVGFNKTMSTALSATRPGGKVCLVGMGHGVMTVPLTPAAAREVDVVGIFRYKNTWPLCLEFLRTGKIDVKPLITHRFGFTQKEIEEAFETSARGGNAIKVMFNL

SEQ ID NO: 4163 - protein, 143 aa, Oryza sativa (japonica cultivar-group); identical to SEQ ID NO: 278

SEQ ID NO: 4164 - protein, 506 aa, Vibrio vulnificus CMCP6
MIYAQPGSDNAVVNFKSHYDNYIGGEWVKPVSGEYFDNISPVNGQAYCKVARSSAADINLALDAAHSVRYQWAKTSVTERANILLKIADRIEAHLEELAVAETWENGKPVRETLAADLPLVVDHFRYFAGCIRAQEGSAAELDANTASYHFPEPIGVVGQIIPWNFPMLMAAWKLAPALAAGCCVVLKPAEQTPTSILVLMEKIGDLIPAGVVNVVNGFGAEAGQALATSDRIAKLAFTGSTEVGNHILKCAAESLIPSTVELGGKSPNIYFPDVFDHEDAYLDKCIEGTLLAFFNQGEVCTCPSRVLVHESIYDQFIAKVAERAKSIKQGNPLDTDTQVGAQASQEQFDKILSYLEIGRQEGAKVVFGGEIAKQEDDLASGYYIQPTLLQGHNKMRVFQEEIFGPVIAVTTFKDEAEALAIANDTEYGLGAGVWTRDQNLAYRMGRNIEAGRIWINCYHAYPAHAAFGGYKKSGIGRETHKMMLNHYQNTKNLLISYDVNPLGFF

SEQ ID NO: 4165 - protein, 502 aa, Arabidopsis thaliana
MVLSHAVSESDVSVHSTFASRYVRTSLPRFKMPENSIPKEAAYQIINDELMLDGNPRLNLASFVTTWMEPECDKLIMSSINKNYVDMDEYPVTTELQNRCVNMIAHLFNAPLEEAETAVGVGTVGSSEAIMLAGLAFKRKWQNKRKAEGKPVDKPNIVTGANVQVCWEKFARYFEVELKEVKLSEGYYVMDPQQAVDMVDENTICVAAILGSTLNGEFEDVKLLNDLLVEKNKETGWDTPIHVDAASGGFIAPFLYPELEWDFRLPLVKSINVSGHKYGLVYAGIGWVIWRNKEDLPEELIFHINYLGADQPTFTLNFSKGSSQVIAQYYQLIRLGHEGYRNVMENCRENMIVLREGLEKTERFNIVSKDEGVPLVAFSLKDSSCHTEFEISDMLRRYGWIVPAYTMPPNAQHITVLRVVIREDFSRTLAERLVIDIEKVMRELDELPSRVIHKISLGQEKSESNSDNLMVTVKKSDIDKQRDIITGWKKFVADRKKTSGIC

SEQ ID NO: 4166 - protein, 463 aa, Nostoc punctiforme PCC 73102
MADLTPNSSFSLTLRLQIPNRVGMLASVTQAIATTGGNLGQIDLIEQTRKESTRDITVDAASTEHAETIVQAVKALPDIKLLSVYDRTFNLHRGGKISITSRIPLKSVSDLAMAYTPGVGRICTAIAQDPEEVYKLTIKQNTVAIVTDGSAVLGLGNLGPAAALPVMEGKAMLFKEFAGLDAFPICLATQDTEEIIQTVKNIAPVFGGVNLEDIAAPRCFEIEKRLREELDIPVFHDDQHGTAIVTLAALFNSLKLVHKPMAEIRIVINGAGAAGVAIARLLRKAGAEKIWMCDSKGIISTSRADLTEEKLEFAVKAQGTLAGAMQGADVFIGVSAPGVLTPEMVHSMAKDPIVFAMANPIPEIQPELISKDVAVIATGRSDYPNQINNVLAFPGVFRGALDCRAKTITTTMYLEAANAIASLVKPSDLDREHIIPSVFDERVVNAVAAAVQQAARQEGIAQN

SEQ ID NO: 4167 - protein, 259 aa, Vigna angularis
MAAAPTPREENVYMAKLAEQAERYEEMVEFMEKVSAAADNEELNVEERNLLSVAYKNVIGARRASWRIISSIEQKEESRGNEDHVTVIRDYRSKIESELSNICDGILKLLDSRLIPSASSGDSKVFYLKMKGDYHRYLAEFKTGAERKEAAESTLAAYKSAQDIANAELPPTHPIRLGLALNFSVFYYEILNSPDRACNLAKQAFDEAIAELDTLGEESYKDSTLIMQLLRDNLTLWTSDMQDDGADEIKEAAPKQDDQ

SEQ ID NO: 4168 - protein, 59 aa, Glycine max
  misc_feature (33)..(34): Xaa can be any naturally occurring amino acid
MSEGTANCVDILIAIILPPLGVFLKYGCGHEFXXICLLLTFLGYIPGIIYAIYAITKNN

SEQ ID NO: 4169 - protein, 252 aa, Prunus caroliniana
AHYKSEADVGNAIAEAIRSGLVKREELFITSKASNHGHVVEACKNSLKKLQLDYLDLYLVHYPLATKHSGVGTTASLLDENKVLDIDVTVSLETTWHDMEKTVSLGLVRSIGLSNYELFLTRDCLSYAKIKPQVSQFETYPYFQRESLVKFCKKHGVTPMAHTPLGGATANVKSFGSISPLEDPVLLGLAKKYKKSVAQIALRWNIERDTPVIPKSSKVERLKENLEVLNFKLEKEDIELINTIDKKSRTTL

SEQ ID NO: 4170 - protein, 253 aa, Triticum aestivum
PVKMVLSREGSDELFGGCLYFRKAPNKKELHEETCRKIKALHLYDCLRANKATSAWGLEARVPFLDKSFINVAMDLDPESKMIRRDLGRIEKWVLRNAFDDDEKPYLPKHILYRQKEQFSDGVGYSWIDGLKDHANAHVSDSMITNASFVYPENTPTTKEAYYYRTVFEKFYPKNAARLTVPGGPSVACSTAKAVEWDAAWSKLLDPSGRAALGVHDAAYEEEKAPALADHVFRPPAHGESILVETGVPAAAV

SEQ ID NO: 4171 - protein, 418 aa, Emericella nidulans
MSDLQVQGRKVFKVFNQDFIVDDRYTVTKELGQGAYGIVCAATNVQTGEGVAIKKVTNVFSKKILAKRALREIKLLQHFRGHRNITCLYDMDIPRPDNFNETYLYEELMECDLAAIIRSGQPLTDAHYQSFIYQILCGLKYIHSANVLHRDLKPGNLLVNADCELKICDFGLARGFSIDPEENAGYMTEYVATRWYRAPEIMLSFQSYTKAIDVWSVGCILAELLGGRPFFKGRDYVDQLNQILHYLGTPNEETLSRIGSPRAQEYVRNLPFMPKVPFQRLFPNANPDALDLLDRMLAFDPSSRISVEEALEHPYLAIWHDASDEPSCPTTFDFHFEVVDDVQEMRRMIYEEVVRFRQSVRMPPQAQSLAQQQQIGNIPIPEHQQGVWRQEEPRPQEAGAVGGNHNDLESSLQRGMDA

SEQ ID NO: 4172 - protein, 489 aa, Agrobacterium tumefaciens str. C58
MRERSMIKLKNAALLRDACLVNGRWLKAADGKTIAVENPANSMIIGHVPSLSADEVKAAVESAGKAFSEWSRRSAKDRAAILRRWFDLMVANADDLGALMTAEQGKPFAEAKGEALYAASFVEWFAEEAKRVYGDTIPSPTTDKRITILKQPIGVCAAITPWNFPAAMITRKAAPALAAGCAMIVKPAEQTPLTALALGVLAEEAGVPAGVFQVVTGAARDIGKVFTESDTVRKISFTGSTEVGRLLMAQSAPTIKKLSLELGGNAPFIVFDDADLDAAVEGAIVSKYRNAGQTCVCSNRIYVQDGVYDAFAEKLVKRVESLSVGEGTEPGVLIGPLIDQEAVAKVEDHVADALGKGAKIVIGGKRHALGGTFYEPTVLTGATQAMKVAREETFGPVAPLFRFGTEDEAVAMANDTEFGLAAYFYTENVRRTWRVAEALEYGMVGHNTGLISNEVAPFGGVKQSGLGREGSHYGIDEYLEIKYLCSAIG

SEQ ID NO: 4173 - protein, 181 aa, Malus x domestica
LENFIDPDIPATWRAMETLYDSGKARAIGVCNFSTKKLSDLLDIARVPPAVDQVECHPSWQQNKLRSFCKSKGVHLSGYSPLGSPGTTWIKSEVLTNPILATVAEKLGKTPAQVALRWGLQKGHSVLPKSTNEARIKENIDVFGWSIPDDLFAKFSEIEQARLIRWLSPVHHTSGPYRSLE

SEQ ID NO: 4174 - protein, 247 aa, Glycine max
MMEGDENIQASSKGKYVESFNCSEAPRKKSKKIENKRRFSDEQIRSLECIFESESKLEPRKKMQLARDLGLQPRQVAIWFQNRRARWKSKRIEQEYRKLKDEYDNLASRFESLKKEKDSLQLELQKLSDLLEACQDDGREDKAGKENSIEDGGSGSGYSSWKPEAKKPRFSNDEGLEERIGVYSDDQNENSIIRGGEKSEDKGHQLLRMDDHAEMPLASLEKWYSGVDPSGILDQSCSSSQWLDFWT

SEQ ID NO: 4175 - protein, 334 aa, Aspergillus nidulans FGSC A4
MSLGKKVTLNTGAQIPQLGFGTWQSAPGQVGEAVYQALKVGYRHLDLATIYQNQREVAEGIKRAYKDIPGLKREDIFITSKLWNTQHDPAVVEKALDDCLAELELDYLDLYLVHWPVAFKTGDNYFPLDESSDHPDGDVLIDDSISIVDTWKAMTKLPKEKARAIGVSNHTVEHLEAIINATGVVPAANQIERHPVLQSNDLIEYAAKKNIHITAYSAFGNNMFNIPLLVAHPEVKAVAEEASKRLGKTVTPAQVILNWSQEGGHSVIPKSVTASRIAENFQEVELTKEELAKVSKLGEERRRYNTPYVANKPRWNINIFGEEDEKPAKHKVIV

SEQ ID NO: 4176 - protein, 463 aa, Mycobacterium avium subsp. paratuberculosis str. k10
MPQHPSLPAHAIAPAYTGRLFTAPVPALRMPDESMDPDAAYRFIHDELMLDGSSRLNLATFVTTWMDPEAGRLMAETFDKNMIDKDEYPATAAIEQRCVCMVADLFHAEGLNDADPYSACGVSTIGSSEAVMLGGLAMKWRWRAKTKDWKKRTPNLVMGSNVQVVWEKFCRYFDVEPRYLPMEEGRYVITPEQVVDAVDEDTIGVVAILGTTYTGELEPVADICGALDKLALKPASAGGVDVPVHVDAASGGFVVPFLHPELKWDFRLPRVVSINVSGHKYGLTYPGVGFVVWRSKEYLPDELVFRVNYLGGDMPTFTLNFSRPGNQVVGQYYNFLRLGREGYTKVMQTLSGTARWLGEQLRVSEHCELISDGSAIPVVAFRLAKNRGYTEFDVSHELRTYGWQVPAYTMPDNATDVSVLRIVVREGLSADLARALHDDAVSALTSLDKVKPGGHYDAQHFAH

SEQ ID NO: 4177 - protein, 229 aa, Pyrococcus furiosus DSM 3638
MNVEEMKKAVARAALEFIEDDMVVGLGTGSTTAYFIRYLGEMIEKGKVEDIYGVPPPIKQKFLRMESGVPVLSLDQVDAIDIAVDGADEVDPNLNLIKGRGAALTMEKIIEYRAGTFIVLVDESKLVDYLCQKMPVPIEVIPAAWKAILEELSIFNAKAELRMGVKKDGPVVTENGNFIIDAKFPRIDDPLDMEIELNTIPGVVENGIFADIADIVLVGTKEGVKRLER

SEQ ID NO: 4178 - protein, 189 aa, Methanosarcina mazei Go1
MSPKNCYRNNLEELKMATGPRYKVPFRRRREGRTNYHLRLKLLLSGQDRVVVRKSARNVQIQLLAPTPEGDITYSSAVSSELAKYGYTGATGNTTAAYLTGLLFGLKSLQKGYEGGILDIGLQASSAGSRVYAALKGIVDSGFEIPCSSDVFPSDERIRGEHIAEYREESSDLPEQFEATKEKIFAEFS

SEQ ID NO: 4179 - protein, 320 aa, Bordetella pertussis Tohama I
MPSQLEALRRHTVVVADTGDFEAMRALRPTDATTNPSLILKAVQQEAYRPLLVQTARAHQGASPAEITDRLLVAFGRQILDIVPGRVSTEVDARLSFDTRATVERARGLIALYQAAGVPRERVLIKIASTWEGIQAARVLQAEGIRCNLTLLFCLPQAAACADAGVQLISPFVGRIYDWHKKNAGAEWVEDARRGANDPGVQSVSRIYRYYKRFGIETEIMGASFRNVDQILALAGCDLLTISPELLTRLAQTEGEVPAALSPQAGHDDADAVRLDGGEVAFRTQLNEDAMASEKLSEGIRLFVADARKLDALIESHGAA

SEQ ID NO: 4180 - protein, 496 aa, Davidiella tassiana
MTSVQLETPHSGKYEQPTGLFINNEFVKGQEGKTFDVINPSDESVITQVHEATEKDVDIAVAAARQAFEGSWRLETPENRGKLLNNLANLFEKNTDLLAAVESLDNGKATSMARVTSACASGCLRYYGGWADKITGKVIDTTPDTFNYVKKEPIGVCRSDHSLELPLLMWAWKIGPAIACGNTVVLKTAEQTPLGGLVAASLVKEAGFPPGVINVISGFGKVAGAALSSHMDVDKVAFTGSTVVGRTILKAAASSNLKKVTLELGGKSPNIVFEDADIDNAISWVNFGIFFNHGQCCCAGSRVYVQESIYDKFVQKFKERAQKNVVGDPFAADTFQGPQVSKVQFDRIMEYIQAGKDAGATVETGGSRKGDKGYFIEPTIFSNVTEDMKIVKEEIFGPVCSIAKFKTKEDAIKLGNASTYGLAAAVHTKNLNTAIEVSNALKAGTVWVNTYNTLHHQMPFGGYKESGIGRELGEDALANYTQTKTVSIRLGDALFG

SEQ ID NO: 4181 - protein, 481 aa, Vibrio parahaemolyticus RIMD 2210633
MSKGMTMQQIQNQSLVSFMVANPQQGIAVTNPATGELLGYAPVSTENDILNSIERAHVAQKEWSALPAKTRAGMLNRWFQLLLENKADLGRLMTLEQGKPLAEAQGEVLYGASFIEWFAEEAKRTYGETIPAPSADKRLVTIKQPIGVACAITPWNFPIAMITRKAAPALAAGCSFVVKPSESTPLSAFAVAELAYQAGIPRDVLQVVLGENSRQVGAIFTSHPLIRKLSFTGSTQVGRVLMQQSAADIKRTSMELGGNAPFIVFDDADIDAAVAGAMASKFRNAGQTCVCANRFYVHSKVYDEFVAKFDAAVQQLKVGNGLEEGVNIGPVISESAKQGIQALIDGAIEQGAKPVSALKELDGLFMQPVVLKGVTHDMKIVSEEIFGPVAPVIRFDSDEQLIEMANDTIYGLASYFYSQNIHRVWKIAEALEYGMVGINEGMISTEVAPFGGVKQSGIGREGAKQGIDEYMDVKYLCFGGN

SEQ ID NO: 4182 - protein, 138 aa, Pyrococcus furiosus DSM 3638
MGDKTKVQVSKLKPGRYIIIDDEPCRIVNITVSSPGKHGSAKARIEAVGIFDGKVRSIVKPTSAEVDVPIIDKRTAQVIAVTPDTVQIMDMETYEMFEVPLDTGVEEEIKDKIKEGINVEYWETLGRIKIMRIKGEEE

SEQ ID NO: 4183 - protein, 487 aa, Mycobacterium tuberculosis H37Rv
MSDSATEYDKLFIGGKWTKPSTSDVIEVRCPATGEYVGKVPMAAAADVDAAVAAARAAFDNGPWPSTPPHERAAVIAAAVKMLAERKDLFTKLLAAETGQPPTIIETMHWMGSMGAMNYFAGAADKVTWTETRTGSYGQSIVSREPVGVVGAIVAWNVPLFLAVNKIAPALLAGCTIVLKPAAETPLTANALAEVFAEVGLPEGVLSVVPGGIETGQALTSNPDIDMFTFTGSSAVGREVGRRAAEMLKPCTLELGGKSAAIILEDVDLAAAIPMMVFSGVMNAGQGCVNQTRILAPRSRYDEIVAAVTNFVTALPVGPPSDPAAQIGPLISEKQRTRVEGYIAKGIEEGARLVCGGGRPEGLDNGFFIQPTVFADVDNKMTIAQEEIFGPVLAIIPYDTEEDAIAIANDSVYGLAGSVWTTDVPKGIKISQQIRTGTYGINWYAFDPGSPFGGYKNSGIGRENGPEGVEHFTQQKSVLLPMGYTVA

SEQ ID NO: 4184 - protein, 152 aa, Oryza sativa (japonica cultivar-group)
MATEEDVKQRQIIESRARNISHNVRCTECGSQSIEDSQADIAILLRKLIRDEIKSGKSDKEIYKKLQADYGETILYTPKFDLQTAAIWLSPVIVGGVAAGVWAYQKHRQRTNVHIMALNLVRGVPLTPREKETMLDVLTPPPPANKWWWPGK

SEQ ID NO: 4185 - protein, 372 aa, Bacillus subtilis subsp. subtilis str. 168
MTATRGLEGVVATTSSVSSIIDDTLTYVGYDIDDLTENASFEEIIYLLWHLRLPNKKELEELKQQLAKEAAVPQEIIEHFKSYSLENVHPMAALRTAISLLGLLDSEADTMNPEANYRKAIRLQAKVPGLVAAFSRIRKGLEPVEPREDYGIAENFLYTLNGEEPSPIEVEAFNKALILHADHELNASTFTARVCVATLSDIYSGITAAIGALKGPLHGGANEGVMKMLTEIGEVENAEPYIRAKLEKKEKIMGFGHRVYKHGDPRAKHLKEMSKRLTNLTGESKWYEMSIRIEDIVTSEKKLPPNVDFYSASVYHSLGIDHDLFTPIFAVSRMSGWLAHILEQYDNNRLIRPRADYTGPDKQKFVPIEERA

SEQ ID NO: 4186 - protein, 444 aa, Zea mays
MDEFELEDNLEFILQSIQELMEDPGDNNAFGDANQNELFASIVNYDQENMLPDVSAADVAAGKDIQGIPWEKMLFGRDKYREMKMKNYRNYQNLSYAREDALQECKQVKKDSPYYDFHYNTRRARPSIVHFQLRNLVWATTKHDVYTMHDQSVTHWSSLEQTSTELINADDCIVPKQRGHGSQSVAMVQVTTMAVDSNLLVVGGFQGEIICKRLDDEGVVYSTRVTDDENAITNSLEMYQDPSGSRRLVAANNDCSIRIFDTEYFDLLKHYVFPWSVNSVSVSPNGKLFAVLGDHEDGCVVDPKCGKAIGSLRGHLDYSFASAWHPDGNIVATGSQDTTCRLWDIRNLSQSVAVLGGRMGSIRCVKFSSDGRFLATAEPVDFVHMYDAYADYSRSHEIDLFGEIGGLAFSPDTEAFYVGLADQTYGGMIEFSKRHQHHYLNSLW

SEQ ID NO: 4187 - protein, 223 aa, Vibrio cholerae O1 biovar eltor str. N16961
MNTPMFTRTSSLERTLETNKVLKNTYFLLSMTLVTSAIAAMATMAIGISPIVALVMQLAAIGILFFVMPKAINSSSGLVWTFVFTGLMGGALGPMLNFYAAMPNGPIVIAQALGLTGMVFLGLSAYTITSKKDFSFMRNFLFAGLIIVIVAALINIFVGSTVAHLAISSVSALVFSGFILFDTSRIVRGEETNYISATISMYLNILNLFTSLLSILGIMNNND

SEQ ID NO: 4188 - protein, 479 aa, Staphylococcus epidermidis ATCC 12228
MEVFNMTNQLFINNEFIESQSKETMDVINPATGEAFDTITLATEEEVNDAIEKSQQAQLEWERVPQPTRAEHVKLLIPLLEKNRDEIAQLYVKEQGKTLTQAYGEIDKSISFIDYMTSLSMSDKGRVLQNSIANETIQIINKPIGVTAGIVPWNAPILVLMRKVIPAIVTGCSVVIKPSEETTLLTLRLAELFRASTIPAGLIQIVPGTGETVGTQLASHKDIQLISLTGSMRAGKSVYENAAQTVKKVNLELGGNAPVIVTSNADLDKAVNYIVTARINNAGQVCTCPERIFVHEDVHDDFLNKVTSKMKSLTVGDPFDENTDYGAIINQKQLDSIHEKVQDAIKNGATLMTGGHQLKRHGFFYAPTVLDNVRKDDNVFKDEIFGPVLAITTYRDFEQVIEDANDTNAGLSSYIFSENLTEVMTATERLKFGEVYANCEAEEVVNGYHAGWRESGLGGADGIHGFEEYYNTTVSYIRY

SEQ ID NO: 4189 - protein, 374 aa, Glycine max
  misc_feature (107)..(107): Xaa can be any naturally occurring amino acid
  misc_feature (310)..(310): Xaa can be any naturally occurring amino acid
  misc_feature (345)..(345): Xaa can be any naturally occurring amino acid
SYCWSRFEEGEESLARQLPKGLSKEEEDSLLGQVEIWRYMTCFTDSVALKAVIELRIADILDRYGKPLSLSQIVENIEDAPSPDASLLQRVLRVMVRRKIFSAQENXRDRGETLFGLTRASKWILRDTKMTLAPMLLLENHPIHLNPAHYISEIIREGTKNGTAFFKCHGHEQFEMTGLDPEYNRLFNEGMVCTARVVSKAVITGYKDGFNQIKSLVDVGGGIGGSLSEIVRAYPHINAINFDLPHVVATAPKFDGITHVGGDMFVSIPSADAIYMKWILHDWSDEHCIKILKNCRKAIPEKTGKVIIRXDTFFDPKGNELFTDVGIAFDMMLLAHNAGGGERTXQNLKWLSKETRFARFNIININALTYVIEA

SEQ ID NO: 4190 - protein, 75 aa, Glycine max
  misc_feature (10)..(10): Xaa can be any naturally occurring amino acid
  misc_feature (39)..(39): Xaa can be any naturally occurring amino acid
  misc_feature (54)..(54): Xaa can be any naturally occurring amino acid
ASSMISSPAXTTVNRAGAGMVAPFTGLKSMACFPTQKTXHDITFIASNRGRMQXLQVLQPICKKNFETFSYFQTL

SEQ ID NO: 4191 - protein, 487 aa, Sinorhizobium meliloti 1021
MTLSFDPDTLPLPVGHFIDGRLVPAEGIIDMHRPSDGKPYAGCPLADEVLVDRAVETAKKALKATNWSGVRPRERTVVLQRWADLIESEAETLAKLEALSSTRPVGHLVAGDIAVSAEQIRFFAEFADKEGSDLVPTDDSNLGMIMTEPYGVVGAITPWNFPVSMAAWKLGPALAAGNAVVLKPSEMTPFSTVYLAELAIRAGLPAGLINIVLGDGPVTGTAMTGHPDIAKVSFTGSTGAGTAIMTNVACTGIKPMTLELGGKSPQLVFADADLDKAAAAIAQSMLSNAGQACVAGSRLIVEECIAAPLAEAIVTRMEAAKPGPTWDETSEYSPIISKRQLNRIHGIVEAAVEAGGECLFGGAQMDAPGYFYQPTLMAVRDSSSPAITEEIFGPVLTMQTFADEEEALALADHPTYGLAAGLFTRDLSRALGLTRRLQAGTVWVNRYSRSRDHILPTGGYKRSGIGKDLGREAYHANRKSKSVLISL

SEQ ID NO: 4192 - protein, 347 aa, Sinorhizobium meliloti 1021
MKSYSIALIPGDGIGQDVTDAAWQVLSTVARHSGFTLTGTSFPWSCAFYKETGAMMPADGIEALRPFDAILLGSVGWPAEVPDSISLHGLLLPIRKAFVQYANIRPHRLLSGVEGPLKASDFDILCVRENTEGEYSGAGGRVHQGTADEVAVETSIFTRAGVERILRFAFEQARQRRGKLASVTKSNAQKHSMVFWDEVTRQLADEYPDVEVTSYHIDAMAARVVMAPESLDVVVASNLFGDILTDLGAAIQGGLGFAASANINPDRSAPSMFEPVHGSAPDIAHLGIANPIAAIWSGAMMLEHLGEREAAGMIMAALERTTIRGIGTVPGKDRTRSITAAVLAALD

SEQ ID NO: 4193 - protein, 159 aa, Triticum aestivum
  misc_feature (5)..(5): Xaa can be any naturally occurring amino acid
MKTFXIFVLLAMAMKIATAARELNPSNKELQSPQQSFSHQQQPFPQQPYPQQPYPSQQPYPSQQPFPTPQQQFPQQSQQSFPQPQPQQPQQPSILQPQQPLPQQPQQPFQQPQQQLSQQPEQTISQQPQQPFPQQPHQPQQPYPQQQPYGSSLTSIGGQ

SEQ ID NO: 4194 - protein, 497 aa, Staphylococcus epidermidis ATCC 12228
MTNINVRNYIDESYGLFINNEFQASDSGETLTVSNPANGEDLAKVARAGKKDVDKAVQAAHDAFDSWSKISKEERADYLLEISRRIHEKTEHLATVESLQNGKPYRETSTIDVPQAANQFKYFASVLTTDEGSVNEIDQNTMSLVVNEPVGVVGAVVAWNFPILLASWKLGPALAAGNTVVIQPSSSTPLSLIELAKIFQEVLPKGVVNVLTGKGSESGDAIFHHEGVDKLSFTGSTDVGYGVAQAGAERIVPTTLELGGKSANIIFDDANLEQVIEGVQLGILFNQGEVCSAGSRLLVQSSIYDELLPKLKEAFENIKVGDPFDEDTKMSAQTGPEQLDKIESYIKIAEEDDKANILTGGHRITDNGLDKGYFFEPTIIEINDNKHQLAQEEIFGPVVVVEKFDDEQEAIEIANDSEYGLAGGIFTTDIHRALNVAKAMRTGRIWINTYNQIPAGAPFGGYKKSGIGREVYKDAIKNYQQVKNIFIDTSNQTKGLY

SEQ ID NO: 4195 - protein, 303 aa, Pisum sativum
MDLDQWISKVKDGQHLLEDELQLLCEYVKEILIEESNVQPVNSPVTVCGDIHGQFHDLMKLFQTGGHVPETNYIFMGDFVDRGYNSLEVFTILLLLKARYPANITLLRGNHESRQLTQVYGFYDECQRKYGNANAWRYCTDVFDYLTLSAIIDGTVLCVHGGLSPDIRTIDQIRVIERNCEIPHEGPFCDLMWSDPEDIETWAVSPRGAGWLFGSRVTSEFNHINNLDLVCRAHQLVQEGLKYMFQDKGLVTVWSAPNYCYRCGNVASILSFNENMEREVKFFTETEENNQMRGPRTGVPYFL

SEQ ID NO: 4196 - protein, 447 aa, Bacillus subtilis subsp. subtilis str. 168
MGSTQLTGRVIFKGDPGYTEAIKNWNPYVDVYPLVFVFAQNSYDVSNAIKWARENKVPLRVRSGRHALDKNLSVVSGGIVIDVSDMNKVFLDEENAIATVQTGIPVGPLVKGLARDGFMAPFGDSPTVGIGGITMGGGFGVLSRSIGLISDNLLALKTVDAKGRIIHADQSHNEDLLWASRGGGGGNFGYNTQYTFKVHRAPKTATVFNIIWPWEQLETVFKAWQKWAPFVDERLGCYLEIYSKINGLCHAEGIFLGSKTELIRLLKPLLHAGTPTEADIKTLYYPDAIDFLDPDEPIPGRNDQSVKFSSAWGHDFWSDEPISIMRKFLEDATGTEANFFFINWGGAISRVPKDETAFFWRHPLFYTEWTASWKNKSQEDSNLASVERVRQLMQPYVAGSYVNVPDQNIENFGKEYYGANFARLREIKAKYDPENVFRFPQSIPPSR

SEQ ID NO: 4197 - protein, 372 aa, Glycine max
  misc_feature (23)..(23): Xaa can be any naturally occurring amino acid
  misc_feature (55)..(55): Xaa can be any naturally occurring amino acid
  misc_feature (67)..(67): Xaa can be any naturally occurring amino acid
  misc_feature (106)..(106): Xaa can be any naturally occurring amino acid
  misc_feature (114)..(114): Xaa can be any naturally occurring amino acid
  misc_feature (123)..(123): Xaa can be any naturally occurring amino acid
  misc_feature (162)..(162): Xaa can be any naturally occurring amino acid
  misc_feature (176)..(176): Xaa can be any naturally occurring amino acid
  misc_feature (185)..(185): Xaa can be any naturally occurring amino acid
  misc_feature (228)..(228): Xaa can be any naturally occurring amino acid
  misc_feature (253)..(253): Xaa can be any naturally occurring amino acid
MGSTGETQNTPTHVADEEANLFXAMQLASASVLPMILKSALELDLLEIIAKAGPXGVHLSPCDIASXLPTHNPDAPVMLDRILRLLACYNILSFSLRTLPHGKVEXLYGLAAVXKYLVRNEDXGVSIAALNLMNQDKILMESWYYLKDAVLEGGLPFNKAYXGMTACEYHGTDPRXFNKVFNKGXMADHSTITMKKILETYTGFEGLKSLVDVGGGTGAVVNMIVSKXYPTIKGINFDLPHVIEDAPSYPGVXHVGEDMFVSVPKADAIFMKWICHDWSDEHCLKFLKNCYEALPDNGKVIVAECILPVAPDSSLATKGVVHIDVIMLAHNPGGKERTEKEFEALAKGSGFQGFQVLCCAFNTYVMEFLKKV

SEQ ID NO: 4198 - protein, 426 aa, Listeria innocua Clip11262
MYVLKNGQVLNESGELENKDVLIQNGKVNLIADSIEVTSGEEFDATGKLIAPGFIDVHVHLREPGGEHKETILTGTKAAARGGYTTICSMPNTKPVPDSKEVMNSLQAKIKETAEVRVLPYASITTSLGTDELVDFEALKEAGAFAFTDDGVGVQLAGTMYEAMKRAAALDMAIVAHCEDNSLIYGGVVHDGIFAEKEGLKGIPNIAESVQIARDVLLAEAAGCHYHVCHISTKESVRVVRDAKRAGIRVTAEVSPHHLILDEEDIPGNDGNWKMNPPLRSKEDRAALLEGLLDGTIDFIATDHAPHAAEEKNVPMEQAAFGIVGLETAFPLLYTHFVKTNEWTLKQLIDWMTVKPAECFKLPYGKLEEGAVADIVVLDLEKEATIDPATFYSKGKNTPFVGETCIGWPVATFAEGELVYNEGENK

SEQ ID NO: 4199 - protein, 103 aa, Glycine max
  misc_feature (68)..(68): Xaa can be any naturally occurring amino acid
  misc_feature (81)..(81): Xaa can be any naturally occurring amino acid
MASSMISWPGVTTVKRADAGMVASFTGLKSMAGFPTSNTNNDITFIAINGGRRRCTQASPPIGNKKFXTLSYLTDLDNAQXAKEVLFLLTKGLIPCFKFELEH

SEQ ID NO: 4200 - protein, 154 aa, Zea mays
MASDRVLGTVKWFNGTKGFGFITPDDGSEDLFVHQSSIKSDGYRSLNDGDAVEYTVGSGNDGRAKALDVTAPGGGPLAGGERPDGGNGGGRGGYGGGDRGYGGGGDRGYGGGGDRGYGGGDRGYGGGGDRGYGGDRGYGGGGGYGGGYGGGGGG

SEQ ID NO: 4201 - protein, 332 aa, Glycine max
  misc_feature (300)..(300): Xaa can be any naturally occurring amino acid
MSPIKLGLVAREPTGEVNVRGNPNNNNLFDGCQGESDHWSELDTDLYHWTKALRPVQWFPGHIAKAEKELKEQLKLMDVVIEVRDGRIPMSTSHPQMELWLGNRKRILVLNREDMISTADRNAWADYFTRNGTKVVFSNGQLGMGTMKLGRLAKELAADVNVRRRTKGLLPRAVQAGIVGYPNVGKSSLVNRLLKRRMCPAAPRPGVTRELRWVRFGKDLELLDSPGILPMRINDQSAAIKLAICDDIGERSYDVADVAAILVQMLTKLPTVGRDALCKRYKIDVDCRDGRTFIEKLAVXVFNGDVHQAAFRVLADFRKGKFGWTALERPPK

SEQ ID NO: 4202 - protein, 700 aa, Zea mays
MSVSPSSLCGGDPAMRIVVWFRRDLRVEDNPALAAAARAGGEVVPAYVWSPEEEGPYYPGRVSRWWISQSLNHLDASLRRLGAGKLVTRRSADAAVALLQLVRDTGATHVYFNHLYDPISLVRDRRLKEMLAAEGIVVQSFNSDLLYEPWEVVDDEGQPFTMFDPFWNRCLSMPYDPPAPLLPPKRINSGDLSMCPSEDLIFEDESERGSNALLARAWTPGWQNADKALTAFLNGPLADYSVNRKKADSASTSLLSPHLHFGELSVRKVFHLVRMKQLVWSNEGNHAAEESCTLFLRSIGLREYSRYLSFNHPSSHERPLLAHLRFFPWVVDESYFKIWRQGRTGYPLVDAGMRELWATGWLHDRIRVVVASFFVKVLQLPWRWGMKYFWDTLLDADLESDALGWQYITGSLPDGRELDRIDNPQFEGYKFDPHGEYVRRWIPELARLPTEWIHHPWDAPVSVLQAAGIELGSNYPLPIVELDAAKGRLQAALSEMWQLEAASRATMNNGTEEGLGDSSEVLFPQELQMEVDRQPAPAEAAANVHVPVPMPARRRGDQMVPTMTTSSLNRAGTEVSADLVVANSEEEDTRAQVPFHAHLHPRAEAPPAARRTNNGARQHDVFQQPRNHRREALLAPSASEASSSWTGREGAVVPVWSPPAASGHSDAFAADEADVSSRSYLGRHPQSHRLMNWSQLSQSS

SEQ ID NO: 4203 - protein, 139 aa, Triticum aestivum
  misc_feature (31)..(31): Xaa can be any naturally occurring amino acid
DGGVLREITMHDLLETIHICETDHLAIDVSXDSLPPLYVGYKDPGDRLHVGDARQLLRNSPEGKYDAINCDSSDPIGPAQELVEKPFFQTIAWASKPGRVLHNIAESMMVYTHVIQDMLSICREGFMAGLPYAWASVTT

SEQ ID NO: 4204 - protein, 218 aa, Bdellovibrio bacteriovorus HD100
MIKSKVRTASKGFPRAFSCDLPPPPLEYAHQGETMRIFTLIALILCTSFAWAKDTPSSFFDLSANSLSGKKVNFSTYRGKVVLVVNTASQCGFTPQLKELEEMYKKYADRGFVVLGFPSNDFKQEKGTNDEVQTFAAKEFGVTFPLFDKAPVSGKDIQPVYQFLTTQKPGLIFKDVAWNFEKFLINRKGQVVERWSSITKPSSDSITKSVEKALNEPL

SEQ ID NO: 4205 - protein, 146 aa, Triticum aestivum
  misc_feature (102)..(102): Xaa can be any naturally occurring amino acid
  misc_feature (114)..(114): Xaa can be any naturally occurring amino acid
  misc_feature (127)..(127): Xaa can be any naturally occurring amino acid
  misc_feature (135)..(135): Xaa can be any naturally occurring amino acid
MAQESLRLVCPPVSAHEGRLPRQYTLEGQGAKKDISPPLEWYGVPDGTRSLAVVVQDVDADERVPWTHWVVVNISPEEKGLPEGFSGAGGNANAGGGDGGVXQEGVNDWSQPGXGRGPVPDSHGHRXIQFRLYAXLDDVLSLGQQG

SEQ ID NO: 4206 - protein, 164 aa, Neurospora crassa
MTALFNFQSLLLVIILLVCTSTYIHQMFPAILDRNKDGLMGIFWKCARIGERLSPYVSICCIFMASIGESDSPGDIRIDSFLDAGQQGRQIQRKYFKVKQADGNQAMEDSTGDDDLACSGTPTLCDYRRPELSTPGQSLSVKRDRQGLCGTWKQRTPYRQCWTP

SEQ ID NO: 4207 - protein, 459 aa, Zea mays
  misc_feature (24)..(24): Xaa can be any naturally occurring amino acid
  misc_feature (110)..(110): Xaa can be any naturally occurring amino acid
  misc_feature (137)..(137): Xaa can be any naturally occurring amino acid
MAYAAGRKKRVGRYEVGRTIAPGXTCAKVKFAVDTDTGAPVPMKVLDKGTMFGHRMLHQIKREISIMKILRRRNIVRLNEVLAGKTKLYIILDTPPGQRRDRYNGPIKEXIRIVLHGKLLENEARKYFKLLIDAIDXLHHKGVYHRDLKPQNLLLDSRGNLKLSDFGLSTLSQNGVGLVHTTCGTPNYVAPEVLSSNGYDGSAADIWSCGVILYVLMAGYLPFEENDLPHLYEKITAAKYSCPYWFSPGAKSLIQRILDPNPRTRITIEEIREDPWFKKNYVTIRCGEDENVSLDDVQAIFDNIEDKYVSDEVTHKDGGPLMMNAFEMIALSQGLDLSALFDRQQEFVKRQTRFVSRKPAKTVVATIEVVAESMGLKVHSRNYKVRLEGPASNRASQFAVVLEVFEVAPSLFMVDVRKVAGDTPEYHRFYENLCSKLCSIIWRPTEVSAKSTPLRTTTC

SEQ ID NO: 4208 - protein, 398 aa, Streptomyces coelicolor A3(2)
MLSEQSVPVVRATLPAVGAAIGDIAALFYRKLFDAHPELLRDLFNRGNQANGEQQRALAGSVAAFAGLLLENPDERADVLLSRISHKHASLGITPDQYTIVHRHLMAAVVDVLGDAVTPEVARAWDEVYWLMANALIALEARLYTEKGVAEGDVWRTMEIVDRVEESADAVSLVLGSADGRPVVPFRPGQYVSVQVELADGARQIRQYSLSAAPGRSDWRITVKRVRGDGQPDGEVSSWLYANARKGDALNVSLPAGDLALAEHDGPLLLVSAGIGVTPMLSMLDHLAAAGATRPVTVVHADRTPDHHAHRQEQLDLIRTLPGARLHLWYEEPGDRAPEASTGRADLTGLDLPADLTVYLCGPVPFMRAVRGDLLRRGVPAEAIHYEVFGPDLWLGQQ

SEQ ID NO: 4209 - protein, 449 aa, Porphyromonas gingivalis W83
MKILLRNALITNEGKTFPGSVMIDGAFISRIIEGELPADDNLSADEVIECSGLRLFPGCIDDQVHFREPGLTHKATIASESRAAVAGGVTSFMDMPNTNPPTTMWERLLEKRQIGADTAWANYGFFFGGTNDNIDEIKRVDKHLVPGLKLFLGSSTGNMLVDNKETLEKIFGECDLLIATHCEKEEIIRANKEHYKAKYGNDLDIHFHPLIRSEEACYRSSAEAVELAERMNARLHILHLSTEKELSLFRNDIPTAQKRITSEVCVHHLWFSDTDYGRLGNRIKWNPAIKKESDREALRAAVRNGRIDIIATDHAPHLLREKEGSCLQAASGGPLVQHSLLALLELCNQGIFSIEEIVSKTAHIPATLFAIEKRGYIRPGYYADLVLVDPSSPHTVSADNILSLCGWSPFEGFTFSHSVAYTFVNGCLAYAKGRLAESRPTVHPLFFNR

SEQ ID NO: 4210 - protein, 283 aa, Streptococcus mutans UA159
MSKIQWFPGHMSKARRQVQENLKFVDFVTILVDARLPLSSQNPMLTKIIGDKPKLIILNKVDLADSTCTAEWCNFFEKQGIKALAVNSKEQSAVKKVTEAAKGLMTDKLVKLRERGIQKENLRTMIVGIPNVGKSTLMNRLAGKKIAIVGNKPGVTKGQQWLKSNKNLEILDTPGILWPKFEEEAVGLKLAMTGAIKDNLLPMDEITIFGLDFFKRYYPERLLERYKGIDLEEEAPEIIMSMTQKLGFRDDYDRFYQVFIKDVRDGRLGCYTLDRLAELDGND

SEQ ID NO: 4211 - protein, 371 aa, Helianthus annuus
MAGVVKEFDSSHDMFKVREEPKVVFNNKDLSEEMMKIKEEPMLVFDEHEDFVGGEEAPKPIEGLRDGGPPPFLKKTFEMVDDPTTDSIISWSSSKNSFILWDPHKFSTDLLPQRFKHNNFSSFVRQLNTYRFKKIDPDRWEFANEFFQKGKKHLLRDIKRRTNQPQNTQKQEEIRKQEQQQCCGHQTNSTMETELKNLRKERITLKQEILKMKQQQENTEKHLEMVEERMLRMEFKQQQLLVFMSKAFRNPIFVKLLQHLVQKQKTGSVEMCKKRKLEQMLNTDDLDRFQEMWNMIEPDAYTVLSSDGSVSPPEDQNTSDKSGSNGSDYNSESFILWEKLMEDELIFGGEQSGKDQTETYLQEWEELIPKA

SEQ ID NO: 4212 - protein, 369 aa, Vibrio parahaemolyticus RIMD 2210633
MKTQKQWIELKNNLNIENRAYINGEYSAALTGQTIPVVNPATDEIFTEIARCQSEDVDLAVSCARQAFQSGQWSESSPAHRKAVLKQFADLIDQHQEELALLETLDTGKPISHSFSTDIPGAANSLRWYAEAIDKVYGEVAPTEKDVHAFVSHQPIGVVAAVVPWNFPLWLACWKLGPALAAGNSVLLKPSEKSSLTAIFLGQLASQVGLPTGVFQVVTGFGHEAGDALAKHQDVDCIAFTGSTRIAGQLMVSSGESNLKRVFAEAGGKNANIVFEDCDDLDRAAAETAAGCFYNQGEVCVAATRLLVHESIKDQFIEKVIQASKAFTPKDPMNPSSSMGALIDQDHKSKVLEYISLGESEGAIRALWR

SEQ ID NO: 4213 - protein, 316 aa, Bifidobacterium longum DJO10A
AVGYGAKEAGTSCFMTPKTFKLISRLREEGVKRGLEILIEVHSYYKKQVEIASKVDRVYDFALPPLLLHSLFTGHVEPVAHWTEIRPNNAVTVLDTHDGIGVIDIGSDQLDRSLKGLVPDEDVDNLVNTIHANTHGESQAATGAAASNLDLYQVNSTYYSALGCNDQHYLAARAVQFFLPGVPQVYYVGALAGRNDMELLRRTNNGRDINRHYYSTAEIDENLERPVVKALNALAKFRNELPAFDGEFSYEVDGDTSITFRWTAADGTSTAALTFEPGRGLGTDNATPVASLAWSDAAGDHETRDLLANPPIADID

SEQ ID NO: 4214 - protein, 371 aa, Cryptococcus neoformans var. grubii
MPLESCMLILDNSEYMRNGDYPPTRFQAQAEAVQTVFTAKTDANPESAVGMMTMAGNSPSLLVTPTNDLGRLMHALSKVLISNTAQLSTAISIAQLALKHRENKNQRQRIVIFVGSPLGESAESLVKLGKRLRKNNVFVDIVTFGDEGRDNDEKLRGLVEAVGDESNLVSVPPGERFLSDVIASSPILFDGENPMAAAGGFEGDIDPNMDPELAMAIRMSLQEAQAQQSQSADAGPSSGAGVALPDSLTQPLSTTHPSSSSGDVLMAPGDKGNLPGTPNAQAHAEAADKAGAIAESGTGSTFISGNPLTGNRAPDVAQQEEEDEELKRALAMSRGEGGDIEMEEEEDEEAAIARAIAMSLEGQEEGKDKNH

SEQ ID NO: 4215 - protein, 434 aa, Beta vulgaris
MDRYKLLKELGDGTCGTVYKAVNRESYEIVAVKKMKRKFYFWEECVNLREVKSLPSIESSHIIKLKEVVRENNDLFFIFEYMQYNLYQIMKDRHRPFTEEEIRNFLTQVLQGLAHMHRNGYFHRDLKPENLLVTNDVIKIADFGLAREVSSIPPYTEYVSTRWYRAPEVLLKSSLYTPAIDMWAVGAVLAELFTSCPIFPGESETDQLYKICCVLGAPDWAVFPEAKNISQLTSISYSQMLPANLSEIIPNANWEAIDLISQLCSWDPLKRPTAEQALHHPFFHVALRVPRPIHDPFHSKPDYTKTKPNLELNLWDFDSKADDCFLGLTLAVNPGVSSLEMGPRVSGSTRQDVYFCSSFQDHPEQSVFWSLFSPCRNGATPPVDPSLSLSFSSITHPRIAVPHSGGFGLAALQPGILDGPLLVVSSPHQPSHYL

SEQ ID NO: 4216 - protein, 470 aa, Thermobifida fusca
MASLPSVSYSITVRLEIDGRASAVSSLTNAVERVGGAVTALDVNSSGRERLRIDVTCAARDTNHAQAIVEALDAVEGVTVHKVSDRTFLMHLGGKIEMRSKVPLRNRDELSMAYTPGVARVSAAIAANPEDARRLTVKRNSVAVVTDGSAVLGLGNIGPEAALPVMEGKAALFKRFADIDAWPIALDTQDTDEIVRAVQLIAPGFGGINLEDISAPRCFEVEARLRELLDIPVFHDDQHGTAIVVLAALKNALRVVGKELGSVRIAMSGAGAAGTAILKLLLHAGAKDVVVCDVHGAVHQGRGDLDANLRWIAEHTNPDGYAGDLAGAVRGADVFIGVSAPNLLSGEEIAEMNEDAIIFALANPEPEVDPEIAALHAAVVATGRSDYPNQINNVLVFPGFFRGLLDAQSHRVTPDMMLAAASALAAVVTEEELSPHYIIPSVFHPGLAQRVAEAVREVALREGGVERHEN

SEQ ID NO: 4217 - protein, 430 aa, Haemophilus influenzae R2846
MMDEQSLLAFDTQHIWHPYSSVSSDMPLYAVERADGVMITLKDGRRLIDGMSSWWAALHGYNHPRLNAAAQNQLAKMSHIMFGGFTHDPAVELAQLLVQILPNGLDKIFFADSGSVAVEVAMKMAIQYQHAKGEVQRQKFATIRSGYHGDTWNAMSVCDPTTGMHHLFHHSLPVQYFLPQPNIPFNESWNDCAIEPLADLLKKKGSEIAALILEPVVQGAGGMYFYSPTYLVKAQALCKQYGVLLIFDEIATGFGRTGKLFAAEHAGISPDIMCIGKALTGGYLTLSATITTTEIAQIICRGEAKCFMHGPTFMANPLACAIAAESIRLLLESPWQQNIQRIEHSLTQQLSPLAEKDYVKEVRALGAIGVVEMKSAVNMKTLVPRFVEQGVWIRPFGKLVYVMPPFVIKNDELQKLTEGMILALTQEYEH

SEQ ID NO: 4218 - protein, 484 aa, Sinorhizobium meliloti 1021
MRLKDRELFRQLGLIGGEWIAGASGVVVDVIDPANQAVLGTVPDMGTAETRAAIEAANAAFGPWKKKTHAERAAVLERWHALMIENLEDLAVLVTMEQGKPLEEARGEIRYGAAFVKWFAEESRRIGGHTIPSPTSDRRIVVLKEAVGVCAIVTPWNFPNAMITRKVAPALAAGCTVVIKPSEFTPFSALALGVLAERAGIPAGVVNIVTGMPTAIGNEFMTNETVRKISFTGSTRVGSLLMRGAADSVKRLSLELGGNAPFIVFDDANLDLAVEGAIASKFRNGGQTCVCANRILVQAGVYDAFAEKLGARVNAMKVGPGTEPGIAIGPMINEAAIDKIDRHVEDAIAKGAKLAARGRSVPEGRQYTAPIVLTGATTDMLLASEETFGPVAPLFRFETEDEAIAIANGTPFGLAAYFYTEGLKRSWRVAEALEFGMIGLNTGAISTEVAPFGGVKQSGLGREGAQVGIEEYLEMKSFHIGGLD

SEQ ID NO: 4219 - protein, 468 aa, Bradyrhizobium japonicum USDA 110
MEAARVFDSKPNSAEARDIAFHLHSQTNPQRHAEIGPLIMARGEGVHVYDASGKRYLEAMAGLWCTSLGFSETRLKAAAATAYDKFGFYHSFNHKTPDNTIELAEKLVEISPIPDAQAYFATSGSEATETMVKLAWVYHAVRGKPGKRKIIARDRGFHGSTIVAASMCGLPRMHREFGLPLDGFLHTHCPDAYRGTRPGESEAAFVDRLAADLEALIMAEGPDTIAAFIGEPINAGGGIVVPPKGYFAAIEAVLRRHDILVLGDEVVCGFGRTGNWFGCETVGMKPDMVALAKGITSSYFPMSAVLLGRPIRDALSEMNKGGELFGHGFTNSGHPVGAAIALETLNIYHEMDVVPHVRRMGSRLRAGLEQIARDSRIVGQVRGEGLMIGVELVAAPATRQAFDPALKVGAMFDALAIENGLIIRAMGDTIGFCPPLIIDEAGVDEALDLFGRTLFSAEAKLAEKRPSA

SEQ ID NO: 4220 - protein, 319 aa, Bacillus subtilis subsp. subtilis str. 168
MKRIGVLTSGGDSPGMNAAVRAVVRKAIYHDVEVYGIYNGYAGLISGKIEKLELGSVGDIIHRGGTKLYTARCPEFKTVEGREKGIANLKKLGIEGLVVIGGDGSYMGAKKLTEHGFPCVGVPGTIDNDIPGTDFTIGFDTALNTVIDAIDKIRDTATSHERTYVIEVMGRHAGDIALWAGLAGGAESILIPEADYDMHEIIARLKRGHERGKKHSIIIVAEGVGSGVEFGKRIEEETNLETRVSVLGHIQRGGSPSAADRVLASRLGAYAVELLLEGKGGRCVGIQNNKLVDHDIIEILETKHTVEQNMYQLSKELSI

SEQ ID NO: 4221 - protein, 410 aa, Bacillus subtilis subsp. subtilis str. 168
MSLREEALHLHKVNQGKLESKSKVEVRNAKDLSLAYSPGVAEPCKDIHEDINKVYDYTMKGNMVAVVTDGTAVLGLGNIGPEAALPVMEGKAVLFKSFAGVDAFPIALNTNDVDKIVETVKLLEPTFGGVNLEDIAAPNCFIIEERLKKETNIPVFHDDQHGTAIVTVAGLVNALKLSGKSMSSIKVVANGAGAAGIAIIKLLHHYGVRDIVMCDSKGAIYEGRPNGMNDVKNEVAKFTNQDRKDGSLKDVIVDADVFIGVSVAGALTKEMVQSMAKDPIIFAMANPNPEIMPEDAREAGASVVGTGRSDFPNQVNNVLAFPGIFRGALDVRATHINEEMKIAAVEAIASLVSEDELSADYVIPAPFDKRVAPAVAKAVAKAAMETGVARITVDPEEVAEKTRKLTIIGE

SEQ ID NO: 4222 - protein, 458 aa, Sinorhizobium meliloti 1021
MYSNSLIELDRAHLIHPVASYRGHEKLGVRVLASAKGATVTDASGRQLIDGFAGLWCVNAGYGQETIVEAAAKQMRELSYATAYFGLGSEPAIRLASELAERAPGNLNHVYFTLGGSDAVDSTIRFIRYYWTARGEPQRDQFISVEQGYHGSSTVGAGLTALPAFHTGFGIPFDWQHKIPSHYAYRNPVGDDPQAIIAASLTALRRKVEEIGPERVAAFYAEPIQGSGGVLVPPRGWMKAMRELCRDLGILFVADEVITGFGRTGPLFASTENEIVPDFITTAKGLTSGYVPMGAVFMADHIYQTIADGAGASAVGHGYTYSAHPVSAAVGLEVLRLYENGLLENGVKAGARLMEGLGSLRDHPLVGDVRGRGMLAAIELVVDKAQKTPLPAAAEPARRIFDRAWENGLVIRAFANGVLGYAPPLCCSETEIDAIIERTRQSLDETLEDPDVRRALKT

SEQ ID NO: 4223 - protein, 80 aa, Brassica napus
  misc_feature (10)..(12): Xaa can be any naturally occurring amino acid
  misc_feature (16)..(16): Xaa can be any naturally occurring amino acid
  misc_feature (18)..(18): Xaa can be any naturally occurring amino acid
  misc_feature (27)..(27): Xaa can be any naturally occurring amino acid
  misc_feature (49)..(49): Xaa can be any naturally occurring amino acid
  misc_feature (51)..(52): Xaa can be any naturally occurring amino acid
  misc_feature (59)..(59): Xaa can be any naturally occurring amino acid
  misc_feature (61)..(61): Xaa can be any naturally occurring amino acid
  misc_feature (64)..(64): Xaa can be any naturally occurring amino acid
MAYSMLSSAXXXTSPXQXTMDAPFTGXLKPSSAFPVTRKVNNDITSIAXSXXGRVSCMXVXPPXGKNKFETLSYLPDLTE

SEQ ID NO: 4224 - protein, 217 aa, Brucella melitensis 16M
MKFFVDTADVKEIRELNDLGLVDGVTTNPSLILKSGRDIIEVTKEICNIVKGPVSAEVAATEYEQMMKEAAVIARIADNICIKLPVTLDGLKACKALTSEGHKVNMTLCFSANQALLAAKAGATFISPFIGRLDDTGINGMELIAEIRTIYDNYDFRTEILAASVRTVNHVKEAALIGADVVTAPPATLKALVKHPLTYKGLETFLADWAKTGQKIA

SEQ ID NO: 4225 - protein, 181 aa, Apium graveolens var. dulce
GNSIAYKNVIGARRASWRIISSIEQKEESRGNDAHVATIREYRSKIENELSSICDGILKLLDSKLIGAASNGDSKVFYLKMKGDYYRYLAEFKIAAERKEAAENTLNAYKAAQDIANAELAPTHPIRLGLALNFSVFYYEILSSPDRACNLAKQAFDEAIAELDTLGEESYKDSTLIKSLV

SEQ ID NO: 4226 - protein, 126 aa, Helicobacter hepaticus ATCC 51449
MAISKEEVLDYIGNLSVLELSELVKAFEEKFGVSAAPTVVAGAVAGGAGGGAAAEEKTDFNVVLVDAGANKINVIKAVREITGLGLKEAKDATEQTPSTLKEGVSKEDAENFKKKLEEAGAKVEIK

SEQ ID NO: 4227 - protein, 90 aa, Zea mays
MDEEEHEVYGQEIPEDGDMDGADVDMDACGDDATKLQELDEMKRKLKEMDEEAAALRDMHAKVAKEMHGCDPSASTTEANEQVDARSLYV

SEQ ID NO: 4228 - protein, 180 aa, Mycoplasma agalactiae
MTPTRIIPLGGVQEIGKSTLIIEHGKHIVIIDAGIKFADTATTGIKGIVPDYKYLKERKDNIEGLFITHGHEDHIGGVVYLVKQVHLKRIYAPRIAIQYLKLKFEEHKITHKVEFIEIEKSAVHEFGNGQVKVDFWTAQHSIPDAFGIRVTTPNGSVMCTGDFRFDYNPIGEIYTDFTKL

SEQ ID NO: 4229 - protein, 159 aa, Glycine max
MDFRVMGLEPPLFHTLQHMMDMSEDAAGENKTYSAPTRSYVRDAKAMAATPADVKEYPNSYVFEIDMPGLKSGDIKVQVEDDNVLLISGERKRDEEKEGVKYLRMERRVGKFMRKFVLPENANTDAISAVCQDGVLSVTVQKLPPPEPKKPRTIEVKVF

SEQ ID NO: 4230 - protein, 307 aa, Petunia x hybrida
MDQYEKVEKIGEGTYGVVYKARDRVTNETIALKKIRLEQEDEGVPSTAIREISLLKEMQHANIVRLQDVVHTVKSDCILSFEYLDLDLKKHMDSSPEFSKDPRLVKMFLYQILRGIAYCHSHRVLHRVLHRDLKPQNLLIGRRTNALKLADFGLARAFGIPVRTFTHEVVTLWYRAPEILLGSRHYSTPVDVWSVGCIFAEMVTQRPLFPGDSEIDELFKIFRVMGTPNEDTWPGVTTLPDFKSALPKWPSKDLATIVPNLDGAGLDLLDKTVRLDPSKRITARNALEHEYFKDIGYVFRSKGSSRV

SEQ ID NO: 4231 - protein, 175 aa, Zea mays
  misc_feature (157)..(157): Xaa can be any naturally occurring amino acid
VGREAGREGAMEQGEEDGDWMMEPAAGKKGGAMIDRKKRFSEEQIKSLESMFATQTKLEPRQKLQLARELGLQPRQVAIWFQNKRARWKSKQLERQYAALRDDYDALLSSYDQLKKDKQALLNQLEKLAESLREPGGAKCGDNAGAARRDDVRLAVXGMNMKDEFVDAGGASKLY

SEQ ID NO: 4232 - protein, 471 aa, Bacillus megaterium
TIKEMPQPKTFGELKNLPLLNTDKPVQALMKIADELGEIFKFEAPGRVTRYLSSQRLIKEACDESRFDKNLSQALKFVRDFAGDGLFTSWTHEKNWKKAHNILLPSFSQQAMKGYHAMMVDIAVQLVQKWERLNADEHIEVPEDMTRLTLDTIGLCGFNYRFNSFYRDQPHPFITSMVRALDEAMNKLQRANPDDPAYDENKRQFQEDIKVMNDLVDKIIADRKASGEQSDDLLTHMLNGKDPETGEPLDDENIRYQIITFLIEGHETTSGLLSFALYFLVKNPHVLQKAAEEAARVLVDPVPSYKQVKQLKYVGMVLNEALRLWPTAPAFSLYAKEDTVLGGEYPLEKGDELMVLIPQLHRDKTIWGDDVEEFRPERFENPSAIPQHAFKPFGNGQRACIGQQFALHEATLVLGMMLKHFDFEDHTNYELDIKETLTLKPEGFVVKAKSKKIPLGGIPSPSTEQSAKKVR

SEQ ID NO: 4233 - protein, 498 aa, Triticum aestivum
  misc_feature (41)..(41): Xaa can be any naturally occurring amino acid
MANNNSSYGENVSRKSHTPSAIVIGGGFAGIVSAMARCSRXAFIDGGLLESRDRIGGRVHTDYSFGFPVDPSAFGFPVDLGASWLHGVCEENPLAPIIGRLGLPLYRTSGDDSVLFDHDLESYALYDTNGYQVPQEFVAIMGKMEGFEAIRKEAGKLCEEMKEDISIAKAIAIVLERNPHFRQVVIAHDVLQWYLVLMEGCFSTDADAISLQCWSHQEVLLPGGHGLMVRGYRPVINTLAKGLDIRLGHRVVEIVRHWNRVEVTVSNGKTFVADAAVITVPLGVLKSNTIKFEPRLPEWKEEAIRELSVGVENKIVLHFSEVFWPNVEFLGVVSSTTYGCSYFLNLHKATGHAVLVYMPAGRLACDIEKMSDEAAAQFAFSQLKKILPNAAEPLNYLVSHWGSDENTLGSYTFDGVGKPRDLYEKLRIPVDNLFFAGEATSVQYTGTVHGAFSTGEMAAEECRMRVLEKFRELDMLEMCHPMAEQTATVSVPLLISRL

SEQ ID NO: 4234 - protein, 417 aa, Erwinia carotovora subsp. atroseptica SCRI1043
MESKVVVPTEGQKITVDAQGKLVVPNNPVIPFIEGDGIGIDVTPAMINVVDAAVKKAYQGKRAISWMEIYTGEKSTQVYGKDVWLPDETLDLIREYRVAIKGPLTTPVGGGIRSLNVALRQQLDLYVCLRPVRYYEGTPSPVKQPELTDMVIFRENAEDIYAGIEWKAGSVEADKVIKFLREEMGVSKIRFPEQCGIGVKPCSEEGTKRLVRAAIEYAITNDRDSLTLVHKGNIMKFTEGAFKDWGYQLAREEFGGELIDGGPWVKIKNPNTGKEIVVKDVIADAFLQQILLRPAEYDVIACMNLNGDYISDALAAQVGGIGIAPGANIGDECALFEATHGTAPKYAGQDKVNPGSVILSAEMMLRHLQWFEAADLIVKGVEGAIKNKTVTYDFERLMEGAKLRKCSEFAQDIIDNM

SEQ ID NO: 4235 - protein, 270 aa, Helicobacter hepaticus ATCC 51449
MQTLTLNNGVKMPILGLGTYSLTGKAGQKAMSEAIEVGYRLFDSAQMYNNEAELGAAINAAVKGGIKREEFFIQTKLLESSSEDLAKKSIEKSLKTLGLDYIDSLLIHMPYSQSKAMYRAMESFYKQGILRVIGISNFGAKAYSEFVKSCEVIPAINQCETHLLLQQKPLREAMKSKKTLLQSWSPFIAGKGSILENPTLKSIAQKYNKTPAQVVLRFLIEQGISVIPKTSKRARMQENLNVFDFSLSAQDTQILKELDTNKSAFSWTNY

SEQ ID NO: 4236 - protein, 309 aa, Candida albicans SC5314
MTSHTHPVKLSRTFKTKSGDELSIGTGTGTKWKKDSKLDEINQELVDQILLAIKLGYRHIDTAEVYNTQAEVGEAIKQSGIPREQLWITTKYNPGWNDIKASSASPQESIDKALKQLGTDYIDLYLIHQPFFTEENTHGYSLIDTWKVLIEAKKQGKIREIGVSNFAIKHLEALKEVSEPEFYPVVNQIESHPFLQDQSKNITKYSQENNILVEAFSPLTPASRLDANPLTEYLEELSKKYNKSLGQLLLRYTLQRGILPITTSAKESRIKESLDVFDFELTKEEFDKITEIGSANPHRVFFHEAFKDL

SEQ ID NO: 4237 - protein, 572 aa, Zea mays; identical to SEQ ID NO: 297

SEQ ID NO: 4238 - protein, 364 aa, Gibberella zeae PH-1
MGFAKTLIFLSQQQPTMSFVRAFSFLTAVSLVTYTILSIATSFGPAEMPEFNKNETVRDIPAFGLGTWLAGKGVVVPAVEYALKGGYRHIDTALIWRNEDEVGKGIKASGVSRDEIWVTGKLWNTDHRPELVRKAIETSIANLGVEYLDLYLIHYPVAWVPETRDVDNNTSLIDTWKAMEELVRAGLTRNIGFSNFAPKDINKILKIASIQPYAHEFETHPYLQQQSFVDFHKKENIKVIAASPLANTNPTYGDKYPSILHDEFWVKLAEDKNATVAQTILAWGQQRGTIVISKSTHSNHIAENLCSQGIEFTKSELEEVAKQDKKLRLLNPIHWGMDLFEGLDAGAAEKEEPKKEEDERNLDL

SEQ ID NO: 4239 - protein, 263 aa, Aeropyrum pernix K1
MQLASWRLLARTIKNVDVVVEVVDIRDPMVTRSRRAERMAEALDKRLLIVLNKSDLVPLRVAEKWARIIEGMGFDVIYVSARHRLSTRRLRGFIKHLADVKPFSAGVIGFPKTGKSSVINALRGRKGAPTSPIPGSPGYTKGLQLLKIEPGFYMVDTPGVIPVEGGWPESIIRGRSPEDLPDPVPPAAALIEKILRYNRRAFQAAYGITAQDPYEIMERLAVKRGWFYKTTKEPLIEEAARTIIRDYHKAKIPFYVPPEEFTR

SEQ ID NO: 4240 - protein, 241 aa, Oryza sativa (japonica cultivar-group)
MSEGFDGTENGGGGGGGGVGKEQDRFLPIANIGRIMRRAVPENGKIAKDSKESVQECVSEFISFITSEASDKCLKEKRKTINGDDLIWSMGTLGFEDYVEPLKLYLRLYREGDTKGSRASELPVKKDVVLNGDPGSSLVNYGAQRADANANHLDLFFLLRKNPESTTANCMREDEAKPVTVKIIETVYVEADTADDFKSVVQRLTGKDAVAGDAPELNSAQRFGSGREASRHGDHKVRIYE

SEQ ID NO: 4241 - protein, 166 aa, Triticum aestivum
ARGTSLGADATVKVSTRAEDLESEVERIQAAMGSEIDVSLDCAGFSKTMSTALEATRPGGKVCLVGMGHNEMTLPMTSAAAREVDVVGVFRYKDTWPLCIDFLRTGKVDVKPLITHRFGFSQRDVEEAFEVSARGRDAIKVMFNLLGGWLELDHRRRLDLSVQPAG

SEQ ID NO: 4242 - protein, 239 aa, Triticum aestivum
  misc_feature (203)..(203): Xaa can be any naturally occurring amino acid
MLLGDKAVLKQQGGGEEEEMGGDGMSASELVSKEMEGVRAIVLKPSESLDESRFMKIAGADFNDAGLGLDGLLGSLASTGFQASNLADAIDVVNQMLDWSLSHEKPSEDCDEAELDPKYRESVRCKIFLGFTSNLVSSGIRDVIRFLAQHHMVDVIVTTAGGIEEDLIKCLAPTYRGEFSLPGALLRSKGLNRIGNLLVPNDXYCKFENWIMPLFDQMLQEQSAENVWTPSKVIARLGK

SEQ ID NO: 4243 - protein, 461 aa, Mycobacterium tuberculosis H37Rv
MATATTQRPLKGPAKRMSTWTMTREAITIGFDAGDGFLGRLRGSDITRFRCAGRRFVSISHPDYVDHVLHEARLKYVKSDEYGPIRATAGLNLLTDEGDSWARHRGALNSTFARRHLRGLVGLMIDPIADVTAARVPGAQFDMHQSMVETTLRVVANALFSQDFGPLVQSMHDLATRGLRRAEKLERLGLWGLMPRTVYDTLIWCIYSGVHLPPPLREMQEITLTLDRAINSVIDRRLAEPTNSADLLNVLLSADGGIWPRQRVRDEALTFMLAGHETTANAMSWFWYLMALNPQARDHMLTELDDVLGMRRPTADDLGKLAWTTACLQESQRYFSSVWIIAREAVDDDIIDGHRIRRGTTVVIPIHHIHHDPRWWPDPDRFDPGRFLRCPTDRPRCAYLPFGGGRRICIGQSFALMEMVLMAAIMSQHFTFDLAPGYHVELEATLTLRPKHGVHVIGRRR

SEQ ID NO: 4244 - protein, 272 aa, Gibberella zeae PH-1
MGHEDAVYLAKLAEQAERYEEMVENMKIVAGEDRDLTVEERNLLSVAYKNVIGARRASWRIVTSIEQKEESKGNSSQVTLIKEYRQKIEAELAKICEDILEVLDQHLIPSAKSGESKVFYHKMKGDYHRYLAEFAIGDRRKDSADKSLEAYKAATEVAQTELPPTHPIRLGLALNFSVFYYEILNAPDQACHLAKQAFDDAIAELDTLSEESYKDSTLIMQLLRDNLTLWTSSEAETSAAGQAEAPKEDAPAAATAEDAPAAPAAAEEPKAE

SEQ ID NO: 4245 - protein, 492 aa, Arabidopsis thaliana
MSDFSSSVKLKYVKLGYQYLINNFLTLLLIPVIATVAIELLRMGPEEILSVLNSLHFELLHILCSSFLIIFVSTVYFMSKPRTVYLVDYSCYKPPVTCRVPFSSFMEHSRLILKDNPKSVEFQMRILERSGLGEETCLPPAIHYIPPTPTMESARNEAQMVIFTAMEDLFKNTGLKPKDIDILIVNCSLFSPTPSLSAMIINKYKLRSNIKSYNLSGMGCSASLISVDVARDLLQVHPNSNAIIISTEIITPNYYKGNERAMLLPNCLFRMGGAAILLSNRRSDRWRAKYKLCHLVRTHRGADDKSYNCVMEQEDKNGNVGINLSKDLMTIAGEALKANITTIGPLVLPASEQLLFLSSLIGRKIFNPKWKPYIPDFKQAFEHFCIHAGGRAVIDELQKNLQLSGEHVEASRMTLHRFGNTSSSSLWYELSYIEAQGRMKRNDRVWQIAFGSGFKCNSAVWKCNRTIKTPTDGAWSDCIERYPVFIPEVVKL

SEQ ID NO: 4246 - protein, 522 aa, Triticum aestivum
LENNRSCEPSVSPRKEFQPNILDLPSDRTTYCHGRKSTEIVFPTRMPSSPPSSRGKHCPTSPVHSRAFGQCPGSPTAWQDDARNSSSPHPLPLPPGSPCTSSRSLHSQWKKGKLLGSGTFGQVYLGFNSEGGQMCAIKEVKVIADDSNSKECLRQLNQEMLLLNQLSHPNIVQYYGSELSSETLSVYLEFVSGGSIHKLLQEYGPFGETVLRNYTAQILSGLAYLHGRNTVHRDIKGANILVDPNGDIKLADFGMAKHISAYTSIKSFKGSPYWMAPEVIMNTNGYSLSVDIWSLGCTILEMATARPPWSQYEGVAAIFKIGNSKDIPDIPDHLSSEAKSFLKLCLQRDPAARPTAAQLIEHPWVKDQASVRSSRSGSGITRDMFSTSTDGSKATVKTSIELSSYRSLSPLRDTNLRLRNLVVPASSIPSISTRKASAISSSNVRMNMSLPVSPCTSPLRQYRQSNRSCLPSPPHPAYSAGAANYSPINNMLYPTRPSNYLTDPWLETPRQKTQTFDSPRRL

SEQ ID NO: 4247 - protein, 329 aa, Oryza sativa (japonica cultivar-group)
MPSEFVAARKKPPPELLFAAGRKKQQPPPPGMAFVPSEFAAAGVGRKRQPAPPVEIRRVWAHNVEEEFRIIRNAIDHFPYVSMDTEFPGVIHRPTKHPALLTAGDRYDLLRRNVDALHLIQVGITLAASPTAAPALAFEINLSDFDQRVHRHAAESVQLLAEHGVDLAAHRRHGVRASALAPLLMSSGLVCSHGAVKWVTFHSAYDFAYLVKLLMGRKLPRSMAEFLNLVRVFFGDEVYDVKHMMRHCGGELYGGLERVAAALQVKRAAGRCHQAASDSLLTWDVFRRMRELYFLKHGVEAYQGVLFGLELDMDMPSNKTPSLPLVAAR

SEQ ID NO: 4248 - protein, 167 aa, Triticum aestivum
HEVSPDGKLLAVLGDSSDCLIADSGSGKEIASLRGHADYSFASAWHPDGRVLATGNQDRTCRLWDVRNPSEAFAVLEGRIGAVRGLRFSPDGRFLAAAEPADFVRVYDVAAGYARAQEIDLFGEIAGVSFSPDDGAEALFVGVADRTYGSLLEFRRRHRHAYLDCYL

SEQ ID NO: 4249 - protein, 139 aa, Pisum sativum
NTDITSITSNGGRVKCMQVWPPIGKKKFETLSYLPPLTRDQLLKEVEYLLRKPWVPCLEFELEKGFVYREHNKSPGYYDGRYWTMWKLPMFGTTDASQVLKELDEVVAAYPQAFVRIIGFDNVRQVQCISFIAHTPESY

SEQ ID NO: 4250 - protein, 226 aa, Glycine max
VTARQDLHHRNRPSDHYRLLKSNVDALNLIQVGLTLTDAAGNLPDLAGNRSIWEFNFRDFDVARDAYAPDSIDLLRRQGIDFARNTADGVDSTCFAELMMSSGLVCNDAVSWVTFHSAYDFGYLVKILTRRNLPTRLEEFLKTVKVFFGDNVYDVKHMMRFCDTLYGGLDRVARTLNVDRAVGKCHQAGSDSLLTWHAFQKIVDIYFVKEEHRKHAGVLFGLEVFC

SEQ ID NO: 4251 - protein, 134 aa, Brassica napus
  misc_feature (122)..(122): Xaa can be any naturally occurring amino acid
  misc_feature (130)..(130): Xaa can be any naturally occurring amino acid
MVLSHAASDSDVSVHSTFASRYVRTSLPRFKMPENSIPKEAAYQIINDELMLDGNPRLNLASFVTTWMEPECDKLIMSSINKNYVDMDEYPVTTELQNRCVNMIAHLFNAPLGETETAVGVXGTVGSSEXIMLA

SEQ ID NO: 4252 - protein, 357 aa, Helicobacter hepaticus ATCC 51449
MQEHKELLERREFLKTSAKFGAAVSLASLSGFALSACDSKEDLKTDSTQNLQSTEKAGKSQIQNHLQGDTMEFITLNNGVKMPILGYGVYQIDPKETQRCVEDAISVGYRSIDTAQAYFNEAEVGAAIKTALQGGLKREELFITTKLWIDNYPEEKALKACEESLRKLGLEYVDLMLLHQPYNDTYGAWRALSRFYKEGRFKAIGVSNFYPDRIMDFYLNNEIKPMINQIELHPFYQKQAEQKVNTELDIVTQSWASFAEGKNGLFTNEILRNIGEKYNKSAAQVVLRWLIQRQIVVIPKTTRKERMIENFNVFDFSLSGEDMQKIATIDTGKTLFLDHHDPQSAKFLFDYTKIHKA

SEQ ID NO: 4253 - protein, 165 aa, Actinobacillus pleuropneumoniae serovar 1 str. 4074
MKVTSSAIKNGAFEDKYGKRGSQFSPNGMPSYSIPFEISEVPEGTKSFAVVLEDKDAITASGFVWIHWLIADLERTKIAENESLTATDFVQGANSWASKLGNFSIEEASNYGGMAPPNCKHRYELIVYALDTKLNLISGFRFNDLHFAMQDHILATATVMGTYDV

SEQ ID NO: 4254 - protein, 388 aa, Streptomyces avermitilis MA-4680
MPINRAASTSVDVPRGLAGVVVTDTSLGDVRGLEGFYHYRQYSAVELAQTRGFEDVWHLMVHGELPDAEQRAVFTARTAALRWLPDGVRATLPAVAAAAGRSGPLAGLRTALSLLGAAKGFRPVYDIDREQRRADTVMASAAVPTLLTALYRLGQGLDPVEPREDLSYAANYLYMLTGSEPDAARTRAIEQYLISTIDHGFNASTFTARVITSTGADVAAALVGAVGALSGPLHGGAPSRALDTLDAIGTPERIDSWIRERVLAGDRIMGFGHPVYRTEDPRSRMLRGVAEQFGGPLVDFAVEVERHVEAILAELKPGRELHTNVEFYAGVVMELCGLPREMFTPTFAAARVVGWSANILEQAEDPKIIRPAARYVGPVPPVAVPLMV

SEQ ID NO: 4255 - protein, 144 aa, Zea mays
  misc_feature (49)..(49): Xaa can be any naturally occurring amino acid
MQWACACSQPNGPATPVDMVVDYYKFDYEFAEPPRVTSLQNTVPLATFXDFGDDVYFVADQRGYEAVVYYLAGQYLKTDDRSGKIVDPRLQLNKVVREIKYSPGGVTVKTEDNSVYSADYVMVSASLGVLQSDLIQFKPKLPVS

SEQ ID NO: 4256 - protein, 418 aa, Streptomyces avermitilis MA-4680
MTDHEAAPTHPDRRLSTKEAAELLGVKPETVYAYVSRGQLSSRREPGGRGSTFDAKEVAALARRNRREPSGSSAIGGELSVRTRITLIDKDRYFFRGVDATELAARHSYEEIAEWLWTGRLRPGVTFAAPDASVAVARRAVDALPEHSGPTDRLRVATIAAATADPLRFDLSEDAVLGTARTLIPTLVAALPPLRRDHRDEGPLARHLWGRLTGRAPDAASVRVLDTALGLLIDHDLAASTLAVRVAASARAHPYAAVSAGLGVLEGPLHGAASGLAHRLLLDVLDQGSAAPVVADELRAGRRIPGLGHRLYPGEDPRARALFALLEEVPDAAPALAAAHDVVATTARHAPLHANVDLALAVLTVSSGMPASAGETVFAVARTAGWIAHALEEYEERPLRMRPSGRYVGARPPQPLPR

SEQ ID NO: 4257 - protein, 190 aa, Arabidopsis thaliana
MGDSDRDSGGGQNGNNQNGQSSLSPREQDRFLPIANVSRIMKKALPANAKISKDAKETMQECVSEFISFVTGEASDKCQKEKRKTINGDDLLWAMTTLGFEDYVEPLKVYLQRFREIEGERTGLGRPQTGGEVGEHQRDAVGDGGGFYGGGGGMQYHQHHQFLHQQNHMYGATGGGSDSGGGAASGRTRT

SEQ ID NO: 4258 - protein, 472 aa, Blumeria graminis f. sp. hordei
MPTFGFLKKRKKVSLGHRDLDSPASTLSQPASPITPSTSRGLGEPIDTTSSKITSPGQKLGSNITKDHRGTRTTVEDLPSMTDVSHLQQAYRNLSQGSTASKSNLLTIHNLINPPQHDGAGQSKVMPEKHMNNKTERPVQGKAAVAQVRQTKGKYSLSDFEILRTLGTGSFGRVHLVQSKHNQRFYAVKVLKKQQVVKMKQVEHTNDERSMLQEVKHPFLITLWGTFQDSKNLYMVMDFVEGGELFSLLRKSQRFPNPVAKFYAAEVTLALEYLHKKDIIYRDLKPENLLLDRHGHLKITDFGFAKKVTDITWTLCGTPDYLAPEVVSSKGYNKSVDWRWSLGILIFEMLCGYTPFWDNGSPMKIYENILKGRVKYPPYIHPDAQDLIQRLITADLTKRLGNLHGGAEGIKSHQWFAEVTWERLAKKDIDAPYVPPVKAGSGDASQFDKYPEETERYGQTGPDEHGSLFENF

SEQ ID NO: 4259 - protein, 205 aa, Arabidopsis thaliana
MAEGSMRPPEFNQPNKTSNGGEEECTVREQDRFMPIANVIRIMRRILPAHAKISDDSKETIQECVSEYISFITGEANERCQREQRKTITAEDVLWAMSKLGFDDYIEPLTLYLHRYRELEGERGVSCSAGSVSMTNGLVVKRPNGTMTEYGAYGPVPGIHMAQYHYRHQNGFVFSGNEPNSKMSGSSSGASGARVEVFPTQQHKY

SEQ ID NO: 4260 - protein, 355 aa, Secale cereale
MPSSQAQADLWRHTLYYLTSMGLRCAVKLGIPTAIHNLGGVSSLPDLAAALSIPASKQPFLGRLMRALVTSGVFANGKERLLGGLFRLNPLSRILVEGVVAEEHHSQTSFVLAGTSRHYMEAALGMADWFKKDATGPVPTVFEDVHSASLFDESTAALDPELDALVTEGLAAHDNLGIGTIIREFHDLFKGLVSLTDFCCGDGTTSRAITKAHPHVKFTVLDLPKVIDKTPSDGIVNYFAGDLFHTVPKAQAVMLKLVLHHLSYEDCFKILTQCKDAIPSREEGGKVIVIDIVVAPSLGQVMFKEQTLMDILMLVFTRGRQRSENNWHELFTKAGFSDYKIVKKLGARGVIEVYK

SEQ ID NO: 4261 - protein, 321 aa, Mycobacterium smegmatis
MNDRAGAGHGLRPLMALLSNRVVADALARTFAATVNPAPKPGVRFSDITCRTSDAAIPTRHGTVFARIYHPPAAGATSAVYVNVHGGGFVVGHPEQDDPWCRYLATHAEVVVVNPDYVLAPRHRFPAAPQQIYDVVCWAAAPDRDWDGSRICVGGQSAGGNLSAAAARLALRHGTPRISLQVLHYAPLDLVTPTRDKPSTIGRRAVMKPWMGEVFDTAYIPDPAQRRDPLASPAWDQATDDLSGIAPAVVVTAEFDRLRNEARTYAERLRSFGALREYIEVPDVDHGYNIMTNATDVTRGVYDRVAHHVRRATDDGGQGRS

SEQ ID NO: 4262 - protein, 174 aa, Hordeum vulgare subsp. vulgare
MAPTVMASSATSVAPFQGLKSTAGLPVSRRSNASSASVSNGGRIRCMQVWPIEGIKKFETLSYLPPLSTEALLKQVDYLIRSKWVPCLEFSKVGFIFREHNASPGYYDGRYWTMWKLPMFGCTDATQVLNEVEEVKKEYPDAYVRIIGFDNMRQVQCVSFIAFKPPGCQESGKA

SEQ ID NO: 4263 - protein, 400 aa, Ralstonia eutropha JMP134
MDNWKTGTDAMFILLGAIMVLAMHAGFAFLELGTVRKKNQVNALVKILVDFAVSTIAYFFIGYTVAYGVQFMSGADTLAQKSGYELVKFFFLATFAAAIPAIISGGIAERSRFNPQLCATFVLVGFVYPFFEGIAWNQRFGIQDWITHLTGAPFHDFAGSVVVHAVGGWIALPAVLLLGARRGRYQKDGRISAHPPSNIPFLALGAWVLAVGWFGFNVMSAQTVDKISGLVAINSLMAMAGGTLAAWWAGRNDPGFAYNGPLAGLVAVCAGSDLMHPVGALVTGAVAGVLFVHLFTLAQNKWHIDDVLGVWPLHGLCGAWGGIAAGIFGSHALGGIGGVSLGAQLIGTLLGIVIAVAGGTIVYGTLKKLVGIRLDAEAEFNGADLTLHRISATPERETNW

SEQ ID NO: 4264 - protein, 1164 aa, Streptococcus agalactiae
MFKSNYERKMRYSIRKFSVGVASVAVASLFMGSVAHASELVKDDSVKTTEVAAKPYPSMAQTDQGNNSSSSELETTKMEIPTTDIKKAVEPVEKTAGETSATDTGKREKQLQQWKNNLKNDVDNTILSHEQKNEFKTKIDETNDSDALLELENQFNETNRLLHIKQHEEVEKDKKAKQQKTLKQSDTKVDLSNIDKELNHQKSQVEKMAEQKGITNEDKDSMLKKIEDIRKQAQQADKKEDAEVKVREELGKLFSSTKAGLDQEIQEHVKKETSSEENTQKVDEHYANSLQNLAQKSLEELDKATTNEQATQVKNQFLENAQKLKEIQPLIKETNVKLYKAMSESLEQVEKELKHNSEANLEDLVAKSKEIVREYEGKLNQSKNLPELKQLEEEAHSKLKQVVEDFRKKFKTSEQVTPKKRVKRDLAANENNQQKIELTVSPENITVYEGEDVKFTVTAKSDSKTTLDFSDLLTKYNPSVSDRISTNYKTNTDNHKIAEITIKNLKLNESQTVTLKAKDDSGNVVEKTFTITVQKKEEKQVPKTPEQKDSKTEEKVPQEPKSNDKNQLQELIKSAQQELEKLEKAIKELMEQPEIPSNPEYGIQKSIWESQKEPIQEAITSFKKIIGDSSSKYYTEHYFNKYKSDFMNYQLHAQMEMLTRKVVQYMNKYPDNAEIKKIFESDMKRTKEDNYGSLENDALKGYFEKYFLTPFNKIKQIVDDLDKKVEQDQPAPIPENSEMDQAKEKAKIAVSKYMSKVLDGVHQHLQKKNNSKIVDLFKELEAIKQQTIFDIDNAKTEVEIDNLVHDAFSKMNATVAKFQKGLETNTPETPDTPKIPELPQAPDTPQAPDTPHVPESPKAPEAPRVPESPKTPEAPHVPESPKAPEAPRVPESPKTPEAPHVPESPKTPEAPKIPEPPKTPDVPKLPDVPKLPDVPKLPDAPKLPDGLNKVGQAVFTSTDGNTKVTVVFDKPTDADKLHLKEVTTKELADKIAHKTGGGTVRVFDLSLSKGGKETHVNGERTVRLALGQTGSDVHVYHVKENGDLERIPSKVENGQVVFKTNHFSLFAIKTLSKDQNVTPPKQTKPSTQGSQVEIAESQTGKFQSKAANHKALATGNETVAKGNPTSTTEKKLPYTGVASNLVLEIMGLLGLIGTSFIAMKRRKS

SEQ ID NO: 4265 - protein, 95 aa, Triticum aestivum
MAALLRSRCSSVGRAMMGSLGNNLYGGATSSIETVARPSRSDAVRQQIRTFIQMRTNLKVVDNSGAKRVMCIQSLRGKKGARLGDMIIGSVKEAQ

SEQ ID NO: 4266 - protein, 81 aa, Triticum aestivum
FSTTLELLKDVKHSGAKVTIETCPHYLAFSAEEVPDGDTRFKCSPPIRDAANKDNLWEALLDGHIDMLSSDHSPSTPDLKL

SEQ ID NO: 4267 - protein, 64 aa, Glycine max
  misc_feature (31)..(31): Xaa can be any naturally occurring amino acid
MVLDETIICDDKSEWIRNGDYSPSRFQTQAXAVNLNCGAKTQSNPEDTVRVLTKAENGVRVMVI

SEQ ID NO: 4268 - protein, 251 aa, Zea mays
  misc_feature (128)..(128): Xaa can be any naturally occurring amino acid
  misc_feature (137)..(137): Xaa can be any naturally occurring amino acid
  misc_feature (224)..(224): Xaa can be any naturally occurring amino acid
MAKNYPTVSAEYSEAVEKARRKLRALIAEKSCAPLMLRLAWHSAGTFDVSSRTGGPFGTMKCPAELAHGANAGLDIAVRLLEPIKEEFPTLSYADFYQLAGVVAVEVTGGPEIPFHPGREDKPQPPPXEGRLPDATXGSDHLRQVFGKQMGLSDQDIVALSGGHTLGRCHKSGLGFEGAWTTNPLVFDNSYFKELLSGDKEGLLQLPSDKALLSDPVFRLFVEXYAADEKAFFDDYKEAQPQLSELGYADA

SEQ ID NO: 4269 - protein, 504 aa, Vibrio cholerae O1 biovar eltor str. N16961
MEKINLVWLKRDLRLTDHAPLQAALTSGRPTLLLYLFEPMLLGDAHYSERHWRFVWQSLQAINRDLAQSKGEVLIVTSDWQTCFARIAERYAIEAIYSHQEVGLACTFQRDLALAQWCQQHDIVWHEFPYAAVIRGAQTRKNWDEHWQQVMRSPCCDPDLTRANWLKLDAATLGLRSDIPATWQSKQAGMQTGGSDMAWATLEDFFARRGREYYRSISSPSLARHACSRMSPYLAWGNISLREMYQTLLKHWSVAGFRRSLIALSSRLHWHCHFIQKFESECEMEFRCVNRAYDSLLQQSSDAPAAQLAAWQTGHTGIPLVDACMRCLIQTGYLNFRMRAMLVSVLTHHMNVDWRAGVTYLAQLFLDFEPGIHYPQFQMQAGVTGTNTIRIYNPTKQAQEHDSEGQFIHKWVPELAQVPVPLLFEPWLMTPLEAQMYQVPLESPYLKPVMDLEASAKQARDRLWQWQKLPAVQAEAMRILARHVRQAKPRTSPRQPNKRQPEMD

SEQ ID NO: 4270 - protein, 316 aa, Zea mays
MIGLSRLGRCSSLELISSSEAGSSKQIPLLLSIVVVGVAGQFAWRRGGNIWCAFANRGAAGGWRRPGEDCSAAAKGFKMLACIACSAKDGGDQDGSRAATPHGRDAGKSLTSQLKDMVLKFSGSGRQYKAAAASPSFRGNRFPGFTSDGATEGYGYMRTTTHATGATAGTKVGRGFPQHVRSPSASWIPSIGEEDDEEDEEVVVVEEDRVPREWTAQVEPGVQITFVSLPGGAGNDLKRIRFSREMYDKWQAQKWWGDNNERIMELYNVRRFSRQVLPTPPRSDDAEVSRCLYPCLPSAFCVHVWESFIHSVGSPG

SEQ ID NO: 4271 - protein, 207 aa, Hypocrea jecorina
MPLCGGSKTVQRKLVLLGDGASGKTSLLNVFTRGYFPTVYEPTVFENYVHDIFVDNVHIELSLWDTAGQEEFDRLRSLSYDDTDLIVLCYSVDSKDSLENVESKWVGEIADNCPGVKLVLVALKCDLRQQEDDEPEDQAAADGNAQREKPPTISYDEGLEVAKRIGASRYLECSAMKNRGVNEAFTEAARVALSVKKEREDNKCTIM

SEQ ID NO: 4272 - protein, 264 aa, Hypocrea jecorina
MGHEDAVYLAKLAEQAERYEEMVENMKIVASEDRDLTVEERNLLSVAYKNVIGARRASWRIVTSIEQKEESKGNSSQVALIKEYRQKIEAELAKICDDILEVLDQHLIPSAKSGESKVFYHKMKGDYHRYLAEFAIGDRRKDSADKSLEAYKAATEVAQTELPPTHPIRLGLALNFSVFYYEILNAPDQACHLAKQAFDDAIAELDTLSEESYKDSTLIMQLLRDNLTLWTSSEAETSAGQVEAPPKEDTPAEAAAPAEEPKAE

SEQ ID NO: 4273 - protein, 500 aa, Panax ginseng
MFPLAYPLLFVLLGALSWWILPIISPLKRHHKLPPGPRGLPIIGSLHTLGALPHRTLQTLAKKYGPIMSMRLGSVPTIVVSSPQAAELFLKTHDNIFASRPKLQAAEYMSYGTKGMSFTAYGPHWRNIRKFVVLELLTPAKINSFVGMRREELGMVVKSIKEASAANEVVDLSAKVANIIENMTYRLLLGRTKDDRYDLKGIMNEALTLAGRFNIADFVPFLGPLDIQGLTRQFKDTGKRLDKILEFIIDEHEQNSSNGNASGDFIDDMLSLKNKPSNTHDELSKVIDRSVIKAIMIDIISAAIDTSDTSIEWILTELIKHPRAMKKCQEEIDAVVGVDRMVEETDLPNLEYVYMVVKEGLRLHPVAPLLGPHESMEDITINGYFIPKQSRVIVNSWALGRDPNVWSEDADEFLPERFEGSNIDVRGRDFQLLPFGSGRRGCPGMQLGLITVQLVVARLVHCFDWNLPNGITPDNLDMTEKFGLTTPRVKHLLAVPKYRL

SEQ ID NO: 4274 - protein, 156 aa, Ananas comosus
MSLVRRSNIFDPFSLDLWEPFEGFPFGGALSFPRPSASFPAETASFAGARIDWKETPEAHVFKADLPGVKKEEVKVEVEEGNVLQISGERTREKEEKNDTWHRVERSSGKFLRRFRLPDNAKVDQVKAAMENGVLTVTVPKEDVKKPQVKSVQISG

SEQ ID NO: 4275 - protein, 98 aa, Glycine max
MSTTESQRYKGTVKWFNEEKGFGFITPEDGGSDLFVHYSAIQTDGGFRTLSEGQSVEFLVTQDDSGRAAAVNVTTTTVKSSDSGNGENSGGDAANVEK

SEQ ID NO: 4276 - protein, 450 aa, Zea mays
MRGSMSNYYDDYDDIDEIEDDYDMDDPADDMVDEQRGVRDSDAEDNDYGQPNDKIPDTSSADARNGRDIQGIPWEQLNITRKKYRQSRLEQYKNYENVPNSGEEAMKDCKPTEKGGMYYEFRRNTRSIKSTILHFQLRNLVWATSKHDIYLVSHYSIRHWSALSGVDTELINVQGHVAPREKHAGSLSEGFYQTQVSTLAVKDNLLVAGGFQGELICKHLDREGISFCCRTTYDDNAITNAVEIFNTSSGAVHFIASNNDSGVRYYDMERFQLFKHLQFEWPVNHASLSPDRKTVVIVGDDPDGLLIDANSGKTLHSIKGHRDYSFASAWSPDGRTFATGNQDKTCRIWDARNLSKSVHVLRGNLGAIRSIRFTSDGQFMSMAEPADFVHVYDVKSDYNKRQELDFFGEISGTSFSPDTDALFVGVWDRMYGSLLQFGRLYNYSYLDSVF

SEQ ID NO: 4277 - protein, 503 aa, Triticum aestivum
MVATAKIPQRQLFIDGDWRAPALGRRLPVINPTTEASIGEIPAGTSEDVDAAVAAARAALKRNRGRDWSRAPGAVRAKYLRAIAAKMVERKSDLARLEALDCGKPLDEAAWDMDDVAGCFEFFAGHAEALDKRQNAAVALPENFKCHLKKEPIGVVALITPWNYPLLMAVWKVAPALAAGCTAVLKPSELASLTCLELGDVCKEIGLPSGVLNIVTGLGHEAGAPLSSHPDVDKVAFTGSYATGQKIMVAAAPTVKPVTLELGGKSPIVVFDDVDIDKAVEWTLFGCFWTNGQICSATSRLLIHKNIAKEFVDRMVAWSKNIKVSDPLEEGCRLGPVVSEGQYEKIKKFVANAKSEGATILTGGVRPKHLEKGFFIEPTIITDINTSMEIWREEVFGPVLCVKEFSTEEEAIELANDTHYGLAGAVISGDRERCQRLAEEIDAGCIWVNCSQPCFCQAPWGGNKRSGFGRELGKGGIDNYLSIKQVTEYTSDAPWGWYKAPAN

SEQ ID NO: 4278 - protein, 246 aa, Oryza sativa (indica cultivar-group)
MGRGKVQLKRIENTINRQVTFSKRRSGLLKKANEISVLCDAEVALIIFSTKGKLYKYATDSCMDKILERYERYSYAEKVLISAESDTQGNWCHEYRKLKAKVETIQKCQKHLMGEDLESLNLKELQQLEQQLENSLKHIRSRKSQLMLESINELQRKEKSLQEENKVLQKELVEKQKVQKQQVQWDQTQPQTSSSSSSFMMREALPTTNISNYPAAAGERIEDVAAGQPQHVRIGLPPWMLSHING

SEQ ID NO: 4279 - protein, 440 aa, Mycobacterium smegmatis
MDPVSQLEADARHLVRYSGRGGFTPTVIGSARGSLMFTEDGRELIDFTSGQMSAILGHSHPEIVATVQSQIAHLDHLYSGMLSRPVIELSRRLAETLPPTLDKVLLLSTGAESNEAAVRMAKLVTGKHEIVSFARSWHGMTQAAANATYSAGRRGYGPAAPGNFALPVPHRFRPDITDELGELDWRRQLDLGFDLIDAQSVGSLAACLIEPILSSGGIIELPPGYLAALAQKCREREMLLIVDEAQTGLCRTGDWYAFEHDGVVPDILTLSKTLGAGLPLAAVITSSEIEQRAQEREFLFFTTHVNDPLPAAVGLTVLDVLSRDRLDVRARELGQRLRAGLDELAGRHPIVADVRGRGLLLGMELSAEDTPGVSADQLGAVVTRRCFELGLHMNIVQLPGMGGTFRLAPPLTATDNEIDRALEIMDEALAYAREPAVHRS

SEQ ID NO: 4280 - protein, 203 aa, Ustilago maydis 521
MATNITFHPGHVSYDERAELLSQQGLTIWLTGLSASGKSTIATALEQHLLSLKKSAYRLDGDNIRFGLNKDLGFSPQDREENIRRISEVSLLFASSTTITITSFISPYKADREIARKLHEAHVPKLPFVEVFVDASIETCESRDPKGLYKKAKAGEIKEFTGISAPYEKPEQPEIHIDADKTSIEDAVRIITEYLINKGYLKL

SEQ ID NO: 4281 - protein, 175 aa, Zea mays
MTKAATLYGSKTQSDALRPGPLRPANIIRNKFPTYKNGSNGIVIKLADGPEMPPLKEIVAKETADLLDRRQRLSVRELAMKFEKGLNTATLLSNEVKWRQVALLERDILLKNLKCVLESLRGRVTGKTKDEIEESISMVEILAVQLSKREAELLQQKEEVTKLAKSLKQASEDAK

SEQ ID NO: 4282 - protein, 274 aa, Hordeum vulgare subsp. vulgare
SSEAAGPDGTLVRRYTTGPLCRWLTKDRGDGTLSPFAVFVVDPDHLFPWHHIAEAVTAGGPSAFERTQKWPYYEYMGKNQRLGTLFDNAMAQHSVILVTKMLERFKGFDGVQRLVDVGGGTGSTLGMITSKYKHMTGINYDLPHVIAQGLPLPGVEHVAGDMYESIPTGDAVLLQWITLMLNDDEFVKILSNCHNALPKDGKVIVVDGILPENPDSSLTARDAFTLDIIMFVLFKGAKQRTEKEFARLAKQAGFTGGIKKTYIFFNFYALEFTK

SEQ ID NO: 4283 - protein, 503 aa, Aspergillus nidulans FGSC A4
MGLELRSMVLVSLARIYQTGFKVRRPLLAVATTNFQNIINGEKTSTTERRHGINPATGEPNPDVPVAIKEDVDRAVVAAQEAFKTWIDVPFDERRKALLAYADAIEEYVADFAKLLVQEQGKPLQFAANEVAQSAQVIRSAADVAEGLTDEIIEDSAEKKIVVRHIPIGVGAGIIPWNFPHLLTVVKLAPALITGNVIIIKPSPFTPYCGLKLVELAQRFFPPGVVQALSGDDRLGPWLTAHPGIGKISFTGSSATGKKVMESASRTLKRVTLELGGKDAAIVCGDVDVQSVAPRVISKGFFNSGQICLAVKRIYVHESIYNEFRDAAVAYAKTIEVGPGTQEGVFMGPLQNSMQYEKVKGFFADLTKEQLSLTHPDGKAFDNKAGYFIKPTIIDRPAEDSHIATEEQFGPIMPLFSWSDESDVIARANNTQMGLGASVWSRDLEQAARIAAKLQAGSVWVNTHFEADLRAPFGGHKESGIGTENGLQGLRQWCNLQTLYLKN

SEQ ID NO: 4284 - protein, 429 aa, Mesorhizobium sp. BNC1
MANSTVTLELGGNSSEYPVRQASIGPGVFDISSLYKQTGMFTYDPGFTSTASCESKITYIDGDEGLLLHRGYPIDQLAEQGDFLEVCYLLLYGELPTKAQKEDFDLRVTRHTMIHEQMSRFFTGFRRDAHPMAVMCGVVGALSAFYHDSTDISDPHQRMVASIRMIAKMPTIAAMAYKYHIGQPFMYPRNELSYAANFLHMCFAVPCEEYKVNPVLARAMDRIFILHADHEQNASTSTVRLAGSSGANPFACIAAGIACLWGPAHGGANEAALNMLAEIGSVDRIPEYIARAKDKNDPFRLMGFGHRVYKNYDPRAKIMQKTCHEVLSELGIKDDPQLDIAMELERIALTDEYFIEKKLYPNIDFYSGITLKALGFPTTMFTVLFAVARTVGWIAQWKEMIEDPQQKIGRPRQLYTGAPQRDYVPIAKR

SEQ ID NO: 4285 - protein, 355 aa, Methanosarcina mazei Go1
MNKNICFIDGLEGILKYRDVDINELIDLPYDAVSYLLIKGELSEEKELAEYSARLHAERGINREVMDVIRMCNLNIDSMEALLTVVSFISQFDPDLYDNSLEGNMRKAIRLIAVVPTIVAAYYRTANGKEPVPPDPSLAHGANFLYMIKGSKPDPLEAEVMEKDFILSAEHELNASTFSSRVTASTMSDLYSAVVSGLCTLKGPLHGGARSEVMTMIETIGSPENAEKFVLEKIEKREKIMGFGHRVYKTYDPRGTIFKQLSRRLAEAKGDMHWYETAEAIENAVIRELVEKRGKPIYPNIDFYSGVIYKYMEIPPQLATSIFAIGRISGWIAHCFDQYEKKKIIRPRIFMLDEC

SEQ ID NO: 4286 - protein, 462 aa, Oceanobacillus iheyensis HTE831
MVKMQEWIEVTNPATGEVIDRVERGGKVEAREAVDKASEAFNDWSKRTAYERSELLMNWNALITKHQDELAEIMTMEQGKPIKEALGEVQYANNFVSWYAEEGKRLYGETIPASKADKRILVQRQPVGVIAAITPWNFPAAMITRKVAPALAVGCTAVVKPASATPRTAIRLAELAEEAGIPKGVLQVVTGSSGDISDAWMQDSRVRKISFTGSTEVGKILMKKSAETVKKVSLELGGHAPLIVMKDADIEKAAEGATASKFRNAGQTCVCTNRIYVHESIKDEFIKAFERKVRELRVGNGLEEGIDIGPLIDHDALEKVETHIRDAAHKGASIVYGGDKVGDDSLFYKPTILSNVTDNMLCMTEETFGPVAPVTTFSTEEEAVKRANHSPYGLAAYLFTENLATAIRISEQLEYGIVGINDGVPSTAQAPFGGFKESGIGREGGHHGMEEYVEVKYISIQL

SEQ ID NO: 4287 - protein, 294 aa, Glycine max
MLVLFLFLIFLQEHVLTGGHGLMVKGYDPVVKALANDLDIRLNHRVTKISNGYNMVMVTVEDGRNFVADAVIVTVPIGILKANLIEFTPKLPDWKASAINDIGMGNENKIALRFDRVFWPNVEVLGIVAPTSYACGYFLNLHKATGHPILVYMAAGRFAYDLEKLSDESAANFVMQQLKKMFPDASKPVQYLVSRWGTDPNSLGCYACDLVGMPDDVYERLRAPLGNLFFGGEAVSMDDHQGYVHGAYSSGLMAAENCQRHLLQKQGHMENLPLVPSVRHEMFETTIPLQISRI

SEQ ID NO: 4288 - protein, 444 aa, Desulfovibrio vulgaris subsp. vulgaris str. Hildenborough
MPGTRFEKDGLVIDTTIPHLGPAKIPSPLVYCHHTNDTGVPLYLDSEFIEELAGESTALNFEAAGPRRNLYFDPSKAKCAIVTCGGLCPGINDVIRAIVMEARHAYDVPAVLGIRYGLEGFIPKYRHDVVELTPDVVSDIHQFGGTILGSSRGPQSPEEIVDALERMNISALFMIGGDGTLKAASNIVQEVMRRNLKISVIGVPKTIDNDINFISQSFGFETAVYKATEAIQCAHTEAIGAMNGIGLVKLMGRESGFIAAHATLSLKEVNFVLIPEAPFTLHGEGGLLPTLERRLRARAHAVIVVAEGAGQNLLADTGKKDASGNPILGDIAQLLRAEIKAYCDERGLPHTLKYIDPSYIIRSVPANANDRVYCGFLGQHAVHAAMAGRTGMVVAKLMDRYVHLPLELVTLRRRKLNIRSDYWRAVLESTGQAELAGMVPGLDE

SEQ ID NO: 4289 - protein, 280 aa, Streptococcus agalactiae
MTDTMILNDNHKIPTLGLGTWMIDNDRVAQVVKDAIELGYRHINTAQAYNNEKGVGVGIKESGITRESLFVTTKIAAEHKDYESATKSIDQSLEALGLDCIDLMIIHSPQPWKEWRETDKHFDQGNLEAWRALEDAQKSGKVKSIGVSNFLEKDLKNGHVKPAVNQILAHIGNTPFDLIDYCQSKGIQVEAYSPIAHGQALKSDGIQKMAEKYGVSVAQLCIQYLLQLNLIVLPKASSKEHLQSNLDFDFVISDEDMSILKSLMFDDYGEFSNFPVFSEK

SEQ ID NO: 4290 - protein, 517 aa, Triticum aestivum
  misc_feature (447)..(447): Xaa can be any naturally occurring amino acid
  misc_feature (455)..(455): Xaa can be any naturally occurring amino acid
  misc_feature (465)..(465): Xaa can be any naturally occurring amino acid
  misc_feature (479)..(479): Xaa can be any naturally occurring amino acid
MAAANGAKGFEVPELDIKFTKLFINGQFVDAASGKTFETRDPRTGEVIARIAEGDKADIDLAVKAAREAFDNGPWPRMPGCARARIMHKFADLVDQHVEELAALDTVDAGKLFMMGKMMDIPGGANLLRYYAGAADKIHGETLKMARPLHGYTLKEPVGVVGHIVPWNYPTTMFFFKVSPALAAGCTMVVKPAEQTPLSALFYAHLAKEAGIPDGVLNVVPGFGPTAGAAIASHMDVDKISFTGSTEVGRLVMQAAATSNLKPVSLELGGKSPVIVFDDADVDMAVNLVNMATYMNKGEICVAGTRIYVQEGIYDAFVKKSVELAKKSVVGDPFNPNVHQGPQVDKDQYEKVLKYIDVGKSEGATLLTGGKPCSDKGYYIEPTIFTDVTDDMSIAQEEIFGPVMALMKFKTVDEVIQKANSTRYGLAAGVVTKNIDTMNTVSRSVSXGLWVNCYXAFDPTPFGGXKMTVGKDMGRCLEXYCTQDVVTPLYTHLAVIGRHRTTHSKQKWKDALHFTNA

SEQ ID NO: 4291 - protein, 195 aa, Glycine max
MGSHNALAATFGILGNIISVMVYLAPVPTFYRIYKKKCTDGFHSLPYLLSLMSSMLWLYYAFLKIHDGVVPLITINSIGCVIELIYILTYIKYAHKDARNLTYTLFAAMNIGFLALVLSSRFALNGSHRVKVIGWICDAVSLSVFASPLSIMAKVIRTKSVQFMPFYLSFFLTLNAITWFVYGLSMQDKCIYEGQ

SEQ ID NO: 4292 - protein, 256 aa, Zea mays
MRSLVLIMGLLLLSCSGMSSAARLLEEMAPKEEYPHPEVPELPKPELPPHPTVPELPKPDELPPHPVVPELPKPEVPVHPAVPELPKPEIPPHSTVPELPKPEMPELPKPEVPEHPAVPELPKPELPPHPTVPELPKPEVPELPKPEVPEHPAVPELPKHELPPHPTVPELPKPEVPELPKPEVPEHPAVPELPKPEFPPHPTVHELPKPEVPAHTAVPEPEPELPKHELPPLPEPELPLPPKAESHYPVPGMAKP

SEQ ID NO: 4293 - protein, 167 aa, Burkholderia fungorum LB400
MAEFRLWSDEFPTNGFMPKAHEYHDKAFGVDGENISPALKWEAPPPDTQSFALTVHDPDAPTGSGFWHWVVVNIPADIRSLPRNAGKPDGSLLPHGALQLRNDYGTVGFGGAAPPRGDKAHRYIFRLHALRVPHLPINADTTNAVARFMTHLNELDSTTHTGLYELK

SEQ ID NO: 4294 - protein, 505 aa, Hordeum brevisubulatum
MAAPPAIPRRGLFIGGGWREPTLGRHIPVINPATEATIGDIPAATAEDVELAVAAGGPVLARRREHWARASGAVRAKYLNAIAAKIKEKISYLALLETVDSGKPKDEAVADMDDVAACFEYYAGLAEALDGKQHAPISLPMEEFKTYVLKEPIGVVGLITPWNYPLLMATWKVAPALAAGCTAVLKPSELASLTCLELGAICEEIGLPSGVLNIITGLGPDAGAPIASHPHVDKIAFTGSTATGKMIMTAAAQMVKPVSLELGGKSPLVIFDDVADIDKAVEWAMFGCFFNGGRVCSATSRLLLHEKIAARFLDRLVEWVKNIKISDPLEEGCRLGSVISKGQYEKIKKFISTARSEGATILHGGDRPKHLGKGFFIEPTIITDVSTSMQIWREEVFGPVICVKVFKTESEAVELANDTHYGLAGGVISDNLERCERIAKVIHSGIVWINCSQPTLVQAPWGGNKRSGFGRELGEWGLENYLSVKQVTRYCKDELYGWYQRPSKL

SEQ ID NO: 4295 - protein, 237 aa, Lactobacillus johnsonii NCC 533
MNNFSQEPERRTIVDVTGLNRFLSRMYGMMTIAVLVSALSAYLTMTVFRTQVMTLFASNPAMTWILLLVPLALTFGISFRATRNPVASFVMLMIMAIVYGVEFSLIAGAYTGHSIASAFVASSTVFITMAVIGTTTKKNLNNLGSYASAALIGLIVAMLINMFLRNPMVSYIFSFIAVIIFTILTAWDAQRMKQIYENYSGQVSVDGLAVAGALALYLDFVNLFLQFLQIFGFSDRN

SEQ ID NO: 4296 - protein, 413 aa, Oryza sativa (japonica cultivar-group)
MEEQQQVEVEVEVPSYFVCPISLQIMRDPVTLPTGITYDRDGIERWLLTAGTCPLTKQPVPPDCDPTPNHTLRRLIQSWCALHADHGVDLVPTPKPPADRARVADLVSRLRAATSSAALLDALRELRDVAAESERNRKLLAAVPGAVDVLAAVVVASCRDAKAACDEALEIVCSLELSERCLARLVERNEELVDALVATLQRTNTTSRAHAALLLEAVTAVMPSNRLVSLPEEVFGEAVQLLRDRVSSPATRAALHVLVGTTSWGRNRVKAVDAGAVAVLVDMLLDGPVERRGCELALAALDRMCGCAEGRAALVSHGAGVAVVGRKVLRVSEVASEKAVRVLRSVARHAATAAVVQEMGQTGAVEKLCVVAQSEQCGERTRERARETLRLHARAWRNSPCLQPHLQALYPSC

SEQ ID NO: 4297 - protein, 126 aa, Glycine max
YPPPPAFRLQTEDLRYHHQLFRHIAQLGRIEAMASRLLAAASSSSASSSPLARLISSRRMAGAADHHGSTKVNMWQEPLNPGNWKEEHFVLASLAMWGAIIYGGLKAFGGKKEVKTEAGPAAAPAH

SEQ ID NO: 4298 - protein, 378 aa, Triticum aestivum
  misc_feature (316)..(316): Xaa can be any naturally occurring amino acid
  misc_feature (336)..(336): Xaa can be any naturally occurring amino acid
  misc_feature (345)..(345): Xaa can be any naturally occurring amino acid
  misc_feature (353)..(353): Xaa can be any naturally occurring amino acid
RSDTCELVARFCYGLTIELSPANIVHLRCAAEYLEMTEETAQDNLIHQAEMFFNQVVLRSWKDSLEALKTCDVLPHAEDLHIAKRCVESLAAKASIDPDLFGWPVSEHGAMHSPGGSVLWNGISTGAKLGNFSSDWWYDDASSLSFPTYKRLISTMESRGAKEEIVAGSLTYYAKKCLPGLNRRQSMGPVPLTSAAATLSEEEQRHLLEDIDRMLPLQRGLISTNVLLWLLRTAMILKVNRACISNLEKRVGMQLDEATLEDLLLPNFSYTMDTLYNVECVRRILDHFLAMGQTMGGGSPCLNDVMGSPSLARITXVAKLIDGYLAEIGPNITLSXPKFESLACXLAEIARPXNYGLYRAISFLGRAIWLRESRGGFW

SEQ ID NO: 4299 - protein, 281 aa, Triticum aestivum
GGASSSATAPAGGPITRRRKLAESEPPAQDTISNLPDAVLGEIISLLPTKDGARTQILASRWRHLWRSAPLNLDCRGLNHGDELVGALSRIISSHQGPCRRLCIHADLLDAPSTTVDSLLRSDALGNLQELEFSCFERPPPASIFRFSPTLRVVTIECSNLPDSTVQGIHFPLLQQLGLEFVCISECSLHSLIASCPVLESLLIHRSFGFACIQINSLSLKSVGLDSYAVWENNKVALQLQELIINNAPCLERLLLLHQETGLHISVIAAPKLETIGFLSD

SEQ ID NO: 4300 - protein, 122 aa, Mycoplasma penetrans HF-2
MIQFMTKLNVADNTGAKQVGVIKVLGGTKRRYASVGDIVVVSVKKAQPDGIVRKGQVCKAVIVRVKKNITRSSGNSLSFDDNACVIIKEDKTPRGSRIFGPVARELRDKGFSKIVSLAPEVL

SEQ ID NO: 4301 - protein, 382 aa, Helicobacter hepaticus ATCC 51449
MGETIKNTKVGGLAGITAGQSAICTVGTGHGLNYRGYDIYDLARECEFEEVAYLLLKEKLPNANELAAFKKELIAARDLPKALKDTLKLLPKNAHPMDIMRTTCSMLGCLEPETYDIVKMSFPMQNQIAIRLLGIFPSALTFWHHYHHNGKEISTQSNQDSIAGHFLELLHQKPPKELWIKAMHASLILYAEHEFNASTFTARVITATMSDVYSGVTGAIGALRGPLHGGANEAAMELIAEYKTPQEAEKGILDKLARKDKIMGFGHRVYVKADPRNVVIKEWSKKLSEDVGDTKGLYPISEAIEKVMWEQKKLFPNLDFYSASAYHFMGIPTPYFTPIFIFSRTAGWLAHIFEQRANNKLIRPSSEYIGPDKKAFVPLHNR

SEQ ID NO: 4302 - protein, 417 aa, Pyrococcus horikoshii OT3
MTQVDLVVVGKFLFKEKIIDGSIGIEDDKIAKFSLRELKGDKKIKVEKGKIILPGLIDVHVHLRDFNESYKETIASGTKAAIHGGITTVFDMPNTKPPIMDEKTLKLRELIFKKKSYSDYALGFLIAGNEPAKADFYKIFMGASTGGIYSKNFEEDYKKAPDIVSVHAEEYELINRYPERPPIVEVVAIKKALQASKKMKKPLHICHVSTKDGLKEILKANIPWVSFEVTPHHLFLTRRDYERSKLLKVYPPLRDEEDRRYLWENLKSIPIIASDHAPHTLEDKEAGAAGLPGLETEVALLLDAVNKGMITIWDIVAKMSINPARIFKIKNKGWEEGKDADLIVVDMKKEWTIKAENFYTKANWTPYEGWKVKGKVIMTILRGEVVMEDDEIIGKPRGERIVKEGNAQGNLGSSQEH

SEQ ID NO: 4303 - protein, 493 aa, Bordetella pertussis Tohama I
MSLSVGNAALLPGRNLIGSEWREAALGARFAVADPATGKVIAHVPDSGARDAGAAVTAAHQAFADWRRTPAKVRAQIIKRWNALLHENAEDLARLISSEQGKPLAEARGEVSYAASYVEWFAEEATRADGDLIPSPAQGRRMFALREPVGVVAAITPWNFPAAMIARKIAPALAAGCTVVCKPAEDTPLTSLALTALAQQAGVPPGVLNIVTASRGRAAEVADAWLDDPRVRKITFTGSTPVGKHLARRSADTLKRVSLELGGNAPFIVFDDADLDAAVEGLMVSKFRNGGQTCVCPNRIFVQAGVHDAFVRKLAARVEGLVVGPASDPASQIGPMINARAVEKIEHHVADALERGARLAVGGKRIHSARCAGDHYYAPTVLTGVDETMACFREETFGPVAPITVFASEAEVVAAANATAFGLAAYFYSTDVRRIWRLADALETGIVGVNEGALAAEAAPFGGVKDSGYGREGSRHGLAEYMQIKYVCQGQLD

SEQ ID NO: 4304 - protein, 349 aa, Lycopersicon esculentum
MGSEALEFFSCANNNNNNNGFSYEPKKNIIMEETDNLSINIHDGSWFEEEIDVDLKWSFALNSVLHKGTSEYQDIALLDTKHFGKILVIDGKMQSAEVDEFIYHECLIHPALLCHPNPKNVFIMGGGEGSAAREALRHKSMEKVVMCDIDKEVVDFCKKHLTANHEAFLNKKLNLVINDAKAELEQRQEKFDIIVGDLADPVEGGPCYQLYTKSFYQNILKPKLNDTGIFVTQAGPAGVFTHKEVFSSIYNTTKQVFKYVLAYTAHVPSFADTWGWVMASDKPFCLDAGKLDKKIAERIEGELLYLNGASFFSSTILNKTVAKTLKNESHVYAEDDARFIHGHGLGFRN

SEQ ID NO: 4305 - protein, 459 aa, Wolbachia endosymbiont of Drosophila melanogaster
MCFIKKTLDLFYNRYSNIMTQTWDLLQTGQKEGYKIAYTNARIIDPETKLDIKGSLLTEGDKIVDFGESLFSTSGVDETIDCKGLVLMPGLIDIHVHFREPGQEHKETIYTGSKSAAAGGVTTVVCQPNTVPAIDSVILAKYLKYRALETSHVNVEFYAKITTSEEHLTEMALLKEAGAVGFTDDGMPVMNPMIMRQALLYSSMLNVPIAQHAEDLNLSAGGAINEGKISEELGVKGILSASESVMVNRDILLMKDMENVHYHILHVSSKDSLDAIKRAKDLGLNVTCEVTPHHFTLTEDIVKQHGAIAKMNPPLRTEEDRLAMVEGLKTGVIDCIATDHAPHDRSSKDLPLENAAFGIVGLETMLPLSLELYHSGQMGLLDVLAKLTYKPADIIHIPRGRIQKNLAADLILVDLNHEWEIKTDNFASKSKNSPFDGRKVKGHVVRTVVSGKTIYSQKS

SEQ ID NO: 4306 - protein, 160 aa, Caulobacter crescentus CB15
MAMSIYDYSAKTLDGQDVSLADYRGQVLLIVNTASKCGFTPQYEGLEALYKAHKDRGFTVLAFPCNQFGAQEPGNAEEIANFCSLTYDVSFPVMSKIDVNGADAHPLYKFLKKEQKGVLGTEAIKWNFTKFLIGKDGQVVDRFAPTVKPEDLKVAVEALL

SEQ ID NO: 4307 - protein, 208 aa, Gossypium hirsutum
MSSENGKRLLETDAGGLNFEATELTLGLPGEPRVTSDGGAKLGSKRGFSETVDLKLGDNNQEVKLGHSLQEAAKSPVSKTQVVGWPPVRGFAKRGKKSCKYVKVAVDGAPYLRKVDLEIYNSYQQLLTSLEDMFSCFTIRNYLNEKKIDQVNGIEYMPTYEDKDGDWMLVGDVPWQMFVESCKRLRLMKSSEAVGLGLKTAPKYSSTN

SEQ ID NO: 4308 - protein, 291 aa, Glycine max
GLSVLAKYRRPLLVHSEIQQHSKKHLELNDKGGPRAYLTYLHTRPPSWEEAAIKELVGVTKDTRKGGPLEGAHVHVVHLSDSSASLDLIKEAKRRGDSISVETCPHYLAFSSEEIPNGDTRFKCSPPIRDAYNREKLWEAVLEGHIDLLSSDHSPTVPQLKLLEEGDFLKAWGGVTSLQFDLPVTWSYGKKHGLTLEQLSLLWSKKPATFAGLESKGAIAVGNHADIVVWKPEVEFDLNEDYPVFLKHPSLSAYMGRRLSGKVLETFVRGNLVFKKGKHAPSACGVPILAK

SEQ ID NO: 4309 - protein, 320 aa, Enterobacter cloacae
MIKKIGVLTSGGDAPGMNAAIRGVVRAALTEGLEVFGVYDGYLGLYEDRMVQLDRYSVSDMINRGGTFLGSARFPEFRDEHVREVAIENMKKRGLDALVVIGGDGSYMGAKRLTEMGFPCIGLPGTIDNDIKGTDYTIGFFTALGTVVEAIDRLRDTSSSHQRISIVEVMGRYCGDLTLAAAIAGGCEFIVVPEVEFSREDLVAEIKAGIAKGKKHAIVAITEHICDVDELAKYIEAETKRETRATVLGHIQRGGSPGPYDRILASRMGAYAIDLLLQGHGGRCVGIQNEKLVHHDIIDAIENMKRPFKGDWLDCAKKLY

SEQ ID NO: 4310 - protein, 163 aa, Triticum aestivum
  misc_feature (53)..(53): Xaa can be any naturally occurring amino acid
  misc_feature (72)..(73): Xaa can be any naturally occurring amino acid
  misc_feature (82)..(82): Xaa can be any naturally occurring amino acid
  misc_feature (86)..(87): Xaa can be any naturally occurring amino acid
  misc_feature (90)..(90): Xaa can be any naturally occurring amino acid
  misc_feature (99)..(100): Xaa can be any naturally occurring amino acid
  misc_feature (102)..(102): Xaa can be any naturally occurring amino acid
  misc_feature (105)..(105): Xaa can be any naturally occurring amino acid
  misc_feature (115)..(115): Xaa can be any naturally occurring amino acid
  misc_feature (119)..(119): Xaa can be any naturally occurring amino acid
  misc_feature (122)..(122): Xaa can be any naturally occurring amino acid
  misc_feature (125)..(125): Xaa can be any naturally occurring amino acid
  misc_feature (127)..(127): Xaa can be any naturally occurring amino acid
MAPAVMASSATTVAPFQGLKSTAGLPVSRRSSASLGSVSNGGRIRCMQVWPIXEGIKNSETLSYLPPLSTEXXWKQVDYLDXSKWXXCSXSSKLVPLPXXQXSPXYYDGPYWDKXNLPXFGXTDXQXAQRVEESRRPDPIRTVQLRQMDASRLKQRGARIREG

SEQ ID NO: 4311 - protein, 178 aa, Streptomyces coelicolor A3(2)
MTTGATVWLTGLPSAGKTTIARELADRLREEGRPVELLDGDEIREFLSAGLGFDRADRHTNVQRIGFVAELLARNGVTALVPVIAPYADSRDAVRERHGANGTAYVEVHVATPVEVCSVRDVKGLYAKQAAGELTGLTGVDDPYEEPVAPDLRIESQDQTVQESAAAVHALLTERGLA

SEQ ID NO: 4312 - protein, 121 aa, Triticum aestivum
  misc_feature (38)..(39): Xaa can be any naturally occurring amino acid
  misc_feature (42)..(42): Xaa can be any naturally occurring amino acid
GPMLIYPMLKSKWDPNTSVALPEGEVFYLVALLRFCPXXGGXAVEELVAQNGAIVDACRSSGYDFKTYFPHYRTEADWARHFGAKWARFVDRKARYDPLAILAPGQKIFARTPSSSRTDRS

SEQ ID NO: 4313 - protein, 447 aa, Glycine max
MEECHTVFGKYEMGRLLGKGTFAKVYYGKQISTGESVAIKVINKEQVRKEGMMEQIKREISVMRLVRHPNVVEIKEVMATKTKIFFVMEYVRGGELFAKISKGKLKEDLARKYFQQLISAVDYCHSRGVSHRDLKPENLLLDEDENLKISDFGLSALPEQLRYDGLLHTQCGTPAYVAPEVLRKKGYDGSKADIWSCGVVLYVLLAGFLPFQHENLMTMYYKVLRAEFEFPPWFSPESKRLISKILVADPAKRTTISAITRVPWFRKGFSSFSAPDLCQLEKQEAVTEEENNSKVPKFFNAFEFISSMSSGFDLSGLFETKRKTAAVFTSKCSAAAIVAKIAAAARGLSFRVAEVKDFKIRLQGAAEGRKGRLAVTAEVFEVAPEVAVVEFSKSAGDTLEYAKFCEEDVRPALKDIVWTWQGDATCAANFPACHGEECQKQVVVSTI

SEQ ID NO: 4314 - protein, 322 aa, Magnetococcus sp. MC-1
MNTIAVMTSGGDAPGMNSAIRAVVRTAIGAEMEVLGIRRGYSGLLEGDLIPMDAASVGNILQKGGTVLGTSRCAEFLKPEIRQEAANILRRKHVDGLVVIGGNGSFNGAYQLHQEHDIPVVGVPGTIDNDIQGTHYTIGFDTAVETGVYAVDKIRDTANAHDRIFLVEVMGRHSPAIAIHTGVCTGAEHVIHTPENTDYDTLVSGIRRGRKRGKNSFIIIVAEGQVPGSAYQVQKHLADNYQIASHVAILGHLQRGGSPTAHDRFIAASMGFHAVQALKTGEVATVTACRDGRIQLVPLQECLEKNDAIDAFSLNLTQQLAI

SEQ ID NO: 4315 - protein, 490 aa, Gibberella zeae PH-1
MASPKLSDPSLIKNACYVNGQWVAAKSGKDFSVENPASLEKLGSCPEFDANDTEAAIAAADAAYKTYRKTPARQRARYLRRWYDLMMENADDIARLITLENGKVWSDAKTEAVYAANFFEWFSEEAPRIYGETIEASNPSCRLSTIKQPVGVCGLIAPWNFPAAMITRKAGPALAAGCTVVIKAPAEAPLTALALAELAHRAGIPAGVVNIITALDNTAEVGKVLTTHPKIKKVSFTGSTGVGRLLMNQSSSTVKKLSFELGGNAPFIVFEDADLEKAVKGIITSKFRNSGQTCVCANRIFVHRSIYDKFVQMVLDVVKTFVIGDGFGEKTTHGPLIHGRAVAKTAEHVEDAISKGAKLIHGGERLADLGPNFFGLTMLTDMTPDMKIFSEETFGPVAAFFAFDTEEEVIELANDSEVGLGGYFFSENVNRCYRVAEALEVGMIGVNCGVLSDPAAPFGGIKQSGFGREGSKYGIDEFTVTKMVMTNIDP

SEQ ID NO: 4316 - protein, 399 aa, Zea mays
  misc_feature (113)..(113): Xaa can be any naturally occurring amino acid
THASFSSFFPVGFRSGNHFPTTRGRSTRPRAVELGSEASEFCHYKGFYSSNYLPMTPKSVNDIHKRGGTVLGTSRGGHDTKKIVDNIQDRGAIQVYTLGGDGTHQGAHGAINXSRGRGLQVAVAGIPKTIDNDIAVIDKSFGFDTAVEEAQRAINAAHVEASSAENGIGLVKLMGRYSGFIAMYATLASRDVDCCLIPESPFYLEGEGGLFEYIDRRLKENNHMVIVVAEGAGQDLIAQSIPAADQQDASGNKLLLDVGLWLTHKIKDYCKSKKMEMTIKYIDPTYMIRAIPSNASDNVYCTLLAHSAIHGAMAGYSFTVGMVNGRHAYIPFHRVTSTRNKVRITDRMWARLLSSTNQPSFLSQKDIDAAREADKAANRTKSREDAKKQSTPVLANGEK

SEQ ID NO: 4317 - protein, 189 aa, Solanum tuberosum
SDGKVDKFIGGESSLPLHEIGSNAGGDGGRYYLGMFLGGAYEEALGGLHNLFGGPSVVRVLQSDSPHSFAVTRSVPGPSCADVLRAMQFEPELMFETLKHRAEEFLEQGEGEGEDKGLAFASLTSSLAQSFHNMPYLVSSSSSCCFTAEATATASANANANNGGYYYYSEDNAADCATEEDEIWSYCTA

SEQ ID NO: 4318 - protein, 206 aa, Glycine max
PRPAESSEPPSHRQKPTTGDDDRISHLPDVLLLQILSLLPTKQAVITGILSKRGRPLWPAVSVLDFDDESSPEFHHPGGLTGFAEFVYSVLLLHDAPAIERFRLRCANPNYSARDIATWLCHVARRRAERVELSLSLSRYVALPRCLFHCDTVSVMKLNGVFLNALASFSVSLPLLKVLHVGDRVLFGCHDYVVKLIAGCPRLEDL

SEQ ID NO: 4319 - protein, 348 aa, Pseudomonas sp. TW3
MLAIRKTKAGPGGLSVDDVAAPKEAHSTDVLVKVEAAGICGTDLLIYKWGEFAKRMKLPTILGHEVSGVIEQVGSDVKGLRPGMRVSLESHLPCGTCYTCRRGWAHVCPKTRYPGVDFDGGFASFVVVPESVCWPVPCGIPPLQAAMMEPFGLAVHASLEGSGVSGLNVLVSGCGPIGLMNIAAAKALGASKVIATDIHPLRLTAAAKMGADECINAAEESVYKTVRSLLGERGVDVAIDYSGQAAALKELIQSITHGGELRLMGVPSHDILLNLEEWLFKGLIVRGLHGRRLYETWERSTSLLVTGRVDLSSLVSHRLPLSAAEDAFEMALNGQSLKILFEPNGSCI

SEQ ID NO: 4320 - protein, 443 aa, Azoarcus sp. EbN1
MHAPSLLERSLRSVWHPCTQMKQHEALPLVPIVRGEGPWLIDAEGRRLLDGISSWWVNLFGHCNPRINAALRAQLDTLEHVMLAGFTHEPVVELSERLAALTGHRLGHAFYASDGASATEIALKMSAHYWRNLGLAEKSRFVSLAGSYHGETVGALAVTDVAIFRDAYAPLVRAGTTVPTPDARLALPGESAADVARRAAAALEAHLAEHHAQTAALIVEPLVQGASGMVMYDPEYLRLARALCDRYRVHLIADEIAVGCGRTGTFFACEQAGIWPDFLCLSKGISGGYLPLSLVLATNTVYAAFYADSATRAFLHSHSYTGNPLACRAALATLDIFEQDGVLAANRVLARQLGDAVRARFGAHPAVRQLRQRGMILAFDVATERPDFARNFFRAGLDHGVLLRPIGNTVYFMPPYILDAAHVAHLVDGAAAALAEALEPAPG

SEQ ID NO: 4321 - protein, 307 aa, Solanum virginianum
MGSKHSKETTSTSHRVPFVDLQEATNNFDDNFLIGEGGFGKVYRGVWRDGTKVALKRYNPKSGQGIAQFRTEIKMLSQLRHPYLVSLIGYCDENNEMTLIYEYMENGNLRKHLYGSDLPTLSWEQRLEICIGAAKGLHYLHTTAVIHCDVKCTNILLAENFVAKVADFGLSKKGTVLDETHTTTMMKGTFGYLDPEYYRTLRLTEKSDVYSFGVVLLDVLCARPAVASSSSKGIINLAEWAMKWKKKGQLERIIDPNLVGKIIPDSLRKFGETAEKCLAESGVDRTSMNTVLWNLEYALHLQEPVIQ

SEQ ID NO: 4322 - protein, 345 aa, Triticum aestivum
MKTLLILTILAMAITISTANMQVDPSGQVQWPQQQLVPQPQQPLSQQPQQAFAQPQQTFPHQPQQQVPQPQQPQQPFPQTQQPQQPFPQQPQQPFPQTQQPQQPFPQQPQQPFPQQSQQPFPQTQQPQQPFPQQPQQPFPQTQQPQQPFPQFQQPHQPFPQPQQQFPQPQQPQQSFPQQQRPFIQPSLQQRLNPCKNILLQQCKPASLVSSLWSIIWPQSDCQVMQQQCCQELAQIPQQLQCAAIHSVVHSIIVQQQQQQQQQQQQQQGMHILLPLSQQQQLGQGTLVQGQGIIQPQQLAQLEAIRSLVLQTLPTMCNVYVPPECSIIRAPFASIRASSGHHLPA

SEQ ID NO: 4323 - protein, 412 aa, Streptococcus mutans UA159
MKNYALLNGAYDNKTMYDFKPVRADNTYLYDSQNRKYLDLRSGLWNTSLGYIDSLYQRVSKRFDQVLNKKLPYLDIHSFQHDIYDEVAQKVLELTGHAFKRVLYTNSGSENTELALKIADYTNKKGENNRILAFKDSYHGTFFGGVSVSGIDQEINSSFYPKYGEVTFIDYPKSAEQEKNVLDYIANVASFYDVMMIEPILASAGIYFASTDFFNALLKLLRKNQVLIVFDEVATGFFKTGKPFYFQQLSEKPDILCLSKAINNGITSFGCVCVNEEVDAKLQKNPKTMEHFSTQNGNLLGLESANIVLDYYLKSRDVIKGKVKDISDSISNVLDSQNVFYRNQGIMTAIRTESNQSLQLMKSLEKLGILTYLYVNEEEEGLSIMPPININLNVLEKALKLISKKIESQNSF

SEQ ID NO: 4324 - protein, 477 aa, Streptomyces avermitilis MA-4680
MATAPSVSYSMTVRLEVPASGTAVSQLTTAVESHGGSVTGLDVTASGHEKLRIDVTIAATSTSHADEIVAQLRTIEGVTLGKVSDRTFLMHLGGKIEMQSKHPIRNRDDLSMIYTPGVARVCMAIAENPEDARRLTIKRNSVAVVTDGSAVLGLGNIGPKAALPVMEGKAALFKRFAGIDAWPLCLDTQDTDAIVEIVKAIAPGFAGINLEDISAPRCFEIEARLREALDIPVFHDDQHGTAIVVLAALTNALRVAGKAIGDIRVVMSGAGAAGTAILKLLIAAGVKNAVVADIHGVVHADREDLVNAAADSPLRWIADNTNPEGLTGTLKEAVRGADVFVGVSAPNVLDGDDVAAMAEDAIVFALANPDPEVEPAVARQTAAVVATGRSDFPNQINNVLVFPGVFRGLLDAQSRTVNTEMMLAAAAALADVVTEDELNPNYIIPSVFNEKVAGAVAGAVRTAAKAAGVTESDSKDA

SEQ ID NO: 4325 - protein, 476 aa, Methylobacillus flagellatus KT
MDGEYFDNISPVTGKVFCQVPRSNEKDINLALDAAHAAKEAWARTSGTGRANILLKIADVMEANLETIAIAETIDNGKPIRETMAADIPLAIDHFRYFASCIRTQEGGISEIDHETVAYHFHEPLGVVGQIIPWNFPILMAAWKLAPALAAGNCIVMKPAEQTPASILVVMELIGDLLPPGVLNVVNGHGVEAGKALATSPRIAKIAFTGSTSVGRLIMQYASQNLIPVTLELGGKSPNIFFEDVMDKDDAYFDKALEGFTLFALNQGEICTCPSRALIQESIYEQFIERAIKRVKAIKQGSPLDKSTMIGAQASSEQVEIIMSYIKLGLEEGAQLLTGGNATKLPGDLSEGYYIEPTVFKGHNKMRIFQEEIFGPVLSVTTFKDEKEALEIANDTMYGLGAGLWTRDGSRAYRVGRGIQAGRVWTNCYHLYPAHAAFGGYKQSGIGRENHRMMLDHYQQTKNLLVSYSPNALGFF

SEQ ID NO: 4326 - protein, 172 aa, Arabidopsis thaliana
MAAAFASRLTRGGRSLLGGLNNVGSMNSSNGMMNESILSQQQRRTFIQMGTVLKVVDNSGAKKVMCIQALKGKKGARLGDTIVASVKEAMPNGKVKKGAVVYGVVVRAAMQRGRVDGSEVRFDDNAVVLVDSKDKNTKTDRQPIGTRVFGPVPHELRKKKHLKILALAQHVA

SEQ ID NO: 4327 - protein, 261 aa, Aspergillus nidulans FGSC A4
MGHEDAVYLAKLAEQAERYEEMVENMKVVAASDVELTVEERNLLSVAYKNVIGARRASWRIVTSIEQKEESKGNESQVALIKEYRQKIEGELAKICQDILDVLDQHLIKSAQSGESKVFYHKMKGDYHRYLAEFAVGDNRKAAADASLEAYKSATEVAQTDLAPTHPIRLGLALNFSVFYYEILNSPDQACHLAKLAFDDAIAELDTLSEESYKDSTLIMQLLRDNLTLWTSSEAEPAAENAPAEKKEEAPAAEGEEKPAE

SEQ ID NO: 4328 - protein, 117 aa, Glycine max
FCWLICIIVEFINLVSSESNEVCNKEERRTIAPEHVLKALGVLGFGEYIEEVYAAYEQHKLETMQDSLKGAKWSNRAEMTEEEALAEQQRMFAEARARMNGGAITSKQPDAHQSLES

SEQ ID NO: 4329 - protein, 154 aa, Nostoc punctiforme PCC 73102
MEIRSPAFFIGNTIPFKYTCDGDNISPPIYWEAAPQETKSFALIVDDIDAPNETFIHWVIYNIPADIRELPEGVAKQPKLPEGALQGKNNFGELGYGGPCPPKNGAHRYFFTIYALDQMLDLAAGANKQQLLAAIKNHILDKAELMGRYAREIE

SEQ ID NO: 4330 - protein, 499 aa, Ralstonia eutropha JMP134
MDTRTELLSAATRAFLQRPKRMLIDGQWCAATDGAVFTTEDPASETTLAEVPAAGPADVDAAVQAARAAFEQGPWNAMRPSDRERLLLRLADLVEANAEELAQIEALDNGKPATMARAIDVAGAAGFLRYMAGWATKLHGESLDVSVPLVREREFVAFTRQEAVGVVGAIIPWNFPLLMAAWKLGPALACGCTVVLKPAEETPLSALRLGELVMEAGYPAGVVNIVTGDGARCGAALAGHPQVDKIAFTGSTEVGKLVGGAAMERLARVTLELGGKSPVIMLDDMSPEAAATGAAQAIFFNQGQVCTAGSRLYLPRSKFDATVQALADIANSLRLGPGLEPDTGMGPLVSRRQHKRVAGYVQAGVDAGAQLICGGNADLPRGHFFKPTVLARAPETSSVVQEEIFGPVVVALPYDDIDEVVGRANGTPFGLAASVWSNDLSRVHRLVPRIKAGTVWVNCHNLLDNAMPFGGFKQSGLGREMGRAVFDHYTETKSVMIAV

SEQ ID NO: 4331 - protein, 325 aa, Emericella nidulans
MSSGKTFKLSNGVTIPAVGFGTFASEGASGETYRAVKKALEVGYRHLDCAWFYQNEDEVGDAVRDFLKENPSVKREDIFICTKVWNHLHRPEDVRWSIEDSLKKLKTDYVDLFLIHWPIAAEKESQDKPKIGPDGKYVILKDLTEDPKPTWQAMEKLYEDKLARSIGVSNWTIEGLEKLLKYAKVKPHVNQIEIHPFLPNEELIQYCWKNDILPEAYSPLGSQNQVPTTGERVSENKTLNEIAQKGGNTLAQVLIAWGLRRGYVVLPKSSNPARIESNFKTIELSDEDYEAVNAVAKGRHFRFVNMKDTFGYDVWPEETAKNISA

SEQ ID NO: 4332 - protein, 240 aa, Triticum aestivum
  misc_feature (62)..(62): Xaa can be any naturally occurring amino acid
MGERVKGTVKWFNVTKGFGFISPDDGGEDLFVHQSAIKADGYRSLNENDAVEFEVITGDDGXRTKAADVTAPGGGALAGGSRPGDGGGDRGGRGGGGGGGGGYGGGGGGYGGGGGAYGGGGGGYGGGGGGYGGGGYGGGGGGGRGCYKCGEEGHISRDCPQGGGGGYGGGGYGGGGGGGGGRECYKCGEEGHISRDCPQGGGGGGGYGGGGGRGGGGRGGGCFSCGESGHFSRECPNKAH

SEQ ID NO: 4333 - protein, 433 aa, Saccharomyces cerevisiae
MQSMNVQPRVLAVGGEQFFSQRQASEQHQQQNMGPQVYSPKVNRARMFPQGMPVNTINGSVNQEMNNAYLLKQKNEPLLTQQQQQQQQQQQPFNIGTPVSVASLPPGLNVLQQQQQQQQQQQQQQQGVGLNRPLASQLPKHLTNQSMPPIFLPPPNYLFVRDVWKSNLYSEFAVIRQLVSQYNHVSISTEFVGTLARPIGTFRSKVDYHYQTMRANVDFLNPIQLGLSLSDANGNKPDNGPSTWQFNFEFDPKKEIMSTESLELLRKSGINFEKHENLGIDVFEFSQLLMDSGLMMDDSVTWITYHAAYDLGFLINILMNDSMPNNKEDFEWWVHQYMPNFYDLNLVYKIIQEFKNPQLQQSSQQQQQQQYSLTTLADELGLPRFSIFTTTGGQSLLMLLSFCQLSKLSMHKFPNGTDFAKYQGVIYGIDGDQ

SEQ ID NO: 4334 - protein, 127 aa, Triticum aestivum
MEAPAAAAAAVSTLSALAVFVSTVDRGAVRSAHGYRVAGKGGGCGWERWVEREFAFTPTSAREVPLPADALRLLPADWRGRPAYREGQIAGPWRCILAFDFVAAVAPPPVPPPVLCPFRNPRLMCVP

SEQ ID NO: 4335 - protein, 368 aa, Oceanobacillus iheyensis HTE831
MKTDEKFVPGLDGVIASETAISFLDVEKEKIIINGHDLIELSLKQDYLDILYLLLEGDLPKKVEITKTEKLLKDHYEVPQAVLDILKLLPKETHPMDGMRTALSVLAGYDKNIEDRSASANKDRAYQLLGQLPTITVNSYRILNNQEVVQPATELSYSANFLYMITGKEPSDLQVEIFDRLLLLYSEHEMPNSTFTARVISSTNSDMYGALTGAISSLKGNLHGGANEAVMYMLNEVETADEFEQLLYKKLENKEKIMGFGHRVYMKKMDPRALITKEALKKLCEKDNDYTLLEMCEAGEEVMKKEKGLYPNLDYYAAPVYWKLGIPISLYTPIFFSARTAGLAAHIVEQHSNNRIFRPRVKYIGKDY

SEQ ID NO: 4336 - protein, 364 aa, Aminobacter sp. IMB-1
MATYHLKIVGKRDEGNDAASLWLEVPQDLRGAFSYRPGQFLTVERDGDGGRIARQYSLSSTPEAHRDLRITVKKIDGGAVSPWLVQDVGEGQALEVQPPRGRFFRGFDEPRHVLMLACGSGIAPILSIARHLLAQDAGHRVTIIYGNRTPDAVILGDEVGALAESHPTACHVEQVMSRAGESWHGARGRIDKTFIETRWKDWQAASHGLSTSIFLCGPQEFMDDAERAFVDLGLALADIHRESFDLVLNDDDGEPGLTLVGVNDPGESGPCERIVAVVGGEEYETVPEEGESILAALIRAEADVPFSCQEGTCASCISKLTEGSASVRPGVLQTLRQDDLDEGLTLACLSRPTTRSVRIDFDEI

SEQ ID NO: 4337 - protein, 355 aa, male-killing Rickettsia from Adalia bipunctata
GFMSTASCRSTITYIDGDKGILRYRGYDIKDLAEKSDFLEVAYLLIYGELPSSEQYNNFTKKVAVHSLVNERLHYLFQTFCSSSHPMAIMLAAVGSLSAFYPDLLNFKEADYELTAIRMIAKIPTIAAMSYKYSIGQPFIYPDNALDFTENFLHMMFATPCEKYKVNPIIKNALNKIFILHADHEQNASTSTVRIAGSSGANPFACVSTGIASLWGPAHGGANEAVINMLKEIGSSENIPKYIAKAKDKNDPFRLMGFGHRVYKNYDLRAAVLKETCKEVLKELGQLDGNPLLQIAIELEAIALKDEYFIERKLYPNVDFYSGIIYKAMGIPSQMFTVLFAIARTVGWMAQWKEM

SEQ ID NO: 4338 - protein, 234 aa, Methanosarcina acetivorans C2A
MTERNTSTDSPEKRAAGIAAAGLVSSGMLVGLGTGSTVAYTIKELGRRVREEGLDILGVVTSYQSEMLAIEAGIRLTTLAQHPELDLAIDGADQIDSELRAIKGGGAAHTREKIVSVSARRFVVVADESKTSKQLDKLVPVEVLPFAKEPVVKKIRELGGKPQLRSAVKKDGPVITDNGNFVLDVEFGVIKDPEALALQLSSIPGVVEHGIFCNVSELYIGNKDGAIKIITRQK

SEQ ID NO: 4339 - protein, 72 aa, Zea mays
MADGPFCPFLEILFAIILPPLGVFLRFGCCRIKFCICLLLPILGYVPGIIYAIYVLVALDSGQPEREYSPPA

SEQ ID NO: 4340 - protein, 247 aa, Prunus dulcis
  misc_feature (220)..(220): Xaa can be any naturally occurring amino acid
  misc_feature (228)..(228): Xaa can be any naturally occurring amino acid
  misc_feature (235)..(235): Xaa can be any naturally occurring amino acid
  misc_feature (243)..(243): Xaa can be any naturally occurring amino acid
RIENKINRQVTFAKRRNGLLKKAYELSVLCEAEVALIIFSNRGKLYEFCSSSSMLKTLERYQKCNYGAPETNVSAREALELSSQQEYLKLKARYEALQRNQRNLLGEDLGPLSSKELESLERQLDMSLKQIRSTRTQCMLDQLTDLQRKEHMLNEANKTLKQRLFEGYHVNSLQMNPNADEYGRQQTQAHGDGFFHPLDCEPTLQIGYQNDPISVVTAGXSVSNYMAXMVAMIIXKCVLESTXSHEW

SEQ ID NO: 4341 - protein, 355 aa, male-killing Rickettsia from Adalia bipunctata
GFMSTASCRSTITYIDGDKGILRYRGYDIKDLAEKSDFLEVAYLLIYGELPSSEQYNNFTKKVAVHSLVNERLHYLFQTFCSSSHPMAIMLAAVGSLSAFYPDLLNFKEADYELTAIRMIAKIPTIAAMSYKYSIGQPFIYPDNALDFTENFLHMMFATPCEKYKVNPIIKNALNKIFILHADHEQNASTSTVRIAGSSGANPFACVSTGIASLWGPAHGGANEAVINMLKEIGSSENIPQYIAKAKDKNDPFRLMGFGHRVYKNYDLRAAVLKETCKDVLKELGQLDGNPLLQIAIELEAIALKDEYFIERKLYPNVDFYSGIIYKAMGIPSQMFTVLFAIARTVGWMAQWKEM

SEQ ID NO: 4342 - protein, 136 aa, Glycine max
  misc_feature (126)..(126): Xaa can be any naturally occurring amino acid
MSTKKIVLKSSDGESFEVDEAVALESQTIAHMVEDDCVDNGVPLPNVTSKILAKVIEYCKKHVDAAASKSEAVDGGGSSDDDLKAWDAEFMKIDQATLFELILAANYLNIKNLLDLTCQTVADMIXGKTPEEIRTT

SEQ ID NO: 4343 - protein, 194 aa, Zea mays
  misc_feature (81)..(81): Xaa can be any naturally occurring amino acid
SGRGGLWRVPPASAFRATTKPGISVRAYMARIARFAGCSPACYVGAYVYLDRLLRRARLLALAVDSYSVHRLLITAVLAAXVKFMDDICYNNAYFAKVGGISLVEMNYLEVDFLFGIAFDLNVTPAAFASYCAVLQSEMAYLDDAPAPAPVVEAPPRLHYCYGAAGTSDRHDDPAAVAAAAACHRHSSQPQLTV

SEQ ID NO: 4344 - protein, 447 aa, Corynebacterium glutamicum ATCC 13032
MVDSNTQYPETGALAPAPADSLLISNVLVYGEGEPTNVFVKDGVIAAIGGTHEADRTIDGNGGVLLPGFVDMHVHLREPGREDTETIATGSAAAAKGGFTAVFTMANTTPVMDQPVIAESVWFKGQNIGLCDVHPVGSITKGLEGKELTEFGMMARSEAKVRMFSDDGKCVDDPQVMRRALEYAKGMDVLIAQHAEDHRLTEGASAHEGENAARLGLRGWPRVAEESIVVRDAIMARDYGNRVHICHASTEGTVELLRWAKSQGIPITAEVTPHHLTLTDERLETYDAVNKVNPPLRESRDAEALKKALLDGTIDVVATDHAPHGSEDKCCEFENAKPGMLGLETSLSIIVDTFVATGLADWRFVARVMSERPAEITRLPGQGRPIAEGEPANLAIVDPGKTWTASGADFASKAENTPFEGQEFSAKVTHTVLRGKVTCADGVAQNA

SEQ ID NO: 4345 - protein, 321 aa, Schizosaccharomyces pombe
MSAEQKYFENAQNVHFTLADGSKIPGLGLGTWRSEPNQTKNAVKTALQYGYRHIDAAAIYGNEDEVGDGIKESGVPRKDIWVTSKLWCNAHAPEAVPKALEKTLKDLKLDYLDEYLIHWPVSFKTGEDKFPKDKDGNLIYEKNPIEETWKAMEKLLETGKVRHIGLSNFNDTNLERILKVAKVKPAVHQMELHPFLPQTEFVEKHKKLGIHVTAYSPFGNQNTIYESKIPKLIEHETIQKIAKSKGEGVTGATIAVSWAITRGTSVIPKSVNEQRIKSNFKYIPLTKEDMDEINSIGIRARFNQATFSNEPVFAGLEDGRT

SEQ ID NO: 4346 - protein, 250 aa, Hordeum vulgare subsp. vulgare
MAKSYPVVSAEYLEAVEKARQKLRALIAEKNCSPLMLRLAWHSAGTFDVSSKTGGPFGTMKKPAEQAHAANAGLDIAVRMLEPIKEEIPTISYADLYQLAGVVAVEVSGGPVIPFHPGREDKPQPPPEGRLPDATKGSDHLRQVFGKQMGLSDQDIVALSGGHTLGRCHKERSGFEGPWTRNPLKFDNSYFTELLSGDKEGLLQLPSDKTLLTDPVFRPLVEKYAADEKAFFEDYKEAHLRLSELGYAEA

SEQ ID NO: 4347 - protein, 355 aa, male-killing Rickettsia from Adalia decempunctata
GFMSTASCRSTITYIDGDKGILRYRGYDIKDLAEKSDFLEVAYLLIYGELPSSEQYNNFTKKVAVHSLVNERLHYLFQTFCSSSHPMAIMLAAVGSLSAFYPDLLNFKEADYELTAIRMIAKIPTIAAMSYKYSIGQPFIYPDNSLDFTENFLHMMFATPCEKYKVNPIIKNALNKIFILHADHEQNASTSTVRIAGSSGANPFACVSTGIASLWGPAHGGANEAVINMLKEIGSSENIPKYIAKAKDKNDPFRLMGFGHRVYKNYDLRAAVLKETCKEVLKELGQLDGNPLLQIAIELEAIALKDEYFIERKLYPNVDFYSGIIYKAMGIPSQMFTVLFAIARTVGWMAQWKEM

SEQ ID NO: 4348 - protein, 505 aa, Candida maltosa
MAIFTPELWLICFAVTVYIFDYIYTKYLMYKLGAKPITHVIDDGFFGFRLPFLITLANNQGRLIEFSVKRFLSSPHQTFMNRAFGIPIILTRDPVNIKAMLAVQFDEFSLGLRYNQFEPLLGNGIFTSDGEPWKHSRIMLRPQFIKSQVSHVNRLEPHFNLLQKNITAQTDNYFDIQTLFFRFTLDTATEFLFGQSVHSLNDGENSLQFLEAFTKSQAILATRANLHELYFLADGIKFRQYNKMVQDFSQRCVDKVLNMSNSEIDKLDRYFFLYEMVKITRNPQVLRDQCLNILLAGRDTTASLLSFAFFELALNEPIWIKLRTEVLHVFQTSLELITFDLLKTKCPYLQAILHETLRLYPSVPRNARFSKKNTTLPHGGGVDGMSPILIKKGQPVAYFICATHVDEKFYTKDALIFRPERWCEEPLIKKNLAWSYLPFNGGPRICLGQQFALTEASYVLTRLAQCYTKISLQPNSFEYPPKKQVHLTMSLLDGVHVKISNLSIS

SEQ ID NO: 4349 - protein, 510 aa, Candida maltosa
MIDALYILIVALVIYKTAQFVHRKSLEKKHHCQPVKQIPLVSILSGLGFDMFFKDTAEMTKNGGLHKKLQQMLESLQTTTFRSRMLTGSQIVTMEPENERTMCSSAHMKDWTIGYRPFALKPLLGDGIFSSEGESWKHSRIMLRPIFAKEHIKQITAMEPYMLLLIEIIKSSSANEGPVDLQPLFHAFTIDYASDFLFGESCDVLKENLGGKSTSGMDAQVKRDFASVFNDVQNYLTKRMMLGPLAFLVSSKDFHDGIKKQHEFVSYFVQKAISMSDEELNDESKNYVFLYQLAKQTKDAKVLQDELLSILLAGRNTTASLLSFLFFELSHHENVWTTLKEVVDQSFPDVESITFETIQNCDYLRWCLFESLRVNPSVPFNSRTANKDTILPRGGGEDCSHPILVKKGDQVLFPLYASNRQEKYFGRKPEEFIPERWRDLPKTGGPAFMPFSTGPRMCLGQQFALIEASYVTIRLVQTFSKLKSHSLEYAPKRLVAATIRLIDGCFVSFE

SEQ ID NO: 4350 - protein, 256 aa, Oryza sativa (japonica cultivar-group)
MEAKRGKIIPAAQVTNFIRRNNVGFGTSIGRKGAPHTIPHGLHGLGRSSNLTLAREGLVGGWHVALRPNLPKPVAKTMEQERREAKSRTSALPGQRRLRRRVQGEDYLPKEDDFAMASSPLRGPRKPFRPIKPRGYRAGDRQTAHQGPMSPYNIMYPCKCPFLVILTTTVLPSVTLLPRILFIHPTTVMFHMNRTNYQLIDISEDGLFVSLLTESGNTKDDLGLPTETISWGRSRLDLVKARKEEEIYALKDIGTK

SEQ ID NO: 4351 - protein, 289 aa, Bifidobacterium longum DJO10A
MTNGHINPANVPDIALKDGHSIPQVGLGVLRIDDEGVVPVVESALEAGYRHIDGAAGYNNEAGVGRALAASGYNKGTKRETLWVTTKLRDSQQGYDSALKAFDNSLKLLQLDYVDMYMIHWPTPFDWRSTDTWKAFVKLRDEGMARTLGVCNFMPADLKRLHEETGAWPAVNQIELHPTWQQREVVAFCKEHGIAVEAYSPMARGADLNAGDGTIEKIAAAHEVSPAQVILRWHIENGTIIIPKSVHADRQKENLNLFGFALTADEHAAIDALDGPTRAGHDPLTFTYA

SEQ ID NO: 4352 - protein, 327 aa, Trichoderma atroviride
MATDTSQKTLSSTTYTLNTGAKIPAVGFGTFANEGAKGETYAAVTKALDVGYRHLDCAWFYLNEDEVGDAIRDFLARRPDVTRKDLFICTKVWNHLHEPEDVKWSAKNSCENLKVDYIDLFLVHWPIAAEKNADRTVKIGPDGKYVINKALTENPEPTWRAMEELVDSGIVKAIGVSNWTIPGLKQLLEFARIKPAVNQIEIHPFLPNTELVEFCFQNDILPEAYSPLGSQNQVPTTGERVRDNPTLNAVADRRGSSLAQVLLAWGLKRGYVVLPKSSTPSRIESNFIIPELSEEDFAAIQKVAEGRHVRFVNMKDTFGYDVWPEDK

SEQ ID NO: 4353 - protein, 178 aa, Glycine max
MASSMISSPAVTTVNRAGAGMVAPFTGLKSMAGFPTRKTNNDTISIASNGGRVQCMQVWPPVGKKKFETLSYLPDLDDAQLAKEVEYLLRKGWIPCLEFELEHGFVYREHNRSPGYYDGRYWTMWKLPMFGCTDASQVLKELQEAKTAYPNGFIRIIGFDNVRQVQCISFIAYKPPGF

SEQ ID NO: 4354 - protein, 144 aa, Triticum aestivum
NKFVQKSRLVPVRNSRDIVDPRVRDWSTRTLTWTEGVENIILSVLPSPTQPPDQSKREISPDSIRSDPRSPSPMASRSCTFLEILLAIILPPLGVFLHYGCCSMEFCICLLLTILGYIPGIIYAVYVLVALGSEERDRDYDTLA

SEQ ID NO: 4355 - protein, 113 aa, Rickettsia typhi
ANEAVINMLKEIGSSENIPKYVAKAKDKNDPFRLMGFGHRVYKSYDPRAAVLKETCKEVLNELGQLENNPLLQIAIELEALALKDEYFIERKLYPNVDSYSGIIYKAMGIPSQ

SEQ ID NO: 4356 - protein, 429 aa, Arabidopsis thaliana
MESLPQPQNQSSPATTPAKILLGKYELGRRLGSGSFAKVHLARSIESDELVAVKIIEKKKTIESGMEPRIIREIDAMRRLRHHPNILKIHEVMATKSKIYLVMELASGGELFSKVLRRGRLPESTARRYFQQLASALRFSHQDGVAHRDVKPQNLLLDEQGNLKVSDFGLSALPEHLQNGLLHTACGTPAYTAPEVISRRGYDGAKADAWSCGVILFVLLVGDAPFDDSNIAAMYRKIHRRDYRFPSWISKQAKSIIYQMLDPNPVTRMSIETVMKTNWFKKSLETSEFHRNVFDSEVEMKSSVNSITAFDLISLSSGLDLSGLFEAKKKKERRFPAKVSGVEVEEKAKMIGEKLGYVVKKKMMKKEGEVKVVGLGRGRTVIVVEAVELTVDVVVVEVKVVEGEEDDSRWSDLITELEDIVLSWHNDIM

SEQ ID NO: 4357 - protein, 420 aa, Listeria monocytogenes str. 4b F2365
MSQKIQVENGVLKTPNNPVIPFIEGDGTGPDIWAAAKRVLDAAVKKAYNGEKEIAWKEVLAGEKAFKQTGEWLPQATLDTIDEYLIAIKGPLTTPIGGGIRSLNVALRQELDLYVCLRPVRYFKGVPSPVKRPEDTDMVIFRENTEDIYAGIEFKEGSEESKKLIDFLKSEFGVDKIRFPETSGIGIKPISKEGTERLVRSAIEYAIKEGRKSLTLVHKGNIMKFTEGAFKNWGYDLCEREYGDKVFTWNEYDRIKEAEGTEVADAKQKEALAAGKILVKDSIADIFLQQILTRPAEFDVVATMNLNGDYISDALAAQVGGIGIAPGANINYLTGHAIFEATHGTAPKYAGLDKVNPSSVILSGTLLLEHIGWGEAAALINQSMEKTIAAKTVTYDFARLMDGATEVKCSEFADELIKNF

SEQ ID NO: 4358 - protein, 178 aa, Glycine max
  misc_feature (178)..(178): Xaa can be any naturally occurring amino acid
MASSMISSPAVTTVNRAGAGMVAPFTGLKSMAGFPTRKTNNDITSIASNGGRVQCMQVWPPVGKKKFETLSYLPDLDDAQLAKEVEYLLRKGWIPCLEFELEHGFVYREHNRSPGYYDGRYWTMWKLPMFGCTDASQVLKELQEAKTAYPNGFIRIIGFDNVRQVQCISFIAYKPPGX

SEQ ID NO: 4359 - protein, 373 aa, Listeria monocytogenes str. 4b F2365
MTLSKGLENVYVAETSISSIIDDMLTYVGYGIDDLMENNASFEEVIYLLWHLRLPNKDEFKKFKREIQENMAVSETIITSLRMQNHQKLHPMSVLRTTVSMLGVFDTEAELDDGEAVYRKGLRLQAKMPTIVAAFSRIRRGLDPIPPREDLNMAANFLYMITGEEADALSVEAMNKALVLHADHEFNASTFTARVCVATLSDVYSGVTAAIGALKGPLHGGANERVFDMLEEIDQAGDVRNYIQEKIDTKQKIMGFGHRVYRGGDPRAQHLREMSRKLTAEKGEEKWFDISLQVEESVWELKHLKPNVDFYSASVYHALGIDRDLFTLVFSVSRVSGWLAHIFEQYRDNRLIRPRAIYVGPENRSYLPVEERI

SEQ ID NO: 4360 - protein, 312 aa, Saccharomyces cerevisiae
MPATLHDSTKILSLNTGAQIPQIGLGTWQSKENDAYKAVLTALKDGYRHIDTAAIYRNEDQVGQAIKDSGVPREEIFVTTKLWCTQHHEPEVALDQSLKRLGLDYVDLYLMHWPARLDPAYIKNEDILSVPTKKDGSRAVDITNWNFIKTWELMQELPKTGKTKAVGVSNFSINNLKDLLASQGNKLTPAANQVEIHPLLPQDELINFCKSKGIVVEAYSPLGSTDAPLLKEPVILEIAKKNNVQPGHVVISWHVQRGYVVLPKSVNPDRIKTNRKIFTLSTEDFEAINNISKEKGEKRVVHPNWSPFEVFK

SEQ ID NO: 4361 - protein, 153 aa, Methylococcus capsulatus str. Bath
MKRLILCLCGMLAISAAEAMEIRQFDDPAKEERYETLIKDLRCLVCQNQSLAESDAELAKDLRTEVYNIIQSGKSSEEAVRFLTERYGDFVLYRPPFKRITLLLWLGPFLLLAGGAVFLWKQARRRAAAAQQDATLSAEERRRLQQLKDRFQG

SEQ ID NO: 4362 - protein, 98 aa, Glycine max
  misc_feature (83)..(83): Xaa can be any naturally occurring amino acid
  misc_feature (87)..(87): Xaa can be any naturally occurring amino acid
TRAESPLFAPFTVLKTMAGLPTIKTTNYITSIANNGGRVQCMQVCPPVGKKKFDTLSYLPNLDDAQLAKEVQYLLRKGWIPCXEIRXDHGLEYREHNR

SEQ ID NO: 4363 - protein, 813 aa, Zea mays
  misc_feature (420)..(420): Xaa can be any naturally occurring amino acid
MAQILLHGTLHATIFEAESLSNPHRATGGAPKFIRKLVEGIEDTVGVGKGATKIYATVDLEKARVGRTRMISNEPVNPRWYESFHIYCAHMAADVIFTVKIDNSIGASLIGRAYLAVQDLLGGEEIDKWLEISDENREPVGDSKIHVKLQYFDVGKDRNWARGVRSTKYPGVPYTFFSQRQGCKVTLYQDAHVPDNFVPRIQLADGKNYEPHRCWEDIFDAISKAQHLIYITGWSVYTEITLVRDTNRPKPGGDVTLGELLKRKASEGVRVLMLVWDDRTSVGLLKKDGLMATHDEETANYFHGTDVNCVLCPRNPDDSGSFVQDLQISTMFTHHQKIVVVDHEMPNQGSQQRRIVSFIGGIDLCDGRYDTQYHSLFRTLDTVHHDDFHQPNFEGGSIKKGGPREPWHDIHSRLEGPIAXWDVLYNFEQRWRKQGGKDLLVRLRDLPDIIIPPSPVMFPEDRETWNVQLFRSIDGGAAFGFPETPEEAARAGLVSGKDQIIDRSIQDAYVNAIRRAKNFIYIENQYFLGSSYGWKPEGIKPEEIGALHLIPKELSLKIVSKIEAGERFTVYVVVPMWPEGVPESASVQAILDWQRRTMEMMYTDIAQALEANGIEANPKDYLTFFCLGNREVKQEGEYEPEEHPEPDTDYIRAQEARRFMIYVHTKMMIVDDEYIIIGSANINQRSMDGARDSEIAMGAYQPYHLATRQPARGQIHGFRMSLWYEHLGMLEDVFQRPESVECVQKVNEVAEKYWDLYSSDDLEQDLPGHLLSYPIGVTADGSVTELPGMENFPDTRARVLGNKSDYLPPILTT

SEQ ID NO: 4364 - protein, 393 aa, Gibberella zeae PH-1
MATRTIEARFERMSVNDENDPIGDGSKLYSKSKVQTISSTSSHGANRPNLFKVALQSQSSNANAAVMLPSQAAQRKVNNPPPSPTRKALPSSSRTSDEVSEDRKSVTLPEQMSVPKQFHLGMFEIGRPLGKGKFGRVYLARERTTGFICALKVLHKNELQAGRVEKQVRREIEIQSNLRHPNILQLYGHFHDSKRVFLILEFAGKGELYKHLRKENRFPEWKAAQYIAQMASALRYLHRKHVIHRDIKPENILVGIHGEIKISDFGWSVHAPNNRRKTMCGTLDYLPPEMIKPGTSDNFYNEKVDLWSLGVLTYEFLVGEAPFEDTPVMTQRRIARADMSIPTWVSPEATDLIKKLLVLDPEKRIPLEQIQQHPWIIKHCVKGERASNREKGL

SEQ ID NO: 4365 - protein, 424 aa, Exiguobacterium sp. 255-15
MATIQGENITVTDGTLNVPNSPIIPFIIGDGTGPDIWNAAVRVFDAAVEKAYNGEKKIEWKEVYAGEKAFNKTGNWLPEETLDLIREHIIAIKGPLTTPVGGGIRSLNVALRQELDLYTCLRPVRYFTGVPSPVKRPEDTDMVIFRENTEDIYAGIEYASGSEEAQKLLNFLQTEMGVNKIRFPETSGLGIKPISKEGTERLVRAAIEYALENKRASLTLVHKGNIMKFTEGAFKNWGYELAEREYAEHVFTWNQYDRIKDEEGADAANKAQSEAEAAGKLIVKDSIADIFLQQILTRPKEFDVVATMNLNGDYISDALAAQVGGIGIAPGANINYMTGHAIFEATHGTAPKYAGLDKVNPSSVILSGEMMFRHLGWNEVADLIIQSMEKSIEGKVVTYDFARLMDGATEVKCSEFADELIKNM

SEQ ID NO: 4366 - protein, 105 aa, Crocosphaera watsonii WH 8501
MIQQQTYLNVADNSGARKLMCLRVLGTGNCTYGKIGDKIIAVVKDALPNMPVKRSEIVTAVIVRTRQPVNRASGMTIRFDDNAAVIINADGNPRGTRVFGPVARD

SEQ ID NO: 4367 - protein, 114 aa, Lycopersicon pennellii
MEMVSKIACFVLLCMVVVAPHAEALTCGQVTAGLAPCLPYLQGRGPLGGCCGGVKGLLGSAKTTADRKTACTCLKSAANAIKGIDLNKAAGIPSVCKVNIPYKISPSTDCSTVQ

SEQ ID NO: 4368 - protein, 146 aa, Brassica napus
  misc_feature (51)..(51): Xaa can be any naturally occurring amino acid
  misc_feature (56)..(56): Xaa can be any naturally occurring amino acid
  misc_feature (67)..(67): Xaa can be any naturally occurring amino acid
  misc_feature (83)..(83): Xaa can be any naturally occurring amino acid
  misc_feature (104)..(104): Xaa can be any naturally occurring amino acid
  misc_feature (116)..(116): Xaa can be any naturally occurring amino acid
MAYSMLSSAAVVTSPAQATMVAPFTGLKSSSAFPVTRKANNDITSIVSNGXGRVSXALQVWPPIGKXKKFETLSYLPDPYRKXMGVREVDYLLRNKWDFLCVEXFELEQRDFVYRXEHGSTPELLTMGRYWTNGESFPLVRMHCSG

SEQ ID NO: 4369 - protein, 114 aa, Lycopersicon pennellii
MEMVNKIACFVLLCMVVVAPHAEALTCGQVTSTLAPCLPYLMNRGPLGGCCGGVKGLLGQAQTTVDRQTACTCLKSAASSFTGLDLGKAASLPSTCSVNIPYKISPSTDCSKVQ

SEQ ID NO: 4370 - protein, 473 aa, Arabidopsis thaliana
MSSSVPNSDRKIVTGPAGYILEDVPHFSDDFPDHPTYPNPLQDNAAYSVVKQYFVDEDDTVPQKIVVHPDSPRGTHFRRAGPRQRVYFESDDVLACIVTCGGLCPGLNTVIREIVCGLSYMYGVKRILGIDGGYRGFYARNTIHLDLKTVNDIHRSGGTILGTSRGGHNTTKIVDSIQDRGINQVYIIGGDGSQKGAAAIFEEIRKRKLKVAVAGIPKTIDNDIPIIDRSFGFDTAVEEAQRAINAAHVEATSFENGIGLVKLMGRYSGFIAMHATLASRDVDCCLIPESPFFLEGSGGLFEFIDKRLKESGHMVIVIAEGAGQDLLSESMKESTTLKDASGNKLLQDIGLWISQRIKDHFAKKMTLTLKYIDPTYMIRAVPSNASDNVCCTLLAQSAVHGVMAGYNGFTVGLVNGRHTYIPFNRITEKQNKVVITDRMWARLLSSTNQPSFMKQADKIHSNQLVGEPGTMKW

SEQ ID NO: 4371 - protein, 397 aa, Clostridium acetobutylicum ATCC 824
MCGIAGFVNFKKNLIDKKSIIEDMTNTLIKRGPNEKGYYISKNALLGHRRLIVVDPKGGSQPMIKIHNGKKYIIVYNGELYNTEDIRKELLEAGYEFSSYSDTEVLLTSYIHWKEDCVNHINGIFAFAIYSETDKKIFLARDPLGVKPLFYTIKNNNLIFGSEIKTLLANPLVEPILTKEGLTEIFALGPARNLGSGVLKDIHEIPPANFIEFTEHKFKLHEYWRLSCKPHTENASETAEHIKFLLTDAIKRQLYADVPVCTFLSGGLDSSIISAVAASEFKKHGKTLNTYSIDYKDNNLYFKNDNFVITPDSVWAEKMRKFIGSNHHKIINNNLDLASALYDAVKANDIPGMADIDSSLFLFCKGVAEKNVVSLSGERAIQMITNLVKQFINIGEL

SEQ ID NO: 4372 - protein, 163 aa, Triticum aestivum
  misc_feature (104)..(104): Xaa can be any naturally occurring amino acid
MPSVEVEVQVGGAGGWRPKQQQKHRHHHHPLEIRQVWADNVDREFKLIRAAIERFPYVSMDTEFPGVIHHPPPAVHHSTLTAPQRYALLKSNVDALHLIKVGLXLAPSPGLPPALAFRLTPRLQPARERQAPDRRLLAATAHSPQRARGPLAALSAEPRPGTR

SEQ ID NO: 4373 - protein, 303 aa, Acinetobacter calcoaceticus
MKFGTVWKYYFTESLLKATIRTPSQLNLAPNALRPVLDQLCRLFPQNPTVQIRPIRLAGVRGEEIKAQASATQLIFHIHGGAFFLGSLNTHRALMTDLASRTQMQVIHVDYPLAPEHPYPEAIDAIFDVYQALLVQGIKPKDIIISGDSCGANLALALSLRLKQQPELMPSGLILMSPYLDLTLTSESLRFNQKHDALLSIEALQAGIKHYLTDDIQPGDPRVSPLFDDLDGLPPTLVQVGSKEILLDDSKRFREKAEQADVKVHFKLYTGMWNNFQMFNAWFPEAKQALADIAEFATSLDLD

SEQ ID NO: 4374 - protein, 486 aa, Pseudomonas stutzeri
MKEIKHFINGAFVDSASGRTFEDINPVNGQVIGRVHEAGRAEVDAAVRAARAALKGPWGKMTVAERAEILHRVADGVTARFDEFLEAECLDTGKPKSLASHIDIPRGAANFKVFADLIKNVPTEAFEMATPDGAGALNYGVRRPKGVIGVISPWNLPLLLMTWKVGPALACGNCVVVKPSEETPLTATLLGEVMQAAGVPAGVYNVVHGFGGDSAGAFLTEHPDVDAYTFTGETGTGETIMRAAAKGVRQVSLELGGKNAGIVFADCDLDKAIEGTLRSAFANCGQVCLGTERVYVERPIFDAFVARLKAGAEALKIGEPNDPEANFGPLISHKHREKVLSYYQQAVDDGATVVTGGGVPEMPAHLAGGAWVQPTIWTGLTDDSAVVTEEIFGPCCHIRPFDTEAEAIELANSLPYGLASAIWTENASRAHRVAGQIEAGIVWVNSWFLRDLRTAFGGSKQSGIGREGGVHSLEFYTELKNICVKL

SEQ ID NO: 4375 - protein, 450 aa, Agrobacterium tumefaciens str. C58
MTILPNSVEARDIAYQMHPNVNLRKFEKTGGLVIESGEGIYVTDSSGKRYIEAMAGLWSVALGFGEQRLVDAATKQMQKLPYYHTFSYKTHGPSVDLAELLIELSPVPMSKVHFTSSGSEANDLVAKMVWYRSNALGKKDKKKIIGRIKGYHGVTIASASITGLPRNHESFDLPLDRMLHTACPSYVHFGKDGESEAEFTARILGELEELILREGPETVAAFWGEPVMGAGGVLLPPEGYWEGVQAILKKYDILLVVDEVICGFGRTGKMFACETYDIKPDVLVVSKQISSSYMPLSAIIMNDSFYQPIADESDRIGSFGHGYTASGHPVATAVGLENLKIIQERDLVGNVARLEGKFLDHLKALADHPLIHSSRGIGLLGALEVKPWDGTKPGDTTLALAAAIESEGVITRPIGESICFCPPLIITAEQLDELFAGVKRGLDNALAARG

SEQ ID NO: 4376 - protein, 387 aa, Ralstonia solanacearum GMI1000
MSEADSSTPAGAFKPKKSVALSGVTAGNTALCTVGRTGNDLHYRGYDILDLAAACEFEEVAYLLVHGKLPNKAELTTYKARLKALRGLPANVKAALEWVPASAHPMDVMRTGVSVLGTVLPERDDHNLPGARDIADRLMASLGSMLLYWYHYSHNGRRIEVETDDDSIGGHFLHLLHGVEPSKSWVDAMHVSLNLYAEHEFNASTFTGRVIAGTGSDIYSAITGAIGALRGPKHGGANEVAFEIQKRYDTPDEAEADVRRRVEAKEVIIGFGHPVYTISDPRNKVIKEVARKLSKEAGNTRMFDIAERLETVMWDVKKMFPNLDWFSAVSYHMMGVPTAMFTPLFVISRTSGWAAHVIEQRIDNKIIRPSANYTGPEDLKFVPLGKR

SEQ ID NO: 4377 - protein, 71 aa, Triticum aestivum
  misc_feature (41)..(41): Xaa can be any naturally occurring amino acid
MAGTANCIDIILAIILPPLGVFLKFGCGHEFWICLLLTFLXGYIPGIIYAIYAITKVNQRQPAPECSRRNK

SEQ ID NO: 4378 - protein, 486 aa, Pseudomonas sp. ST41
MKEIKHFINGAFVYSADGRTFEDINPVNGQVIGRVHEAGRAEVDAAVKAARAALKGPWGKMTVAERAEILHRVADGITARFDEFLEAECLDTGKPKSLASHIDIPRGAANFKVFADLIKNVPTEAFEVATPDGAGALNYGVRRPKGVIGVISPWNLPLLLMTWKVGPALACGNCVVVKPSEETPLTATLLGEVMQAAGVPAGVYNVVHGFGGDSAGAFLTEHPDVDAYTFTGETGTGETIMRAAAKGVRQVSLELGGKNAGIVFADCDMDKAIEGTLRSAFANCGQVCLGTERVYVERPIFDAFVARLKAGAEALKIGEPNDPEANFGPLISHKHREKVLNYYQQAVDDGATVVTGGGVPDMSAHLAGGAWVQPTIWTGLADDSAVVTEEIFGPCCHIRPFDSEEEAIELANSLPYGLASAIWTENASRAHRVAGQIEAGIVWVNSWFLRDLRTAFGGSKQSGIGREGGVHSLEFYTELKNICVKL

SEQ ID NO: 4379 - protein, 139 aa, Arabidopsis lyrata subsp. petraea
STGKRSEREEDTDPQGSRGISDDEDGDNSRKKLRLSKDQSVILEETFKDHSTLNPKQKQALAKQLGLRARQVEVWFQNRRARTKLKQTEVDCEFLRRCCENLTEENRRLQKEVTELRALKLSPQFYMHMSPPTTLTMCP

SEQ ID NO: 4380 - protein, 74 aa, Triticum aestivum
  misc_feature (2)..(2): Xaa can be any naturally occurring amino acid
  misc_feature (6)..(6): Xaa can be any naturally occurring amino acid
  misc_feature (8)..(8): Xaa can be any naturally occurring amino acid
  misc_feature (10)..(12): Xaa can be any naturally occurring amino acid
  misc_feature (15)..(16): Xaa can be any naturally occurring amino acid
  misc_feature (18)..(18): Xaa can be any naturally occurring amino acid
  misc_feature (21)..(21): Xaa can be any naturally occurring amino acid
  misc_feature (33)..(33): Xaa can be any naturally occurring amino acid
  misc_feature (35)..(35): Xaa can be any naturally occurring amino acid
  misc_feature (43)..(46): Xaa can be any naturally occurring amino acid
  misc_feature (49)..(49): Xaa can be any naturally occurring amino acid
  misc_feature (54)..(54): Xaa can be any naturally occurring amino acid
  misc_feature (56)..(56): Xaa can be any naturally occurring amino acid
  misc_feature (61)..(62): Xaa can be any naturally occurring amino acid
LXSSLXAXVXXXHLXXTXAAXRWGTKLQSFCVXLXGSPDLKAXXXXPNXLGTMXHXFTFTXXDGIDAIEDVIYH

SEQ ID NO: 4381 - protein, 294 aa, Staphylococcus aureus subsp. aureus Mu50
MVIQWYPGHMAKAKREVSEQLKKVDVVFELVDARIPYSSRNPMIDEVINQKPRVVILNKKDMSNLNEMSKWEQFFIDKGYYPVSVDAKHGKNLKKVEAAAIKATAEKFEREKAKGLKPRAIRAMIVGIPNVGKSTLINKLAKRSIAQTGNKPGVTKQQQWIKVSNALQLLDTPGILWPKFEDEEVGKKLSLTGAIKDSIVHLDEVAIYGLNFLIQNDLARLKSHYNIEVPEDAEIIAWFDAIGKKRGLIRRGNEIDYEAVIELIIYDIRNAKIGNYCFDIFKDMTEELANDANN

SEQ ID NO: 4382 - protein, 361 aa, Myxococcus xanthus
MRLGVLTGGGDCPGLNALIRGLVKRGTHEFGYEFVGIENGYMGLVEPGLAHPLTEEDTRGILPKGGTILGTSNKANPFSYATREDGHWVERDVSDQVLLRCEELGLDGLIAVGGDGTLSIAHRLVEKGLKVVGCPKTIDNDLSGTDQTFGFDTARLIVTEALDRLHSTAEAHDRVMVVEIMGRHAGFLTLESGIAGGADVILIPEIPYSVESVVEKIRRRSTRRRSFSIIAISEGAFPQGGELAVLDTAEAIPGRGVVRLGGSGKALADLLARHIEAEIRVTVLGHLQRGGSPSAADRVLATRYGCKVLDLVSAGQWDHMVALRAGEIIAVPLSESRKERRVDPAGELVRFTKSMGISFGD

SEQ ID NO: 4383 - protein, 124 aa, Zea mays
  misc_feature (105)..(105): Xaa can be any naturally occurring amino acid
MDNLSRLPDELLVRILSLVPTKVVVSTSILSKRWKFLWMSLPKLEFVDRDESLLVLKNFVNKNLPLHRAPVIQSFLLSLYESREKNIKPEDIRQWVEIAVSRHLXELDVSYSSDNKENMVPNSL

SEQ ID NO: 4384 - protein, 541 aa, Zea mays
MATANGSWVPRGRAGIHLSITTTSSFPRLPSALRVARGSMATANGSSKGSFEVPKVEVRFTKLFIDGKFVDAVSGKTFETRDPRTGEVIASIAEGGKADVDLAVKAAREAFDNGPWPRMTGYERGRILHRFADLIDEHVEELAALDTVDAGKLFAVGKARDIPGAAHLLRYYAGAADKVHGATLKMAQRMHGYTLKEPVGVVGHIVPWNYPTTMFFFKVGPALAAGCAVVVKPAEQTPLSALFYAHLAREAGVPAGVLNVVPGFGPTAGAAVAAHMDVDKVSFTGSTEVGRLVMRAAAESNLKPVSLELGGKSPVIVFDDADLDMAVNLVNFATYTNKGEICVAGTRIYVQEGIYDEFVKKAAELASKSVVGDPFNPSVSQGPQVDKDQYEKVLRYIDIGKREGATLVTGGKPCGDKGYYIEPTIFTDVKDDMTIAQDEIFGPVMALMKFKTVEEVIQKANNTRYGLAAGIVTKNIDVANTVSRSIRAGAIWINCYFAFDPDAPFGGYKMSGFGKDMGMDALDKYLQTKTVVTPLYNTPWL

SEQ ID NO: 4385 - protein, 189 aa, Zea mays
MSVSPSSLCGGDPAMRIVVWFRRDLRVEDNPALAAAARAGGEVVPAYVWSPEEEGPYYPGRVSRWWISQSLNHLDASLRRLGAGKLVTRRSADAAVALLQLVRDTGATHVYFNHLYDPISLVRDRRLKEMLAAEGIVVQSFNSDLLYEPWEVVDDEGQPFTMFDPFWNRCLSMPYDPPAPLMPPKRINS

SEQ ID NO: 4386 - protein, 351 aa, Vibrio parahaemolyticus RIMD 2210633
MFFEWQGNQPVTLRCIDKYFETHDTVSIKLAELTESLLFQFKPGQFINLGVEIDGKMEFRAYSISSINEDDHLQLTIKRVSGGKVSNYIVDSLLLGDTVQALPPAGEFNCIDHPPVLRDGETRALLISAGCGVTPVFSMAKHWLSNQDENDNDVDIAFLHIARSPEETIYYDQLETFDAVYPNFHLKLLLKNREGTSHPQGRLNADWLKELVPDFKQRTVYLCGPSQFMQDVHGYLNDLGFDMTNFYQESFTPATGAETSVSDEVVHVSVPDFAQTIDAQKGQVLADVLEGAGLPLIVACRSGICGSCKCKVRQGSVSSTSLETLTPEEIEQGYVLACSSTIEADLEVQIG

SEQ ID NO: 4387 - protein, 249 aa, Zea mays
MGKHGHGKCHDVEACYPPGAAGGGKYPYMTENPQLRWAFIRKVYVIVCLQLLLTVAVAATVNLVRAIGDFFLSRTMGAMFAIIGVIVAPILVMIPMIIYRKRHPVNLALLALFTVCISFAVGLSCLTANGPVILEAVVITMVVVLGLTFYTFWAAKRGYEFEFLGPFLVSACLILMLFSLLRIIFPLGRTGTMVYGCIAALVFSGFIIYDTDNLIRVYSYDEYVAAAIELYLDIINLFQAILAVLEGVD

SEQ ID NO: 4388 - protein, 362 aa, Arxula adeninivorans
MSKNIIILSGDHVGPEVTAEAIKVLEAITQARPNVKFNFDHKLIGGAAIDATGSPLPDETLEASKKADAVLLGAVGGPKWGTGAVRPEQGLLKIRKELNLYANLRPCNFMSEKLLDLSPLRSEIVKGTNFTVVRELVGGIYFGTRKEDEGNGEAWDTEKYTVEEVKRITRMAAFLALQSNPPLPVWSLDKANVLASSRLWRKTVTETIEKEFPQLTLNHQLIDSAAMILIQNPSKMNGVIVTSNMFGDIISDEASVIPGSLGLLPSASLSSLPDKNTAFGLYEPCHGSAPDLPPNKVNPIATILSAAMMLRLSLNLKEEADAVEKAVSKVIDNGIVTADLKGASSTTEVGDAVAAEVQKLLK

SEQ ID NO: 4389 - protein, 121 aa, Zea mays
  misc_feature (83)..(83): Xaa can be any naturally occurring amino acid
RFQAGPFEVEPIRVTHSIPDCCGLVLRCGDGIIFHTGDWKIDESPVDGKNFDRQALEELSKEGVTLMMSDSTNVLSPARSISXESVVAGSLLRHISEAKRRVIATQFASNIHRIGRIPAAA

SEQ ID NO: 4390 - protein, 175 aa, Triticum aestivum
  misc_feature (169)..(169): Xaa can be any naturally occurring amino acid
MAPAVMASSATTVAPFQGLKSTAGLPVSRRSGSAGLSSVSNGGRIRCMQVWPIEGIKKFETLSYLPPLSTEALLKQVDYLIRSKWVPCLEFSKVGFVFREHNSSPGYYDGRYWTMWKLPMFGCTDATQVLNEVEEVKKEYPDAYVRVIGFDNMRQVQCVSFIAFRPPGXEESGKA

SEQ ID NO: 4391 - protein, 170 aa, Zea mays
MAAFLRSKCSPVGRTLMGSLGNSLFGAANSSVGAITRPSHCDAISQQIRTFIQMRTNLKVVDNSGAKRVMCIQSLRGKKGARLGDMIIGSVKEAQPRGKVKKGDVVYGVVVRAAMKKGRSDGSEVQFDDNAVVLVNKKGELIGTRVFGPVPHELRKKKHLKILALAEHIV

SEQ ID NO: 4392 - protein, 487 aa, Sinorhizobium meliloti 1021
MQRFQCYINGEFADGEARFESIDPTTGRAWAEMPEAREADVNRAVEAARIALHDQPWSTLTATQRGKLLYKLADLVAENAGRLAELETRDTGKIIRETSSQIAYVADYYRYYAGIADKIEGSYLPIDKPDMDVWLRREPIGVVAMVVPWNSQLFLSAVKIGPALAAGCTMVVKASEDGPAPLLEFARLVHAAGFPAGVVNIVTGFGPSCGAALSRHPQVDHIAFTGGPETARHIVRNSAENLASTSLELGGKSPFIVFADADLESAANAQIAGIFAATGQSCVAGSRLIVEKSVKDRFLQILKAKAETIRIGSPLEMSTEVGPLATERQSNHVKTLVARSLAAGAKLVTGGTAPEGAGFYYRPTILDCDGSASPSLENEFFGPVLSVLSFETEAEALHLANDSRFGLAAGVFTQNLTRAHRLMKGIRAGIVWVNTYRAVSPVAPFGGFGLSGHGREGGLEAALDYTRSKTVWLRTSDDPIPDPFVMR

SEQ ID NO: 4393 - protein, 181 aa, Triticum aestivum
  misc_feature (94)..(94): Xaa can be any naturally occurring amino acid
MAGVGRNMVAPLLVLNLIMYLIVIGFASWNLNHFINGLTNRPGVGGNGATFYFLVFAILAGVVGAASKLAGVHHVRTWRGDSLATSASSSLVAXAVTALAFGLACKEIHIGGYRGWRLRVLEAFVIILVFTQLLYVLALHSGLFGNQFGGNHAGGYPAEHGAYGAGDPHNKGMGTGGVARV

SEQ ID NO: 4394 - protein, 174 aa, Methanosarcina acetivorans C2A
MATGPRYKVPFRRRREGRTNYHLRLKLLLSRQDRVVVRKSSRNVQIQLIAPTPDGDITYSSAVSNELAKYGYTGATGNTTAAYLTGLLFGLKSLQKGYEGGILDIGLQASSAGSRVYAALKGVVDSGFEIPCSPEVFPPDERIRGEHIAGYREESSDLPEQFEATKEKIFAEFS

SEQ ID NO: 4395 - protein, 133 aa, Glycine max
RISSHVVTTVNRAGAGLVVPLTGLKSMAGFPTGKTNIAIPSIVGTGGGVHCMQGGPPIGRKKFGTFSYWPDLVDAQLAKEVESFLRKGWIPCLEFGWEHGFGFRGPTSLPGSFDGPLWTMWKLPMLGCTDAFK

SEQ ID NO: 4396 - protein, 457 aa, Iris hollandica
MVGILVYVALFILSLLLFLTAAAKLHNSKSKIKNQAPSPPSLPVVGHLHLLKKPLHRSISLLSARHGPILLLRFGSRPALAVSSLPLAEECLSGKNDLAFANRAHFPHEAAPLQLLTLGSANYGPHWRMLRRISAVELLSSHRINSFSQLRSEEVHSMISTLFRESSDKELNRVELKSKLFELAMNNMMRMIFGKDLASSEGAGRFREMVKESHSLLGASTRLGDFFPFLGWMDWRARRMVLRLVRRRDEFLQSLIDAHARKMEEVEEKTMIRVLVELQKSNRESNNDEGFMLKPLIIGLLQAGTDTSSDTIEWAMSLLLNNRDKLKKARDEIDARVGKERLLRESDLPNLPYLQCVITETLRLYPAAPLLVPHESAEECTVGGYAVPQGTMLLVNAYAIRVVGIVLGTLIQCFEWERVGEEEVDMTEGSGLTLPRANPLEAICRPRQSMISVLAGL

SEQ ID NO: 4397 - protein, 178 aa, Glycine max
MAESDNDSGGAQNAGNSGNLSELSPREQDRFLPIANVSRIMKKALPANAKISKDAKETVQECVSEFISFITGEASDKCQREKRKTINGDDLLWAMTTLGFEEYVEPLKIYLQRFREMEGEKTVAARDSSKDSASASSYLEPLEPQGHVYGSAYHHQVPGGAIMGGSAYPGGGSNARPR

SEQ ID NO: 4398 - protein, 428 aa, Gloeobacter violaceus PCC 7421
MENRFLNIFPGLSEERAIELLYTPMAQLEDASERYIAAAHLVNFPSERAIDALLAAVENRDSALDNRIVRRKAVETLGRLKVERALPVIRASLQDEDNYLVENAAWAIGEIGCSDPEILEELTALLARPRQSYRTIIQTLAKLGYTPATGRIAAFEQSPEPPIASAAITAVGRLSGERAGLERLLPFLQHPNVNARRGVIQDLMDSEYFEAIPRIAACPVSAVFRLRGIRHLADAGVPIGAVSFQQVESGLDRVIVDHPRFLEPVHRYERTPHLEELIEELYSTDFGRCYLATQTIIDHYPDAGPALVASFEAAGHNDYGAHYHIVKLLGWLRFGEAREIVVGALHDRRPQFMKSRSAAAIALAELGDTRVPADLRSCLDSFIWELKYACLIALEHLEDPTGAQIALQDSDWVVRAKAERQCTAPLAH

SEQ ID NO: 4399 - protein, 149 aa, Triticum aestivum
  misc_feature (123)..(123): Xaa can be any naturally occurring amino acid
GDDDGPEWMMEVGGAGATGKGKGGALDKNKKRFSEEQIKSLESMFATQTKLEPRQKLQLARELGLQPRQVAIWFQNKRARWKSKQLERDYSALRDDYDALLCSYESLKKEKHTLLKQLEKLAXMLHEPRGKYSGNADAAGAGDARASAA

SEQ ID NO: 4400 - protein, 193 aa, Exophiala dermatitidis
MVVATIKCVVVGDGAVGKTCLLISYTTNKFPSEYVPTVFDNYAVTVMIGDEPYTLGLFDTAGQEDYDRLRPLSYPQTDVFLVCFSVTSPASFENVREKWFPEVHHHCPGVPCLIVGTQTDLRDDPQVREKLAKQKMQPVRKEDGERMAKELGAVKYVECSALTQYKLKDVFDEAIVAALEPPPKKSSKKCTIL

SEQ ID NO: 4401 - protein, 497 aa, Synechococcus elongatus PCC 7942
MPRGVAPAFAGRKPKGWAWASTAVPDFQGGFKRLINRFQGSKLWLACVPLAATIAVFWGVAANAQGSADPVPSAQFLVNNLWLMVATVLVIFMNAGFAMVETGLCRQKNAVNVLAKNLIVFTLAATAYWFIGYSLMYGSPVVDGFLYFGKGGPLGFFFDPTVSAETIKNDGLISSLDFLFQAAFAGTAATIVSGSVAERIKFVDFIIFSLILTAVIYPIAGSWQWNVGSGWLNKAGFIDFAGSTVVHSVGGWAALIGAITLGPRMGKFQDGRPGALPGHNLAIATLGALILWIGWYGFNGGSVLAFNTAVPYVAVTTTLGGAAGGISATITSWSTSGKPDLSMVINGILAGLVGVTAGCDGFGMGGSFIVGLIAGVLVVFSVYTFENLKIDDPVGACSVHLVCGIWGTLAVGLFNLEKGLFYGGGFGQLGSQILGIISYGVWTVVASVIIWNILKALLGLRVSPEEELQGLDIGEHGMEAYSGFAKDASNALSSISE

SEQ ID NO: 4402 - protein, 301 aa, Zea mays
FVSISQCTGLSLQHPWAFTFGLLGNVISFMTFLAPIPTFYRIYKSKSTEGFQSVPYVVALFSAMLWIFYALIKSNETFLITINAAGCVIETVYVVMYFVYATKKGRMFTAKIMLLLNVGAFGAILLLTLLLFKGDKRVVMLGWICVGFSVSVFVAPLSIMRRVIQTKSVEYMPFSLSLSLTLSAVVWFLYGLLIKDKYVALPNILGFTFGVVQMVLYVVYMNKTPLPVADGKAAGKLPSAADEHVVVNVTKLSPGRLPPVTQMAAVPTKSCATEAAAPATLPSRDVVDVLVNRHSPAVHVT

SEQ ID NO: 4403 - protein, 463 aa, Glycine max
MVLTSTATHPDEQDQSLNYTFASRYVREPIPKFKMPEKSIPKDAAYQIINDELMLDGAPRLNLASFVTTWMEPECDKLIMASLNKNYVDMDEYPVTTELQNRCVNIIANLFHAPISDDETAVGVGTVGSSEAIMLAGLAFKRKWQTKRKAEGKPYDKPNIVTGANVQVCWEKFARYFEVELKEVKLKEGYYVMDPAKAVEMVDENTICVAAILGSTMTGEFEDVKLLDELLTKKNNETGWDTPIHVDAASGGFIAPFLYPDLEWDFRLPLVKSINVSGHKYGLVYPGVGWVVWRSKDDLPDELVFHINYLGSDQPTFTLNFSKGSSQIIAQYYQLIRLGFEGYKNIMENCWENARVLKEGIERTGRFNIISKDIGVPLVAFSLKDSSQHTVFEIADHLRKFGWIVPAYTMPPDAQHIAVLRVVIREDFSRGLAERLAADIEKVAKLLDTLPSPLTTKAVHITA

SEQ ID NO: 4404 - protein, 422 aa, Mycoplasma penetrans HF-2
MLTLLKNCLLSNSRKVDILIKDSIIEKISDTSLDSKTYNNKKIDAVFDMKCNLVMPGFIDAFSRIKKQTSYTTSDYETESRACAYGGITTFVDIPSAPISEKYYDAIIDKVNEAKENSHVNFGFVVSVSNLSNIVELEKIQDYSVGTIININARTVSDRIIDSEKLSEALKASKLVLLHLSGFDIDLFFSVCDDKFTKLVFYDITNENDLEKILSYKKEGYNIRTATSVNYLLFNRDMIANEYKRKTITTEYKLGTMLNNLGLWNAVKDRKIDIITSDHTPVSLIEKFETEQKGLPNFETMFSILFDSCYYKRIPITILEDLLCKNPAKVCGFKNKGEIKEGYDADLVVVNTTKRWWIKNEDIVSSARWTPFNDYRISGRVMMTFVNGQLVYNFINQMSPIRNVKAGKFAEFDKNLASRSAS

SEQ ID NO: 4405 - protein, 243 aa, Zea mays
GILNNWRASFKPQDPVQASHFQSDGRVLYCLELTKNFNSGDTDTMEQEEVAVLLSRLRFIQSTLFHTDVTYLEFLDRVHTSELKLRAQSLWEVPHPWLNLLIPRSSIRRFATEVFGRILKDSNNGPILLYPVNKSKWDNKTSVVIPDEEIFYLVGFLSSAPSLSGHGSIAHAMSLNSQIVEFCEEADIGMKQYLAHYTTQEQWKTHFGARWETFERRKHRYDPLAILAPGQRIFPKASLPLSL

SEQ ID NO: 4406 - protein, 238 aa, Oryza sativa
MCGIKQEMSGESSGSPCSSASAERQHQTVWTAPPKRPAGRTKFRETRHPVFRGVRRRGNAGRWVCEVRVPGRRGCRLWLGTFDTAEGAARAHDAAMLAINAGGGGGGGACCLNFADSAWLLAVPRSYRTLADVRHAVAEAVEDFFRRRLADDALSATSSSSTTPSTPRTDDDEESAATDGDESSSPASDLAFELDVLSDMGWDLYYASLAQGMLMEPPSAALGDDGDAILADVPLWSY

SEQ ID NO: 4407 - protein, 483 aa, Mesorhizobium sp. BNC1
MSGRKYPNPSLFINGRSVTGRGAKEEMVIDPSNEEVLGSYRSAAPEDLQELLDSAAAGFEKWRRTSAYERCEILHKVAAALRENAQEIGSLLTLETGKILSESITEVRGAADHFDWSGEEGRRLYGYTVPARRAESRLRVELEPLGIVFALIPWNFPLGTSARKVAPALAAGCSVILRPPEEAPATVEAFVRCCQEAGLPPGVLNMVLGSPKDVVEPLMASFSVRAVTFTGSTRVGKILIQQAADTVKHLVLELGGHAPAIVLPDADPKKVGVAAARAKFRNAGQVCVSPSRFIVHEKIVEPFTQAMVEETRSIKLGSGFDAGAQMGPLTTARQRERVERLVEDARSKGARILAGGQRPSGFNRGFFFEPTVLGDVPDTALIFEEEPFGPVAPIIPVRSVQEAVEKANAVKWGLAGYLFTSSLADATKVSEAMQVGMVGLNTFAAAAPEAPFGGVKESGYGRECGLEGIREFVSSKLIHTDIG

SEQ ID NO: 4408 - protein, 288 aa, Zea mays
  misc_feature (15)..(15): Xaa can be any naturally occurring amino acid
  misc_feature (23)..(23): Xaa can be any naturally occurring amino acid
ILLNTTCCTPAYLVXEIINKKGXEGAKADIWSYSKILFMLLCAYLPFYNANLEEMYRTIRTTDGKYPQGIYPELRRIIPKLLTPNPNNRITIDKLGKHPWFKKGYRPAVMLAQPHGSSSLKDVQVAFSNADHKDSSSKVEQPADSSLKPASLNAFDIISHSRGFDLSSLFEVDQEQKASNSRFMTQKPASAIVSKLEQIAETERFMVKKQDGLVKLQGSKQGRKGQLAIDAEIFEVTPAFHVVEVKKSAGDTLEYEMFCSKGLRPSLSDICWSSRSEENMAPSVVQPS

SEQ ID NO: 4409 - protein, 176 aa, Triticum aestivum
MAPTVMSSAATAVAPFQGLKSTAGLPVSRRSSSAAGLGSVSNGGRIRCMQVWPIEGIKKFETLSYLPPLSTEALLKQVDYLIRSKWVPCLEFSKVGFIFREHNASPRYYDGRYWTMWKLPMFGCTDATQVINEVEEVKKEYPDAYVRIIGFDNMRQVQCVSFIAFKPPGCEESGKA

SEQ ID NO: 4410 - protein, 479 aa, Medicago truncatula
MLSEKQGEETMMSSLNETIELNEEREEEKGASPGSGFKNFLWHGGSVYDAWFSCASNQVAQVLLTLPYSFSQLGMISGIIFQVFYGLMGSWTAYLISILYVEYRSRKEKENVSFKNHVIQWFEVLEGLLGPYWKAIGLAFNCTFLLFGSVIQLIACASNIYYINDHLDKRTWTYIFGACCATTVFIPSFHNYRIWSFLGLGMTTYTAWYMTIAAIVHGQVENVVHSGPKKMVWYFTGATNILYTFGGHAVTVEIMHAMWKPQKFKAIYFFATLYVFTLTLPSAIAVYWAFGDQLLDHSNAFSLLPRNAWRDAGVILMLIHQFITFGFACTPLYFVWEKVIGMHDTKSIFLRALARLPVVIPIWFLAIIFPFFGPINSAVGALLVSFTVYVIPASAHMLTYRSASARQNAAEKLPKVIPSWTLMYVINAFVVIWVTIVGFGFGGWASMTNFIKQVDTFGLFAKCYQCPPKLPASNHTMHH

SEQ ID NO: 4411 - protein, 291 aa, Candida albicans SC5314
MIRSYIRNIILAILSPLLTTPPPLILPPPYEKIIQEITTVLSINNYDDGSLAPIILRLAWHCCATYDVTTNTGGSNGATMRFVPEITDEGNYGLDIARAALEPIKQRYPAISYADLWTLAGKVAIEYMGGPTIIWKSGRVDYTNDRCTPSNGLLPFADKDANHIRKTFTRLGYNDQQTVALIGAHGVGRCHKRFSGWEGKWTRTPKTFSNQFYVVLLNETWSQGEVPETGKTQYFNADKSLIMLNTDMELIRDKSYLHWVEIYAKDEPKFFHDFSSAFAKLLELGIKRETL

SEQ ID NO: 4412 - protein, 490 aa, Sinorhizobium meliloti 1021
MTISETLLVKLKDPSLAVDKGLIGAEWLDRSDSGKTFDVSNPATGEVIAILPDMSRSETARAIDAAHAAQRAWAEKTGKERAAVLRNLYDLVVANADDLATILTMEMGKPLTEAKGEILYGASYVEWFGEEAKRVYGDTIPGHQPDKRIIVLKQPIGVVAAITPWNFPNAMLARKLAPAAAAGCAVVSKPAAETPLSALALALLAERAGLPAGVFNVILSTDSAEVGKEMCANDKVRKLTFTGSTNVGKILMRQGADQIMKLGLELGGNAPFIVFDDADLDAAVEGAMVAKYRNNGQTCVCANRIFVQAGIYDAFAARLTAKVSEMTIGDGFEPDVDAGPLISEKALAKVEEHIRDAVTKGADLVLGGNARGGLFFEPTVLTGATMDMKIAGEETFGPVAPLFKFETENEVVSMANKTEFGLASYFYSKDVSKVFRVAEALEYGMVGINTGLISTEVAPFGGVKQSGQGREGSKYGIDDYVETKYLCLSI

SEQ ID NO: 4413 - protein, 321 aa, Aquifex aeolicus VF5
MRIGILTAGGDAPGMNAVIRAVVRSAEREGHEVIGIKRGYKGLIEGDFIKLTSRDVGGILDRGGTILLSSRDPRYKKLEYREKAYKNLNEQGIEALIILGGEGTLAGAKLTAEETGIPVIGVPCTIDNDVGGTEYCIGYDTALRNAVDAIDKIRDTASSHERIFIVEVMGRNRGFIAVEAGLATGAELILIPEERFPREQIPEEIEKAKKLGKLHFIIVLAEGYCRAKELEDFLLEKIGDKYGEIRSTVLGHIQRGGIPTHFDRIMGTKFGVVAYESLIAGERSGFVAYEKGKFYIEDFEKAQEYKPIDREAYKLNTRLAI

SEQ ID NO: 4414 - protein, 149 aa, Zea mays
  misc_feature (69)..(69): Xaa can be any naturally occurring amino acid
ASFPVSRKQSLDITSIASNGGRVSCMQVWPPINMKKYETLSYLPDLSDEQLLSEIEYLLKNGWVPCLEXFETEHGFVYRENHKSPGYYDGRYWTMWKLPMFGCTDATQVLAEGQEAKKAYPQAWVRIIGFDNVRQVQRIRFIGYKPEGY

SEQ ID NO: 4415 - protein, 218 aa, Ipomoea batatas
MGRGKVEIRRIEKSTNRRVTFWKRRNGLLKKAMEMGILCDAEVGLMIFSSTGKLHEFATTSIRSVIERYNKTQGDGLQSPLDPTLELKFWQIKVAILRKQLHNMQEDHRKAMGEVYGLSVKDLLNLENQLEMSMSSIIMKKEQLLIDQILELTHQQRSIVLQENFELFNKFQAYGTSDPNAVNGDTISPYDFTISEESQGHIHFQLPQNFSDLARALY

SEQ ID NO: 4416 - protein, 411 aa, Rickettsia sp. DnS28
DSEFAELKIRGKIFKLPILKASIGEDVIDISRVSAEADCFTYDPGFMSTASCQSTITYIDGDKGILRHRGYDIKDLAEKSDFLEVAYLLIYGKLPSGEQYNNFTKQVAHHSLVNERLHYLFQTFCSSSHPMAIMLAAVGSLSAFYPDLLNFKEADYELIAIRMIAKIPTIAAMSYKYSIGQPFIYPDNSLDFTENFLHMMFATPCTKYKVNPIIKNALNKIFILHADHEQNASTSTVRIAGSSGANPFACISTGIASLWGPAHGGANEAVINMLKEIGSSKYIPKYIAKAKDKNDPFRLMGFGHRVYKNYDPRAAVLKETCKEVLKELGQLDNNPLLQIAIELEAIALKDEYFIERKLYPNVDFYSGIIYKAMGIPSQMFTVLFAIARTIGWMAQWKEMHEDPEQKISRPR

SEQ ID NO: 4417 - protein, 283 aa, Schizosaccharomyces pombe
MSESQTESTTVTLTNGMVIPRIGFGAFMLKYNECYGLVTQALDSGYRHIDTAAVYGNEDICGKAIVDWCEKNNVKRTDIFLTSKLANCSDYYSTRAAIRSSLHHLGTYIDLFLIQSPAGGKKSRIASWKAMEEFVDSGDIRSVGVSNYGVKHLQELYASNPKFYPCVNQIELHPFLSQDDIVKYCQSHDIAIEAYSPLTHGIRLNDEKLVPIAKKLNISVAQLLIRWSLQKGYIPIIKSTKKEHMLSDLDVFNFTIPDDVVQELSSFDEHWHAGTTYDPTVCD

SEQ ID NO: 4418 - protein, 321 aa, Mesorhizobium loti MAFF303099
MMEMAMTLDPDALRALVIGRVAGGEPFEKGSVAAARAAYNASFPTQQGEHEPVAASQERQTDGPNGPVKIRVHRGIGAPRAGARAVLYLHGGGWVIGNLSSHDEICRWLANLSNAVVVYPDYRLAPEHKFPAGLEDCTAALRFMAENAGELGIDPARISVAGDSAGGNLAAVLALLARDRLVPRLAAQVLIYPNTDARQTADSYRRFGDGFGLTAATMAWFRDHYVRTPNDITDWRVSPLLASSLAGAAPAFVVIAGHDILADEGTAYAERLRVAGVPLVLRPWPGQIHGFVSMGRHILAARQAVSEAAAWLQLQTRVQAD

SEQ ID NO: 4419 - protein, 411 aa, Rickettsia sp. RpA4
DSEFAELKIRGKIFKLPILKASIGEDVIDISRVSAEADCFTYDPGFMSTASCQSTITYIDGDKGILRHRGYDIKDLAEKSDFLEVAYLLIYGELPSGEQYNNFTKQVAHHSLVNERLHYLFQTFCSSSHPMAIMLAAVGSLSAFYPDLLNFKEADYELIAIRMIAKIPTIAAMSYKYSIGQPFIYPDNSLDFTENFLHMMFATPCTKYKVNPIIKNALNKIFILHADHEQNASTSTVRIAGSSGANPFACISTGIASLWGPAHGGANEAVINMLKEIGSSEYIPKYIAKAKDKNDPFRLMGFGHRVYKNYDPRAAVLKETCKEVLKELGQLDNNPLLQIAIELEAIALKDEYFIERKLYPNVDFYSGIIYKAMGIPSQMFTVLFAIARTIGWMAQWKEMHEDPEQKISRPR

SEQ ID NO: 4420 - protein, 271 aa, Glycine max
MFSKLQPQHQQQHQPFQFSRECQTSEDDDSRSSGGPNTAVAQKSVLGGGGCSDGATIEVVRRPRGRPPGSKNRPKPPLIITREPEPAMSPFILEIPGGSDVVEALARFSRRKNTGLCVLTGSGTVANVTLRQPSFSPDGATVATVTFHGRFDILSMSATFLHHASPAAIPNAFAVSLSGPQGQIVGGFVAGRLLAAGTVFVIAASFNNPSYHRLSSEEEAQNNSGGGAGDAQSPPVSGGGVESGHVPAESFMYSCHLPSDVIWAPTPRPPF

SEQ ID NO: 4421 - protein, 371 aa, Bacillus cereus ATCC 14579
MTVIRGLEGVVATTSSVSSIIDDTLTYVGYNIDDLAENATFEEVVYLLWHRKLPNEKELAEFNEIVSEYYKVPGEILTYLKQVDLKIAHPMSVLRTAISMLSLYDESAEIMDEKSNYLKAVKLQAQVGTLVAAYARIRKGLDIVEPRKDLSLAANFLYMLNDREPNEVEIEAFDKALVLHADHELNASTFTARVCVATLSDVYSGITAAIGALKGPLHGGANENVMKMLTEIGEEENVESYIHNALQNKVKIMGFGHRVYEQGDPRAKHLREMSKRLCVLLGEEKWYNMSIKIEDIVTKEKGLPPNVDFYSASVYHCLGIDHDLFTPIFAISRMSGWLAHILEQYENNRLIRPRADYNGPTHQVYVPIAQR

SEQ ID NO: 4422 - protein, 502 aa, Corynebacterium efficiens YS-314
MTAVIPAALQRREQLNLPYTHVDDFYINGAWVTATGEKRNPVVDPATGQEWGSVPEAGQVELDHAVGAAREALPGWGSLTAADRAEYLVRIAEEIEKRAEVLALTNTRENGSPISETRGAAANAAGIFRYFATLAPFLDDPDIRPFPAGGAESLVDKDPIGVCALIAPWNFPINLVVIKLAPALLAGCSVVIKPASPTPLSIRFIIEAVEAAGVPAGVINLLTGSGRFGDAMVRHPGVNKVAFTGSTPVGRKIASACGELLRPVTLELGGKSSAIVLPDADMSVLSARLIRSCMRNTGQTCYISTRIIAPASRYEEVVQVVADTIAAGRQGDPLDEDTIFGPVATASQYATVMEYIESGHAEGARAVTGGAATAGLTGGLENGVFIEPTVFADVTPDMRIAAEEIFGPVISILRYDDSAGVEEAIAIANNTEFGLGGLVFGADEDRALDVARRVDSGSVGINFFGSNHSAPFGGRHDSGMGVEYGIEGLSAYLSYKSIHRMV

SEQ ID NO: 4423 - protein, 193 aa, Triticum aestivum
  misc_feature (117)..(117): Xaa can be any naturally occurring amino acid
MAPTVMASSATSVAPFQGLKSTAGLPVSRRSNGASLGSVSNGGRIRCMQVWPIEGIKKFETLSYLPPLSTEALLKQVDYLIRSKWVPCLRFKQVGSSSREHNASLGYYDGRYWDMWXLPISGAPTHTSVNEVEESRRIPDAYSASSDRHIASACVSSCLNHGLKIRKANSYHTGIINAFSLHPKCLVPLLLMS

SEQ ID NO: 4424 - protein, 229 aa, Oryza sativa (japonica cultivar-group)
MARPLYPMMLESPQLRWAFVRKVYAILSIQMLLTIAVASVVVFVRPVALFFVSTPAGFALYIFLIILPFIVLCPLYYYYQRHPVNLLLLALFTAAISFAVGLTCAFTKGEVILESAILTAAVVVSLTAYTFWAARRGHDFSFLGPFLFAAVMILMVFALIQVFFPLGRVSLMIYGGLAALVFCGYIVYDTDNLIKRYSYDEYVWAAVALYLDVINLFLSLLTLFRASDS

SEQ ID NO: 4425 - protein, 251 aa, Arabidopsis lyrata
MGRGRVQLKRIENKINRQVTFSKRRAGLLKKAHEISVLCDAEVALVVFSHKGKLFEYSTDSCMEKILERYERYSYAERQLIAPESDVNTNWSMEYNRLKAKIELLERNQRHYLGEDLNAMSPKELQNLEQQLDTALKNIRTRKNQLMYESINELQRKEKAIQEQNSMLSKQIKEREKILRAQQEQWDQQNHGHNMPPPPPPQQHQIQHPYMLSHQPSPFLNMGGLYQEEDPMAMRRNELELTLEPVYNCNL

SEQ ID NO: 4426 - protein, 218 aa, Oryza sativa
MEVEEAAYRTVWSEPPKRPAGRTKFRETRHPVYRGVRRRGGRPGAAGRWVCEVRVPGARGSRLWLGTFATAEAAARAHDAAALALRGRAACLNFADFAWRMPPVPASAALAGARGVRDPVAVAVEAFQRQSAAPSSPAETFANDGDEEEANKDVLPVAAAEVFDAGAFELDDGFRFGGMDAGSYYASLAQGLLVEPPAAGAWWEDGELAGSDMPLWSY

SEQ ID NO: 4427 - protein, 444 aa, Agrobacterium tumefaciens str. C58
MDNPSRSNSTSLDSYWMPFTANRQFKANPRLLTSAEGMYYTSNDGRQVLDGTAGLWCVNAGHGRQQIASAVKHQLSTLDYAPSFQMGHPVAFEFAERLAEIAPGPEGGKLDRVFYTGSGSESVDTALKIAIAYQRAIGQGTRSRLIGRERGYHGVGFGGISVGGLVNNRRVFPQIPADHLRHTHDLARNSFVKGQPEHGAELADDLERLVALHGAETIAACIVEPVAGSTGVLVPPKGYLERLRAICDKHGILLIFDEVITGFGRMGSSFASNYFGVTPDIVTTAKGLTNGAIPMGAVFTSRKVHDALMHGPENQIELFHGYTYSGHPVACAAGIATLDIYRDEGLFTRAAELQDAWHDAIHSLKSAANVIDIRTIGFIAGIELQSREGAVGARAYDVFVDCFERGLLIRVTGDIIALSPPLIAEKSHFDDIVSILGDALNRAV

SEQ ID NO: 4428 - protein, 330 aa, Candida albicans SC5314
MSNNIEDDSISVDNIVDRLLEVRGSRPGKQVTLTENEIRFLCTKAREIFIQQPILLELEAPIKICGDIHGQYYDLLRLFEYGGFPPEANYLFLGDYVDRGKQSLETICLLLAYKIKYPENFFILRGNHECASINRIYGFYDECKRRFNIKLWKTFTDCFNCLPIAAIIDEKIFTMHGGLSPDLNSMEQIRRVMRPTDIPDVGLLCDLLWSDPDKDITGWSENDRGVSFTFGPDVVSRFLQKHDMDLICRAHQVVEDGYEFFSKRQLVTLFSAPNYCGEFDNAGAMMSVDESLLCSFQILKPADKKPRYAPANVANNRPGANQRKPKKAVK

SEQ ID NO: 4429 - protein, 204 aa, Arabidopsis thaliana
MSQLGDLLRESEDGTRSERTMMMSLLEEDQINGGDRTMSKWTTLKQRLRFDWVGCCGKPLTLRLRQAETPIVVDDDDDEEESQNQVVDFSDPGTGTELDCLTRGSTRNLAEALAEERLAHVTEEETAVTKVPLMRLLAESDGCDSTTTWLGNDPLCCVCMGREKGAAFIPCGHTYCRVCSREIWMNRGTCPLCNRSIFDVLDLY

SEQ ID NO: 4430 - protein, 197 aa, Bacillus subtilis
HNPNIIWHPAAISKSDRQSLNGHKSCVLWFTGLSGSGKSVLANAVDEKLYRKGIQSYVLDGDNIRHGLNKDLGFQTGDRIENIRRIGEVAKLFVDSGQMILTAFISPFREDRDMVRALFPKGEFFEIYVKCPLHVCEQRDPKGLYKKARNGEIKHFTGIDSPYEAPLSPDFIIESDQTSISDGADLIINALQNRGII

SEQ ID NO: 4431 - protein, 205 aa, Auxenochlorella protothecoides
ARPPDDGTSEEEKTTLQRHIEFWDPKGTGVIWPRDVYAGFRRLGFSRAFSTAITPIISGGLSFNTQTSKIPDPRLPVYVERIHLGIHTSDTGSYDAKGHFDSKRFDEVLAQYDIGNKGGLTQEEVKALTRGQREPKDPKGWTGSWIEWNISFHLAARESPDGKLPLYKEDLLGIMDGTLFPKISKEVAEGTWVRHGHLSPGLRRP

SEQ ID NO: 4432 - protein, 391 aa, Glycine max
MSLTLQTPPSTTLSSASPIHRTITRYTTFSFSLRPPTTLHFNPHRSLPLIRASNSSINAASTTELDAVSAFSEIVPDTVVFRCISKIFLPILLGICGLPDTIFRNAVEMALADSECYGLENPNARLSCFVNKAFANIGSDMAKLVPGRVSTEVDARLAYDTHAIIRKVHDLLKLYNDSNVPPQRLLFKIPSTWQGIEAARLLESEGIQTHLTFVYSFAQAAAAAQAGASVIQIFVGRIRDWARNHSGDTEIESAQLRGEDPGLALVTKAYNYIHKYGHKSKLMAAAVRNKQDLFSLLGVDYIIAPLKVLQSLKESVASPDEKYSFVRRLSPQSAAKYTFSDEELVRWDEDSLSKAMGPAAVQLLAAGLDGHADQAKRVEELFGKIWPPPNV

SEQ ID NO: 4433 - protein, 501 aa, Magnaporthe grisea 70-15
MASAPEKDRHTFFAGKVQPSPDSPGTFTTVNPATAQPIATIHTSSRASVDAAVDAARAAFPAWSSTPAPERAQILQRAVAILRERNDALARVETLDTGKAFSETQAVDVVTGADVLAYYANLVASDGLNGESFRLRPGAWVYSSKEPLGACAAIGAWNYPIQIALWKSAPCLAAGNTLVYKPSEYTPLHAQYLADIYAEAGVPPGVFNVVYGAGDVGAQLSSHPKIAKVSFTGQVSTGRKVAGTAAGGLKSVTMELGGKSALVVLPDADVSQAADGAMMANFYSSGQVCTNGTRVFVPRALKEEFERAVLEKIVHVRAGDLFDANTNFGPLSSKVHYEKVVSYVRHGIEQDKARLLCGGIGQPRGVPKELGKGFWIEPTVFTDCTDDMRIVKEEIFGPVMSILTYDTLEEVVQRANATELGLAAGVFGKDLNQCHQVIAQLEAGITWINTWGESPAEMAVGGWKQSGIGVENGHKGLDAWVQNKSTLVEMGGAVPTVFAKI

SEQ ID NO: 4434 - protein, 238 aa, Oryza sativa (japonica cultivar-group)
MVCSNFHQQRKKYTEGRRHQPTGGEEGGGGSLLSVLANEDEQWRSWSHTREEEEPSAPGHTTLLDAGDDGWVLGPNLSVFTSLPDMWAIGQMFPIIPIQCLGERPAIDGVLSDLTSDSDGKVDHFISGRHSLPLHELPVHGTRGYYLGGTYQEALGGLHNLFGGPSVHEHEVFKQRTDGATAAALAKAFGAMPYLSFYPEAAAMARGESSGMSSDSEVSAAGVAEDDDEWEFMRGLIV

SEQ ID NO: 4435 - protein, 370 aa, Exiguobacterium sp. 255-15
MHVEKRDYYEVLGVARDASAAEIKRAYRKLARTYHPDVNKEADADQKFKELSEAYEVLSDDNQRARYDQFGHQDPSQGGGGFGGAEGFGDIFDMFFGGGRRQDPNAPRKGQDLQYVEEIDFMEAFSGVEKVITIPVEEDCGTCHGSGAKPGTHPETCKRCGGSGHINVEQNTMFGRVVNQTTCSTCHGRGQIVKEPCETCRGAGRVRKNKDVRVKIPAGIDNGQQIRLAGKGEAGVNGGPFGDLYVVVRVREHELFERVDDHIVMDMPLTFAQATLGDEIEVPTVHGKVSLKIPAGTQTGSRFRLRGKGMPNVRSGHHGDQYVNVVIITPKNLTDRQKELLREFNEISDEKGVEEQHEGVFSRIKTFFTG

SEQ ID NO: 4436 - protein, 309 aa, Glycine max
MAPGSSVFKEVLESHLMSSDYEMGKAKSEAKSNSTSTKSSIGLSGKSGISSNNGVYELLGCPVCKNLMYPPIHQCPNGHTLCSHCKVEVHNICPSCHHDLGNIRCLALEKVAESLELPCRYQSLGCHDIFPYYTKLKHEQNCGFRPYNCPYAGSECSVMGDIPTLVAHLKDDHKVDMHDGCTFNHRYVKANPHEVENATWMLTVFNSFGRHFCLHFEAFQLGSAPVYMAFLRFMGDDNEAKKFSYSLEVGANGRKLIWQGIPRSIRDSHRKVRDSQDGLIIQRNLALYFSGGERQELKLRITGRIWREE

SEQ ID NO: 4437 - protein, 319 aa, Bacillus cereus ATCC 14579
MKRIGVLTSGGDSPGMNAAIRAVVRKAIFHDIEVYGIYHGYAGLISGHIEKLELGSVGDIIPRGGTKLYTARCLEFKDPEVRLKGIEQLKKHGIEGLVVIGGDGSYQGAKKLTEQGFPCVGVPGTIDNDIPGTDFTIGFDTALNTVIDAIDKIRDTATSHERTYVIEVMGRHAGDIALWAGLADGAETILIPEEEYDMDDVIARLKRGSERGKKHSIIVVAEGVGSAIDIGKHIEEATNFDTRVTVLGHVQRGGSPSAQDRVLASRLGARAVELLIAGKGGRCVGIQDNKLVDHDIIEALAQKHTIDKDMYQLSKELSI

SEQ ID NO: 4438 - protein, 412 aa, Bacillus cereus ATCC 14579
MSTLREEALHMHKVHQGKLETVSKVKVENAKDLSLAYSPGVAEPCKEIYDDKSKVYEYTMKGNMVAVVTDGTAVLGLGNIGPEASLPVMEGKAVLFKSFAGVDAFPIALNTNDVDKIVETVKLMEPTFGGVNLEDIAAPNCFIIEERLKKETNIPIFHDDQHGTAIVTVAGLVNALKLVGKKMSDIKVVANGAGAAGIAIIKLLYRYGVRDIIMCDRKGAIYDGRPTGMNPVKDEVAKYTNKNRIEGSLADVVQGADVFIGVSAEGALTEEMVRTMNDDAIIFAMANPVPEIMPELAKAAGAAVVGTGRSDFPNQVNNVLAFPGIFRGALDVHATQINEEMKMAAVQAIAELVAEDELNADYIIPAPFDARVAPQVAAYVAKAAMETGVARRQVDPNEIAEKTKQLALIGKE

SEQ ID NO: 4439 - protein, 286 aa, Pseudomonas aeruginosa UCBPP-PA14
MSDYQETLYQGYGQRFSIDNMLHEVRTEHQHLVIFENARMGRVMALDGVIQTTEADEFIYHEMLTHVPILAHGAARRVLIIGGGDGGMLREVAKHKSVERITMVEIDGTVVDMCKEFLPNHSQGAFDDPRLNLVIDDGMRFVATTEERFDVIISDSTDPIGPGEVLFSENFYQACRRCLNEGGILVTQNGTPFMQLEEVRTTAARTDGLFADWHFYQAAVPTYIGGAMTFAWGSTREGLRRLPLETLRQRFRDSGIATRYYNADIHLGAFALPQYVLQAIGKQDND

SEQ ID NO: 4440 - protein, 254 aa, Zea mays
MAAKCYPTVSDEYLAAVAKARRKLRGLIAEKNCAPLMLRLAWHSAGTFDVATKTGGPFGTMKCPAELAHGANAGLDIAVRLLKPIKEQFPILSYADFYQLAGVVAVEVTGGPEVPFHPGRQDKPEPPPEGRLPDATQGSDHLRQVFSTQMGLSDQDIVALSGGHTLGRCHKERSGFEGAWTANPLIFDNSYFTELLSGEKEGLLQLPTDKTLLTDPAFRPLVDKYAADEDAFFADYAEAHLKLSELGFGEAGCC

SEQ ID NO: 4441 - protein, 144 aa, Nitrosomonas europaea ATCC 19718
MAITRYEPWGLLTQLQRELERARDDMATEGASAIAEWAPAVDIKEESDKFIVHADLPGVKPEAIDVTTENGVLTIKGEKQTEARTEKEGYKRVERTHGSFYRRFSLPDTADLGAISAVTKDGVLVVTIPKREAVQPKKVSVTAQ

SEQ ID NO: 4442 - protein, 138 aa, Pyrococcus horikoshii OT3
MGDKTKVQVSKLKPGRYIIIDDEPCRIVNITVSSPGKHGSAKARIEAVGIFDGKVRSIVKPTSAEVDVPIIDKKTAQVIAITPDTVQIMDMETYETFEVPIDTGVADEIRDQLKEGINVEYWETLGRIKIMRIKGEGE

SEQ ID NO: 4443 - protein, 152 aa, Brassica napus
MGGGVRGTERWFNVTKGFGFISPEDGREGLFVHPSAIKSDRYRPLNENDTVGFEVITGDEGRTKAGDLTPPGGGALAGGRRPADGGGDRGGGGGEGGGGDGGGGAAGGEAGGAGGEAAGGAGAGAGAGGGGCYKCGEEAAAATEEAAVAAVS

SEQ ID NO: 4444 - protein, 278 aa, Streptomyces avermitilis MA-4680
MSTKVPPITLNNGVEMPQLGFGVWQVPDDEAERAVATALEAGYRSIDTAAIYGNEEGTGKAIATAGIPRADLFVTTKLWNSDQGYDSTLRAFDVSLEKLGLDYIDLYLIHWPLPTRGQFVETYKAFEKIYADGRAKAIGVSNFLPEHLRTLIDATSVIPAVNQIELHPHLQQHAAREFHAEHGIATEAWSPLGSGKGLLEVPAIVAIARKHERTPAQVVLRWHIQLGNIVIPKSVTPSRIKENIEVFDFSLDDEDIAAISALNEDRRLGPDPATFDMG

SEQ ID NO: 4445 - protein, 508 aa, Zea mays
  misc_feature (180)..(180): Xaa can be any naturally occurring amino acid
  misc_feature (286)..(286): Xaa can be any naturally occurring amino acid
MKTSVVVAALAAVLFAAQSYASLAGASGPRVIIVGAGMSGISAGKTLWEAGVRDLLILEATGRVGGRMHKHNFGGINVEIGANWVEGLGGDQLNPIWPLVNSTLKLRNFYSDFDSVVGNVYKENGGGLYDEEYVQKRMDRAYEVEELGANLTKKMHPSGRDDISVLAMQRLFNHQPNGPXTTPVDMALDYFIYDYEFAEPPRVTSLQNTQPTPTNADFGEDNYFVADQRGYESIIHSIGSSYLSTDGNGKLKDRRILLNKVVRQITYNKQGVVVKTEDGSSYRADXYVVVSTSLGVLQTDLIQFKPQLPFWKIAAIYSFDMGVYTKIFLKFPERFWPVGEGKQFFMYASSRRGYYALWQSFEREYPGANVLLATVTDDESRRIERQSDDQTKAEVAEVLRDMFPAADVPGPDQIDVYVPRWWSDRFFKGSYSNWPVGVSRYEYDQLRAPVGRVYFTGEHTSERYNGYVHGAYLAGIDSANILINYIFKNEEYKVRGKYDVDDLIAQAR

SEQ ID NO: 4446 - protein, 297 aa, Yersinia pestis KIM
MRYAFPTQQLKDNVMQTVKLNNGIAMPLLGFGVFQMTNTAECERAVIDAIETGYRLIDTAASYQNETQVGNALKLSGIARDELFITTKLWLQDTYYEGAKAQFERSLNRLQLDYVDLYLIHQPYGDVHGAWRAMEELHQAGKIRAIGVSNFHPDRLADLMAFNKIIPAVNQIEVNPFNQQLHAVPWMQSRGIQPEAWAPFAEGRNGLFQNPVLTAIGEKYGKSVGQVVLRWIFQRGIVSLAKSVRKGRMEENINILDFELSAEDMLQIAALDTATSAFFSHRDPAMVEWLTGRKLDV

SEQ ID NO: 4447 - protein, 250 aa, Zea mays
MAKTYPVVSAEYQEAVEKARQKLRALIAEKNCSPLMLRLAWHSAGTFDVSSKTGGPFGTMKKPAEQAHAANAGLDIAVRMLEPIKEEIPTISYADLYQLAGVVAVEVSGGPVIPFHPGREDKPQPPPEGRLPDATKGSDHLRQVFGKQMGLSDQDIVALSGGHTLGRCHKERSGFEGPWTRNPLKFDNSYFTELLSGDKEGLLQLPSDKTLLTDPVFRPLVEKYAADEKAFFEDYKEAHLRLSELGYAEA

SEQ ID NO: 4448 - protein, 456 aa, Securigera parviflora
MCGILAVLGCSDDSQAKRVRVLELSRRLKHRGPDWSGLHQHGDCFLAHQRLAIVDPASGDQPLFNEDQSIIVTVNGEIYNHEELRKQMPNHKFRTGSDCDVIAHLYEEHGENFVDMLDGIFSFGLLDTRDNSFIVARDAIGVTSLYIGWGLDGSVWIASELKGLNDDCEHFETFPPGHLYSSKEREFRRWYNPPWFSESIPSAPYDPLALRQAFEKAVVKRLMTDVPFGVLLSGGLDSSLVASITARHLADTKAAKQWGAKLHSFCVGLEGSPDLKAGKEVADYLGTVHHEFQYTVQDGIDALEDVIYHIETYDVTTIRASTPMFLMSRKIKSLGVKWVISGEGSDEIFGGYLYFHKAPNKEELHKETCRKIKALHKYDCLRANKSTFAWGLEARVPFLDKEFINVAMNIDPENKMIKLDEGRIEKWILRKAFDDEENPYLPKHILYRQKEQFSDG

SEQ ID NO: 4449 - protein, 300 aa, Magnaporthe grisea 70-15
MASKPGDFDAVRKDIVSLLDQPEYDDGSAGPVLVRLAWHSAGTYDKSTDTGGSNGAGMRYEAEGGDPANAGLQNARQFLEPVKARHPWITYADLRTLAGVVAVRAMGGPEIPWRAGRTDFADDSRVPPRGRLPDATQGAAHVRDIFYRMGFDDREIVALSGAHSLGRCHPANSGFEGKWVNNPTRFSNQYFRLLLSEDWREKTVAGTGLKQFVAVDEVTGDELMMLPTDLSLTSDPVFARWVKVYRDDQDLFFADFAKVFDKLMELGIKRDAEGKVINKENVEGGYVSAPKKQGKIASKL

SEQ ID NO: 4450 - protein, 443 aa, Zea mays
MEDAVAADGKSVLQGRYELGRVLGHGNFGRVHAARDLRTGRSVAVKVVAKDKLERAGMAEQIKREIAVMKMVSHPNIVELHEVMATRSKIYLALELVRGGELFSRIARAGRVREDVARCYFRQLVAAVDFCHGRGVFHRDLKLENLLLDEVGNLKVADFGLSALAGHARSDGLLHTACGTPSYVAPEVLGGKGYDGAKADLWSCGVILYVLLVGSLPFHEDNLMVMYRKMQRGEFLCPPWVSADARKLIGELLDPDPSTRITVARLVETPWYRKPLPVLPPLNLKEPTPDARRATSDKEEPEVLNAFHLISFSEGFDLSPLFDQGRGGGVGRSSAGGIRFVTREAASSVVSRLESLVTGRGANMRVTKSGSRGVRLEAVSRGRSGARLAVAAEIFSVAPSVLLVDVKKDGGDTMEYRSFCSEELRPALKDIVWASSQDTPGAA

SEQ ID NO: 4451 - protein, 202 aa, Saccharomyces pastorianus
MATNITWHPNLTYDERKELRKQDGCTVWLTGLSASGKSTIACALEQLLLQKNLSAYRLDGDNIRFGLNKDLGFSEKDRNENIRRISEVSKLFADSCAVSITSFISPYRVDRDRARDLHKEAGLKFIEIFVDVPLEVAEQRDPKGLYKKAREGVIKEFTGISAPYEAPKAPELHLRTDQKTVEECAAIIYEYLVNEKIIRKHL

SEQ ID NO: 4452 - protein, 312 aa, Saccharomyces cerevisiae
MPATLKNSSATLKLNTGASIPVLGFGTWRSVDNNGYHSVIAALKAGYRHIDAAAIYLNEEEVGRAIKDSGVPREEIFITTKLWGTEQRDPEAALNKSLKRLGLDYVDLYLMHWPVPLKTDRVTDGNVLCIPTLEDGTVDIDTKEWNFIKTWELMQELPKTGKTKAVGVSNFSINNIKELLESPNNKVVPATNQIEIHPLLPQDELIAFCKEKGIVVEAYSPFGSANAPLLKEQAIIDMAKKHGVEPAQLIISWSIQRGYVVLAKSVNPERIVSNFKIFTLPEDDFKTISNLSKVHGTKRVVDMKWGSFPIFQ

SEQ ID NO: 4453 - protein, 421 aa, Novosphingobium aromaticivorans DSM 12444
MTADGKTVEMPVKSGTIGPDVIDIRKLYGQTGMFTYDPGFTSTASCDSALTYIDGDEGVLLHRGYPIGQLAEHSSFMEVSYLLLNGELPSQQELADFTRTITRHTMLHEQLATFYRGFRRDAHPMAIMCGVVGALSAFYHDSTDISDPTHRKISSHRLIAKMPTIAAMAYKYSVGQPFVYPDNKLSYTGNFLKMTFGVPAEEYEVIPAVEKAMDRIFILHADHEQNASTSTVRLAGSSGANPFACIAAGIACLWGPAHGGANEAALNMLKEIGTPDKIPHYIERAKDKNDPFRLMGFGHRVYKNYDPRATVMQQTVREVFDALKVNDPLFETALRLEEIALNDPYFVEKKLFPNVDFYSGIILSAIGFPTTMFTVLFALARTVGWVAQWNEMISDPGQKIGRPRQLYTGPTQRDYVPLASR

SEQ ID NO: 4454 - protein, 470 aa, Sulfolobus solfataricus P2
MMSLEVIEVRSPSNLKVIGTVKRMSKDEVRGEIEEAYKGFEIISRMPLYKRTAILRKISEILEREQERLARLLAMEAGKPISDSRVEVLRASRLFRQAAEEVGIVLEGKNYRVDAYEYPPGNENRIVLSTREPIGVVTAILPFNFPINSFAHKVAPALAVGNSVVVKPSINTPLAAVEMKKILVEAGLPDSAVRVVTGYSSEIGDEIITHPLVGLITLTGSTQTGLKIASKAISLGKRIIMELGGSDPIIILEDANIERASSIAVRARFEYAGQNCNAGKRIIVRQEVYDKFVKAFNEKAKALKVGEPLDETTDVGPVINKESVENLNSVLEDAKVKGGRVEILNRGPESGSFFPLTMVTNPSLDMLVLKSEVFGPIVPIVSVKSDEEAIRIANSTEYGLQSAIFTNDVNRALKLSRELKFGAVIINDSTRLRWDSLPFGGFKKTGIGREGVRETMLEMTENKLIAITLL

SEQ ID NO: 4455 - protein, 84 aa, Glycine max
MEYQRQRSHQSQGRSRWVPASYFSVESLLLLSCLTASLLILPLLLPPLPPPPFLLLLLPIAILLVLIISAFMPSNVRDITHTYM

SEQ ID NO: 4456 - protein, 204 aa, Xylella fastidiosa Temecula1
MHLISNDFKNGQPIPVECAAGQTDGFAPNRNPHLAWDNVPENTRSFALLCIDPDVPSIPETIGRTDMEIPVTQPRIDFVHWVMTDISTDLRMIAHGSCSDGFVVGGKTMPPGPAGTHQGLNDYTKFFANTPEMAGDYYGYDGPYPPFNDLRIHRYLFRLFALDLEHLPLHKRFDGPTLLRTIQGHVLTEATLYGTYTLNPKAQK

SEQ ID NO: 4457 - protein, 367 aa, Malus x domestica
MGKGGQSCNGVVRDAKPVEQENMAVWLVDVNTIKILPFKLPAIGPNDVRIRIKAVVICGSDVHYLKTMKCADFEVKEPMVIGHECAGIVDTVGSEVKHLVPGDRVGEPGISCARCQQCKGGRYNLCPDMKFFATPPVHGSLANQIVHPADLCFKLPENVSLEEGAMCEPLSVGVHACRRANVGPETSVLIIGAGPIGLVSVLAARAFGAPRIVIVDMDDKRLAMAKSLGADEAVKVSTKMEDLDDRVAEIKKAMISEVDVTFDCVGFNKTMSTGLNATRPGGKVCLVGMGHGVMTVPLTPAAAREVDVVGVFRYQNTWPLCLEFLRSGKIDVKPLITHRFGFTEKEVEEAFATSARGGNAIKVMFKL

SEQ ID NO: 4458 - protein, 358 aa, Medicago sativa subsp. x varia
MENGKVHVVKPQSEARLAILELAHIMSVPTSLVAVLKMKVPEAIWQGGKNTPLSASQILSIVRPNGGGDAENLQRILRLLTTYAIFAEDLSSNGKRKYSLTDIGKALVPDDDGLSYATYVLQHYQDQYLRAWPLVGDAVEDASVEPFEKLHGEGAYAYCMKRPDEMSLFYASMSGLSMPHMNEMLEKYDGFKGVETLVDVGGNSGVILNMIMNKYPNILKGINFDLPDMISSAPQLPGITHVGGDALESVPAGDAIFTKWTMLTWTDEECKKVLQNCYKALPVNGKLIVCEPVSPELTDESQRTRALLSGDIFIMTMYRTKGKHRTEEQFKQLGISTGFLRFRAFHIDPYFPVLEFQK

SEQ ID NO: 4459 - protein, 493 aa, Actinobacillus pleuropneumoniae serovar 1 str. 4074
MKDLNVFDKNYGLLINGKWTQGSGNDLLPSYNPANGEVLAHFVDATDADVDAAVKAAQEAFKSWRKTTVAERAAILNKIADVIDENSELFALQETLDNGKPIRETRAADIPLASDHFRYFASAIRAGEGSLNQINQEELSLVLREPIGVVGQIIPWNFPFLMAAWKIAPALAAGCTVVIHPSSTTSLSLLSFAQKINHLLPKGVLNVITGKGSKSGEYMLHHKGFNKLAFTGSTEIGRHIAISAAELLIPATLELAAKSANIFFDDMPFDKALEGAQKGILFNQGQVCCAGSRIFVQEGIYDKFVAALAEEFKKVKVGLPWEDDTQMGAQVNAGQLNTILKYVKIGEEEGCRIITGGRKVLSDNLACGEFVEPTLIESKDNNSRIAQEEIFGPVATVIKFKTEEDVIRMANDSEYGLGGGVWTKDINRALRVSQAIETGRVWVNCYNILPAGAPFGGYKSSGIGRETHQMMLDAYTQVKNIYISTREEREGMY

SEQ ID NO: 4460 - protein, 205 aa, Ralstonia solanacearum GMI1000
MHASIPVSPSLPDTQRFALAPSEAFTIWMTGLSGAGKSTLAQEMQSRLRQHGRACYVLDGDVLRDGLSSDLGFSREDRCEQVRRVAHVARILNEAGVVAIVALVSPYRADRQLAHEIIGAGAMHEVWICTPLQVCQARDPKGLYQRASAGLLPAMTGVAAPYEPPPESTLRIDTSRHDVSTCASRILDAVGIYPCMNGSQHDVRR

SEQ ID NO: 4461 - protein, 263 aa, Escherichia coli
DRVNIEPGVPCGHCRYCLEGKYNICPDVDFMATQPNYRGALTHYLCHPESFTYKLPDNMDTMEGALVEPAAVGMHAAMLADVKPGKKIIILGAGCIGLMTLQACKCLGATEIAVVDVLEKRLAMAEQLGATVVINGAKEDTIARCQQFTEDMGADIVFETAGSAVTVKQAPYLVMRGGKIMIVGTVPGDSAINFLKINREVTIQTVFRYANRYPVTIEAISSGRFDVKSMVTHIYDYRDVQQAFEESVNNKRDIIKGVIKISD

SEQ ID NO: 4462 - protein, 182 aa, Brassica napus
  misc_feature (11)..(11): Xaa can be any naturally occurring amino acid
  misc_feature (171)..(171): Xaa can be any naturally occurring amino acid
MAETLKEDSIXFREVWNDNLLEEFALIREIVDKFTYVAMDTEFPGVVLKPVETFKHNNDLNYRTLKENVDLLKLIQVGLTFSDEDGNLPTCGADDKFCVWQFNFREFNIGEDIYASESIELLRQCGIDFKKNLERGIDVARFGELMMSSGIVLNDSISWGTFHGGYDFGYXLVKLLTCKELP

SEQ ID NO: 4463 - protein, 122 aa, Buchnera aphidicola str. Sg (Schizaphis graminum)
MSITKEQILEAVSEMSVMNVVELISAMEKKFGVSANMSVNTNNNSEKSTIEEKTEFDIFLKSIGPNKVSVIKSVRSATGLGLKEAKDLVESAPTVLKENMSKNDAESLKKTLEDAGAEIEIK

SEQ ID NO: 4464 - protein, 315 aa, Glycine max
MAAAIEIPTIVFPNSSAQQRMPVVGMGSAPDFTCKKDTKEAIIEAVKQGYRHFDTAAAYGSEQALGEALKEAIHLGLVSRQDLFVTSKLWVTENHPHLVLPALRKSLKTLQLEYLDLYLIHWPLSSQPGKFSFPIEVEDLLPFDVKGVWESMEECQKLGLTKAIGVSNFSVKKLQNLLSVATIRPVVDQVEMNLAWQQKKLREFCKENGIIVTAFSPLRKGASRGPNEVMENDVLKEIAEAHGKSIAQVSLRWLYEQGVTFVPKSYDKERMNQNLHIFDWALTEQDHHKISQISQSRLISGPTKPQLADLWDDQI

SEQ ID NO: 4465 - protein, 330 aa, Candida albicans SC5314
MWSKEEKKQKREKKMYVQPQQRTYYLLLMFRLFARRNYSIHWRFKDVCPSPRYDTGCTYCQPEFPTNLAIDFDKNLNKTGAIPTKHVMVLTNPINQISELPSKTEFIPNSIPSEITKYRTMIQTDDQRVTISVIHLNNNRHQQILDQYNIKPGSSQQLVFLYPSMKIIRFDLSVSDQFVKKYLYSKPTAPVYNPFVQTKPSAPNNDLFDSIIVDESNFIEDELDKDLLVICGHAKRDLRCGIIAPQLESEFNQVLVRHNLQDTIYTGQVSHVGGHAYAGNVLYYPKDCQTSKDFIWYGRVFPKDVQGIVESTIINKEIIKDLFRGDIEAY

SEQ ID NO: 4466 - protein, 425 aa, Vibrio vulnificus YJ016
MSDDNSQQMTPEEVLRQQALDYHALPTAGKIAVALTKPAETAKDLALAYSPGVAEPVREIAQNPDNVYKYTSKGNMVAVISNGTAILGLGNLGPLASKPVMEGKALLFKRFAGLDSIDIEVKHRTIDEFVDTVANIADTFGGINLEDIKAPDCFEIEKRLIERCDVPVFHDDQHGTAIVTAAGMLNAIELQGKKLNECIIVCLGAGAAAVACMELLIKCGAMREKIYMLDRKGVIHTRRDDLNEYKQLFANNTDKRTLEDVISGADLFLGVSGPNLMPAEALKLMADKPVVFACSNPDPEIKPELAHEVRSDLIMGTGRSDYPNQVNNVLCFPFIFRGALDVRASEINDEMKLAAVEAIRQLAKEPVPEAVLKAAGVESLSFGPQYIIPKPMDSRLLPRVAKAVAQAAVDTGVARIPMPENYMAG

SEQ ID NO: 4467 - protein, 194 aa, Zea mays
APAFCELSLPLTKEEAAFSPSHPAMQRHVASGRPSGTDGSDFSYRMVVESRYQRVAEGRSRLARLILVQALHLVAGGLLLLLSLSKGAAVNKFAVLSMAAGFLAIVVGELGRMRTMSVLLRLYTSLSSIAVAFSVTCIIRSELFLKVMKQNTEAITSYEMLDAVRVALGILLQMVVIATTTRLLQNMSPPKRAS

SEQ ID NO: 4468 - protein, 363 aa, Exiguobacterium sp. 255-15
MMTKLVTAVEDTTKVKTMRALVKEERGFGAVLKEVAVPSPKRGEVLIRVEATSICGTDVHIYEWDAWAASRVNPPYVFGHEFSGEVVELGEGTKRLKLGDRVSAETHIVCHQCKQCLRGQYHICKNTKIIGVDTQGCFAEYVVMPEENLWVNPEDMPAAIASIQEPMGNAVHTVLASDVSAKTVAIVGCGPIGLMAVSVAKAAGAAEVIAIDVNPYRLELAKTMGADVVIDSRHEDVLERVRMMTDGDGIDVVCEMSGHPVAIRQAFEMVTAGGDVNILSLPVKPVEIDLTNHVVFKGVRVQGITGRKMYETWSQVSAFLSSGKVDVKPLITHTLPLERFEEGFELMRQGKCGKVVLQPRGTN

SEQ ID NO: 4469 - protein, 129 aa, Brassica napus
LCVSALKSDPRSPTADTKGLAAIMASVGMTNATATASYIAKNLTATANNTVLKKVLKDCSDKYILAADSLRLTIQDLDDEAYDYAYMHVLAAQDYPNVCRNIFRRAKGLVYPAEISRCEVSLRSICVVV

SEQ ID NO: 4470 - protein, 378 aa, Gibberella zeae PH-1
MLSRGSLRSAQLLRGVAKQQPQLARSFATVQSDIFKPAKYGGKYTVTLIPGDGIGTEVAESVKTVFKADNVPVEWEQIEVSGLEGAGRTEDAFRESVASLKRNKLGLKGILHTPISRSGHQSFNVAMRQELDIYASISLIKNIPGYETRHKDVDLCIIRENTEGEYSGLEHQSVEGVVESLKIITRAKSERIARFAFSFALANGRSKVTCIHKANIMKLADGLFRSTFHQVAKDYPTLETNDMIVDNASMQAVSRPQQFDVMVMPNLYGGILSNIGAALVGGPGIVPGCNMGREVAVFEPGCRHVGLDIKGKDQANPTAMLLSGSMLLRHLGLDEHANRISKATYAVIADGKVRTPDMGGKSTTHEFTRAILDKLETV

SEQ ID NO: 4471 - protein, 115 aa, Glycine max
  misc_feature (39)..(39): Xaa can be any naturally occurring amino acid
  misc_feature (106)..(106): Xaa can be any naturally occurring amino acid
MKPMKKQAGAGMDAPFTGLKSMAGFPTRKTINDFSFIAXFGGRVLCMQVWPPVDKKKFVTLSYLPDLDDAQLAKEAEYLLRKGWIPCLEFQLEHGFLYREHIGSPXYYYGRYWSL

SEQ ID NO: 4472 - protein, 327 aa, Arabidopsis thaliana
MVASGHEVVTLTFPIGSVHHLMPVLALGTAASPPPEPIVLKRTVLEAIKLGYRHFDTSPRYQTEEPLGEALAEAVSLGLIQSRSELFVTSKLWCADAHGGLVVPAIQRSLETLKLDYLDLYLIHWPVSSKPGKYKFPIEEDDFLPMDYETVWSEMEECQRLGVAKCIGVSNFSCKKLQHILSIAKIPPSVNQVEMSPVWQQRKLRELCKSKGIVVTAYSVLGSRGAFWGTHKIMESDVLKEIAEAKGKTVAQVSMRWAYEEGVSMVVKSFRKDRLEENLKIFDWSLTEEEKQRISTEISQSRIVDGEVYISEKGPIKSVTEMWDGEI

SEQ ID NO: 4473 - protein, 505 aa, Brassica napus
MTSINVKLLYHYVITNLFNLCFFPLTAIVAGKAYLTIDDLHHLYYSYLQHNLITIAPLLAFTVFGSVLYIATRPKPVYLVEYSCYLPPTHCRSSISKVMDIFFQVRKADPSRNGTCDDSSWLDFLRKIQERSGLGDETHGPEGLLQVPPRKTFARAREETEQVIIGALENLFKNTNVNPKDIGILVVNSSMFNPTPSLSAMVVNTFKLRSNVRSFNLGGMGCSAGVIAIDLAKDLLHVHKNTYALVVSTENITYNIYAGDNRSMMVSNCLFRVGGAAILLSNKPRDRRRSKYELVHTVRTHTGADDKSFRCVQQGDDENGQTGVSLSKDITDVAGRTVKKNIATLGPLILPLSEKLLFFVTFMGKKLFKDEIKHYYVPDFKLAIDHFCIHAGGKAVIDVLEKNLGLAPIDVEASRSTLHRFGNTSSSSIWYELAYIEPKGRMKKGNKVWQIALGSGFKCNSAVWVALNNVKASTNSPWEHCIDRYPVKIDSDSGKSETRVPNGRS

SEQ ID NO: 4474 - protein, 489 aa, Xanthomonas axonopodis pv. citri str. 306
MEALSETLRGIAARGPLGLFIDGQWRASTGDRTVDVIAPHTEERLLRYTEPSPSDTEAAIAAARSAFDNGPWPQLSPQERSVVLKRVADHLRARMPELAEAWTGQVGATLGFSKRASQQAPDLFDYYADLIATHAFVQPRVRPSGGRVHVVQEPVGVVAAITPWNAPLVLLCYKVAAALAAGCTVVAKPSPETPIDAYILAECISAAGVPDGVFNLLPAGREVGEQLIRHPHVDKISFTGSTQAGRSIGIACAERLARVGLELGGKSAAIVLEDADLAKMLPTLVPYSMPIAGQVCFSLTRVLVPTQRREEILQAYCTALSAVKLGDPFAADTGMGPLALGRQLERVQSYIAKGKAEGARLVMGGSRPAHLSRGFFVEPTVFAEVMPDMAIAREEIFGPVVSFIDYHDEADLIAKANASDYGLHGTIYSEDAERAYRIARRVRSGSHAINGMWVDISMPFGGFKHSGIGREGGIEGLHAFLETRTLYLS

SEQ ID NO: 4475 - protein, 324 aa, Actinobacillus pleuropneumoniae serovar 1 str. 4074
MAKQIKKIAVLTSGGDAPGMNAAIRGVVRAALNEGLEVYGVQDGYYGLYTDRVIPLDRRSVSETINRGGTFLGSARFPQFKDPDVRKKSVETLKKYDIDALVVIGGDGSYMGAKLITEEFGYPCIGIPGTIDNDIVGTDYTIGYQTALETAVEAIDRLRDTSTSHQRISIVEIMGRHCGDLTISAALASGCEYIIVPEKGLDKESLMRNIEDGFNKGKRHAIIAITELMTDVQALAKEIEDRFGHETRATVLGHIQRGGAPCPFDRILASRMGVYAVDLLLQGHGGRCIGIKNENLVHHDIIDAINNMRRPFKEELFEAARKLF

SEQ ID NO: 4476 - protein, 342 aa, Pyrococcus horikoshii OT3
MKAKDIVLKKSEKIEGVEVKGPWLDDAQSLEEVVSYYYRIGFQATHLGRAIEIWRKVEEKRERGEEIRVFLGYTSNIISSGLREIIAWLVKEKKVDVIVTTAGGVEEDFIKSLKPFILGDWEVDDAELRKKGVNRIGNIFVPNDRYIEFEKYMIPFFERVLKIEEKLSRPLTASEFIYEMGRYMDEKLGKEKEKSVIYWAYKNNIPIFCPAITDGSIGDMLYFFKEERRDSRLIIDIANDIVKLNNLAITAKETASIILGGSLPKHAIINANLFRGGTDYAIYISTAVPWDGSLSGAPPREGVSWGKIKAKADYVEVWGDATLIFPILVWMVMKARGQGYAQ

SEQ ID NO: 4477 - protein, 73 aa, Triticum aestivum
MASRSCTFLEILLAVILPPLGVFLRYGCCSMEFLICLLLTILGYIPGIIYAVYVLVAHGSASEESGRDYDALA

SEQ ID NO: 4478 - protein, 457 aa, Streptomyces avermitilis MA-4680
MNVSVVLFTSDLRLHDHPPLRAALDGARQVVPLFVRDRAVDGAGFAAPNRLAFLADCLRDLDAGLRERGGRLVLRSGDVVDQVCKVAAEADADEVHLAAGVSAYAHRREQRLRSALEADGRRLHVHETVITAVAPGAVTPSSSDHFAVFTPYFRHWEREHLRDALGAPRGVRVPESVGSERLPTRTELSGLSQGLAAGGEEEGRKRLMAWLRGGITAYEDRHDDLAGDATSHLSPHLHFGTLSPVELVHRARRTGGPGAEAFVRQLAWRDFHYQVLAARPDAATADYRGRGDRWRSEAAAREEVEAWRTGRTGYPVIDAAMRQLRHEGWMHNRGRLLTASFLTKTLYVDWRVGARHFLELLVDGDVANNQLNWQWMAGTGTDTRPNRVLNPVTQAKRYDPDGAYVRRWVPELEGLRGAAVHEPWKLKGLDRAAYDYPDPIVELADGLARFRHARGRD

SEQ ID NO: 4479 - protein, 115 aa, Triticum aestivum
AEILRGHGGPSLGFVKLPPRVRPARPRVPGIATRWSNVLRTGSVAAKFVAVDFGTLMFTMERGRDMRELKEFILGQPEAYEFKVGDQFFRRPGDPPLDQVIQMLRKHKDKSEDEL

SEQ ID NO: 4480 - protein, 187 aa, Triticum aestivum
MSVAWRLLSSNTMAPTVMGSSATSVAPFQGLKSTAGLPISRRSSSAGLSSVSNGGRIRCMQVWPIEGINNFESVGDLLPLSTEALLKQVDYLIRSKWVPCLEFSKVGFVFREHNSSPGYYDGRYWTMWKLPMFGCTDATQVLNEVEEVKKEYPDAYVRVIGFDNLRQVQCVSFIAFRPPGCEESGKA

SEQ ID NO: 4481 - protein, 164 aa, Ustilago maydis 521
MSNPNLAEVMGDGPASIADKLTLLPGYEPDFSAVTFCLKEEDHTLGNSLRYIIMKDPRVEFCGYSNPHPSENKIHLRIQMYDNASALDALRDAIENLDQLFAAIGEAYDRSLSAGNYETYVEPKLDHERLAQMAEQGKKRRAEEKAREAEARKQAAQAAAGRPM

SEQ ID NO: 4482 - protein, 205 aa, Eucalyptus globulus subsp. globulus
MVRGKTQMKRIENDTSRQVTFSKRRNGLLKKAFELSVLCDAEVALIIFSPRGKLYEFSSSSLCKTIEKYQTRAKDMEAKTAEISMQPSKGNTLDMEKKIEHFEISRRRLLGEGLDSCSVEELQQTENQLERSLTKIRARKNHLIREHIERLKAEERKLLEEKRKLLQEIECGKGLTPVSSERPREEIRAESMDVETELFIGPPKR

SEQ ID NO: 4483 - protein, 93 aa, Triticum aestivum
MHPRSASTVRLCLVCLVLLLLTRDAHSRNLVGAVVVQKEKHKQSHGGHGAATLEPWGEEGSNAGAKRRQLQRDPTKWEEIHTDYIYTQDVKHP

SEQ ID NO: 4484 - protein, 294 aa, Triticum aestivum
VTILNKFVQKSRLVPVRNSRDIVDPRVRTGSTKVGQMVQPPRPARFGKCLLELSGNNAIIVMDDADIPLAVRSVLFAAVGTAGQRCTTCRRLLLHESIYQTFLDQLVEVYKQVRIGDPMEKGTLLGPLHTTASKESFLKGIQNIRSQGGKILLGGSAIESEGNFVQPTIVEISPAAPVVREELFGPVLYAMKFQTLKEAIEINNSVPQGLSSSIFTRKPDAIFKWIGPHGSDCGIVNVNIPTNGAEIGGAFGGEKATGGGREAGSDSWKQYMRRATCTINYGSELPLAQGINFG

SEQ ID NO: 4485 - protein, 126 aa, Zea mays
  misc_feature (35)..(35): Xaa can be any naturally occurring amino acid
  misc_feature (67)..(69): Xaa can be any naturally occurring amino acid
  misc_feature (87)..(87): Xaa can be any naturally occurring amino acid
  misc_feature (92)..(93): Xaa can be any naturally occurring amino acid
  misc_feature (98)..(98): Xaa can be any naturally occurring amino acid
  misc_feature (108)..(108): Xaa can be any naturally occurring amino acid
KNSPGGGRGRRANTRRGRAAGHSSTDGPQAKRARXPASTRRKKHRGPDRTGPDQHEGGGGAQQRPAXXXPQTGDQPQRNEDRTDEEXAKGEXXNHKNXRKQGTGTHNXSTGRDREDNKPRNEKDGE

SEQ ID NO: 4486 - protein, 290 aa, Solanum berthaultii
LNSSYRVPFESFRVPFVDLQEATNNFDEKFHIGLGGFGKVYRGVLRDGTKVALKRCKRESSQGIEEFQTEIEILSFCSHPHLVSLIGYCDERNEMILVYDYIENGNLRSHLYGSDLPSMSWEQRLEICIGAARGLHYLHTSAVIHRDVKSINMLLDENFVAKITDFGLSKKGTELDQTHLSTLVQGTIGYLDPEYFIRGQLTEKSDVYSFGVVLFEVLCARPAIVQSLPREMVNLAEWAVDSHNKGQLEQIIDLNLAAKIRPESLRKFGETAVKCLALSSGDRPSMGDVL

SEQ ID NO: 4487 - protein, 244 aa, Glycine max
MEYSQYTTYSAEGVEAETYTSSCTTPSRSKKRNNNNTRRFSDEQIKSLETMFESETRLEPRKKLQLARELGLQPRQVAIWFQNKRARWKSKQLERDYGILQSNYNTLASRFEALKKEKQTLLIQLQKLNHLMQKPMEPGQRCTQVEAANSMDSESENGGTMKCEAEGKPSPSMEISEHLLGVLSDDDTSIKVEDFGLEDEHGLLNFAKHVDGSLTSPEDWNAFESNDLLGQSTTDDYQWWDFWS

SEQ ID NO: 4488 - protein, 175 aa, Mesorhizobium sp. BNC1
MAETATKLPVKSEKSVASPEGWAPFESLRREIDRLFDDFHPFGWRLPSRTAFDLEIPKFSRAAWQVAPAMDLVEKEKEYEITAELPGIDEKNVEIKLSNHTLTIKGEKKEEKEEKDKDYYLSERRYGSFQRSFRVPDGVDADKIEATFTKGVLTVRLPKTAQAQKADKKIEVKAA

SEQ ID NO: 4489 - protein, 175 aa, Zea mays
  misc_feature (73)..(73): Xaa can be any naturally occurring amino acid
  misc_feature (87)..(87): Xaa can be any naturally occurring amino acid
  misc_feature (96)..(96): Xaa can be any naturally occurring amino acid
  misc_feature (105)..(105): Xaa can be any naturally occurring amino acid
  misc_feature (130)..(130): Xaa can be any naturally occurring amino acid
  misc_feature (140)..(140): Xaa can be any naturally occurring amino acid
MAPTVMMASSATAVAPFQGLKSAASLPVARRSTRSLGNVSNGGRIRCMQVWPAYGNKKFETLSYLPPLSTDDXLLKQVDYLLRNGWXIPCLEFSKXGFVYRENSXTSPCYYDGRYWTMWKLPMFGCTDAXTQVYKELQEXAIAAYPDAFHRVIGFDNVRQTQCVSFIAYKPPGSE

SEQ ID NO: 4490 - protein, 322 aa, Candida tenuis
MSASIPDIKLSSGHLMPSIGFGCWKLANATAGEQVYQAIKAGYRLFDGAEDYGNEKEVGDGVKRAIDEGLVKREEIFLTSKLWNNYHDPKNVETALNKTLADLKVDYVDLFLIHFPIAFKFVPIEEKYPPGFYCGDGNNFVYEDVPILETWKALEKLVAAGKIKSIGVSNFPGALLLDLLRGATIKPAVLQVEHHPYLQQPKLIEFAQKAGVTITAYSSFGPQSFVEMNQGRALNTPTLFAHDTIKAIAAKYNKTPAEVLLRWAAQRGIAVIPRSDLPERLVQNRSFNTFDLTKEDFEEIAKLDIGLRFNDPWDWDNIPIFV

SEQ ID NO: 4491 - protein, 321 aa, Capsicum chinense
MGSKYSKATNSINDALSSSYLVPFESYRVPLVDLEEATNNFDHKFLIGHGVFGKVYKGVLRDGAKVALKRRTPESSQGIEEFETEIETLSFCRHPHLVSLIGFCDERNEMILIYKYMENGNLKRHLYGSDLPTMSMSWEQRLEICIGAARGLHYLHTRAIIHRDVKSINILLDENFVPKITDFGISKKGTELDQTHLSTVVKGTLGYIDPEYFIKGRLTEKSDVYSFGVVLFEVLCARSAIVQSLPREMVNLAEWAVESHNNGQLEQIIDPNLVAKIRPESLRKFGDTAVKCLALSSEDRPSMGDVLWKLEYALRLQESVI

SEQ ID NO: 4492 - protein, 589 aa, Zea mays
  misc_feature (559)..(559): Xaa can be any naturally occurring amino acid
  misc_feature (572)..(572): Xaa can be any naturally occurring amino acid
MCGILAVLGCSDWSQAKRARILACSRRLKHRGPDWSGLYQHEGNFLAQQRLAVVSPLSGDQPLFNEDRTVVVVANGEIYNHKNVRKQFTGTHNFSTGSDCEVIMPLYEKYGENFVDMLDGVFAFVLYDTRDRTYVAARDAIGVNPLYIGWGSDGSVWIASEMKALNEDCVRFEIFPPGHLYSSAGGGFRRWYTPHWFQEQVPRTPYQPLVLREAFEKAVIKRLMTDVPFGVLLSGGLDSSLVASVTKRHLVETEAAEKFGTELHSFVVGLEGSPDLKAAREVADYLGTIHHEFHFTVQDGIDAIEEVIYHDETYDVTTIRASTPMFLMARKIKSLGVKMVLSGEGSDELLGGYLYFHFAPNKEEFHRETCRKVKALHQYDCLRANKATSAWGLEVRVPFLDKEFINVAMGMDPEWKMYDKNLGRIEKWVMRKAFDDDEHPYLPKHILYRQKEQFSDGVGYNWIDGLKSFTEQQVTDEMMNNAAQMFPYNTPVNKEAYYYRMIFERLFPQDSARETVPWGPSIACSTPAAIEWVEQWKASNDPSGRFISSHDSAATDHTXAVSRRWPTAAATXAANGTVNGKDVAVAIAV

SEQ ID NO: 4493 - protein, 122 aa, Glycine max
  misc_feature (96)..(96): Xaa can be any naturally occurring amino acid
APSLISTAAVTTVNRAGARMDAPFTGLKSMAGYPTRKTNHDITSIASNRGRVQCMQVWPPLGKKKMETLSYLPHLDDAQLATDVEYLLRNGGIPCXEFQLQHGIEYREHNRSPAYYNGRYWT

SEQ ID NO: 4494 - protein, 321 aa, Capsicum chinense
MGSKYSKATNSINDALSSSYLVPFESYRVPLVDLEEATNNFDHKFLIGHGVFGKVYKGVLRDGAKVALKRRTPESSQGIEEFETEIETLSFCRHPHLVSLIGFCDERNEMILIYKYMENGNLKRHLYGSDLPTMSMSWEQRLEICIGAARGLHYLHTNGVMHRDVKSSNILLDENFVPKITDFGISKKGTELDQTHLTTVVKGTLGYIDPEYFIKGRLTEKSDVYSFGVVLFEVLCARSAIVQSLPREMVNLAEWAVESHNNGQLEQIVDPNLADKIRPESLRKFGDTAVKCLALSSEDRPSMGDALWKLEYALRLQESVI

SEQ ID NO: 4495 - protein, 274 aa, Brassica napus
  misc_feature (120)..(120): Xaa can be any naturally occurring amino acid
  misc_feature (153)..(153): Xaa can be any naturally occurring amino acid
MIAAGAKSMLGLSIASPKGVSDSNSRSVGVLRACVSMEGSQTMSHNKNGSIPELKAVNGHTGQKQGPLSTVGNSTNIKWHECPVEKVDRQRLLDQKGCVIWVTGLSGSGKSTLACALNQXLYQKGKLCYILDGDNVRHGLNRDLSFKAEDRAXENIRRVGEGAKLFADAGIICIASLISPYRRDRDAWRTLLPEGDFVEVFMNVPLEVCEARDPKGLYKLARAGKIKGFTGIDDPYEPPLNCEISLGEEGTGTSPIEMAETVVAYLEHKGYLKA

SEQ ID NO: 4496 - protein, 511 aa, Oryza sativa (japonica cultivar-group)
MARMGISKGGSGKEAKKPPLLLGRFEVGKLLGQGNFAKVYHARNVATGEEVAIKVMEKEKIFKSGLTAHIKREIAVLRRVRHPHIVQLYEVMATKLRIYFVMEYVRGGELFARVARGRLPEADARRYFQQLVSAVAFCHARGVFHRDIKPENLLVDDAGDLKVSDFGLSAVADGMRRDGLFHTFCGTPAYVAPEVLSRRGYDAAGADLWSCGVVLFVLMAGYLPFQDRNLAGMYRKIHKGDFRCPKWFSPELIRLLRGVLVTNPQRRATAEGIMENEWFKIGFRRFSFRVEDDRTFTCFELDDDAAVDAPTSPPDTPRTVDSGDVGAAPTRPRKAGSLTSCDSAPSLLEGRFGLGGSSRRRSSLNAFDIISFSPGFDLSGLFDQDDGGGAGAGSIPEQQKHTARFVSAAPVEVIVATLEAAAAAAGMAVREREDGSISMEGTREGEHGALAVAAEIYELTPELVVVEVRRKAGGAAEYEEFFRARLKPSLRELVCDDRPCPEDSGELSRSL

SEQ ID NO: 4497 - protein, 570 aa, Glycine max
MVCTANDLQGWKDFPKGLRVLLLEGDSSSAAEIREQLEAMDYKVSTFYDENEALSALSSSPKGFHVAIVEVSTSCSLGGFKFLENAKDLPTIMTSKDQCLNTMMKCIALGAVEFLSKPLSEDKLKNIWQHVVHKAFNSGENVLSESLKPVKESVESMLQLQTDIGQDKSRISIDLENVSRFSDNDHEQSAVCDKYPAPSTPQLKQGTRLLDDGDCHEQTNCSTEKESGEHDRECKSVETSCGNLNAESSPQPREPDKTLIREEDDFANVSKGESAVSLNPHNKKFLSNADGNTSPNKTGVLNDSCEIKANRKKVKVDWTPELHKKFVKAVEQLGIDQAIPSRILEIMKVEGLTRHNVASHLQKYRIHKRQSAPREEDRKWHNQGDAMQRNYYMQRPIMAYPPYHSHHTLSPAPIYPMWGQPGSQTAGVQIWGHPGYPMWHPTESWHWKPYPGVHVDAWGCPLVPPPQAPCFPYNQNTPGLHNPKAVDYRFSMPRSSFEHHPAEEVVDKVVKEAISKPWLPLPLGLKPPSMDSVLAELSKQGIPSIPLGNKGSSTPKPRRDVRPTPPPGPT

SEQ ID NO: 4498 - protein, 311 aa, Capsicum chinense
MGSKYSKATNSISDASNSFESYRFPLEDLEEATNNFDDKFFIGEGAFGKVYKGVLRDGTKVALKRQNRDSRQGIEEFGTEIGILSRRSHPHLVSLIGYCDERNEMVLIYDYMENGNLKSHLTGSDLPSMSWEQRLEICIGAARGLHYLHTNGVMHRDVKSSNILLDENFVPKITDFGLSKTRPQLYQTTDVKGTFGYIDPEYFIKGRLTEKSDVYSFGVVLFEVLCARSAMVQSLPREMVNLAEWAVESHNNGQLEQIVDPNLADKIRPESLRKFGETAVKCLALSSEDRPSMGDALWKLECALRLQESVI

SEQ ID NO: 4499 - protein, 113 aa, Rickettsia monacensis
ANEAVINMLKEIGSSENIPKYIAKAKDKNDPFRLMGFGHRVYKNYDPRAAVLKETCKEVLKELEQLENNPLLQIAIELEAIALKDEYFIERKLYPNVDFYSGIIYKAMGIPSQ

SEQ ID NO: 4500 - protein, 164 aa, Saccharum hybrid cultivar CP72-2086
MAAPRRLSSCCLLFAVLLGAVLATATAFFEQAAAAGVGLGHGARFARKHGRAAAELPQPEPQPKPEPKPEPQPQPEPLPKPEPQPKPTPKPEPKPKPEPVPKPEPKPEPEPKPHPKPEPKPEPEPKPEPKPEPKPKPKPEPKPEPLPKPEPKPEPKPEPKPEPL

SEQ ID NO: 4501 - protein, 316 aa, Capsicum chinense
MGSKYSKATNSISDASNSFESYRFPLEDLEEATNNFDDKFFIGEGAFGKVYKGVLRDGAKVALKRRTPESSQGIEEFETEIETLSFCRHPHLVSLIGFCDERNEMILIYKYMENGNLKRHLYGSDLPTMSMSWEQRLEICIGAARGLHYLHTRAIIHRDIKSINILLDENFVPKITDFGISKKGTELDQTHLSTVVKGTLGYIDPEYFIKGRLTEKFDVYSFGVVLFEVLCARSAIVQSLPREMVNLAEWAVESHNNGQLEQIVDPNLADKIRPESLRKFGDTAVKCLALSSEDRPSMGDVLWKLEYALRLQESVI

SEQ ID NO: 4502 - protein, 294 aa, Sesbania rostrata
MEQYEKVEKIGEGTYGVVYKARDRVTNETIALKKIRLEQEDEGVPSTAIREISLLKEMQHRNIIRLQDVVHSEKRLYLVFEYLDLDLKKHMDSSPEFVKDPRQVKMFLYQILCGIAYCHSHRVLHRDLKPQNLLIDRRTNSLKLADFGLARAFGIPVRTFTHEVVTLWYRAPGILLGSRHYSTPVDIWSVGCIFAEMVNRRPLFPGDSEIDELFKIFRILGTPNEDTWPGVTSLPDFKSTFPKWPPKDLATVVPNLEQAGLNLLSSMLCLDPSKRITARSAVEHEYFKDIKFVP

SEQ ID NO: 4503 - protein, 206 aa, Ehrlichia sp. Belluno
AACASKITFIDGEKGILRYRGYDIEYLVNMQHSFLEIAYLLFYGVLPNKDEFENFSCNVIEEHSLPQQVYNIIQSFPRNSHPMAILSACFATLSAHYHDSEVVNDYLRCAILSVAKVPSIIAAIYRYIVNKDIILSHKSLSYSRNFANMMLLDFKNDKVNDVVAKALDVIFILHADHEQNASTASVRLAGSAGANLFACLTCWSRT

SEQ ID NO: 4504 - protein, 129 aa, Triticum aestivum
  misc_feature (88)..(88): Xaa can be any naturally occurring amino acid
  misc_feature (99)..(99): Xaa can be any naturally occurring amino acid
  misc_feature (104)..(104): Xaa can be any naturally occurring amino acid
  misc_feature (116)..(116): Xaa can be any naturally occurring amino acid
  misc_feature (122)..(122): Xaa can be any naturally occurring amino acid
PTVMASSATSVAPFQGLKSTAGLPVSRRSNGASLGSVSNGGRIRCMQVWPIEGIKKFETLSYLPPLSTEALLKQVDYLIRSKWVPCLXEFKQVGFIFRXEHNAXPGYYDGRYLDMXELPMFXGCTDPTQ

SEQ ID NO: 4505 - protein, 92 aa, Zea mays
MTMTSRFVAAASSSSSSCPLARLISRRGLAGAADGHGPAKVPLWKDPLSPSKWKEEHFVLASLSMWGALFYGGFKFFGGKKEDKIEAASGQT

SEQ ID NO: 4506 - protein, 428 aa, Shewanella oneidensis MR-1
MADLKAKLELPGNDSIELPVKQGSAGFDVIDISKLGSKGYFTFDPGFLATASCESAITYIDGDQGILLHRGYPIEQLAVDSDYLDLCYLLLYGELPTKEQYAEFVHTVKTHTMVHEQIAFFFRGFRRDAHPMAMLCGVTGALSAFYQDSLDVNDPRHREIAAYRLVSKMPTIAAMCYKYSSGQPFVYPRNDLSYAGNFLSMMFAVPCEEYKVNPIVERAMDRIFILHADHEQNASTSTVRLAGSSGANPFACIAAGIASLWGPAHGGANEACLQMLEEIGSVDRIPEFIARAKDKNDPFRLMGFGHRVYKNFDPRAKVMRETCHEVLKELKVQDPLLDVAMELERIALEDEYFISKKLYPNVDFYSGIIMKAIGIPTSMFTVLFALSRTVGWIAHWKEMLDQPGHKISRPRQLYTGETARDFVDLDKR

SEQ ID NO: 4507 - protein, 530 aa, Zea mays
MGACVSRPSACVGKPHTPRSGDASGRSGGGGGARRRRSRRVGKGRRTAPSRAASMETIQEAEVPGSSSAAAADHRTYSNPAFQVSGTGSIEEAWYDSLAMSESDAEDDFHSVQDDAFSLNGFENEAALSMRDGNGGSFNGAAQSGEQHHKKPKSSELSKGSSENGVRTSISHEDAVSFSGADNTHGGERILEVCGLLPNNCLPCIASAVGVSEKKRTLSSSPTHSMRMPSLKLSFKKKSGEAHPSSTLLSTKDFLERPLAGSQVQLCLLETNMPNSWTHIDPGTFRVRGANYFRDKKKELAPNYAAYYPFGVDVYLSPQKLNHISRFVELPDIQLSSKLPPLLVVNVQVPLYPASLFQNETDGEGMSFVLYFRLSDGYSKELPPSFIESIRRLIDDHVEKIKAFPMETTIPFRERLKILGRVANLEDLPLSAAERKLMHAYNEKPVLSRPQHEFYLGDNYFEIDIDMHRFSYISRKGFATFLDRLKACVLDVGLTIQGNKAEELPEQILCCVRLNGIDYTKYQPLLTHAA

SEQ ID NO: 4508 - protein, 365 aa, Bradyrhizobium japonicum USDA 110
MIAPALQFWGNVMQLIVLPGDGIGPEITTATSGVLRAASERFQLNLRLEEHAVGHASLKQFGTTVRPELLDIVRGADGLILGPTATFDFKDEAHGEINPSRHFRKNLDLYANVRPARTYAGRPGRLGDFDLVVVRENTEGFYADRNMEQGNGEMLVTPDVAISLRRITRACCERIAHAACRLAMKRRRHLTIVHKANVLKIGDGMFLDICRAAAKGYAGLEVDDILVDAMMAHVVRNPDRFDVIVATNMFGDILSDLTAELSGSLGLGGSLNVGDRYAMAQAAHGSAPDIAGQDVANPVSLILSTALLLAWHGERSGAVRYEEAARAIEAAVAKAIGEGRATRDVGGRLGTIAAGAAIAEILQGA

SEQ ID NO: 4509 - protein, 246 aa, Zea mays
ATNSNARGSGAEMQGGATAKLQSPVTVMRPVRGDLEEHLPKPYLARALVAPDIYHPDGTAADEHGHHHMSVLQQHVAFFDRDDNGIIYPWETYSGCRALGFNMILSLLIALVVNGTMSYATLPGWLPSPLFPIYVHNIHKSKHGSDSGTYDNEGRFMPVNFENLFSKYARTSPDRLTYRELWSMTEGFRDAFDLYGWIAAKLEWTILYVLARDDEGYLSREAMRRVYDGSLFEYVERQRAQHAKMS

SEQ ID NO: 4510 - protein, 425 aa, Lactobacillus gasseri
MATVIKNGTVYQNGRLIKADVLIEGKKIKAIGTDLDAEKIIDAQGMLVSPGLVDVHVHYRDPGQTYKEDIKTGSEAAARGGFTTVGAMPNVTPVPNTPELMKKMVEENKHKGVVHIFQYGPITNDETTDIIPDYAALKKAGAFALSNDGHGVQTAQTMYLAMQKAKENNLIIATHAQDDSLFNKGIVNEGVAAKKLDLPPVTELAETTQIARDLLLAQKTGVHYHICHVSTKTSVELVRLAKARGINVTCEVAPHHILLTDSDIPKDNGYFKMNPPLRNKEDQAALLVGLLDGTIDLIATDHAPHAKSEKQGGMKNAAFGITGSETAFSTLYTKFVKEEKVLSLEQLLALLSDKPAKVFGIENAGVLEPGKNADVAIFDIEHKNEIKEADFKSKGVNTPFTGQKVYGETVMTLVDGEVVYQRGTK

SEQ ID NO: 4511 - protein, 65 aa, Glycine max
  misc_feature (51)..(51): Xaa can be any naturally occurring amino acid
  misc_feature (54)..(54): Xaa can be any naturally occurring amino acid
FLQQATMICIDNSEWMRNGDYSPSRFQAQADAVNLICGAKTQSNPENTVGXLTXAGKGFFGPLEV

SEQ ID NO: 4512 - protein, 450 aa, Zea mays
  misc_feature (50)..(50): Xaa can be any naturally occurring amino acid
  misc_feature (60)..(60): Xaa can be any naturally occurring amino acid
  misc_feature (68)..(68): Xaa can be any naturally occurring amino acid
  misc_feature (88)..(88): Xaa can be any naturally occurring amino acid
  misc_feature (126)..(126): Xaa can be any naturally occurring amino acid
  misc_feature (153)..(153): Xaa can be any naturally occurring amino acid
  misc_feature (216)..(216): Xaa can be any naturally occurring amino acid
  misc_feature (235)..(235): Xaa can be any naturally occurring amino acid
  misc_feature (295)..(295): Xaa can be any naturally occurring amino acid
  misc_feature (321)..(321): Xaa can be any naturally occurring amino acid
PWGSTAGDVAAVVDEEACMYAMQLASSSILPMTLKNAIELGLLEVLQKEXAGGGKAALAXPEEVVARXMPAAPGDPAAAAAMVDRMLXRLLASYDVVRCQMEDRDGRYERRYSAAPVCKWLTPNEXACPWAALALMNQDKVLMESWYYLKDAXVLDGGIPFNKAYGMTAFEYHGTDSRFNRVFNEGMKNHSVIITKKLLDFYTGFEGVSTLVDRGXGGVGATLHAITSRHPHISXGVNFDLPHVISEAPPFPGVRHVGGDMFASVPAGDAILMKWILHDWSDAHCATLLKNCYDXALPENGKVIVVECVLPVNTEATPKAXQGVFHVDMIMLAHNPGGKERYEREFRELAKGAGFSGFKATYIYANAWAIEFIKWNHRRRDEMAWLPHALLAWSLYRTSPSSSSSRSRVCMYFCLIFFLHIMHSGWPRLPPIHGGHVFGTSCRALACRGF

SEQ ID NO: 4513 - protein, 173 aa, Oryza sativa (japonica cultivar-group)
MYSLRLASSGSTGLGFALGRLGGRSGGGGGGGGLAPASASSSSVVSARTRRTVSVTPNAAAPTPGEQGVAMEQGKQQHQPPPPSQPQPQQEKRGSRDDDMHKTTGDVMTHSFGEGYSTRSDEEGFGGVYGQNDPVFNPGTEVHPSHPEYDTSQGSEVKEKEKARHHKDDKHAT

SEQ ID NO: 4514 - protein, 355 aa, Trichoderma asperellum
MSRSNAPNASASRKISFNVSEQYDIQDVVGEGAYGVVCSAIHKPSGQKVAIKKITPFDHSMFCLRTLREMKLLRYFNHENIISILDIQKPRSYDSFNEVYLIQELMETDMHRVIRTQDLSDDHCQYFIYQTLRALKAMHSANVLHRDLKPSNLLLNANCDLKVCDFGLARSAASQEDNSGFMTEYVATRWYRAPEIMLTFKEYTKAIDVWSVGCILAEMLSGKPLFPGKDYHHQLTLILDVLGTPTMEDYYGIKSRRAREYIRSLPFKKKVPFRTLFPKTSDLALDLLEKLLAFNPVKRITVEDALKHPYLEPYHDPDDEPTAPPIPEEFFDFDKHKDTLSKEQLKQLIYQEIMR

SEQ ID NO: 4515 - protein, 314 aa, Capsicum chinense
MGSKYSKATNSISDASNSFESYRFPLEDLEEATNNFDDKFFIGEGAFGKVYKGVLRDGTKVALKRQNRDSRQGIEEFGTEIGILSRRSHPHLVSLIGYCDERNEMVLIYDYMENGNLKSHLTGSDLPSMSWEQRLEICIGAARGLHYLHTNGVMHRDVKSSNILLDENFVPKITDFGISKKGTELDQTHLGTVVKGTLGYIDPEYFIKGRLTEKSDVYSFGVVLFEVLCARSAIVQSLPREMVNLAEWAVESHNNGQLEQIVDPNLADKIRPESLRKFGDTAVKCLALSSEDRPSMGDVLWKLEYALRLQESVI

SEQ ID NO: 4516 - protein, 410 aa, Rickettsia sp. AT1
DSEFAELKIRGKIFKLPIFKASIGEDVIDISRVSAEADCFTYDPGFMSTASCQSTITYIDGDKGILRHRGYDIKDLAEKSDFLEVAYLLIYGELPNSEQYNNFTKQVAHHSLVNERLHYLFQTFCSSSHPMAIMLAAVGSLSAFYPDLLNFKEADYELTAIRMIAKIPTIAAMSYRYSIGQPFIYPDNSLDFTENFLHMMFATHCTKYKVNPIIKNALNKIFILHADHEQNASTSTVRIAGSSGANPFACISTGIASLWGPAHGGANEAVINMLKEIGSSENIPKYIAKAKDKNDPFRLMGFGHRVYKNYDPRAAVLKETCKEVLKELGQLENNPLLQIAIELEAIALKDEYFIERKLYPNVDFYSGIIYKAMGIPSQMFTVLFAIARTVGWMAQWKEMHEDPEQKISRP

SEQ ID NO: 4517 - protein, 316 aa, Capsicum chinense
MGSKYSKATNSINDALNSSYLVPFESYRFPLVDLEEATNNFDSKGGFGKVYRGVLRDGTKVALKRHNRDSGQSIELFRTEFEILSRRSHPHLVSLIGFCDERNEMILIYKYMENGNLKRHLYGSDLPTMSMSWEQRLEICIGAARGLHYLHTNGVMHRDVKSSNILLDENFVPKITDFGISKKGTELDQTHLSTVVKGTLGYIDPEYFIKGRLTEKSDVYSFGVVLFEVLCARSAIVQSLPREMVDLAEWAVESHNNGQLEQIVDPNLADKIRPESLRKFGDTAVKCLALSSEDRPSMGDALWKLEYALRLQESVI

SEQ ID NO: 4518 - protein, 411 aa, Rickettsia sp. DT1
DSEFAELKIRGKIFKLPILKASIGEDVIDISRVSAEADCFTYDPGFMSTASCQSTVTYIDGDKGILRHRGYDIKDLAEKSDFLEVAYLLIYGELPSGEQYNNFTKQVAHHSLVNDRLHYLFQTFCSSSHPMAIMLAAVGSLSAFYPDLLNFKEADYELTAIRMIAKIPTIAAMSYKYSIGQPFIYPDNSLDFTENFLHMMFATPYTKYTVNPIIKNALNKIFILHADHEQNASTSTVRIAGSSGANPFACISTGIASLWGPAHGGANEAVINMLKEIGSSEYIPKYIAKAKDKNDPFRLMGFGHRVYKNYDPRAAVLKETCKEVLKELGQLDNNPLLQIAIELEAIALKDEYFIERKLYPNVDFYSGIIYKAMGIPSLMFTVLFAIARTVGWMAQWKEMHEDPEQKISRPR

SEQ ID NO: 4519 - protein, 462 aa, Erwinia carotovora subsp. atroseptica SCRI1043
MRSIKRLPMPPTRGVLGHVDYLKRSDIHLQMLRWKAQYGCFFRLRLGLSSAVVIADTEWIRTIMKSRPDEFRRISSIESVFQEAGLNGVFSSEGERWELQRKLTEPMFQPAHLKYFYSSLRKVTSRLSERFTMLAETGEAIALVDEFKRYTVDITSLLAFGEDVNTLEQGDNPLSQSLRHLFPIINERCESPIPVWRYIRRARDKQFDASLNLIREYVDGFISRQRQRIQLNPQLLEAPENMLQVMLAEQQKDGTLKDDDIVANAITLLIAGEDTTANTLTWMSFLLCSAPSVEECVFQECKEAAEGVGAILPWPLPRMAWLTAVMYESMRLKPVAPLLYLEPTRDTVIDDFLIKKGTPLLLMLNASGFNDELFQQPYDFMPERWLERGKAAFSDLQPFGGGPRMCPGRSLALMEIKLGFHALCSGFHVEALQVASAVTESFAFTVTPSGFRVKLHKRELQQ

SEQ ID NO: 4520 - protein, 380 aa, Saccharomyces cerevisiae
MEFVAERAQPVGQTIQQQNVNTYGQGVLQPHHDLQQRQQQQQQRQHQQLLTSQLPQKSLVSKGKYTLHDFQIMRTLGTGSFGRVHLVRSVHNGRYYAIKVLKKQQVVKMKQVEHTNDERRMLKLVEHPFLIRMWGTFQDARNIFMVMDYIEGGELFSLLRKSQRFPNPVAKFYAAEVILALEYLHAHNIIYRDLKPENILLDRNGHIKITDFGFAKEVQTVTWTLCGTPDYIAPEVITTKPYNKSVDWWSLGVLIYEMLAGYTPFYDTTPMKTYEKILQGKVVYPPYFHPDVVDLLSKLITADLTRRIGNLQSGSRDIKAHPWFSEVVWERLLAKDIETPYEPPITSGIGDTSLFDQYPEEQLDYGIQGDDPYAEYFQDF

SEQ ID NO: 4521 - protein, 359 aa, Capsicum chinense
  misc_feature (288)..(288): Xaa can be any naturally occurring amino acid
NMSYRVPFAALLEATSNFDESLVIGIGGFGKVYKGVLYDGTKLAVKRGNPKSQQGLAEFRTEIEMLSQFRHRHLVSLMGYCDEKNEMILVYEYMENGTLKSHLYGSDLPSMSWKQRLEICIGSARGLHYLHTGYAKAVIHRDVKSANILLDESFMAKVADFGLSKTGPELDQTHVSTAVKGSFGYLDPEYFRRQQLTEKSDVYSFGVVLFEVLCARPVIDPSLPREMVNLAEWAMKWQKKGQLEQIIDPTLVGKIRPDSLRKFGETAEKCLADFGVDRPSMGDVLWNXEYALQLQEAVIQDDPEENSTLLIGELSPQVNDFSQVDAGASAALIGTPNLDDLSGVSMSRVFSQLVKSEGR

SEQ ID NO: 4522 - protein, 411 aa, Rickettsia sp. FLA1
DSEFAELKIRGKIFKLPILKASIGEDVIDISRVSAEADCFTYDPGFMSTASCQSTVTYIDGDKGILRHRGYDIKDLAEKSDFLEVAYLLIYGELPSGEQYNNFTKQVAHHSLVNDRLHYLFQTFCSSSHPMAIMLAAVGSLSAFYPDLLNFKEADYELTAIRMIAKIPTIAAMSYKYSIGQPFIYPDNSLDFTENFLHMMFATPYTKYTVNPIIKNALNKIFILHADHEQNASTSTVRIAGSSGANPFACISTGIASLWGPAHGGANEAVINMLKEIGSSEYIPKYIAKAKDKNDPFRLMGFGHRVYKNYDPRAAVLKETCKEVLKELGQLDNNPLLQIAIELEAIALKDEYFIERKLYPNVDFYSGIIYKAMGIPSQMFTVLFAIARTVGWMAQWKEMHEDPEQKISRPR

SEQ ID NO: 4523 - protein, 314 aa, Capsicum chinense
MGSKYSKATNSINDALNSSYLVPFESYRFPLVDLEEATNNFDGKGGFGKVYRGVLRDGTKVALKRHNRDSGQSIEPFRTEFEILSRRSHPHLVSLIGFCDERNEMILIYDYMENGNLKSHLYGSDLPTMSWEQRLEICIGAARGLHYLHTSAAIHRDVKSTNILLDENFVAKITDFGISKKGTDLDHTHVSTHVKGAFGYLDPEYFIKGRLTEKSDVYSFGVVLFEVLCARSAIVQSLPREMVNLAAWAVESHNNGQLEQIIDPNLVAKIRPESLGKFGETAVKCLAPSSEDRPSMGDVLWKLEYALRLQESVI

SEQ ID NO: 4524 - protein, 322 aa, Xanthomonas axonopodis pv. citri str. 306
MTASPSKLAQLRELSVVVADTGDYDAIKRLKPVDCTTNPTLVKKALDLPVYADLIERELAWGREHGGDDRTATVNEVADRLTIGVGVKLAELVPGRVSTEVDADLAHDTQATIAKARKFIAMYAERGVSKDKILIKIAATWEGIEAARQLQKEGIDCNLTLIFNRSQALACAEAGVFLISPFVGRILDYYVAQGQTPASIDEDPGVVFVRTVYNEFKQRGSSTVVMGASFRSTAQIEALAGCDRLTISPDLLEKLDAEHGELPRKLSPAQADNAQFTPIDSDSFASGLAADPMATEKLAGGIDTFAKDLHALRKTIADKLAG

SEQ ID NO: 4525 - protein, 287 aa, Zea mays
MAMSDLTATVIPKPDGADDESVEIREVWADNLEEEFALIRDIVDEYPFVAMDTEFPGIVCRPVGAFRSPADYNYATLKANVDMLHLIQLGLTFSGPRGELPALGAGRRRCVWQFNFREFDDARDIFASDSIELLRRSGIDFRRNAERGVDARRFAELLMSSGVVLNDSVYWVTFHAGYDFGYLLKILTCNSLPDTQAGFFKLMKIYFPTVYDIKHLMKFCNSLHGGLNKLAELLDVERVGESHQAGSDSLVTSCAFWKLKDSFFAGSTEKYAGVLYGLNAENGVSAH

SEQ ID NO: 4526 - protein, 70 aa, Glycine max
  misc_feature (31)..(31): Xaa can be any naturally occurring amino acid
EALLATGSNSDTGYIAHAPSESNGLSDVLIXSSPILTGVSARARGLAAAAAAAAAGGVSGFEFGVDPNLD

SEQ ID NO: 4527 - protein, 392 aa, Pseudomonas stutzeri
MLCAEQIALIKATVPLLESGGEALTTHFYKLWLDEHPEVQPLFNQAHQASGEQPRALANGVLMYAKHIDRLEALGPLVGQIINKHVALQVLPEHYPLVGSCLLRAIREVLGEEIATEAVIDAWGAAYQQLADILIGQEESLYRAKAAAEGGWRGARPFRIIRKVAESEEITSFHLQPEDGGPLMDFLPGQYIGLRLEVDGQEVRRNYSLSAASNGSEYRISVKREPGGVASNALHAMPEGAVLELFGPAGEFTLEPGNKPLVLISGGVGITPTLAMLEQALASTRPVHFIHCARNAGVHAFRCSVDTLAERHAQLKRFYCYEEHDGAGAAPDAVGRLTEQQLGEWLPEDRNVDAYFLGPKPFMAAVRRQLKSLGVPEQQTRYEFFGPASALD

SEQ ID NO: 4528 - protein, 232 aa, Zea mays
  misc_feature (193)..(193): Xaa can be any naturally occurring amino acid
MGYEDSVYLAKLAEQAERYEEMVENMKAVASADQELSVEERNLLSVAYKNVIGARRASWRIVTSIEQKEESKGNEAQVGLIKEYRQKIEAELAKICEDILECLDGHLIPSAESGESKVFYHKMKGDYHRYLAEFAVGDKRKTSADKSLEAYKAATEVAASSLAPTHPIRLGLALNFSVFYYEILNSPDQACQXGQQAFDDAIAELDTLSEESYKDSTLIMQLLRDNLTLWTS

SEQ ID NO: 4529 - protein, 147 aa, Brassica napus
MRSPISGLFSRSLSFLHRTSPLTSAARHLCAVTSPEARTKNLERIADDLLNLNRIELYDYSILFSHKLGLNRYGSAVSSPAGDLPDASASAETKTAEKTAFDVKLEKFDSASKIKVIKEIRAFTELGLKEAKDLVEKAPVVVKTGVT

SEQ ID NO: 4530 - protein, 381 aa, Lycopersicon esculentum
MGEALKYSIMDSVRSVVFKESENLEGSCTKIEGYDFNKGVNYAELIKSMVSTGFQASNLGDAIAIVNQMLDWRLSHELPTEDCSEEERDVAYRESVTCKIFLGFTSNLVSSGVRDTVRYLVQHRMVDVVVTTAGGIEEDLIKCLAPTYKGDFSLPGASLRSKGLNRIGNLLVPNDNYCKFENWIIPVFDQMYEEQINEKVLWTPSKVIARLGKEINDETSYLYWAYKNRIPVFCPGLTDGSLGDMLYFHSFKKGDPDNPDLNPGLVIDIVGDIRAMNGEAVHAGLRKTGMIILGGGLPKHHVCNANMMRNGADFAVFINTAQEFDGSDSGARPDEAVSWGKIRGGAKTVKVHCDATIAFPILVAETFAAKSKEFSQIRCQV

SEQ ID NO: 4531 - protein, 376 aa, Musa acuminata
MEGGAAGGQRDRETLDAVRSVVFKPSVSLEEKRFPRVQGYDFNRGCDLIGLLDSISSTGFQASNLGDAIDVINQMIDWRLSHDAPTEDCSEEERNLAYRQSVTCKIFLGFTSNLVSSGIREIIRFLVQHRMVEVLVTTAGGIEEDLIKCLAPTYKGDFSLPGSYLRSKGLNRIGNLLVPNDNYCKFEDWIMPILDQMLLEQTTENVVWTPSKVIARLGKEINDESSYLYWAYKNNVSVYCPALTDGSLGDMLYCHSVRNPGLLIDIVQDIRAMNGEAVHVGLRKTGVIILGGGLPKHHICNANMFRNGADYAVYVNTAQEFDGSDSGAEPDEAISWGKIKGSAKTIKVHCDATIAFPLLVAATFARKFQERNNKLA

SEQ ID NO: 4532 - protein, 290 aa, Solanum sucrense
LNSSYRVPFESFRVPFVDLQEATNNFDEKFHIGLGGFGKVYRGVLRDGTKVALKRYTPESNQGLQEFQTEIEILSFCSHPHLVSLIGYCDERNEMILVYDYMENGNLRSHLYGSDLPSMSWEQRLEICIGAARGLHYLHTSAVIHRDVKPINILLDENFVAKITDFGLSKKRTELDQTHLSTLVQGTLGYLDPEYFNRGQLTEKSDVYSFGVVLFEVLCARPAIVQTPSRGMISLAEWVVESQKKGQLEQIIDPNIVAEIRPESLRIFGETAVKCLALSGEDRPSMGDVL

SEQ ID NO: 4533 - protein, 118 aa, Glycine max
MATFMLKLVLPLLFLFMIPPKTAYAEFEQWCVADEQTTESELQAALDWACGKGGADCSKIQVNQPCYLPNTLKDHASYAFNSYYQKFKHSGGSCYSRGAAITTEVDPSHGSCHYDFIP

SEQ ID NO: 4534 - protein, 582 aa, Triticum aestivum
MDTHIGSVDGPSPAAVNGAVGCPASAPGCPIMSSHPVVFAVPGDFNLTLLDHLVDEPGLRLVGCCNELNAGYAADGYARARGVGACAVTFTVGGLSVLNAIAGAYSENLPVICIAGGPNSNDYGTNRILHHTIGIPDFSQELRCFQTVTCHQAVVTNLDDAHEQIDTAIATALRESKPVYLSISCNLPGLPHPTFTRDPVPFFLAPRMSNKMGLEAAVEATVEFLNKAVKPVLVAGPKLRVAKAGKAFVDLVDASGYAYAIMPSAKGFVPETHPHFLGTYWGAVSTAFCAEIVESADAYLFAGPIFNDYSSVGYSFLLKKDKAIIVQPERVIVGNGPAFGCVMMKEYLSALAKRVQKNTTAYENYKRIFVPEGHPLKGEANEPLRVNVLFKHIQDMLTGDSAVLAETGDSWFNCQKLKLPEGCGYEFQMQYGSIGWSVGALLGYAQGASDKRVIACIGDGSFQVTAQDVSTMLRCEQNSIIFLINNGGYTIEVEIHDGPYNVIKNWNYTALVEAIHNGEGKCWTAKVKCEEELTAAIETALGEKKDSLCFIEVIAHKDDTSKELLEWGSRVSAANSRPPNPQ

SEQ ID NO: 4535 - protein, 290 aa, Solanum sucrense
LNSSYRVPFESFRVPFVDLQEATNNFDEKFHIGLGGFGKVYRGVLRDGTKVALKRYTPESNQGLQEFQTEIEILSFCNHPHLVSLIGYCDERNEMILVYDYMENGNLRSHLYGSDLPSMSWEQRLEICIGAARGLHYLHTSAVIHRDVKPINILLDENFVAKITDFGLSKKRTELDQTHLSTFVQGTLGYLDPEYFNRGQLTEKSDVYSFGVVLFEVLCARPAIVQTPSRGMISLAEWVVESQKKGQLEQIIDPNIVAEIRPESLRIFGETAVECLALSGEDRPSMGDVL

SEQ ID NO: 4536 - protein, 331 aa, Gibberella zeae PH-1
MGIVDQPQSKGQESTPGDFAAVQKSIIDLLNQPDYDDGSAGPVLVRLAWHSSGTYDKVTDTGGSNGAGMRYEAEGGDPANAGLQNARVFLEPVKRLHPWITYSDLWTLAGVTAIHAMGGPEIDWLPGRTDFVDDSKLPPRGRLPDAAQGAEHIRHIFYRMGFNDREIVALSGAHNLGRCHTANSGFEGKWVNNPTRFSNQYFRLLLSETWTEKTIPESGLLQFSSVDQDTEEELMMLPTDIALTTDSEFSKYVQLYAKDKDVFFQDFKKAFAKLLELGIARNSEGKVINTDNQKGGYRSAPKKSDSTPATSGQPGASKTGGCPVMHHKAKL

SEQ ID NO: 4537 - protein, 290 aa, Solanum sucrense
LNSSYRVPFESFRVPFVDLQEATNNFDEKFHIGLGGFGKVYRGVLRDGTKVALKRYTPESNQGLQEFQTEIEILSFCSHPHLVSLIGYCDERNEMILVYDYMENGNLRSHLYGSDLPSMSWEQRLEICIGAARGLHYLHTSAVIHRDVKPINILLDENFGQKLLDFGLSKKRTELDQTHLSTLVQGTLGYLDPEYFNRGQLTEKSDVYSFGVVLFEVLCARPAIVQTPSRGMISLAEWVVESQKKGQLEQIIDPNIVAEIRPESLRIFGETAVKCLALSGEDRPSMGDVL

SEQ ID NO: 4538 - protein, 185 aa, Xanthomonas campestris pv. campestris str. ATCC 33913
MSLNRLLVLVFAGLFSTAAVAAGTSVLDLDYRPLAGKAPINLNRSYGGKVVMVVNTASKCGFTPQYEGLEALNQRFGSRGFTVLGFPSNDFQGQEPGSEKQIQEFCTLTYGVKFPMFEKVHVLGAQATPLYQRLTRETGVAPGWNFHKYLIGRNGHVVAQFPSKVKPDDPQVLAAIERELKAPAR

SEQ ID NO: 4539 - protein, 411 aa, Rickettsia sp. IM1
DSEFAELKIRGKIFKLPILKASIGEDVINISRVSAEADCFTYDPGFMSTASCQSTITYIDGDKGILRHRGYDIKDLAEKSDFLEVAYLLIYGELPSSEQYNNFTKQVAHHSLVNERLHYLFQTFCSSSHPMAIMLAAVGSLSAFYPDLLNCKEADYKLTAIRMIAKIPTIAAMSYKYSIGQPFIYPDNSLDFTENFLHMMFATPCTKYKVNPIIKNALNKIFILHADHEQNASTSTVRIAGSSGANPFACISTGIASLWGPAHGGANEAVINMLKEIGSSENIPKYIAKAKDKNDPFRLIGFGHRVYKNYDPRAAVLKETCKEVLKELGQLENNPLLQIAIELEAIALKDEYFIERKLYPNVDFYSGIIYKAMGIPSQMFTVLFAIARTIGWMAQWKEMHGDPEQKISRPR

SEQ ID NO: 4540 - protein, 488 aa, Gibberella zeae PH-1
MLSVGLKAVALTLLLGSRANASPNTPTASACRQIAKALGEGVFFPDDTDYSELSTINWSQTAWAQPACIVSPSNASEVSKVVKIAVAQKARFAIRSGGHSANPGYANINDGILISLDRLTKTVFDPSTSLVSIGPGNRWGEVYEHLEQFNRTMVGGRVPTVGVGGLTLGSGLSYLTDLHGLACDNVVSYEVVLSNGSIVEASATSNKDLFWGLKGGINNFGVVTEFKSRTYVLDRVWGSVSLYNASQMPEVLQAVNKYQSAPNKDLYANMHMNLAPINDSIVLTLVYLKPEPQPKAFAPFYALKPLMAQDGIMTLSQLQSLFSPGGSPRWALHVTGFKPSSAIYKKIDGIFRTAPELDDLRGITGGMMVGTVQPITANVALAGQSLGGNALGLQAVNQTWLGLSAAWWSKDDDAAAERALAAFSKRIEAAIPKNMKVPYLFMNDAGPKQEVIKSYGTDNVKRLQQVRAKYDASLVFHQLVPGGQKIPL

SEQ ID NO: 4541 - protein, 411 aa, Rickettsia sp. IO1
DSKFAELKIRGKIFKLPILKASIGEDVIDISRVSAEADCFTYDPGFMSTASCQSTITYIDGDKGILRHRGYDIKDLAEKSDFLEVAYLLIYGELPSSEQYNNFTKQVAHHSLVNERLHYLFQTFCSSSHPMAIMLAAVGSLSAFYPDLLNCKEADYKLTAIRMIAKIPTIAAMSYKYSIGQPFIYPDNSLDFTENFLHMMFAMPCTKYKVNPIIKNALNKIFILHADHEQNASTSTVRIAGSSGANPFACISTGIASLWGPAHGGANEAVINMLKEIGSSENIPKYIAKAKDKNDPFRLIGFGHRVYKNYDPRAAVLKETCKEVLKELGQLENNPLLQIAIELEAIALKDEYFIERKLYPNVDFYSGIIYKAMGIPSQMFTVLFAIARTIGWMAQWKEMHGDPEQKISRPR

SEQ ID NO: 4542 - protein, 469 aa, Bacillus sp. KSM-K16
MKLFINGEWVSEELDVFDVVNPATGEVVGSVPKGGAKEAKVAADGAYESLPAWAERSAYERSAILEAWHDLIAEQKEELARLMTMEQGKPINEARGEIAYANSFIKWYAEEGKRIYGETIPASSPDKRLFVVKQPVGVVAAITPWNFPAAMITRKVAPALAAGCTVLIKPASQTPLTALKLAELAEKAGLPKGVLHVVVGSTSDISKAWQEDERVRKLTFTGSTEIGRTLMSEAGQTVKKISLELGGHAPVLVFEDADIDNAVQETIASKFRNGGQTCVCANRIYVHESIAEAFITKMKQAVEQLKVGNGLNEETDIGPLIDEEAVDKVLTHIRDAKDKGAEVLTGGNSSDGLFIEPTVIAGVTDDMACMSEETFGPLAPISTFKTEEEVVKRANDTIYGLAAYLFTTDLSRGIRVAEKLDYGVVGLNDGGPSVAQAPFGGFKQSGIGREGGHEGLEEFLESKYVSLKM

SEQ ID NO: 4543 - protein, 236 aa, Nostoc sp. PCC 7120
MTVTADPVTLMKQEVGKAAAALVKSGSIVGLGTGSTTAYTIQYLGDRLKSGELTDIVGIPTSFQSEVLSKQYGVPLTTLDAVDHIDIAIDGADEVDPHKNLIKGGGAAHTREKVVDYLANQFIVVVDSGKLVDRLGSVFAVPVEVIPMAITPVTNAIKQLGGKPELRMGVKKAGPVITDQGNFVLDVRFDSIDDPVNLEKILNNIPGVLENGIFVNCADIVLVGEVKDGQPLVRRL

SEQ ID NO: 4544 - protein, 510 aa, Bacillus cereus G9241
MFGIDIVIPDITYLVENQERVKGLFITHGHEDHIGGIVYVLRKLSIPVYATKLTVGLIQEKLGEAGMLGRVDLKTIDSNSTVEFNTTTVSFFGTTHSIPDSVGVCFHTSKGAIVYTGDFKFDQTPIGNSGADLGKMAQIGNEGVLCLLSDSTNAERPGYTGSEKEVGVEISKVFYGAEGRIIVASFASNVHRIQQVFDAAAETGRKVAVVGRSMVKVVDIARRLGYLDVPEGMVISLKEVDNFPEKKVAILTTGSQGEPMAALSRMAKQAHKQISIRKGDTVIIAASPIPGNEISVSKIIDLLFRAGAEVVYYGERKVHVSGHGSQEELKLMLNLMKPKYFVPVHGEFRMQKAHAYLAEDVGIARENIFIVEKGDVIAFGDDEANLVGKVQAGNVLIDGLGVGDVGNIVLRDRKMLSQDGILVVVVTLGKDEKKIISGPEIISRGFVYVRESEALIDRSTEIVRMIVEQSIKEYSIEWSMLKQNIRELLGQFLYEETKRKPMILPIIMEV

SEQ ID NO: 4545 - protein, 207 aa, Lactobacillus plantarum WCFS1
MVKSDNITWHQSQVSKAERQALNHHKSVVLWFTGLSGSGKSTIANAVEKALFDQQVGSYVLDGDNMRFGLNKNLGFSAEDREENIRRIGEVAKLFVDAGVITLTAFISPYRADRDKVRANLEVDEFIEVFVDTPLEVCEQRDVKQLYAKARRGEITGFTGIDAPYEAPIDPEITIDTSKQPLTASVQQVLNYLAEHHYVSLVTANEN

SEQ ID NO: 4546 - protein, 360 aa, Halobacterium sp. NRC-1
MRGAAPDAVLDAVQSGDPLPGTGGFAGELPDGRLARDVLGRRLCYVDGDEWSHDPRDLAAPTLLPAGHVRAPGATGSGRPVWSLPEPAPTGDEPVERVRDAVAGALGGVPAGDDLAVAFSGGVDSALAAAALDAPLYVVGYADSSDIAAARESAAAMGRADDLRVHEVTLADIEAAVPTVARAIGRTNAMAVQIALPLFLVAARAAADGYSRLVVGQGADELFGGYAKVAKAPTDPRTDADTVRGARRETVQSLPAQLERDLRALRAAGVEPVTPLLHDDVVRAALALPGEWLVSGDTRKRALREAARSWLPDAVADRDKKAVQYGSLVAREVDRLARQAGFKRRMDDHVTQYVEARIEE

SEQ ID NO: 4547 - protein, 323 aa, Vicia faba
MSAQGQPQVQAQVQGIDEAVLDDIIRRLTEVRLSRPGKQVQLSEAEIKQLCLASRDIFLQQPNLLELEAPIKICGDIHGQYSDLLRLFEYGGLPPKSNYLFLGDYVDRGKQSLETICLLLAYKIKYPENFFLLRGNHECASINRIYGFYDECKRRFNVRLWKAFTDSFNCLPVAALIDDKILCMHGGLSPDLTNLDQIRILPRPVAIPDTGLLCDLLWSDPGRDVKGWGMNDRGVSYTFGPDKVAEFLSMHDLDLICRAHQVVEDGYEFFADRQLVTIFSAPNYCGEFDNAGAMMSVDENLMCSFQILKPAEKKTKFVMSNKM

SEQ ID NO: 4548 - protein, 151 aa, Brassica napus
  misc_feature (139)..(139): Xaa can be any naturally occurring amino acid
EALPESARSCDDGLYRAIDSYLKAHPTLSEHERKRLCRVMDCQKLSMDACMHAAQNERLPLRVVVQVLFSEQVKISNALANTSLKESTTLGEAMGTTYQPMIPNRKTLIEATPQSFQEGWAAAKKDINTLKFELETVKXKYVELQNEMEVM

SEQ ID NO: 4549 - protein, 582 aa, Glycine max
  misc_feature (468)..(468): Xaa can be any naturally occurring amino acid
MAASLFMPSSIVDEEARFEAEVAEVQAWWNSERFRLTKRPYTARDVVSLRGNLRQTYASNEMAKKLWCLLKNHQANGTASRTFGALDPVQVTQMAKHLDTIYVSGWQCSATHTTSNEPGPDLADYPYDTVPNKVEHLFFAQQYHDRKQREERMRMSREERARTPYVDYLRPIIADGDTGFGGTTATVKLCKLFVERGAAGIHIEDQSSVTKKCGHMAGKVLVAISEHINRLVAARLQFDVMGVETVLVARTDAEAANLIQSNIDTRDHQFILGVTNPNLKGKSLATLMQQGMAAGKNGAELQALEDEWLSKAQLKTLSEAVVEAIERQNNIGEEEKRRKLNEWMHHSSYERCLSNEEGREIAEKLGVRNLFWDWDLPRTREGFYRFKGSVTASVVRGCAFSPHADVIWMETASPNVVECTEFSEGVRSKHPQMMLGYNLSPSFNWDASGMSDEQMRDFIPKIGKHGYXAKLGYVWQFITVGGLHSNALITSTFARDFANRGMLAYVERIQREERNNGVDTLAHQKWAGANYYDRYLKTVQGGVASTAAMGKGVTEEQFKESWTRPGAVEIDRGSIVVAKARM

SEQ ID NO: 4550 - protein, 373 aa, Dianthus caryophyllus
MEDANHDSVASAHSAAFKKSENLEGKSVKIEGYDFNQGVNYSKLLQSFASNGFQASNLGDAIEVVNHMLDWSLADEAPVDDCSEEERDPKFRESVKCKVFLGFTSNLISSGVRDTIRYLVQHHMVDVIVTTTGGIEEDLIKGRSIKCLAPTFKGDFALPGAQLRSKGLNRIGNLLVPNDNYCKFEDWIIPILDKMLEEQISEKILWTPSKLIGRLGREINDESSYLYWAFKNNIPVFCPGLTDGSLGDMLYFHSFRNPGLIVDVVQDIRAVNGEAVHAAPRKTGMIILGGGLPKHHICNANMMRNGADYAVFINTAEEFDGSDSGARPDEAISWGKISGSAKTVKVHCDATIAFPLLVAETFAAKREKERKSC

SEQ ID NO: 4551 - protein, 346 aa, Chlamydomonas reinhardtii
MTRGLDYYEVMGLTRSANDIDIRRAYRRLALKYHPDINKDGAAGDEFLRICEAYEVLCDPKTKGFYDLYGEDALKDGISDGNGGLKGPMYRFNPEESPKAVFERFFGTANPYEALEALSNQFESMTSEEAPARGKNKVYPLELTLEEIFHGCLKKVAHKRKVLLFSGEYVEEERQLTVDVKPGLPTGTRFVFEGEGNKTPKKEPGPVVFVLKPKPHPRFVRRGSDLVHKVTLPLHHALIGTTLDIRTLDDRDLKVPISDIMRPGSSLTVPGEGMPLPATPSARGNLVIEIDLLFPTHLTETQKMLLRSAFFLPPPTEQNEETKKALRDYEAAFKHDLKGWAPVFKR

SEQ ID NO: 4552 - protein, 112 aa, Bartonella sp. Pm1785nv
NEACLKMLQEIGSVKRIPEFIARAKDKNDPFRLMGFGHRVYKNYDPRAKIMQKTCHEVLKELNIQDDPLLDIAIELEKIALNDEYFVEKKLYPNVDFYSGITLKALGFPTEM

SEQ ID NO: 4553 - protein, 482 aa, Shewanella oneidensis MR-1
MLLNDPSLLRQQCYINGQWCDANSKETVAITNPATGAVIACVPVMGQAETQAAIAAAEAALPAWRALTAKERGAKLRRWFELLNENSDDLALLMTSEQGKPLTEAKGEVTYAASFIEWFAEEAKRIYGDTIPGHQGDKRIMVIKQPVGVTAAITPWNFPAAMITRKAAPALAAGCTMVVKPAPQTPFTALALAVLAERAGIPAGVFSVITGDAIAIGNEMCTNPIVRKLSFTGSTNVGIKLMAQCAPTLKKLSLELGGNAPFIVFDDANIDAAVEGAMIAKYRNAGQTCVCANRIYVQAGVYDEFAEKLSMAVAKLKVGEGIIAGVTTGPLINAAAVEKVQSHLEDAIKKGATVLAGGKVHELGGNFFEPTVLTNADKSMRVAREETFGPLAPLFKFNDVDDVIKQANDTEFGLAAYFYGRDISLVWKVAESLEYGMVGVNTGLISTEVAPFGGMKSSGLGREGSKYGIEEYLEIKYICMSV

SEQ ID NO: 4554 - protein, 160 aa, Dianthus caryophyllus
MSDDDHHFESSADAGASKTYPQQAGTIRKSGHIVIKNRPCKVVEVSTSKTGKHGHAKCHFVAIDIFNGKKLEDIVPSSHNCDVPHVNRVDYQLLDITEDGFVSLLTDSGDTKDDLKLPADEALVKQMKEGFEAGKDLILSVMCAMGEEQICAVKDVSGGK

SEQ ID NO: 4555 - protein, 392 aa, Escherichia coli
KITLQNGKLNVPENPIIPYIEGDGFGVDVTPAMLKVVDAAVEKAYKGERKISWMEIYTGEKSTQVYGQDVWLPAETLDLIREYRVAIKGPLTTPVGGGIRSLNVALRQELDLYICLRPVRYYQGTPSPVKHPELTDMVIFRENSEDIYAGIEWKADSADAEKVINFLREEMGVKKIRFPEHCGIGIKPCSEEGTKRLVRAAIEYAIANDRDSVTLVHKGNIMKFTEGAFKDWGYQLAREEFGGELIDGGPWLKVKNPNTGKEIVIKDVIADAFLQQILLRPAEYDVIACMNLNGDYISDALAAQVGGIGIAPGANIGDECALFEATHGTAPKYAGQDKVNPGSIILSAEMMLRHMGWTEAADLIVKGMEGAINAKTVTYDFERLMEGAKLLK

SEQ ID NO: 4556 - protein, 113 aa, Bartonella sp. Pm1857nv
ANEACLKMLQEIGSVKRIPEFIARAKDKNDPFRLMGFGHRVYKNYDPRAKIMQKTCHEVLKELNIQDDPLLDIAIELEKIALNDEYFVEKKLYPNVDFYSGITLKALGFPTEM

SEQ ID NO: 4557 - protein, 268 aa, Oryza sativa (japonica cultivar-group)
GADGKLSRRYAAAPVCKWLTPNEDGVSMAALALMNQDKVLMESWYYLKDAVLDGGIPFNKAYGMTAFEYHGTDARFNRVFNEGMKNHSVIITKKLLDLYTGFDAASTVVDVGGGVGATVAAVVSRHPHIRGINYDLPHVISEAPPFPGVEHVGGDMFASVPRGGDAILMKWILHDWSDEHCARLLKNCYDALPEHGKVVVVECVLPESSDATAREQGVFHVDMIMLAHNPGGKERYEREFRELARAAGFTGFKATYIYANAWAIEFTK

SEQ ID NO: 4558 - protein, 503 aa, Haloarcula marismortui ATCC 43049
MPDSETRTAMRERHLQAHEDALADIVIEPWIGGTSVSGSEPIPTRDPVIDEPITAVPVCDDELVNQAVQVAWDGFETWSDRTPTDRSQRLSEWVDVLEEHLDELALLECLDTGKPLSEARGEVEGALRTLEYYAAVARTQQGSQIPAQGDLHMYTRMEPYGVVGQITPWNFPAWAAAWKFGPALAAGNCSVLKPSAYTPLTTVRMAQLSDGIFPDGVINVVTGGGSTTGATLTEHEDVRKLSFTGSGSVGQEVMQTAAARIAPVTLELGGKSPLLVFPDADMQTAVDAAAAGVYYSTGEICDALSRAIVHEDVHDEFVDRLVARAESYTLGDPLDDETTLGPLTNEDQFETVSDYVTIGRNEGATLATGGTAPDDRALADGHYVEPAVFTDVEPDMRIAREEIFGPVQTVQSFETYDEAIALANDTEFGLAGGVATESTDIAHQAAADIDAGVVYINAYGPIRPEGPYGGFKESGIGHDLGRAAVEQYQQPKTVYVNLDSPEI

SEQ ID NO: 4559 - protein, 325 aa, Glycine max
MGGRGAMRSAAKIAGIGVSKAALRPSALPTEQTVRNASRPTAVTGVSSQSAKSAEVLPTEQTVRNASRPTAVSGVSSQSAKSAEVAPLHTAAAWDDWDFAEDGELVVPRMVFGSVPTLDEATEATAELKDAIDQVYLCHESSQYSSRGGQVSALSPTGGQVSALSPTLYEPVNRSCVVDAISDSSAPKHAIQAFHLLSTSRDGVSSQNYSIRNREIFKCLLNEVLGSFIELIDSIHLFLVSTRLLWLHLLVTQMYGMQSWKILPSVVSSNHNSQWLILEQQEILRNWISSQVVLLKQLNPLKDWECQLSLTRGMGFSISWIFYRM

SEQ ID NO: 4560 - protein, 159 aa, Lycopersicon esculentum
MSDEEHHFESKADAGASKTYPQQAGTIRKGGHIVIKNRPCKVVEVSTSKTGKHGHAKCHFVAIDIFTGKKLEDIVPSSHNCDVPHVNRTDYQLIDISEDGFVSLLTENGNTKDDLRLPTDDTLLAQVKDGFAEGKDLVLSVMSAMGEEQICGIKDIGPK

SEQ ID NO: 4561 - protein, 390 aa, Burkholderia cepacia R18194
MSETKDAAAPAAAGAFKPKKSVALSGVTAGNTALCTVGKTGNDLHYRGYDILDVAESCEFEEIAHLLVHGTLPNLTELAAYKNKLRALRGLPNALKAALEQIPASAHPMDVMRTGVSVLGTVLPEKDDHNLPGARDIADRLMASLGSMLLYWYHFSHNGKRIETETDDDSIGGHFLHLLHGKTPSKSWVEAMHTSLILYAEHEFNASTFTGRVIAGTGSDIYSAITGAIGALRGPKHGGANEVAYEIQSRYSSPDDAEADIRRRVENKEVVIGFGHPVYTISDPRNKVIKGVAHKLSKEAGDLKLYNIAERLESVMWDAKKMFPNLDWFSAVSYHMMGVPTAMFTPLFVISRTSGWSAHIMEQRIDNKIIRPSANYTGPEDLQFVPIEKR

SEQ ID NO: 4562 - protein, 299 aa, Candidatus Carsonella ruddii
MNLFNFVKKKIKISIDSADLNLIKKYNFDSLTSNPSLILLSFLNNSYNKILKFFFKNNNKKILLDPDTEISFYDYLLIFVVCNLIKFIKDKISIEIPARISYNYNKIIIYSQKILFLCDQFGINKNRILIKIPATDSGIKAASKLKLSGIECNLTLIFDLNQVKKCFDNEIYIISPFVGRISDIINCNFDSGVNFVKNIYNYKKNYNYKTKIMAASFRNLNQILNLLFCDYITISPIYFEKLLNKKINFNINDFQIFKINFNLNFLNLISSKLLINGIIQFEKDHNSLIKLIYFLINNF

SEQ ID NO: 4563 - protein, 392 aa, Escherichia coli
KITLQNGKLNVPENPIIPYIEGDGFGVDVTPAMLKVVDAAVEKAYKGERKISWMEIYTGEKSTQVYGQDVWLPAETLDLIREYRVAIKGPLTTPVGGGIRSLNVALRQELDLYICLRPVRYYQGSPSPVKHPELTDMVIFRENSEDIYAGIEWKADSADAEKVINFLREEMGVKKIRFPEHCGIGIKPCSEEGTKRLVRAAIEYAIANDRDSVTLVHKGNIMKFTEGAFKDWGYQLAREEFGGELIDGGPWLKVKNPNTGKEIVIKDVIADAFLQQILLRPAEYDVIACMNLNGDYISDALAAQVGGIGIAPGANIGDECALFEATHGTAPKYAGQDKVNPGSIILSAEMMLRHMGWTEAADLIVKGMEGAINAKTVTYDFERLMEGAKLLK

SEQ ID NO: 4564 - protein, 160 aa, Lycopersicon esculentum
MSDEEHHFESKADAGASKTFPQQAGTIRKNGYIVIKGRPCKVVEVSTSKTGKHGHAKCHFVAIDIFNGKKLEDIVPSSHNCDVPHVNRTDYQLIDISEDGFVSLLTESGNTKDDLRLPTDENLLKQVKDGFQEGKDLVVSVMSAMGEEQINAVKDVGTKN

SEQ ID NO: 4565 - protein, 312 aa, Burkholderia cepacia R18194
MDTLHLVDREIRPLLVAWPTVTLSADTLAQSRERVLPLPPPDLAGSTLERRAVPGPAGAPDVPVLVYRPDAGVRPLPAIVHMHGGGYVRGAAKDLEAVHRSVVTELGCALISIDYRLAPETVFPGAIEDCYAALAWVFRQADALGIDPARIGVAGESAGGGLAAALALLARDRGEYRLAFQHLIYPMLDDRTCTRAPHPHAGEFVWHAANNRFGWSALLGHAPGLDGVSPYAAAARATQLEGLPPAFLSVGSLDLFLDENLDYAQRLLRAGVPTELHVLPGGVHGFDIVPGARVAETARRLSHDALRRFLHG

SEQ ID NO: 4566 - protein, 111 aa, Citrus limon
METSVPYENDLNLKATELRLGLPGSDENEQQTRNNKRSLPDTPDDLDTKDKSDEAASVAKAQVVGWPPIRSYRKNSLQQKKNEGECAGIYVKVSMDGAPYLRKIDLKLYNG

SEQ ID NO: 4567 - protein, 78 aa, Zea mays
MGLWTLLEGFLLLANALAILNEDRFLAPRGWSMSEVSGNGQTKSLKGQIVGLIYATQFLRMPLIALNVLIIVVKLVSG

SEQ ID NO: 4568 - protein, 476 aa, Bacillus cereus ATCC 10987
MQNKIIVMFQKDFRLYDNPALFKATQSGEVVPVYVHDETFSMGSASKWWLHHAIIDVKKQLEALGSTLIIRKGSTEEEILSLIEQLGITAVYWNICYDPDRLQFNQNMKMMLEDKGITCKEFNSHLLLEPWMIKKKDNTEYKVFTPFYNAFQKQVISKPISKVQSIKWGSSLPESLSVTELHLLPTIPWTSHIESIWDPTEEGAYKTCKKFFSSKLASYSEGRDFPNQNAHSMLAPYLSFGQISVRWMYHYLINKSTERQCSLFEKQVNSFIRQLIWREFSYYLLYHYPFTVYKPLNKNFEHFPWNNEEELLTVWQKGETGYPFIDAGMRELWQTGFMHNRARMAVASFLVKHLLIPWQEGAKWFMDTLLDADIANNTMGWQWVAGSGADASPYFRIFNPITQGEKFDKDGEYIRKWVPELKDMPNKYIHKPWEAPEHILQKANIKLGDTYPLPVVDHKAARERALCAYKSMKEFV

SEQ ID NO: 4569 - protein, 121 aa, Spinacia oleracea
MIQPQTHLNVADNSGARELMCIRIIGASNRRYARIGDVIVAVIKEAIPNTPLERSEVIRAVVVRTCKELKRDNGMIIRYDDNAAVIIDQEGNPKGTRIFGAIARELRQKFAKIVSLAPEVL

SEQ ID NO: 4570 - protein, 506 aa, Corynebacterium diphtheriae NCTC 13129
MTVYAYPGTPGAVANYKKRYDNYIGGQWVPPVGGEYLDNITPVTGEVFCQVARGTAADVEKALDAAHDAAKTWGHSSPAERALILHRIADRMEEHLEEIAVAETWDNGKAVRETLAADIPLAIDHFRYFAGAIRAQESRTSQIDHNTVAYHFHEPIGVVGQIIPWNFPLLMAAWKIAPALAAGNTIVLKPAEQTPASILFWIDIVGDLLPDGVLNIVNGLGEEAGVALSSSNRIGKIAFTGSTQVGKIINRAAADKIIPVTLELGGKSPSIFFADIMDYDDPFREKCIEGLAMFALNQGEVCTCPSRALVHESIADEFLELGVQRVKNIKLGNPLDTETMMGAQASMEQMDKISGYLDIGPKEGAEVLTGGHVNKIDGLENGYYIEPTVFKGTNDMTIFREEIFGPVLSVATFKDFDEAIRIANDTNYGLGAGVWTRHQNTAYRAGRAIQAGRVWVNQYHNYPAHAAFGGYKESGIGRENHLMMLDHYQQTKNLLVSYDENPTGLF

SEQ ID NO: 4571 - protein, 161 aa, Zea mays
MEALKYWMEQDRVLELFCRLLIAVYGILWGFSASGPGADPKVDYACTPEEVQQHFQACGTVNRVTILTDKFGQPKGFAYVEFLEQEGVQEALNLNESELHGRQIKVAPKRTNVPGMKQRPPRGYNPYHGYPYRSYGAPYFPPYGYGRAPRFRRPMRYRPYF

SEQ ID NO: 4572 - protein, 357 aa, Triticum aestivum
  misc_feature (204)..(204): Xaa can be any naturally occurring amino acid
MGSIAAGADEDACMYALQLVSSSILPMTLKNAIELGLLETLMAAGGKLLTPAEVAAKLPSAANPEAPDMVDRMLRLLASYNVVSCKTEEGKDGRLSRRYGAAPVCKYLTPNEDGVSMSALALMNQDKVLMESWYYLKDAVLDGGIPFNKAYGMSAFEYHGTDPRFNRVFNEGMKNHSIIITKKLLESYKGFEGLNTLVDVGGGXVGATVAGITAHYPTIKGINFDLPHVISRAPPFSGVTHVGGDMFQKIPSGDTILMKWILHDWSDEHCATLLKNCYDALPAHGKVVLVECILPVNPEATPEAQGGFHLDMIMLAHNPGGRERYEREFEALAKGAGFGAIKTTYIYANIWVIEFTK

SEQ ID NO: 4573 - protein, 64 aa, Glycine max
  misc_feature (4)..(4): Xaa can be any naturally occurring amino acid
  misc_feature (49)..(50): Xaa can be any naturally occurring amino acid
  misc_feature (54)..(54): Xaa can be any naturally occurring amino acid
MSGXWVFKNGVVRLVENPGGEAVEGSRGGRRKVLVHRASNEVITSYAVXXLKLXSLGWERYYFF

SEQ ID NO: 4574 - protein, 251 aa, Zea mays
  misc_feature (197)..(197): Xaa can be any naturally occurring amino acid
  misc_feature (217)..(217): Xaa can be any naturally occurring amino acid
  misc_feature (228)..(228): Xaa can be any naturally occurring amino acid
  misc_feature (237)..(237): Xaa can be any naturally occurring amino acid
  misc_feature (243)..(243): Xaa can be any naturally occurring amino acid
MGSSRPAGRSLPDFRWNPQSFSRLLLPHPFSLLFFLFIHLVLTSLNQTFHDTNDLILFIMSSALNQLKATGTTVVSDSGDFASIGKYKPQDATTNPSLILAASKKEEYAKLIDVAIDYAKQKGGSVDQQVDDALDRLLVEFGKEILKIIPGKVSTEVDARYSFDTEASVNKALHLIELYGEQGISKDRILIKIAATXEGIKAAEILQRDHGINTNLXTLMFSLVQAIXAAEAGAYLXSPFVGXILDWVQAL

SEQ ID NO: 4575 - protein, 105 aa, Glycine max
MDIRLMDLDSPLFNTLHRIMDLTEDDNVLLISGERKREEDKEKEGAKYLRMERRVGKFMRKFTLPENANTDAISAVCQDGVLTVTVNKLPPPQPKKPKTIKVKIA

SEQ ID NO: 4576 - protein, 452 aa, Triticum aestivum
  misc_feature (439)..(439): Xaa can be any naturally occurring amino acid
MQLEVMANRGKILMERYELGRLLGKGTFGKVHYARSLESNRSVAIKMLDKEKVLKVGLSEQIRREVTTMRLVAHKNIVQLHEVMATRNKIYFVMEYVKGGELFDKVAKSGKLTEGAAHKYFQQLISAVDYCHSQGVYHRDLKLENLLLDENENLKVSDFGLSALSESKRQDGLLHTTCGTPAYVAPEVISKAGYDGAKSDIWSCGVILFVLVAGYLPFQGQNLIEMYRKIEKGDFRCPGWVSQKLQKLLYKIMDPDPNKRISIQKIKESTWFRKGPGENLTVKERLPSENANTDAVPTLGVRRRKNSHEDAKPLAVTNLNAFEIISFSTGFDLSGLFVEKESKKEARFTSEQPASAIVSKLEAVAKTLNLRVRKKDNGVVKMQVRKEGRNGVLQFDSEIFEISPSYHLIEMKQTSGDSLEYQKLLEEGIRPALKDICLXAWHGADGQQEHQG

SEQ ID NO: 4577 - protein, 127 aa, Brassica napus
MAETLKEDSIMIREVWNDNLLEEFALIREIVDKYTFIAMDTEFPGVVLKPVETFKYNNDLNYRTLKENVDLLKLIQLGLTFSDEDGNLPTCGTDKFCVWQFNFREFNIGEDIYASESIELLRQCGID

SEQ ID NO: 4578 - protein, 120 aa, Zea mays
MAMEARMKGTVKWFNDTKGFGFISPDDGSEDLFVHQSSIKADGFRSLAEGEVVEFAVSEGDDGRTKAVDVTGPDGSFVQGGAGGGGGGGGFGSRGGGGSRGGGGFGGRGGDGSGGYGGGY

SEQ ID NO: 4579 - protein, 251 aa, Zea mays
MAAKCYPTVSDEYLAAVAKAKRKLRGFIAEKNCAPLMLRLAWHSAGTFDVATKTGGPFGTMKCPAELAHGANAGLDIAVRLLEPIKEQFPILSYADFYQLAGVVAVEVTGGPEVPFHPGRQDKPEPPPEGRLPDATQGSDHLRQVFSTQMGLSDQDIVALSGGHTLGRCHKERSGFEGAWTANPLIFDNSYFTELLSGEKEGLLQLPTDKALLTDPSFRPLVDKYAADEDAFFADYAEAHLKLSELGFAEA

SEQ ID NO: 4580 - protein, 451 aa, Zea mays
  misc_feature (231)..(231): Xaa can be any naturally occurring amino acid
MAGAGAGGWKKRVGRYEVGRTIGRGTFAKVKFAVDADTGAAFAIKVLDKETIFTHRMLHQIKREISIMKIVRHPNIVRLNEVLAGKTKIYIVLELVTGGELFDRIVRHGKLRENEARKYFQQLIDAIDYCHNKGVYHRDLKPQNLLLDSRGNLKLSDFGLSTLSQNGVGLVHTTCGTPNYVAPEVLSSNGYDGSAADIWSCGVILYVLMAGYLPFEENDLPHLYEKITAAXYSCPYWFSPGAKSLIQRILDPNPRARITIEEIREDPWFKKNYVTIRCGEDENVSLDDVQAIFDNIEDKYVSDEVTHKDGGPLMMNAFEMIALSQGLDLSALFDRQQEFVKRQTRFVSRKPAKTVVATIEVVAESMGLKVHSRNYKVRLEGPASNRASQFAVVLEVFEVAPSLFMVDVRKVAGDTPEYHRFYENLCSKLGSIIWRPTEVSAKSTPLRTTTC

SEQ ID NO: 4581 - protein, 159 aa, Lycopersicon esculentum
MSDEEHQFESKADAGASKTYPQQAGTIRKNGYIVIKGRPCKVVEVSTSKTGKHGHAKCHFVAIDIFTGKKLEDIVPSSHNCDVPHVNRTDYQLIDISEDGFVSLLTDNGNTKDDLRLPTDENLLSLIKDGFAEGKDLVVSVMSAMGEEQINALKDIGPK

SEQ ID NO: 4582 - protein, 399 aa, Desulfitobacterium hafniense DCB-2
MCEKTHTMIQRGQEVVMNTYGRLPMAIVKGKGTTVWDIEGKQYLDFVTGLAVSSLGHSHPAVVEAIQKQAEEILHTSNLYWIPNQIALAEKLVEHSFADQVFFCNSGAEANEAAIKIARKYAKEHYSEDKYEILTLVNSFHGRTLATLTATGQTKYQKGYAPLPEGFTYVPINDLAQLEEKMNPKVAAVMLEPIQGEGGVFPLEVEFLAKARKLCDDYGALLIFDEIQVGLGRTGKLFAYEWSNVVPDIMTLAKALGGGVPIGVMLAKEKVASTFKPGDHASTFGGNPLATAVGCAVMDVLTEEGFLEDVQKRAQYFKQELQKLADKYQTGTEIRGQGFILGWPLDRLGAEIVEGAREKGLLINFVGGKALRFLPPLNVSYQEIDEAITILDQIFAECW

SEQ ID NO: 4583 - protein, 160 aa, Lycopersicon esculentum
MSDEEHHFESKADAGASKTYPQQAGTIRKNGYIVIKGRPCKVVEVSTSKTGKHGHAKCHFVAIDIFNAKKLEDIVPSSHNCDVPHVNRTDYQLIDISEDGFVSLLTENGNTKDDLRLPTDDTLLNQVKGGFEEGKDLVLSVMSAMGEEQICAVKDIGTKT

SEQ ID NO: 4584 - protein, 160 aa, Xylella fastidiosa Temecula1
MNVVRYTPWPGQAALQNEIKQVFDRFFEHNGDTDESAVVTAQWVPRVDIKEEPNQFVLYADLPGIDPADIEVQMDKGILSIKGERKTESSSQTEHFSRIERRYGSFHRRFALPDSADADGITASGSHGVLRILIPKQAATTPRRIQVGNAVSSDVALQSM

SEQ ID NO: 4585 - protein, 392 aa, Escherichia coli
KITLQNGKLNVPENPIIPYIEGDGIGVNVTPAMLKVVDAAVEKAYKGERKISWMEIYTGEKSTQVYGQDVWLPAETLDLIREYRVAIKGPLTTPVGGGIRSLNVALRQELDLYICLRPVRYYQGTPSPVKHPELTDMVIFRENSEDIYAGIEWKADSADAEKVIKFLREEMGVKKIRFPEHCGIGIKPCSEEGTKRLVRAAIEYAIANDRDSVTLVHKGNIMKFTEGAFKDWGYELAREEFGGELIDGGPWLKVKNPNTGKEIVIKDVIADAFLQQILLRPAEYDVIACMNLNGDYISDALAAQVGGIGIAPGANIGDECALFEATHGTAPKYAGQDKVNPGSIILSAEMMLRHMGWTEAADLIVKGMEGAINAKTVTYDFERLMEGAKLLK

SEQ ID NO: 4586 - protein, 297 aa, Candidatus Carsonella ruddii
MNLLNYLYINKKISIDSADLNLIKKYKFNSITSNPTLILKSFLNKTYNLLLNLFFYKNNKKILLDSDIQISLYDKILILIVGNLIPFINDKISIEIPARISFNYNLIIIYSKKIIFLCNKYGINIKKILIKIPGTDSGIKAAKKLKEIGIETNITLIFDINQVKKCLDYGVYIISPFVGRISDSIFCKYDSGVNFVKNIFIYKNNNNYKTKIMAASFRNINQILNLTFCDCLTISPIYFSKLLKFNLKLLFTNNIKKSIKINFLNKHSSKLIINGINIFDKDHKKFINIISTIINNL

SEQ ID NO: 4587 - protein, 473 aa, Oryza sativa (japonica cultivar-group)
MDMAAAAAEVSTPPSLVKMTEKALDEMPQWSWQSVVDAVRQCQRLLPTADATGVFDRVVGALVSHVAVSPGDATPTSSSPESSAFRFSCDTKSSCLSARCTSRTWWFEDLAVVLGPGMVERVAGALLARGTDHGVVSRFLFYYLKCRVAGAATADDKRAMLEAAIAAMSGLDRSSVSCRGLFGILRISSPLKLPTSCHDSLVAMIGAKLDHATLDNLLVPAPPGTTSSLYDVTLVLRFLDAFLHHAAATGARGETPRLKKVGKLVDLYLAEVAPDPSLRPAMFVELATALPAAARDCHDALYRAIDVYFQVHTRLTEEEKMRICKGINYEKLSPECCKHLARNAGFPTRAAVQALASQHTVLKSLLRGGGPDEHLRPVSAAKHRAGGEDHDDLVAAGGQVVLYAGRLDLSLESQNLRSLLDGMHWRVMELEKVCSRMKTQMSKMKAARRATGGGGGAAAGRRAASRSLPRMCS

SEQ ID NO: 4588 - protein, 392 aa, Escherichia coli
KITLQNGKLNVPENPIIPYIEGDGIGVDVTPAMLKVVDAAVEKAYKGERKISWMEIYTGEKSTQVYGQDVWLPAETLDLIREYRVAIKGPLTTPVGGGIRSLNVALRQELDLYICLRPVRYYQGTPSPVKHPELTDMVIFRENSEDIYAGIEWKADSADAEKVIKFLREEMGVKKIRFPEHCGIGIKPCSEEGTKRLVRAAIEYAIANDRDSVTLVHKGNIMKFTEGAFKDWGYELAREEFGGELIDGGPWLKVKNPNTGKEIVIKDVIADAFLQQILLRPAEYDVIACMNLNGDYISDALAAQVGGIGIAPGANIGDECALFEATHGTAPKYAGQDKVNPGSIILSAEMMLRHMGWTEAADLIVKGMEGAINAKTVTYDFERLMEGAKLLK

SEQ ID NO: 4589 - protein, 187 aa, Zea mays
  misc_feature (152)..(152): Xaa can be any naturally occurring amino acid
WVPRGRPGIISKLLEVYRGFEGVDVLVDVGGGTGSTLRMVTAKYKHLRGVNYDLPHVIAQAPPVQGVEHVGGSMFEYIPSGNAILLKWILHLWRDEECIKILKNCHRALPANGKVIVVECVLPASPEPTQVAQGALLLDVVMLNRLRGAKEXRTEREFAELAAEAGFSGGCRATYVFTGAWALEFTK

SEQ ID NO: 4590 - protein, 429 aa, Xanthomonas axonopodis pv. citri str. 306
MSDLDQVTLNAGDKSVVLPVLKPTLGNDCVDISKLTKETGLFTYDSGFTATASCKSAITYIDGDNGVLLYRGYPIEQLAEKSSFLEVSYLLMNGELPTADEFKKFDHEVTHHTMMHESLKNFLGGFRHDAHPMAMLAGSVASLSAFYHDTLDLNDPEQRRQAAIRLIAKVPTLAAAAYRYSIGWPIRYPRNNLNYVDRFLHMMFEVPSEPLEINPVVAKALDLLFILHADHEQNASTSTVRLVGSTGANPYASVAAGITALWGPAHGGANEAVLKMLEEIGTADNVESAVAKAKDKNSSFRLMGFGHRVYKNFDPRAKIIREMTHKVLGELGVNDPLLEVALKLEEAALKDDYFVQRKLYPNVDFYSGIIYKALNIPVEMFTVMFAIARTAGWVSHWLEQQVDPEMKIGRPRQIYTGYDKRDYTDSAKR

SEQ ID NO: 4591 - protein, 297 aa, Saccharomyces cerevisiae
MSGPPPPYEEQSSHLYGQPASSQDGNAFIPEDFKYSTVVISCEPIIRQRFMHKVYSLLSCQLLASLSFCYWASVSTSLQNFIMSHIALFYICMVVSLVSCIWLAVSPRPEDYEASVPEPLLTGSSEEPAQEQRRLPWYVLSSYKQKLTLLSIFTLSEAYCLSLVTLAYDKDTVLSALLITTIVVVGVSLTALSERFENVLNSATSIYYWLNWGLWIMIGMGLTALLFGWNTHSSKFNLLYGWLGAILFTAYLFIDTQLIFRKVYPDEEVRCAMMLYLDIVNLFLSILRILANSNDDN

SEQ ID NO: 4592 - protein, 238 aa, Petunia x hybrida
MGRGKIVIQRIDNTTSRQVTFSKRRSGLLKKAKELSILCDAQVGLIIFSSTGKLYEFASNSMRSVIERYYKMKEEHHLMSPMSEVKYWQREVASLRQQLHYLQENHRQLLGEKLSGLGIKDLTHLENKLEMSLKGVRKQKEQILTDEIKEITRKGNLIHQENIELYKKVNLIRQENTDLQKKVYEKGCGSEPNEGVQATFAISNGYDLHAPIYLQLRPPQTQKNQTSTSVMQFGLQLH

SEQ ID NO: 4593 - protein, 194 aa, Saccharomyces cerevisiae
MVTSNVVLVSGEGERFTVDKKIAERSLLLKNYLNDMHDSNLQNNSDSDSDSDSETNHKSKDNNNGDDDDEDDDEIVMPVPNVRSSVLQKVIEWAEHHRDSNFPDEDDDDSRKSAPVDSWDREFLKVDQEMLYEIILAANYLNIKPLLDAGCKVVAEMIRGRSPEEIRRTFNIVNDFTPEEEAAIRRENEWAEDR

SEQ ID NO: 4594 - protein, 72 aa, Brassica napus
  misc_feature (63)..(63): Xaa can be any naturally occurring amino acid
MADGRCCTFLEILFAIILPPLGVFLRFGCCRIEFCICLLLTILGYVPGIIYAIYVLVALDSDXHEREYYTLA

SEQ ID NO: 4595 - protein, 292 aa, Rubrivivax gelatinosus PM1
MPVDAHAQGLLDALKAQGLKSFEQMTIAEARGAIETFVGLQAPPEEVKQVHDLTVKGPAGELQYRIFVPAGPTPMPVLVYFHGGGWVGGSLAVVDEPCRAIANRCGAVVIAASYRLSPEARFPAATDDAYAAVQWASANAATYGGDASRLGVMGDSAGANLAAVVSMMARDRKGPAIKAQILTYPVIQRDGDFASRKANEEGYLLTSAGVAWFWKQYLASDADAVNPYASPIMAKDLTGLPPALVMTAEFDPARDEGEAYGKALAKAGVPVTVRRFEGLIHGVFGSADQPAS

SEQ ID NO: 4596 - protein, 359 aa, Triticum aestivum
  misc_feature (203)..(203): Xaa can be any naturally occurring amino acid
  misc_feature (223)..(223): Xaa can be any naturally occurring amino acid
MGSMAAEMTAVEEEACIYAMQLSSTAVLPLTLKNAIELGMLEVLMGAGGKMLSPSEVAARLPPTATNPDAPAMVDRMLHLLASYKVVSCEVEEGTHARRYGPTPVCKWFTPNQDGISMAPLLLLTNDKVPMESLYHLKDAVLDGGLPFHKAHGMTMYEYTKTDARLNRVFNEAMKGYTTIVTGKLVDLYTGFQDVATLVDVGXGGIGATIQAITSKYPHIKGXINFDLAHVIAEAPHSPGVEHVAGDMFKNVPSGDAIVLKWILHNWTDEHCTTLLRNCYDALPAHGKVVVVEGILPVKPEATSRGQQASLSDMIMLTHTAGGKERNQREFEELAKAAGFTGVKTAYIYSNTWVIEFTK

SEQ ID NO: 4597 - protein, 282 aa, Tropheryma whipplei TW08/27
MVFVLTYVPSVLLGDGVSIPQFGLGTYELPPNETSSVVQSAIELGYRHIDTASLYANEREVGRAIASSGIKREEFFVTTKLWNSDQPKPREAFERSLDLLSLDYVDLYLIHWPCPPSELYINVWEVLLELKESGRAKSVGVSNFLSEHINKIKEAGFPLPSVNQIELHPWLQQRELVLSCRNYGIQIESWGPFARFSKDLDAFPELTRPAKEYGKTPAQVILRWHIQKGYVVFPKTVHAERLRQNIDIFDFDLTPDEISGIDSLDAGFRTGPDPSSFRAGLD

SEQ ID NO: 4598 - protein, 429 aa, Acidithiobacillus thiooxidans
MTTHIQKPATGSPLTLLNGVLQVPDQPIIPFIEGDGIGCDVTPAMRSVVDAAVAKVYGGQRQIAWMELFAGQKAVQLYGEGQYLPDETMAAIREYKVAIKGPLETPVGGGIRSLNVAMRQDLDLYVCLRPVRYFEGTPSPMRHPEKVDMVIFRENSEDIYAGIEWPAGSPEAEKIIRFLREEMGVTKIRFPDSSAIGIKPVSTEGSERLIRRTIQYALEHGKPSVSLVHKGNIMKFTEGGFRDWGYALAEREFAGRVFTWRQKAAISKAEGKAAGQKAEQQAIADGKLIIKDVIADNFLQQILLRPEDYSVVATLNLNGDYVSDALAAEVGGIGMAPGANLSDTHAIFEATHGTAPDIAGQGKANPSSLILSAVMMLEHLGWGEAAQAIVAAMNATIAAGEVTGDLAALRGDVPALSTTEFTAALIRRF

SEQ ID NO: 4599 - protein, 202 aa, Bacillus halodurans C-125
MGTSNQPHIVWHEASVSKEERQKRNRLKSCVVWFTGLSGSGKSTLANALDRKLFEEGIHSYVLDGDNIRHGLNAGLGFSEEDRKENIRRIGEVAKLFVDAGVVTSTAFISPFREDRDNVRGILDDGEFIEVYVRCPLETCEKRDPKGLYKKARSGDIPEFTGISSPYEEPVNPELIIDTDQLAVEEAVEKIYAYLHAQESGK

SEQ ID NO: 4600 - protein, 399 aa, Bacillus cereus ATCC 14579
MLANQINERSLLLHKELVGKIEITSKVEVNSADDLSLTYTPGVAESCKAIAADEETVYDYTARGNMVAVVSDGTAVLGLGNIGPKAAMPVMEGKSILFKKFANVDAFPLCLGTTDVDEIVTLVKNLEPTFAGINLEDIAAPRCFEIEKRLKEETNIPVFHDDQHGTAIVVLAAVINALKVVSKQMDNVKIVINGAGSAGIAIGKLLLKAGAKHITLVSLEGIVCEGETWMNEAQIEVSKKTNREHVRGTLKEAIHQADIFIGVSAPNVLTKELVQTMNEKAIVFAMANPIPEIFPEDALEAGAAVVGTGRSDYANQVNNVLAFPGIFRGALDVRATDITEEMKLAAAYGIANIITDEERNANYVIPNPLDKRVVPSVAEAVAKAAIDSGVAQITKIPRY

SEQ ID NO: 4601 - protein, 321 aa, Ralstonia metallidurans CH34
MPAQPLDSQVAQLLDLIARAKRPAIHTMDPVDAKIAYEKSAPILDLSPAPVHGVEDFQVTARDGHAIPVRLYSPREASWADPLPLLVYFHGGGFTVGSVNSHDSLCRMFCNGAECLVLSVDYRLGPEWKFPVAANDAFDVLHWVFEEAARIGADATRIALGGDSAGGTLAAACAVEARDHGLAPVLQMLIYPGTCARQDTPSHRALAEGYLLTAEMIQWFFSQYLDVDASRDDWRFAPLDGGGEGADVRGCCPAWIAVAGYDPLHDEGVAYAAKLEAAGVVASLTDYPSMIHDFFKLGRFIGAVAGAHADATAALRRAFGI

SEQ ID NO: 4602 - protein, 294 aa, Brucella melitensis 16M
MWWPAPRKTAQKISGKGYIMTVPTVKLNDGNHIPQLGYGVWQISNDEAVSAVSEALKAGYRHIDTATIYGNEEGVGKAINGSGIARADIFLTTKLWNSDQGYESTLKAFDTSLKKLGTDYVDLYLIHWPMPSKDLFMETWRAFIKLKEEGRVKSIGVSNFRTADLERLIKESGVTPVLNQIELHPQFQQDELRLFHGKHDIATEAWSPLGQGKLLEDPTLKSIAEKHAKSVAQIILRWHIETGNIVIPKSITPARIKENFDIFDFTLNGTDHDAITKLDMADGRIGPNPSVFSA

SEQ ID NO: 4603 - protein, 471 aa, Oryza sativa (japonica cultivar-group)
MESTDEHAMESDTDLISVLPGEVLQHILSFSRIRAIVRMRRLSRRWMRVIECLQFICLDYRDFKHWKVEKFARFVDNLLLIRSKVDLHTFQLYWFHYLPLNCNDLRKWILYAVKHNVKVLDVELDMYDKTALPSRIFTCRSVEELSLQMGEAPDEDLEHVGLVLPDIIQLPSLKKLTLSDVEVDQLSLNQFIGRSPNLEDLHLINSATYLDLIASKVLKRLTLDGFMHGPKRFTISAPHLVHFECQGCALQDVSWGEKPSLESAHIDTWGKKYDGESEFIGVLLSAKTLALFGSDVKVMLEKELPACPVFERLTTLEIGKWCLTEDFYTVLRFLQLSPRLGELTLMQEELPHAARKGAETDAMPIDGMTFQCPFLETVIIQCSKGDDGINKLVNVLAANGINPKKIQVNFYEDIEEMERAENRRIIEEREKELCNFEKMAKKNPEWVDESRYADSNPETDSDEYDDDYDDF

SEQ ID NO: 4604 - protein, 413 aa, Sulfolobus solfataricus P2
MMQKIPEDGEVIKFENGKWIVPKKPIILYVEGDGIGHEITHAAMKVINKAVEKAYGSDREIKWVEVLAGDKAEKLTGNRFPKESEELIEKYRVLLKGPLETPIGKGWKSINVAIRLMLDLYANIRPVKYIPGIESPIKNADKIDLIIFRENTDDLYRGIEYPYDSEQAKKIRDFLRKELGVEVEDDTGIGIKLISRFKTQRIARMAIKYAIDHKRKKVTIMHKGNVMKYTEGAFREWSYEVATKEFRDYIVTEEEVTKNYNGVPPSGKVIINDRIADNMFQQIIIRPDEYDIILAPNVNGDYISDAAGALVGNIGMLGGANIGDTGGMFEAIHGTAPKYAGKNVANPTGIIKGGELMLRFMGWDKAAELIDSAIMESIRQKKVTQDLARFMGVRALSTTEYTDELIAIIDTLS

SEQ ID NO: 4605 - protein, 214 aa, Desulfitobacterium hafniense DCB-2
MEPIKGEQRDGQSEIRKLAILTGGGDCPGLNAVIRAAVKTACHRGIAVVGIQDGFRGAVEGDFRPLELKDVSGILPRGGTILGTTNRDNPFAYPTQVGEERQVQDRSAEVLDRFKAEGIDALIAIGGDGSLSIAWEFAKQGLKVVGVPKTIDNDLMCTDLTFGFQTAVATAQDALDRLHTTAESHHRIMILEVMGRYAGWIALYAGVAGERMSS

SEQ ID NO: 4606 - protein, 322 aa, Fusobacterium nucleatum subsp. nucleatum
MEKKLAILTSGGDAPGMNAAIRATAKIAEYYGFEVYGIRRGYLGMLNDEIFPMTGRFVSGIIDKGGTVLLTARSEEFKEARFREIAANNLKKKGINYLVVIGGDGSYRGANLLYKEHGIKVVGIPGTIDNDICGTDFTLGFDTCLNTILDAMSKIRDTATSHERTILIQVMGRRAGDLALHACIAGGGDGIMIPEMDNPIEMLALQLKERRKNGKLHDIVLVAEGVGNVLDIEEKLKGHINSEIRSVVLGHIQRGGTPSGFDRVLASRMAAKAVEVLNKGEAGVMVGIEKNEMVTHPLEEACSVDKRKSIEKDYELALLLSK

SEQ ID NO: 4607 - protein, 297 aa, Candidatus Carsonella ruddii
MNIINYLYNNKKISIDSADLNLIKNFKFNSITSNPTLILKSFLNKTYNKILNLFFIKNNKKKIIDSDKEISLYDKILIFIVGNLIPYINDKISIEIPSRISFNYNLIIIYSKKIIYLCEKYGINKSFILIKIPGTDSGIKAAKKLKEIGIEVNITLIFDINQVKKCFDYGIYLISPFVGRISDNIFCKYDSGVNFVKNIFIYKNNNNYKTKIMAASFRNINQIINLRFCDCLTISPIYFNKLSKYNLKILLNNNFNNLVKFNFYNKHSSKLIIEGLKSFDKDHKRLINLLSTIINNL

SEQ ID NO: 4608 - protein, 392 aa, Escherichia coli
KITLQNGKLNVPENPIIPYIEGDGIGVNVTPAMLKVVDAAVEKAYKGERKISWMEIYTGEKSTQVYGQDVWLPAETLDLIREYRVAIKGPLTTPVGGGIRSLNVALRQELDLYICLRPVRYYQGTPSPVKHPELTDMVIFRENSEDIYAGIEWKADSADAEKVIKFLREEMGVKKIRFPEHCGIGIKPCSEEGTKRLVRAAIEYAIANDRDSVTLVHKGNIMKFTEGAFKDWGYQLAREEFGGELIDGGPWLKVKNPNTGKEIVIKDVIADAFLQQILLRPAEYDVIACMNLNGDYISDALAAQVGGIGIAPGANIGDECALFEATHGTAPKYAGQDKVNPGSIILSAEMMLRHMGWTEAADLIVKGMEGAINAKTVTYDFERLMEGAKLLK

SEQ ID NO: 4609 - protein, 297 aa, Candidatus Carsonella ruddii
MNLLNYLYKNKKISIDSADLNLIKNYKFNSITSNPTLILKSFLNKTYNLLLNFFFYKNNKKILLDSDIQISLYDKILIFIVGNLIPFINDKISIEIPARISFNYNLIIIYSKKIIFLCNKYGININKVLIKIPGTDSGIKAAKKLKEIGIETNITLIFDINQVKKCLDFGVYIISPFIGRISDSIYCKYDSGVNFVKNIYTYKNNNNYKIKIMAASFRNINQIINLTFCDCLTISPIYFLELLKFNLKLLFKNKIKKTLKINFFNKYSSKLIIEGIKSFDKDHKKLINIISTIINNL

SEQ ID NO: 4610 - protein, 290 aa, Solanum tuberosum
LNSSYRVPFESFRVPFVDLQEATNNFDEKFHIGLGGFGKVYRGVLRDGTKVALKRCKRESSQGIEEFRTEIEILSFCSHPHLVSLIGYCDETNEMILVYDYIENGNLRSHLYGPDLPTMSWEQRLEICIGAARGLHYLHTSAVIHRDVKSINILLDENFVAKITDFGISKKGTELDQTHLSTLVQGTIGYLDPEYFIRGQLTEKSDVYSFGVVLFEVLCARPAIVQSLPREMVNLAEWAVDSHNKGHLEQIIDPDLAAKIRPESLRKFGETAVKCLALSSEDRPSMGDVL

SEQ ID NO: 4611 - protein, 446 aa, Lycopersicon esculentum
MKKVKRKLGKYEVGRTIGEGTFAKVKFARNTETGENVAIKVLAKSTILKHRMVEQIKREISIMKIVRHPCIVRLHEVLASQTKIYIVQEFVTGGELFDKIVHLGRLSEDEARRYFQELIDAIAHCHSKGVYHRDLKPENLLLDFQGNLKISDFGLSALPQQGVELLYTTCGTPNYVAPEVLGNRGYDGAAADVWSCGIILYVLMAGYLPFDETDLPTLYTKIKAAEFSCPFWFSPGATSLIQKIIDPNPQTRIKIDGIKRDPWFRKNYRAVKAKADEVVNLDDIHAVFDDIEDAFVSEKSEDSESGPLVMNAFEMITLSQGLNLSALFDRRQDYVKRQTRFISRQPAKVVIETIEAAAESLGLKVHTRDYKTRIEGVTANRAGQFAVVLEVFQVAPSLFMVDVRKAAGDTLEYHKFYKTFCTKIDDVIWKPKEGMSNAVLLRTRTR

SEQ ID NO: 4612 - protein, 493 aa, Oryza sativa (japonica cultivar-group)
MTRVIHDSGEGMQKEALAMVSSDVNFPKGHFPDYKIGPNNQIIDPEEIHEAVPLKEIVAKETAQLLEQRRRLSVRDLKEKFEKGLSGASKLSEEAKRREAASLDRQVLLKKLRDVLDTLKGRVAGRNRDDADEAISLVEALAVQLTQREGELIYEKAEVKKLASFLKQATEDARKVAEEERALALAEIEKARTAIAIVEKGLQEHDAASSSREKEEIEGLRKEVREARRIKMLHQPSKVMDMEFELKALRTLIAEKNQLCNQLMKELAMIKRLEEDSSDLYDLEGSDILGSQFCIIPRFDDAPDISSCPTQWYRVISGGNRNLILGATKPTYAPEPFDVGRLLQAEIVLNAEKVTIQTMGPINPAAGLEHYVESLMKRADVEFNVVVTQMNGNDYSSNSVHAFHIGKMRIKLRKGWSTKARESYSTTMKLCGSRGGGNAAATAVFWQARKGLSYTLAFETDRDRNAAIMLARKFASNCNITLTGPGDEVHAGS

SEQ ID NO: 4613 - protein, 161 aa, Nostoc punctiforme PCC 73102
MSNTISDIAVKTINGEDKQLKDYTGKVLLIVNVASYCGYTSQYEGLEKLNQKYREQGLRILGFPCNDFGAQEPGSNEEIVQFCTSKYSVTFELFDKIHAKGPQQHPLYERLTKAVEPTGTIAWNFEKFLVNKKGEVTARFNSSVQPNSPELIAIIEKELAK

SEQ ID NO: 4614 - protein, 344 aa, Arabidopsis thaliana
MATISFSHNHQSSDNRRGGSHHHRHGPVVEEIEGLIKVFNDGCVERPPIVPIVSPTIHPSSKATAFDIKLSNDTWTRVYIPDAAAASPSVTLPLLVYFHGGGFCVGSAAWSCYHDFLTSLAVKARCVIVSVNYRLAPEHRLPAAYDDGVNVVSWLIKQHISTGGGYPSWVSKCNLSNVFLAGDSAGANIAYQVAVRIMASGKYANTLHLKGIILIHPFFGGESRTSSEKQQHHTKSSALTLSASDAYWRLALPRGASRDHPWCNPLMSSAGAKLPTTMVFMAEFDILKERNLEMCKVMRSHGKRVEGIVHGGVGHAFHILDNSSVSRDRIHDMMCRLHNFIHLS

SEQ ID NO: 4615 - protein, 157 aa, Brassica napus
MADSDNDSGGHKDGGGASSREQDRFLPIANVSRIMKKALPANAKISKDAKETVQECVSELISFVTGEASDKCQREKRKTINGDDLLWAMTTLGFEDYVEPLKVYLQKYREVEGERMTPGGRQGDKEGGGGSGGMYGGVVTMGHHHHQRHVYGGSGMN

SEQ ID NO: 4616 - protein, 290 aa, Solanum tuberosum
LNSSYRVPFESFRVPFVDLQEATNNFDEKFHIGLGGFGKVYRGVLRDGTKVALKRCKRESSQGIEEFRTEIEILSFCSHPHLVSLIGYCDETNVMILVYDYIENGNLRSHLYGPDLPTMSWEQGLEICIGAARGLHYLHTSAVIHRDVKSINILLDENFVAKITDFGISKKGTELDQTHLSTLVQGTIGYLDPEYFLRGQLTEKSDVYSFGVVLFEVLFARPAIVQSLPREMVSLAEWAVDSHNKGQLEQIVDPDLAAKIRPESLRKFGETAVKCLALSSEDRPSMGDVL

SEQ ID NO: 4617 - protein, 486 aa, Nostoc punctiforme PCC 73102
MNKHIRPWQRLLALAIGSMVFAVFAPTIVQATDPPTVQSLSETTTKLQISIDTIWVLITGFLVFFMQTGFAMLEAGLNRQRGVVNALLENFINAAVTILVWWGIGFGIAFGTSAGGLVGIDTFFLSQLPGADGSYILAAPGSTAAINTYTLFFFQFAFAATATTIATGSMAGRTDFIGDLIYSAIMGAIAYPIVVHWVWNSDGWLSKLSYHDFAGSSVVHTVGGWTALVGAYLLGSRPGRPAWGTLPPAHNLGLATLGTMILWFGWYGFNPGSTLSTGNTGLIGLVTVNTTLSAGAGALSAIIFQYTRKGKWDLVYSLNGSLAGLVAITAPCAYVAPWASVLIGLTSGILVTVGMDLIESVHIDDPVGAFAVHGINGMMGTLSVGFLGQAELTLNQKAGLFLGGGFELLGIQLLGVVAIAVFTVAFSFLMFGGLKAVGHLRVNSEADRIGIDAYEHGASVWSDVYAIEKKEINCAETTEIEALDSE

SEQ ID NO: 4618 - protein, 363 aa, Corynebacterium diphtheriae NCTC 13129
MKAARYYDQKDIRIEEISEQPLLPGTARIKVAWCGICGTDLHEFLEGPLFVPEHHHPHPVSGEDSPVTLGHEMSGVITEVAEDVTDLAVGDHVVVEPYLIHDDVDTSEANPFYHLSRDMNFIGLAGGGGGLSENIVVKRRWIHKISPDLPLDEAALIEPLSVGYHAVERAGFASEEAAKGKVALVGGAGPIGLLTASVLKAFGATVVISELSPLRRKKALDSGAADYALNPAEVDVVEEIAKLTDGKGADVAFECTSVQVVLDTLMDAVRPGAVIVVVSIWSKRSNFDIHKLVMKEIDLRGTIAYSHAHPNTIKLVESGKINLKPFITGKIALQDIVDKGFDTLINHNETAVKILVSPSGVGL

SEQ ID NO: 4619 - protein, 290 aa, Glycine max
  misc_feature (11)..(11): Xaa can be any naturally occurring amino acid
ALTKQGADLLXTTCGTPNYVAPEVLSNRGYDGAAADVWSCGVILYVLMAGYLPFEEADLPTLYRRINAAEFVCPFWFSADTKSFIQKILDPNPKTRVKIEEIRKEPWFKKNYFPVKLGEDEQVNLDDVRAVFDDIEDQYVAERSEITEGGPLIMNAFEMIALSQGLNLSPLFDRHQDYVKRQTRFVSRKPAKVIISSIEAVAESMGLKVHSRNYKVRLEGVSANRVGQFAVVLEVFEVAPSLFMVDVRKATGDTFDYHKFYKNFCGKLGNIIWRPAGTMPNSNLRKQMTL

SEQ ID NO: 4620 - protein, 328 aa, Triticum aestivum
MKTLLILTIIAVALTTTTANIQVDPSGQVQWPQQQQPCSNPQQPFSQPQQPFSQQPQQIFPQPQQTFPHQPQQAFPQPQQTFPHQPQQQFPQPQQPQQQFPQPQQPQQPFPQQPQQQFPRPQQPQQPFPQPQQPQLPFPQQPQQPFPQPQQPQQPFSQLQQPQQPLPQPQQSQQPFSQQQQSLIQPYLQQQMNPCKNYLLQQCNPVSLVSSLVSMILPRSDCQVMRQQCCQQLAQIPQQLQCAAIHGVVHSIIMQQEQQQQQGIQIMRPLFQLIQGQGIIQPQQPAQLEVIRSLVLGTLPTMCNVFVPPECSTTKAPFASIVADIGGQ

SEQ ID NO: 4621 - protein, 222 aa, Glycine max
  misc_feature (26)..(26): Xaa can be any naturally occurring amino acid
  misc_feature (30)..(30): Xaa can be any naturally occurring amino acid
  misc_feature (40)..(40): Xaa can be any naturally occurring amino acid
  misc_feature (148)..(148): Xaa can be any naturally occurring amino acid
  misc_feature (188)..(188): Xaa can be any naturally occurring amino acid
  misc_feature (206)..(206): Xaa can be any naturally occurring amino acid
SGYNKVMVTVEDGRNFVADAAIITVXIGIXKANLIQFEPXLPDWKVSAISDLGVGNENKIALRFDKVFWPNVELLGTVAPTSYTCGYFLNLHKATGHPVLVYMVAGRFAYDIEKLSDEAAANFVMQQLKKMFPNSSKPVSPPLMLSSXIAHHLLKVRVQYLVSRWGTDPNSLGCYSYDLVGKPLDVYXKLRAPLGNLFFGGEAVSXDNQGSVHGATQRGQAQ

SEQ ID NO: 4622 - protein, 288 aa, Glycine max
SSQLRRPPPPRDELRNNQTKRWQAIGTLKHVLYFVNLPWELKKHAIDFLLSITDEGVSRNYNEERSEWSSYVPSLFSALQAVKMVIMYAPEPELRKKSFTVLKGVLADIPNSQRFDIMKALITNTDSSSMIAIFIDLVRKEMHTAICSSRSIVKDAPQIDNKAFPDTSFWNPGILELVELVLRPPQGGPPSLPEQSDAVLSALNLYRFVLMTESAEKTNITGVLSRNNLLKAYNEWLLPLRTLVTGIMAESHSDYDEFAVDTVCTLNPLELVLYRCIELVDEKLKQST

SEQ ID NO: 4623 - protein, 99 aa, Glycine max
NFLYQWAFAIAAAGITSGSIAERTQFVAYLIYSSFLTGFVYPVVSHWFWSADGWASAISPGDRLFSTGVIDFAGSGVVHMVGGVAGFWGALIEGPRIGR

SEQ ID NO: 4624 - protein, 197 aa, Glycine max
  misc_feature (59)..(59): Xaa can be any naturally occurring amino acid
MEGVGARLGRSSTRYGPATVFTGPVRKWKKKWIHVSPSSASSNSNANNHASNASHLLLXSGPHNHASHASHLLLYKWTPLTHSQNTATTNNANAKDSPPEPPEEPPRRKFKYVPVALLEEQKNEGAEIEGTEKVDEESKPIDADSGAAEATHKNETLDEKPDINDVPMEESQVNLCMSLLFTSCFLTFSSIFPKCIV

SEQ ID NO: 4625 - protein, 123 aa, Triticum aestivum
  misc_feature (76)..(76): Xaa can be any naturally occurring amino acid
  misc_feature (91)..(91): Xaa can be any naturally occurring amino acid
  misc_feature (95)..(95): Xaa can be any naturally occurring amino acid
  misc_feature (101)..(101): Xaa can be any naturally occurring amino acid
  misc_feature (107)..(107): Xaa can be any naturally occurring amino acid
MAPTVMASSATSVAPFQGLKSTAGLPVSRRSNGASLGSVSNGGRIRCMQVLAHRGHQEFETLSYLPPLSTEALLKXVDYLIRSKWVPCLQXNKVXFIFREXNASPGXYNGRIGMWKLLMFGVH

SEQ ID NO: 4626 - protein, 486 aa, Pseudomonas aeruginosa PAO1
MIKHWINGREVESKDVFENYNPATGELIGEVASGGAAEIDAAVAAAREAFPKWANTPAKERARLMRRLGELIDRNVPHLAELETLDTGLPIHQTKNVLIPRASHNFEFFAEVCTRMNGHSYPVDDQMLNYTLYQPVGVCGLVSPWNVPFMTATWKTAPCLALGNTAVLKMSELSPLTANELGRLVHEAGIPPGVFNVVQGYGASAGDALVRHRDVRAVSFTGGTATGRRIMEAAGIKKYSMELGGKSPVLVFEDADLERALDAALFTIFSLNGERCTAGSRIFVQESVYPQFVAEFAARARRLIVGDPQDPKTQVGSMITQAHYDKVTGYIRIGLEEGATLVAGGLERPAGLPAHLSKGQFIQPTVFADVDNRMRIAQEEIFGPVVCLIPFKDEAEALRLANDVEYGLASYIWTQDIGKAHRLARGIEAGMVFINSQNVRDLRQPFGGVKASGTGREGGEYSFEVFAEIKNVCISMGSHHIPRWGV

SEQ ID NO: 4627 - protein, 503 aa, Zea mays
MDRADPARGRLAVLSSHLRGAGAEEAAGLERSPVSAPAPGPRAGALAVVDGRTGKRHEVKVSEDGTVRATDFKKITTGKDDKGLKIYDPGYLNTAPVRSSICYIDGDEGILRYRGYPIEELAESSSFVEVAYLLMYGNLPTQSQLAGWEFAISQHSAVPQGLLDIIQSMPHDAHPMGVLASAMSTLSVFHPDANPALQGQDLYKSKQVRDKQIVRVLGKAPTIAAAAYLRLAGRPPVLPLNTLSYSENFLYMLDSLGDRTYKPNPRLARALDILFILHAEHEMNCSTAAVRHLASSGVDVFTALSGGVGALYGPLHGGANEAVLKMLNEIGSMENIPDFIVGVKNRKRKMSGFGHRVYKNYDPRAKVIRKLADEVFSIVGRDPLIEVAIALEKAALSDEYFIKRKLYPNVDFYSGLIYRAMGFPTEFFPVLFAIPRMGGWLAHWKESLDDPDTKIIRPQQVYTGFWLRHYTPVRERVLSSQSEELGQVATSNATRRRRAGSAL

SEQ ID NO: 4628 - protein, 440 aa, Glycine max
  misc_feature (53)..(53): Xaa can be any naturally occurring amino acid
  misc_feature (200)..(200): Xaa can be any naturally occurring amino acid
MEQKGGVLMQRYELGRLLGQGTFAKVYHARNIITGMSVAIKITDKDKILKVGXVMRLIRHPHVVELYEVMASKTKIYFVMEYVKGGELFNKVSKGKLKQDDARRYFQQLISAVDYCHSRGVCHRDLKPENLLLDENGNLKVTDFGLSTLAETKHQDGLLHTTCGTPAYVAPEVINRRGYDGAKADIWSCGVILYVLLAGXEFKFPNWIAPDLRRLLSKILDPNPKTRISMAKIMESSWFKRGLEKPTITRNEDQELAPLDADGVFGACENGDPIEPAKDSKRCNNLNAFDIISYSSGFDLSGLFEETNRKKEARFTSDKPASIIISKLEEICIRLGLKVKKKDGGLFKLEGSKEGRKGSLGIDAEIFEITPVFHLVELKKSSGDTLEYQKLLKQEVRPALKDIVWNWQGEQPQQLQHGVVQKEEQPSYPGISDVAPPQTA

SEQ ID NO: 4629 - protein, 481 aa, Rubrobacter xylanophilus DSM 9941
MAQLLVGGERVSARGGGEMPVVNPATEEVVDTVPKGTAEDVEAAVAAAKGALAEWSGKDPDERAAIMRAGIGAVKERGREIAELLVREQGKPLSEAMGELHHFIHGMDFYADLASKVRGAYAPLPSSLGKSYGMVIKRPVGVCAAIVPFNFPLTLMGTKVGPALAGGNTVVVKPAETTPLATLRVAELFAEAGLPAGVFNVVTGEGPEVGEALVAHPDVRRVAFTGSTEVGRRIMELAGPQFKRVSVELGGSDPVIVCPDADVDAAVKGVNIGRFFNAGQACLAAKRVYVFDEVYDEFMEGLIKRVSRYELGDGLTKAEKPKIRMGPMNSARYRDQVASQLEEALGRGARVVYQGEWGGEKGYFFPPAVIEGAPHDSRVVREETFGPLLPVFRVGDLDEALRLANDSRYGLGSSIWTRNIRWIHRAAQEIEAGMTWVNQLHYGYDELPFGGVKDSGVGREHGPEALEYYLESKSVVIGGLD

SEQ ID NO: 4630 - protein, 510 aa, Eustoma grandiflorum
MAVGNGVLLHIAASLMLFFHVQKLVQYLWMNSRRHRLPPGPIGWPVLGALRLLGTMPHVALANMAKKYGPVMYLKVGSCGLAVASTPEAAKAFLKTLDMNFSNRPPNAGATHLAYNAQDMVFADYGPRWKLLRKLSNIHILGGKALQGWEEVRKKELGYMLYAMAESGRHGQPVVVSEMLTYAMANMLGQVMLSKRVFGSQGSESNEFKDMVVELMTVAGYFNIGDFIPSIAWMDLQGIQGGMKRLHKKFDALLTRLLEEHTASAHERKGSPDFLDFVVANGDNSEGERLQTVNIKALLLNMFTAGTDTSSSVIEWALAELLKNPIILRRAQEEMDGVIGRDRRFLEADISKLPYLQAICKEAFRKHPSTPLNLPRIASQACEVNGHYIPKGTRLSVNIWAIGRDPSVWENPNEFNPDRFLERKNAKIDPRGNDFELIPFGAGRRICAGTRLGILLVEYILGTLVHSFVWELPSSVIELNMDESFGLALQKAVPLAAMVTPRLPLHIYSP

SEQ ID NO: 4631 - protein, 301 aa, Arabidopsis thaliana
MKLNEEYVKFLGEGAYSFVDLFKYTKSDGSSFHAAVKSSDDENSLLKEFHILSELKGCPRIIQCFGNDLEEGFDDKGNRVYKLLLEYASEGSLSDFMNNCVDRKLPDLMIRDFTRMILQGLVSIHSHGYVHCDLKPENVLVFPCGDSYEVKISDFGLSLQVGEVPDHWKIEYPFVGTLNYMPPESLHDGVANKTLDLWSLGCLVLEMYVCKKPWIGFIPEDFVYILSNGNPPEIPESLPCDARAFIQKCFSRNPKERGTASELLSHRFLRQEKSKLKMISPFNLLKFKKFLNKLLRLKNFL

SEQ ID NO: 4632 - protein, 156 aa, Zea mays
MLLLLCRVDVMCGILVGLGCSHWAQAKRARILVWSGRVKHRGPDWWCLYHDDGNFLAQQRLADCSPLSGDQLLFNEDRTDVVVVNGEIYNHKNVRKQFAGTHDYRRCSDCGVIMPLHDNYSENFENMMDRPFVFVLYHIRDRTNGVESDAIVDEPL

SEQ ID NO: 4633 - protein, 457 aa, Staphylococcus aureus subsp. aureus Mu50
MAIAVLLNRMFRMEHNPLFEYIYQQKEDIDACYFIIPEEDMSSASDLKAQFYRGTLQRFYQSLHAEKLTPYVMSYDDIISFCKENNISEVVIAGDIMSYHLEEYDILHQRSLFNEARIAVTLIRGNHYFKASKTMNQQGEPYKVFTSFYRKWRPYLRHRDVYHYDLKSFEDFVIASPDDLVFDDIAFGSSQVIEQNKWQHFLDQDIQNYESGRDYLPEVLTSQLSVALAYGLLDIIEIFNDLLARYDEDEANHEAFIRELIFREFYYVLMTQYPETSYQAFKPKYRQIKWSQNEANFNAWCEGQTGFPIIDAAIMELTQTGFMHNRMRMVVSQFLTKDLFIDWTWGEKFFRKHLIDYDAASNIHGWQWSASTGTDAVPYFRMFNPIRQSERFDAKALYIKTYLPIFNQIDAKYLHDTQRNESNLFEQGIELGSHYPRQMVDHQEKRTQVLATFKALD

SEQ ID NO: 4634 - protein, 457 aa, Staphylococcus aureus subsp. aureus MSSA476
MAIAVLLNRMFRMEHNPLFEYIYQQKEDIDACYFIIPEEDMSSASDLKAQFYRGTLQRFYQSLHAEKLTPYVMSYDDIISFCKENNISEVVTAGDIMSYHLEEYDILHQRSLFNEARIAVTLIRGNHYFKASKTMNQQGEPYKVFTSFYKKWRPYLRHRDVYHYDLKSFEDFVIASPDDLVFDDIAFGSSQIIEQNKWQHFLDQDIQNYESGRDYLPEVLTSQLSVALAYGLLDIIEIFNDLLARYDEDEANYEAFIRELIFREFYYVLMTQYPETSYQAFKPKYRQIKWSQNEADFNAWCEGQTGFPIIDAAIMELTQTGFMHNRMRMVVSQFLTKDLFIDWTWGEKFFRKHLIDYDAASNIHGWQWSASTGTDAVPYFRMFNPIRQSERFDAKALYIKTYLPIFNQIDAKYLHDTQRNESNLFEQGIELGSHYPRQMVDHQEKRTQVLATFKALD

SEQ ID NO: 4635 - protein, 153 aa, Nicotiana benthamiana
MKMIVLRSSDGETFEVEESVALESQTIKHMIEDDCADTSIPLPNVTSKILAKVIEYCKRHVDAASKTEDKAVEDDLKAFDADFVKVDQSTLFDLILAANYLNIKRLLDLTCQTVADMIKGKTPEEIRKTFNIKNDFTPEEEEEVRRENAWAFE

SEQ ID NO: 4636 - protein, 297 aa, Candidatus Carsonella ruddii
MKFFDFIKNKTKISIDSADINFIKNKLFNAATTNPSLILKSILSKVYNKLLYAFLLKNFKKKIIDSDYNISLYDKLLVNIIANIIPYIEEKISIEIPARISFNYNKIIFYSYKIIYLCEKIGINLKKILIKIPATNSGIKAAKQLKNNNINSNLTLIFNLTQAKKCFDSGIYIISPFVGRVSDSIYCKYDSGVNFVKNLVNLKNNNNYSTKIMAASFRNINQIINLTCCDFITISPIYYNKLKNINYKNSVLNYKSNIDFCNNENYNSIKLLNNGIKQFDIDHNRLIKLISNLINNL

SEQ ID NO: 4637 - protein, 182 aa, Glycine max
MASKIFYLLSLLLLAHLLQPHVFVKGDGSLIEKTCKNTKYYNLCFSSLKSNPSSANADPKGLAVIMVGIGMANATSTSLYLSSKMLGTANNNDSTFKRVLKECAEKYKYASDALQASAQDLVNEAYDYASMHIIAAYDYSNVCHNLFKLYSGLVYPSELAPREDGLKCLCDVALGIVENLNR

SEQ ID NO: 4638 - protein, 153 aa, Zea mays
  misc_feature (25)..(25): Xaa can be any naturally occurring amino acid
  misc_feature (28)..(28): Xaa can be any naturally occurring amino acid
  misc_feature (33)..(34): Xaa can be any naturally occurring amino acid
  misc_feature (44)..(44): Xaa can be any naturally occurring amino acid
  misc_feature (47)..(47): Xaa can be any naturally occurring amino acid
  misc_feature (52)..(52): Xaa can be any naturally occurring amino acid
  misc_feature (59)..(59): Xaa can be any naturally occurring amino acid
MCGILAVLGCADEAKGSSKKSPVLXLSXRLKHXXPDWSALRAVXDCXLSPQXLGIIDRXSGEQPSTGPRGAPPNGKIKTPWTSGAPSRGKAKFKNRREVEEFPNLSKRWEKNFGKFGRGVLPFGGGETPPGGTAREKKFFRGGRQPPRGGPPL

SEQ ID NO: 4639 - protein, 314 aa, Zea mays
MSATGRAPCGLPRIGLGTAVQGPRPDPVRAAVLRAIQLGYRHFDTAAHYATEAPIGEAAAEAVRTGLVASREDLFVTSKVWCADAHRDRVLPALRRTLSNLQMEYVDLYMVHWPVTMKAGRFTAPFTPEDYEPFDMRAVWEAMEECHRLGLAKAIGVCNFSCKKLETLLSFATIPPVVNQVEINPVWQQRKLREFCRAKGIQLCAYSPLGAKGTHWGSDSVMDSGVLHEIAMSKGKTVAQVCLRWVYEQGDCLIVKSFDEGRMKENLDIVDWELSEEERQRISKIPQRKINQGRRYVSEHGPYKSFEELWDGEI

SEQ ID NO: 4640 - protein, 385 aa, Triticum aestivum
IDPDCSWVEQWVHRAGPRKDIYYEPNEVKAAIVTCGGLCPGLNDVIRQVVFTLETYGVKNIVGIPFGFRGFFEKGLKEMPLSRNLVENINLAGGSFLGVSRGGAKTSEIVDSIQARRIDMLFVLGGNGTHAGANAIHDECRKRKLKVSVVAVPKTIDNDIPLMDKTFGFDTAVEEAQRAINSAYIEARSAYHGIGLVKLMGRSSGFIAMHASLSSGQVDVCLIPEVSFALDGEYGVLQHLEQLIKNKGFCVVCVAEAAGQELLQNSGATDASGNAILSDIGVHMQQKIKTHFKGIGVHADIKYIDPTYMVRACRANASDAILCTVLGQNAVHGAFAGFSGITSCICNTHYVYLPVTQVITAPKRVNHKGRMWHRCLTSTGQPDFR

SEQ ID NO: 4641 - protein, 392 aa, Escherichia coli
KITLQNGKLNVPENPIIPYIEGDGIGVDVTPAMLKVVDAAVEKAYKGERKISWMEIYTGEKSTQVYGQDVWLPAETLDLIREYRVAIKGPLTTPVGGGIRSLNVALRQELDLYICLRPVRYYQGTPSPVKHPELTDMVIFRENSEDIYAGIEWKADSADAEKVIKFLREEMGVKKIRFPEHCGIGIKPCSEEGSKRLVRAAIEYAIANDRDSVTLVHKGNIMKFTEGAFKDWGYQLAREEFGGELIDGGPWLKVKNPNTGKEIVIKDVIADAFLQQILLRPAEYDVIACMNLNGDYISDALAAQVGGIGIAPGANIGDECALFEATHGTAPKYAGQDKVNPGSIILSAEMMLRHMGWTEAADLIVKGMEGAINAKTVTYDFERLMEGAKLLK

SEQ ID NO: 4642 - protein, 384 aa, Glycine max
  misc_feature (259)..(259): Xaa can be any naturally occurring amino acid
  misc_feature (308)..(308): Xaa can be any naturally occurring amino acid
  misc_feature (338)..(338): Xaa can be any naturally occurring amino acid
PRVRLSPEIIETCLMWYARVDPPAVSRSNRKPLPSSSSSSSVATEAEQKEILETLVSNLPLEKSSKAATATRFLFGLLRTTNILNASEACRDALEKKIGLQLEEATLDDLLVPSYSYLNETLYDVDCVERILSQFLEGLEARTAAETTEDAAATRSPALMLVGKLIDGYLSEIASDANLKPEKFYNFAISLPDEARLFDDGLYRAVDVYLKAHPWVLEEEREKICGLLDCQKLTLEACTHAAQNERLPLRSVDQELFFXQLQLPQAIAGNFDGGGSRRETGKAINGAGAESGGQKKIKIRDRARAGTXGTWRVAMKDNQVLRLDMDSMKTHVHQLKRXCSSMKRVIFKINKFATYLGGWKATHDLKYPCKFKTQVCESQQSTDR

SEQ ID NO: 4643 - protein, 369 aa, Glycine max
MSSNSRESQVHPEIAKVEDPYLSAVLLCFSRVLPAVLNAAIDLNLFDIIAKAQSSCDSSFSASEIASLLPNQHPQLANRLERILPLLASYSLLNCSIRTNEDGKRERVYALSPVGAYFAFDKDEGSSLAPLSSLIHRGFHDMWKDVKDAIVDPNNNNHFENVHGIPPYDYMEKNAELNDIFYKAVIHAAPLELKRALKLYKGFEGVSTLVDVGGGAGETLKQILPKYPSMKGINFDLPLVIQKAPPHPGIEQIAGDMFESVPTGDAILVKFVCHNWADEDCIKFLRNFHKALPQHGKVIVFEYIIPEVPNPSYISKHTCTLDNVMFLAHGGRERTQKEFENLCKSSGFSKFHVASSDISSTLGVMEFYK

SEQ ID NO: 4644 - protein, 178 aa, Glycine max
  misc_feature (62)..(62): Xaa can be any naturally occurring amino acid
  misc_feature (75)..(75): Xaa can be any naturally occurring amino acid
  misc_feature (122)..(122): Xaa can be any naturally occurring amino acid
  misc_feature (125)..(125): Xaa can be any naturally occurring amino acid
MASSMISSPAVTTVNRAGADMVAPFTDLKSMAGFPDQKTNNDITSIASNGGRVQCMQVWPPXGKKKFETLSYLPXLNNTQLAKEVEYLLRKGWIPCLKFKLKHGFIYQEHNKSPKYYNGHYXTMXKLPMFDCTDASQVLKELQEAKTAYPNNFIHIIKFHNIHQMQYISFITYEPPSF

SEQ ID NO: 4645 - protein, 487 aa, Acinetobacter sp. ADP1
MNARFQELLPELALYAGSKKLDVNQTFQDINPCDEILIAHIPKASVEDLNAIVAVAKQGLNSTAWHEVTPLQRENLIRCFADAIEKDSTRLAQLESIDAGKPISITQTVDIPAVVAWLKYYAGWASKIMGSAGELSNVAGSFHAYSRRQPVGVVAAITPWNFPSVLSMWKIAPALAAGCCIVLKPASDTPLTALRLAEIAREIGFPEGVFNVVTGNSDIGHALATHPDIAKVAFTGSTQTGRSILQASIADFKRVTLELGGKSPVILHKDADLDKAIPTIAMGCFFNTGQVCYAGTRLYVHHDIYDEVLARLAAFTKTLKIGSSDDPNTQLGPVVNARQQHSIQEFLNKAEQQGIESLDLSAMTLPEHGFYVRPAILKNVPAHAAIMKEEVFGPVLATAAYQSLDEAIQLSNDSIYGLAAHLWTQDLSIAHQVSAALDAGTVFVNCALLADPNFPFGGFKQSGIGRENGQEVLDAYLESKSVIMALS

SEQ ID NO: 4646 - protein, 228 aa, Desulfovibrio vulgaris subsp. vulgaris str. Hildenborough
MPCYPTYPTDGQDMKSCNTFFCDGRIRRPDRERLNGHPARAFWFTGLPSAGKSTLAHIAEEVLHQRGIRTYVFDGDNVRHGLCGDLGFSEHDRKENVRRIAETVRLFLDAGILCLCAFVSPLRANRQAVRDIIGPCDFFEVYVKCPVTVCESRDVKGLYGKARQGLVENYTGISAPYEEPESPDIVVDTSRNTIEESVQSLTDFILQVMTVPCAQKDAQAPGKAVRFP

SEQ ID NO: 4647 - protein, 429 aa, Mesorhizobium loti MAFF303099
MTDFYNLVPSAPEGRFDGIERPYSPEDVKRLRGSVQIRQSLAEMGANRLWKLIHEEDFVNALGAMSGNQAMQQVRAGLKAIYLSGWQVAADANTASAMYPDQSLYPANAAPELVKRINRTLQRADQIETSEGNGLSVETWFAPIVADAEAGFGGPLNAFEIMKAFIEAGAAGVHYEDQLASEKKCGHLGGKVLIPTAAHIRNLNAARLAADVMGTPTLVVARTDAEAAKLLTSDIDERDQPFVDYDAGRTVEGFYQVRNGIEPCIARAVAYAPHADLIWCETSKPDLAQAKKFAEGVRRHHPGKLLAYNCSPSFNWKKNLDDATIAKFQRELGAMGYKFQFITLAGFHQLNYGMFELARGYKERQMAAYSELQEAEFAAEANGYTATKHQREVGTGYFDAVSMAITGGKSSTTAMHESTEHAQFRPAAE

SEQ ID NO: 4648 - protein, 306 aa, Lycopersicon esculentum
MPSHADVDRQIEQLMECKPLSEAEVKTLCEQARAILVEEWNVQPVKCPVTVCGDIHGQFYDLIELFRIGGNVLITNYLFMGDYVDRGYYSVETVSLLVALKVRYRDRITILRGNHESRQITQVYGFYDECLRKYGNANVWKYFTDLFDYLPLTALIESQIFCLHGGLSPSLDTLDNIRALDRIQEVPHEGPMCDLLWSDPDDRCGWGISPRGAGYTFGQDIASQFNHTNGLSLISRAHQLVMEGFNWCQDKNVVTVFSAPNYCYRCGNMAAILEISENMEQNFLQFDPAPRQIEPDTTRKTPDYFL

SEQ ID NO: 4649 - protein, 270 aa, Triticum aestivum subsp. macha
GTANMQVDPSSQVQWPQQQPVPQPHQPFSQQPQQTFPQPQQTFPHQPQQQFPQPQQPQQQFLQPQQPFPQQPQQPYPQQPQQPFPQTQQPQQLFPQSQQPQQQFSQPQQQFPQPQQPQQSFPQQQPPFIQPSLQQQVNPCKNFLLQQCKPVSLVSSLWSMIWPQSDCQVMRQQCCQQLAQIPQQLQCAAIHTIIHSIIMQQEQQEQQQGMHILLPLYQQQQVGQGTLVQGQGIIQPQQPAQLEAIRSLVLQTLPTMCNVYVPPECSIIKA

SEQ ID NO: 4650 - protein, 306 aa, Lycopersicon esculentum
MPSHADLDRQIEQLMECKPLSEADVKTLCDQARAILVEEWNVQPVKCPVTVCGDIHGQFYDLIELFRIGGNAPDTNYLFMGDYVDRGYYSVETVTLLVALKVRYRDRITILRGNHESRQITQVYGFYDECLRKYGNANVWKYFTDLFDYLPLTALIESQIFCLHGGLSPSLDTLDNIRALDRIQEVPHEGPMCDLLWSDPDDRCGWGISPRGAGYTFGQDIASQFNHTNGLTLISRAHQLVMEGFNWCQDKNVVTVFSAPNYCYRCGNMAAILEIGENMEQNFLQFDPAPRQIEPDTTRKTPDYFL

SEQ ID NO: 4651 - protein, 344 aa, Burkholderia cepacia R1808
MKIVKPLLIAAVVAATWSGASAATAASAQAVRPDTATSAFLAVLNGQKGPGLETLSPEKARQVLVDAQSGVKVDLSGIDVSNRTIEQDGLSVPITIVRPQQVSGTPPVFMFFHGGGWILGDFPTHERLVRDLVVQSGAVAVFVNYTPSPEAHYPVAINQAYAATKWVAAHGAEIGVDGSRLAVVGNSVGGNMAAVVALMAKDKGGPAIRFQGLLWPVTDHDFNTGSYGAYAQGHFLTRPLMKWFWNAYTKNEAQRDEIYASPLRASVAQLKGLPPALIQVAQFDVLRDEGEAYGRKLDAAGVDATTTRYDGTIHDFGLLNALANDAPTKAAMKAMGNEIAARLK

SEQ ID NO: 4652 - protein, 202 aa, Rubrivivax gelatinosus PM1
MLRNTYALLSMTLLFSAAIAAASVTFQLPAPGILLTLGGYFGLLFAVYKFKNSGWALPAVFALTGFMGYSLGPVLAKSLALPGGAQVVTMALAATGATFLALSAWVLTTRRDFSFMGGFLFAGMVIALIAGLGAVFLQVPALGLAVAAMVALLSAGLILYETSRIVTGGETNYVLATVGLYVSIFNLFTSLLSLFGFGNSDE

SEQ ID NO: 4653 - protein, 109 aa, Nicotiana benthamiana
MPSHGDLDQQIAQLMECKPLSEAEVKTLCDQARAILVEEWNVQPVKCPVTVCGDIHGQFYDLIELFRIGGNAPDTNYLFMGDYVDRGYYSVETVTLLVALQVRYRDRIT

SEQ ID NO: 4654 - protein, 259 aa, Triticum aestivum subsp. spelta
QVDPSSQVQWPQQQPVPQPHQPFSQQPQQTFPQPQQTFPHQPQQQFPQPQQPQQQFLQPQQPFPQQPQQPYPQQPQQPFPQTQQPQQLFPQSQQPQQQFSQPQQQFPQPQQPQQSFPQQQPPFIQPSLQQQVNPCKNFLLQQCKPVSLVSSLWSMIWPQSDCQVMRQQCCQQLAQIPQQLQCAAIHTVIHSIIMQQEQQQGMHILLPLYQQQQVGQGTLVQGQGIIQPQQPAQLEAIRSLVLQTLPTMCNVYVPPECSI

SEQ ID NO: 4655 - protein, 132 aa, Lotus corniculatus var. japonicus
ALYQWAFAIAAAGITSGSIAERTQFVAYLIYSSFLTGLVYPIVAHWFWSSDGWGSPARTENLLFGSGVIDFAGSGVVHLVGAVAGFWGAFIEGPRMGRFDHAGKPVPLRGHSGTLVVLGTFLLWFGWYGFNP

SEQ ID NO: 4656 - protein, 119 aa, Nicotiana benthamiana
MSSSDLVAASTPGNLDEQISQLMQCKPLSKPDVRALCEKAKEILMEESNVQPVKSPVTICGDIHGQFHDLAELFRIGGQCPDTNYLFMGDYVDRGYYSVETVTLLVALKVRYPQRLTIL

SEQ ID NO: 4657 - protein, 168 aa, Setaria italica
  misc_feature (159)..(159): Xaa can be any naturally occurring amino acid
MAAASSTTSVHDFTVKDASGKDVDLSTYKGKVLLIVNVASQCGLTNSNYTELAQLYEKYKDQGFEILAFPCNQFGGQEPGTNEEIVQFACTRFKAEYPIFDKVDVNGNNAAPIYKFLKSSKGGLFGDSIKWNFSKFLVDKEGRVVDRYAPTTSPLSIEXDIKKLLGSS

SEQ ID NO: 4658 - protein, 158 aa, Chromobacterium violaceum ATCC 12472
MSIYDFSFRRLDGSEQAMADYRGSVLLLVNTASRCGFTSQYAGLEALHRRFGPQGLAIIGFPCNQFGAQEPGDAGEIGAFCQKNYGVDFAMADKVDVNGANAHPLWQYLKRQKRGLLGQAIRWNFSKFLVDRQGRVVARFAPFTRPEKLAARIEALLK

SEQ ID NO: 4659 - protein, 445 aa, Vibrio parahaemolyticus RIMD 2210633
MKKKIGLYWFTFDLRLHDNSLLVDASSFLDELVCLYCRPSVTPFLHHFAQEVTLGRARQKFIDASLCELNDALGQLGQRLWTLDLPPYQALKYAIQYLSVTHLYSDAMAGSDEQSILHKLQDEYPHLVIVQHSVRSLFDESKLPFTLPDLPETFTQFRKCVEGIDIAHPIDAPSRLPPMPKGAQLPTLSSFYFDESALFSGGEWSGLAHCRRYFFSGLASSYKETRNGLDGMAYSTKFSPWLALGCVSPRMIHAMLKQYEQTQGANDSTYWIYFELLWREYFYWYARCYQQRLFRFGGIRNQPPLTSFYAHRFQQWKNGTTPYPIVNACMHQLNHTGYMSNRGRQLVASCLVHELGLDWRYGAAYFETQLIDYDVGSNWGNWQYLAGVGADPRGSRQFNLEKQTQMYDPNHEFIERWQGRDSRAQQDVVDMVGWPITTQQENGDK

SEQ ID NO: 4660 - protein, 177 aa, Triticum aestivum
  misc_feature (146)..(146): Xaa can be any naturally occurring amino acid
  misc_feature (170)..(170): Xaa can be any naturally occurring amino acid
MAPTVMASSATSVAPFQGLKSTAGLPVSRRSNGASLGSVSNGGRIRCMQVWPIEGIKKFETLSYLPPLSTEALLKQVDYLIRSKWVPCLEFSKVGFIFREHNASPGYYDGRYWTMWKLPMFGCTDATQVINEVEEVKKEYPDAYVXRIIGFDNMRQVQCVSFIAFKPPGXCEESGKA

SEQ ID NO: 4661 - protein, 278 aa, Bacteroides thetaiotaomicron VPI-5482
METVRLNNGVEMPILGYGVYQVTPEECERCVLDAISVGYRSIDTAQAYYNEEGVGNAVRKCGVPREELFITTKVWISNGGYEKAKASIDESLRKLQSDYVDLLLIHQPFNDYYGTYRAMEEAYKAGKARAIGVSNFYPDRFIDLAEFCEIKPAVNQVETHVFNQQVKPQEIMKKYDTKVMSWGPFAEGRNNFFSNEVLKAIGEQYGKSVAQVALRFLIQRDIIVIPKSTRKERMIENFDVFDFTLSVKDMEEIAGLDKKESLFFSHYDPEMVNFLINL

SEQ ID NO: 4662 - protein, 392 aa, Escherichia coli
KITLQNGKLNVPENPIIPYIEGDGFGVDVTPAMLKVVDAAVEKAYKGERKISWMEIYTGEKSTQVYGQDVWLPAETLDLIREYRVAIKGPLTTPVGGGIRSLNVALRQELDLYICLRPVRYYQGTPSPVKHPELTDMVIFRENSEDIYAGIEWKADSADAEKVIKFLREEMGVKKIRFPEHCGIGIKPCSEEGTKRLVRAAIEYAIANDRDSVTLVHKGNIMKFTEGAFKDWGYQLAREEFGGELIDGGPWLKVKNPNTGKEIVIKDVIADAFLQQILLRPAEYDVIACMNLNGDYISDALAAQVGGIGIAPGANIGDECALFEATHGTAPKYAGQDKVNPGSIILSAEMMLRHMGWTEAADLIVKGMEGAINAKTVTYDFERLMEGAKLLK

SEQ ID NO: 4663 - protein, 357 aa, Oryza sativa (japonica cultivar-group)
MVVPDESTIWDEVLEEADELAYVHKVPPSISFLSAGTGKRRKGEHRLKFSIRGSSSVSLNVKTENPYIGEQEVSSVMPTNRAPETMMAEQLENIKEETEDLPSEFACSTKKANVSISELLDSLQDRSASSAGTPFLLHQHTRPKEEKPKVPTSVKRTLALLGQRNLETENPLEHVIGETSSEEEDDAQNNLALINKDVKGQTMADIFQQVFNATSMDCFTLPVRSYGSGYYGRMQQILQMEKDRHAEFLRQYNREQDYLGDPKGVTVQILSRSLEGKLTICRCLFMEKSNLATTGEVSTDLDMDNSSVKRTIIFSPKICDNVDLLAGNIIHIFPPWKEVKVKEETVILCTYFSHRGV

SEQ ID NO: 4664 - protein, 279 aa, Staphylococcus aureus subsp. aureus Mu50
MLNEIQILNNGYPMPSVGLGVYKISDEDMTKVVNAAIDAGYRAFDTAYFYDNEASLGRALKDNGVDREDLFITTKLWNDYQGYEKTFEYFNKSIENLQTDYLDLFLIHWPCEADGLFLETYKAMEELYEQGKVKAIGVCNFNVHHLEKLMAQSSIKPMVNQIEVHPYFNQQELQEFCDRHDIKVTAWMPLMRNRGLLDNPVIVKIAEKYHKTPAQVVLRWHLAHNRIIIPKSQTPKRIQENIDILDFNLELTEVAEIDALDRNARQGKNPDDVKIGDLK

SEQ ID NO: 4665 - protein, 392 aa, Escherichia coli
KITLQNGKLNVPENPIIPYIEGDGIGVDVTPAMLKVVDAAVEKAYKGERKISWMEIYTGEKSTQVYGQDVWLPAETLDLIREYRVAIKGPLTTPVGGGIRSLNVALRQELDLYICLRPVRYYQGTPSPVKHPELTDMVIFRENSEDIYAGIEWKADSADAEKVIKFLREEMGVKKIRFPEHCGIGIKPCSEEGTKRLVRAAIEYAIANDRDSVTLVHKGNIMKFTEGAFKDWGYQLAREEFGGELIDGGPWLKVKNPNTGKEIVIKDVIADAFLQQILLRPAEYDVIACMNLNGDYISDALAAQVGGIGIAPGANIGDECALFEATHGTAPKYAGQDKVNPGSIILSAEMMLRHMGWTEAADLIVKGMEGAINAKTVTYDFERLMEGAKLLK

SEQ ID NO: 4666 - protein, 410 aa, Rickettsia rickettsii
DSEFAELKIRGKIFKLPILKASIGEDVIDISRVSAEADCFTYDPGFMSTASCQSTITYIDGDKGILRHRGYDIKDLAEKSDFLEVAYLLIYGELPSGEQYNNFTKQVAHHSLVNERLHYLFQTFCSSSHPMAIMLAAVGSLAAFYPDLLNFKEADYELTAIRMIAKIPTIAAMSYKYSIGQPFIYPDNSLDFTENFLHMMFATPCTKYTVNPIIKNALNKIFILHADHEQNASTSTVRIAGSSGANPFACISTGIASLWGPAHGGANEAVINMLKEIGSSEYIPKYIAKAKDKNDPFRLMGFGHRVYKNYDPRAVVLKETCKEVLKELGQLDNNLLQIAIELEAIALKDEYFIERKLYPNVDFYSGIIYKAMGIPSQMFTVLFAIARTVGWMAQWKEMHEDPEQKISRPR

SEQ ID NO: 4667 - protein, 279 aa, Staphylococcus aureus subsp. aureus MSSA476
MLNEIQILNNGYPMPSVGLGVYKISDEDMTKVVNAAIDAGYRAFDTAYFYDNEASLGRALKDNGVDREDLFITTKLWNDYQGYEKTFEYFNKSIENLQTDYLDLFLIHWPCEADGLFLETYKAMEELYEQGKVKAIGVCNFNVHHLEKLMAQSSIKPMVNQIEVHPYFNQQELQEFCDRHDIKVTAWMPLMRNRGLLDNPVIVKIAEKYHKTPAQVVLRWHLAHNRIIIPKSQTPKRIQENIDILDFNLELTEVAEIDALNRNARQGKNPDDVKIGDLK

SEQ ID NO: 4668 - protein, 191 aa, Triticum aestivum
  misc_feature (107)..(107): Xaa can be any naturally occurring amino acid
  misc_feature (156)..(156): Xaa can be any naturally occurring amino acid
  misc_feature (162)..(162): Xaa can be any naturally occurring amino acid
  misc_feature (164)..(164): Xaa can be any naturally occurring amino acid
  misc_feature (176)..(176): Xaa can be any naturally occurring amino acid
MAPTVMASSATSVAPFQGLKSTAGLPVSRRSNGASLGSVSNGGRIRCMQVWPIEGIKKFETLSYLPPLSTEALLKQVDYLIRSKWVPCLEFSKVGFIFREHNASPGXYYDGRYWTMWKLPMFGCTDATQVINEVEEVKKEYPDAYVRIIGFDNMRXVQCVSXIXFKPPGCEESGKXTGSHGPHIKPLRFQL

SEQ ID NO: 4669 - protein, 411 aa, Rickettsia sp.
DSEFAELKIRGKIFKLPILKASIGEDVIDISRVSAEADCFTYDPGFMSTASCRSTITYIDGDKGILRYRGYDIKDLAEKSDFLEVAYLLIYGELPSSEQYNNFTKKVAVHSLVNERLHYLFQTFCSSSHPMAIMLAAVGSLSAFYPDLLNFKEADYELTAIRMIAKIPTIAAMSYKYSIGQPFIYPDNALDFTENFLHMMFATPCEKYKVNPIIKNALNKIFILHADHEQNASTSTVRIAGSSGANPFACVSTGIASLWGPAHGGANEAVINMLKEIGSSENIPKYIAKAKDKNDPFRLMGFGHRVYKNYDLRAAVLKETCKEVLKELGQLDGNPLLQIAIELEAIALKDEYFIERKLYPNVDFYSGIIYKAMGIPSQMFTVLFAIARTVGWMAQWKEMHEDPEQKISRPR

SEQ ID NO: 4670 - protein, 459 aa, Mycobacterium leprae TN
MVSVQESALVVYTSGVKRLVASYRSIPATSPVRLAKPTSNLFRTRAKRDAPGLDASGLTGVIGIDTEARTADVAGMCTYEDLVAATLPYGLLPLVVPQLKTITLGGAVTGLGIESASFRNGLPHESVLEMDILTGAGELLTVSANQHGDLYRAFPNSYGTLGYSTRFRISLEPVTPFVALRHIRFHLLTEMVTAMENIIDTGGHDGVPVDYLDGVVFSANESYLCIGKRTTTPGPVSDYTGQHIYYRSIQHDNEVKEDRLTIHDYVWRWDTDWFWCSRAFGAQNQQLRRWWPRRYRRSSVYWKLMAADRRFGIVDRIEARNGRPLRERVVQDVELPIERTCEFLEWFLGSVPIAPIWLCPLRLRDHNSWPLYPIQPDHSYVNVGFWSSVPAGATEGETNRTIEAKVSALDGHKSLYSDSFYTREEFNELYGGESYNAVKKIYDPDSRLLDLYAKVVQRR

SEQ ID NO: 4671 - protein, 177 aa, Triticum aestivum
  misc_feature (30)..(30): Xaa can be any naturally occurring amino acid
  misc_feature (171)..(171): Xaa can be any naturally occurring amino acid
MAPTVMALVGPPPSLPFQGLKSTVGLPVSXGSNGASLGSVSNGGRIRCMQVWPIEGIKKFETLSYLPPLSTEALLKQVDYLIRSKWVPCLEFSKVGFIFREHNASPGYYDGRYWTMWKLPMFGCTDATQVINEVEEVKKEYPDAYVRIIGFDNMRQVQCVSFIAFKPPGCXEESGKA

SEQ ID NO: 4672 - protein, 130 aa, Triticum aestivum
MAMEARMKGTVKWFNDTKGFGFISPADGSEDLFVHQSSIKADGFRSLAEGEEVEFAVSEGDDGRTKAVDVTGPDGSFVQGGAGGGGGGGGFGSRGGGGSRGGGGFGARGGDGSGGYGGGYGGGGGGGWGR

SEQ ID NO: 4673 - protein, 363 aa, Oryza sativa (japonica cultivar-group)
MSFCERDMNKESMYQERDDMAGIRFATPPLPQQQQQQQLVECFSDEVDSRGSGGEMKDAVGSGSGQLVVVGGGDGASIEVAKKRRGRPPGSKNKPKPPVVITREAEPAAAMRPHVIEIPGGRDVAEALARFSSRRNLGICVLAGTGAVANVSLRHPSPGVPGSAPAAIVFHGRYEILSLSATFLPPAMSSVAPQAAVAAAGLSISLAGPHGQIVGGAVAGPLYAATTVVVVAAAFTNPTFHRLPADDDASVSVSVSLSGSGDADEHRGHQHKPEPQEPRQLRRPPPHLSAAAAVSAAQPVEPCGAPMYACHPQPQEVMWPPPARTPHPPPPPPWGEQEKGGEGDERGRDGVVEGRVAAAGDVE

SEQ ID NO: 4674 - protein, 411 aa, Rickettsia sp.
DSEFAELKIRGKIFKLPILKASIGEDVIDISRVSAEADCFTYDPGFMSTASCQSTITYIDGDKGILRHRGYDIKDLAEKSDFLEVAYLLIYGELPNGEQYNNFTKQVAHHSLVNERLHYLFQTFCSSSHPMAIMLAAVGSLSAFYPDLLNFKEADYELTAIRMIAKIPTIAAMSYKYSIGQPFIYPDNSLDFTENFLHMMFATPCTKYKVNPIIKNALNKIFILHADHEQNASTSTVRIAGSSGANPFACISTGIASLWGPAHGGANEVVINMLKEIGSSEYIPKYIAKAKDKNDPFRLMGFGHRVYKNYDPRAAVLKETCKEVLKELGQLDNNPLLQIAIELEAIALKDEYFIERKLYPNVDFYSGIIYKAMGIPSQMFTVLFAIARTVGWMAQWKEMHEDPEQKISRPR

SEQ ID NO: 4675 - protein, 492 aa, Oryza sativa (japonica cultivar-group)
MVPREQAEEAIVADSNGKEEEVGVMGVSAGEHGADDHHGGGGKFSMKNLLWHGGSVWDAWFSCASNQVAQVLLTLPYSFSQLGMLSGVLLQLFYGFMGSWTAYLISVLYVEYRSRKEKEGVSFKNHVIQWFEVLDGLLGPYWKAAGLAFNCTFLLFGSVIQLIACASNIYYINDRLDKRTWTYIFGACCATTVFIPSFHNYRIWSFLGLGMTTYTAWYLAIAALLNGQAEGITHTGPTKLVLYFTGATNILYTFGGHAVTVEIMHAMWKPAKFKYIYLLATLYVFTLTLPSASAMYWAFGDELLTHSNAFSLLPKTGWRDAAVILMLIHQFITFGFACTPLYFVWEKVIGMHDTKSICLRALARLPIVVPIWFLAIIFPFFGPINSAVGALLVSFTVYIIPALAHILTYRTASARMNAAEKPPFFLPSWTGMFVLNMFIVVWVLVVGFGLGGWASMVNFIRQIDTFGLFAKCYQCPKPAPALAQSPVPLPHH

SEQ ID NO: 4676 - protein, 158 aa, Glycine max
MDIRLMDLDSPLFNTLHRIMDLTEDAEKNLNAPTRTYVRDAKAMAATPADVKEYPNYYVFVIDMPGLKSGDIKVQVEDDNVLLISGERKREEDKEKEGAKYLRMERRVGKFMRKFTLPENANTDAISAVCQDGVLTVTVNKLPPPQPKKPKTIEVKIA

SEQ ID NO: 4677 - protein, 286 aa, Arabidopsis thaliana
MSQAPNPEEEDDTIEIREVWNHNLEQEMALIEQSIDDFPYVAMDTEFPGIVCKTVTANPNPNPYSIHYEYNYDTLKANVNMLKLIQLGLTLSDEKGNLPTCGTNKQCIWQFNFREFNVISDMFALDSIELLRKSAIDLEKNNECGVDAKRFAELLMGSGVVLNDKIHWVTFHCGYDFGYLLKLLSGKELPEEISDFFDQMEKFFPVVYDIKYLMGFCTNLYGGLEKIAELLGVKRVGISHQAGSDSLLTLRTFIKMKEFFFTGSLLKYSGFLFGLDNPRLLTGSKN

SEQ ID NO: 4678 - protein, 479 aa, Aspergillus nidulans FGSC A4
MSSQIDTTHYPGNIINNQFVPSARTRHSTNPSTGEPLYEVPWATEEDVDRAVEHARTAFKSWSRLPFQERSRLLVAYADAVEAERAPLAKLLVLEQGKPLSLAQTELDMSVQWLRTFVTMEVKDELLDDNEERSITQTFPPLGVCCGIVPWNWPVLLALGKVGPALITGNTMIIKPSPYTPYCDLKLGEIGMRIFPPGVLQVLSGGDELGPILTQHPGIDKITFTGSSATGKLVMQSCAKTLKRVTLELGGNDPAIICEDVDIDAIVPKITSLAFLNSGQICMLIKRVYIHESIYDAFRDAMVAFAKSIKTADGFEPDAFVGPIQNSMQYEKVKDMYSEIGKRNWKQALEGKVFENSKGYYISPAIIDNPPEDSRIVLEEPFGPIVPLLKWSDEEDVIARANSLKDGLGASVWSKDLDRAERIGRQLSAGSVWLNSHFDVAPNVPFGGHKWSGLGSEWGMTGLKQYCNSTSLWKWKKVM

SEQ ID NO: 4679 - protein, 313 aa, Triticum aestivum
  misc_feature (31)..(31): Xaa can be any naturally occurring amino acid
MQVDPSGQVQWPQQQLVPQPQQPLSQQPQQXLPQPQQTFPHQPQQQVPQPQQPQQPFLQPQQAFPQQPQQPFPQTQQPQQPFPQQPQQPFPQTQQPQQPFPQQPQQPFPQQSQQPFPQTQQPQQPFPQQPQQPFPQTQQPQQPFPQFQQPHQPFPQPQQQFPQPQQPQQSFPQQQRPFIQPSLQQRLNPCKNILLQQCKPASLVSSLWSIIWPQSDCQVMQQQCCQELAQIPQQLQCAAIHSVVHSIIQQQQQQQQQQQQQGMHILLPLSQQQQLGQELCLSFIPKLELALVGVTHDGARHFICHRYIDWCIC

SEQ ID NO: 4680 - protein, 120 aa, Nicotiana benthamiana
MSSSDLVAASTPGNLDERISQLMQCKPLSEPDVRALCEKAKEILMEESNVQPVKSPVTICGDIHGQFHDLAELFRIGGQCPDTNYLFMGDYVDRGYYSVETVTLLVALKVRYPQRLTILR

SEQ ID NO: 4681 - protein, 244 aa, Triticum aestivum subsp. sphaerococcum
PQQQPVPQPHQPFSQQPQQTFPQPQQTFPHQPQQQFPQPQQPQQQFLQPQQPFPQQPQQPYPQQPQQPFPQTQQPQQLFPQSQQPQQQFSQPQQQFPQPQQPQQSFPQQQPPFIQPSLQQQVNPCKNFLLQQCKPVSLVSSLWSMIWPQSDCQVMRQQCCQQLAQIPQQLQCAAIHTVIHSIIMQQEQQQGMHILLPLYQQQQVGQGTLVQGQGIIQPQQPAQLEAIRSLVLQTLPTMCNVYVP

SEQ ID NO: 4682 - protein, 498 aa, Mesorhizobium loti MAFF303099
MTLSFDPRAKATTLYHGEFRPMFIGGKWVAAQSGQEMQALNPATGEVLTTVPRGGAADVDAAVAAARAAFEGPWSKFSPYERQCVLLRIADLFETHWEELSVSDTLDMGLPITRTLANRRRVIGMLRFYGGMATALHGEAIDNSIPGEIVSFTRREPVGVVGAIIPWNAPTAASIWKIAPALATGCTIVLKPSEEASLTPLLIARLMQEAGVPDGVVNIVTGTGAEAGARLAEHPDVNKIVFTGSTLTGQAIARAGVTNLKRVSLELGGKSPIIVCRDADIDKAVPVAAMAVFVHSGQICIAGSRLFVAREIHDEFVRRVAEFAGRLRIGHGIEAETEIGPLINARQAGKVEGYIKAGSDEGAKLVAGGSRLTGALYDGGNFIAPTVFGSVSDKMTIAREEIFGPVISAMPFDTLDEVVARANATPYGLAAGIFTTHLGTAHKLARRIRAGSVWVNMYHAIDPAVPFGGMKMSGYGREGGIEHLHEYLETKSVWIQTD

SEQ ID NO: 4683 - protein, 355 aa, Spirulina platensis
MTQNYRITLLSGDGIGPEIMAVAVDVLKAVGKQLDLNFEFKEALMGGVAIDATGEPLPEESLQACRDSDAVLLAAIGGYKWDNLPRPERPETGLLALRAGLGLFANRARLLFCPHVLDASSLKREVVEGVDIMVVRELTGGIYFGQPKGIFETETGKNEGSNTMAYGESEIDRIGRVGFETAKKRQGRLCSVDKANVLDVSQLWRDRIMALAADYPEVELSHLYVDNAAMQLVRWPKQFDTIVTGNLFGDILSDAAAMLTGSIGMLPSASLGASGPGVFEPVHGSAPDIAGQDKANPLAQVLSAAMMLRYGLDEPAASDPVEKAVLKVLDWGYPTGDIMSEGMKAVGCRKWGICY

SEQ ID NO: 4684 - protein, 1085 aa, Candida albicans
MYATAHTIKQQQQQHPPPPPLNGGLHASGAPPNSHEAAAIAQQQQQQQQHHNGPGMIVAAAAASANQQAVQARAQQQQQQQQQQRLPSSAALNETTVSTWLAIGSLAESLGDIERATASYNSALRHSPNNPDILVKIANTYRSKDQFLKAAELYEQALNFHVENGETWGLLGHCYLMLDDLQRAYAAYQRALFYLENPNVPKLWHGIGILYDRYGSLEYAEEAFVRVLDLDPNFDKANEIYFRLGIIYKHQGKLQPALECFQYILNNPPHPLTQPDVWFQIGSVYEQQKDWNGAKDAYEKVLQINPHHAKVLQQLGCLYSQAESNPPTPANGAAQPHKPFQQDLTIALKYLKQSLEVDQSDAHSWYYLGRVEMIRGDFTAAYEAFQQAVNRDARNPTFWCSIGVLYYQISQYRDALDAYTRAIRLNPYISEVWYDLGTLYETCNNQISDALDALDAYRQAERLDPNNPHIKARLEQLTKYQQEGNTHPPQPPPSSQQPRLPQGMVLESTQQQQQQQQQQPPPPPPPPQQLQHQSQSQSQPQPQQPPQIQSQPSLLQHQSSLPPQQIQPLHQQAAKPLVNQQQSPPPPHLMNLGQPGQQPRQLPPHLPPHTQQPSQIQEKPPTQEQPHHQPPPPPQHQQQSQSQPQPPHQPQHTQNQSPQLAQLPPHHSNPPANPHGAPQQRTGLPDLLHNSANIIIAPSQVPQPQQQYQQPHIAPVRQEQVNHVPSIYSAPRPTETTLPQINNPNESTTTQVPQLKKEEPKPEATVSAPVPEAIKVQDQVTIQESAPAAAAVSAPASAPVGDIKTDTVSTTTPATSTTADAVPVSVSQVGEAPNVVQEKKVPDTEQIVSQVEKPVESQPEVTPAPTPAPALATAPTEPAPTDKDVVMAPSKSATPIPQSIVEQNTRVSEATKAPESNGKHDLEDKNDEEKILKRPTVETTTESVPVNQPVEKENEKVEVPPPPEQPSSEKREKEVNGSIKKPLENESKVDIPQFSSNITAQNEEAKSGEETKKDTTKTSPAKQGEVKEVIPSSTETVSKPDVEKDNKEKDKDEDEVMADEDDVKKDENPEPPMRKIEEDENYDDE

SEQ ID NO: 4685 - protein, 267 aa, Triticum aestivum subsp. sphaerococcum
GTANMQVDPSSQVQWPQQQPVPQPHQPFSQQPQQTFPQPQQTFPHQPQQQFPQPQQPQQQFLQPQQPFPQQPQQPYPQQPQQPFPQTQQPQQLFPQSQQPQQQFSQPQQQFPQPQQPQQSFPQQQPPFIQPSLQQQVNPCKNFLLQQCKPVSLVSSLWSMIWPQSDCQVMRQQCCQQLAQIPQQLQCAAIHTVIHSIIMQQEQQQGMHILLPLYQQQQVGQGTLVQGQGIIQPQQPAQLEAIRSLVLQTLPTMCNVYVPPECSIIKA

SEQ ID NO: 4686 - protein, 474 aa, Synechococcus elongatus PCC 6301
AAPILFWHRRDLRLSDNIGLAAARAQSAQLIGLFCLDPQILQSADMAPARVAYLQGCLQELQQRYQQAGSRLLLLQGDPQHLIPQLAQQLQAEAVYWNQDIEPYGRDRDGQVAAALKTAGIRAVQLWDQLLHSPDQILSGSGNPYSVYGPFWKNWQAQPKPTPVATPTELVDLSPEQLTAIAPLLLSELPTLKQLGFDWDGGFPVEPGETAAIARLQEFCDRAIADYDPQRNFPAEAGTSGLSPALKFGAIGIRQAWQAASAAHALSRSDEARNSIRVWQQELAWREFYQHALYHFPSLADGPYRSLWQQFPWENREALFTAWTQAQTGYPIVDAAMRQLTETGWMHNRCRMIVASFLTKDLIIDWRRGEQFFMQHLVDGDLAANNGGWQWSASSGMDPKPLRIFNPASQAKKFDATATYIKRWLPELRHVHPKDLISGEITPIERRGYPAPIVNHNLRQKQFKALYNQLKAAI

SEQ ID NO: 4687 - protein, 120 aa, Brassica napus
MSSEEFRLVSPTIDNEGKLPRKYTKGGQGVKKNISPPLEWYNVPQGTKSLALVVEDIDAPDPSGPLVPWTVWVVVDIPPDMKGLPEGFSGNDEQVAGIREGNNDHKIPGWRGPLMPSHGH

SEQ ID NO: 4688 - protein, 197 aa, Oryza sativa (japonica cultivar-group)
THAFARVQLHVGDAVDFLRNAPEGKYDAIIVDSSDPIGPAQELVEKPFFQTIARALKPAGVLCNQAESMWLHTHLIQDMLSICRETFKGAVHYAWTSVPTYPSGVIGFLLCAKEGPAVNFLSPVNPIEKLEGAMEAGREIRFYNSEVHRAAFVLPTFVRRELESHNTCAEKDKSETKPVAKPKKMKIMPNSAIPTAS

SEQ ID NO: 4689 - protein, 504 aa, Arabidopsis thaliana
MASALSCSASDLIPLLSGGANATAAAAAAEYICGRFDTVAGKFTDAAYAIDNTYLLFSAYLVFAMQLGFAMLCAGSVRAKNTMNIMLTNVIDAAAGGLFYYLFGFAFAFGSPSNGFIGKHFFGMYDFPQPTFDYPYFLYQWTFAIAAAGITSGSIAERTQFVAYLIYSSFLTGLVYPIVSHWFWSSDGWASPARSENLLFQSGVIDFAGSGVVHMVGGIAGLWGALIEGPRIGRFGVGGKPVTLRGHSATLVVLGTFLLWFGWYGFNPGSFATIFKAYGETPGSSFYGQWSAVGRTAVTTTLAGCTAALTTLFGKRLIDGYWNVTDVCNGLLGGFAAITSGCSVVEPWAALVCGFVAAWVLMGCNRLAEKLQFDDPLEAAQLHGGCGAWGIIFTGLFAEKRYIAEIFGGDPNRPFGLLMGGGGRLLAAHVVQILVITGWVSVTMGTLFFILHKLKLLRIPAEDEIAGVDPTSHGGLAYMYTEDEIRNGIMVRRVGGDNDPNVGV

SEQ ID NO: 4690 - protein, 167 aa, Triticum aestivum
  misc_feature (90)..(90): Xaa can be any naturally occurring amino acid
  misc_feature (97)..(97): Xaa can be any naturally occurring amino acid
ARAKLVYAPEPHDVGRYLQAEVNLGGQTSVAKTAGPLDPAPGLVDYVETLVRNPETDYNVVVLQLNGIDQPADSIHVLCVGKLRMRLAQXETTVVAXESYSAPTLLAGAGRGGGAAPQPLPPPPRVGLGLPLGFDPARGPIAPPRLPRGFAIARSFILPPPGDPPPW

SEQ ID NO: 4691 - protein, 317 aa, Triticum aestivum
TGPEFRVDPASGDMLERRVASRLPDAAVDDLLIPSYSYLVETLYDVECVERIVRHFLEGRGGVEEVDEEGSEAETPGREASRRAMLAVSRLMDAYLGEIAADPRLRTDKFCDLAWALPDGARVYDDGLYRAVDIYIKAHPALREEEKEKVSGVVDGRKLTLEACTHAAQNERLPLRTVVQVLFFDQLQLRRAIARTIVANEGGAAGQGEEDGDSDGGRTWRVATRGNQMLRLDMDSMRNRVQELERECTTMRKAIQKIDRRGGGAAGDKGAAAPAAEGRWGSMVTKRFGCKFPAQVCQSQPRSVVARPRRARIEQSP

SEQ ID NO: 4692 - protein, 75 aa, Glycine max
MADSDRSSSEVSTHSTDSGKRGSSKVEFSEDEETLIIRMYKLVGERWSLIAGRIPGRTAEEIEKYWTSRFSGSSE

SEQ ID NO: 4693 - protein, 143 aa, Glycine max
  misc_feature (87)..(87): Xaa can be any naturally occurring amino acid
  misc_feature (113)..(113): Xaa can be any naturally occurring amino acid
MGGGKRNTVETFLLATLILWLASLCSQIFFNKRWELLSVIAGCFFYQTSNCLILLFLSTHKDPLFVNTSVFLLHSFLTSASVIFILXHRVIQCALWTVAHSNLVDNVLPLLTXALTSSSAYFVFDQWDFVSALLSNGRISSLL

SEQ ID NO: 4694 - protein, 215 aa, Vibrio cholerae O1 biovar eltor str. N16961
MSKQADSLGFEQDAKPENVVWHRHAVDKAQRATLKQQRPAVLWFTGLSGAGKSTVAGALENRLAALGYHTYLLDGDNVRHGLCSDLGFSEQDRRENIRRIGELAKLMSDAGLIVLTAFISPHRAERQMVRDLLPNGEFLEVYVNTSLDVCEARDPKGLYKKARAGEIRQFTGIDSAYEAPLNPDIDLPAGEKSVDELVAQCLQALAERHIIQRWV

SEQ ID NO: 4695 - protein, 159 aa, Arabidopsis thaliana
MDPMDIVGRSKEDASLPKATMTKIIKEMLPPDVRVARDAQDLLIECCVEFINLVSSESNDVCNKEDKRTIAPEHVLKALQVLGFGEYIEEVYAAYEQHKYETMQDTQRSVKWNPGAQMTEEEAAAEQQRMFAEARARMNGGVSVPQPEHPETDQRSPQS

SEQ ID NO: 4696 - protein, 491 aa, Synechococcus sp. WH 8102
MSSLQIVWFKRDLRVDDHRPLLEAAARGPVLPLYVVEPELWQQPDASERQWLFCRESLLELRQALAELGQPLVVRSGDVVQVLERARRQFGVDGLWSHEETGNGWTYQRDKRVGAWARAHGIQWGEIRQFGVTRRMRSRNGWAKRWEEQMAEPITPAPAGVPALEEIDPGVIPERPCPELLPDDCSQRQTGGRSIGLGELRDFLQHRAPCYQRAMSSPKSAFTGCSRLSAYLAWGCLSMREVLQTSRHHSGRGVSSFESRLHWHCHFIQKLEDQPEIEFSDFHPYMRGIRETNAERLAAWTEGRTGVPFVDACMRALKAHGWINFRMRAMLMSFASYNLWLPWRDSGLHLARQFVDYEPGIHWSQCQMQSGSTSINTIRIYNPIKQGMDHDPQGVFIRQWCPELKDVSTIHIHEPWMLGGGRSAPIVDVTTSMQLAKDRIWEIRRSAGFDRHADAIQRMHGSRKAGLKPTASRRRQKRSNDNGVRQLSLEL

SEQ ID NO: 4697 - protein, 411 aa, Rickettsia sp.
DSEFAELKIRGKIFKLPILKASIGEDVIDISRVSAEADCFTYDPGFMSTASCQSTITYIDGDKGILRHRGYDIKDLAEKSDFLEVAYLLIYGELPSGEQYNNFTKQVAHHSLVNERLHYLFQTFGSSSHPMAIMLAAVGSLSAFYPDLLNFKEADYELTAIRMIAKIPTIAAMSYKYSIGQPFIYPDNSLDFTENFLHMMFATPCTKYTVNPIIKNALNKIFILHADHEQNASTSTVRIAGSSGANPFACISTGIASLWGPAHGGANEAVINMLKEIGSSEYIPKYIAKAKDKNDPFRLMGFGHRVYKNYDPRAAVLKETCKEVLKELGQLDNNPLLQIAIELEAIALKDEYFIERKLYPNVDFYSGIIYKAMGIPSQMFTVLFAIARTVGWMAQWKEMHEDPEQKISRPR

SEQ ID NO: 4698 - protein, 411 aa, Rickettsia sibirica
DSEFAELKIRGKIFKLPILKASIGEDVIDISRVSAEADCFTYDPGFMSTASCQSTITYIDGDKGILRHRGYDIKDLAEKSDFLEVAYLLIYGELPSGEQYNNFTKQVAHHSLVNERLHYLFQTFCSSSHPMAIMLAAVGSLSAFYPDLLNFKEADYELTAIRMIAKIPTIAAMSYKYSIGQPFIYPDNSLDFTENFLHMMFATPCTKYTVNPIIKNALNKIFILHADHEQNASTSTVRIAGSSGANPFACISTGIASLWGPAHGGANEAVINMLKEIGSSEYIPKYIAKAKDKNDPFRLMGFGHRVYKNYDPRAAVLKETCKEVLKELGQLDNNPLLQIAIELEAIALKDEYFIERKLYPNVDFYSGIIYKAMGIPSQMFTVLFAIARTVGWMAQWKEMHEDPEQKISRPR

SEQ ID NO: 4699 - protein, 341 aa, Mycobacterium sp. S65
MEAIVLNGTNDVGLTSVPDPAPQDGEVIIEVAATGLCGTDLHEYVAGPTFSQPPVVLGHEVSGRIVEVGAGVDQSRIGEGAAVIPMDFCGSCHYCHRSLYHLCQRPGWIGFTRNGGLANYVAVPSRLAVRVPDVVDLEEAALTEPTAVAFHAVRRAELLLGETVMVLGAGALGLTVIQCARAAGAARIFVTEPSGVRASLARDLGATLVLDPHDPGTTACILEETRGVGVDVVFHVAGSAEAFTQGLDCLRKQGRFMEMSSWAGAASLDVNRHLLKEIQLRMVFGYDMFDDFPAVLALIADGKLALAPQITARVPLDRAVKEGLGGLLEGREGLVKVLVKP

SEQ ID NO: 4700 - protein, 411 aa, Rickettsia sp.
DSEFAELKIRGKIFKLPILKASIGEDVIDISRVSAEADCFTYDPGFMSTASCQSTITYIDGDKGILRHRGYDIKDLAEKSDFLEVAYLLIYGELPSGEQYNNFTKQVAHHSLVNERLHYLFQTFCSSSHPMAIMLAAVGSLSAFYPDLLNFKEADYELTAIRMIAKIPTIAAMSYKYSIGQPFIYPDNSLDFTENFLHMMFATPCTKYTVNPIIKNALNKIFILHADHEQNASTSTVRIAGSSGANPFACISTGIASLWGPAHGGANEAVINMLKEIGSSEYIPKYIAKAKDKNDPFRLMGFGHRVYKNYDPRAAVLKETCKEVLKELGQLDNNPLLQIAIELEAIALKDEYFIERKLYPNVDFYSGIIYKAMGIPSQMFTVLFVIARTVGWMAQWKEMHEDPEQKISRPR

SEQ ID NO: 4701 - protein, 477 aa, Comamonas testosteroni
MSTVLYRCPELLIGGEWRPGRHEQRLVVRNPATGEPLDELRLASADDLQLALQTTQQAFEHWRQVPAHERCARLERGVARLRENTERIAHLLTLEQGKTLAEARMECAMAADLIKWYAEEARRVYGRVIPARLPNSRMEVFKFPVGPVAAFSPWNFPLVLSARKLGGAIAAGCSIVLKAAEETPASVAAMVDCLNQELPPGVVQLLYGVPAEVSQALIASPVVRKVTFTGSVPVGRHLAELSARHLKRITLELGGHAPVIVCGDADIARTVNLMVQHKFRNAGQACLAPTRFFVDRRIYGDFVDAFGAATQALRVGAGMAAETQMGPVASARRQAAVQDLIARSVAAGARPVASAVPEAGYFVAPTLLADVPLDAPVMSEEPFGPVACAVPFDSLDQAIAQANHNPYGLAGYLFTDSAKAILAVSERLEVGSLAVNGMGVSVPEAPFGGVKDSGYGSESGTEGMEAFLDTKFMHYVA

SEQ ID NO: 4702 - protein, 411 aa, Rickettsia typhi
NLEFAELKIRGKMFKLPILKASIGKDVIDISRVSAEADCFTYDPGFMSTASCQSTITYIDGDKGILWHRGYDIKDLAEKSDFLEVAYLMIYGELPSSEQYHNFTTKIAHHALVNERLHYLFQTFCSSSHPMAIMLAAVGSLSAFYPDLLNFNETDYELTAIRMIAKIPTIAAMSYKYSIGQPFIYPDNSLDFTENFLHMMFATPCTKYKVNPIIKNALNKIFILHADHEQNASTSTVRIAGSSGANPFACISTGIASLWGPAHGGANEAVINMLKEIGSSENIPKYVAKAKDKNDPFRLMGFGHRVYKSYDPRAAVLKETCKEVLNELGQLENNPLLQIAIELEALALKDEYFIERKLYPNVDFYSGIIYKAMGIPSQMFTVLFAIARTVGWMAQWKEMHEDPEQKISRPR

SEQ ID NO: 4703 - protein, 411 aa, Rickettsia honei
GSEFAELKIRGKIFKLPILKASVGEDVIDISMVSAEADCFTYDPGFMSTASCQSTITYIDGDKGILRHRGYDIKDLAEKSDFLEVAYLLIYGELPSGEQYNNFTKQVAHHSLVNERLHYLFQTFCSSSHPMAIMLAAVGSLSAFYPDLLNFKEADYELTAIRMIAKIPTIAAMSYKYSIGQPFIYPDNALDFTENFLHMMFATPCTKYTVNPIIKNALNKIFILHADHEQNASTSTVRIAGSSGANPFACISTGIASLWGPAHGGANEAVINMLKEIGSSEYIPKYIAKAKDKNDPFRLMGFGHRVYKNYDPRAAVLKETCKEVLKELGQLDNNPLLQIAIELEAIALKDEYFIERKLYPNVDFYSGIIYKAMGIPSQMFTVLFAIARTVGWMAQWKEMHEDPEQKISRPR

SEQ ID NO: 4704 - protein, 239 aa, Glycine max
  misc_feature (217)..(217): Xaa can be any naturally occurring amino acid
KSLGVKMVISGEGSDEIFGGYLYFHKAPNKEEFHQETCRKIKALHKYDCLRANKSTFAWGLEARVPFLDKEFIRVAMNIDPECKMIKKEEGRIEKWALRRAFDDEEHPYLPKHILYRQKEQFSDGVGYGWIDGLKAHAEKHVTDRMMLNAANIFPFNTPTTKEAYHYRMIFERFFPQNSARLTVPGGPSVACSTAKAVEWDAAWSNNLDPSGRAALXVHASAYGNQVKAVEPGEIIPKE

SEQ ID NO: 4705 - protein, 258 aa, Oryza sativa (japonica cultivar-group)
MDAVAGASVSSSSARLRPCPRPRRIGNVAPATVRRRSRRRAVTCAAAADADVVGLFDAAKLTVDRFVESGMVVGLGSGPASGLAIQYLGTRLRRGSLTGILGIPSSTISASEAVKAGIQVSSYEEGTQIDFAFTDADIIEEDTMTAVIGRRKTESGEPSFMVEKGIVKSADKLAFIIGHEKYVKGIEGSIPVLVKSVWRRPSIGTAGPLGGDFPLVTKEGHHVLDVIFTTPIPDLGKVAESLEKIAGVVDHGIVSSIP

SEQ ID NO: 4706 - protein, 57 aa, Triticum aestivum
  misc_feature (10)..(10): Xaa can be any naturally occurring amino acid
  misc_feature (31)..(31): Xaa can be any naturally occurring amino acid
  misc_feature (34)..(34): Xaa can be any naturally occurring amino acid
  misc_feature (39)..(39): Xaa can be any naturally occurring amino acid
  misc_feature (46)..(46): Xaa can be any naturally occurring amino acid
  misc_feature (53)..(53): Xaa can be any naturally occurring amino acid
  misc_feature (56)..(56): Xaa can be any naturally occurring amino acid
MEDGTANCIXIILAIILPPLGVFFKFACGIXFWXCLLLXFFGYLPXIIYAVWXIIXV

SEQ ID NO: 4707 - protein, 341 aa, Mycobacterium sp. S65
MDAIVLKGTNDVGLTSVPDPAPQPGEVIIEVAATGLCGTDLHEYVAGPTFSQPPVVLGHEVSGRIVEVGAGIDRCRIGEGAAVIPMDFCGSCHYCHRSLYHLCQRPGWIGLTRNGGLASHVAVPSRLAVRVPDAVDLQEAALTEPTAVAFHAVRRAELLLGETVLVLGAGALGLTVIQCARAAGAARIYVTEPSRVRGNLARDLGATLVLDPHEPGTTARILEETRGVGVDVVFHVAGSVEAFTQGLDCLRKQGRFMEMSSWAGPASLDVNRHLLKETQLRMVFGYDMFDDFPAVLALMADGKIALTPQITTRIPLDSAVEEGLNGLLEAREGLIKVLVRP

SEQ ID NO: 4708 - protein, 214 aa, Helianthus annuus
MERGGGFHGYHRLPIHPTSGMQQPDMKQKQPDTTNTTFTEDNECIVREQDRFMPIANVIRIMRKILPPHAKISDDAKETIQECVSEYISFVTGEANDRCQREQRKTITAEDVLWAMSKLGFDDYIEPLTVYLHRYREFDGGERGSIRGEPLVKRAAATADPGPFGMGPFVPGFHMGHHNGFFGPASIAGFFKDPSSAAGQSGPAGFEPYAQCKD

SEQ ID NO: 4709 - protein, 465 aa, Burkholderia cepacia R1808
MNGIDVGLEADLQALGKRHLLMHFTHADAYRDQALTVFDRGEGCWLVDRNGKRYFDGLAGLYCVQLGYSHGAEIGDAMREQMGRLPFATNWGYGHEPAIRLAHKLATLAPDGLNRVFFTSSGSESNESAIKLVRQYHQARGEPQRRKFIARRVAYHGTSFGALALNGMTNFRKHFEPLMAGVRHVSNTKRYGRPDGETEAQFTRHLLDEIESLIVQEGPDTVAAIVVEPLQNAGGSLTPPAGYAQGLRALCDRHGVLLVADEVICGFGRLGEWFGSTRYGLQPDLITFAKGIASGYVPLGGVIASDAVVDTVLAGPQQMFLHGATYGGHPVACTAALANLAIMERERVLENVGGNQAVFRRTLDGLLELPCVGDVRGDGYHYSLELVTDKAARRWAAGIGAQAFVSTLLAPAIFEAGLLCRAGVDHEGTPIVQFSPPLVMSRDEIVWFVAKIRDILADTYARAMR

SEQ ID NO: 4710 - protein, 481 aa, Burkholderia cepacia R1808
MLTQEHSMRTSEQSYIAGQWLDPADARAIDVIDPATARPYARLAIGSAADVDRAVGAAKQAFDAYSRWSVDARVALLQRVLDIYQRRYDEVARTISQEMGAPLAFARAAQAAVGTAHLEQTIRALRAFRFSTQVDSLLVSYEPIGVCALITPWNWPINQIVCKVAPALAAGCTMVLKPSEIAPFSAILFAEILDEAGVPPGVFNLVHGYGHEVGDALSRHPDVDMVSFTGSTRAGVEVAKAAADTVKRVHQELGSKSPNLILPDADIDAAVTLGARSCFSNSGQSCNAPTRMFVHVDQLAAAEAAARREAARTVVGDPRSPETEIGPVVSRTQFDRIQQLIQRGIDEGATLVAGGLGRPDGLGDGFYVKPTVFSNVTPDMTIAREEIFGPVLSILTYRTEDEAVALANDSVYGLAAYVQTKDLERARRIAARLRVGNVHINYPAWNPAAPFGGYKRSGNGREYAEFGLVEYLETKGTTGYA

SEQ ID NO: 4711 - protein, 411 aa, Arabidopsis thaliana
MDNINGLPDDLLVKILSFVPTYVAVSTCVLSKRWEFLWMWLPNLEFVSPWDSRPGIVDFINKKLPIHRAPVIERLCIHINSNPHIKPEYIKRWIEIAVSHYVRELQIDYHSKTKITLQLEAESYFIDGKYLQQLISGCPVLEDLSLRFCCNDNLREFTVIIPSLQSLSLFLFGNSNLNRYKIDTPSLKYLKLEDWNDPEHYSWTNMPKLREAYVDVESSNHLKTLIGSITSVKHLTICCLEDYLYGDGFIFNHLEHLKLCMCPFDSSNLLGQLLKGSPNLQVLDIFEMKVSFDNKKKKCFVFLVPNMVFNLILLLGLIDDERNDIVCWNQPSSVLECLLSSLKILNWSAYFGRPQDRDIAVYILKNACHLKTATFLTDKRINDVRRLKMIKELRLSPRASSTCQLVFGEDF

SEQ ID NO: 4712 - protein, 362 aa, Glycine max
MEDGAGRGLECPKTMDGKASNGNGLEKEIPSCCLKAKASIPESEAKCHSTVVSGWFSASQTCSGKSGKAVYFNNPMWPGEAHSIKVEKILYKEKSEYQEVLVFESSMYGNVLVLDGIVQLTERDECAYQEMIAHLPLCSIHSPKNVLVVGGGDGGVLREVARHSSVEHIDICEIDKMVIDVSRKFFPQLAVGFEDSRVHLHVGDAVDFLKSAPEGKYDAIIVDSSDPVGPAQELVEKPFFDTIARALRPGGVLCNMAESMWLHTHLIQDMISICRETFKGSVRYAWASVPTYPSGMIGFILCATEGPPVDFVNPINPIEKLEGANEHKRELQFYNSEMHSAAFALPAFLKREVSLLRDLSLQ

SEQ ID NO: 4713 - protein, 410 aa, Arabidopsis thaliana
MDKINGLPDDLLVKILSYVPTDIAVSTSILSKRWEFLWMWLPNLDYTSRWCRKPGDVGLRDFIHKNLPLHRAPVIESLRFHSNSPDIKPEDIRRWIEIAVSRHVHDLDIDHFSENENIFLSSFFACKSLVTLKLRSVTLRDIPSMVCLPSLKTLLLDNVSFVEGKSLQELLSICPVLEDLSVYCDDYENTKELTIVVPSLLSLSLYIPDEWLLDGYWIDTPSLEYLKLEDWNSCDHLSLIKNMPKLREAYVDAKCFLPKSVIESITSVKHLTICSKDGYGDGFVFNQLEHLTLCVCRGDSPSLLGQLLKDSPNLRILEISVMEDHVDDVGISLDGWNQPSSVPECLLSSLQIFKWPQYLGRPEDRDIAVYILKNARHLKKTTILADRCERFVTQRRMIKELLQALPARIC

SEQ ID NO: 4714 - protein, 130 aa, Arabidopsis thaliana
MIREISNLQKDIINIQDSYSNNRVMDVGRNNRKNMSFRSSPEKSKQELRRSFSAQKRMMIPANYFSLESLFLLVGLTASLLILPLVLPPLPPPPFMLLLVPIGIMVLLVVLAFMPSSHSNANTDVTCNFM

SEQ ID NO: 4715 - protein, 467 aa, Listeria innocua Clip11262
MTSVMWFRRDLRVNDNKALYHACKEEDLILLFQVNPEQFIKGSPSHQAFFASVAHFQQELNKNTHLQIMFGEPIELLKQLKEKIPTWDKVFFNRDETGYGASRDEAARAFFADKEITVHSYHDSYLHSAEEVKKSATEYYKIFTPYYKKWREEIKEMPLKVTLKPEKIRKESLFPNYEEQFRELIQDLPAFDSGEKAANTRLANFVKEDLADYDKARDVPALDKTSHLSRYLRTGEISIRTVWQALQKEEATEGRATFEKELCWRDFYNMIYVSFPKQKNEPIQENYRFIEWENNREFFKKWQDGQTGFPLVDAAMRQLKETGWMHNRLRMITASFLTKDLLIDWRFGEKYFQQMLIDYDPASNIGGWQWAASTGTDAVPYFRIFNPTTQSEKFDPDGTFIRKYVKELRDLPDKFIHQPEKMSETEQKEHGLILGKDYPLPIIDHKERRKLAIARYEFSKEHSRGNI

SEQ ID NO: 4716 - protein, 334 aa, Pisum sativum
MAAPENTLHSTDSPLKRQREDEVNGVSDTLSKEPQPNGLSSVIPGWFSEISPMWPGEAHSLKVEKILFQGKSDYQDVMVFQSATYGKVLILDGVIQLTERDECAYQEMITHLPLCSIPNPKKVLVIGGGDGGVLREVARHSSVEKIDICEIDKMVVDVSKEYFPDIAVGFADPRVTLNIGDGVAFLKAAPEGTYDAVIVDSSDPIGPAQELFEKPFFESVARALRPGGVVCTQAESIWLHMHIIEDIVVNCRQVFKGSVNYAWTTVPTYPSGMIGFMLCSTEGPSVDFKHPVNPIDENDSQQAARPLKFYNREIHSAAFCLPSFAKRAIASKEN

SEQ ID NO: 4717 - protein, 550 aa, Zea mays
MAATVRRAASSVLSRFLLTKPSPSPASAAGNNSALLGSGAAALHRFSTAPASAAAAAEEPIQPAVEVKHTQLLINGNFVDAASGKTFPTLDPRTGEVIARVAEGDSEDIDRAVAAARRAFDEGPWPRMTAYERCRVLLRFADLIERHAEEVAALETWDNGKTLAQAAGAEVPMVARCVRYYAGWADKIHGLVAPADGAHHVQVLHEPVGVAGQIIPWNFPLLMFAWKVGPALACGNTVVLKTAEQTPLSALYVANLLHEAGLPEGVLNVVSGFGPTAGAALSSHMGVDKLAFTGSTGTGQIVLELAARSNLKPVTLELGGKSPFIVMDDADVDQAVELAHQAVFFNQGQCCCAGSRTFVHERVYDEFVEKSKARALKRVVGDPFRDGVEQGPQIDGEQFNKILRYVQSGVDSGATLVAGGDRVGDRGFYIQPTVFADAKDEMKIAREEIFGPVQTILKFSGVEEVIRRANATPYGLAAGVFTRSLDAANTLSRALRAGTVWVNCYDVFDATIPFGGYKMSGVGREKGIYALRNYLQTKAVVTPIKNPAWL

SEQ ID NO: 4718 - protein, 480 aa, Halobacterium sp. NRC-1
MEQNAIQRRERPFVAGEWVSDGEPLPVSDLADGGTFASVAAADTSDAERALSAATGVHADLRETTVPERVEWLESIADGIRRREDELAEVIVREAGKPISSARGEVQSAAERFDRAVGELRHLTGEYRTGTTAGHEDWQAIVKHEPMGTVLCITPYNYPLSTMALQVAPAIAAGNAVIVKPASKTPISGAILADIAADAGLPDGAYNFVPGESSVIGDPLASDARVDAIAMTGSSGAGEHVARQSGITRLHMELGGNAPAIVFEDADLDAAADAATAGSLKYAGQRCSAVSRVLAHESVHDELVSRIDDAMAEWSIGDLFDTDTTLGPLVSADQADWVAELVDDAVDRGATVVRGGERHVEDGVHYYEPTLLADVPRDARIVDEEQFGPVCAVTTVTDEDDAVRTANGSELALDAAVFTADHDRAMRVAERVNAGAVRINGAPSHGLGDVPFGGNDASGIGREGLDSTIHEFVREKSIIL

SEQ ID NO: 4719 - protein, 342 aa, Pisum sativum
MAAESTVELESSMKEHRDDDEKSNGFSVSAVSMDVEGGDKDPSGNGVSSVIPGWFSEISPMWPGEAHSLKIEKILFQGKSEYQKVMVFQSSTYGKVLVLDGVIQLTERDECAYQEMITHLPLCSIPNPKKVLVIGGGDGGVLREVARHSSIEKIDICEIDNMVVEVSKQFFPEVAVGFNDPRVTLRIGDGVAFLKAAPEGTYDAVIVDSSDPIGPAQELFEKPFFQSVARALRPGGVMCTQAESIWLHMDIIEDIVSNCRHIFKGSVNYAWTTVPTYPSGMIGFMLCSTEGPLVDFKHPVNPIDQKDCQKSVRPLKFYNSEIHTAAFCLPSFAKRKIGSKET

SEQ ID NO: 4720 - protein, 341 aa, Photorhabdus luminescens subsp. laumondii TTO1
MKALSKLKAEEGIWMIDVPEPELGHNDVMIKIRKTAICGTDVHIYNWDDWSQKTIPVPMVVGHEYVGEVVAIGQEVKGFKIGDRVSGEGHITCGYCRNCRGGRTHLCRNTIGVGVNRAGCFAQYLVIPAFNAFKIPDNISDELAAIFDPFGNAVHTALSFDLVGEDVLVSGAGPIGIMAAAVCKHVGARHVVITDVNEYRLELARKMGVTRAVNVSQENLTDVMAELGMTEGFDVGLEMSGAPAAFRTLLNTMNHGGRVALLGIPPSDMAIDWNQVIFKGLFIKGIYGREMFETWYKMATLIQSGLDLTPIITHRFSIDDFQKGFDIMRSGQSGKVILNWD

SEQ ID NO: 4721 - protein, 401 aa, Zea mays
MVLEATMICIDNSEWMRNGDYAPSRFQAQADAVNLICGAKTQSNPENTVGVMTMAGKGVRVLVTPTSDLGKILACMHGLEVGAEANLAAAIQVAQLALKHRQNKRQQQRIIAFIGSPVKYDKKILETIGKKLKKNNVALDIVDFGESDDEKPEKLEALIAAVNSSDSSHIVHVPPGENALSDVLLSTPIFTGEEGGSGFAASAAAAVATGASGFEFGVDPNVDPELALALRLSMEEERARQEAIAKKAAEDTSNTENINASSSNSDSVMAEAELASNAAAGDKQEQPKDDDDLLQQALAMSMEGGASGSAAVTDSAMAEAGAVDPDLALALQMSVQDANMSSDTDMSKVFEDRTFVSSILNSLPGVDPNDPSVKDLLASLHSQGEQEKKEDKSDKTEDEKN

SEQ ID NO: 4722 - protein, 363 aa, Pseudomonas aeruginosa PAO1
MNSSPQANAAMRAAVWHGRHDIRVEDVPLPAEPPPGWVQIRVHWCGICGSDLHEYLAGPVFIPVEAPHPLTGLKDQCILGHEFSGEIVRLGNGVTGFAVGQAVAADACQHCGTCYYCRHGLYNICENLAFTGLMNNGAFAEYVNVPANLLYALPAGFPSEAGALIEPLAVGMHAVKKAGSLLGQNVVVVGAGTIGLSTIMCARAAGAAQVIALEMSSARKAKALEVGASQVLDPSRCDALGEIRALTGGLGADVSFECIGNKHTAKLAIDAIRKAGKCVLVGIFEEPSEFNFFELVSTEKQLLGALAYNGEFADVIAFIADGRLDIAPLVTGRIGLEEIVERGFEELVNNKEHNVKIIVSPGG

SEQ ID NO: 4723 - protein, 175 aa, Secale cereale
  misc_feature (168)..(168): Xaa can be any naturally occurring amino acid
MAPAVMASSATTVAPFQGLKSTAGLPVGRRSGSAGLSSVSNGGRIRCMQVWPIEGIKKFETLSYLPPLSTEALLKQVDYLIRSKWVPCLEFSKVGFVFREHNNSPGYYDGRYWTMWKLPMFGCTDATQVLNEVEEVKKEYPDAYVRVIGFDNMRQVQCVSFIAFRPPXCEESGKA

SEQ ID NO: 4724 - protein, 285 aa, Xanthomonas axonopodis pv. citri str. 306
MSANDNWYIEHFQPTGSAIGFRISGKLDEVQSPFQKIEIYQTTDWGKLMLIDGAVMLTSRDNFFYHEMISHPALFTHPAPKRVVIIGGGDCGTLREVLKHPGVESATQCDIDEQVTRMSEKYFPELCDSNHDARAELLFDDGVAYMANCQAGSVDIVIVDSTDPVGPAEGLFNKAFYESCFKALKDDGILVQQSESPLALLDLINEMRTEMGKAGFQSFKTLPFPQPCYPTGWWSVTMASKQAKADFAFRQDAAQAKGFDTLYYTAHLHTGVLVAPPFVAKALGE

SEQ ID NO: 4725 - protein, 175 aa, Secale cereale
MAPTVMASSATSVAPFQGLKSTAGLPVSRRSNGASLGSVSNGGRIRCMQVWPIEGIKKFETLSYLPPLTTEALLKQVDYLIRSKWVPCLEFSKVGFIFREHNASPGYYDGRYWTMWKLPMFGCTDATQVINEVEEVKKEYPDAYVRIIGFDNMRQVQCVSFIAFKPPGCEESGKA

SEQ ID NO: 4726 - protein, 225 aa, Zea mays
  misc_feature (71)..(71): Xaa can be any naturally occurring amino acid
RYYLKDAVLDGGVPFNKAYGMTAFEYHGTDARFNRVFNEGMKNHSVIITKKLLDFYTGFEGVSTLVDVGGXGVGATLHAITSRHPHISGVNFDLPHVISEAPPFPGVRHVGGDMFASVPAGDAILMKWILHDWSDAHCATLLKNCYDALPENGKVIVVECVLPVNTEATPKAQGVFHVDMIMLAHNPGGKERYEREFRELAKGAGFSGFKATYIYANAWAIEFIK

SEQ ID NO: 4727 - protein, 192 aa, Chara globularis
MGRAKIEIKRIDNATSRQVTFSKRRNGLLKKAYELSVLCDADIAVIMFSPTGKLFEYANSSMKEILDRYHSCPPEQREKRKFDNTDYLSKEAKRLRHEVELAKQENRHLSGEDLNAVQMPELDGLELKLEDALRKIRFRKREVMQMEIDRLQQKVWTSSPQFLLAWRSCHPAVVQIIIFCSHPAFVPKFILQ

SEQ ID NO: 4728 - protein, 469 aa, Glycine max
  misc_feature (80)..(80): Xaa can be any naturally occurring amino acid
MASEEAECISNLFKPIYLKEVAELRQYVPNLQSRPNPLDHNPYFDTRQLQQQQGFYLTESDVLLRQIGNDLSPYTLCFFXCHHSPRFAYHRAGPRKNIYFDPSIVRVAIVTCGGLCPGLNTVIRELVVGLWQLYGVRHIFGITAGYRGFYSSVPLPLNPKLVHHWHNVGGTLLQTSRGGFDLHNIVDAIQTHAFNQVYIIGGDGTMRGAVKIFDEIKHRKLEVAVVGIPKTVDNDVGIIDRSFGFQTAVEMAQEAISAAHVEAESAVNGIGLVKLMGRSTGHIALHATLSSRDVDCCLIPEIDFFLEGKGGLLEFLGQRLKENGHAVLVVAEGAGQDIIPRTDSQKDERDESGNPVFLDVGVWLKSELNKWWKREHPNELFTVKYIDPTYMIRAVHANATDNLYCTLLAHSAIHGVMAGYTGFVAGPINGNYAYIPLEDVARANNPVDTQDHKWSWVRSVTNQPDFVRR

SEQ ID NO: 4729 - protein, 289 aa, Salmonella typhimurium LT2
MEYSILSNNLKMPMVGFGVFKVTDKEECQQSVLSAIRSGYRLIDTAAVYGNEDAVGDAVREAIATGLCTREELFITSKLWVQDMANYDLAKAGIEASLKKSGLDYFDLYLLHQAMGDYFSAWRALEDAYEAGKLKAIGVSNFYAHVLANFCETVRITPMVNQVELHPYFAQPAALETMKHYNVQPEAWAPLGGGRHKPYENVMLQGIADAHQKTIAQVVLRWNVQRGVTVIPKSTRQERIEENFAIWDFSLTDNEMAQINALDLGYVGEAVKHFNPEFVRGCLGVKIHD

SEQ ID NO: 4730 - protein, 336 aa, Coleochaete scutata
MGRGKIEIRRIENATSRQVTFSKRRNGLLKKAYELSVLCDVDIAVIVFSPTGKLFQYASSSMKEILERYEQVPPEQKEKGSQRLDNMDYLNREVAKLRNEVEHKYHEARQLEGEDLDRLGVYELEQLEQKLSNSMRRIRGRKDELMKAELEGLRKQVADMETALVGAASFDGRPLSGSSNYLLQSIPGIRTMPPSSLGGMNPASTSLQLGSDRLFGNRGVELHDRSASDESPVMTNRMSVDFAQAPREMSGVDLSGSPVPPWKSQAAAAAQQEWKNQASSPTDWKVTNTEHLDSWPKAPAPTPEWKSTSVQPEWKNQSSPSSEWKPLDWMYHGPQD

SEQ ID NO: 4731 - protein, 187 aa, Triticum aestivum
  misc_feature (122)..(122): Xaa can be any naturally occurring amino acid
  misc_feature (162)..(162): Xaa can be any naturally occurring amino acid
QQPFAQPQQLFPELEQPIPYQPLHPFTLQPQQPFPLQPQQPFPQQPQQPFPQQPQQSFPQQPQQPFPQQPQQPFPQQPQQPFPQQPQQPFPLRPQQPFPQQPQQSQQSFPQPQPQQRPTTIXLQPQQPLPQQPQQPFQQPQQQLSQQPEQTISQQPQQPFPXQPHQPQQPYPQQQPYGSSLTSIGGQ

SEQ ID NO: 4732 - protein, 321 aa, Mucor mucedo
MSTDYLTLNRTGDKMPIRGFGCWKIDTKDCEETVYQAIKTGYRLFDGACDYGNEVEVGRGINKAINEGLVKREDLFIVTKLWNTFHSKKHVRALFDRQLKDTGLEYFDLYLIHFPVPLQYVDPATVYPPGWYVGDAKSLQFEQSPIHECWAELEKIVDAGLARNIGVANFNCQAILDLLTYARIKPAVLQIELHPYLPQERLVKWVKEQGIQITAYSSFGPTSYVDLTESGKTYTSLLEHASVKSVADKHNVSTGQVLLRWALDREFAVIPKSVNAGRMKANLEILDIKLDAEDNKTLDSLKTNQRFNDPMTYGFGLPLFD

SEQ ID NO: 4733 - protein, 813 aa, Zea mays
  misc_feature (678)..(678): Xaa can be any naturally occurring amino acid
MAQILLHGTLHATIFEAESLSNPHRATGGAPKFIRKPDYWIEDTVGIGKGTTKIYATVDLEKARVGRTRMVSNEPVNPRWYESFHIYCAHMAADVVFTVKIDNPIGASLIGRAYLPVEDILGGDEIDKWLEICDEKREPIGDSKIHVKLQYFDVGKDRTGARGVRSTKYPGVPYTFFSQRQGCKGTLYQDAHVPDNFVPRIPLADGKNYEPHRCWEDIFDAISKAQHLIYITGWSVYTEITLVRDTSRPKPGGDVTLGELLKRKASEGVRVLMLVWDDRTSVGLLKKDGLMATHDEETANYFHGTDVNCVLCPRNPDDSGSFVQDLQISTMFTHHQKIVVVDHELPNEGSQQRRIVSFVGGIDLCDGRYDTQYHSLFRTLDTVHHDDFHQPNFEGGSIKKGGPREPWHDIHSRLEGPIAWDVLYNFEQRWRKQGGKDLLVRLRDLSDIIIPPSPVMFPEDRDTWNVQLFRSIDGGAAFGFPETPDEAARAGLVSGKDQIIDRSIQDAYINAIRRAKNFIYIENQYFLGSSYDWKPEGIKPEDIDCLHLIPKELSLKIVSKIEAGERFTVYVVVPMWPEGVPESASVQAILDWQRRTMDMMYTDITQALEANGIQTNPKDYLTFFCLGNREVKQEGEYQPEEHPEPGTDYIRAQEARRFMIYVHAKMMIVDDEYIIIGXSANINQRSMDGARDSEIAMGAYQPYHLATRQPARGQIHGFRMSLWYEHLGMLDDVFQRPESVECVQKVNKIAEKYWDLYSSDDLEQDLPGHLLSYPIGVTADGTVTELPGMENFPDTRARVLGNKSDYLPPILTT

SEQ ID NO: 4734 - protein, 304 aa, Zea mays
MAGLSLEHPWAFAFGLLGNVISFMTFLAPIPTFYRIYKSKSTEGFQSVPYVVALFSAMLWIFYALIKSNETFLITINAAGCVIETIYIVMYFVYAPKKAKLFTAKIMALVNGGVFGVILLLTLLLFKGSKRVVLLGWICVGFSVSVFVAPLSIMRRVIQTKSVEYMPFSLSLSLTLSAVVWFLYGLLIKDKYVALPNILGFTFGVVQMVLYVLYMNKTPVAVAEGKDAGGKLPSAADEHVLVNIAKLSPALPERSSGVHPVVAQMAAVPNRSCAAEAAAPPAMLPNRDVVDVFVSRHSPAVHVV

SEQ ID NO: 4735 - protein, 427 aa, Shigella flexneri 2a str. 301
MADTKAKLNLNGDTAVELDVLKGTLGQDVIDIRTLGSKGVFTFDPGFTSTASCESKITFIDGDEGILLHRGFPIDQLATDSNYLEVCYILLNGEKPTQEQYDEFKTTVTRHTMIHEQITRLFHAFRRDSHPMAVMCGITGALAAFYHDSLDVNNPRHREIAAFRLLSKMPTMAAMCYKYSIGQPFVYPRNDLSYAGNFLNMMFSTPCEPYEVNPILERAMDRILILHADHEQNASTSTVRTAGSSGANPFACIAAGIASLWGPAHGGANEAALKMLEEISSVKHIPEFVRRAKDKNDSFRLMGFGHRVYKNYDPRATVMRETCHEVLKELGTKDDLLEVAMELENIALNDPYFIEKKLYPNVDFYSGIILKAMGIPSSMFTVIFAMARTVGWIAHWSEMHSYGMKIARPRQLYTGYEKRDFKSDIKR

SEQ ID NO: 4736 - protein, 347 aa, Nostoc punctiforme PCC 73102
MFQTQLQHPTSKDEMQTTQTLKQIIAGAWITQGIYVVAQLGIADLLKDGSKSYDELATKTGVDARSLYRLLRALASVGIFAEGNSGYFELTPVAESLQSDRTDSLRGYAIKSGQAWEWQPWGHLLESIKTGKPVFKNIFGMERFDYLATDPSASKIYTQAISSISGEQDAAIAAGYDFSFIHNLVEVGGGNGTLIASILKSNLTMQGILFDLPHVVADAKPVIEDLELQDRCQLVGGNFFESVPTSGDAYLLRYIIHDWDDERAIAILKNCYQAMQPDGRLLLVEMVIPQGNEPFFGKLLDLQMLVNYGGRERTQAEYQVLLKTAGFSLTKIYPVAPPISIIEAIRL

SEQ ID NO: 4737 - protein, 276 aa, Fusobacterium nucleatum subsp. vincentii ATCC 49256
MKNVKLLNGVEMPILGFGVYQIPDLEECERVVSEAIGVGYRLIDTAQIYRNEKAVGNAIKKSGVDRKEFFITTKVWITNSGYEKAKTSIEESLKKLQTDYIDLLLIHQPFGDYYGTYRAMEEYYKAGKLRAIGVSNFYPDRFIDIAHFFEIKPMVNQVETHVFNQQIIPQGIMKEYGTQIESWGPFAEGKNNLFTNETLVEVGKKYNKTAAQVALRYLIQRDVVVIPKTVRKERMIQNFDIFNFELSETDMKEILKLDKKESLFLSHYETLKQLTI

SEQ ID NO: 4738 - protein, 216 aa, Phaseolus coccineus
MESGGFHGYRKLPNTTSPGLKLSVSDMNNVNTSRQVAGDNNHTADESNECTVREQDRFMPIANVIRIMRKILPPHAKISGDAKETIQECVSEYISFITGEANERCQREQRKTITAEDVLWAMSKLGFDDYMEPLTMYLHRYRELEGDRTSMRGESLGKRTIEYAPMGVGVATAFVPPQFHPNGYYGPAMGAYVAPPNAASSHHHGMPNTEPNARSM

SEQ ID NO: 4739 - protein, 293 aa, Arabidopsis thaliana
TRPWFSEISPMWPGEAHSLKVEKILFQGKSDYQDVIVFQSATYGKVLVLDGVIQLTERDECAYQEMITHLPLCSISNPKKVLVIGGGDGGVLREVARHSSVEQIDICEIDKMVVDVAKQYFPNVAVGYEDPRVNLIIGDGVAFLKNAAEGTYDAVIVDSSDPIGPAKELFEKPFFESVNRALRPGGVVCTQAESLWLHMDIIEDIVSNCRDIFKGSVNYAWTSVPTYPSGVIGFMLCSSEGPQVDFKKPVSLIDTDESSIKSHCPLKYYNAEIHSAAFCLPSFAKKVIDSKAN

SEQ ID NO: 4740 - protein, 197 aa, Zea mays
MATSFQGTTTKCTACDKTVYLVDKLTADNRIYHKACFRCHHCKGTLKLANYNSFEGVLYCRPHFDQLFKRTGSLDKSFEGTPKVVKPERNVGNENATKVSSAFAGTREKCVGCSKTVYPTERVTVNNTMYHKSCFKCCHGGCTISPSNYIAHEGKLYCKHHHIQLIKERGTSASLRMTTRRHHRLGHWRRMNMSIDH

SEQ ID NO: 4741 - protein, 334 aa, Triticum aestivum
  misc_feature (38)..(38): Xaa can be any naturally occurring amino acid
MASSSPPHVVEDVPPFLQLLSDGTVIRFTDAYPLPIPXSPPGQPVVDWKDVLYDASHGLKLRIYRPAAASSSGNKLPVIVYFHGGGYSIGSFDMPNFHACCVRLAGELPALVLSADYRLAPEHRFPAGLDDAANVVSWVRAQAAAVGDNADPWLSETANFGRVFVAGDSAGGGVVHHTAVRLASGRLGPLDPVRVAGCAMLCPMFGGEERTASEAEFPPGPFLSLPAVDQAWRLVLPPGSTRDHPLANPFGPDSPALDGVALPPMLVVAAARDLLRDRAADYAARLKAMGKPVELVEFEGQHHGFFAVEPYGDAGSEVVRLVKRFVYGNGGASD

SEQ ID NO: 4742 - protein, 308 aa, Neurospora crassa
MADHTEVDLDSIIDRLLEVRGSRPGKQVQLLEAEIRYLCTKAREIFISQPILLELEAPIKICGDIHGQYYDLLRLFEYGGFPPEANYLFLGDYVDRGKQSLETICLLLAYKIKYPENFFILRGNHECASINRIYGFYDECKRRYNIKLWKTFTECFNCLPIAAIIDEKIFTMHGGLSPDLNSMEQIRRVMRPTDIPDCGLLCDLLWSDPDKDITGWSENDRGVSFTFGPDVVSRFLQKHDMDLICRAHQVVEDGYEFFSKRQLVTLFSAPNYCGEFDNAGAMMSVDESLLCSFQILKPAEKKQKFGRR

SEQ ID NO: 4743 - protein, 214 aa, Zea mays
  misc_feature (14)..(14): Xaa can be any naturally occurring amino acid
MAAVEVCVKAATGXPDTLGDCPFSQRVLLTLEEKKVPYEVKLVDLDNKPEWFLKISPEGKVPVFNGGDGECIADSDVITQTIEEKFPTPSLVTPVEYASVGSKIFPAFITFLKSKDASDGSEKALLDELQALDEHLKAHGPYINGDNVSAADLSLAPKLFHLQVALEHFKGWKIPENLTNVHAYTKALFTRESFVKTKPSEEHVIAGWAPKVNA

SEQ ID NO: 4744 - protein, 322 aa, Xanthomonas axonopodis pv. citri str. 306
MSFDPDVVRLFAQLQEAAQPPMDTLPIEGARAMMRAVGAQFGFQRLEMAEVRDLQADAATGAVPLRVYRPTGLATGPAPTCLYVHGGGGLVGDLESHDDVCRQLAARAGCQVLAIHYRLAPEHPAPAGVEDVIATLHWLVAHPDTVGADVQRLAVCGDSIGGAMAAVAALAARDAGIALRCQLLVYPLTDARQDSGLYPSRSLNAGLPPLTAAAVEFFNRHLLPDMAVANDWRVSPMLAPDVAGVAPALVVVCDRDMLYDEGRAYAERLRAAGVEVTLHSFPGMIHGFINMGSVLRAAGETLDLAALTLRQRLLPAIERRAA

SEQ ID NO: 4745 - protein, 309 aa, Burkholderia cepacia R18194
MPMPLDPQIAAILKTLEAAPPMESLSVDALRNSLAYPPLERRTVVGEVVDFDMPLEGRVLAARLYRPKLAQSDGVTVFFHGGGFVIGNLDTHDHVCRDLCAESGAAVIAVDYRLAPEHPFPAAVDDCFDAVRWIAEHADTLSFDPSRIVVAGDSAGGNLAAVTALKIRDEGGPTLRAQVLVYPVTDYHTPPTRSYIENQSGYSLTRAAMIRFWNDYVANEREALHPHACPLRAKSLAGLPRALVITAGFDPLRDEGEAYANRLFDAGVPVTFRRHDDMIHGFFRMGPACAAAQEGLLRAAAWIRDVMAR

SEQ ID NO: 4746 - protein, 307 aa, Triticum aestivum
  misc_feature (239)..(239): Xaa can be any naturally occurring amino acid
MEAVARASIAAGSHARVPLCRRPRPRHAVRCLRGRPSVACAAAADADVVRLFDAAKLTVGRVGERAAWWSGVGSGAASGLAVPVPPDAPPQNLGNRLRRGTLTGIVGIQSSVIKPGEASEATRKVPKFILLALIDFAFTDADVIEEGTLAAVIGRGKTESGQPSFIQEKGIVESADKVAFIIDNDKYVNGIEGSIPVLVKSGNWIDTAEEIDDLFLGDAEVWRRPSIGTAGPSGGDFPXLVTKEGHHILDVIFTTPIQDLGKVAEDLEKIVGVVDHGIICNTMPYAVIASKGEVQVLDRKSSVIPNT

SEQ ID NO: 4747 - protein, 135 aa, Mycobacterium tuberculosis H37Rv
MPTGKVKWYDPDKGFGFLSQEGGEDVYVRSSALPTGVEALKAGQRVEFGIASGRRGPQALSLRLIEPPPSLSRPRREPAAEHKHSPDELHGMVEDMITLLESTVQPELRKGRYPDRKTARRVAEVVRAVAREFES

SEQ ID NO: 4748 - protein, 245 aa, Lycopersicon esculentum
MATNSSSHSPRTVEEIFKDFSARHAAVLRALTTDVEDFYSQCDPERDNLCLYGHPNESWEVAVPAEEVPPELPEPVLGINFARDGMERRDWLSLVAMHTDSWLLSVAFYFGARLNRNERSRVFTLINDLPTVFEAVTGRKPLKDKPSVDSGKKSKNNAKREKQMKANQRLQEESDDEDEGNEDEHEETLCGSCGTNGNEDEFWIGCDMCEKWYHGKCVKITPAKAQSIKEYRCPSCSNKRAKHMA

SEQ ID NO: 4749 - protein, 182 aa, Glycine max
  misc_feature (51)..(51): Xaa can be any naturally occurring amino acid
RAESARAVPRSPKPLHENKPQISAPAAKAHVEGWPPIRSFKKNSLASSASXMMRGQIPSLDAFIGKVSMEGAPYLRKVDLNSFTTYKDLSLALEKMFSCFTLSQCGSYGVSSRENLSESRLMDLLHGSEYVLTYEDKDGDWMLVGDVPWEMFTESCKRLRIMKSSEAIGLAPRAMEKCKSRY

SEQ ID NO: 4750 - protein, 125 aa, Agrobacterium tumefaciens str. C58
MADLAKIVEDLSTLTVLEAAELSKLLEEKWGVSAAAPVAVAAAGGAGAAAAVEEEKTEFDVVLVDAGANKINVIKEVRAITGLGLKEAKDLVEGAPKAVKEAVSKAEAADLKKKLEDAGAKVDVK

SEQ ID NO: 4751 - protein, 525 aa, Zea mays
  misc_feature (485)..(485): Xaa can be any naturally occurring amino acid
MAVAPMDCAAGSISLGHKVLGRFGVPNSSRLRWVGYDRKPRTDQLIARAVSVDRTQLDFSNPDWKKQFQEDFDKRFSLPHLTDVIDVEPRPTTFSLKSRAPLENANGTMQGSWNGYVNDDDRALLKVIKFASPTSAGADCIDPDCSWVEQWVHRAGPRKQIYFEPQYVKAGIVSCGGLCPGLNDVIRQIVLTLEKYGVKNIVGIQHGFRGFFEDHLSEVPLSRHVVQNINLAGGSFLGVSRGGANISDIVDSIQARRLDMLFVLGGNGTHAGANAIHDECRKRKLQVSIVCVPKTIDNDILLMDKTFGFDTAVEAAQRAINSAYIEAHSAFHGIGLVKLMGRSSGFITMHASLSSGQVDICLIPEVPFTVDGPNGVLRHLEHLIETKGFALVCVAEGAGQEYFQKSNATDASGNMVLSDIGVHLQQKIKSHFKDIGVHSDVKYIDPTYMLRAVRANASDAILCTVLGQNAVHGAFAGFSGITTGXCNTHNVYLPIPEVIKSTRFIDPNSRMWHRCLTSTGQPDFH

SEQ ID NO: 4752 - protein, 101 aa, Sorghum bicolor
VLAATTSEAAISCGQVSSAIAPCLSYARGQGSAPSAGCCSGVRSLNSAARTTADAAACNCLKNAARGISGLNAGNAASIPSKCGVSVPYTISTSTDCSRVN

SEQ ID NO: 4753 - protein, 261 aa, Triticum aestivum
INHSLAAGLRNSGGFFTDADVARIVAVAAARNATTVYVIEATLNYDDATAASVEQELSSVLATLRHEEGLAFVRDASYLEFLDRVHGEEVALDKIGLWRVPHPWLNVLVPRSRIADFDSAVFKGILQGTDIAGPLVVYPLNKSKWDDGMSAVTPAEEVFYAVSLLFSSVANDLKRLEAQNQKILRFCDLAGIGYKEYLAHYTAHGDWVRHFGGKWDRFVEMKDKYDPKRLLSPGQDIFALVRSVLPLSTSCYYLWINSCGQ

SEQ ID NO: 4754 - protein, 504 aa, Bifidobacterium adolescentis [sequence omitted]

SEQ ID NO: 4755 - protein, 322 aa, Staphylococcus epidermidis
MKKIAVLTSGGDSPGMNAAVRAVTRTAIYNNIEVYGVYQGYQGLLDDDIHKLELGSVGDTIQRGGTFLFSARCPQFKEEDVRKKAIENLRKRGIEGLVVIGGDGSYRGAQRISEECKEIQTIGIPGTIDNDINGTDFTIGFDTALNTIIESVDKIRDTASSHARTFIVEVMGRDCGDLALWAGLSVGAETIVLPEVNTDIKDVAEKIEQGIKRGKKHSIVMVAEGCMSGQECADELTKYINIDTRVSVLGHIQRGGSPSGADRVLASRLGGYAVELLKQGETAKGVGIRNNQLTSTPFDEIFAESDRKFNSQMYELAKELSI

SEQ ID NO: 4756 - protein, 84 aa, Glycine max
PENTPTTKEGYLYRTIFEKFFPKNAAKATVPGGPSVACSTAKAVEWDAAWSKNLDPSGRAALGIHDAAYDAVDTKIDEPKNGTL

SEQ ID NO: 4757 - protein, 261 aa, Vicia faba
MASTKDRENFVYIAKLAEQAERYEEMVDSMKNVANLDVELTIEERNLLSVGYKNVIGARRASWRILSSIEQKEESKGNDVNAKRIKEYRHKVETELSNICIDVMRVIDEHLIPSAAAGESTVFYYKMKGDYYRYLAEFKTGNEKKEAGDQSMKAYESATTAAEAELPPTHPIRLGLALNFSVFYYEILNSPERACHLAKQAFDEAISELDTLNEESYKDSTLIMQLLRDNLTLWTSDIPEDGEDSQKANGTAKFGGGDDAE

SEQ ID NO: 4758 - protein, 89 aa, Glycine max
MASFARRAMSLAQIPSARVPASVCQRRGLAGAADHHGSTKVDFWKQPTNPGNWKEEHFVLISLSGWGLLFYSGYKLFTGGKGDDEKPAQ

SEQ ID NO: 4759 - protein, 241 aa, Zea mays
HNNKYKQTGSPIEECRPKIWLMDSKGLIVASRKDSLQAFKKPWAHEHEPVATLLEAVQSLKPTVLIGTSGKGGTFTKEVVEAMASQNEKPVIFALSNPTSHSECTAEQAYTWTKGRAVFASGSPFDSVELDGKVLVPGQSNNAYIFPGFGLGVVISGAIRVRDDMLLAASEALAEQVTEEHFAKGLIFPPFTNIRAISARIAAKVAAKAYELGLASRLPRPDDLVKYAESCMYTPIYRSYR

SEQ ID NO: 4760 - protein, 472 aa, Shigella flexneri 2a str. 301
MTTHLAWFRQDLRLHDNLALAAACRNSSARVLALYIATPRKWETHNMSPRQAELINAQLNGLQIALAEKGIPLLFREVDDFVASVEIVKQVCAENSVTHLFYNYQYEVNERARDVDVERALRNVVCEGFDDSVILPPGAVMTGNHEMYKVFTPFKNAWLKRLREGMPECVAAPKVRSSGSIKPAPSITLNYPRQSFDTAHFPVEEKAAIAQLRQFCENGAGEYEQQRDFPAVEGTSRLSASLATGGLSPRQCLHRLLAEQPQALDGGAGSVWLSELIWREFYRHLMTYYPSLCKHRPFIAWTDRVQWQSNPAHLQAWQKGKTGYPIIDAAMRQLNSTGWMHNRLRMITASFLVKDLLIDWREGERYFMSQLIDGDLAANNGGWQWAASTGTDAAPYFRIFNPITQGEKFDREGEFIRRWLPELRDVPGKAVHEPWKWAQKAGVKLDYPQPIVEHKEARVQTLAAYEAARKGK

SEQ ID NO: 4761 - protein, 510 aa, Glycine max
  misc_feature (299)..(299): Xaa can be any naturally occurring amino acid
  misc_feature (473)..(473): Xaa can be any naturally occurring amino acid
MGSDNTNLEFLKEIGLGSSNIGSYINGQWKATGSSVTSVNPSNNQSIAQVTEATLQDYEEGLQACSEAAKTWMTIPAPKRGEIVRQIGEALRAKLDPLGRLVSLEMGKILPEGIGEVQEIIDMCDYCVGLSRQLNGSIIPSERPDHMMFEVWNPLGIVGVITAFNFPCAVLGWNACIALVCGNCVVWKGAPTTPLITIAVTKLVAEVLERNKLPGAIFTSFCGGADIGQAIAKDTRIPLVSFTGSSKVGLMVQQTVNERFGKCLLELSGNNAIIVMDDADIKLAVRSILFAAVGTAGQXRCTTCRRLFLHESIYADVLDQLIGVYKQVKIGNPLEKGTLVGPLHTPTSVENFQKGISVIKSQGGKILTGGSVLESAGNFVQPTIVEISPDAPVVKEELFGPVLYVMKFQTLEEAIALNNSVPQGLSSSIFTQRPGTIFKWIGPRGSDCGIVNANIPTNGAEIGGAFGGEKATXGGGREAGSDSWKQYMRRSTCTINYGSELPLAQGINFG

SEQ ID NO: 4762 - protein, 116 aa, Triticum aestivum
PRVREKAALSDEYFIKRKLYPNVDFYSGLIYRSMGFPTEFFPVLFAIPRMAGWLAHWKESLDDPDNKIMRPQQVYTGVWLRHYTPVRERVASNQGEELGQIATSNATRRRRAGSSL

SEQ ID NO: 4763 - protein, 510 aa, Oryza sativa (japonica cultivar-group)
MICRSLLLLRSNAASKASNIVKHVAATGCLPKYSSEAPARYFSSEPSLQVDSTEENGFKGHGMLAPFTAGWQSTDLHPLVIDRSEGSYVYDINGKKYIDALAGLWSTALGGNEPRLIKAATDQLNKLPFYHSFWNRTTKPSLDLANEILSMFTAREMGKIFFTNSGSEANDSQVKLVWYYNNALGRPNKKKFIARSKSYHGSTLVSASLSGLPALHQKFDLPAPFVLHTDCPHYWRFHLPDETEEEFATRLATNLENLILKEGPETIAAFIAEPVMGAGGVIPPPKTYFEKIQAVLKKYDILLIADEVITAFGRLGTMFGCDMYDIKPDLVSIAKALSSAYMPIGAILVSPEITDVIYSQSNKLGSFAHGFTYSGHPVSCAVAIEALKIYKERNIIEHVQKIAPRFQEGIKAFSGSPIVGEIRGLGLILGTEFVDNKSPNDPFPAEWGVGSLFGAECEKRGMLIRVAGDNIMLSPPLIMTPDEVEEIICKYGDALKATEERIAELKAKRG

SEQ ID NO: 4764 - protein, 302 aa, Burkholderia cepacia R18194
MDKLAATPSKPRHLMSPDEARTAFARISTILSPGADVRSTIALDIPVDGGTLRARLFVPDGRPQALLVYFHGGGWVVGGIDAFTPLCREIAAGAGVAVALVEYRKAPEHPFPGPVHDAWQAAQWLASQRVALLGAELPVFVGGDSAGANLAIAVTLLTRREGSMSFAGQLLVYPVTDCVFDRPSYVAAENQLLTTRDAMMGYWNHYAPSDAARHSSLASPLREADLSGLPEAIVVTAEHDVLRDEGEAYAQRLEQAGVPVHHRRALGQMHGFLMMIGVLPGSRDGLEFVCERLRDLVARSSR

SEQ ID NO: 4765 - protein, 494 aa, Pseudomonas aeruginosa PAO1
MIDLNPIQPICIAGEWRAGGGDLYESLYPATGEAVARLHAASLEDVEEAMAGAHRAFRESGWAQRKPHERATVLYRIAALIRERSEELAQLQRLDNGKPIRETRNLVASAAATFQFFAAACETLEESITPSRGDFVSMSVYEPMGVVVAITPWNSPIASEAQKLAPALAAGNAVVVKPAEITPLAALALARICDEAGLPRGLVSVLPGKGALIGDALTRHPLARRVSFTGGTRTGKHIARIAADKMMPVSLELGGKSPTMVLADADLDHAVAGVLYGIFSSSGESCIAGSRLFVASERYDEFMERLATGAAALRVGDPADERTQMGPLISARHRESVERYVEMGVAEGGRLRTGGLRPHGGAFDRGYFYTPTIIEGLTNGARLCREEVFGPVLVAMPFASEEALIEEANDSCYALAAGIWTRDFQRAWRLGRAVQAGTVWINTYKQFSISTPFGGWRDSGLGREKGRLGILQYMEQKSLYWGLNEQPLAWAGSH

SEQ ID NO: 4766 - protein, 497 aa, Mesorhizobium loti MAFF303099
MKGDDGLTVTQSLTRRLKNPELFDDLAGVPGRKAEQSTRRFSVFNPSTGELLAELPDMDVRDVSKAIDKAEAAQEHWAALTARERSDILWEWHQLILDHSEDLAAILTAEMGKPLAEAKSEIAHAAAYLQWYAEEANRIYGETISPPSNDRRMLVIKQPIGVVGAITPWNFPASMVARKISPALAAGCAIVLKPAEQTPLVAGAMFTLARMAGFPDGVLNLIYASEGDAVGRELCSNPKVRKISFTGSTEVGRLLMRECSDQIKRTSFELGGNAPFIVFDDADVDAAVDGALQAKFRNAGQTCVSANRLYVQSSVYNEFCDKFTKRVSALRVGDGFEPEVAIGPLIDKCALAKIEDHIRDAVRQGGKIRCGGNRIGESGTFFEPTVITDVERTMRVAQEETFGPLAPIIRFNDPDQVVREANDTIYGLAAYFYASNLKRVWRVAEALEYGMVGINTGRMSSEAAPFGGMKQSGIGREGSRHGLEDYLEMKYLCMGGL

SEQ ID NO: 4767 - protein, 364 aa, Magnaporthe grisea 70-15
MSQESQAPTQAKDAVLVQSAEMPAGSQKVEELDFNKFRGRPITAEDLLDGMRHMGFQASSMCEAVRIINDMRAWSDPETGERTTIFLGYTSNLISSGLRGVLRYLVQHKHVSAIVTTAGGVEEDLIKCLGDTYMSSFSAPGADLRKKGLNRIGNLVVPNSNYCAFEDWVVPILDKMLEEQEAGRGKGDDGQDAVNWTPSKVIHRLGQEINDERSVYYWAWKNDIPVFCPALTDGSLGDMLYFHSFKASPRHLRVDIVEDIRKINTIAVRAKRAGIIILGGGVVKHHIANACLMRNGAESAVYINTAQEFDGSDAGARPDEAVSWGKIKAGADAVKVYLEATSCFPFIVANSFAKDDQHIKPDSS

SEQ ID NO: 4768 - protein, 268 aa, Zea mays
MTKAATIYGSKTQSDALRPGPLRPANIIRNKFPTYKNGSNGIVIKLADGPEIPPLKEIVAKETADLLDRRQRLSVRELAMKFEKGLSTATLLSNEVKWRQVALMERDILLKNLKSVLESLRGQVTGKTKDEIEESISMVEILTVQLSKREAELVQQKEEVTKLAKSLKQASEDAKRIVEEERANAHTEIETAKGAVQRVQQAVQEHEKMSQNTGKQKQDMEELKKKKKGGRPFFFFFFFFFFFYQQNVTHILVTLPNSQVTHHLFLGN

SEQ ID NO: 4769 - protein, 307 aa, Zea mays
  misc_feature (247)..(247): Xaa can be any naturally occurring amino acid
MAARSSPSSTSPPAGGPAAAAWRRRRVASEPPYSCGAGASPNIPFCDVGLPIDRRVDDLGSRMTVAKKTSQLGDQSPAIPRLGVPAYKWWSEALHGIFNQGRGIHLDGPLRAATSFPQVILTAASFNLHLWDRIGQDVDELKEEVQEAPRVKMLHCPSKAMDIENEIQVLCDQLAKKSSDSLRLLKELELHRSYGENDMPLYELKGLETLGSTLHIVVHDCASVDFWNSSIQWFRIQPEGSKKEIIXGTTKPAYAPEPHDVGRYTQAEVKSGGQTSITKIAGSVDPAAGLVHYVEALVRRRETGYNV

SEQ ID NO: 4770 - protein, 272 aa, Pseudomonas aeruginosa PAO1
MSSTIHPLPSFGLGTFRLTGQVVVDSVRSALELGYRAIDTAQIYGNEADIGRAIAESGVPRSELFLTTKVWVDNYAREKLLASLRESLEKLRTDRLDLVLIHWPAPGNGVELGEYMAALAEAKSLGLTRRIGVSNFNIELTRQAIAAVGAGEISTNQIELSPYLQNRALTAYLEEQGIAVTSYMTLAYGKVLKDPTLAGIAARHRATVAQVALAWAMQLGYAVIPSSTRRENLASNLLARDLRLDAEDMARIAGLERNGREVSPQGLAPAWD

SEQ ID NO: 4771 - protein, 277 aa, Leuconostoc mesenteroides subsp. mesenteroides ATCC 8293
MTFHELSDGQHLPEIGFGTYKLNGFAGTQSILSAVDAGYRLFDTAFNYQNEGTVGQAIQQSHVNRDELIITSKLPGKYYSSYQDSIDLIQESLYRSKLDYFDLYLLHWPNPIDDHYLEAWHTLIQAQKFGLVKSIGVCNFLPEHIERLKKETNILPVVNQVELHPYFNQQELREYNNTQNILTQAWSPLGRASAILKDPVLVELAKKYHKNIGQLVLKWEISLGVLPIPKASSYARQKGNLDLFDFEISSSDMQRINDLTKPDGRTNNQDPAVYQEF

SEQ ID NO: 4772 - protein, 235 aa, Leuconostoc mesenteroides subsp. mesenteroides ATCC 8293
MRLIMNEKNFQKKQAALAALNYIQTDMIIGLGTGSTVSYFLDALAASQYNVIGVTTSTITSQRCAELNIPIVDIDAIDHIDVTVDGADEVDSYLNGIKGGGAALLMEKIVAKNSKKNIWIVDRSKVHNTLGSFPLPVEVIPYGSGQLLRQFANKGLFPKLRRHPGNNQPVITDAGHYIIDCHMTTINNPYALAEYLESQVGVVEHGLFLNICDRIIIGDNTVEIKERQQAHVEIN

SEQ ID NO: 4773 - protein, 355 aa, Alternaria brassicicola
MAEFVRAQIFGTTFEITSRYTDLQPVGMGAFGLVCSAKDQLTSQAVAIKKIMKPFSTPVLSKRTYRELKLLKHLRHENIISLSDIFISPLEDIYFVTELLGTDLHRLLTSRPLEKQFIQYFLYQILRGLKYVHSAGVVHRDLKPSNILVNENCDLKICDFGLARIQDPQMTGYVSTRYYRAPEIMLTWQKYDVEVDIWSAGCIFAEMLEGKPLFPGKDHVNQFSIITELLGTPPDDVIQTICSENTLRFVQSLPKRERQPLSNKFKNAEPQAVDLLENMLVFDPKKRVRAEQALAHPYLAPYHDPTDEPIAEEKFDWSFNDADLPVDTWKIMMYSEILDYHNVDAAAQEQENNGS

SEQ ID NO: 4774 - protein, 159 aa, Hyacinthus orientalis
MSDEGASLRVEADAGASKTYPQQAGTIRKNGYIVIKNRPCKVVEVSTSKTGKHGHAKCHFVAIDIFTAKKLEDIVPSSHNCDVPHVTRTDYQLIDISEDGFVSLLTENGGTKDDLRLPTDDSLLTQIKDGFAEGKELVVSVMSAMGEEQINALKDVGPK

SEQ ID NO: 4775 - protein, 98 aa, Glycine max
RDGSAHGGVVINMESLKVPEMQVHVDVGNSPPYVDVSGGELWINILHETLRYGLAPRSWTDYLHLTVGGTLSNAGVSGQAFRHGPQISNVQQLEIVTG

SEQ ID NO: 4776 - protein, 373 aa, Mycobacterium tuberculosis H37Rv
MTVVPENFVPGLDGVVAFTTEIAEPDKDGGALRYRGVDIEDLVSQRVTFGDVWALLVDGNFGSGLPPAEPFPLPIHSGDVRVDVQAGLAMLAPIWGYAPLLDIDDATARQQLARASVMALSYVAQSARGIYQPAVPQRIIDECSTVTARFMTRWQGEPDPRHIEAIDAYWVSAAEHGMNASTFTARVIASTGADVAAALSGAIGAMSGPLHGGAPARVLPMLDEVERAGDARSVVKGILDRGEKLMGFGHRVYRAEDPRARVLRAAAERLGAPRYEVAVAVEQAALSELRERRPDRAIETNVEFWAAVVLDFARVPANMMPAMFTCGRTAGWCAHILEQKRLGKLVRPSAIYVGPGPRSPESVDGWERVLTTA

SEQ ID NO: 4777 - protein, 214 aa, Brassica napus
  misc_feature (139)..(139): Xaa can be any naturally occurring amino acid
  misc_feature (182)..(182): Xaa can be any naturally occurring amino acid
  misc_feature (186)..(186): Xaa can be any naturally occurring amino acid
  misc_feature (189)..(189): Xaa can be any naturally occurring amino acid
  misc_feature (193)..(193): Xaa can be any naturally occurring amino acid
  misc_feature (204)..(204): Xaa can be any naturally occurring amino acid
  misc_feature (206)..(206): Xaa can be any naturally occurring amino acid
  misc_feature (212)..(212): Xaa can be any naturally occurring amino acid
METSSNSTNSSLFQWLGLIEDYDHPSTSTLPPVITLLASVLTKMIQKNEKPFHTRRNKFRDEEITMFHGSRAPSMNIQRYTERVHRYARCSPACFVAAFVYIIRYLEIPVATSTTRRLTSLNVHRLLITSLLVAAKFLXRKCYNNAYYAKIGGVSTEEMNRLERTFLFDLDFRLNITAEMFXKHCXMLXRQTXPCGSRRLRTAXEXMTCGCXAI

SEQ ID NO: 4778 - protein, 483 aa, Rhodobacter sphaeroides 2.4.1
MRAQPAASHFVDGRPLEDETGAPIPVIYPATGEEIARLHEATPAVIEAALASGARAQAAWAAMRPVERARILRRASDLIRAHNEELSLLETLDTGKPLQETLVADWASGADALEFFAGLAPVVTGETVPLGQDFVYTIREPLGLCVGIGAWNYPSQIACWKAAPALALGNAMVFKPSEVTPLGALKLAEILIEAGLPPGLFNVVQGRGAVGASLVTDSRVAKVSLTGSVPTGRRVYAAAAEGVRHVTMELGGKSPLIVFDDADLESAIGAAMLGNFYSAGQICSNGTRVFVQKGIKEAFLARLAERADAIRMGDPLDPEVQMGPLVSQAQLEKVLAYIEKARAEGGRLVCGGEASVSPGCYVQPTVFADVTDAMTLAREEVFGPVMAVLDFETEEEAIARANATDFGLAAGVFTADLTRAHRVVAQLQAGTCWINAYNLTPVEAPFGGVKLSGVGRENGRAAVQHYTQVKSVYVGMGPVDAPY

SEQ ID NO: 4779 - protein, 468 aa, Corynebacterium glutamicum ATCC 13032
MNDPQRSPTLLWFRDDLRLSDNAALKWAADHGPVIGLFIDETINRSIGAAARWWREQSLNALAQDLSFYGVPLLRRTGNPLEILPKIVSEMEVKAVTWNRRYHQPLCEVDATLKKNLRDKGIEVHSHPGFLLTEPWEVSTATGTPYKVFTPFSKAAWEVARVHAYETVKNNVPVPSHLTGPEDVELPILEMEQPFWSTTLVKECAPGEKNASEKLFDFLEHLQDYPQARDSLARSATSKLSAHLRFGEISIHRVWAETAAIDSEGTELFLKELLWRDFAWHRLYALPHMDTQNVRMQFNRFGWSWDPSEKDKLNTPSTPLIPTKADQFHEDLAAWRAGKTGIPLVDAGMRELWATGSMHNRVRMVVASFLTKNLQIHWRHGEEWFWETLVDADPASNAFNWQWAAGSGDDASPYFRIFNPVTQAKKFDPDETYIRRWVPEYGTPSYPDPIVDLKESRQIALDAYSAIK

SEQ ID NO: 4780 - protein, 189 aa, Desulfovibrio desulfuricans G20
MDIDFKKLAPWNWFKKEQEEQQSTASLPMQRNDLPVAGGPVSPILQLHREIDRLFDDAFRGFGFPALAMPRWPSDWPGLLKPALDIQETDKLYKISLEVPGVEEKDIQITLDNDVLLVRGEKRQEQETKDGGFHRVERSYGSFQRALNLPADANQDTIKAAFKNGVLTITMEKREACAPKQGRSIPING

SEQ ID NO: 4781 - protein, 320 aa, Escherichia coli O6
MIKKIGVLTSGGDAPGMNAAIRGVVRSALTEGLEVMGIYDGYLGLYEDRMVQLDRYSVSDMINRGGTFLGSARFPEFRDENIRAVAIENLKKRGIDALVVIGGDGSYMGAMRLTEMGFPCIGLPGTIDNDIKGTDYTIGFFTALSTVVEAIDRLRDTSSSHQRISVVEVMGRYCGDLTLAAAIAGGCEFVVVPEVEFSREDLVNEIKAGIAKGKKHAIVAITEHMCDVDELAHFIEKETGRETRATVLGHIQRGGSPVPYDRILASRMGAYAIELLLAGYGGRCVGIQNEQLVHHDIIDAIENMKRPFKGDWLDCAKKLY

SEQ ID NO: 4782 - protein, 546 aa, Zea mays
MARRAASSLVSRCLLARAPAGAPPAAPSAPRRTDGMHRLLPGVLQRFSTAAAVEEPITPSVHVNYTKLLINGNFVDSASGKTFPTLDPRTGEVIAHVAEGDAEDINRAVAAARKAFDEGPWPKMTAYERSRILLRFADLIEKHNDELAALETWDNGKPYEQAAQIEVPMVARLMRYYAGWADKIHGLIVPADGPHHVQILHEPIGVAGQIIPWNFPLLMYAWKVGPALACGNTLVLKTAEQTPLSALYISKLLHEAGLPEGVVNVVSGFGPTAGAALASHMDVDKIAFTGSTDTGKIILELAAKSNLKTVTLELGGKSPFIIMDDADVDHAVELAHFALFFNQGQCCCAGSRTFVHERVYDEFVEKAKARALKRVVGDPFRKGVEQGPQIDDEQFKKILRYIRYGVDGGATLVTGGDRLGDKGFYIQPTIFSDVQDGMKIAQEEIFGPVQSILKFKDLNEVIKRANASQYGLAAGVFTNSLDTANTLTRALRAGTVWVNCFDVFDAAIPFGGYKMSGMGREKGVDSLKNYLQVKAVVTPIKNAAWL

SEQ ID NO: 4783 - protein, 400 aa, Aspergillus nidulans FGSC A4
MATCQALVLHGAKDLRLEPRPVSSPSDGEVQIAIRSTGICGSDLHYYSHGRNGDFVVREPMCLGHESSGIVTAIGPNVHNLKVGDRVALEVGLPCRKCALCLSNPSRYNLCPEMKFRSSAKIFPHLDGTLMQLTTHPENMCHKLPDTVSYAGGALVEPLAVCLHAIRRSNPPAQSSLPPNYKSTALIFGAGAIGLLLAGALAAQETFAHIVIADIDDSRLKIASTMSLPNLSTFQIPKPSTPPPPRDAPHAEQTAFALSNAQATASSLKSAISSLDPSGLGFTRVYDCTGVPACVQTGIYAASPGSVLVQIGMGNPVQTLPVGAAALREVDIIGVFRYDGHAYPAAIELMASGKMDVVEKSVVTHRLGLQDGIRAFDIAGKGVDEGGRPVVKVLIESESP

SEQ ID NO: 4784 - protein, 306 aa, Arabidopsis thaliana
MAQLIRPIRQLSPQCNHHFRNLRYLFSKKLPNPPSSIPTLLLFSSFSTERSPPRRRIRPAPPEALKPTVIVAEEDGDNDGYESDSLRSRNQRKRDARRAVKWGMELASFSGDQVKQILKAASLGEEVYDALMLAKRLGSDVREGKRRHFNYIGKLLREVEPDLMDTLINATKQGDHSTLQTLISSAKDVADDVGDSYDDDTETESEDEEEGSDEYTAMAARWFDGLISQNVELTKEVYSLQSVDFDRQELRKLVRKVQLVHEQRKGTTEEKQKEVEAALVTAEKSLNQFLCSMAKQVHSEQTDLYL

SEQ ID NO: 4785 - protein, 165 aa, Leptospira interrogans serovar Lai str. 56601
MRFNMNETLYDLTATLNNGKEQKLENYKGKVLLIVNTASECAFTPQYAGLQNLYSKYKTEGLEILGFPCDQFKHQEPGSDETIKNFCQKNYGVEFPIFKKIEVNGDNAHPVFRFLRNKASGFFGNSIKWNFTKFLVDKQGNVIKRYSPITTPENIEKEIQNLLKR

SEQ ID NO: 4786 - protein, 183 aa, Glycine max
MAEERFTGVVQWFNNGKGFGFIKPDDGGEDLFVHQSSIRSDGYRTLLEGDRVEFAIATGDNDKTKAVDVTGVDGAPLQPRASAANNRAGGSGFGARRNGGSGAACYQCGDFGHLARDCNRSSNTGGGGGGSGGGCFNCGGFGHLARDCVRGGGGNVGVGGGGGSGSCFRCGGFGHMARDCATG

SEQ ID NO: 4787 - protein, 402 aa, Bordetella pertussis Tohama I
MLSPEVRALVKATAPVLKEHGEALTRHFYTRMLGGNPELRQLFNQGHQQSGQQQQALAAAVAAYAEHIDDPSVLLQVVERIAHKHVSLGVRAEHYAIVGKHLLASIREVLGEAATDELIDAWAAAYGQLADLLIGRERALYAAAASRDGGWTGWRAFKVVRKTPESAEITSFYLAPADGGATPDYLPGQYVSVRVYVPELGLMQPRQYSLSEAPGMPGQLRISVKREAGSPAGMVSGTLHNRINEGDVLDVSPPQGDFTLDAEDGRPVVLLSGGVGLTPMVSMLNHLTARDDGRQIRFVHACREAGVHAMKEHINALAAKRPNVRKAVFYERVGADDRRGVDYDYEGRVDLHAIRDEVILPDADYYLCGPLPFMQAQRRALADLGVAEHRIHAEVFGTGGVA

SEQ ID NO: 4788 - protein, 459 aa, Desulfovibrio desulfuricans G20
MNALQPDTERLRALDTAHVWHPFTQMATWHEDAPLIIEKARGNWLVDTDGNRYLDGVSSLWTNVHGHRHPHIDAAIRAQLDNVAHSTLLGLSSRPAIELAAMLARVAPQGLNRVFYSDSGSTAVEVALKIAYQYQKQRGPAGEGRSKFLCLRGAYHGDTVGAVSLGGIDLFHAVYGGLLFKTVRAEAPYCYRCPFGRQKESCRHECFTHLEETATRHAPELAAMVIEPLVQGAAGQITHPDGYLAHARALCDRLGILLIADEVAVGFGKTGTMFACEQEKVTPDLLCLAKGISGGYLPLAATMVTDAVYEAFLGDHAQCRTFFHGHTYTGNALACAAGIASLQLFRTEGTLERLQHIITIYDALLRQLETLPHVGDIRRRGIMTGIELVEDRATRRPYPFALRTAHKVVLAARRRGVIIRPLGDVLVLMPPLSITAQECGLLVEATAEAIQEVTGGPRV

SEQ ID NO: 4789 - protein, 230 aa, Zea mays
MAAAARQRGTVKWFNDTKGFGFISPEDGSEDLFVHQSSIKSEGFRSLAEGEEVEFSVSEGDDGRTKAVDVTGPDGSFVRGGGGGGGGGGGYGSRGGGGSGGGGRSYGGSWGGGRRSGGGGGPGACYKCGEPGHMARDCPSADGGGGYGGGGYGGGGYGGGGGGGGGCFKCGEPGHMARDCSSGGGGYGGGRRRRGGGGGGGRFGGGGGGGGDRSCYNCGEAGHIARDCPT

SEQ ID NO: 4790 - protein, 416 aa, Rickettsia heilongjiangensis
DSEFAELKIRGKIFKLPILKASIGEDVIDISRVSAEADCFTYDPGFMSTASCQSTITYIDGDKGILRHRGYDIKDLAEKSDFLEVAYLLIYGELPSGEQYNNFTKQVAHHSLVNERLHYLFQTFCSSSHPMAIMLAAVGSLSAFYPDLLNFKEADYELTAIRMIAKIPTIAAMSYKYSIGQPFIYPDNSLDFTENFLHMMFATPYTKYTVNPIIKNALNKIFILHADHEQNASTSTVRIAGSSGANPFACISTGIASLWGPAHGGANEAVINMLKEIGSSEYIPKYIAKAKDKNDPFRLMGFGHRVYKNYDPRAAVLKETCKEVLKELGQLDNNPLLQIAIELEAIALKDEYFIERKLYPNVDFYSGIIYKAMGIPSQMFTVLFAIARTVGWMAQWKEMHEDPEQKISRPRQLYTG

SEQ ID NO: 4791 - protein, 375 aa, Arabidopsis thaliana
MFAQLAPSPSPSPANVSHFVHRRTFRQCTYAVSASLPTANSSRPPPIQANIIVGGKDLNLDVTRKDDSIGFKLEANEDEIDWMNLESDIRLWTRALRPVQWYPGHIMKTEKELREQLKLMDVVIEVRDARIPLSTTHPKMDAWLGNRKRILVLNREDMISNDDRNDWARYFAKQGIKVIFTNGKLGMGAMKLGRLAKSLAGDVNGKRREKGLLPRSVRAGIIGYPNVGKSSLINRLLKRKICAAAPRPGVTREMKWVKLGKDLDLLDSPGMLPMRIDDQAAAIKLAICDDIGEKAYDFTDVAGILVQMLARIPEVGAKALYNRYKIQLEGNCGKKFVKTLGLNLFGGDSHQAAFRILTDFRKGKFGYVSLERPPL

SEQ ID NO: 4792 - protein, 160 aa, Pseudomonas aeruginosa PAO1
MSAFHDLTLQGLDGQDLPLSPFKGKVLLVVNVASKCGLTPQYAGLENLYQTYRERGFAVLGVPCNQFAGQEPGSEADIQSFCSLNYGVSFPMSAKVEVNGSARHPLYRLLAGEGAEFPGDITWNFEKFLLGPDGRVLARFSPRTAPDDPALVQAIEKALG

SEQ ID NO: 4793 - protein, 107 aa, Glycine max
MEHGSYTDQSKSTFSLVDEDHTFANAVRFTLNQDPRVSFCGYSIPHPSDNRVNIRVQTTGDPSREVLKDACQDLMLMCQHVRSTFDKAVSDFKISKARKNNEDMDVE

SEQ ID NO: 4794 - protein, 431 aa, Mycobacterium tuberculosis H37Rv
MADTDDTATLRYPGGEIDLQIVHATEGADGIALGPLLAKTGHTTFDVGFANTAAAKSSITYIDGDAGILRYRGYPIDQLAEKSTFIEVCYLLIYGELPDTDQLAQFTGRIQRHTMLHEDLKRFFDGFPRNAHPMPVLSSVVNALSAYYQDALDPMDNGQVELSTIRLLAKLPTIAAYAYKKSVGQPFLYPDNSLTLVENFLRLTFGFPAEPYQADPEVVRALDMLFILHADHEQNCSTSTVRLVGSSRANLFTSISGGINALWGPLHGGANQAVLEMLEGIRDSGDDVSEFVRKVKNREAGVKLMGFGHRVYKNYDPRARIVKEQADKILAKLGGDDSLLGIAKELEEAALTDDYFIERKLYPNVDFYTGLIYRALGFPTRMFTVLFALGRLPGWIAHWREMHDEGDSKIGRPRQIYTGYTERDYVTIDAR

SEQ ID NO: 4795 - protein, 166 aa, Zea mays
MDAVMFGLETPLMAALQHLLDVPDGDAGAGGDSDNKTGSGGSATRTYVRDARAMAATPADVKELPGAYAFVVDMPGLGTGDIRVQVEDERVLVVSGERRREEREDDAKYLRMERRMGKFMRKFVLPDNADVDKVAAVCRDGVLTVTVEKLPPPEPKKPKTIEVKVA

SEQ ID NO: 4796 - protein, 273 aa, Ureaplasma parvum serovar 3 str. ATCC 700970
MDIINKKINWFPGHMKKATDEILKNLKNVDFFIQLVDARCPLTSSNIELLKEVSSKPVINLANKADLSDWKKNFDNNFLLISTKKRNDKNKIIQHLYQLFDQKIKIYQKKGLINPKFVGMIIGLPNIGKSSLINFLAPKKVLKVENRPGVTKTQCIRQINQHFYLIDTPGIFLKNIQNERDSFVLTLINCVKKEVLELESIVHFAYDFYLKNYRNELFIKYKMNKVLNFDDFIHHICELYNYKLTNNEFDHVRAYENLFNDFSNGLICKVNYD

SEQ ID NO: 4797 - protein, 375 aa, Arabidopsis thaliana
MPLSLQSPPCATLSASIRKGRWKTLAAGFSVTPLPAVNFSLRRSIPRILASASSSSSPASSSLEAGENNELNAVSAFSEIVPDTVVFDDFERFPPTAATVSSALLLGICGLPDTIFRNAVDMALADSSCAGLETTESRLSCFFNKAIVNVGGDLVKLVPGRVSTEVDARLAYDTNGIIRKVHDLLRLYNEIDVPHDRLLFKIPATWQGIEAARLLESEGIQTHMTFVYSFAQAAAASQAGASVIQIFVGRLRDWARNHSGDTEIESAIKSGEDPGLALVKRSYNYIHKYGYKSKLMAAAVRNKQDLFSLLGVDYVIAPLKVLQSLKDSPAIPDDEKYSFVRKLTPETATHYHFTNKELVKWDQLSLSSSMGPASV

SEQ ID NO: 4798 - protein, 211 aa, Penicillium chrysogenum
MSTNITFHASALTRSERTELRNQRGLTIWLTGLSASGKSTLAVELEHQLVRDRRVHAYRLDGDNIRFGLNKDLGFSEADRNENIRRIAEVAKLFADSNSIAITSFISPYRKDRDTARQLHEVATPGEETGLPFVEVYVDVPVEVAEQRDPKGLYKKAREGVIKEFTGISAPYEAPANPEVHVKNYELPVQDAVKQIIDYLDTKGYLPAKKE

SEQ ID NO: 4799 - protein, 210 aa, Triticum aestivum
  misc_feature (208)..(208): Xaa can be any naturally occurring amino acid
MTTLLDALRQTTQVDCDTLDANVAHQLGPFVDCTSNQAIAFSEISRPLAGEPLLHYDALVKDAIEKARGALKEFQGSATFEEFVVQILMVKLQLLIVPNVTGYVHIQTNPKLSYSTDGTMSDAHRIVNIFKALAPEFDTKRVCIKIPATWEGLQACRALEVEGIATLATTMFCMEQATLAADAQCTYIAPYVNELKVHFEAGYVDEHXAF

SEQ ID NO: 4800 - protein, 366 aa, Clostridium perfringens
MMQPIKKIAILTGGGDCPGLNAVIRAVTRTAILKYGYEVIGYKFGYRGLYNNDFVKLDLDSVSGILHRGGTILHSSNKDNLFDYQVEDENGKIVKKDVSDVGVENLKKEGVDALVVIGGDGTLTSARDFSRKGVNVIGVPKTIDNDLLATDVTFGFNTATEIATEALDRLHTTAESHHRIMLLEVMGRNAGWIALESGIAGSADVILLPEIPYDINKIVEKVKEREEAGKQFTIIVVAEGAKPKDGEVVVSKIVDDSPDPIRLGGIANKLAIDLEGLIKNHEIRSTVLGHIQRGGNTSTYDRILSTKYGVKAVELINSNLFGNMVALKGNKVSYESLENVIGHTKNVDPEGELVNTAKSIGISFAD

SEQ ID NO: 4801 - protein, 263 aa, Hordeum vulgare
MSAPGELSREENVYMAKLAEQAERYEEMVEFMEKVAKTVDSEELTVEERNLLSVAYKNVIGARRASWRIISSIEQKEESRGNEDRVTLIKEYRGKIETELSKICDGILKLLETHLVPSSTAPESKVFYLKMKGDYYRYLAEFKSGPERKDAAENTMVAYKAAQDIALAELAPTHPIRLGLALNFSVFYYEILNSPDRACNLAKQAFDEAISELDTLSEESYKDSTLIMQLLRDNLTLWTSDITEDTAEEEIREAPKHDSSEGQ

SEQ ID NO: 4802 - protein, 357 aa, Nostoc sp. PCC 7120
MRKRIGILTSGGDCPGLNCVIRAVVSHATLTYDWEVLGIPYATQGLRERQAIALNMHGWDLRGIDPLLNMGGTILGTINKGDTLAHVDEMLASYQALALDALIVIGGDGSLGILHELASRGNWNLVAIPKTIDNDVALTERAVGFDTAVNTIVDALNRLTFTAASHDRVMIVEVMGRSAGHLALHAGIAGGADVILIPEISYTISGLCQHIAELRDRWQRKFAIVVVAEGAKLCLEDVQENIASSCAPSKCGRGQYIADQIAQCSKNLIDTRVSVLGHIQRGGIPSALDRLTATVFGKTAVDLIAQGKFGQMVAWQNGEAIPVPIQDVVAQSPLHVNPQGSLVQSARCLGIYVGEKT

SEQ ID NO: 4803 - protein, 518 aa, Triticum aestivum
MGNRTSRHRRAAADQPATAPPPTAQPKPQPPPKPQTAPAPAPTPEAGQVAMGRVLGRPMEDVRATYTFGRELGRGQFGVTYLVTHKATGQRFACKSIATRKLVHRDDIEDVQREVQIMHHLTGHRNIVELRGAYEDRHSVNLIMELCEGGELFDRIIARGHYSERAAALLCREMVSVVHSCHSMGVFHRDLKPENFLFLNNKEDSPLKATDFGLSVFFKHGEQFKDLVGSAYYVAPEVLKRHYGAEADIWSAGIILYILLSGVPPFWADNEDGIFEAVLLGHIDFSSDPWPSISNGAKDLVKKMLRQDPKERLTAAEILNHPWIREDGEAPDKPLDITVISRMKQFRAMNKLKKVALKIVAENLSEEEITGLKEMFRSLDTDNSGTITLEELRSGLPKLGTKISESEITQLMEAADVDGNGTIDYSEFVSATMHMNRLEKEDHILKAFEYFDKDHSGYITVDELEEALKKYDMGDDKTIKDIIAEVDTDHDGRINYQEFVAMMRNNSPEIVPNRRRMF

SEQ ID NO: 4804 - protein, 320 aa, Bordetella parapertussis 12822
MPSQLEALRRHTVVVADTGDFEAMRALRPTDATTNPSLILKAVQQEAYRPLLVQTARAHQGASPAEITDRLLVAFGRQILDIVPGRVSTEVDARLSFDTRATVERARGLIALYQAAGVPRERVLIKIASTWEGIQAARVLQAEGIRCNLTLLFCLPQAAACADAGVQLISPFVGRIYDWHKKNAGAEWVEDARRGANDPGVQSVSRIYRYYKRFGIETEIMGASFRNVDQILALAGCDLLTISPELLTRLSQTEGEVPAALSPQAGHDDADAVRLDGGEVAFRTQLNEDAMASEKLSEGIRLFVADARKLDALIESHGAA

SEQ ID NO: 4805 - protein, 442 aa, Zea mays
MEQAEVCYLISSISPLRENVVSKGGLCFVKLYQVDNLMRVLCFPTAGGKSVKKPRFSLRGYDFVPLDVKTDNLCIGEQDVSSAVPSTKASQTMVAERLENVEEQTEDLAPEFALPPKANTSVSELLDNLQRRGGSFVRTPSLLHQHAPSISIREQEVSSGVPPTKASQALMDEPFENVNGQTEELPSELPCSIKRPKFSVAELLEDLQGRSGSYVETASLSHQHTRAKHWKPKFLSSEKKTIAILGDRSIDSEDPLEHVIDGTSSEEEDATQNHLSLVNKDENQQTMADLFQEVFNPTNMDGAMKSMTSTGAGNYGRMQQIMQMEKYWHVEFLRQYSREHSYSGDLKGTTVQIMSRSLEGKLTVCSCMFQEKGNDATISNASADGTMDESRTRRTIIFSPKICNNVDLLVGNIIHIFPPWKEVKIQEEHVIICTYFSHHHRT

SEQ ID NO: 4806 - protein, 159 aa, Exiguobacterium sp. 255-15
MNTSLYEIEVQDATGQTVSLNDYAGEVLVIVNTASKCGLVKQLGDLQQLHDKYADQGVKVLGFPCDQFNNQEFADQQETMQFCQRNYGVTFPMFQKIDVNGPAEHRLYTYLKQQQGGLLSSNIKWNFTKFLVDREGRVVKRFAPVDSIQTIEKTLARYV

SEQ ID NO: 4807 - protein, 443 aa, Arabidopsis thaliana
MGSGRDRDDPLSFTSNPCTASSPVTVSDYLDNFLGEPTSRSGSFQSESLLGGGGGESINDADFGFARPDFRSEQLAGTVQFYERHVFLCYKKPSVWPARIEAAEFDRLPRLLSAAVSARKGSMKKETRLTICEGHDGTETSNGDVLIFPDMIRYRRLTHFDVETFVEEVLVKDGEWLPGNPELLKGSYVFVCSHGSRDRRCGVCGPSLVSRFREELEFHGLQGKVSISPCSHIGGHKYAGNVIIYRSNINREVTGHWYGYVTPEDVPILLEQHINKGEIVDRLWRGEMGLSEEDQKKTQEGRFQLNGTVHSVKINGKVSQESSVHNADVSCCQSRAAEPNGCCQQNGNSSSCCQDDTTLMLSLGTSEDNQLESENNTEKLTPGRKIAEKTFFRINSDKGSSTRKVCGIPTWLESWEREDTYAALAVVCAAASVAVAYTCYKQL

SEQ ID NO: 4808 - protein, 163 aa, Arabidopsis thaliana
MDPMDIVGKSKEDASLPKATMTKIIKEMLPADVRVARDAQDLLIECCVEFINLISSESNEVCNKEDKRTIAPEHVLKALQVLGFGEYVEEVYAAYEQHKYETMQDSQRSVKMNSGAEMTEEEAAAEQQRMFAEARARMNGGVTVPQPEQLEEPQQQQQTSLQS

SEQ ID NO: 4809 - protein, 370 aa, Triticum aestivum
MEKTNIVACRNPTSRDASDDEEATWSHAWGLISGFAVSITLKTAIELGIIDALTNAVGRALTVDELAAQLPAPDKAGSAASVDRLLRLLAAFDVVRCSTETGPDCEAVRKYTPAPVCRWLTSNRSDGSLAPLAMLAVDQDYLPTWNQMGAAVVCGVPTPFERAHGVPLFEYMGKNPRLSGVFNQAMFHMSVTVISKMVERFDGFDGVEVLVDVGGGTGAALEMITARHKHIKGINFDLPYVITQAPSLPGVENIAGNMFENVPTGDAIFLKWILHLQNDDECIKILKNCHRALPANGKVIVVEIVLPTTTEATREAQNMFLLDVIMFNNQQGGKERTEQDFLKMARSSGFDGAFRSTYIFGNFWALEFTK

SEQ ID NO: 4810 - protein, 469 aa, Synechococcus elongatus PCC 6301
MASALTPNASHSVSVLVRMPSNTAAMLHVVQAIATTGANLTEMELLQRTNQWIDRRLIVEAASEEQAAAVVEAIAAVPDLELLDSEDRTFALHRGGKISVEPKLPLTSQAQLAMAYTPGVGRVCKAIAANPDRVYELTVKQNMVAIVTDGTAVLGLGNLGPAGALPVMEGKAMLFKAFGDVDAFPICLDTQDTDEIVETMKRIAPVFGGVNLEDIAAPRCFEIEARLKQELDIPVFHDDQHGTAIVTLAALENALKLVKKSLSQVRIVMNGAGAAGLSVASLLREAGATNIIICDSRGILSCDRSDLTPQKQAFAIEAGGSLADALVNADVFIGVSVPGVLTVEMVETMASDRIIFAMANPIPEIQPELIQGRAAVIATGRSDYPNQINNVLAFPGVFRGALDCRAKSLTSSMFLAAARAIAALVPPETLSAEHIVPSAFDSRVAPAVAAAVVEAAQANGLAQTLAVTH

SEQ ID NO: 4811 - protein, 422 aa, Mesorhizobium loti MAFF303099
MMPQSRVWHPFTQHALEPAIPEIARTEGAYLYKADGTRILDAISSWWVVTHGHRHPRIIKAIETTASSLVQIIFAGFTHEPAERLAKALVGLAPAGLDWVFYSDSGSTSVEVALKMALGYFRNIDAPRSRIVVMEHSYHGDTIGTMSVGARGAFNAAYEPLLFEVDTIPFPAAGREQETLDRFEAVARDRRTAALIVEPLVLGAGGMLMYPAWVLAELKKIAETSGTLLIADEVMTGWGRTGTMFACEQASISPDILCTSKGLTGGAIPLAATLATDAIFQAHYSEDRKKTFFHSSSYTANPIACAAALANVEIWRDEPVAERVAALSAKQAAGLQRFRDNPYFTDCRATGTIAALDLRTGSAGYLAEIGPKLRAFFLERGLLVRPLGNVLYLLPPYCITGGELDALYDAIEEAAERFGSRP

SEQ ID NO: 4812 - protein, 498 aa, Chlamydomonas reinhardtii
MADEMDPMTACITALTDAAMTTAQATALCGQFAFAADNSDLSDRLDQTNQGLNTLYLVSCGALVFVMHAGFAMLCAGAIRSKNTMNILLQTVMDAAVSAVAFYILGYGFAYGIGNNPNGFIGDSLFGLSRWVSHSSSSDAGANWQAWFFQWAFAATATTIPAGAVAERLNFNAYLIYSFFISAFVYPVVVHWVWAAEGWLGYARFGGYSHLFRSGMIDFAGSGVVHMTGGLAGLAGCIMVGPRMGRFDSNGQPVEMPGHSATLVVLGTVLLWFGWYGFNPGSQLIINYTASAAVVGRAAVTTTLSGAAGCLSCLLTAFLRHKAWDLVSGCNGALVGFVSITASANVVEPWAALIAGLVGGWVFDAVCLLFLKLRIDDPLSAAPMHAFCGAWGVFFAGLLAKKEYICESYGRDCEGYVADGLFYVGDGRLLAQVIGIISIFAWVFGLMLLLFGGLKAVGLLRISAEEEQAGLDVSKHGGSAYNYDHGLGKPEKAQALGL

SEQ ID NO: 4813 - protein, 211 aa, Buchnera aphidicola str. Sg (Schizaphis graminum)
MHNNSKKNIIWQKHSVTRIKREQKNGHKSIVIWFTGLSGSGKSSIANSLEEILFQNNFNTYLLDGDNIRSSLCSDLSFSILDRNENIRRIGEVSKLMIDAGIIVLVSVISPYRNQRKKIRLMLGKINFLEVFVDTPLNICEERDPKKLYQKSRLGKISDLTGIQSLYEIPEKPDLHLDETISLKNNTKKLIHILCDKNIISFPNIDETFLF

SEQ ID NO: 4814 - protein, 503 aa, Ralstonia solanacearum
MSPSPETLLQRLHLDTLTGGDGPLAARSPIDGAVLARLPVETAADADRIVAQAHAAFRNWRTVPAPRRGELVRLLGEELRAHKADLGALVTLEAGKITQEGLGEVQEMIDICDFAVGLSRQLYGLTIASERPAHRMMETWHPLGPCLVITAFNFPVAVWAWNATLALVCGDPVIWKPSEKTPLTALAVERLFLRACQRFGEAPPHLAQVAIGAHDLGEALARHPGVPLVSATGSTGMGRAVAQAAAPRFARTILELGGNNAAIVCTSADLALAERAIAFAAMGTAGQRCTSLRRLFVQRPVYDALVPRLTTLYARVQVGDPRDDGTLVGPLIDGHAYERMQAALARARAEGGTVHGGGRVTVGAGDGAYYVRPALVEMPAQDGVVCEETFAPILYVMPFDSLDEAIALNNAVPHGLSSSLFTLDMREAERFVSATGSDCGIANVNIGPSGAEIGGAFGGEKDTGGGREAGSDAWKAYMRRATNTVNYGTALPLAQGIRFEVGG

SEQ ID NO: 4815 - protein, 502 aa, Neurospora crassa
MWLPLILLTATAAPILANPLSSPLNKRAAIDDCLKSAGVPADAQGSSEWRTDVNPFNQRLPYTPVAIAVPTTIEHIQGAVSCATKLGIKVTPKSGGHSYASFGLGGENGHLVVELDRMSKVTLDKTTNIADVQSGARLGHVATELYKQGKRAFSHGTCPGVGVGGHSLHGGFGFSSHTYGLAVDWIAAATVVLANSTVVTASPTENPDLFWALRGAGSNFGIVASFKFNTFAAPSQVTAFQINLPWNSASSIASGWEKLQDWLAAGNMPKEMNMRVFGSPSQTQLQGLYHGSSSALRTAVQPLLSTLGASLSNAQQYDWMGAFTYYTYGGTVDVTHPYNTVETFYSKSLVTTALPSAALNSVANYWINTAKRVSRDWFIIIDMHGGPKSAITSSTTNSANYTSSYAYRAPEYLFLYELYDRVMFGSYPSNGFSFLDGWVKSFTDNMKQEQWGMYINYADPTMKRAEAVGNYYRSSLSRLQKVKAQYDPNEVFYYPQSVEPAK

SEQ ID NO: 4816 - protein, 111 aa, Beta vulgaris subsp. vulgaris
YKAVNRESYEIVAVKKMKRKFYFWEECVNLREVKSLPSIESSNIIKLKEVVRENNDLFFIFEYMQYNLYQIMKDRHRPFTEEEIRNFLTQVLQGLAHMHRNGYFHRDLKPQ

SEQ ID NO: 4817 - protein, 270 aa, Lactococcus lactis subsp. cremoris
MTKKIVTLAGDGIGPEIMSAGLRVLKAVSKKIAFEYELVAKDFGGIAIDKHGHPLPEETLQAVKNADAILLAAIGHPKYNDAKVRPEQGLLALRKELGLYANVRPLKIYPALKNLSPIRNVENVDFVVIRELTGGIYFGQHELSDEKARDINDYTADEIRRILHFAFKIAQNRPRKLLTSVDKQNVLATSKLWRKIADEIAVEYPDVTLEHQLVDSCAMLLITEPQKFDVIVTENLFGDILSDEASSLAGTLALCPLVLMDLTDCHYMSQ

SEQ ID NO: 4818 - protein, 501 aa, Glycine max
MTSLTNGDAGSLNKVPTIKFTKLFINGDFVDSLSGKTFETIDPRTGDVIARISEGDKEDIDIAVKAARHAFDNGPWPRLPGSERARILLKWAEIIEENAEELAALDAIDAGKLYHMCRNVEVPAAANTLRYYAGAADKIHGEVLKMSREFHAYTLLEPLGVVGHITPWNFPNTMFYIKVAPSLAAGCTMVLKPAEQTPLSALFSAHLAKLAGIPDGVINVVPGFGPTAGAALSSHMDVDKVSFTGSTQTGRVIMQAAAKSNLKQVSLELGGKSPLIIFDDADIDKATELALLGILYNKGEVCVASSRVFVQEGIYDEFEKKLVEKAKAWVVGDPFDPKVQQGPQVDKEQFEKVLSYIEHGKKEGATLLTGGKTVGNKGYFIEPTIFSNIREDMLIAQDEIFGPVMALKKFKTIEEAIKSANNTKYGLAAGIVTKNLDTANTVSRSIRAGTIWINCYFAFGDDVPFGGYKVSGFGKDHGLEALHKYLQVKSVVTPLYNSPWL

SEQ ID NO: 4819 - protein, 105 aa, Zea mays
MASRSSAMEGGAAIQRRNAVKRHLQQRQQEADFLDKKVIASTYFSIGAFLVLACLTVSLLILPLVLPPLPPPPSLLLWLPVCLLVLLVVLAFMPTDVRSMASSYL

SEQ ID NO: 4820 - protein, 496 aa, Pseudomonas aeruginosa PAO1
MTELLSREEYAAIAATLDLPQRAFIDGGFRDACGGRTFASTNPATGELLAQVAACDAEDVGHAVASARRAFEDGRWRSRTPAERKAALLRLAELLEEHLLELAVMESLDSGKPIRECQHTDLPETINTLRWHAELIDKIYDSTAPVGSAALAMVVREPIGVVGLVLPWNFPLLMLAWKIGPALAAGCSVVVKPAPETSLTALRVAELASQAGIPAGVFNVVPGGGREAGEPLGRHPDVAMVSFTGSTATGRLFLKYAAESNLKRVVLECGGKNPAVVMNDVEDLDLVAQHVVNGAFWNMGENCSASSRLIVHAEVREALLERIGAQLREWRMGDPLDPRNRLGALVSPAHFEKVRAYLDQARTERLAVRFGGATEAGIFVEPTVVDGVSPHSRLFREEIFGPLLSVTSFDDIDEAIALANDTVYGLAASAYTGSLRHALRLSREIRAGIVTVNCFGEGDASTPFGGYKESGFGGRDKSVWAHDQYTELKTIWIDAS

SEQ ID NO: 4821 - protein, 203 aa, Zea mays
  misc_feature (42)..(42): Xaa can be any naturally occurring amino acid
RGANNIKIGSTIPYHRTGIDAIEEVIYHDETYDVTTIRASTXPMFLMARKIKSLGVKMVLSGEGSDELLGGYLYFHFAPNKEEFHRETCRKVKALHQYDCLRANKATSAWGLEVRVPFLDKEFINVAMGMDPEWKMVQIRGLSDCAYSSVLCCFMMIDDDVFSSSCFDLLAHTRTVRQEPGPHREVGHEEGVRRRRAPLPAQG

SEQ ID NO: 4822 - protein, 318 aa, Photorhabdus luminescens subsp. laumondii TTO1
MLTELIASNRRSAAIHAFVDTGLSTHFKDGIYVDISELSRKSGVNYARFSRLCDFLVEMGVLVSNDNKFRLSDECHVFANPESFESFMIKLEICSHYSNAWLMYGKSLFEDDGKSAFEMAHGRPFFEYLDGNKFLKSNFDALMTRVSNLIVEKLLGIYDFNQHNRILDVGGGEGELLVRISEKVKGKHYAVLDRYSELPVSDNIDFINGNFLNSIPSGYDLYILKNVLHNWSDSDSILILENFRKAMDKNSSLLLINMVKEPEFSRSFDILMDVLFLGKERSFTEFEYLANQAGLVVQETKVIDQSYSPYSFIKLQIK

SEQ ID NO: 4823 - protein, 317 aa, Photorhabdus luminescens subsp. laumondii TTO1
MLIDLITSCRKSTVIYAFVDMGLSVHFKDGACVNISELASQYGLDHSRFSRLCEYLIKIGVLVSCNEGVALSEECSALADPESMESLMIRCEVSPEYWKAWSMYSKSLYENNSKTAFEIAHGKPFFEYLDHHELFRSNFDSFMSKNSDKIIEKLLDIYDFSQHNRILDVGGGEGNLLIRINEKIKGKHYAVLDRYNETPVLEDIEFINGDFFKLVPSGYDLYILKNVIHNWSDSNAILILENCRKAMDDNATILLIGTVKKLKLEIIDSTDILMDVLLLGKERYLNELEDLAHQAGFVVKDIKEINEKYSIIELGVK

SEQ ID NO: 4824 - protein, 317 aa, Photorhabdus luminescens subsp. laumondii TTO1
MLAELITSYRKSIAIYTFVDTGLSVHFKNGTYMDINELASQYGIDYSRLNRLCDFLIEIGVLVSSNDRVALSEECRVLADPESMESLIAKWEFNSGLWNAWLMYPKSLLENNGKSAFEIANGKPFFEYLDSNKLLKSKFDSLMSKDSDKMIEKLFNVYDFNQHDKILDVGGGEGNLLIRMSEKVKEKHYAVLDRYNELPDYGNINFIDGDFFKSIPSGYDLYILKNVIHDWPDNDAILILENCRKAMGNNATILLITLMKKPQSNIIKYFDILMDVSSLGKERDLTEFEYLANQAGLVIQDVKDIDESYSIIQLGVK

SEQ ID NO: 4825 - protein, 104 aa, Zea mays
  misc_feature (41)..(41): Xaa can be any naturally occurring amino acid
  misc_feature (49)..(49): Xaa can be any naturally occurring amino acid
  misc_feature (77)..(77): Xaa can be any naturally occurring amino acid
MTMGVVVAALPEHHQEPRIQVNEEIYNHDELKAKFRTHEFXTGSDCEVXAHLYEEFGEEFVDMLDGIISFVLLDTRXKSFVAAHDVVAICPLYMGWCLDVVNNA

SEQ ID NO: 4826 - protein, 117 aa, Avicennia marina
MEGMNKSMCIIVVVAVLAAWVVPHGEAAISCGTVASKLAPCIPYVTNRGPLGGCCGGVKSLYGLARTTPDRQSVCGCLKSLASSYNVNLGKAAGLPGQCGVNIPYKISPSTDCSKVH

SEQ ID NO: 4827 - protein, 124 aa, Glycine max
  misc_feature (8)..(8): Xaa can be any naturally occurring amino acid
  misc_feature (10)..(10): Xaa can be any naturally occurring amino acid
  misc_feature (15)..(16): Xaa can be any naturally occurring amino acid
  misc_feature (23)..(23): Xaa can be any naturally occurring amino acid
  misc_feature (25)..(26): Xaa can be any naturally occurring amino acid
  misc_feature (29)..(29): Xaa can be any naturally occurring amino acid
  misc_feature (39)..(39): Xaa can be any naturally occurring amino acid
  misc_feature (43)..(43): Xaa can be any naturally occurring amino acid
AETKRTDXTXNEKAXXQQARARXKXXPTXNHDTRDTDTXEAAXEEPERAQAHQIFFFYSTKDSASQSDVSKLLADQSFVSSILASLPGVDPNDPSVKDLLASLQNQAEPQQKNEDKPPNEEEKK

SEQ ID NO: 4828 - protein, 213 aa, Candida tropicalis
ISLLNILVAGRDTTAGLLSFVFFELARTPRVANKLREEIEDKFGLGQDARVEEISFESLKSCEYLKAVLNECLRLYPSVPQNFRVATRNTTLPRGGGKDGLSPVLVRKGQTVMYSVYAAHRNKQIYGEDALEFRPERWFEPETKKLGWAFLPFNGGPRICLGQQFALTEASYVTVRLLQEFSHLTMDPNTEYSPKKMSHLTMSLFDGANIQMY

SEQ ID NO: 4829 - protein, 283 aa, Streptococcus pneumoniae TIGR4
MATIQWFPGHMSKARRQVQENLKFVDFVTILVDARLPLSSQNPMLTKIVGDKPKLLILNKADLADPAMTKEWRQYFESQGIQTLAINSKEQVTVKVVTDAAKKLMADKIARQKERGIQIETLRTMIIGIPNAGKSTLMNRLAGKKIAVVGNKPGVTKGQQWLKTNKDLEILDTPGILWPKFEDETVALKLALTGAIKDQLLPMDEVTIFGINYFKEHYPEKLAERFKQMKIEEEAPVIIMDMTRALGFRDDYDRFYSLFVKEVRDGKLGNYTLDTLEDLDGND

SEQ ID NO: 4830 - protein, 333 aa, Mycoplasma gallisepticum R
MMAIQTQRIAILTSGGDSPGMNPAIYGLVQQAIINNIQPYLVYEGYKGLVEDQIVLANQQEVIDHFFDSGTFIYSARLVEFKDLEVRKKAVSNLKAKKIDTLVVIGGDGSYQGAKLLSEMGINVIVMPGTIDNDVSSSDYTIGFYSALEHITRTIQEIISTSVSHNRVSISEVMGRHCGDLAVYAALATKADLVITSENIKTTQEIVDLAAKRMLQDHKRTFTVIVCEHIYGEDGRDSLKTIAQQINDQLGIKTNLNILTYGQRGQVPTPMERILAMKFAIKAFECINEQRYGVVLGLSGDEIVAYNFQEALNKRNPSRIKLINLSNRINGGF

SEQ ID NO: 4831 - protein, 503 aa, Pisum sativum
MAITVSSRQLFIDGEWRVPILNKRIPNINPSTENIIGDIPAATKEDVDLAVDAAKRAISRKNGRDWSAASGSLRARYLRAIAAKIKEKKDELGKLESIDCGKPLEEALADLDDVVACFEYYAGLAEELDSKQKAPISLPMDTFKSYILKEPIGVVALITPWNYPFLMATWKIAPALAAGCAAILKPSELASVTCLELGEICKEVGLPRGVLNIVTGLGHEAGASLASHPDVDKISFTGSSATGSKIMTTAAQLVKPVSLELGGKSPIVVFEDVDLDKVAEWTGFGCFFTNGQICSATSRLIVHESIAVEFVDKLVKWAENIKISDPLEEGCRLGPIVSEAQYKKVLNCISSAKSEGATILTGGRRPEHLKKGYFVEPTIITDVTTSMQIWREEVFGPVLAVKTFSTEEEAINLANDTHYGLGSAVMSNDLERCERLSKALQAGIVWINCAQPSFIQAPWGGIKRSGFGRELGEWGLENYLSVKQVTRYTSDEPWGWYQPPSKL

SEQ ID NO: 4832 - protein, 163 aa, Glycine max
EAAAKKAAEDAAKQEKDGEQQASPQDTTMTKGVSAAASEAETKRTDLTVNENALLQQALAMSMDDPTINHDMRDTDMSEAAAEDPELALALQLSVEDSSKDSASQSDVSKLLADQSFVSSILASLPGVDPNDPSVKDLLASLQNQSEPQQKNEDKPPNEEEKK

SEQ ID NO: 4833 - protein, 421 aa, Mesorhizobium loti
MSQSQVWHPFTQHALEPAIPEIVRTEGAYLYKADGTRILDAISSWWVVTHGHRHPRIIRAIETTASSLDQIIFAGFTHEPAERLARALVGLAPTGLDWVFYSDSGSTSVEVALKMALGYFRNIGAPRSRIVVMEHSYHGDTIGTMSVGARGVFNAAYEPLLFEVDTIPFPASGREQETLDRFEAVSRDRRAAALIVEPLVLGAGGMLMYPASVLTELKKIAETSGTLLIADEVMTGWGRTGTMFACEQASISLDILCTSKGLTGGAIPLAATLATDAIFQAHYSEDRTKTFFHSSSYTANPIACAAALANVEIWRDEPVAERIATLSAKQAAGLQRFRDNPYFTDCRATGTIAALDLRTGSAGYLAEIGPKLRAFFLERGLLVRPLGNVLYLLPPYCITGEELDGLHDAIEEAGERFGTKP

SEQ ID NO: 4834 - protein, 451 aa, Bdellovibrio bacteriovorus HD100
MSQKPYDLIIQGGICLLPHPSESGLIEHQADIAITDGRIEKIRDSINEPALRIIKAHGLHVLPGVIDSQVHFREPGLTHKEDLETGTRAAVLGGVTSIFEMPNTNPSTTTKEAFEDKLQRAKNRAHCNYAFFIGGAHDNVAHIAELELMPHCSGVKIFMGSSTGNLLVEDDETLEQILKRGHRRIIFHSEDEMRLRERKHIATDMADPHYHPVWRDVETAVNSTTRLLRLARKTGRKIHVLHVSTGEEMDLLKDAKDIATVEVLPQHLTLYAPDCYDKLGTYAQQNPPIREKRHMDRIWKALLDGTVDVIGSDHAPHTREEKDRPYPASPSGVPGVQTLVPIMLNHVHDGRLSLKKFTELVTENPCRVFGVKNKGRLRQGFDADITIVDLKKEMTIDNSWIASRCGWTPFHGMRVTGWPTHTIVGGKLVMENDQVVLPSQGQAVDFLETRS

SEQ ID NO: 4835 - protein, 327 aa, Rhodospirillum rubrum
MSETKLDALRRHTIIVADSGDIDAIRSFAPQDCTTNPSLILKAAKMPAYAGLIAQAIEAGSAEAGPSEGLIDRILDHLAVTFGSELARIVPGVVSTEVDARLSFDTQATVARAERLIGLYAARGVAAERILIKVAATWEGIRAVEILQSRGIACNVTLVFSLAQAVAAAEAGAFLISPFVGRILDWHVKASGKSFDIDEDPGVRSVTEIYTYFKHFGYKTIVMGASFRSSAEVEALCGCDRLTVSPALLDQLRSQTGDVPKRLDPAASKAATISRLAVDEASFRWQINEDALATEKLAEGIRLFNADTDALRRTIAETLAKRASTVA

SEQ ID NO: 4836 - protein, 141 aa, Brassica napus
MPRSLKPLDLGIQIPYHFRCPISLQLMRDPVTVCTGQTYDRTSIESWVSTGTDTTCPVTRAPLSDFTLIPNHTLRRLIQEWCVANRSNGVERIPTPKQPADPTSVRALLSQASAACGTHVSVRSRAAALRRLRAFARDSEK

SEQ ID NO: 4837 - protein, 109 aa, Ammopiptanthus mongolicus
ASFPRSLSSNLGRETFAVRFCTHPDTDSAHKMDKTQNPSEEATHGDVMFHPFGEGYTTRFDEEGFGGIYGGNQTRPEKSVHENHPAYDKTQGSEVKEKEKARHQTNTNA

SEQ ID NO: 4838 - protein, 166 aa, Brassica napus
MERGAPLSHYQLPKSNSGLNLDQHNNSIPTMTGSISACDDKNKTILPQQQPSMPREQDQYMPIANVIRIMRKILPPHAKISDDAKETIQECVSEYISFVTGEANERCQREQRKTITAEDILWAMSKLGFDDYVGPLNVFINRYREFETDRGCSLRGESSFTPVYGG

SEQ ID NO: 4839 - protein, 297 aa, Saccharomyces cerevisiae
MAFQKDAKSSAYSSRFQTPFRRRREGKTDYYQRKRLVTQHKAKYNTPKYRLVVRFTNKDIICQIISSTITGDVVLAAAYSHELPRYGITHGLTNWAAAYATGLLIARRTLQKLGLDETYKGVEEVEGEYELTEAVEDGPRPFKVFLDIGLQRTTTGARVFGALKGASDGGLYVPHSENRFPGWDFETEEIDPELLRSYIFGGHVSQYMEELADDDEERFSELFKGYLADDIDADSLEDIYTSAHEAIRADPAFKPTEKKFTKEQYAAESKKYRQTKLSKEERAARVAAKIAALAGQQ

SEQ ID NO: 4840 - protein, 350 aa, Bacillus cereus ATCC 14579
MKALLWHNQRDVRVEEVPEPTVKPGTVKIKVKWCGICGTDLHEYLAGPIFIPTEEHPLTHVKAPVILGHEFSGEVIEIGEGVTSHKVGDRVVVEPIYSCGKCEACKHGHYNVCEQLVFHGLGGEGGGFSEYTVVPEDMVHHIPDEMTYEQGALVEPAAVAVHAVRQSKLKEGEAVAVFGCGPIGLLVIQAAKAAGATPVIAVELSKERQELAKLAGADYVLNPATQDVLAEIRNLTNGLGVNVSFEVTGVEVVLRQAIESTSFEGQTVIVSVWEKDATITPNNLVLKEKEVIGILGYRHIFPAVIKLISSGQIQAEKLITKKITVDQVVEEGFEALVKDKTQVKILVSPK

SEQ ID NO: 4841 - protein, 381 aa, Arabidopsis thaliana
MENHLQHSLTIIPKPDLIKEEQRYHEDTVSLQAERILHAMTFPMVLKTALELGVIDMITSVDDGVWLSPSEIALGLPTKPTNPEAPVLLDRMLVLLASHSILKYRTVETGDNIGSRKTERVYAAEPVCTFFLNRGDGLGSLATLFMVLQGEVCMKPWEHLKDMILEGKDAFTSAHGMRFFELIGSNEQFAEMFNRAMSEASTLIMKKVLEVYKGFEDVNTLVDVGGGIGTIIGQVTSKYPHIKGINFDLASVLAHAPFNKGVEHVSGDMFKEIPKGDAIFMKWILHDWTDEDCVKILKNYWKSLPEKGKVIIVEVVTPEEPKINDISSNIVFGMDMLMLAVSSGGKERSLSQFETLASDSGFLRCEIICHAFSYSVIELHK

SEQ ID NO: 4842 - protein, 391 aa, Methanocaldococcus jannaschii DSM 2661
MFEVKHMDGIDVFFFMWAASLIFFMKAGFIALEIGQFRAKNVSYHCVLKLLDLAAVFIAYLFIGYGISYGFENIMPLITGTFDADLGAWWMKMVMFAAAAVTIITGGVAERIKILPYFIGALIVGGILYPIVEHLVWGGGFANLGINFHDYAGSGAVHLFGGLVGLMAAYVLGPRIDKYINGKPQAIPGHNIPIAVLGAFILAFGWYGFNIGSASGIANGVELASVAMATTMALAGGIIGGALSSRNDPLYTANGMCAGLVAVCSGVDLFTPIGAFIVGLLAGIQQPFTYKFIEEKLKIDDVCAIGPVHAMSGLIGVICAGIPFLLKADAVSKVSITGQIIGAIVIALIAIVGGLIIYKGLDLTIGLRVSEEAEKVGLDTAILQTTAYSEE

SEQ ID NO: 4843 - protein, 244 aa, Triticum aestivum
  misc_feature (114)..(115): Xaa can be any naturally occurring amino acid
MFGYRKAPDLDLEAGGSAPLYPGMTEDVELRWAFIRKIYVILSVQLAMTAAVAGFVVKVPAVSDFFVSSNAGLGLYIFFLVLPLIVLCPLRYYHQKHPVNLILLGVFTVSISFXXGMTCAFTSGKIILEAAILTAVVVISLTAYTFWAAKRGHDFNFLGPFLFGALMVLMVFSLIQIFFPLGKISTMIYGAVASIIFCGYIIFDTDNIIKRHTYDEYIWAAVSLYLDIINLFLNLMQILRAADS

SEQ ID NO: 4844 - protein, 488 aa, Bacillus subtilis subsp. subtilis str. 168
MSVITEQNTYLNFINGEWVKSQSGDMVKVENPADVNDIVGYVQNSTAEDVERAVTAANEAKTAWRKLTGAERGQYLYKTADIMEQRLEEIAACATREMGKTLPEAKGETARGIAILRYYAGEGMRKTGDVIPSTDKDALMFTTRVPLGVVGVISPWNFPVAIPIWKMAPALVYGNTVVIKPATETAVTCAKIIACFEEAGLPAGVINLVTGPGSVVGQGLAEHDGVNAVTFTGSNQVGKIIGQAALARGAKYQLEMGGKNPVIVADDADLEAAAEAVITGAFRSTGQKCTATSRVIVQSGIYERFKEKLLQRTKDITIGDSLKEDVWMGPIASKNQLDNCLSYIEKGKQEGASLLIGGEKLENGKYQNGYYVQPAIFDNVTSEMTIAQEEIFGPVIALIKVDSIEEALNIANDVKFGLSASIFTENIGRMLSFIDEIDAGLVRINAESAGVELQAPFGGMKQSSSHSREQGEAAKDFFTAIKTVFVKP

SEQ ID NO: 4845 - protein, 449 aa, Oryza sativa (japonica cultivar-group)
MYRAKRAALSPKVKRRVGKYELGRTIGEGTFAKVRFAKNTENDEPVAIKILDKEKVQKHRLVEQIRREICTMKLVKHPNVVRLFEVMGSKARIFIVLEYVTGGELFEIIATNGRLKEEEARKYFQQLINAVDYCHSRGVYHRDLKLENLLLDASGNLKVSDFGLSALTEQVKADGLLHTTCGTPNYVAPEVIEDRGYDGAAADIWSCGVILYVLLAGFLPFEDDNIIALYKKISEAQFTCPSWFSTGAKKLITRILDPNPTTRITISQILEDPWFKKGYKPPVFDEKYETSFDDVDAAFGDSEDRHVKEETEDQPTSMNAFELISLNQALNLDNLFEAKKEYKRETRFTSQCPPKEIITKIEEAAKPLGFDIQKKNYKMRMENLKAGRKGNLNVATEVFQVAPSLHVVELKKAKGDTLEFQKFYRTLSTQLKDVVWKCDGEVEGNGAAA

SEQ ID NO: 4846 - protein, 466 aa, Sinorhizobium fredii
MSKRFRSRSAARAARHRLRRGEQDMSNRLNTTPNDLSAFWMPFTANRQFKKEPRLFVGAKDMYYTTHDGRTVLDGTAGLWCVNAGHCRPKITEAIREQAGELDYAPAFQLGHPKAFELANRLVDIAPEGLNHVLYTNSGSESVDTALKVALAYHRAKGNGSRFRLIGRERGYHGVNFGGISVGGIVANRKMFGTLLTGVDHLPHTHLPAKNAFTRGEPEHGGDLASELERIVTLHDASTIAAVIVEPVAGSTGVLIPPKGYLQKLREICTKHGILLIFDEVITGYGRLGTPFAAQYFDVKPDIITTAKGLTNGVIPMGAVFVTSEIHDAFMTGPEHLIEFFHGYTYSGNPIASAAALGTLDTYKEEGLLTRAAELASYWEEALHSLKDCPHVIDIRNIGLIGAVELEPIAGEPTKRAFSAFLKAYEKGLLIRTTGDIIALSPPLIIEKKQIDELIDKLRDVLKNNI

SEQ ID NO: 4847 - protein, 498 aa, Aspergillus nidulans FGSC A4
MANVRVKGENFYRDAKKVKRLNMLKDGKPQRDAAGNITVAASYQSREAPVARIEPNRKWFGNTRVISQEALSSFREAVAERASDPYQVLLKTNKLPMSLIRDNKTVNGLKQHEAKMTIETSPFSDTFGPKAQRKRVKLGVSSLEDLAGETMKMHDSYVEKSEQGRHEDGTPIVAGDDVATDLSVGTLPTSREAVFLKGQSKRIWNELYKVIDSSDVVIHVIDARDPEGTRCRGIEKYIREEAPHKHLIFVLNKCDLVPTGVAAAWISVGLIGYPNTGKSSIINTLRKKKVCTVAPIPGETKVWQYVTLMKRIYLIDCPGVVPPSQTDTPEDILLRGVVRVENVENPEQYIPAILKRVQPKHLERTYGIKETSDAIEFLSILARKGGRLLRGGEPDLDGVAKMVINDFLRGKIPWFTPPPFTPGEEGEKIEGREGRLGEMGRKRKIEETSQDASEGQEGQDQSASDSEEEFGGFDDEQDDSDNDSIANLEVSDEESGEE

SEQ ID NO: 4848 - protein, 405 aa, Glycine max
MVLEATMICIDNSEWMRNGDYSPSRFQAQADAVNLICGAKTQSNPENTVGVLTMAGKGVRVLVTPTSDLGKILACMHGLDIGGEMNLAAGIQVAQLALKHRQNKKQQQRIIVFAGSPVKHEKKMLEMIGRKLKKNSVALDIVNFGEEDEGKTEKLEALLAAVNNNDTSHIVHVPSGPNALSDVLISTPIFTGDGEGGSGFAAAAATAAAGGVSGFEFGVDPNLDPELALALRVSMEEERARQEAAAKKAAEDAANLEKGDEQQASSQHATMTERAGAATSEAENKTSDLMDDENALLQQALAMSMDDSAISHDVKDTDMSEASASDPDLALALQLSITDSAKDQSSQSDMSKLLADQSFVSSILASLPGVDPNDPSVKDLLASMQNQSEPQQKNDDKPSNEEEKK

SEQ ID NO: 4849 - protein, 166 aa, Brassica napus
  misc_feature (163)..(163): Xaa can be any naturally occurring amino acid
KKILRSSLLCCIVFLLISNFYGSVEAGKRRIEITDDLDDVEDSEEDESWKTWGNKAAAPEFDPPPDFSNMGFDQIQEEMAKRTFAPVVGFVKLRLGVQRTKDMVVDIAMKWTKVLRTGGLGVRFMAVDRSTVMFNMQNGKEVTELREFVLRQEEAYEVKIGKXEFD

SEQ ID NO: 4850 - protein, 487 aa, Vigna radiata
MRRGLDNQAYYVLGHKTPNIRDLYTLGRKLGQGQFGTTYLCTENSTSNEYACKSISKRKLISKEDVEDVRREIQIMHHLAGHKNIVTIKGAYEDPLYVHIVMELCSGGELFDRIIQRGHYTERKAAELTKIIVGVVEACHSLGVMHRDLKPENFLLVNKDDDFSLKAIDFGLSVFFKPGQIFTDVVGSPYYVAPEVLLKHYGPEADVWTAGVILYILLSGVPPFWAETQQGIFDAVLKGHIDFDSDPWPLISDSGKDLIRKMLCSQPSERLTAHQVLCHPWICENGVAPDRAIDPAVLSRLKQFSAMNKLKKMALRVIAESLSEEEIAGLREMFQAMDTDNSGAITFDELKAGLRRYGSTLKDVEIRDLMEAADVDKSGTIDYGEFIAATVHLNKLEREEHLIAAFQYFDKDGSGYITVDELQQACAEHNMTDAFLEDIIREVDQDNDGRIDYGEFAAMMQKGNAGIGRRTMRNSLNLSMRDASSAQ

SEQ ID NO: 4851 - protein, 184 aa, Amaranthus hypochondriacus
MASSMMSNAATAVAVAATSGGAQANMVAPFNGLKSIASFPVTRKSNDITSIASNGGRVQCMQVWPPVGKKKFETLSYLPPLSDAQLLAQVQYLLNKGWIPCIEFELEHPFVYRENHRSPGYQDGRYWTMWKLPMYGCTDPAQVLNEVEEAKKAYPTAFIRIIGFDNKRQVQCVSFIAYKPADSY

SEQ ID NO: 4852 - protein, 344 aa, Candida albicans SC5314
MSPSTQQQVHESNQSQSNDSSSIGLRLNDNNIQPIEIELSSFKHDSITFHKQDSSYWFYEKSKQSFPGQSFGLQVEKILYHTKSSFQDILIFKSTNFGNVLVLNGIIQCTEKDEFAYQELITHLPIMSHPSPKKVLVIGGGDCGVIRELIKHVNDQTIQEITMVEIDDMVIKLSTKFLPEMAKYHNHPKVNLIIGDGFEFLKNSSKEKKYDVIITDSSDPDDGPAEEFFQINYFKLLLNALNEKGIVIMQSSENIWLNLPYLKELKSKAATVFSNVKYCQCYMPSYTSGQLGLIIATMDTGKDLVNPLRKFDHDKELKLFKYYNQHIHTNSFVLPTWADDYLNN

SEQ ID NO: 4853 - protein, 180 aa, Amaranthus hypochondriacus
MASSLMSNAITAVVGASGAQANMVAPFNGLKSIASFPVTRKSNDITSIASNGGRVQCMQVWPPVGKKKFETLSYLPPLSDAQLLAQVQYLLNNGWIPCIEFELEHPFVYRENHRSPGYQDGRYWTMWKLPMYGCTDPAQVLNEVEEAKKAYPSAFIRIIGFDNKRQVQCVSFIAFKPPGY

SEQ ID NO: 4854 - protein, 160 aa, Manihot esculenta
MSDEEHHFESKADAGASKTFPQQAGTIRKNGYIVIKNRPCKVMEVSTSKTGKHGHAKCHFVGIDIFNGKKLEDIVPSSHNCDVPHVNRTDYQLIDISEDGFVSLLTETGNTKDDLRLPTDENLLSQIKDGFAEGKDLVVSVMSAMGEERICSLKDIGPKN

SEQ ID NO: 4855 - protein, 210 aa, Photorhabdus luminescens subsp. laumondii TTO1
MADIENLPLENVVWHPHQLTRAQREVENGHPALVIWFTGLSGSGKSTVAGALEQALFQRGIKTYLLDGDNLRHGLCRDLGFSEQDRQENIRRVGEVASLMVDAGLVVLTAFISPYKAERKKVRELLEPGQFIEVFVDTPLEICESRDPKGLYKKARAGEIRHFTGIDSVYEVPDSPEIYLPGQQSVETSVTQLLVELKKSGIIRSRIHHG

SEQ ID NO: 4856 - protein, 1062 aa, Gibberella zeae PH-1
MSVDSLLSSLASSYNRVQLHLSYFARVYRASCASATVMSSNWHSLIARAIDIPLEGDDSRVGSTRDGSSGGTLSTNNASKSSSLQSLGGTFIPVVIYCVVCIIFFSIFRVKCSRVYAPRAIPSLRSPHKHIPPLPTGWFDWVKPFFKTPDTFVLNHGSLDGFFFLRYLKVLRNTFLVGMLIAWPILFPIHITGGNKLSQLDILTIGKISDRKRFVLFTITRECFYYIGIRQAYLSSPHYSKRLSSRTVLITSIPDRYLDEARLRKLYGDSVKRVWIPRTAKALIKLVEEREETAMRLEKAEIALIKKAHLARKKHFNKSPSSASSSVDPYPTESSSSYRSDPSSEQTRSDSPRVGVSQNETAQDETQEAGFKAQYPQVTQTVTQDTHDLLERSAEDPEYVHPYGLNPNLPDVRGSVAAQWIPAKARPHHRPLQNFFRRVDTIRWCRMRLKDLNLEIYKLRRQVRRGDGDTLPAAFIEFDTQEAAQAAHQIVAHHRPLQLAPRLLGVRPDEVVWKALRMCWWERIIRRFLIMGLVAVAIIFWSIPSAMIGIISNIDFLSGIVFLRWIKLLPKPILGFLQGFIPAIALSFWMSLVPAMLRFCGVQAGIPSLVLVELFTQNIYFAFQVVQVFLITTLTSAASAAVLDIIKQPMSAPDLLARNLPKASNFYLSYILVQCLAIGATGLLHLFELFRQHILGRGLQNPRTRFNIWYNLRPPRWGGIFPIYTNMACIAFCYTCIAPLILLFACAGMAFTRLIYRYNILYVFDSEMDSMGLFYPNALLQLIVGLYLAEICMIGLFALKLAFPPMVLMLIFLIFTGIVHMSLRDSISPLLQNLPQTLTLEEELQQQEKAEAEQKLQEAAESGEVNGGTAASYFDADLNFGEEEVEEPPSDDEDGQHDGPQGSRGVDGGGGVKLMVREWMKTTAKAQVKKEIQQSGIKRFLDRWILAGDPSNPDQQPTFLQRFLHPEVYEDFIALRKLIPFEEPPDVDYAGDEKMSNYWPPELWMPKPVLWIPRDEARVSRQEVAHTRKITPITDVGVTLNEKGLIIVDVEAAPFPRMRLVH

SEQ ID NO: 4857 - protein, 509 aa, Streptomyces coelicolor A3(2)
MANSTHTPAERAHRTIHAGGEWLAASSGATREILDPADAVAFAVVAEGDEKDTDLAVAAARRAFDAGDWPHTPVAERAALLRRVAGLLVRDREKLGLLESRDAGKTVEEGRVDIDCVADAFRYFADLVAGEAPGRVVDAGSPEVHSVVVHEPVGVCAMITPWNYPLLQASWKIAPALAAGNTFVIKPSEITPMTTIALIDLLVEAGLPTGVANIVTGPGHTVGARLAEHPDVDLVSFTGGLTSGVKVAQAAAVTVKKVALELGGKNPNVVFADACATEEGFDTAVDQALNAAFMHSGQVCSAGGRLIVEESVRERFVAELARRAERIRLGRGTEEGVECGPLVSAQQRAKTEDYVASALAEGAELRCGGKRPEPSPQRPESGYFYEPTVLDHCHREMRVVREEVFGPVLTVETFRTEDEAVALANDTEYGLAGAVWTADAGRARRVAGRLRHGTVWINDFHPYLPQAEWGGFGKSGVGRELGPAGLAEYRESKHVYQNLAPKPVRWFSG

SEQ ID NO: 4858 - protein, 494 aa, Geobacillus stearothermophilus
SSIAAPKLKEKVEKFLSGKKKMYINGSFVESASGKTFDTPNPATGERLATVYEGDAEDIDRAVKAAREAFDRGPWSRMSAAERSRLMYKLADLMEENKEELAQLETLDNGKPIRETINADVPLAIEHMRYYAGWSTKIVGQTIPVNGPYFNYTRHEPVGVVGQIIPWNFPLLMAMWKLGAALATGCTVVLKPAEQTPLSALYLAELIEEAGFPAGVVNIVPGFGETAGDALVKHPQVDKIAFTGSTEVGKLIMANASKSLKRVTLELGGKSPNIILPDADFSKAIPGALNGVMFNQGQVCCAGSRVFIQKKQYDNVVADMVSHAKSIKQGFGLKADTEMGPLVSSEQQNRVLGYIEKGLEEGAELLTGGQKPSEQGYFVEPTIFANVEDSMTISKEEIFGPVIAALPYEDIDELIERANDTNYGLAAGVWTRDVTKAHYIANKLRAGTVWVNCYNVFDAASPFGGYKESGIGREMGSYALDNYTEVKSVWIAQN

SEQ ID NO: 4859 - protein, 405 aa, Thermoplasma volcanium GSS1
MAYIQVREDGTLLVPDKVTIGYIEGDGIGPDITKTTINVINAALEVAYGGKRSIEWHKVLAGDEAYDKTGNRLPDSSLEELKKCVVSIKGPLTTPIGEGFRSLNVTLRQYLDLYANIRPVRYFPGVPSPVLHPEYMNMVVFRENTEDLYAGIEWRYDSEDAEKVRAFLSSTFNINLTPDTGIGIKPISKFKSTRLVRKAIQYAIANGRKSVTLVHKGNIMKYTEGAFRDWGYEVARTEFGDYTVTEAEYLKDPEKYANKIVIKDRITDNMFQQVLTRTQEYDVIATPNLNGDYLSDALAAQVGGIGLAPGANIGDHYAVFEAVHGTAPKYAGLDVANPTSLILSAEMMLDHIGWKEASKILDDAIMQTYRDQKLTQDIARLLNLKALKCSEFGEEIINRMKPIKS

SEQ ID NO: 4860 - protein, 54 aa, Zea mays
MASATFLEVLLAIFLPPVGVFLRYGCGVEFWIDLLLTVLGYIPGIIYAVYVLVA

SEQ ID NO: 4861 - protein, 120 aa, Glycine max
MAGMVFGLDAPMMAALQHLLDIPDGEAGAAAGEKQGPTRAYVRDARAMAATPADVKELPGAYAFVVDMPGLGSGDIKVQVEDERVLVISGERRREEKEDAKYLRMERRMGKLMRKFVLPE

SEQ ID NO: 4862 - protein, 122 aa, Oryza sativa (japonica cultivar-group)
MAPRCATLAVVVVLVAAVVAPPTAVRAAISCSAVYNTLMPCLPYVQAGGTVPRACCGGIQSLLAAANNTPDRRTICGCLKNVANGASGGPYITRAAALPSKCNVSLPYKISTSVNCNAYVHA

SEQ ID NO: 4863 - protein, 266 aa, Zea mays
PARREPALLHLRRSCEFNPRVSMSSYSPPPPLPPRDQSMDTEAPNAPITRERRLNPDLQEQLPKPYLARALEAVDPSHPQGTKGRDPRGMSVLQQHAAFFDRNGDGVIYPWETFQGLRAIGCGLTVSFAFSILINLFLSYPTQPGWLPSPLLSIRIDNIHKGKHGSDSETYDTEGRFDPSKFDAIFSKYGRTHPNALTKDELSSMLQGNRNTYDFLGWLAAAGEWLLLYSLAKDKDGLLQRETVRGLFDGSLFERLEDDNNKKKSS

SEQ ID NO: 4864 - protein, 427 aa, Photorhabdus luminescens subsp. laumondii TTO1
MADNKATLAPDGSVAIELDVLTPTLGSKVIDVRTLGSQGFYTYDPGFTSTASCESKITYIDGNEGVLLHRGFPIDQLATKSTYLEVCYILLYGETPTQEQFDKFKKTITRHTMIHEQIHRLFNGFRRDSHPMAVLCGVTGALAAFYHDALDVNNPRHRDITAYRLLSKMPTVAAMCYKYSIGQPFVYPRNDLSYAGNFLNMMFATPCEEYKVNPVLERAMDRIFILHADHEQNASTSTVRTAGSSGANPFACIAAGIASLWGPAHGGANEACLRMLEEIQSVEHIPEFIKRAKDKNDAFRLMGFGHRVYKNYDPRATVMRETCHEVLDELGLNDSLLEVAMELERIALHDPYFIEKKLYPNVDFYSGIILKAMGIPSTMFTVIFAIARTIGWIAHWNEMHDGGVKIARPRQLYTGYTKRDFDSQLEK

SEQ ID NO: 4865 - protein, 286 aa, Hordeum vulgare
  misc_feature (4)..(6): Xaa can be any naturally occurring amino acid
TTMXXXPSGLELERPQQLFPQWQPLPQQPPFLQQEPEQPYPQQQPLPQQQPFPQQPQLPHQHQFPQQLPQQQFPQQMPLQPQQQFPQQMPLQPQQQPQFPQQKPFGQYQQPLTQQPYPQQQPLAQQQPSIEEQHQLNLCKEFLLQQCTLDEKVPLLQSVISFLRPHISQQNSCQLKRQQCCQQLANINEQSRCPAIQTIVHAIVMQQQVQQQVGHGFVQSQLQQLGQGMPIQLQQQPGQAFVLPQQQAQFKVVGSLVIQTLPMLCNVHVPPYCSPFGSMATGSGGQ

SEQ ID NO: 4866 - protein, 470 aa, Dechloromonas aromatica RCB
MKKEKALVWFRRDLRDHDHAALSAALAEAQQVYCAFVFDSEILDPLPTRHDRRVHFIRESLVELDAALRARGGGLIIRHGQAVDEIPALARRLGVSAVFTNRDYEPSAKRRDAQVARQLRNDDIAFHGVKDQAIFDGDEVLTQAGKAFSVFTPYKNAWLKRLTTADYAAWPCDGRLAGQELAGIPTLEEIGFTPTDLAELGIQPGMSGAKGLWDDFSRDRIERYGSLRDFPAVKGVSYLSVHLRFGTISIRQLVRQALAHQADTWLSELIWRDFYFMILDHFPHVAGHAFKPEYDAIQWASRPEAFAAWCEGCTGYPLVDAAMRQLNFSGWMHNRLRMVVASFLTKDLGIDWRLGEKYFAEQLNDFDLSANNGGWQWASSSGCDAQPYFRIFNPVTQSEKFDAEGKFIRRYVPELAKVHDKYIHAPWKMGRIEQEALGVVIGRDYPSPIVDHATARDETLARYAVVKKQA

SEQ ID NO: 4867 - protein, 73 aa, Triticum aestivum
MEHGSLTDSTSSTFSIMDEDHTLANSARFVLNQDPRVAFCGYTIPHPSEKKVNIRLQTTGDAAKDVLKDALQI

SEQ ID NO: 4868 - protein, 216 aa, Escherichia coli
DLYICLRPVRYYQGTPSPVKHPELTDMVIFRENSEDIYAGIEWKADSADAEKVIKFLREEMGVKKIRFPEHCGIGIKPCSEEGTKRLVRAAIEYAIANDRDSVTLVHKGNIMKFTEGAFKDWGYQLAREEFGGELIDGGPWLKVKNPNTGKEIVIKDVIADAFLQQILLRPAEYDVIACMNLNGDYISDALAAQVGGIGIAPGANIGDECALFEAT

SEQ ID NO: 4869 - protein, 360 aa, Triticum aestivum
MGSTATDMAASADEEACMYALQLVSSSILPMTLKNAIELGLLETLVAAGGKLLTPAEVAAKLPSTANPAAADMVDRMLRLLASYNVVSCTMEEGKDGRLSRRYGAAPVCKFLTPNEDGVSMAALALMNQDKVLMESWYYLKDAVLDGGIPFNKAYGMSAFEYHGTDPRFNRVFNEGMKNHSIIITKKLLEVYKGFEGLGTIVDVGGGVGATVGAIVAAYPAIKGINFDLPHVISEAPPFPGVTHVGGDMFQKVPSGDAILMKWILHDWSDEHCATLLKNCYDALPAHGKVVLVECILPVNPEATPKAQGVFHVDMIMLAHNPGGRERYEREFEGLAKGAGFAAIKTTYIYANAFAIEFTK

SEQ ID NO: 4870 - protein, 88 aa, Zea mays
  misc_feature (65)..(65): Xaa can be any naturally occurring amino acid
MAPTVMASAGTSVAPFQGLKSTAGLPVSRRSNGASLCSVSNGGRIRCMQGWPFEGIKKCETLSYXPPVNTEALLEQEDYLVRCQGAPG

SEQ ID NO: 4871 - protein, 323 aa, Aspergillus nidulans FGSC A4
MSLPSHFSLNTGAKIPAVGFGTWQAKPLEVENSVEVALKQGYRHIDCAAIYRNETEVGNGIRKSGVPREEIFLTGKLWNTKHAPEDVEPALDKTLKDLGVEYLDLYLMHWPCAFKASDKWFPLDDNGVFQLADIDYVTTYRAMEKLLNTGKVRAIGVSNFNVRRLEDLLSKVSVVPAANQIEAHPYLQQPDLLRYCQSKGIIIEAYSPLGNNQTGEPRTVDDPVVHTVAGQLSMDPGPLLASWAVQRGTVVLSKSVTPSRIAANLQVKRLPDDAFATLAALERHKRFNFPAFWGYDIFDEAGEEAVKKAAMDAAPINKTKFTV

SEQ ID NO: 4872 - protein, 334 aa, Arabidopsis thaliana
MDAKETSATDLKRPREEDDNGGAATMETENGDQKKEPACFSTVIPGWFSEMSPMWPGEAHSLKVEKVLFQGKSDYQDVIVFQSATYGKVLVLDGVIQLTERDECAYQEMITHLPLCSIPNPKKVLVIGGGDGGVLREVARHASIEQIDMCEIDKMVVDVSKQFFPDVAIGYEDPRVNLVIGDGVAFLKNAAEGSYDAVIVDSSDPIGPAKELFEKPFFQSVARALRPGGVVCTQAESLWLHMDIIEDIVSNCREIFKGSVNYAWTSVPTYPSGVIGFMLCSTEGPDVDFKHPLNPIDESSSKSNGPLKFYNAEIHSAAFCLPSFAKKVIESKAN

SEQ ID NO: 4873 - protein, 319 aa, Escherichia coli CFT073
MKPENKLPVLDLISAEMKTVVNTLQPDLPPWPATGTIAEQRQYYTLERRFWNVGAPEMATRAYRVPTKYGQVKTRIFYPQPDRPATLFYLHGGGFILGNLDTHDRIMRLLASYSQCTVIGIDYTLSPEARFPQAIEEIVAACCYFHQQAEDYQINMSRIGFAGDSAGAMLALASALWLRDKQIDCGKVAGVLLWYGLYGLRDSVTRRLLGGVWDGLTQQDLQMYEEAYLSNDADRESPYYCLFNNDLTREVPPCFIAGAEFDPLLDDSRLLYQTLAAHQQPCEFKLYPGTLHAFLHYSRMMKTADEALRDGAQFFTAQL

SEQ ID NO: 4874 - protein, 2761 aa, Ustilago maydis 521
MHPRQPSGPGSTDAMEIYDHLHTPKHEIDVADAFAAAMPSAIDPNQPSLRSVPEDAQLDTQQLSSLNASPLASSLQPSSQVAQQESPTSRRSDKLATSSYGLVQPGGRPDLASRRSSDVLKSLPGLPLALTNAEQTFLPATLNGGTSSAIPHPSAAIGSLVDHRAPPADTLPPQHIPRPLPGSATPSASASPSAMQTPPKKTPYDAIAAGVQTLAMPNSISVGPLSPPESDPHRSMMDSNRKSIDDIRRNHAARAAQRQSNNSSPIETRPGNGLVPDSAYTPTRAHAQYQSEFASSPDPTQRQRRAMASEPPRPASVLDTRAAQMQAVQRRQHDSRLGQGSSDTFDATDTLGSSRDTQLDRASQQHLQLRAAREQELERERLQHQQLQEQQREKEQQRQREKLKEREREKEREREREKERGERDRDRDRERRSRRLLGDYALGKTLGAGSMGKVKLGVKMGNGEKVAIKIIPRHTSMAAAQSPRAAVDENGKPQPPPPPPTASFLAKAAAKDQSKEIRTIREGSLQILLHHPYVCGMREMIIHTNHYYMVFEYVNGGQMLDYIISHGRLRERSARKFARQIGSALEYCHRNSIVHRDLKIENILISKTGNIKIIDFGLSNLFSPHSHLSTFCGSLYFAAPELLNAKVYTGPEVDVWSFGIVLYVLVCGKVPFDDQSMPALHAKIKRGQVEYPAWLSGECKHLLSRMLVTNPANRATLAEVLAHPWMVKGYEGVPDPHLPDRTPLRPHNIDQEVIKGMTGFEFGSPEAITAKLIEVLNSEAYQTSLYHWELKNLPASLTGLSTVSNSGSSIDSPGLNRPSTRGSFTATSGSDTVKSKAGSRRFSGIDFYKKKLTTNPLAAAFGSKDDSAVGSANGSSNGLGSGTGLLPFGKEPLDPTRGFHPLISIYFLVKEKMERERLYGHSFFASSNLSLNGPPVPSTGAVAGAGTGARAAAAGAMPTAADIPQEALRVPEVPHVSHRAYDPSRQQEAALASPAPPRPAAAMIPVPASPTPVFESREKSRPSGLMAGPPRARANADEMEAALREKCLPSPKDAGFAPGIGGMAPVPAASTPGMRQSFSVVPPGPEVAIGHNHRHSMMAPDISMAITNNHKRSVSLTARRPPGAAAAGRTPVGAMVEPSTPDAFSMDTRRMSTMSPARLPARASYIATPSKSEAGSAEPSSSPAATAHNTSSTLGYGATLARRFSSFMGRSPSQPLDTEARERKKQSRMSMPLGGLPQQQQQQHQQRRGSAHMPLSEVDEADTGTDVDAYDYDEVEEHLVTHDEDMPLGSGTTVRRSGTMGDMPASHANTRVSEASMGALSVGRAAGLSMSPKSTAAAKSGRRPSTGISPSTSMPLNVLDAGGAARQKEDALQQVSPSNARTGWMGPSTPGQAEVLPALVTRRRFGGGSNATGGQQNGSSASEGGSKPIFLKGLFSVQTTSTKPRTVIHASLVKVLDRIGIQYRELRGGYECVHLPSLDFSGSDSLGRGNARIPLETMAAAAAADAEASERSPTSEENNRQPKRKPSRLSFVSGRSKDKDRANRKEGSVAESIGALTGAGGTVRSRTPSLTSNAAFANADSTTLPPLPPKTPSKPSLLIRSPRQRADSMGAASMLGPSGSRDSNLMLDTTVAAGSGGDACALSPASAAGTVTARTMNAAQATELAVRFEIFVVKVPLLLGVNGLQFRRVGGNPWQYQMLAKRILQELKLPVLWNDRGSWIRMVAFHVWKHSRFTIHDSRFGVSKEAGEIHREWSRSRVGRIVCETRHAAVEPVLGTTFYHTFILTIKNAADDHKQVWQRYISPARIRNETCSISKMHKDYTTLHSVAPDKARIDNLCCDIERCCFTDTIHTQGSFHSSSSAHKTLLSDIPSISPRSLVKYLDSYVVGQTRAKKVLAVGVWNHYLRVASNQRMKHEAEARLEAQQQQQQQQQQQQQLSEEETETQLQRNCTIPDHGVSEAASRSLRLGKYKARSEEAAGPISNPTAMQEKDEAMASLQDSWRSQHQIEQERNAERARDPHGEATRSLMFGRSEREWLVNAGGPSAIIEDDSKVAIQNGSGYAGRIAPKFGDDLKPPEKPEKPEKPMKRVSAQTPAEEASWKLEQRKWSSTTAAQENALAEAASRMHNAVLSDYTRDFHQKDHVVEGTSRIGVFGADEPLYFSSNTMRGSQHAGVRGPGSQSQMSRTDETENKWESSQERAAYAAGIAQERTKRALRLARERLSTSRNSDHPSERASTVDVCHVSDCTPRTHDAGKETASTSNPGIAFLSTQPGSLPFFEKSNILLLGPSGSGKTLLLRTLAQALDVPFVHVDATPLTMAGYVGEDVESIIQRLLVEAGWDVDRAQRGIVCIDEIDKLRKTGLGGGGGGAGGAGGGGGKDVGGEGVQQALLRILEGTTIQIANKAGANAGASAAGTATAASKVPKSYPRQAATGDVNGVETAGGLGPWYNHRRAQADSADAKWNSNSLSSSQTQAASLSVDTSSILFVLSGAFVGIDHVIRNRLDRLSGDPTTLNVSSEDQNEKPHAATLSQCDLLSRLEPSDLEQYGMIPEFIGRVPVSVVLNPLSHQDLIRVMTEPRNSLVDQYTSLFKLNGIELHISRGAIEEVVHRAMGTCSAANSKALVRNSADRGGGGGGARSLRRIMEDVLLDAFYESYGSSSVKYILVDRQSVRDTSEVKLFSRGQKLDFEARVKTEAQDWCTRQQQQKQTRHQGANPAKAIRKDGGALGDMDAARTAMARHKARALIRSRLRRTNRLVDPVIYV

SEQ ID NO: 4875 - protein, 316 aa, Caulobacter crescentus CB15
MIKVRVASRARAAEGIAQLDLVCAEGRDLPAFEAGAHIDLFLGNGLTRQYSLCSDPAERSFYRIAVLRELTSRGGSAYVHEALTEGATLEISPPRNLFALDETAEEHLLFAGGVGVTPILAMAKRLSALGRAFTFHYCARDRSRAAFLNELSTAPFTSAVRLSFDAEPDTRLDLDVALARPKPGRRLYVCGPGGFMTHVIDGALARGWSGDQIRKEHFAAAPLSAGQDQPFELVIASSGQIVTVAADQTAAQALEAAGVFVPVSCEQGVCGTCLTRVIDGQPDHRDAFQTDEERAANDQFTPCCSRARSPRLVLDL

SEQ ID NO: 4876 - protein, 142 aa, Triticum aestivum
AGSGPYPPPPAFRLQAEGLRYHHQLSRHIAQLGRIEAMASRLLAAASSSSASSSPLARLISSRRMAGAADHHGSTKVNMWQEPLNPGNWKEEHFVLASLAMWGAYYIWWIEGICVRNTEPTNRRQAHPASTGHDYPCTPKPL

SEQ ID NO: 4877 - protein, 457 aa, Zea mays
MAASARDSADAAERVVDDHDGWASDGEMGMEMDVEGEFHDRDADRRDGGVDGDDEYLLLTRIRDTSAAEARAGKDIQGIPWERIHIARQDYRKARLEQYKNYENFPQSGELMDKLCKQVEKSSKYYEFQHNTRSVKPSILHFQLRNLLWATSRHDVYFMSNSTVTHWSSLSHKLSEVLDFSGHIAPVEKHPGSLLEGFSGVQVSTLAVNEGLLVAGGFQGELIGKDLEGCNIKFCARTTLSDNAITNAIDIHRSTSGSLRITVSNNDCGVREYDMERFQLLNHYRYNWPVNHTSVSPDKKLLAVVGDDRDALLVDSRNGKVTSTLVGHLDYSFATAWHPDSRTFATGNQDKTCRIWDTRNLSTSLAVLRGNIGAIRCIRYSSDGRFLVFSEPADFVHVYSVAADYKKRQEIDFFGEVSGITLSPDDESLFVGVCDRVYASLLQYRMIHAFDYLDSYV

SEQ ID NO: 4878 - protein, 496 aa, Pseudomonas aeruginosa PAO1
MFELSDWQRRAATQRFIDQALIGGRQRPAASGATFDAIDPASNRLLARVAACDAADVDAAVAAARRAFDEGPWARLAPVERKRVLLRLAELMLAHREELALLDSLNMGKPVMDAWNIDVPGAAHVFAWYAESLDKLYDQVAPTAQQTLATITRVPLGVIGAVVPWNFPLDMAAWKLAPALAAGNSVVLKPAEQSPFSALRLAELALEAGVPEGVLNVVPGLGEQAGKALGLHPEVDALVFTGSTEVGKYFMQYSAQSNLKQVWLECGGKSPNLVFADCRDLDLAAEKAAFGIFFNQGEVCSANSRLLVERSIHDEFVERLLAKARDWQPGDPLDPASRAGAIVDRRQTAGILAAIERAQGEGATLLGGGRQLTINGSDNFIEPTLFGDVRPDMQLAREEIFGPVLAISAFDSEDEAIRLANDSRYGLAASLWSDDLHRAHRVARRLNAGTVSVNTVDALDVAVPFGGGKQSGFGRDLSLHSFDKYTQLKTTWFQLR

SEQ ID NO: 4879 - protein, 352 aa, Triticum aestivum
  misc_feature (186)..(186): Xaa can be any naturally occurring amino acid
  misc_feature (195)..(195): Xaa can be any naturally occurring amino acid
MADEEGCMHAVQLALSSVLPMTLKAAIELGLLEILVGAGGEALSPEEVAAKLPAEANPDAASMVDRMLRVLASHDIVSCMVEEGKDGNLSRRYSPAPVCKWLTPNEDGVSMAPYVVVAQDKVFMEPWCYMKKAVLEGGSPFNMAYGMSWYDYAGTDPRFNRLFNEAMRHHSVIITKKLLELYTGFXGVGTLVDVXGGIGTTIHAITSKYPRIKGINFDLSHVISEAPPYPGLQVEHVGGDMFDKVPSGDAILMKWILLHFRDETCVALLKNCYHALPVNGKVINMECILPAELDATHRVQGCVSADMSMLAYSPDGKERYLTDFERLAKEAGFASVKATYIYTNFWAIEYIK

SEQ ID NO: 4880 - protein, 464 aa, Listeria monocytogenes EGD-e
MLYSKENKESYLEPVFGSSAEDRDIPKYTLGKEPLEPRIAYRLVKDELLDEGSARQNLATFCQTYMEDEATKLMSETLEKNAIDKSEYPRTAELENRCVNIIADLWHAPKDQKFMGTSTIGSSEACMLGGMAMKFAWRKRAEKLGLDIYAKKPNLVISSGYQVCWEKFCVYWDIDMRVVPMDKEHMQLNTDQVLDYVDEYTIGVVGILGITYTGRYDDIYALNEKLEEYNSKTDYKVYIHVDAASGGFFTPFVEPDIIWDFRLKNVISINTSGHKYGLVYPGIGWVLWKDESYLPEELIFKVSYLGGEMPTMQINFSRSASHIIGQYYNFLRYGFEGYRTIHQKTSDVAQYLAHAVEQTGYFDIFNDGSHLPIVCYKLKDDANVNWTLYDLADRLQMRGWQVPAYPLPKSLENIIIQRYVCRADLGFNMAEEFIQDFQASIQELNNAHILFHDTQQSGVHGFTH

SEQ ID NO: 4881 - protein, 460 aa, Pseudomonas aeruginosa PAO1
MTAQLNPQRDTRDYQQLDAAHHIHAFLDQKALNREGPRVMVRGDGLQLWDNDGKRYLDGMSGLWCTNLGYGRQDLAAAASRQLEQLPYYNMFFHTTHPAVVELSEMLFSLLPDHYSHAIYTNSGSEANEVLIRTVRRYWQILGKPQKKIMIGRWNGYHGSTLGSTALGGMKFMHEMGGMLPDFAHIDEPYWYANGGELSPAEFGRRAALQLEEKILELGAENVAAFVAEPFQGAGGMIFPPQSYWPEIQRICRQYDVLLCADEVIGGFGRTGEWFAHEHFGFQPDTLSIAKGLTSGYIPMGGLVLGKRIAEVLVEQGGVFAHGLTYSGHPVAAAVAIANLKALRDEGVVTRVREETGPYLQRCLREVFGDHPLVGEVQGAGFVAALQFAEDKVTRKRFANENDLAWRCRTIGFEEGVIIRSTLGRMIMAPALVAGRAEIDELIDKTRIAVDRTAREIGVL

SEQ ID NO: 4882 - protein, 138 aa, Gibberella zeae PH-1
MSDHEFGGNEDLSLPKATVQKIVSEILPPQAGVAFAKEARDLLIECCVEFITLISSEANEISEKEAKKTIACDHITKALEQLGFTDMVPAVLEAAAEHKEVQKGREKKADKFANSGMSMEELARLQEEQFAAARERHG

SEQ ID NO: 4883 - protein, 153 aa, Glycine max
  misc_feature (143)..(143): Xaa can be any naturally occurring amino acid
ISNNGARDNSEWMRNGDYSPSRFQAQADAVNLICGAKTQSNPENTVGVLTMAGKGVRVLVTPTSDLGKILACMHGLEISGEMNLAAGIQVAQLALKHRQNKKQQQRIIVFAGGPVNHEKKMLEMIGRKLKKNSVALDIVNFGXEEDEGKTEKL

(The sequence listing continues in the following parts.)

What is claimed is:

1. A plant cell with stably integrated, recombinant DNA comprising a promoter that is functional in plant cells and that is operably linked to DNA from a plant, bacteria or yeast that encodes a protein having at least one domain of amino acids in a sequence that exceeds the Pfam gathering cutoff for amino acid sequence alignment with a protein domain family identified by a Fasciclin Pfam, the Pfam gathering cutoff for said protein domain families is 4; wherein said plant cell is selected from a population of plant cells with said recombinant DNA by screening plants that are regenerated from plant cells in said population and that express said protein for an enhanced trait as compared to control plants that do not have said recombinant DNA; and wherein said enhanced trait is selected from group of enhanced traits consisting of enhanced water use efficiency, enhanced cold tolerance, increased yield, enhanced nitrogen use efficiency, enhanced seed protein and enhanced seed oil.

2. A plant cell with stably integrated, recombinant DNA comprising a promoter that is functional in plant cells and that is operably linked to DNA from a plant, bacteria or yeast that encodes a protein having at least one domain of amino acids in a sequence that exceeds the Pfam gathering cutoff for amino acid sequence alignment with a protein domain family identified by a Pfam name in the group of Pfam names consisting of FAD_binding_{—}4, MtN3_slv, Homeobox, FAD_binding_{—}6, RWP-RK, PMEI, FAD_binding_{—}7, RRM_{—}1, Transaldolase, RNA_pol_L, WD40, U-box, Cyclin_N, Skp1, Redoxin, DZC, PBP, TPP_enzyme_M, CBFD_NFYB_HMF, TPP_enzyme_N, PFK, Caleosin, Iso_dh, Ribosomal_L18p, Metallophos, zf-A20, Ras, BBE, NAF, PLDc, DUF1242, Pkinase, C2, p450, Pyridoxal_deC, FBD, UPF0005, HEAT_PBS, GST_N, PEP-utilizers, Alpha-amylase, Amino_oxidase, SRF-TF, Phi_{—}1, Malic_M, Tryp_alpha_amyl, GSHPx, Miro, HSF_DNA-bind, DNA_photolyase, Sina, CTP_transf_{—}2, Abhydrolase_{—}3, Chal_sti_synt_C, ACP_syn_III_C, ADH_zinc_N, CSD, Globin, GATase_{—}2, Amidohydro_{—}1, HLH, HALZ, Amidohydro_{—}3, Lactamase_B, HSP20, DAO, DUF296, AT_hook, AWPM-19, Dimerisation, Suc_Fer-like, Methyltransf_{—}2, Aminotran_{—}3, PHD, MMR_HSR1, Aldo_ket_red, zf-AN1, malic, Fasciclin, UPF0057, DUF221, Pkinase_Tyr, DnaJ, Cofilin_ADF, Orn_Arg_deC_N, Skp1_POZ, Asn_synthase, K-box, LRR_{—}2, Ribosomal_L12, Ammonium_transp, Ribosomal_L14, KOW, DUF1336, DS, Aa_trans, CcmH, peroxidase, eIF-5a, Aldedh, PEP-utilizers_C, ADH_N, UIM, NAD_binding_{—}1, zf-C3HC4, Spermine_synth, AUX_IAA, LIM, Anti-silence, X8, Citrate_synt, 14-3-3, RMMBL, efhand, NPH3, CAF1, ICL, FAE1_CUT1_RppA, Orn_DAP_Arg_deC, PPDK_N, Myb_DNA-binding, AP2, F-box, and APS_kinase wherein the Pfam gathering cutoff for said protein domain families is stated in Table 11; wherein said plant cell is selected from a population of plant cells with said recombinant DNA by screening plants that are regenerated from plant cells in said population and that express said protein for an enhanced trait as compared to control plants that do not have said recombinant DNA; and wherein said enhanced trait is selected from group of enhanced traits consisting of enhanced water use efficiency, enhanced cold tolerance, increased yield, enhanced nitrogen use efficiency, enhanced seed protein and enhanced seed oil.

3. A plant cell of claim 2 wherein said protein has an amino acid sequence with at least 90% identity to a consensus amino acid sequence in the group of consensus amino acid sequences consisting of the consensus amino acid sequence constructed for SEQ ID NO: 194 and homologs thereof listed in Table 7 through the consensus amino acid sequence constructed for SEQ ID NO:386 and homologs thereof listed in Table 7.

4. A plant cell of claim 2 wherein said protein is selected from the group of proteins identified in Table 1.

5. A plant cell of claim 2 further comprising DNA expressing a protein that provides tolerance from exposure to an herbicide applied at levels that are lethal to a wild type of said plant cell.

6. A plant cell of claim 5 wherein the agent of said herbicide is a glyphosate, dicamba, or glufosinate compound.

7. A transgenic plant comprising a plurality of the plant cell of claim 1

8. A transgenic plant of claim 7 which is homozygous for said recombinant DNA.

9. A transgenic seed comprising a plurality of the plant cell of claim 1.

10. A transgenic seed of claim 9 from a corn, soybean, cotton, canola, alfalfa, wheat or rice plant.

11. A transgenic pollen grain comprising a haploid derivative of a plant cell of claim 1.

12. A method for manufacturing non-natural, transgenic seed that can be used to produce a crop of transgenic plants with an enhanced trait resulting from expression of stably-integrated, recombinant DNA comprising a promoter that is (a) functional in plant cells and (b) is operably linked to DNA from a plant, bacteria or yeast that encodes a protein having at least one domain of amino acids in a sequence that exceeds the Pfam gathering cutoff for amino acid sequence alignment with a protein domain family identified by a Pfam name in the group of Pfam names consisting of FAD_binding_{—}4, MtN3_slv, Homeobox, FAD_binding_{—}6, RWP-RK, PMEI, FAD_binding_{—}7, RRM_{—}1, Transaldolase, RNA_pol_L, WD40, U-box, Cyclin_N, Skp1, Redoxin, DZC, PBP, TPP_enzyme_M, CBFD_NFYB_HMF, TPP_enzyme_N, PFK, Caleosin, Iso_dh, Ribosomal_L18p, Metallophos, zf-A20, Ras, BBE, NAF, PLDc, DUF1242, Pkinase, C2, p450, Pyridoxal_deC, FBD, UPF0005, HEAT_PBS, GST_N, PEP-utilizers, Alpha-amylase, Amino_oxidase, SRF-TF, Phi_{—}1, Malic_M, Tryp_alpha_amyl, GSHPx, Miro, HSF_DNA-bind, DNA_photolyase, Sina, CTP_transf_{—}2, Abhydrolase_{—}3, Chal_sti_synt_C, ACP_syn_III_C, ADH_zinc_N, CSD, Globin, GATase_{—}2, Amidohydro_{—}1, HLH, HALZ, Amidohydro_{—}3, Lactamase_B, HSP20, DAO, DUF296, AT_hook, AWPM-19, Dimerisation, Suc_Fer-like, Methyltransf_{—}2, Aminotran_{—}3, PHD, MMR_HSR1, Aldo_ket_red, zf-AN1, malic, Fasciclin, UPF0057, DUF221, Pkinase_Tyr, DnaJ, Cofilin_ADF, Orn_Arg_deC_N, Skp1_POZ, Asn_synthase, K-box, LRR_{—}2, Ribosomal_L12, Ammonium_transp, Ribosomal_L14, KOW, DUF1336, DS, Aa_trans, CcmH, peroxidase, eIF-5a, Aldedh, PEP-utilizers_C, ADH_N, UIM, NAD_binding_{—}1, zf-C3HC4, Spermine_synth, AUX_IAA, LIM, Anti-silence, X8, Citrate_synt, 14-3-3, RMMBL, efhand, NPH3, CAF1, ICL, FAE1_CUT1_RppA, Orn_DAP_Arg_deC, PPDK_N, Myb_DNA-binding, AP2, F-box, and APS_kinase; wherein the gathering cutoff for said protein domain families is stated in Table 11; and wherein said enhanced trait is selected from the group of enhanced traits consisting of enhanced water use efficiency, enhanced cold tolerance, increased yield, enhanced nitrogen use efficiency, enhanced seed protein and enhanced seed oil, said method for manufacturing said seed comprising:
(a) screening a population of plants for said enhanced trait and said recombinant DNA, wherein individual plants in said population can exhibit said trait at a level less than, essentially the same as or greater than the level that said trait is exhibited in control plants which do not express the recombinant DNA,
(b) selecting from said population one or more plants that exhibit the trait at a level greater than the level that said trait is exhibited in control plants,
(c) verifying that said recombinant DNA is stably integrated in said selected plants,
(d) analyzing tissue of a selected plant to determine the production of a protein having the function of a protein encoded by nucleotides in a sequence of one of SEQ ID NO: 1-193; and
(e) collecting seed from a selected plant.

13. A method of claim 12 wherein plants in said population further comprise DNA expressing a protein that provides tolerance to exposure to an herbicide applied at levels that are lethal to wild type plant cells, and wherein said selecting is effected by treating said population with said herbicide.

14. A method of claim 13 wherein said herbicide comprises a glyphosate, dicamba, or glufosinate compound.

15. A method of claim 12 wherein said selecting is effected by identifying plants with said enhanced trait.

16. A method of claim 12 wherein said seed is corn, soybean, cotton, alfalfa, wheat or rice seed.

17. A method of producing hybrid corn seed comprising:
acquiring hybrid corn seed from a herbicide tolerant corn plant which also has stably-integrated, recombinant DNA comprising a promoter that is (a) functional in plant cells and (b) is operably linked to DNA that encodes a protein having at least one domain of amino acids in a sequence that exceeds the Pfam gathering cutoff for amino acid sequence alignment with a protein domain family identified by a Pfam name in the group of Pfam names consisting of FAD_binding_{—}4, MtN3_slv, Homeobox, FAD_binding_{—}6, RWP-RK, PMEI, FAD_binding_{—}7, RRM_{—}1, Transaldolase, RNA_pol_L, WD40, U-box, Cyclin_N, Skp1, Redoxin, DZC, PBP, TPP_enzyme_M, CBFD_NFYB_HMF, TPP_enzyme_N, PFK, Caleosin, Iso_dh, Ribosomal_L18p, Metallophos, zf-A20, Ras, BBE, NAF, PLDc, DUF1242, Pkinase, C2, p450, Pyridoxal_deC, FBD, UPF0005, HEAT_PBS, GST_N, PEP-utilizers, Alpha-amylase, Amino_oxidase, SRF-TF, Phi_{—}1, Malic_M, Tryp_alpha_amyl, GSHPx, Miro, HSF_DNA-bind, DNA_photolyase, Sina, CTP_transf_{—}2, Abhydrolase_{—}3, Chal_sti_synt_C, ACP_syn_III_C, ADH_zinc N, CSD, Globin, GATase_{—}2, Amidohydro_{—}1, HLH, HALZ, Amidohydro_{—}3, Lactamase_B, HSP20, DAO, DUF296, AT_hook, AWPM-19, Dimerisation, Suc_Fer-like, Methyltransf_{—}2, Aminotran_{—}3, PHD, MMR_HSR1, Aldo_ket_red, zf-AN1, malic, Fasciclin, UPF0057, DUF221, Pkinase_Tyr, DnaJ, Cofilin_ADF, Orn_Arg_deC_N, Skp1_POZ, Asn_synthase, K-box, LRR_{—}2, Ribosomal_L12, Ammonium_transp, Ribosomal_L14, KOW, DUF1336, DS, Aa_trans, CcmH, peroxidase, eIF-5a, Aldedh, PEP-utilizers_C, ADH_N, UIM, NAD_binding_{—}1, zf-C3HC4, Spermine_synth, AUX_IAA, LIM, Anti-silence, X8, Citrate_synt, 14-3-3, RMMBL, efhand, NPH3, CAF1, ICL, FAE1_CUT1_RppA, Orn_DAP_Arg_deC, PPDK_N, Myb_DNA-binding, AP2, F-box, and APS_kinase;
(a) wherein the gathering cutoff for said protein domain families is stated in Table 11;
(b) producing corn plants from said hybrid corn seed, wherein a fraction of the plants produced from said hybrid corn seed is homozygous for said recombinant DNA, a fraction of the plants produced from said hybrid corn seed is hemizygous for said recombinant DNA, and a fraction of the plants produced from said hybrid corn seed has none of said recombinant DNA;
(c) selecting corn plants which are homozygous and hemizygous for said recombinant DNA by treating with an herbicide;
(d) collecting seed from herbicide-treated-surviving corn plants and planting said seed to produce further progeny corn plants;
(e) repeating steps (c) and (d) at least once to produce an inbred corn line;
(f) crossing said inbred corn line with a second corn line to produce hybrid seed.

18. A method of selecting a plant comprising cells of claim 1 wherein an immunoreactive antibody is used to detect the presence of said protein in seed or plant tissue.

19. Anti-counterfeit milled seed having, as an indication of origin, a plant cell of claim 1.

20. A method of growing a corn, cotton or soybean crop without irrigation water comprising planting seed having plant cells of claim 2 which are selected for enhanced water use efficiency.
